United States Patent Application Publication US 2026/0167953 A1 - sequence listing, part 3

SEQ ID NO: 38127 - DNA, 80 bp, synthetic construct
  source 1..80: mol_type = other DNA
aggagtagtgataactgaatataaaaacttagttttgctccttctttgctcctacagtcactgggaaaatgctcatttgc

SEQ ID NO: 38128 - DNA, 80 bp, synthetic construct; identical to SEQ ID NO: 13412
  source 1..80: mol_type = other DNA

SEQ ID NO: 38129 - DNA, 80 bp, synthetic construct
  source 1..80: mol_type = other DNA
ctgatggtctttccctaccttgtcccatttacccccaattattcttttgggaactataaattcgtaaactctaagctcag

SEQ ID NO: 38130 - DNA, 80 bp, synthetic construct
  source 1..80: mol_type = other DNA
aaggtagtctgataatctgaagtctgaactcagattatctaaggtcgaggtcagttaactaagccccagtttttacaagc

SEQ ID NO: 38131 - DNA, 80 bp, synthetic construct
  source 1..80: mol_type = other DNA
ctcttaacaatatttgtgttttagtaagtgaagctatttgtgattttcagatggcattagagaataacctctaagaagtt

SEQ ID NO: 38132 - DNA, 80 bp, synthetic construct; identical to SEQ ID NO: 13413
  source 1..80: mol_type = other DNA

SEQ ID NO: 38133 - DNA, 80 bp, synthetic construct
  source 1..80: mol_type = other DNA
gagagagtggctgagctgataccttaaggtcttattcaaagtacaggccaaggtgaaacctactcaggtcactataccta

SEQ ID NO: 38134 - DNA, 80 bp, synthetic construct
  source 1..80: mol_type = other DNA
atgattttactgttgtttaatggtacacagccctcgtgttacctggcattgtcccattcacatatccattgactgtgtac

SEQ ID NO: 38135 - DNA, 80 bp, synthetic construct; identical to SEQ ID NO: 13414
  source 1..80: mol_type = other DNA

SEQ ID NO: 38136 - DNA, 80 bp, synthetic construct
  source 1..80: mol_type = other DNA
ttggggaacaggctttatttcatccagcttgggaagaaaacatttggtgactctcaagactctgtacaagtatccatttc

SEQ ID NO: 38137 - DNA, 80 bp, synthetic construct
  source 1..80: mol_type = other DNA
agtatcagcattaatccattctcactatgagaaaaacatgctgctgatggtaaaatgcaagaagagtcttttgtaagttt

SEQ ID NO: 38138 - DNA, 80 bp, synthetic construct
  source 1..80: mol_type = other DNA
gctcactgtggttgtttgttttaatgaaagatgggctggattctcatgggataaaatgaaaatccaagcttgctcctaag

SEQ ID NO: 38139 - DNA, 80 bp, synthetic construct
  source 1..80: mol_type = other DNA
gttctttccaagagctctttcagcagagtataggctactgtatactttctaaaagactttggccttgaggtaaatgttac

SEQ ID NO: 38140 - DNA, 80 bp, synthetic construct; identical to SEQ ID NO: 13415
  source 1..80: mol_type = other DNA

SEQ ID NO: 38141 - DNA, 80 bp, synthetic construct
  source 1..80: mol_type = other DNA
tgtgtgaggcatggagggtcatcatgggtgggtccactgtcctcactgatactccattcataggtgtattctcggcctgg

SEQ ID NO: 38142 - DNA, 80 bp, synthetic construct
  source 1..80: mol_type = other DNA
atgtccttcaatagtgaacttttattatttggaaagattcacatatgcccatttctatgctcatgtacttacaaaggctt

SEQ ID NO: 38143 - DNA, 80 bp, synthetic construct
  source 1..80: mol_type = other DNA
cttctttgtggtgtttaataagacatacttagcctattaacatgagatgggaggatagtcagagctgtttatgtattatt

SEQ ID NO: 38144 - DNA, 80 bp, synthetic construct; identical to SEQ ID NO: 13416
  source 1..80: mol_type = other DNA

SEQ ID NO: 38145 - DNA, 80 bp, synthetic construct
  source 1..80: mol_type = other DNA
gccatagagagccaagtggaatgaacagtttcctctgcctgaggaattcctcatttaattaggtgaaagattccctatca

SEQ ID NO: 38146 - DNA, 80 bp, synthetic construct
  source 1..80: mol_type = other DNA
aaaggccaataaaactcctcttactgaagcaactacactttttgaaaactgaaatgattaatcctttccctccccttcct

SEQ ID NO: 38147 - DNA, 80 bp, synthetic construct; identical to SEQ ID NO: 13417
  source 1..80: mol_type = other DNA

SEQ ID NO: 38148 - DNA, 80 bp, synthetic construct
  source 1..80: mol_type = other DNA
cctatctttgtctctctcattaaagtggatttcttaaattctgcatacagtttagcattgcttttttattcaatcttatt

SEQ ID NO: 38149 - DNA, 80 bp, synthetic construct
  source 1..80: mol_type = other DNA
gatgtttaatctccattgttgccttcttagctttgttttcttagtggtgcccttccgtttacaatatatagtacattttt

SEQ ID NO: 38150 - DNA, 80 bp, synthetic construct
  source 1..80: mol_type = other DNA
tttaacatttagataatcaattgcctttttaatagattaaaacgaggaaaaaatttctctatatttatcaacttctggaa

SEQ ID NO: 38151 - DNA, 80 bp, synthetic construct
  source 1..80: mol_type = other DNA
ttttgacttggtatagaatactaaacagacagattcccctatcttctaccctcccaacactttaaagatgtccctaattg

SEQ ID NO: 38152 - DNA, 80 bp, synthetic construct; identical to SEQ ID NO: 13418
  source 1..80: mol_type = other DNA

SEQ ID NO: 38153 - DNA, 80 bp, synthetic construct
  source 1..80: mol_type = other DNA
cccacagttcactgatgctctgttcactttcttcagcctttttaatctctgtatttcactttgcagtttctattgcaatg

SEQ ID NO: 38154 - DNA, 80 bp, synthetic construct
  source 1..80: mol_type = other DNA
tctggaacatattgagaagatttatgatagctgtcttactgtctctgcctgctgcttctattctctctttcacttctcaa

SEQ ID NO: 38155 - DNA, 80 bp, synthetic construct
  source 1..80: mol_type = other DNA
ttttattctgttgcctcctcagcagcctgtagtctaattttatccacccactgtttctaaatccttctgacaattctatc

SEQ ID NO: 38156 - DNA, 80 bp, synthetic construct; identical to SEQ ID NO: 13419
  source 1..80: mol_type = other DNA

SEQ ID NO: 38157 - DNA, 80 bp, synthetic construct
  source 1..80: mol_type = other DNA
gcttaggtgctcatagggcacatctggtttgttactcttcttttactgtcttgagttgtctgtcattcgatgtctgaaaa

SEQ ID NO: 38158 - DNA, 80 bp, synthetic construct
  source 1..80: mol_type = other DNA
ttacagcaatgtcagcttcccttctttaattgtacctttccccatcccaactgtggaaaatctattccactcaaaacgct

SEQ ID NO: 38159 - DNA, 80 bp, synthetic construct
  source 1..80: mol_type = other DNA
catgaggttctgagcatggaaaccataagttgagtaggtatatctagatttacttcttgcataaagtccttaacgtggac

SEQ ID NO: 38160 - DNA, 80 bp, synthetic construct; identical to SEQ ID NO: 13420
  source 1..80: mol_type = other DNA

SEQ ID NO: 38161 - DNA, 80 bp, synthetic construct
  source 1..80: mol_type = other DNA
ctcaaggaaaagtgctggattgtatttgtcttagtgtctctggtgccttccataggtacctagagaagcatggaacatga

SEQ ID NO: 38162 - DNA, 80 bp, synthetic construct
  source 1..80: mol_type = other DNA
atataagaatttggattactggtttctctttaaaaaacaaaaacctggagatctggttaacaacaggaccaaactcctgc

SEQ ID NO: 38163 - DNA, 80 bp, synthetic construct
  source 1..80: mol_type = other DNA
gaactttgcgctagcataaagtggactttgttgtgtcttcccccaacacaccccaaaggatagcttgacactaataacta

SEQ ID NO: 38164 - DNA, 80 bp, synthetic construct; identical to SEQ ID NO: 13421
  source 1..80: mol_type = other DNA

SEQ ID NO: 38165 - DNA, 80 bp, synthetic construct
  source 1..80: mol_type = other DNA
catcacatggggtttctatagtagaaaatgatattctttccactgccttcacaagctcccctaagggcaaaacattatat

SEQ ID NO: 38166 - DNA, 80 bp, synthetic construct
  source 1..80: mol_type = other DNA
tcatcgccatttgtaattcagtatttgtgagactatatggttaacgatacttttttctgctagatagtgggagaaagcac

SEQ ID NO: 38167 - DNA, 80 bp, synthetic construct
  source 1..80: mol_type = other DNA
tgggttatgaagactggaaaatatttgtaaaatttctggctcctaacaaatgctctgatagcctgtgggaatacatgttc

SEQ ID NO: 38168 - DNA, 80 bp, synthetic construct; identical to SEQ ID NO: 13422
  source 1..80: mol_type = other DNA

SEQ ID NO: 38169 - DNA, 80 bp, synthetic construct
  source 1..80: mol_type = other DNA
gcactaatctcatcatgagggctccatcctcattacctaaaaatctcccaaaggaggggggagggatagcattgggagat

SEQ ID NO: 38170 - DNA, 80 bp, synthetic construct
  source 1..80: mol_type = other DNA
aggttagatttcagtatgtgaatttttggaggacacaaacttccaatccattgtagtgatgtatctattccaaaggcgat

SEQ ID NO: 38171 - DNA, 80 bp, synthetic construct; identical to SEQ ID NO: 13423
  source 1..80: mol_type = other DNA

SEQ ID NO: 38172 - DNA, 80 bp, synthetic construct
  source 1..80: mol_type = other DNA
acaattagaacacactgtcaatctggaatgagaaccaaccaatgtaagtatctaaaaattgcccaagatgctataacact

SEQ ID NO: 38173 - DNA, 80 bp, synthetic construct
  source 1..80: mol_type = other DNA
ctctagtcacacaaattaatgtctgtctaattgatcaaactaaattactcagaatttcacattcgcctgtcagttacata

SEQ ID NO: 38174 - DNA, 80 bp, synthetic construct
  source 1..80: mol_type = other DNA
ataattacactgagtgagatggctaatgagacaattggggtgtaattttatcaatgcttttattcttttcacttcaaatt

SEQ ID NO: 38175 - DNA, 80 bp, synthetic construct; identical to SEQ ID NO: 13424
  source 1..80: mol_type = other DNA

SEQ ID NO: 38176 - DNA, 80 bp, synthetic construct
  source 1..80: mol_type = other DNA
atggtgcatacaagctttgggaaagtgaagttacataaagagcctttttggttactcattagggtgctcactcagtaact

SEQ ID NO: 38177 - DNA, 80 bp, synthetic construct
  source 1..80: mol_type = other DNA
attgcacaggacttgcaagtctctttggaaaagggatccacatttttgtgatttattaaatatacaaactatagccgtta

SEQ ID NO: 38178 - DNA, 80 bp, synthetic construct
  source 1..80: mol_type = other DNA
acacttagatacaacgaacaatgtctggcagaaaacgtgttttatttggagagctggcttaccagcagatggctatatat

SEQ ID NO: 38179 - DNA, 80 bp, synthetic construct
  source 1..80: mol_type = other DNA
tgaccaaaacgactttgaaaattttactgaacaacaaactttgctcaaaggtgcagcattgaagtcaatttgatgcatgc

SEQ ID NO: 38180 - DNA, 80 bp, synthetic construct; identical to SEQ ID NO: 13425
  source 1..80: mol_type = other DNA

SEQ ID NO: 38181 - DNA, 80 bp, synthetic construct
  source 1..80: mol_type = other DNA
ccacagagggaggctataggtgagggtgagtgtcagacatggaggaggagatgttttattttaatgcagagggcataata

SEQ ID NO: 38182 - DNA, 80 bp, synthetic construct
  source 1..80: mol_type = other DNA
tcataggaccagaggcaatattatatgccaataatcatgtctccagtgaaagctgtgggagcattttaagcaattgctca

SEQ ID NO: 38183 - DNA, 80 bp, synthetic construct; identical to SEQ ID NO: 13426
  source 1..80: mol_type = other DNA

SEQ ID NO: 38184 - DNA, 80 bp, synthetic construct
  source 1..80: mol_type = other DNA
aatgcaagtactcctaaggaaggtagttcattgacctattatcagtcacttataccttagtgggtatgagtttgacaaca

SEQ ID NO: 38185 - DNA, 80 bp, synthetic construct
  source 1..80: mol_type = other DNA
atggctaatatttattatctgttatatgccagtcattattctaagatttcacgacaacaaacctgtatgacagagacatg

SEQ ID NO: 38186 - DNA, 80 bp, synthetic construct
  source 1..80: mol_type = other DNA
gaacatgtagaaggaaagatatttaaatgtgaaccatgaaaagtctgaaattattttaaaatgttctcataccaacaact

SEQ ID NO: 38187 - DNA, 80 bp, synthetic construct; identical to SEQ ID NO: 13427
  source 1..80: mol_type = other DNA

SEQ ID NO: 38188 - DNA, 80 bp, synthetic construct
  source 1..80: mol_type = other DNA
cactatgtccaaaagtctaatactattaatgcttctagtctcaccaccaccaaataccacttattgagtgtcatctatgt

SEQ ID NO: 38189 - DNA, 80 bp, synthetic construct
  source 1..80: mol_type = other DNA
gttctggcatctgtaaccaaagccaaaaaaataggtatcgtctatggctgcttttgtactaaaaggcagagttgagtact

SEQ ID NO: 38190 - DNA, 80 bp, synthetic construct
  source 1..80: mol_type = other DNA
ccctcccaaacattaaagagtaagaacccagtgaaaaatgcaggtctagaggactccaaaaccttttccttttcttctct

SEQ ID NO: 38191 - DNA, 80 bp, synthetic construct
  source 1..80: mol_type = other DNA
tttactgtacctaattccttgaggatggatgctcaagggcttatctgccttatttttaaagtgaacttttatgatgtctc

SEQ ID NO: 38192 - DNA, 80 bp, synthetic construct; identical to SEQ ID NO: 13428
  source 1..80: mol_type = other DNA

SEQ ID NO: 38193 - DNA, 80 bp, synthetic construct
  source 1..80: mol_type = other DNA
cattccttagcaataactttctttgcttaagaaagatgttcatttcaattacagagggtgatgcgagagggtagttactt

SEQ ID NO: 38194 - DNA, 80 bp, synthetic construct
  source 1..80: mol_type = other DNA
tagaacaagggaggccctatgggctacggtaagaacttgaattttcttctaagtgaaatgggacatcactggagcatttt

SEQ ID NO: 38195 - DNA, 80 bp, synthetic construct
  source 1..80: mol_type = other DNA
ctaatttttgtatttttagtagagatgacttttcaccatgttggccaggctggtctcaaactcctgacctcaggtgatac

SEQ ID NO: 38196 - DNA, 80 bp, synthetic construct; identical to SEQ ID NO: 13429
  source 1..80: mol_type = other DNA

SEQ ID NO: 38197 - DNA, 80 bp, synthetic construct
  source 1..80: mol_type = other DNA
tcaaggatgacctcaaggtgttttatcagaacaactgggtaaatgatgttattagttactgcaatgggagaacacagcag

SEQ ID NO: 38198 - DNA, 80 bp, synthetic construct
  source 1..80: mol_type = other DNA
tgagatatgggcaaaatattacagaagaagagaggatgaagcacaaattctgtctggggagttagggaaaaagttgatgg

SEQ ID NO: 38199 - DNA, 80 bp, synthetic construct
  source 1..80: mol_type = other DNA
taatagcaatttacatagtatttacattgcattcagtattataactaatttaaagatgatttaaagtatatgagaggatg

SEQ ID NO: 38200 - DNA, 80 bp, synthetic construct; identical to SEQ ID NO: 13430
  source 1..80: mol_type = other DNA

SEQ ID NO: 38201 - DNA, 80 bp, synthetic construct
  source 1..80: mol_type = other DNA
cgtcctagaagcaggagaaggaagtcacggcactcatggagttcagccagcatttgtttgcagtggtgatgataatcata

SEQ ID NO: 38202 - DNA, 80 bp, synthetic construct
  source 1..80: mol_type = other DNA
ctcagagagtttaaatatcttgcctaatatcacacagcatcatgatttaaagtttaatatgtctgtctctagatcgtgac

SEQ ID NO: 38203 - DNA, 80 bp, synthetic construct
  source 1..80: mol_type = other DNA
gtaaaagagtaaaatagatacacccactccctgccttcatagagtttataaaagtcaaacatttttatagttctataact

SEQ ID NO: 38204 - DNA, 80 bp, synthetic construct; identical to SEQ ID NO: 13431
  source 1..80: mol_type = other DNA

SEQ ID NO: 38205 - DNA, 80 bp, synthetic construct
  source 1..80: mol_type = other DNA
tagagttttccctttagcctaagagtatctggaagccattaaagagttttcatcaggggtgcaacatggaccagattttg

SEQ ID NO: 38206 - DNA, 80 bp, synthetic construct
  source 1..80: mol_type = other DNA
aaatagttggaacttgaagatggattggatgtggggtagagaataaaggacatcagttgctgtggatggctgatgaggtt

SEQ ID NO: 38207 - DNA, 80 bp, synthetic construct
  source 1..80: mol_type = other DNA
aaagggactgtgtatctatgattaagaatcttgagatgagattcttctgggctgtccaggtggatcccatgtaataacaa

SEQ ID NO: 38208 - DNA, 80 bp, synthetic construct; identical to SEQ ID NO: 13432
  source 1..80: mol_type = other DNA

SEQ ID NO: 38209 - DNA, 80 bp, synthetic construct
  source 1..80: mol_type = other DNA
tggagtttattctgatcttgtgcctgaagctttttgtttgtttttatgttagctttacacaggactgtggaggtcacaaa

SEQ ID NO: 38210 - DNA, 80 bp, synthetic construct
  source 1..80: mol_type = other DNA
gctcaggcccccatctttatagaatagtccagatgtctacacctcttttgactcctgacatgtcggactccactgactga

SEQ ID NO: 38211 - DNA, 80 bp, synthetic construct
  source 1..80: mol_type = other DNA
gtttgttggcatcacatgcctgcaaataccagatgcccagagaaagtctcctaagttatttaacctaataagacctatta

SEQ ID NO: 38212 - DNA, 80 bp, synthetic construct; identical to SEQ ID NO: 13433
  source 1..80: mol_type = other DNA

SEQ ID NO: 38213 - DNA, 80 bp, synthetic construct
  source 1..80: mol_type = other DNA
aaggtagtgattgttgcagctatttcaaaactccttcagggacaaacattttataatttgtccctgaaaaatatgcagac

SEQ ID NO: 38214 - DNA, 80 bp, synthetic construct
  source 1..80: mol_type = other DNA
ccccagtagctgaaatgacaggtatgtaccaccatgtctggctaatttaaatatatatatatatatatatatatatatat

SEQ ID NO: 38215 - DNA, 80 bp, synthetic construct
  source 1..80: mol_type = other DNA
ttttaaagcccaagacagaattcctaaaaatgaccccagctgtactccctcacctgcccaaatgtccacaaaccttattg

SEQ ID NO: 38216 - DNA, 80 bp, synthetic construct; identical to SEQ ID NO: 13434
  source 1..80: mol_type = other DNA

SEQ ID NO: 38217 - DNA, 80 bp, synthetic construct
  source 1..80: mol_type = other DNA
acctttgtccacatgaaacaaatatattctgagatacacaggggttgacagaaaggtgcaaaggccttacacataaattg

SEQ ID NO: 38218 - DNA, 80 bp, synthetic construct
  source 1..80: mol_type = other DNA
tcctttccgtctcttatggcatttagcacaatgtctcacacagcaaagggattaaaatttgcttagcttggcaaaagcca

SEQ ID NO: 38219 - DNA, 80 bp, synthetic construct
  source 1..80: mol_type = other DNA
atctattgtacatgctaagcttggagctggagctatgaaaatgaatagactctgtgatataggacaggacatccttcaac

SEQ ID NO: 38220 - DNA, 80 bp, synthetic construct
  source 1..80: mol_type = other DNA
tcagatgttttatccccacattttctattggaaaggacttcatggcatttctatagagtcttcccttaaatatttaagtc

SEQ ID NO: 38221 - DNA, 80 bp, synthetic construct; identical to SEQ ID NO: 13435
  source 1..80: mol_type = other DNA

SEQ ID NO: 38222 - DNA, 80 bp, synthetic construct
  source 1..80: mol_type = other DNA
ccctgggtgagttcacaccctctaaattcttcatttgccatctttgttctgatgtctcccaaatgttgacagctagctca

SEQ ID NO: 38223 - DNA, 80 bp, synthetic construct
  source 1..80: mol_type = other DNA
tccttttcttacattttctttctcactgaatggcaccctatccattctgctgttcaaaccagacaccttgaagtccataa

SEQ ID NO: 38224 - DNA, 80 bp, synthetic construct
  source 1..80: mol_type = other DNA
cccatgactactttctctggctctggactggtctttctccaatctattctctataattggacaacataatctttctaaag

SEQ ID NO: 38225 - DNA, 80 bp, synthetic construct; identical to SEQ ID NO: 13436
  source 1..80: mol_type = other DNA

SEQ ID NO: 38226 - DNA, 80 bp, synthetic construct
  source 1..80: mol_type = other DNA
ttcttccttattactctactgtcattgcttgtctatccataggttatccccaatagctgattggctcctggaaatcaagg

SEQ ID NO: 38227 - DNA, 80 bp, synthetic construct
  source 1..80: mol_type = other DNA
cctcctgggttcaagtgattctcatgtctcagcctcctgagtagctgggactacaggcatgtaccatcatgcacaactaa

SEQ ID NO: 38228 - DNA, 80 bp, synthetic construct
  source 1..80: mol_type = other DNA
cagatctgtttaaaattaaataaatatataaatgaacacatgtgaagactatataaatgagtggagaaatatagatatat

SEQ ID NO: 38229 - DNA, 80 bp, synthetic construct; identical to SEQ ID NO: 13437
  source 1..80: mol_type = other DNA

SEQ ID NO: 38230 - DNA, 80 bp, synthetic construct
  source 1..80: mol_type = other DNA
ggtaaagcgagagcttcagaaaggaagagtgttaaatgtcctagtaatgtctagtagtaaaagaacataggctctggcac

SEQ ID NO: 38231 - DNA, 80 bp, synthetic construct
  source 1..80: mol_type = other DNA
cagggtcaaggggagatttttttttttctttttctagataggagttaactggacatggtttgatttggttttggtttagt

SEQ ID NO: 38232 - DNA, 80 bp, synthetic construct
  source 1..80: mol_type = other DNA
ggaggaagttctcccttgatggtctctatcatccctgcggaatatggtatcatagttaagatattagaaccctattcaac

SEQ ID NO: 38233 - DNA, 80 bp, synthetic construct; identical to SEQ ID NO: 13438
  source 1..80: mol_type = other DNA

SEQ ID NO: 38234 - DNA, 80 bp, synthetic construct
  source 1..80: mol_type = other DNA
aaagggcccctggcttggtttaatgctttgcagtcactgtgaaattttcaataatatgaacaaggggactcacattttca

SEQ ID NO: 38235 - DNA, 80 bp, synthetic construct
  source 1..80: mol_type = other DNA
ctgaaatggtagattgtggtttttctttcttaaaatatggttcatactctctgtagacaattttcttaaaggaagttaca

SEQ ID NO: 38236 - DNA, 80 bp, synthetic construct
  source 1..80: mol_type = other DNA
aatctaccctaatatcattcctcagaatcaattttctaaaaagaacccaatatcacagtagaaacccaaactgtaggttt

SEQ ID NO: 38237 - DNA, 80 bp, synthetic construct; identical to SEQ ID NO: 13439
  source 1..80: mol_type = other DNA

SEQ ID NO: 38238 - DNA, 80 bp, synthetic construct
  source 1..80: mol_type = other DNA
aaggcaaatcagtcttatccttgtcttaaactcaaagatgagggtaaaaggaaagagaatttggagaaaataccttgcaa

SEQ ID NO: 38239 - DNA, 80 bp, synthetic construct
  source 1..80: mol_type = other DNA
ctagggtgcaggctgtgaattcagtatctctggacttgaagcctatatctacctcttattgttttactttgaaaagttta

SEQ ID NO: 38240 - DNA, 80 bp, synthetic construct
  source 1..80: mol_type = other DNA
tttgtaaatgtaataagagttagtctttacccttcaggttttctcagaaagcaaaaacaaatctgtagttacagtaatgc

SEQ ID NO: 38241 - DNA, 80 bp, synthetic construct; identical to SEQ ID NO: 13440
  source 1..80: mol_type = other DNA

SEQ ID NO: 38242 - DNA, 80 bp, synthetic construct
  source 1..80: mol_type = other DNA
atatcagtctcttacgtggagtaatttcaacagagagatgtttcctaacatgtttttactatgtatgctgtgtattcata

SEQ ID NO: 38243 - DNA, 80 bp, synthetic construct
  source 1..80: mol_type = other DNA
gctagaaccctagaaggaaaatgtatgtatatcttttcttcaatatctctttgtatacatgtgagtgactaaacaagttt

SEQ ID NO: 38244 - DNA, 80 bp, synthetic construct; identical to SEQ ID NO: 13441
  source 1..80: mol_type = other DNA

SEQ ID NO: 38245 - DNA, 80 bp, synthetic construct
  source 1..80: mol_type = other DNA
atgtgaatcagacctttgccctatctggttctgcctccggtattttgcttgttattttcaacgctaactacagacaagag

SEQ ID NO: 38246 - DNA, 80 bp, synthetic construct
  source 1..80: mol_type = other DNA
ttacggcagttcccaaagggtgtgggtgtgacctagattatcactttgaagtacgatatttaaaatgattatttttgaga

SEQ ID NO: 38247 - DNA, 80 bp, synthetic construct
  source 1..80: mol_type = other DNA
agaggaacacatctttcataatgaagtgtgatgtaaggaaaaaaagtgagtcacactagcaggtttaccatttaaaaaat

SEQ ID NO: 38248 - DNA, 80 bp, synthetic construct
  source 1..80: mol_type = other DNA
aaccatatcccaggacatgatgaacagagagaaaaaaaaatgaagagtcacattcaataggataaataagtcaaatatga

SEQ ID NO: 38249 - DNA, 80 bp, synthetic construct; identical to SEQ ID NO: 13442
  source 1..80: mol_type = other DNA

SEQ ID NO: 38250 - DNA, 80 bp, synthetic construct
  source 1..80: mol_type = other DNA
gtagcatctaaccaatcaaatagggtgctttctaaaccctcagaatgataaactacattgttggatgcaaaattagcatt

SEQ ID NO: 38251 - DNA, 80 bp, synthetic construct
  source 1..80: mol_type = other DNA
tgagtttgtgggctcaggtcggtagctccaactgatgccctgagcagccacgtagaactgccttagctgtgccgcttctg

SEQ ID NO: 38252 - DNA, 80 bp, synthetic construct; identical to SEQ ID NO: 13443
  source 1..80: mol_type = other DNA

SEQ ID NO: 38253 - DNA, 80 bp, synthetic construct
  source 1..80: mol_type = other DNA
tgttcagagcaggcatttatgaaagtgttgctttaatgagtccccctgagcattccgagacaactctcccttccttgggg

SEQ ID NO: 38254 - DNA, 80 bp, synthetic construct
  source 1..80: mol_type = other DNA
caggccaacgtcctggggtacactcacagtcatctgttcttccaggtcagccctcatagatcagggcagcttcagcagtt

SEQ ID NO: 38255 - DNA, 80 bp, synthetic construct; identical to SEQ ID NO: 13444
  source 1..80: mol_type = other DNA

SEQ ID NO: 38256 - DNA, 80 bp, synthetic construct
  source 1..80: mol_type = other DNA
tagatgtacttttgtattggggtaagacatatataacataacatttgccatccaaatcattttaagtatacgatcctgtg

SEQ ID NO: 38257 - DNA, 80 bp, synthetic construct; identical to SEQ ID NO: 13445
  source 1..80: mol_type = other DNA

SEQ ID NO: 38258 - DNA, 80 bp, synthetic construct
  source 1..80: mol_type = other DNA
aaatatagagttcttttaaaaattctatcaatagatatttctttttctcttttcttttctttttttttttttttttgagt

SEQ ID NO: 38259 - DNA, 80 bp, synthetic construct
  source 1..80: mol_type = other DNA
agtagagatggggtttcactagttggctaggctggtctcgaactcctgacctcaggtgatccgcctgcctcggcctccca

SEQ ID NO: 38260 - DNA, 80 bp, synthetic construct
  source 1..80: mol_type = other DNA
agatgtgcaaatgtggagacctgaaggcttgttatgggaacaaaaggtggctgtgtatagagaggagcgcagataaaggg

SEQ ID NO: 38261 - DNA, 80 bp, synthetic construct
  source 1..80: mol_type = other DNA
ctgtaatcctaggactttgggaggctgaggtgggcatagtgaatcacgcctgtaatcctaggactttgggaggctgaggt

SEQ ID NO: 38262 - DNA, 80 bp, synthetic construct; identical to SEQ ID NO: 13446
  source 1..80: mol_type = other DNA

SEQ ID NO: 38263 - DNA, 80 bp, synthetic construct
  source 1..80: mol_type = other DNA
gcctcctcagcagctgggattacaggcatgtgccactactggccggctaatttctgtatttttagtagagacggggtttc

SEQ ID NO: 38264 - DNA, 80 bp, synthetic construct
  source 1..80: mol_type = other DNA
attggctcctagtgtcttaatccacatctgctaaagttgtttaaggtacagctaaaacatcacccaggctgggctcagtg

SEQ ID NO: 38265 - DNA, 80 bp, synthetic construct
  source 1..80: mol_type = other DNA
tgggaggctgaggtgggaggatcacttgagcccaggaggtcaaggctgcagtgagctatgatcacaccactgcactccag

SEQ ID NO: 38266 - DNA, 80 bp, synthetic construct
  source 1..80: mol_type = other DNA
tactaaaaatacaaaaattagctgggcatggtggtacacgcctgtaataccagatactcgggaggctgaggcaggagaat

SEQ ID NO: 38267 - DNA, 80 bp, synthetic construct; identical to SEQ ID NO: 13447
  source 1..80: mol_type = other DNA

SEQ ID NO: 38268 - DNA, 80 bp, synthetic construct
  source 1..80: mol_type = other DNA
ggacgtgccttgttaacaaaatgcttacaggcagtatgcttggtaaaagtcatcgccattctctagtctcaataaaccag

SEQ ID NO: 38269 - DNA, 80 bp, synthetic construct
  source 1..80: mol_type = other DNA
ggattagtaaaagaggaaagcctcttgcagttgagatagaggaaggccactgtctcctgcctgcccctgggaactgaatg

SEQ ID NO: 38270 - DNA, 80 bp, synthetic construct; identical to SEQ ID NO: 13448
  source 1..80: mol_type = other DNA

SEQ ID NO: 38271 - DNA, 80 bp, synthetic construct
  source 1..80: mol_type = other DNA
gggcccactattgtttctctatactttgtctctgtgtcttagttcttttctcagtctctcgtcccacccaactagaaata

SEQ ID NO: 38272 - DNA, 80 bp, synthetic construct
  source 1..80: mol_type = other DNA
ccgtctctactaaaaatacaaaaattagccaggcatggtggcgggtgcctgtaatctcagctactggggaggctgaggca

SEQ ID NO: 38273 - DNA, 80 bp, synthetic construct; identical to SEQ ID NO: 13449
  source 1..80: mol_type = other DNA

SEQ ID NO: 38274 - DNA, 80 bp, synthetic construct
  source 1..80: mol_type = other DNA
gttgagcagaaacatggcttccttgtcttcaagtcattcttgggcttcagagcgaagatgctggacctttgaaccaacaa

SEQ ID NO: 38275 - DNA, 80 bp, synthetic construct
  source 1..80: mol_type = other DNA
attcctttcttagtagtggtatttccattgacaaaaaaatagtaattctgaattgccgaaaatgtcaaatcgtagaaaat

SEQ ID NO: 38276 - DNA, 80 bp, synthetic construct
  source 1..80: mol_type = other DNA
aaaataaatgagcactggcaacctccgcctcccgggttcaagcaattctcctgcctcagcctccccagtagctgaaatta

SEQ ID NO: 38277 - DNA, 80 bp, synthetic construct; identical to SEQ ID NO: 13450
  source 1..80: mol_type = other DNA

SEQ ID NO: 38278 - DNA, 80 bp, synthetic construct
  source 1..80: mol_type = other DNA
cctcactgcaacctccgcctcccgggtccaagtgattctcctgcctcagcctcccgagtagctgggattacaggcaccca

SEQ ID NO: 38279 - DNA, 80 bp, synthetic construct
  source 1..80: mol_type = other DNA
tcttgtctcattttcctgccagaaagctccctgaggctgaacatctgaaaaaagaactcagaaagacgaccccagacatt

SEQ ID NO: 38280 - DNA, 80 bp, synthetic construct
  source 1..80: mol_type = other DNA
acatctgaaaaaagaactcagaaagacgaccccagacatttgctgtgtacagcgctacccagaattatttgaagaaaatg

SEQ ID NO: 38281 - DNA, 80 bp, synthetic construct
  source 1..80: mol_type = other DNA
ttcaagaccagctcggtcaacatggcaaaattctgtctctactaaaaatacaaagattagccaggtggtagtgcgtgcct

SEQ ID NO: 38282 - DNA, 80 bp, synthetic construct; identical to SEQ ID NO: 13451
  source 1..80: mol_type = other DNA

SEQ ID NO: 38283 - DNA, 80 bp, synthetic construct
  source 1..80: mol_type = other DNA
ggctcacgcctataagcactttgggaggccgaggtgggcggatcacgaggtcaggagttcgagaccagactggccaatat

SEQ ID NO: 38284 - DNA, 80 bp, synthetic construct
  source 1..80: mol_type = other DNA
tgacagacaagactctgtctcaaaaaaaaaaaaaaaaagaagtatacaggaggatgtgcgtaggttatatgctgtgccat

SEQ ID NO: 38285 - DNA, 80 bp, synthetic construct; identical to SEQ ID NO: 13452
  source 1..80: mol_type = other DNA

SEQ ID NO: 38286 - DNA, 80 bp, synthetic construct
  source 1..80: mol_type = other DNA
atctaggctcactacaacctctgcctcccgggttcaagtgattctgcttcagcctcccacgcagctgggattacaggcaa

SEQ ID NO: 38287 - DNA, 80 bp, synthetic construct
  source 1..80: mol_type = other DNA
atcatgcccagccagccatcattatatcttcaagttttgcttctgccatacttgctgtcttctgtttctgtgaaatcagt

SEQ ID NO: 38288 - DNA, 80 bp, synthetic construct
  source 1..80: mol_type = other DNA
cccgcattctctctttgatgttgcgtaatttgccactaaaccagtccatctacttttaaacttactagctcacattttac

SEQ ID NO: 38289 - DNA, 80 bp, synthetic construct
  source 1..80: mol_type = other DNA
tgtattttttgtagacgtggggtctcaccatgttgcccaggctggcctagaacccctgggctcaagcaatctgtctgctt

SEQ ID NO: 38290 - DNA, 80 bp, synthetic construct; identical to SEQ ID NO: 13453
  source 1..80: mol_type = other DNA

SEQ ID NO: 38291 - DNA, 80 bp, synthetic construct
  source 1..80: mol_type = other DNA
atggtcaaccctgggaatttgaaccctgggaacttgaaccctgggaatttgaaccctgggaatttgaaccctgggaattt

SEQ ID NO: 38292 - DNA, 80 bp, synthetic construct
  source 1..80: mol_type = other DNA
ggtgggcaaaggcaacttgggggttaatttgtatcatggggtcctagttttctctgaaaatttggccttgcaaatgtgtg

SEQ ID NO: 38293 - DNA, 80 bp, synthetic construct; identical to SEQ ID NO: 13454
  source 1..80: mol_type = other DNA

SEQ ID NO: 38294 - DNA, 80 bp, synthetic construct
  source 1..80: mol_type = other DNA
agctctaggaggcaagaggccttctcagggaccccagctttggcctgtatgtctgggtgtcgtcctggactagtctgatc

SEQ ID NO: 38295 - DNA, 80 bp, synthetic construct
  source 1..80: mol_type = other DNA
ttcgcagagcagacaatgcaacagtcgcccccgcccagctcagcctgaagaccccttctccactcccatccctttctggc

SEQ ID NO: 38296 - DNA, 80 bp, synthetic construct
  source 1..80: mol_type = other DNA
tttgggtctgtgctgctgtggcacctgggactcagtgtgaagggatcaggctaggtttgaaattctcttccggcttaata

SEQ ID NO: 38297 - DNA, 80 bp, synthetic construct
  source 1..80: mol_type = other DNA
cacttaacagtaaattgtgggctgggtgcggtggctcttgcctgtaatcccagcactttgagaagcctaggcgggtggat

SEQ ID NO: 38298 - DNA, 80 bp, synthetic construct; identical to SEQ ID NO: 13455
  source 1..80: mol_type = other DNA

SEQ ID NO: 38299 - DNA, 80 bp, synthetic construct
  source 1..80: mol_type = other DNA
atacaaaaattagctgtgtgtgctggcgggtgcctgtagtcccagctacttgggaggctgaggcaggagaatcacttgac

SEQ ID NO: 38300 - DNA, 80 bp, synthetic construct
  source 1..80: mol_type = other DNA
ctgtaatcccagcactttgggaggctgaggcgggcggatcacgggagttcaagatcagcctggccagcatggggaaaccc

SEQ ID NO: 38301 - DNA, 80 bp, synthetic construct; identical to SEQ ID NO: 13456
  source 1..80: mol_type = other DNA

SEQ ID NO: 38302 - DNA, 80 bp, synthetic construct
  source 1..80: mol_type = other DNA
gcaggagaatcacttgaacccaggaggtggaggttgcagtgagccgagatcacgccagtgtagtccagactgggcgacag

SEQ ID NO: 38303 - DNA, 80 bp, synthetic construct
  source 1..80: mol_type = other DNA
tgcgtcactgcactccaacctgggcaacagagtgagatccagtctcaaaaaaaaaaaaaaaaaaaaaaaaaaaagcaaat

SEQ ID NO: 38304 - DNA, 80 bp, synthetic construct
  source 1..80: mol_type = other DNA
tccaaggggctggggaggactgccttcttgttcagggtacagctcgtgttgttttctcgggcttatgtccatgtctcagt

SEQ ID NO: 38305 - DNA, 80 bp, synthetic construct
  source 1..80: mol_type = other DNA
ggatggtcttccacctcccgggttcaagcgattgtcctgcctcagcctcctgagtagctgggaccacaggtgcccgccac

SEQ ID NO: 38306 - DNA, 80 bp, synthetic construct; identical to SEQ ID NO: 13457
  source 1..80: mol_type = other DNA

SEQ ID NO: 38307 - DNA, 80 bp, synthetic construct
  source 1..80: mol_type = other DNA
tgaacttggcatacttcctccctctgaaaactcaagaggtgccactccccattcagggcacaggaagagcaagaattgaa

SEQ ID NO: 38308 - DNA, 80 bp, synthetic construct
  source 1..80: mol_type = other DNA
tggaacactcctccctggccactttccaggccactggtttgctctccgcaaaggacaaatcccagcaccacctggttatt

SEQ ID NO: 38309 - DNA, 80 bp, synthetic construct; identical to SEQ ID NO: 13458
  source 1..80: mol_type = other DNA

SEQ ID NO: 38310 - DNA, 80 bp, synthetic construct
  source 1..80: mol_type = other DNA
gaatcagcctatgttgagagctgcccagtgtgtggcccttctgcctggaaggggtggctgggcctggctgtgcatcactg

SEQ ID NO: 38311 - DNA, 80 bp, synthetic construct
  source 1..80: mol_type = other DNA
caagctggtctcacaatgacaatatgcgtggagcggaggaggactcaggaggtgtctctgacaccaaacatggtcatggc

SEQ ID NO: 38312 - DNA, 80 bp, synthetic construct
  source 1..80: mol_type = other DNA
ttgggaggggtcccagctgctgcgtctgcttttcttatagcagagaggctgcctacgggtggcacggggtggccatggag

SEQ ID NO: 38313 - DNA, 80 bp, synthetic construct; identical to SEQ ID NO: 13459
  source 1..80: mol_type = other DNA

SEQ ID NO: 38314 - DNA, 80 bp, synthetic construct
  source 1..80: mol_type = other DNA
cagctgaggtcaatggtcccggagtcctcccgactcggggtcgggcggcgggaaggagggtggccgtggcgggggtggag

SEQ ID NO: 38315 - DNA, 80 bp, synthetic construct
  source 1..80: mol_type = other DNA
cctgcccgctgggctctgtccccagcccccaccctttcctcacctgccataaatataggggatgggcttgggcttctcca

SEQ ID NO: 38316 - DNA, 80 bp, synthetic construct
  source 1..80: mol_type = other DNA
cctgcgcacgaagtgcatctggctcccgcagaagacgtccaggatgaggcgctcataggcgtcagggagcttcacgttct

SEQ ID NO: 38317 - DNA, 80 bp, synthetic construct; identical to SEQ ID NO: 13460
  source 1..80: mol_type = other DNA

SEQ ID NO: 38318 - DNA, 80 bp, synthetic construct
  source 1..80: mol_type = other DNA
gtctcagtgggagctccagtgcccgcacacagggcatgcccagttctgccttgctgggcctcgaaggcatcacctaccat

SEQ ID NO: 38319 - DNA, 80 bp, synthetic construct
  source 1..80: mol_type = other DNA
tgagatgcatttcaacaccttgacctgagagaaagccaagggagagaatgggctccttgggtgttgagttggggtgcagg

SEQ ID NO: 38320 - DNA, 80 bp, synthetic construct
  source 1..80: mol_type = other DNA
gagaggcaatggccttccctggtcacatagtgactgtcaggcctgggacatgacaacttgggcttcatgactgccagtcc

SEQ ID NO: 38321 - DNA, 80 bp, synthetic construct
  source 1..80: mol_type = other DNA
acggacgtcatctgagttggtggaggcgggcttctccatggccaccagacacagcatctgcagtaggtggttctgcatca

SEQ ID NO: 38322 - DNA, 80 bp, synthetic construct; identical to SEQ ID NO: 13461
  source 1..80: mol_type = other DNA

SEQ ID NO: 38323 - DNA, 80 bp, synthetic construct
  source 1..80: mol_type = other DNA
ccgcgaccctcagtgccaaagggctccttgaaggtgaggataacgcaggcgatgttgtcccggttccagatggggccgaa

SEQ ID NO: 38324 - DNA, 80 bp, synthetic construct
  source 1..80: mol_type = other DNA
caccctggtcccccggcccaggcttggccccacctcagcaccatgaggttctgcaccatctccttgcccaggtagtggtc

SEQ ID NO: 38325 - DNA, 80 bp, synthetic construct
  source 1..80: mol_type = other DNA
agtgaggatcagagctgcatcattcagacgccctcccaggggagtagaggccagaacctcctcgcccccgtggccacctc

SEQ ID NO: 38326 - DNA, 80 bp, synthetic construct; identical to SEQ ID NO: 13462
  source 1..80: mol_type = other DNA

SEQ ID NO: 38327 - DNA, 80 bp, synthetic construct
  source 1..80: mol_type = other DNA
tgccaccttgtggtcccgctggggatggccccggcaccatggatgctgcccagatccccggccccggacacgctcataga

SEQ ID NO: 38328 - DNA, 80 bp, synthetic construct
  source 1..80: mol_type = other DNA
ggtggagggcattcatgtggctgttgaggcgctggtaggaggctgcatcatcgtactggccagccacataggagttgcgg

SEQ ID NO: 38329 - DNA, 80 bp, synthetic construct; identical to SEQ ID NO: 13463
  source 1..80: mol_type = other DNA

SEQ ID NO: 38330 - DNA, 80 bp, synthetic construct
  source 1..80: mol_type = other DNA
ggaggggacctgtgggtcctggtcacgggggctggtaatgggggtctcaaggaagtacgagagcaggcggggcggggcag

SEQ ID NO: 38331 - DNA, 80 bp, synthetic construct
  source 1..80: mol_type = other DNA
ggaacgggcatagcccacgatgaaggtgttttcgggcagaaggccatcccggaacagccacctgagggcagggcacagct

SEQ ID NO: 38332 - DNA, 80 bp, synthetic construct
  source 1..80: mol_type = other DNA
gacctacatacatcatcctccacccttggtgatctgggcactactcaggatcactactgggccacaagcatgtctgtctt

SEQ ID NO: 38333 - DNA, 80 bp, synthetic construct; identical to SEQ ID NO: 13464
  source 1..80: mol_type = other DNA

SEQ ID NO: 38334 - DNA, 80 bp, synthetic construct
  source 1..80: mol_type = other DNA
ctgtaatcccagttactcaggaggctgaggcaggagaatcacttgaatccgggaggcagaggttgcagtgagccgagatc

SEQ ID NO: 38335 - DNA, 80 bp, synthetic construct
  source 1..80: mol_type = other DNA
aaagctggaaattggtgtttgaaaaagacgaatagaaacagacaaccccctggcatggttgcttttttaaaagggcatag

SEQ ID NO: 38336 - DNA, 80 bp, synthetic construct
  source 1..80: mol_type = other DNA
gtcccagctactcggaaggctgaggtaggagaatcacttgaacccgggagatggaggttgcagtgagccaagattgcacc

SEQ ID NO: 38337 - DNA, 80 bp, synthetic construct
  source 1..80: mol_type = other DNA
ctgaccaacatggagaaaccgtttctactaaaaatacaaaattggctgggcatggtggcccatgcctgtaatcccagcta

SEQ ID NO: 38338 - DNA, 80 bp, synthetic construct; identical to SEQ ID NO: 13465
  source 1..80: mol_type = other DNA

SEQ ID NO: 38339 - DNA, 80 bp, synthetic construct
  source 1..80: mol_type = other DNA
tacggaaacctgatgagaaaggcacatgggaaaacccatacgcctcattcacacacacatgcagatgcagaaatcccaca

SEQ ID NO: 38340 - DNA, 80 bp, synthetic construct
  source 1..80: mol_type = other DNA
gttcactgcaacctctgcctctgggctcaagcaatcctcccacctcagcctctggagtagctgggactacaggtacatgc

SEQ ID NO: 38341 - DNA, 80 bp, synthetic construct
  source 1..80: mol_type = other DNA
ctttaaaaaaaaagaagaaaacatcagcaaaccaaatcctgcaatgttaaaaacggtaggttttttatttacagaataaa

SEQ ID NO: 38342 - DNA, 80 bp, synthetic construct; identical to SEQ ID NO: 13466
  source 1..80: mol_type = other DNA

SEQ ID NO: 38343 - DNA, 80 bp, synthetic construct
  source 1..80: mol_type = other DNA
aacatggtggtgtatgcctgtaatcccagctattcaggagactgaggcaggagaatcgcttgaaccaggagggagagact

SEQ ID NO: 38344 - DNA, 80 bp, synthetic construct
  source 1..80: mol_type = other DNA
atcatccctttaagcaatcaggaacaagaaaagtgcagtaaggcaagaaaatgaaaatggctgaagttgagctgtgaggt

SEQ ID NO: 38345 - DNA, 80 bp, synthetic construct; identical to SEQ ID NO: 13467
  source 1..80: mol_type = other DNA

SEQ ID NO: 38346 - DNA, 80 bp, synthetic construct
  source 1..80: mol_type = other DNA
gaactttctggggagatgacgatggcctttattgtgatgagggtgtacagccaattgtacagttaagatttgcgcaccaa

SEQ ID NO: 38347 - DNA, 80 bp, synthetic construct
  source 1..80: mol_type = other DNA
gagtttgtgaaaagtcatcaacaagctagacctgcaccatctgtgttcttcatgacatgtatttctttttttttttgaga

SEQ ID NO: 38348 - DNA, 80 bp, synthetic construct
  source 1..80: mol_type = other DNA
tagagatggggtttcgccatgttggccaggctggcctcaaactcctgaccttgtgatccacctgccgtggcctcccaaag

SEQ ID NO: 38349 - DNA, 80 bp, synthetic construct; identical to SEQ ID NO: 13468
  source 1..80: mol_type = other DNA

SEQ ID NO: 38350 - DNA, 80 bp, synthetic construct
  source 1..80: mol_type = other DNA
cttgaacctcgcaggtggagattgcagtgagccaagattgcgccactgtactccagcctggtgaaagagcaagactccat

SEQ ID NO: 38351 - DNA, 80 bp, synthetic construct
  source 1..80: mol_type = other DNA
gactccatgtcacgaaaaaaaaaaaaaaaaaacacatgctcttcgaagcaatcaggcactgcaaccatggatgggtccat

SEQ ID NO: 38352 - DNA, 80 bp, synthetic construct
  source 1..80: mol_type = other DNA
atgctcctcaggtgagctcggtgccaggactacagcgacacggacctctcactgctgcacccttcaaagtccagcagaca

SEQ ID NO: 38353 - DNA, 80 bp, synthetic construct; identical to SEQ ID NO: 13469
  source 1..80: mol_type = other DNA

SEQ ID NO: 38354 - DNA, 80 bp, synthetic construct
  source 1..80: mol_type = other DNA
cgaccgaccgtctgctgggctccaagtcacctgagaggcgaggtgaggtaagacggacagtaggggtggggtaaggcagg

SEQ ID NO: 38355 - DNA, 80 bp, synthetic construct
  source 1..80: mol_type = other DNA
ttggtcaagagtctactcgtgccatgtgggtgggggcaattcaaggggtccttagtgaaaagcagttgggagcttctcat

SEQ ID NO: 38356 - DNA, 80 bp, synthetic construct
  source 1..80: mol_type = other DNA
taaaccgaaatcgctgcagcccttgtcttggcatgagggtttcatggtagagcacgatgcctgctggagggccagcgggg

SEQ ID NO: 38357 - DNA, 80 bp, synthetic construct; identical to SEQ ID NO: 13470
  source 1..80: mol_type = other DNA

SEQ ID NO: 38358 - DNA, 80 bp, synthetic construct
  source 1..80: mol_type = other DNA
tcactccctgtgaagctctccagcatcatcgaggtcccatcaggtggggaaagatgctgttccaggcgcacactagtcta

SEQ ID NO: 38359 - DNA, 80 bp, synthetic construct
  source 1..80: mol_type = other DNA
ctggccagggaggaggaagggacagaggaaggccacgtgggtccagcctgccccagggtgtcctgcttgcccaggctgtg

SEQ ID NO: 38360 - DNA, 80 bp, synthetic construct
  source 1..80: mol_type = other DNA
tatcttctgaaacacacgtcagcctgaactcttgctggtctgcttacttgccgtggttccctggccgcaatagcacatag

SEQ ID NO: 38361 - DNA, 80 bp, synthetic construct
  source 1..80: mol_type = other DNA
aagtgccaccctgcctacctcccgcaccgagtgaggcatcaggcgtggaagaagcctgggagccggagctgttccaggtg

SEQ ID NO: 38362 - DNA, 80 bp, synthetic construct; identical to SEQ ID NO: 13471
  source 1..80: mol_type = other DNA

SEQ ID NO: 38363 - DNA, 80 bp, synthetic construct
  source 1..80: mol_type = other DNA
aggttcaggaaaaggaagacacttgctccaactcacacagcaagcttggatgctctcaatgaggtgtctaataagagctg

SEQ ID NO: 38364 - DNA, 80 bp, synthetic construct
  source 1..80: mol_type = other DNA
ggactaagggtttaacggtcagagtcctggctgttaaggtttgtggctgatgcaggtatggctctttttatttttatttt

SEQ ID NO: 38365 - DNA, 80 bp, synthetic construct; identical to SEQ ID NO: 13472
  source 1..80: mol_type = other DNA

SEQ ID NO: 38366 - DNA, 80 bp, synthetic construct
  source 1..80: mol_type = other DNA
cccgcttcagcctcccaaagtgctgggattacagacgtgagccactgcgcccggcctttttgttttgttttgttttgaga

SEQ ID NO: 38367 - DNA, 80 bp, synthetic construct
  source 1..80: mol_type = other DNA
agagatggggtttcaccatgttggccaggatggtctcgatctcttgaccttgtgatctgcccaccttggccccccaaagt

SEQ ID NO: 38368 - DNA, 80 bp, synthetic construct
  source 1..80: mol_type = other DNA
gtgcccggccaggtatggctcttctgaggggaccaggctggggctggggctgaggccaagcccaatctactgtgggctcc

SEQ ID NO: 38369 - DNA, 80 bp, synthetic construct
  source 1..80: mol_type = other DNA
ttttctaagttctgatcagaagtacaaaggtgtcaaggagtaggtttgacaaagtgtgacagcgcgttgttctatgtgaa

SEQ ID NO: 38370 - DNA, 80 bp, synthetic construct; identical to SEQ ID NO: 13473
  source 1..80: mol_type = other DNA

SEQ ID NO: 38371 - DNA, 80 bp, synthetic construct
  source 1..80: mol_type = other DNA
tactattcttttgtctttcctatgagtgcagaatggcggttctacaagctggacaattggggccaggtggggtgaggcag

SEQ ID NO: 38372 - DNA, 80 bp, synthetic construct
  source 1..80: mol_type = other DNA
aaactacagaatgaatagcattccctgttttccccaagaagtccatctagacagtccctaaagagcctgcaactccagga

SEQ ID NO: 38373 - DNA, 80 bp, synthetic construct
  source 1..80: mol_type = other DNA
tctctactaacaatacaaaaattagccgggtgtggtggtgcatgcctgtaatctcagctacttggggggctgaggcagga

SEQ ID NO: 38374 - DNA, 80 bp, synthetic construct; identical to SEQ ID NO: 13474
  source 1..80: mol_type = other DNA

SEQ ID NO: 38375 - DNA, 80 bp, synthetic construct
  source 1..80: mol_type = other DNA
tgctctgccatgacgctgtctggtggaagaaaggctcgttaacaaggcagaagaacaggagagcattgagaagttagccc

SEQ ID NO: 38376 - DNA, 80 bp, synthetic construct
  source 1..80: mol_type = other DNA
cattacaaaattactcaaagcattggtgtattccgactacagcatcaattctggacaaccgagtaaaatccttgtggggc

SEQ ID NO: 38377 - DNA, 80 bp, synthetic construct; identical to SEQ ID NO: 13475
  source 1..80: mol_type = other DNA

SEQ ID NO: 38378 - DNA, 80 bp, synthetic construct
  source 1..80: mol_type = other DNA
cccgaagtgtacgaccgtttccgggggctgagccccgccggcccatttaatcggcgggggcgggggcgggcgcctgggct

SEQ ID NO: 38379 - DNA, 80 bp, synthetic construct
  source 1..80: mol_type = other DNA
gctgccgctgctctgcatccccaattccggcgggcacgggtgcagctccgcgtagtgctcccgcatccccatcgccggcc

SEQ ID NO: 38380 - DNA, 80 bp, synthetic construct
  source 1..80: mol_type = other DNA
gcggggccttctgccgcgccactcccccgggaaccctcgcctgttcgcgggtcaagccggccctattgggcagtctcttc

SEQ ID NO: 38381 - DNA, 80 bp, synthetic construct; identical to SEQ ID NO: 13476
  source 1..80: mol_type = other DNA

SEQ ID NO: 38382 - DNA, 80 bp, synthetic construct
  source 1..80: mol_type = other DNA
ccacggctgctgcggaagaggaaaaacggccaacagcagccccgcggccggcccggcagcgcccggcccccggctcagcc

SEQ ID NO: 38383 - DNA, 80 bp, synthetic construct
  source 1..80: mol_type = other DNA
ccgcacccctgccccggcccccgcccccgcgccctcctccccgctcccgcctcccgccagcccggtccctggcacttcgg

SEQ ID NO: 38384 - DNA, 80 bp, synthetic construct
  source 1..80: mol_type = other DNA
ctctgtcccctgcagggatgacagccccttcccagcctggcgcgtctcccctacacctcgtcaccctccgcttctcccag

SEQ ID NO: 38385 - DNA, 80 bp, synthetic construct
  source 1..80: mol_type = other DNA
gggggaaccagcgtcctatcagaaatgatcctctttcccggggagaatggggctcccacccatcccaccctagttcatcc

SEQ ID NO: 38386 - DNA, 80 bp, synthetic construct; identical to SEQ ID NO: 13477
  source 1..80: mol_type = other DNA

SEQ ID NO: 38387 - DNA, 80 bp, synthetic construct
  source 1..80: mol_type = other DNA
gcatctgtacttgatgctgccatcttcctcttggtgctgttgtctggtgatgccacgcggtgccacctccctgcctccct

SEQ ID NO: 38388 - DNA, 80 bp, synthetic construct
  source 1..80: mol_type = other DNA
caaagaactaccttcactttcactccctatgggtcacctggttggtagtgacacttctaggagcaccgggaaactgcggg

SEQ ID NO: 38389 - DNA, 80 bp, synthetic construct
  source 1..80: mol_type = other DNA
tggaattccactgggcgtcatcatgctggctttatttgctgaagctgcagctcaggcttcatcattaatcaggtttatta

SEQ ID NO: 38390 - DNA, 80 bp, synthetic construct
  source 1..80: mol_type = other DNA
ccacccctctgtcctcctctggacctgccacctgaaacccagaggcagcactggtccctccgggtggggaagaggtggat

SEQ ID NO: 38391 - DNA, 80 bp, synthetic construct; identical to SEQ ID NO: 13478
  source 1..80: mol_type = other DNA

SEQ ID NO: 38392 - DNA, 80 bp, synthetic construct
  source 1..80: mol_type = other DNA
ctgcatagtactaatcccttatgtgtgtatggggttctgcagcattccagatgcctctcagaacaattacttcatttgat

SEQ ID NO: 38393 - DNA, 80 bp, synthetic construct
  source 1..80: mol_type = other DNA
ggctcgttgctgttgctttttaaggtctcagctgtttggttctcagaaagcccacccttggtcctgcctgttcctcagtt

SEQ ID NO: 38394 - DNA, 80 bp, synthetic construct; identical to SEQ ID NO: 13479
  source 1..80: mol_type = other DNA

SEQ ID NO: 38395 - DNA, 80 bp, synthetic construct
  source 1..80: mol_type = other DNA
gtttccagccatcctgccgctgtgcctgtcttcttacagagggtaacgcttctcacaggggaccctgtctcagcagccgt

SEQ ID NO: 38396 - DNA, 80 bp, synthetic construct
  source 1..80: mol_type = other DNA
ctcttttcctcccatccatatattgcccagccttcaaggtgctgctggaagaggaaccagttccagctaccaagtatcag

SEQ ID NO: 38397 - DNA, 80 bp, synthetic construct
  source 1..80: mol_type = other DNA
gcagcatggaatgtgagtgggagtgtgactcgtccagtgtgaagggcacctgcatgggtatggagggcacattctctgag

SEQ ID NO: 38398 - DNA, 80 bp, synthetic construct
  source 1..80: mol_type = other DNA
agcgaggctgttcttcaacatcctgtaaatcggccctcttcatagtaaggacataagatatagttgttgcttgattataa

SEQ ID NO: 38399 - DNA, 80 bp, synthetic construct; identical to SEQ ID NO: 13480
  source 1..80: mol_type = other DNA

SEQ ID NO: 38400 - DNA, 80 bp, synthetic construct
  source 1..80: mol_type = other DNA
cttcccctacacttgggcatcctctgccttaaaaaccaagagggagacactttttgattcatcacaggttttctttaaac

SEQ ID NO: 38401 - DNA, 80 bp, synthetic construct
  source 1..80: mol_type = other DNA
caccaagacacccggtctctgggaacatggcgtgtgtgttgattgcacctgccaccagcattcagacctggcaggagctg

SEQ ID NO: 38402 - DNA, 80 bp, synthetic construct
  source 1..80: mol_type = other DNA
agtcagggagcagcggattgtcacggtagacggggtgggtagaactgctggaatccaagagggccctggccaccaaacag

SEQ ID NO: 38403 - DNA, 80 bp, synthetic construct; identical to SEQ ID NO: 13481
  source 1..80: mol_type = other DNA

SEQ ID NO: 38404 - DNA, 80 bp, synthetic construct
  source 1..80: mol_type = other DNA
gtctagtcttgtgcaggaacaggcctggggcgcgtgctgccgggggccagcttaaggcatctcgcgtgcctcagtctcac

SEQ ID NO: 38405 - DNA, 80 bp, synthetic construct
  source 1..80: mol_type = other DNA
agctatccctagtgcttgcatagaacaggtgttaagtcaatatttgtcccatttaagggacctcaactcatgtttaacag

SEQ ID NO: 38406 - DNA, 80 bp, synthetic construct
  source 1..80: mol_type = other DNA
agtgaggctggcatcgtttgccccagggaggccatgggcaggccccctgaggcaaacggtgcccccgcctgtgcacccct

SEQ ID NO: 38407 - DNA, 80 bp, synthetic construct; identical to SEQ ID NO: 13482
  source 1..80: mol_type = other DNA

SEQ ID NO: 38408 - DNA, 80 bp, synthetic construct
  source 1..80: mol_type = other DNA
tagcccagaggaggttaagttgtgtaagtgagaggctgactgcaaggcacgcttaatgaaaaagaaaagtttaagaaggc

SEQ ID NO: 38409 - DNA, 80 bp, synthetic construct
  source 1..80: mol_type = other DNA
ctgaggctgtgtggtgcaatggttggcctggccacttccagatcaggtacataggacaaatcccagcttttccagttcca

SEQ ID NO: 38410 - DNA, 80 bp, synthetic construct; identical to SEQ ID NO: 13483
  source 1..80: mol_type = other DNA

SEQ ID NO: 38411 - DNA, 80 bp, synthetic construct
  source 1..80: mol_type = other DNA
attttttaaatattttgagatggagtctggctctgttggcagagtgcaatgtgcgcgaccttggcttactgcaacctccg

SEQ ID NO: 38412 - DNA, 80 bp, synthetic construct
  source 1..80: mol_type = other DNA
gcctcagcctccaaagtgctgacattataggcatgagccactgtgcctggcttagcctgtgtcttttgctgggtcttgtg

SEQ ID NO: 38413 - DNA, 80 bp, synthetic construct
  source 1..80: mol_type = other DNA
cttgtgcttttgtctctaacactaggctgacacatagctgtgaattcaacaatgatgatgacaataataatagctaataa

SEQ ID NO: 38414 - DNA, 80 bp, synthetic construct
  source 1..80: mol_type = other DNA
gaggtgattaagtcatggagcagagccctcacgaatgggattatgcccttaaaaagagaacccgcaaagccccctcaccg

SEQ ID NO: 38415 - DNA, 80 bp, synthetic construct; identical to SEQ ID NO: 13484
  source 1..80: mol_type = other DNA

SEQ ID NO: 38416 - DNA, 80 bp, synthetic construct
  source 1..80: mol_type = other DNA
gtgggtgcacaagtgtatgtgaaatatgcactaatccctccctaattcctagattctacctctggctacctcactactgg

SEQ ID NO: 38417 - DNA, 80 bp, synthetic construct
  source 1..80: mol_type = other DNA
gggattctaggtgcccaccaccacacctggctaatttttgtgttttcagtagagacagggtttcaccatgttggccaggc

SEQ ID NO: 38418 - DNA, 80 bp, synthetic construct
  source 1..80: mol_type = other DNA
gcaccctcaagccccagtcccagcccgtccagccatcagcaggcgcggagaatgagtggtggcgcctctatgcgttttgg

SEQ ID NO: 38419 - DNA, 80 bp, synthetic construct; identical to SEQ ID NO: 13485
  source 1..80: mol_type = other DNA

SEQ ID NO: 38420 - DNA, 80 bp, synthetic construct
  source 1..80: mol_type = other DNA
acagcagcagaatagggagtctctttggaagaaatctgatggtagcattgttagactcatggtcgttattgctcctgaca

SEQ ID NO: 38421 - DNA, 80 bp, synthetic construct
  source 1..80: mol_type = other DNA
tatgcagaagaccctgtagagttatttccaggtgggaggtcagcacaactctgcccttatgctgaagttgcaatgccatt

SEQ ID NO: 38422 - DNA, 80 bp, synthetic construct
  source 1..80: mol_type = other DNA
ccatgcctggcgaatattttgattttttgtggagatggagtctcactgtgttatccagactggactcaaactcctgagct

SEQ ID NO: 38423 - DNA, 80 bp, synthetic construct; identical to SEQ ID NO: 13486
  source 1..80: mol_type = other DNA

SEQ ID NO: 38424 - DNA, 80 bp, synthetic construct
  source 1..80: mol_type = other DNA
acttgtcaggtaatgagaacgcctgttgtattgctgggaaaactgaatgaagtccagggaggttaaatgaatcctagaat

SEQ ID NO: 38425 - DNA, 80 bp, synthetic construct
  source 1..80: mol_type = other DNA
aactgaatgaagtccagggaggttaaatgaatcctagaatcttattcttgaagtaactcgagatcattgcatttgacgtc

SEQ ID NO: 38426 - DNA, 80 bp, synthetic construct
  source 1..80: mol_type = other DNA
taagttgattctccagccaaccctatgaagtaggtactgttgtcccactttacacatgaggaaatacataaccacagagg

SEQ ID NO: 38427 - DNA, 80 bp, synthetic construct; identical to SEQ ID NO: 13487
  source 1..80: mol_type = other DNA

SEQ ID NO: 38428 - DNA, 80 bp, synthetic construct
  source 1..80: mol_type = other DNA
tgtgtaccaccacacccggctaatttttgtatttttatagagacagggtttcaccatgttggccaggctggtctcgaacc

SEQ ID NO: 38429 - DNA, 80 bp, synthetic construct
  source 1..80: mol_type = other DNA
cttctgaatgtgaagctacctaatgaacaagaagcaaagccaactttcagtctccttctacctcagtttccaagaccctt

SEQ ID NO: 38430 - DNA, 80 bp, synthetic construct
  source 1..80: mol_type = other DNA
tatgtgccaggcacagccacggagcagcacagctggccccatctcaaggctgggcccttacaaaatgtgtgcacagacac

SEQ ID NO: 38431 - DNA, 80 bp, synthetic construct; identical to SEQ ID NO: 13488
  source 1..80: mol_type = other DNA

SEQ ID NO: 38432 - DNA, 80 bp, synthetic construct
  source 1..80: mol_type = other DNA
ctctctcttgccctcagctcctttggggagggaagtgggagggggtatgtcaagagcttgaccctgggctttaggggtgg

SEQ ID NO: 38433 - DNA, 80 bp, synthetic construct
  source 1..80: mol_type = other DNA
ttattagtcccattggacaagggaaaacacagatgtccagagaacctgagacaccgacacagggtcacacagctgaacct

SEQ ID NO: 38434 - DNA, 80 bp, synthetic construct
  source 1..80: mol_type = other DNA
caggccacccttggatgctttggggaggtcatcagagatcatcatctgtctccccacaaggcacgggttccattgcacag

SEQ ID NO: 38435 - DNA, 80 bp, synthetic construct
  source 1..80: mol_type = other DNA
aagtgattcccctgcctcagcctcccgagtagctgggactacaggcgcacaccaccatgcctggctaattttttgtattt

SEQ ID NO: 38436 - DNA, 80 bp, synthetic construct; identical to SEQ ID NO: 13489
  source 1..80: mol_type = other DNA

SEQ ID NO: 38437 - DNA, 80 bp, synthetic construct
  source 1..80: mol_type = other DNA
ggtttctcaggttagtgtagccggcgatggagctgaaccagtacaaagagtaacaccaggcctacctggaccttggctcc

SEQ ID NO: 38438 - DNA, 80 bp, synthetic construct
  source 1..80: mol_type = other DNA
gctctgggaacatggattggacctggggtgctccttcagacatacccagtgtgagctaggggctgcctgcatcctggggg

SEQ ID NO: 38439 - DNA, 80 bp, synthetic construct
  source 1..80: mol_type = other DNA
tcttcttggcttctggagcccatcaggggctgcaccatgaatgcccagtgactctggacctccctggtcaaggctgctgg

SEQ ID NO: 38440 - DNA, 80 bp, synthetic construct; identical to SEQ ID NO: 13490
  source 1..80: mol_type = other DNA

SEQ ID NO: 38441 - DNA, 80 bp, synthetic construct
  source 1..80: mol_type = other DNA
taatgcagtgcccattccaaccccagctgccagccagccccattcatactgggcagggcgtggaaagagctgtagaagca

SEQ ID NO: 38442 - DNA, 80 bp, synthetic construct
  source 1..80: mol_type = other DNA
gtgggacaagctgatggttctcctctgagcaatccaaggaagcttcctggaggaagtagggctctggggaggagcggcct

SEQ ID NO: 38443 - DNA, 80 bp, synthetic construct; identical to SEQ ID NO: 13491
  source 1..80: mol_type = other DNA

SEQ ID NO: 38444 - DNA, 80 bp, synthetic construct
  source 1..80: mol_type = other DNA
gtgatctgagagctagttctgtggacattccttgagctgcacacttatgtgcacttctctttctttttttcctttgaggc

SEQ ID NO: 38445 - DNA, 80 bp, synthetic construct
  source 1..80: mol_type = other DNA
agagacagtgtttctctatgttgccccggcttgaacttctgggctcaagcgatcctcccacctcggcctctcaaagccct

SEQ ID NO: 38446 - DNA, 80 bp, synthetic construct
  source 1..80: mol_type = other DNA
cgttcaagaccggcctgaccaacatggtgaaaccccatctcccctaaaaatacaaaattaaccaggtgtggtggcacatg

SEQ ID NO: 38447 - DNA, 80 bp, synthetic construct; identical to SEQ ID NO: 13492
  source 1..80: mol_type = other DNA

SEQ ID NO: 38448 - DNA, 80 bp, synthetic construct
  source 1..80: mol_type = other DNA
gcagaagaaacattttctcatttaaacctcaacaactcacattttacaagtggggaaactcagtgaggttgcagaagttg

SEQ ID NO: 38449 - DNA, 80 bp, synthetic construct
  source 1..80: mol_type = other DNA
cctgctggggtcctgccaggcctcagctttcatggaatgtggagagcagcctcagctccctgcggccccagggtggagat

SEQ ID NO: 38450 - DNA, 80 bp, synthetic construct
  source 1..80: mol_type = other DNA
agaggaggggagcagggagccgctgcaagttccctcctgccttcctggagcccgtgctggggatttatctcctcccagag

SEQ ID NO: 38451 - DNA, 80 bp, synthetic construct
  source 1..80: mol_type = other DNA
gagagagaggtggcattgtgcttgcatttatatgcagctggcagagcagatacagcctcattgttgtccaaggtttccaa

SEQ ID NO: 38452 - DNA, 80 bp, synthetic construct; identical to SEQ ID NO: 13493
  source 1..80: mol_type = other DNA

SEQ ID NO: 38453 - DNA, 80 bp, synthetic construct
  source 1..80: mol_type = other DNA
ggcatgggccacaatgctcagctattttttattttttatttttgtattttttgtgcagacgtggtttcaccatgttgcct

SEQ ID NO: 38454 - DNA, 80 bp, synthetic construct
  source 1..80: mol_type = other DNA
catgatctgcccgccttggcctcccaaagtgctgggattacaggcatgagccaccaagcccgaccctataatttttttat

SEQ ID NO: 38455 - DNA, 80 bp, synthetic construct
  source 1..80: mol_type = other DNA
tagtctgttttcatgctgctgataaagacatatcagagactgggtaacttatacaggaaaaaggggttaatgaagttaca

SEQ ID NO: 38456 - DNA, 80 bp, synthetic construct; identical to SEQ ID NO: 13494
  source 1..80: mol_type = other DNA

SEQ ID NO: 38457 - DNA, 80 bp, synthetic construct
  source 1..80: mol_type = other DNA
aactcctccttccacctcctctccttctcttgcttcactactccttatccattcctcttccaggaagccctttcctgacg

SEQ ID NO: 38458 - DNA, 80 bp, synthetic construct
  source 1..80: mol_type = other DNA
tgtgccacactttaacacagtgtctggcttacaggaggatcttgccaaatatttgttgaaagaagcaaagcgatcgagca

SEQ ID NO: 38459 - DNA, 80 bp, synthetic construct
  source 1..80: mol_type = other DNA
ctgggttcctgacatctgcacagagatgcagcctaatagtgtctcttagatgtccttggatagtcacacatgtaagttcc

SEQ ID NO: 38460 - DNA, 80 bp, synthetic construct; identical to SEQ ID NO: 13495
  source 1..80: mol_type = other DNA

SEQ ID NO: 38461 - DNA, 80 bp, synthetic construct
  source 1..80: mol_type = other DNA
ccacttgcccttccttcctggtggctcagtggcctgcttaggagtaagggtgccccaagtgtgagtcctatgaggcccca

SEQ ID NO: 38462 - DNA, 80 bp, synthetic construct
  source 1..80: mol_type = other DNA
catgctccactgctaataaaatttgagtttaaaaaataatggtgagcaaatgaatcggtcgatggcctgtggggagaggc

SEQ ID NO: 38463 - DNA, 80 bp, synthetic construct; identical to SEQ ID NO: 13496
  source 1..80: mol_type = other DNA

SEQ ID NO: 38464 - DNA, 80 bp, synthetic construct
  source 1..80: mol_type = other DNA
gcggactgggttctgccacgcagggctgagaatggggttcagaggcctaagaaggttctaagtctctgaaaaaccaaggg

SEQ ID NO: 38465 - DNA, 80 bp, synthetic construct
  source 1..80: mol_type = other DNA
gcatcatcggctggagaaaatgccggttcacaaaaaggagatctgctacggtgtgactttgatcaagtcattttacttct

SEQ ID NO: 38466 - DNA, 80 bp, synthetic construct
  source 1..80: mol_type = other DNA
cttaagactagacttttggagggcttagaaaatgtgggtggatttgcgattcttatgtgtaaatgctaccctacaacctc

SEQ ID NO: 38467 - DNA, 80 bp, synthetic construct; identical to SEQ ID NO: 13497
  source 1..80: mol_type = other DNA

SEQ ID NO: 38468 - DNA, 80 bp, synthetic construct
  source 1..80: mol_type = other DNA
actgagactggtgcagtgaggggtctgcccaaggtcatggttacagctgaactctgcctgtttcttttttctttttcttt

SEQ ID NO: 38469 - DNA, 80 bp, synthetic construct
  source 1..80: mol_type = other DNA
ttgtatttttagtagagacgggttttcaccatgttggccaggctggtctcggactcctgacctcagatgatccacccgcc

SEQ ID NO: 38470 - DNA, 80 bp, synthetic construct
  source 1..80: mol_type = other DNA
tttactcccaaatggagaccctccccctgcttccacctctggatgtggggcaggtggaaggtctccattcaggagcgcac

SEQ ID NO: 38471 - DNA, 80 bp, synthetic construct
  source 1..80: mol_type = other DNA
gactcgctgctttgaacatccatcccccagctccatgctaagctctctgcagccctgtgggccctaccccgcccccagct

SEQ ID NO: 38472 - DNA, 80 bp, synthetic construct; identical to SEQ ID NO: 13498
  source 1..80: mol_type = other DNA

SEQ ID NO: 38473 - DNA, 80 bp, synthetic construct
  source 1..80: mol_type = other DNA
tagtccctcccaagtggattcctgtgattcatccctcaaccagagttttctgaagtatctggagactcgggacaaagaca

SEQ ID NO: 38474 - DNA, 80 bp, synthetic construct
  source 1..80: mol_type = other DNA
tcagcactaaggggacacattcctgagttcagtacttagtggtggagacagagaagtaaacagatgatgcaatgcggtgt

SEQ ID NO: 38475 - DNA, 80 bp, synthetic construct
  source 1..80: mol_type = other DNA
tgcatttcaataaacaaggaggaattagtctggcaaaggaaaggacaagagcctcctagcagagggaaaagcacatgtca

SEQ ID NO: 38476 - DNA, 80 bp, synthetic construct; identical to SEQ ID NO: 13499
  source 1..80: mol_type = other DNA

SEQ ID NO: 38477 - DNA, 80 bp, synthetic construct
  source 1..80: mol_type = other DNA
ccaaggatgttacaccagggttgggtcattggggcatctgcagagctggattatggagggtcttatgtgtacgttcaaaa

SEQ ID NO: 38478 - DNA, 80 bp, synthetic construct
  source 1..80: mol_type = other DNA
tgtctctacaaaaaatgcaaaacttacccgggtgtggtagtgcgtgcctgtaatcccagctacttgggaggctaaggcag

SEQ ID NO: 38479 - DNA, 80 bp, synthetic construct; identical to SEQ ID NO: 13500
  source 1..80: mol_type = other DNA

SEQ ID NO: 38480 - DNA, 80 bp, synthetic construct
  source 1..80: mol_type = other DNA
ggaaggcaggtgtttacgtgaggctcagattcttcattcggggcagtttggagtcaattaccaagacactggagatggga

SEQ ID NO: 38481 - DNA, 80 bp, synthetic construct
  source 1..80: mol_type = other DNA
agtggtggggctggggattttgaaattagggcaagtagggggcacaggggctttaatgagctcccctcgaaagaatgttt

SEQ ID NO: 38482 - DNA, 80 bp, synthetic construct
  source 1..80: mol_type = other DNA
gaaacccaggtagaatgggggatagtccatggtggaaaacgctgtagtaagtacagtaagagtcatacagtgtctagtgg

SEQ ID NO: 38483 - DNA, 80 bp, synthetic construct
  source 1..80: mol_type = other DNA
gcagaggtttgagggagcacttcccaatgggggacactcagcagggatgaagaggttagggtgaccaaccatcctggttt

SEQ ID NO: 38484 - DNA, 80 bp, synthetic construct; identical to SEQ ID NO: 13501
  source 1..80: mol_type = other DNA

SEQ ID NO: 38485 - DNA, 80 bp, synthetic construct
  source 1..80: mol_type = other DNA
gagggagggaaggagggaagaaggagtttggaaaagcctgtaaaaggagggggtagggagcaggccgggacccccaccca

SEQ ID NO: 38486 - DNA, 80 bp, synthetic construct; identical to SEQ ID NO: 13502
  source 1..80: mol_type = other DNA

SEQ ID NO: 38487 - DNA, 80 bp, synthetic construct
  source 1..80: mol_type = other DNA
catgcagtccttaagatatgaaagtgacactgtgcctgccttcagtcagtaggcatcactgtaccttttccagggtaggt

SEQ ID NO: 38488 - DNA, 80 bp, synthetic construct
  source 1..80: mol_type = other DNA
aaagccatccttgaagtattgtgtgtagcactaagaaggtgagaggtgccaaaaatcaagtcaggcagatgttttcacaa

SEQ ID NO: 38489 - DNA, 80 bp, synthetic construct
  source 1..80: mol_type = other DNA
cccaaaccacctctttttctctgtttcaaaagctttccgagtctatgtgtcttagctggggggtgtcttaatttcagcga

SEQ ID NO: 38490 - DNA, 80 bp, synthetic construct; identical to SEQ ID NO: 13503
  source 1..80: mol_type = other DNA

SEQ ID NO: 38491 - DNA, 80 bp, synthetic construct
  source 1..80: mol_type = other DNA
gtgatcaataggaagaacaatggacccacaccaacaagatggaattaaccaccagcaaaggaagagtcctgcatctagag

SEQ ID NO: 38492 - DNA, 80 bp, synthetic construct
  source 1..80: mol_type = other DNA
aggcctagggcgtgctccccatgctccaccctgtgagcatgtgctctgggtgcactgtgcccagtgcgtagggcctcact

SEQ ID NO: 38493 - DNA, 80 bp, synthetic construct
  source 1..80: mol_type = other DNA
caaagactccgagggccacaggagagcctagcttatttatgttgctgttccttactctttgccttcaactagtggacatg

SEQ ID NO: 38494 - DNA, 80 bp, synthetic construct; identical to SEQ ID NO: 13504
  source 1..80: mol_type = other DNA

SEQ ID NO: 38495 - DNA, 80 bp, synthetic construct
  source 1..80: mol_type = other DNA
ccacagtgaaggaagcaaacacacatgtctcctggaagctccctgaaaccctgaggtggaattaatcattccttcttagg

SEQ ID NO: 38496 - DNA, 80 bp, synthetic construct
  source 1..80: mol_type = other DNA
agtgccacctgcaaagtagatgctcagtaatgaatgaggggatctgttgtagaataaatatatgttcttctgtgaacagg

SEQ ID NO: 38497 - DNA, 80 bp, synthetic construct
  source 1..80: mol_type = other DNA
ttagccttaataaacaaaagtgtgtcacagccacagactttcttatattgcactttctaacgaggacagaagtctttcct

SEQ ID NO: 38498 - DNA, 80 bp, synthetic construct
  source 1..80: mol_type = other DNA
tttctggagatggcacctcctcctggggaagaaagaggggagaacagtagttgactacaggtggggaacttcagggaact

SEQ ID NO: 38499 - DNA, 80 bp, synthetic construct; identical to SEQ ID NO: 13505
  source 1..80: mol_type = other DNA

SEQ ID NO: 38500 - DNA, 80 bp, synthetic construct
  source 1..80: mol_type = other DNA
tacctatctgtcctcagaggaggaagaggtcaggaaaaggaaagggctgggtttctgcattggcaaaccaatgcaacata

SEQ ID NO: 38501 - DNA, 80 bp, synthetic construct
  source 1..80: mol_type = other DNA
ccttgctgagccagggaccagattagacatttctcctctcttcactctccaggttgggaaattctgtatgagagaagaaa

SEQ ID NO: 38502 - DNA, 80 bp, synthetic construct
  source 1..80: mol_type = other DNA
tcaaagggaccagcttgctccctgtgggaggagaggacagcctctttggtgatgctgggtggttttggggggcctgtggg

SEQ ID NO: 38503 - DNA, 80 bp, synthetic construct; identical to SEQ ID NO: 13506
  source 1..80: mol_type = other DNA

SEQ ID NO: 38504 - DNA, 80 bp, synthetic construct
  source 1..80: mol_type = other DNA
atggccatcagcaaagttattgccattaccaatatgtctttaaactggttaaatatttgaagccatgtcagcatctccca

SEQ ID NO: 38505 - DNA, 80 bp, synthetic construct
  source 1..80: mol_type = other DNA
agccagataaagggaaacagcagctataatctgtttggctttcaaaggccttttcaaggttacccaccaaatgcaatgtt

SEQ ID NO: 38506 - DNA, 80 bp, synthetic construct; identical to SEQ ID NO: 13507
  source 1..80: mol_type = other DNA

SEQ ID NO: 38507 - DNA, 80 bp, synthetic construct
  source 1..80: mol_type = other DNA
tggcaaagggacaggggcatattaccagggtgtcttccttaggatcctcatgggagcttaaaacttggggctcggctggg

SEQ ID NO: 38508 - DNA, 80 bp, synthetic construct
  source 1..80: mol_type = other DNA
tgggaggctgaggcaggagaatcgcttgaacccaggagatggaggttgcagtgagcagagatcgtgccactgcgccccag

SEQ ID NO: 38509 - DNA, 80 bp, synthetic construct
  source 1..80: mol_type = other DNA
acagtataggcatttttgggtacaaggacaatagcttgcatcagattttcaaagaggactttggactcaaaaaatatcaa

SEQ ID NO: 38510 - DNA, 80 bp, synthetic construct
  source 1..80: mol_type = other DNA
acagctgtttgtctgctacacgtggccctctccaacctgccccagcctctctctccagcatatttttaccacatactgcc

SEQ ID NO: 38511 - DNA, 80 bp, synthetic construct; identical to SEQ ID NO: 13508
  source 1..80: mol_type = other DNA

SEQ ID NO: 38512 - DNA, 80 bp, synthetic construct
  source 1..80: mol_type = other DNA
catttgtcagttgacctggataagctgttgcaaccaaaaaggccataacaggtaggtgtcaggaaaaatactcttttttt

SEQ ID NO: 38513 - DNA, 80 bp, synthetic construct
  source 1..80: mol_type = other DNA
ttttttttgtagagacagggttttgccatgttgcttaggctggtcttgaacaggcttaagcaatctgcctgccttgattt

SEQ ID NO: 38514 - DNA, 80 bp, synthetic construct
  source 1..80: mol_type = other DNA
ttaatgtaatccatatcaaaattccaaaggcatttgtttttacagaaagagaaaaaaaaaccctaaaattcatatggagc

SEQ ID NO: 38515 - DNA, 80 bp, synthetic construct; identical to SEQ ID NO: 13509
  source 1..80: mol_type = other DNA

SEQ ID NO: 38516 - DNA, 80 bp, synthetic construct
  source 1..80: mol_type = other DNA
tagtcttgccagtgattttttgggtatgatgccaaaagcatatgcaccaaaagcaaaaataaacaagtggaactacatca

SEQ ID NO: 38517 - DNA, 80 bp, synthetic construct
  source 1..80: mol_type = other DNA
aaaaaatgggcagaggatctgaatagacatttctccaaagacacataaataaccaacaggtatatgaagagatgctcaac

SEQ ID NO: 38518 - DNA, 80 bp, synthetic construct
  source 1..80: mol_type = other DNA
aagaggaaactgaagacctaggggaaggggaaactgaggcatgttgagcacagcctaggctcccagcatatgctttttat

SEQ ID NO: 38519 - DNA, 80 bp, synthetic construct; identical to SEQ ID NO: 13510
  source 1..80: mol_type = other DNA

SEQ ID NO: 38520 - DNA, 80 bp, synthetic construct
  source 1..80: mol_type = other DNA
gtggatcacctgagggtcaggagttcgagaccagcctgaccaacatggcgaaaccctgtctctactaaaaatacaaaaaa

SEQ ID NO: 38521 - DNA, 80 bp, synthetic construct
  source 1..80: mol_type = other DNA
gaatgtatgttcctcaaaaaattaaaaatagaactaccatacaagccagtaatcccacttctgggtatttatccaaaggg

SEQ ID NO: 38522 - DNA, 80 bp, synthetic construct
  source 1..80: mol_type = other DNA
cctttgcaaaaacgtggatgaacctggaggacagtgtgctaagtgaaataagccaggtacagaaagacaaatattgtatg

SEQ ID NO: 38523 - DNA, 80 bp, synthetic construct; identical to SEQ ID NO: 13511
  source 1..80: mol_type = other DNA

SEQ ID NO: 38524 - DNA, 80 bp, synthetic construct
  source 1..80: mol_type = other DNA
taacaaagtggttaaataatactatttttatacttttttttttgagatggagtcttgctctgtcacccaggctagagtgc

SEQ ID NO: 38525 - DNA, 80 bp, synthetic construct
  source 1..80: mol_type = other DNA
gtcttgagctcctgacctcaggtgatccacctgcctcggcctcccaaagtgctgggattacaggctaaagagtactattt

SEQ ID NO: 38526 - DNA, 80 bp, synthetic construct; identical to SEQ ID NO: 13512
  source 1..80: mol_type = other DNA

SEQ ID NO: 38527 - DNA, 80 bp, synthetic construct
  source 1..80: mol_type = other DNA
agggttcccgctttctctaatttgtgaatggggaaactgaggcagggagcttacgcagctgactgaaggcctcacagctg

SEQ ID NO: 38528 - DNA, 80 bp, synthetic construct
  source 1..80: mol_type = other DNA
aatggagctctttccctcaaaactgccttatctctagtcgttaagggtgttcatttggctgaaactatattaagtgaatt

SEQ ID NO: 38529 - DNA, 80 bp, synthetic construct
  source 1..80: mol_type = other DNA
cctaccatgtagcccactatcaataacaatagtaactggcatggaatgagtaattgccgtattgtagtaagcactattcg

SEQ ID NO: 38530 - DNA, 80 bp, synthetic construct; identical to SEQ ID NO: 13513
  source 1..80: mol_type = other DNA

SEQ ID NO: 38531 - DNA, 80 bp, synthetic construct
  source 1..80: mol_type = other DNA
tttcagacagagccaagggtggcacccaggctccacccttcctgctctgaccagatggcttcacatctctcctgacttct

SEQ ID NO: 38532 - DNA, 80 bp, synthetic construct
  source 1..80: mol_type = other DNA
aacccctgtgtggaggagacaggagattttagcagcagggaccctccttgcaaaccagcccttgcagcgttggtgctgct

SEQ ID NO: 38533 - DNA, 80 bp, synthetic construct
  source 1..80: mol_type = other DNA
ccggaaaagtggtcaggggcatttttcagttgggaaagattctctctggaatggcaaaggacttctcaagggaccgcgcc

SEQ ID NO: 38534 - DNA, 80 bp, synthetic construct
  source 1..80: mol_type = other DNA
tcatagcatatccccatgggagtcttgccccacagagtgtgtccaaggtgaaggatggagtctagggaacgtgcagtatg

SEQ ID NO: 38535 - DNA, 80 bp, synthetic construct; identical to SEQ ID NO: 13514
  source 1..80: mol_type = other DNA

SEQ ID NO: 38536 - DNA, 80 bp, synthetic construct
  source 1..80: mol_type = other DNA
acattctcctgtcttgtgtgcctcagttcctttgcgtggacagtcccttcgacttgaagtccccttccctctcttccctc

SEQ ID NO: 38537 - DNA, 80 bp, synthetic construct
  source 1..80: mol_type = other DNA
agaccttgccttgggcatctgtggatgtctcgcccctagcacgcagtgacctcagccagtgggcgagtgtctgcacgagc

SEQ ID NO: 38538 - DNA, 80 bp, synthetic construct; identical to SEQ ID NO: 13515
  source 1..80: mol_type = other DNA

SEQ ID NO: 38539 - DNA, 80 bp, synthetic construct
  source 1..80: mol_type = other DNA
gtttttccatggaaacgtctgacatgggaaatcagaaaatctttcttagggagggaccagacattacatgagcttgtcat

SEQ ID NO: 38540 - DNA, 80 bp, synthetic construct
  source 1..80: mol_type = other DNA
atctgttactgaacctgctcagtggaaagagccctgttagagctttaagaactcattagcgggataaatatgccgggtat

SEQ ID NO: 38541 - DNA, 80 bp, synthetic construct
  source 1..80: mol_type = other DNA
cctgtgtgtgacagtgatcagctgttactggcgctggtaggtgactcagcccgaatcaattgcaggcctgctggactctg

SEQ ID NO: 38542 - DNA, 80 bp, synthetic construct
  source 1..80: mol_type = other DNA
ggtagtcaaggatgcacaggggccatgtgggcagaggctcacttacgaagtagattgtgcaagtggagacgtagggcaaa

SEQ ID NO: 38543 - DNA, 80 bp, synthetic construct; identical to SEQ ID NO: 13516
  source 1..80: mol_type = other DNA

SEQ ID NO: 38544 - DNA, 80 bp, synthetic construct
  source 1..80: mol_type = other DNA
aaaccctgaaatcccaagaggtgaagtaatccatcacactcgctcagcagaaggggccgaatctgcagggtagagagggc

SEQ ID NO: 38545 - DNA, 80 bp, synthetic construct
  source 1..80: mol_type = other DNA
tcccctcttcctggctttgtcatcccaggcagctgtggtatgaagggggctctgaaggatgcctgtttcctggctgtttt

SEQ ID NO: 38546 - DNA, 80 bp, synthetic construct
  source 1..80: mol_type = other DNA
tttttgtatatatttttttttaagtaaagtcgggctttcaccatgttggccaggctggtctcaaactcttgacctcatga

SEQ ID NO: 38547 - DNA, 80 bp, synthetic construct
  source 1..80: mol_type = other DNA
ggctgcagtggcacctgtgtgcaggcccctttcctgtaagaggtgagggcagagacaggatagggaggggcacagcaggc

SEQ ID NO: 38548 - DNA, 80 bp, synthetic construct; identical to SEQ ID NO: 13517
  source 1..80: mol_type = other DNA

SEQ ID NO: 38549 - DNA, 80 bp, synthetic construct
  source 1..80: mol_type = other DNA
ttggttctaagtgcaatgaaaagccattaaaggaatttgagcagagggatcccatggtctgatttacattttaacagaat

SEQ ID NO: 38550 - DNA, 80 bp, synthetic construct
  source 1..80: mol_type = other DNA
ttggcatcccaggttgctgctgccgcagggctgaaaggaagaggtggatcaaggatctggagtgagtgggaggaggatgg

SEQ ID NO: 38551 - DNA, 80 bp, synthetic construct; identical to SEQ ID NO: 13518
  source 1..80: mol_type = other DNA

SEQ ID NO: 38552 - DNA, 80 bp, synthetic construct
  source 1..80: mol_type = other DNA
cgggagtcacacgggagaagcatacagacatgagtggagggtttgacaacagtgaggtggtcactggtgacctggataag

SEQ ID NO: 38553 - DNA, 80 bp, synthetic construct
  source 1..80: mol_type = other DNA
gacagcggagcatgcatgagtgcacagtgaagggcatgatctaatgtgggggtattcatggataactcagaacagaaggg

SEQ ID NO: 38554 - DNA, 80 bp, synthetic construct
  source 1..80: mol_type = other DNA
tgagatgagagtgagggaagccggtagatttggtggtgggaagttaacgagttcctgtttgcttttgtatatgtatgttt

SEQ ID NO: 38555 - DNA, 80 bp, synthetic construct
  source 1..80: mol_type = other DNA
atacccaggaggaaggaatgctgcagagagaggccaagaagaatctgaacaggcaggccgttctgcatccagatcatacc

SEQ ID NO: 38556 - DNA, 80 bp, synthetic construct; identical to SEQ ID NO: 13519
  source 1..80: mol_type = other DNA

SEQ ID NO: 38557 - DNA, 80 bp, synthetic construct
  source 1..80: mol_type = other DNA
aggaccaggttctgggagcttctggatagctgaacacgtggcggttcctggagggtggtgcctggggagggcatataagc

SEQ ID NO: 38558 - DNA, 80 bp, synthetic construct
  source 1..80: mol_type = other DNA
tctcaacttgaagctgggtggccagaatttcccccggggcctggacttgcaactggtgtctggctgtggagggcagtctt

SEQ ID NO: 38559 - DNA, 80 bp, synthetic construct; identical to SEQ ID NO: 13520
  source 1..80: mol_type = other DNA

SEQ ID NO: 38560 - DNA, 80 bp, synthetic construct
  source 1..80: mol_type = other DNA
aaatgcaaggagtcaaactggctttgtggttttctacaggaacgttcagtcgctggtgcaggcatggagagggtggatag

SEQ ID NO: 38561 - DNA, 80 bp, synthetic construct
  source 1..80: mol_type = other DNA
cctgtctctactaaaaatacaaaagttagctgggcgtggtggcaggtgcctgtaatcccagctactcgggaggctgaggc

SEQ ID NO: 38562 - DNA, 80 bp, synthetic construct
  source 1..80: mol_type = other DNA
gagattagagtgggctgtaattatgcatctccagttaccttctagatagaaaagatgctggatataaagatttggggcca

SEQ ID NO: 38563 - DNA, 80 bp, synthetic construct
  source 1..80: mol_type = other DNA
aggagccttctgaagagacaggggaacaggaggaaaccaggagatgtggcactggggacacccagaggaaggaagagtgg

SEQ ID NO: 38564 - DNA, 80 bp, synthetic construct; identical to SEQ ID NO: 13521
  source 1..80: mol_type = other DNA

SEQ ID NO: 38565 - DNA, 80 bp, synthetic construct
  source 1..80: mol_type = other DNA
cagactgcagcactgctggatgcagagcaagcccaggagctgtaaattgcctgcctgtatgtcacttgtgccctgagatg

SEQ ID NO: 38566 - DNA, 80 bp, synthetic construct
  source 1..80: mol_type = other DNA
gacttggcaggatttaaaaaaacaaaacagagaagccactttggaggctggtgcagatgagactaagatggatttgggga

SEQ ID NO: 38567 - DNA, 80 bp, synthetic construct
  source 1..80: mol_type = other DNA
tgaaaggcagatgaatagatgaagtttcaaaactggagttgggcccaaatgggaccagcaaaaatatctgttaagtctac

SEQ ID NO: 38568 - DNA, 80 bp, synthetic construct; identical to SEQ ID NO: 13522
  source 1..80: mol_type = other DNA

SEQ ID NO: 38569 - DNA, 80 bp, synthetic construct
  source 1..80: mol_type = other DNA
tttggcttccttttccttccagtctctctctgtcgctctctttttttctttttctttttctttttttttttgagacagga

SEQ ID NO: 38570 - DNA, 80 bp, synthetic construct
  source 1..80: mol_type = other DNA
acggagtttcaccatgttagccaggctggtctcgaactcctggtctcaagtgatctgcctgccttggcctcccaaaatgc

SEQ ID NO: 38571 - DNA, 80 bp, synthetic construct
  source 1..80: mol_type = other DNA
accgcaaccacactcccacacaggcatcccgtaaaggtagtccatgcgagtccacagaagctggttgcctctgaagcctg

SEQ ID NO: 38572 - DNA, 80 bp, synthetic construct; identical to SEQ ID NO: 13523
  source 1..80: mol_type = other DNA

SEQ ID NO: 38573 - DNA, 80 bp, synthetic construct
  source 1..80: mol_type = other DNA
cgccgagccagcattcacacactttctcctcttcactcagtaaaatttgctctggggctgaggctgccaccagatgcaca

SEQ ID NO: 38574 - DNA, 80 bp, synthetic construct
  source 1..80: mol_type = other DNA
tttcgacttctcaggaaagctgcgggtggcacaaagtttgcaaattccttttacttcatccttgtcctcagaggccttgg

SEQ ID NO: 38575 - DNA, 80 bp, synthetic construct; identical to SEQ ID NO: 13524
  source 1..80: mol_type = other DNA

SEQ ID NO: 38576 - DNA, 80 bp, synthetic construct
  source 1..80: mol_type = other DNA
cctgtcacagcgcagtccaggagggaattcatgcatgcatgcattcacccatgagtcctttctttgtctcataccccatt

SEQ ID NO: 38577 - DNA, 80 bp, synthetic construct
  source 1..80: mol_type = other DNA
gttcttcacatcacagccagagtaaagcttttaaaatgtaagtcagatcaagtcatttcgcaaggataactccacatgca

SEQ ID NO: 38578 - DNA, 80 bp, synthetic construct
  source 1..80: mol_type = other DNA
agggtcctcaacttactgggtaacacctgtcttgggaatgggcttaacccgtcctttgctttaggaggaaaaaaaagcac

SEQ ID NO: 38579 - DNA, 80 bp, synthetic construct; identical to SEQ ID NO: 13525
  source 1..80: mol_type = other DNA

SEQ ID NO: 38580 - DNA, 80 bp, synthetic construct
  source 1..80: mol_type = other DNA
acatccctcctgagctgacccgtccagtctcctcctgcccacagaaggcaccgacctctgactcctgctgcaaacctggc

SEQ ID NO: 38581 - DNA, 80 bp, synthetic construct
  source 1..80: mol_type = other DNA
tctcctgtcccccccgaggactctcgtgttcagcacaccatcccttccctctgcctgcagtctttctgctgcacgctcta

SEQ ID NO: 38582 - DNA, 80 bp, synthetic construct
  source 1..80: mol_type = other DNA
ctcagccaagacaatctgaattaattttgcaagtaaaatttcatcagacgacctatctagcgcttccctaaatcaagacg

SEQ ID NO: 38583 - DNA, 80 bp, synthetic construct; identical to SEQ ID NO: 13526
  source 1..80: mol_type = other DNA

SEQ ID NO: 38584 - DNA, 80 bp, synthetic construct
  source 1..80: mol_type = other DNA
aggcggagcttgcagtgagccgagattgggccactgcagtccagcctgggcgacagagcgagactccgtctcaaaaaaaa

SEQ ID NO: 38585 - DNA, 80 bp, synthetic construct
  source 1..80: mol_type = other DNA
tatctacttgagagggctgttatgaggttaaatgagataaagcacatgaagtgtcagtactatagtaggtattctataat

SEQ ID NO: 38586 - DNA, 80 bp, synthetic construct
  source 1..80: mol_type = other DNA
gaccatcctggccaacatggtgaaaccctgtctctacgaaaaattcaaaaaaattagctgggtgtggtggtgtgcgcctg

SEQ ID NO: 38587 - DNA, 80 bp, synthetic construct
  source 1..80: mol_type = other DNA
tcacagatgtgttcagttctgacagttgtgctgatgaaggcacacacaagagacaggcatttatacacaacataaatgat

SEQ ID NO: 38588 - DNA, 80 bp, synthetic construct; identical to SEQ ID NO: 13527
  source 1..80: mol_type = other DNA

SEQ ID NO: 38589 - DNA, 80 bp, synthetic construct
  source 1..80: mol_type = other DNA
gaccctttcttgagaagcccaggagtggtgaccttcgtggcatagcaaaggcctgctgaggctactaggtggcaattctg

SEQ ID NO: 38590 - DNA, 80 bp, synthetic construct
  source 1..80: mol_type = other DNA
gaacctattcctgtccaccagggactcctagtcctgaccagctggatgtttcattacacattggaatctgtatttcagct

SEQ ID NO: 38591 - DNA, 80 bp, synthetic construct; identical to SEQ ID NO: 13528
  source 1..80: mol_type = other DNA

SEQ ID NO: 38592 - DNA, 80 bp, synthetic construct
  source 1..80: mol_type = other DNA
ttctttatcacctttttatgttttcctcttcattttgtcagttgcctcttacttttgccagcatgcctgcctcttctgtg

SEQ ID NO: 38593 - DNA, 80 bp, synthetic construct
  source 1..80: mol_type = other DNA
tagcagtgacattcctgtactccttgtgttggtgtggcattgttttgaatatatgcccagttttccaagcagattttttt

SEQ ID NO: 38594 - DNA, 80 bp, synthetic construct
  source 1..80: mol_type = other DNA
ttgtaggtgtgtgccaccacgcccggctaatttttttggtatttttagtagagatggtgtttcaccatgttggccaggct

SEQ ID NO: 38595 - DNA, 80 bp, synthetic construct
  source 1..80: mol_type = other DNA
tctgggtgtagcagggagcctacacagtgtccccgttgaattcatcaatgagtctccttcacagtgatatacggaagtaa

SEQ ID NO: 38596 - DNA, 80 bp, synthetic construct; identical to SEQ ID NO: 13529
  source 1..80: mol_type = other DNA

SEQ ID NO: 38597 - DNA, 80 bp, synthetic construct
  source 1..80: mol_type = other DNA
aaaaagctttaacatctacttcagtggaagagcagtggggatggtatgatctcgtgggggattttctgtgggtcctttct

SEQ ID NO: 38598 - DNA, 80 bp, synthetic construct
  source 1..80: mol_type = other DNA
aagtgtgccataaatcttggctgtttaggaaggtgagaaattaaaattgcaagacagccagggagggagtgagcctgtct

SEQ ID NO: 38599 - DNA, 80 bp, synthetic construct
  source 1..80: mol_type = other DNA
ctccctcatgttctagaagatatttctgcatcaaggcgcctgctactgggctttgagctttcctctcccttctctccttc

SEQ ID NO: 38600 - DNA, 80 bp, synthetic construct
  source 1..80: mol_type = other DNA
ggcatacccccgctccagcaatggcaaaagccatgagagggtctcatatatagaaagggtgtcccaggccacaccttcgg

SEQ ID NO: 38601 - DNA, 80 bp, synthetic construct; identical to SEQ ID NO: 13530
  source 1..80: mol_type = other DNA

SEQ ID NO: 38602 - DNA, 80 bp, synthetic construct
  source 1..80: mol_type = other DNA
tcgtgttcttcctcttatcattcattagctcagcaattaggaagcagttgttagaatgtgccagatgggctgacactgag

SEQ ID NO: 38603 - DNA, 80 bp, synthetic construct
  source 1..80: mol_type = other DNA
gcagatggaagagctaagaatcaaactgacatttcactaactccaaagccgagacttttaatcattttccaataaggcaa

SEQ ID NO: 38604 - DNA, 80 bp, synthetic construct
  source 1..80: mol_type = other DNA
gcctgagctgagcctagaaggatgtaaaggaaccaaccagaggaagaaggggagttagggtattgtgaggctggtggggg

SEQ ID NO: 38605 - DNA, 80 bp, synthetic construct; identical to SEQ ID NO: 13531
  source 1..80: mol_type = other DNA

SEQ ID NO: 38606 - DNA, 80 bp, synthetic construct
  source 1..80: mol_type = other DNA
ggaccctattttggccttctgcggaagcatgacgtccagtgggctgtggatgtatgtgactgccgagatgtcagtcatgc

SEQ ID NO: 38607 - DNA, 80 bp, synthetic construct
  source 1..80: mol_type = other DNA
tatcagcctctttgtccatgtgggatagggattgcttggccggtaagcactgtgtttgggtgtacatctcctaggatact

SEQ ID NO: 38608 - DNA, 80 bp, synthetic construct; identical to SEQ ID NO: 13532
  source 1..80: mol_type = other DNA

SEQ ID NO: 38609 - DNA, 80 bp, synthetic construct
  source 1..80: mol_type = other DNA
gaacttctggagctcccgtccttggagcctcctctcaggaagttagatgtggcactcagggttagttggctctgaattcc

SEQ ID NO: 38610 - DNA, 80 bp, synthetic construct
  source 1..80: mol_type = other DNA
gggccccctctccagtgacactccaggcctaaacattattttcccatcgcggaggaggtgttcccggtgtgtctcatgaa

SEQ ID NO: 38611 - DNA, 80 bp, synthetic construct
  source 1..80: mol_type = other DNA
ccagccagctccctctccccacgtgcgcgctaggccttggttactctggcaactcgccccgctcagacggcaccaggcag

SEQ ID NO: 38612 - DNA, 80 bp, synthetic construct; identical to SEQ ID NO: 13533
  source 1..80: mol_type = other DNA

SEQ ID NO: 38613 - DNA, 80 bp, synthetic construct
  source 1..80: mol_type = other DNA
gggcctggaggtggccgggcatcggtgccgacgccgcgagggcagcgcccgcggcgggaatactaatgcaccctaaaggg

SEQ ID NO: 38614 - DNA, 80 bp, synthetic construct
  source 1..80: mol_type = other DNA
cggctcaggacttcgcacaagggcagctctttgtttacagctcctctcccagctccccgctttcctttcgcccaccgcct

SEQ ID NO: 38615 - DNA, 80 bp, synthetic construct
  source 1..80: mol_type = other DNA
gcgtgggaggacgggctgcggagcccgcgtcatcctgcctgtggggagcgctgtgcctgctctcctgccagcgcgcccag

SEQ ID NO: 38616 - DNA, 80 bp, synthetic construct
  source 1..80: mol_type = other DNA
agtgagctgctgcatcctctcctcctttaattagcaggaatgcgctggacaagttgttacaactgcagggaaaacgataa

SEQ ID NO: 38617 - DNA, 80 bp, synthetic construct; identical to SEQ ID NO: 13534
  source 1..80: mol_type = other DNA

SEQ ID NO: 38618 - DNA, 80 bp, synthetic construct
  source 1..80: mol_type = other DNA
gaggtaatacctggccacatgagaaaacttaactaatagcacgttagttgccagggaatggacaaaaccatcttttccta

SEQ ID NO: 38619 - DNA, 80 bp, synthetic construct
  source 1..80: mol_type = other DNA
ttgagccgtgttgaaagtaggcgtcattgtctctaggataaaaatctgagccaggcccacagaggttaagttttatatcc

SEQ ID NO: 38620 - DNA, 80 bp, synthetic construct; identical to SEQ ID NO: 13535
  source 1..80: mol_type = other DNA

SEQ ID NO: 38621 - DNA, 80 bp, synthetic construct
  source 1..80: mol_type = other DNA
aggtctcaggtgtcagataagcccatgctggtgttaaaatagactatttaaggtgattgccagctaatctacggacgaag

SEQ ID NO: 38622 - DNA, 80 bp, synthetic construct
  source 1..80: mol_type = other DNA
tctgagtgggtagtacaataaagtggtttcattactggtgagcaattaatgggttgacatcaactaagagggagagtcta

SEQ ID NO: 38623 - DNA, 80 bp, synthetic construct
  source 1..80: mol_type = other DNA
cccgagtagctgggactacaggcgcgtgccatcacaccggctaatttttgttttttgtattttagtggagatggggtctc

SEQ ID NO: 38624 - DNA, 80 bp, synthetic construct
  source 1..80: mol_type = other DNA
ctgccttgaactcctgggctcaagtgattctcctgcctcagtctcctcagtagctgggaccccaggccatgccatcacat

SEQ ID NO: 38625 - DNA, 80 bp, synthetic construct; identical to SEQ ID NO: 13536
  source 1..80: mol_type = other DNA

SEQ ID NO: 38626 - DNA, 80 bp, synthetic construct
  source 1..80: mol_type = other DNA
agcaggataagaaagggattagaaaggggatttcgtgttagttagcagagcaaagggtttggtacagacacatggacatg

SEQ ID NO: 38627 - DNA, 80 bp, synthetic construct
  source 1..80: mol_type = other DNA
gtagtgagtgggtatgggatgtcaacaggaggtatgtcttatgtgacagtgttgggctttttaaaagtcttatgttctat

SEQ ID NO: 38628 - DNA, 80 bp, synthetic construct
  source 1..80: mol_type = other DNA
cctgggaaacaggaagaccctgcctctacaaaaaataaaataattagctgggcatggtggtgcctgcctaaaatcccagc

SEQ ID NO: 38629 - DNA, 80 bp, synthetic construct; identical to SEQ ID NO: 13537
  source 1..80: mol_type = other DNA

SEQ ID NO: 38630 - DNA, 80 bp, synthetic construct
  source 1..80: mol_type = other DNA
cagcctctgcctcccaggtccaagtgattcccctgcttcagcctcccaggtagctgggaccataagtgcacaccaccatg

SEQ ID NO: 38631 - DNA, 80 bp, synthetic construct
  source 1..80: mol_type = other DNA
atgtgaaggctgacatttaagtctcacctctcctcttgtgcaatccttcttgccaaagatggagttagaccctcagagag

SEQ ID NO: 38632 - DNA, 80 bp, synthetic construct; identical to SEQ ID NO: 13538
  source 1..80: mol_type = other DNA

SEQ ID NO: 38633 - DNA, 80 bp, synthetic construct
  source 1..80: mol_type = other DNA
gctgttgccatttggatgaaaggagctgaggagcattagtgagcgatttgattttatgaaggggaagtggcacaggtgct

SEQ ID NO: 38634 - DNA, 80 bp, synthetic construct
  source 1..80: mol_type = other DNA
gggtgcattggtccccaccactcaaggatctctttatggtctgctaatttagaaaattactatgaccaatgatgataata

SEQ ID NO: 38635 - DNA, 80 bp, synthetic construct
  source 1..80: mol_type = other DNA
gtcagaaaactaaggcttcaagatgtttactgctttgtccaaaattaagaagctccccttctctcatgcccccatttcta

SEQ ID NO: 38636 - DNA, 80 bp, synthetic construct
  source 1..80: mol_type = other DNA
ctccacagtggcagaggagaaattctggactctgctcttgcaaatacagacttggaggaggctgggtgtagggaacagtg

SEQ ID NO: 38637 - DNA, 80 bp, synthetic construct; identical to SEQ ID NO: 13539
  source 1..80: mol_type = other DNA

SEQ ID NO: 38638 - DNA, 80 bp, synthetic construct
  source 1..80: mol_type = other DNA
gccaaccacagaggatcaggggttggggattttaaaaagctattgtgataattactcatagtttataagtcaaatcatat

SEQ ID NO: 38639 - DNA, 80 bp, synthetic construct
  source 1..80: mol_type = other DNA
acccttcctgtccctcaacctcccttttttgaaataatggctttcaactgtttagctgcttttttctgagatttccacat

SEQ ID NO: 38640 - DNA, 80 bp, synthetic construct
  source 1..80: mol_type = other DNA
tgggctcaagggatcatcaccccacctcagcctcccgagtagctgggactacaggtgcaccatcacacctggctattttt

SEQ ID NO: 38641 - DNA, 80 bp, synthetic construct; identical to SEQ ID NO: 13540
  source 1..80: mol_type = other DNA

SEQ ID NO: 38642 - DNA, 80 bp, synthetic construct
  source 1..80: mol_type = other DNA
tgccttgttttatcatttgcttagttttctttgtccttaccaatagcctctcagaatgattttccacaaggtcactctct

SEQ ID NO: 38643 - DNA, 80 bp, synthetic construct
  source 1..80: mol_type = other DNA
cattccctatttctgagaccttgcatcttcttctttcttggtttactccattgttttgatggagcgtgctctccaggagt

SEQ ID NO: 38644 - DNA, 80 bp, synthetic construct; identical to SEQ ID NO: 13541
  source 1..80: mol_type = other DNA

SEQ ID NO: 38645 - DNA, 80 bp, synthetic construct
  source 1..80: mol_type = other DNA
cctggcccacccccctcatctctcctcttcttcctctcttgccagcccccattgtggatgtctgtctttctgacaccctg

SEQ ID NO: 38646 - DNA, 80 bp, synthetic construct
  source 1..80: mol_type = other DNA
ccctgctcatggtcctttgattggcaggaagtcaccggaggcatcctgtctatgtcagctggagctgctataacagatca

SEQ ID NO: 38647 - DNA, 80 bp, synthetic construct
  source 1..80: mol_type = other DNA
cagagagagcaagagcaagttctgtgtctctttgagaggcacgagtctccttcttgagggctccaccctcctgatctagt

SEQ ID NO: 38648 - DNA, 80 bp, synthetic construct
  source 1..80: mol_type = other DNA
caggtcagggagtagagcgttgcggagaagatcaggtgggaactcacctgaagtcccttacaacttggaaggcatgagca

SEQ ID NO: 38649 - DNA, 80 bp, synthetic construct; identical to SEQ ID NO: 13542
  source 1..80: mol_type = other DNA

SEQ ID NO: 38650 - DNA, 80 bp, synthetic construct
  source 1..80: mol_type = other DNA
caactaaggccattaaatattgtgcaagaagattggaaagccagaggccttagtaatctctaaattagaccattggaccc

SEQ ID NO: 38651 - DNA, 80 bp, synthetic construct
  source 1..80: mol_type = other DNA
ttaaagcgaagtgttctcttgtggattgtagttacctcgaggccatgagccaggttggttttgccagtttggtgtggtgt

SEQ ID NO: 38652 - DNA, 80 bp, synthetic construct; identical to SEQ ID NO: 13543
  source 1..80: mol_type = other DNA

SEQ ID NO: 38653 - DNA, 80 bp, synthetic construct
  source 1..80: mol_type = other DNA
agacagagttggagcacttgggactcagaatggtcactgagcagatagacgagggctggcaagacacatggggaaaacta

SEQ ID NO: 38654 - DNA, 80 bp, synthetic construct
  source 1..80: mol_type = other DNA
aggtggcctgggcttacagccaagccaggctctccttgggtccttccacatcccagaggcccacactgagcttggctgca

SEQ ID NO: 38655 - DNA, 80 bp, synthetic construct
  source 1..80: mol_type = other DNA
cacccgatgaaaggtagtatttgttgtgtgtctctctccagccttatccatgagctccttaatagcaagtcacacacctc

SEQ ID NO: 38656 - DNA, 80 bp, synthetic construct; identical to SEQ ID NO: 13544
  source 1..80: mol_type = other DNA

SEQ ID NO: 38657 - DNA, 80 bp, synthetic construct
  source 1..80: mol_type = other DNA
aggcctctgtttgaatgtcttctcctttgggaaggccaacaccctctacctccataacattgcatttttgatacttcctg

SEQ ID NO: 38658 - DNA, 80 bp, synthetic construct
  source 1..80: mol_type = other DNA
tgtttgaatgaaggaatgaaccaattcttacagcatcactttgtgtctacagaagcattccatcagtctgtggggagggg

SEQ ID NO: 38659 - DNA, 80 bp, synthetic construct
  source 1..80: mol_type = other DNA
ttgaggacatgggaactaaagactatatcttctgcaaagaactcccttcatttgcatttctcctaaagctgtgtcatgct

SEQ ID NO: 38660 - DNA, 80 bp, synthetic construct
  source 1..80: mol_type = other DNA
tcgctccctccctttgaggacacgagcattttggcgaattctgaagagcacacgttttccacttagctcagtctgtggcg

SEQ ID NO: 38661 - DNA, 80 bp, synthetic construct; identical to SEQ ID NO: 13545
  source 1..80: mol_type = other DNA

SEQ ID NO: 38662 - DNA, 80 bp, synthetic construct
  source 1..80: mol_type = other DNA
aagtgtagaactgactcctgctcttgccccattctccctccagaaaccacaggtcactctgacttcctgctgggcgtccc

SEQ ID NO: 38663 - DNA, 80 bp, synthetic construct
  source 1..80: mol_type = other DNA
ggcaggaggatcactcgagcccaggagtgcgaggctgcagtgagttatgatcataccactaaattcctaggcaacagagc

SEQ ID NO: 38664 - DNA, 80 bp, synthetic construct; identical to SEQ ID NO: 13546
  source 1..80: mol_type = other DNA

SEQ ID NO: 38665 - DNA, 80 bp, synthetic construct
  source 1..80: mol_type = other DNA
tgcaaacatgaaaataggtgatagatttgtcttctctgccaggtgacgctagacttcaggaagaccccccatttctgctc

SEQ ID NO: 38666 - DNA, 80 bp, synthetic construct
  source 1..80: mol_type = other DNA
aaagacaggaaggaaagggctcagccaagaatgtgtagtgtttaatgcaatgtcgatgaagagctctgcttacagctgtg

SEQ ID NO: 38667 - DNA, 80 bp, synthetic construct
  source 1..80: mol_type = other DNA
gctgggcccgggacatggccggctaatgtttggttctgggtgacctccagccttctggttaaggtcttgccttagctcct

SEQ ID NO: 38668 - DNA, 80 bp, synthetic construct; identical to SEQ ID NO: 13547
  source 1..80: mol_type = other DNA

SEQ ID NO: 38669 - DNA, 80 bp, synthetic construct
  source 1..80: mol_type = other DNA
aagtcctatgggaagagtgggatgatggagatctcttgggttagaaggggcttcttctggttctgaaggcagttgcccaa

SEQ ID NO: 38670 - DNA, 80 bp, synthetic construct
  source 1..80: mol_type = other DNA
gggagtttcttggaaggcagatcattaagatttaatgggacatttcctgccaggcagagggattgtaaaatgcagctaat

SEQ ID NO: 38671 - DNA, 80 bp, synthetic construct
  source 1..80: mol_type = other DNA
tgctggcggcaggggcaggtgggtgtttagctggctgagggcttagtgaggaaagtggtgttggagcagcatctacgcag

SEQ ID NO: 38672 - DNA, 80 bp, synthetic construct; identical to SEQ ID NO: 13548
  source 1..80: mol_type = other DNA

SEQ ID NO: 38673 - DNA, 80 bp, synthetic construct
  source 1..80: mol_type = other DNA
tctttacccataggtgacaggaaatgagaacatggagggatagatgtgggcacagcctagggagaggaaaggggaggtga

SEQ ID NO: 38674 - DNA, 80 bp, synthetic construct
  source 1..80: mol_type = other DNA
ctgtgaggtcccataaaaatgaggataccattgcaaccttacacgtaacacagctgaagcttctagaacatacagggcat

SEQ ID NO: 38675 - DNA, 80 bp, synthetic construct
  source 1..80: mol_type = other DNA
caacagccactcagccactgcccctcggccttgggagctggagtcaggcagagctgagggttgcacccagctggccagtg

SEQ ID NO: 38676 - DNA, 80 bp, synthetic construct
  source 1..80: mol_type = other DNA
ctgactctgctgctaaccagctgtcagaagttgcgggttaagtagcgggggttgaggcgggagttcctgcaggcagggcc

SEQ ID NO: 38677 - DNA, 80 bp, synthetic construct; identical to SEQ ID NO: 13549
  source 1..80: mol_type = other DNA

SEQ ID NO: 38678 - DNA, 80 bp, synthetic construct
  source 1..80: mol_type = other DNA
cacagagttcagggcagagccttccaggcaaggggaacaaggcggtagcaaggtggggacagggtgagtgtcttcgagag

SEQ ID NO: 38679 - DNA, 80 bp, synthetic construct
  source 1..80: mol_type = other DNA
aaaagttattttgacagcttataaaggataaatcataggagaggaagagttaagccatgagtagctgtaggttgggtgag

SEQ ID NO: 38680 - DNA, 80 bp, synthetic construct
  source 1..80: mol_type = other DNA
tgtgtaaccaccaccacaatcaagatatggaacatctccgtcacctgccaaattcccccacacccccggcagtcacactc

SEQ ID NO: 38681 - DNA, 80 bp, synthetic construct; identical to SEQ ID NO: 13550
  source 1..80: mol_type = other DNA

SEQ ID NO: 38682 - DNA, 80 bp, synthetic construct
  source 1..80: mol_type = other DNA
cactctgtcacccacactggagtgcagtggcgcgatcttggctcactgcaatctccacctcccgggttcaagtgattctc

SEQ ID NO: 38683 - DNA, 80 bp, synthetic construct
  source 1..80: mol_type = other DNA
tgtgagccaccatgcctggcctcctttcttttttttttttagaaacagggttttgctctgtcatccaggctggagtgcag

SEQ ID NO: 38684 - DNA, 80 bp, synthetic construct; identical to SEQ ID NO: 13551
  source 1..80: mol_type = other DNA

SEQ ID NO: 38685 - DNA, 80 bp, synthetic construct
  source 1..80: mol_type = other DNA
atgtgtcttttcatctgtttatttgccaaccctgtatcttttcttggtgaagtatctttcagtcttttgtacatttttat

SEQ ID NO: 38686 - DNA, 80 bp, synthetic construct
  source 1..80: mol_type = other DNA
aaaatagagcaaggattaaaacatatgtaattccttgacacagacacttcctttactgtcatttagagaacggtttcaga

SEQ ID NO: 38687 - DNA, 80 bp, synthetic construct
  source 1..80: mol_type = other DNA
ctagagctctttcaatcttgcaaaactgaaactctgtacccattaaataacaactcctcattccctcttcccctcggttc

SEQ ID NO: 38688 - DNA, 80 bp, synthetic construct; identical to SEQ ID NO: 13552
  source 1..80: mol_type = other DNA

SEQ ID NO: 38689 - DNA, 80 bp, synthetic construct
  source 1..80: mol_type = other DNA
tttagtagagacggggtttcactgtgttagccaggatggtctcgatctcctgacctcgtgatctgcctgcctcagcctcc

SEQ ID NO: 38690 - DNA, 80 bp, synthetic construct
  source 1..80: mol_type = other DNA
ataacagtctttgtttctttttttttttttaaatagtatgtatatatatacatatacattatacgtatgtatatatgtgt

SEQ ID NO: 38691 - DNA, 80 bp, synthetic construct
  source 1..80: mol_type = other DNA
ccctgccctcgagtaggctttgctgtctgttgttcccttctttgtgtccatgtgtattcagcatttattaggttggtgca

SEQ ID NO: 38692 - DNA, 80 bp, synthetic construct
  source 1..80: mol_type = other DNA
gcgtagtattccatggtgtatatgtaccacattttctttatccagtctaccgttgatgggcatttaggttgattccatgt

SEQ ID NO: 38693 - DNA, 80 bp, synthetic construct
  source 1..80: mol_type = other DNA
atggctgaattaatttacattcccaccagcagtgtatacgtgttcccttttctctgcaacctcagcagcatctgttattt

SEQ ID NO: 38694 - DNA, 80 bp, synthetic construct; identical to SEQ ID NO: 13553
  source 1..80: mol_type = other DNA

SEQ ID NO: 38695 - DNA, 80 bp, synthetic construct
  source 1..80: mol_type = other DNA
tgcctatgtccagaatggtatttcctaggttatcttccagggtttttatagttttaggttttatatttaagtccttaatc

SEQ ID NO: 38696 - DNA, 80 bp, synthetic construct
  source 1..80: mol_type = other DNA
tttttgcttaggattgctttggcttttcaaacacttttttggttgcatatgaattttaaaacagtttttcctagttctgt

SEQ ID NO: 38697 - DNA, 80 bp, synthetic construct
  source 1..80: mol_type = other DNA
ttcttgttgtagggatctttcacctccctggttagctgtattcctaggtattttattctttttgtggctattgtgaatag

SEQ ID NO: 38698 - DNA, 80 bp, synthetic construct; identical to SEQ ID NO: 13554
  source 1..80: mol_type = other DNA

SEQ ID NO: 38699 - DNA, 80 bp, synthetic construct
  source 1..80: mol_type = other DNA
ggaagcatggtgctggtatctgctcagcttctagggaggcctcaggaagcttacaatcatggtggaaggtgaagagggag

SEQ ID NO: 38700 - DNA, 80 bp, synthetic construct
  source 1..80: mol_type = other DNA
tcacattccaccaggctccacctccaacactggggattacatttcaagtgagatttgggcaggacaaatatccaaactgt

SEQ ID NO: 38701 - DNA, 80 bp, synthetic construct
  source 1..80: mol_type = other DNA
tattgatttgaaccaaccttgcatcccagggataaagcctacttgatcatggtagattagctttttgatgtgctgctgga

SEQ ID NO: 38702 - DNA, 80 bp, synthetic construct; identical to SEQ ID NO: 13555
  source 1..80: mol_type = other DNA

SEQ ID NO: 38703 - DNA, 80 bp, synthetic construct
  source 1..80: mol_type = other DNA
ttttttttttctttttttttgtgagacagagtctcactctgtagcccaggccgaggtgcagtggacctatctcagctcac

SEQ ID NO: 38704 - DNA, 80 bp, synthetic construct
  source 1..80: mol_type = other DNA
cttttatacattgtacttttggtattgtatctgagtattgcctaatccaagatcacaagtgttttcttctactctgatct

SEQ ID NO: 38705 - DNA, 80 bp, synthetic construct; identical to SEQ ID NO: 13556
  source 1..80: mol_type = other DNA

SEQ ID NO: 38706 - DNA, 80 bp, synthetic construct
  source 1..80: mol_type = other DNA
gagtctggagttcaggacagaggtaagagctggagataggcattttgcaaagcattggcatacacagacaggtgtgtgag

SEQ ID NO: 38707 - DNA, 80 bp, synthetic construct
  source 1..80: mol_type = other DNA
tttttcaggggaagtaccagaatatgcaaaggtttaggggcatgaagtgtagggtgatgaggaaattgaaaagagtttag

SEQ ID NO: 38708 - DNA, 80 bp, synthetic construct
  source 1..80: mol_type = other DNA
ctggggaattaatgaaaagcctgctgtaagggagtgcctattgcttccttcctcagagacatgttttaggtgggtcacca

SEQ ID NO: 38709 - DNA, 80 bp, synthetic construct
  source 1..80: mol_type = other DNA
tctgtcccacagcaaggggacccttcctccgacctggagagtatgtttgtccctagggatccctgatttgatcaagcccc

SEQ ID NO: 38710 - DNA, 80 bp, synthetic construct; identical to SEQ ID NO: 13557
  source 1..80: mol_type = other DNA

SEQ ID NO: 38711 - DNA, 80 bp, synthetic construct
  source 1..80: mol_type = other DNA
gtctctgcttgtaatcaagctgatgtttatgatggggctgttttataaagccaggcagagatgatataaggggaactgga

SEQ ID NO: 38712 - DNA, 80 bp, synthetic construct
  source 1..80: mol_type = other DNA
aaaatcttataatgtcacatggaaaggagaccgtgagctttggatcagatagctcagggtttgaatcttagctctgccat

SEQ ID NO: 38713 - DNA, 80 bp, synthetic construct; identical to SEQ ID NO: 13558
  source 1..80: mol_type = other DNA

SEQ ID NO: 38714 - DNA, 80 bp, synthetic construct
  source 1..80: mol_type = other DNA
ctggtgctgagtaagtctgtggggtggcacaggcaccagaaggctagtgagctgccttttgaattgggtgggaggagcag

SEQ ID NO: 38715 - DNA, 80 bp, synthetic construct
  source 1..80: mol_type = other DNA
ctgtcagtcacttggctgccgggatttgtcaaactgtattcatgaatttatcactccagactgtgagctgtgacacactg

SEQ ID NO: 38716 - DNA, 80 bp, synthetic construct
  source 1..80: mol_type = other DNA
ctctggtttctcagtaccccagttcaagatctatttgcgggaggcttcttggagtatggtgttcttgaagtgggagtttt

SEQ ID NO: 38717 - DNA, 80 bp, synthetic construct; identical to SEQ ID NO: 13559
  source 1..80: mol_type = other DNA

SEQ ID NO: 38718 - DNA, 80 bp, synthetic construct
  source 1..80: mol_type = other DNA
gcaggggatagtatagggcaggcttctcaacattttgggccgcacaattccttgttgtgggggtgctctcctgtgtactc

SEQ ID NO: 38719 - DNA, 80 bp, synthetic construct
  source 1..80: mol_type = other DNA
ctaagagtgcaaatgttggctgggtctggaaagtctagaagagccttggctttcaggtcaagaaagttgggactttattc

SEQ ID NO: 38720 - DNA, 80 bp, synthetic construct
  source 1..80: mol_type = other DNA
tgccctctgggcctcaactgagtggtgacatgcaccaagcaggccaagctgaaggcagtagtggctaaacaacttgtaat

SEQ ID NO: 38721 - DNA, 80 bp, synthetic construct; identical to SEQ ID NO: 13560
  source 1..80: mol_type = other DNA

SEQ ID NO: 38722 - DNA, 80 bp, synthetic construct
  source 1..80: mol_type = other DNA
gaacaaaatccttcagccagcggccaccgtttgctctgggagcattccttttgcattccttggctcctaagggaacccag

SEQ ID NO: 38723 - DNA, 80 bp, synthetic construct
  source 1..80: mol_type = other DNA
acacacacagtcctgcttgggcagctggcattttcacacttctttatcccttcactcctagaaggccagagcaggaaagg

SEQ ID NO: 38724 - DNA, 80 bp, synthetic construct
  source 1..80: mol_type = other DNA
ctgggaaggagggtgtgtttcaatgcgtttttcatccatgaaggattcctttcattgcctttttcttctttctctttagt

SEQ ID NO: 38725 - DNA, 80 bp, synthetic construct; identical to SEQ ID NO: 13561
  source 1..80: mol_type = other DNA

SEQ ID NO: 38726 - DNA, 80 bp, synthetic construct
  source 1..80: mol_type = other DNA
agcacagtgcctggaatgtaattggcactcgcttcaattgtagagtgaataaatggatgaataaatatgctttgctcatt

SEQ ID NO: 38727 - DNA, 80 bp, synthetic construct
  source 1..80: mol_type = other DNA
ctaggccttggctagcctttcatttgtggaatacttagtatatgccaggcaccttgctaagtgatttatacagattgttg

SEQ ID NO: 38728 - DNA, 80 bp, synthetic construct
  source 1..80: mol_type = other DNA
atggtcattgccaagaggtgttatgtttagtggttaaatcacaggagatctggctgcttcacctgcttccttctcacact

SEQ ID NO: 38729 - DNA, 80 bp, synthetic construct
  source 1..80: mol_type = other DNA
atggacctgggcatggctgtgcacctggatgtcaggaggcagggaggcatcactaggactcacctggggctggtggatgc

SEQ ID NO: 38730 - DNA, 80 bp, synthetic construct; identical to SEQ ID NO: 13562
  source 1..80: mol_type = other DNA

SEQ ID NO: 38731 - DNA, 80 bp, synthetic construct
  source 1..80: mol_type = other DNA
ctgttgtgtgtttgcctatggattgatgctcatagacaaacattttgggtacaagtgaagtgctgatgcttgcattttta

SEQ ID NO: 38732 - DNA, 80 bp, synthetic construct
  source 1..80: mol_type = other DNA
tgaatcaggggagagatcttggaagagtaattaatttgagcagatgtgtatcagtgtcctaggaaataaaagatgtcagt

SEQ ID NO: 38733 - DNA, 80 bp, synthetic construct
  source 1..80: mol_type = other DNA
ggtttatttaagtgttttacaggtcattaagtacttgacagagaggctttagggactggaaaactttatgttcaagctta

SEQ ID NO: 38734 - DNA, 80 bp, synthetic construct; identical to SEQ ID NO: 13563
  source 1..80: mol_type = other DNA

SEQ ID NO: 38735 - DNA, 80 bp, synthetic construct
  source 1..80: mol_type = other DNA
ctaactgaaaatcatagttcaatgcagggggcttttgagattttttatcgaatgatgtttctcttgtggactccctttct

SEQ ID NO: 38736 - DNA, 80 bp, synthetic construct
  source 1..80: mol_type = other DNA
gactggagcccctttacaccctgaactctgcaagcccgcctgacctcccacccacatgtgcccctcctgcaactctgagg

SEQ ID NO: 38737 - DNA, 80 bp, synthetic construct
  source 1..80: mol_type = other DNA
gcccaggcgggcagatcacctgaggtcaggagttcaagaccagcctgcccaacatggcgaaatcccgtctctactaaaaa

SEQ ID NO: 38738 - DNA, 80 bp, synthetic construct; identical to SEQ ID NO: 13564
  source 1..80: mol_type = other DNA

SEQ ID NO: 38739 - DNA, 80 bp, synthetic construct
  source 1..80: mol_type = other DNA
ttgcccaatcctgtggacactctgctgtcctcatcttggttctcagcagcattcgacacttccctcctccctcgagacac

SEQ ID NO: 38740 - DNA, 80 bp, synthetic construct
  source 1..80: mol_type = other DNA
tgccccccacttctctaactgtatattctctctgagtgaactcacctattgccacactttcaataccatctatacagtga

SEQ ID NO: 38741 - DNA, 80 bp, synthetic construct; identical to SEQ ID NO: 13565
  source 1..80: mol_type = other DNA

SEQ ID NO: 38742 - DNA, 80 bp, synthetic construct
  source 1..80: mol_type = other DNA
acagtagcctcctaattggtttttctccttccacttctcttgttccttgttcttcacacagcacagcattttaaaaacta

SEQ ID NO: 38743 - DNA, 80 bp, synthetic construct
  source 1..80: mol_type = other DNA
ctaggagttgaagaccagcttgggcaacatggtgagaccccgtgtcttaaaaaatatatatacaaaaattagccagtggc

SEQ ID NO: 38744 - DNA, 80 bp, synthetic construct
  source 1..80: mol_type = other DNA
atcgtaactctttgccatgccttataaggcccttgtaatgccgtatagggtatgatctggcccatctaattctccagcct

SEQ ID NO: 38745 - DNA, 80 bp, synthetic construct; identical to SEQ ID NO: 13566
  source 1..80: mol_type = other DNA

SEQ ID NO: 38746 - DNA, 80 bp, synthetic construct
  source 1..80: mol_type = other DNA
gaagagaatgtctgctggtggctgtgggaaagatgggctgccctcatacgagagtgactcgtgaagaggagatgcctgca

SEQ ID NO: 38747 - DNA, 80 bp, synthetic construct
  source 1..80: mol_type = other DNA
gataatgaatgcctttatggttccagccacatttaggaaggccgtctgttgcatgtggctgagcacatcctaaccagtat

SEQ ID NO: 38748 - DNA, 80 bp, synthetic construct
  source 1..80: mol_type = other DNA
ataaaggtttctctgctgtattattttctttatgtctgcttcttgttagtttcatccacagcccctagcacattttgaaa

SEQ ID NO: 38749 - DNA, 80 bp, synthetic construct; identical to SEQ ID NO: 13567
  source 1..80: mol_type = other DNA

SEQ ID NO: 38750 - DNA, 80 bp, synthetic construct
  source 1..80: mol_type = other DNA
ctgctctcagcaggcagagcacctcccagtctgcactgtaggcccctgattgcttttgtatttattatttctatttttcg

SEQ ID NO: 38751 - DNA, 80 bp, synthetic construct
  source 1..80: mol_type = other DNA
tagtagagacggtgtttcatcatgttggccaggctgatctcgaactcttgacctcaataatccgcccgtctcggcctccc

SEQ ID NO: 38752 - DNA, 80 bp, synthetic construct
  source 1..80: mol_type = other DNA
tctccattcttacattctagaaagggagacaggtctattaaccagtaaaaaaaatgcaacgtgatgagtgtgggaaaaga

SEQ ID NO: 38753 - DNA, 80 bp, synthetic construct; identical to SEQ ID NO: 13568
  source 1..80: mol_type = other DNA

SEQ ID NO: 38754 - DNA, 80 bp, synthetic construct
  source 1..80: mol_type = other DNA
gccatattggctcactgcaacctccgcctcctgggttcaagtgattctcctgcctcagcctgccgagtggctgggattac

SEQ ID NO: 38755 - DNA, 80 bp, synthetic construct
  source 1..80: mol_type = other DNA
agatttgtgttccatccagttctcccctcacttggggcttctatatatgtaagcactgggggcctcaggacccctggctt

SEQ ID NO: 38756 - DNA, 80 bp, synthetic construct
  source 1..80: mol_type = other DNA
gctgggtgacggggcaagtgccttcccaccatgatgaggagatgatgtttcccgcagagggttctggggaggatgcagtg

SEQ ID NO: 38757 - DNA, 80 bp, synthetic construct
  source 1..80: mol_type = other DNA
ggcaggcagcagagtctcagtgtcacataaaggcaatttctctagctgattctttttaaagaacaaaaagcaaattgcct

SEQ ID NO: 38758 - DNA, 80 bp, synthetic construct; identical to SEQ ID NO: 13569
  source 1..80: mol_type = other DNA

SEQ ID NO: 38759 - DNA, 80 bp, synthetic construct
  source 1..80: mol_type = other DNA
ttactgcttgatggaatgaataaagacgtcatgttttctgcattttacttagagagttgctgatgcggtgaatgttggat

SEQ ID NO: 38760 - DNA, 80 bp, synthetic construct
  source 1..80: mol_type = other DNA
gggccccttctgttctttccactcttctggaatcaaggtggaagatgccttgaccatcgaatttgactgattaaaaaaga

SEQ ID NO: 38761 - DNA, 80 bp, synthetic construct
  source 1..80: mol_type = other DNA
gaggctcacagagttagtgtcttgcccaaggtcatctggatagcaggtagcagaacggtggtttgaattcaacctccagt

SEQ ID NO: 38762 - DNA, 80 bp, synthetic construct; identical to SEQ ID NO: 13570
  source 1..80: mol_type = other DNA

SEQ ID NO: 38763 - DNA, 80 bp, synthetic construct
  source 1..80: mol_type = other DNA
ccatgtagatgtagatatccattcttcctctttgaaagtaactgagctggcttggaccctgtctatcttgcagaagaggg

SEQ ID NO: 38764 - DNA, 80 bp, synthetic construct
  source 1..80: mol_type = other DNA
gcctgcaggaacgaggaaggctttgtggtcattctgcgttactgcaaagggtaacacccactcttcaaaggccatttcac

SEQ ID NO: 38765 - DNA, 80 bp, synthetic construct; identical to SEQ ID NO: 13571
  source 1..80: mol_type = other DNA

SEQ ID NO: 38766 - DNA, 80 bp, synthetic construct
  source 1..80: mol_type = other DNA
tttccgccgttatctgggagatgaagaccagagggttttaggccctttgaaggaaggaacggttcagaagaatgagtcag

SEQ ID NO: 38767 - DNA, 80 bp, synthetic construct
  source 1..80: mol_type = other DNA
tcagaggtttgtgaaaaccagtttcaaggctgccagctttgggtattcctggggtgtgggcctcagttccaggttgccct

SEQ ID NO: 38768 - DNA, 80 bp, synthetic construct
  source 1..80: mol_type = other DNA
aagaaaggcttttggtgtctcttgcagccagagtatgtttgaacattagaggctggttttaggtttgacgctttctcatg

SEQ ID NO: 38769 - DNA, 80 bp, synthetic construct
  source 1..80: mol_type = other DNA
ctggcagccctgattcaggtgtgtttggggaaagggaaaggtgagaccttcaatgtgggagcccctaaggcctgcagaaa

SEQ ID NO: 38770 - DNA, 80 bp, synthetic construct; identical to SEQ ID NO: 13572
  source 1..80: mol_type = other DNA

SEQ ID NO: 38771 - DNA, 80 bp, synthetic construct
  source 1..80: mol_type = other DNA
tgttctgctctttgaacagagggctgaggagggatgctggtctttgttttcctcccacagtcaggactggaggagatcct

SEQ ID NO: 38772 - DNA, 80 bp, synthetic construct
  source 1..80: mol_type = other DNA
aaggggtaaatctgtagctttgttctgattctcaaagaggtcagtgaccttcaaaaagattaagaactcatgagaggctg

SEQ ID NO: 38773 - DNA, 80 bp, synthetic construct; identical to SEQ ID NO: 13573
  source 1..80: mol_type = other DNA

SEQ ID NO: 38774 - DNA, 80 bp, synthetic construct
  source 1..80: mol_type = other DNA
acttgaggtcaggagtttgagaccagcctggccaatatggtgaaacctcatctctagtaaaaatacaaaaattagccagg

SEQ ID NO: 38775 - DNA, 80 bp, synthetic construct
  source 1..80: mol_type = other DNA
cccaaaagaaccttgtccaggaaggtctacacagggcaagtgacttgatgattcaattcacatagcacattagtggctgt

SEQ ID NO: 38776 - DNA, 80 bp, synthetic construct
  source 1..80: mol_type = other DNA
taagttggaatcactcccagaagtaaaggggctgagatgagcaaaataaataaggaataagtaggctcaacgtgtggggg

SEQ ID NO: 38777 - DNA, 80 bp, synthetic construct; identical to SEQ ID NO: 13574
  source 1..80: mol_type = other DNA

SEQ ID NO: 38778 - DNA, 80 bp, synthetic construct
  source 1..80: mol_type = other DNA
cccagccaggtaccccggggctgccttccccgggctctcatcctcctctttcatccagcggctccttacagtatagttca

SEQ ID NO: 38779 - DNA, 80 bp, synthetic construct
  source 1..80: mol_type = other DNA
ttgctattctcaactgattgagtttttgttcctggagccaatctccatttagtggacaaacagagccctataggaattga

SEQ ID NO: 38780 - DNA, 80 bp, synthetic construct
  source 1..80: mol_type = other DNA
ctagaaattccctcaggctcacctcatttcaatccttttggacaggcattgataacccattttgcagatgagtaaaccaa

SEQ ID NO: 38781 - DNA, 80 bp, synthetic construct
  source 1..80: mol_type = other DNA
agttccgattgaaggcctatctgggtatgagggtatctgtctcgccttagttttctggctgcattttcgttagtatcttc

SEQ ID NO: 38782 - DNA, 80 bp, synthetic construct; identical to SEQ ID NO: 13575
  source 1..80: mol_type = other DNA

SEQ ID NO: 38783 - DNA, 80 bp, synthetic construct
  source 1..80: mol_type = other DNA
agagctgaggtcacaaatggggagactgagtcccactggcagataggtcatgtgcagacatgctgctgttttgtttggct

SEQ ID NO: 38784 - DNA, 80 bp, synthetic construct
  source 1..80: mol_type = other DNA
agagtgtgaatctgcacatctctccctgattctgccttcagtgacatcaggctggcagcttgaaattggccatcttgggt

SEQ ID NO: 38785 - DNA, 80 bp, synthetic construct
  source 1..80: mol_type = other DNA
gccctcctttgaaaactctctccagtttgtactaggcatgatcatccaccttgctttatttaaatcagtctcatttacgc

SEQ ID NO: 38786 - DNA, 80 bp, synthetic construct; identical to SEQ ID NO: 13576
  source 1..80: mol_type = other DNA

SEQ ID NO: 38787 - DNA, 80 bp, synthetic construct
  source 1..80: mol_type = other DNA
ggatcacgaggtcaggagatcgagaccatcctggctaacacggtgaaaccccgtctctactaaaaatacaaaaaaaatta

SEQ ID NO: 38788 - DNA, 80 bp, synthetic construct
  source 1..80: mol_type = other DNA
tgggcgacagagcgagactccttctcaaaaaaaaaaaaaaaaaaaaaaaaaagaatgatctgccccccttcgtttggaag

SEQ ID NO: 38789 - DNA, 80 bp, synthetic construct
  source 1..80: mol_type = other DNA
attgcttttcctatctcaggaaggcatgaactaaataaaggtaacactcatcttggtcaggaatggggaagcaccgtttg

SEQ ID NO: 38790 - DNA, 80 bp, synthetic construct
  source 1..80: mol_type = other DNA
atcgcccagcagtgggaactgtgacctgaagacaaatacagacaggggaggatttcatgagaaaagagaacatgggagtg

SEQ ID NO: 38791 - DNA, 80 bp, synthetic construct; identical to SEQ ID NO: 13577
  source 1..80: mol_type = other DNA

SEQ ID NO: 38792 - DNA, 80 bp, synthetic construct
  source 1..80: mol_type = other DNA
ccgagtagccgggaccactggtgtgcaccaccgtacctgcctaatttttaatgttgcccaggctggtcttgaactcctgg

SEQ ID NO: 38793 - DNA, 80 bp, synthetic construct
  source 1..80: mol_type = other DNA
agtgatggctgttaaatatcaaaacgagtatttgagggaggctaggcaccagcatcactcatgcaataaagtgtttgaag

SEQ ID NO: 38794 - DNA, 80 bp, synthetic construct; identical to SEQ ID NO: 13578
  source 1..80: mol_type = other DNA

SEQ ID NO: 38795 - DNA, 80 bp, synthetic construct
  source 1..80: mol_type = other DNA
gttgtccatggcttttgctgcaagagcttcctctttcagtccaaattctacatgggttgtggttctaccttgtgtcaggg

SEQ ID NO: 38796 - DNA, 80 bp, synthetic construct
  source 1..80: mol_type = other DNA
gcaagagggatcatgggtcagggaagctgcttaaatggaattccaaaggaagttacagggttttggtaggatggagaaag

SEQ ID NO: 38797 - DNA, 80 bp, synthetic construct
  source 1..80: mol_type = other DNA
aaatgatacccttcaggtgcagacacttgaaaaagttcatctgcttggtgcttgatttatcattcaaaccttcagtaact

SEQ ID NO: 38798 - DNA, 80 bp, synthetic construct
  source 1..80: mol_type = other DNA
gaatatcgcattttgatatgttttgacgcctcatttgccactgaagtcaaggacagattcacgtttttcatggcatgggg

SEQ ID NO: 38799 - DNA, 80 bp, synthetic construct; identical to SEQ ID NO: 13579
  source 1..80: mol_type = other DNA

SEQ ID NO: 38800 - DNA, 80 bp, synthetic construct
  source 1..80: mol_type = other DNA
tccattcatctgctcatgctggcaactgaggtttaagaagcacctactaagtgttagatactgagctaggccctggggat

SEQ ID NO: 38801 - DNA, 80 bp, synthetic construct
  source 1..80: mol_type = other DNA
gagctcaggcttcagctaagaatgagtttgcagatggccgaggaggataagggcgttccagtcagggcgtgctgctggag

SEQ ID NO: 38802 - DNA, 80 bp, synthetic construct
  source 1..80: mol_type = other DNA
ggtctcctggagatggcaagggaatgccacaattcattggatgagaggatggtttggagcagggcaagaccagaggcaag

SEQ ID NO: 38803 - DNA, 80 bp, synthetic construct
  source 1..80: mol_type = other DNA
aaatgacttgtattgtaacgggtttggttgaggggcgatcatgggaatcagcaatggcacagtgaggcagggaggggcac

SEQ ID NO: 38804 - DNA, 80 bp, synthetic construct; identical to SEQ ID NO: 13580
  source 1..80: mol_type = other DNA

SEQ ID NO: 38805 - DNA, 80 bp, synthetic construct
  source 1..80: mol_type = other DNA
cccagattgtgtcacttatagtcacttaagaagagcagagagcagatgagagaggaaagagctgggaaacacaggaattt

SEQ ID NO: 38806 - DNA, 80 bp, synthetic construct
  source 1..80: mol_type = other DNA
attggaaaagacagtggctgccgagaggagtcaaatcaggtgagggtggaaaagctttcgctgggcaatgaggaggtcat

SEQ ID NO: 38807 - DNA, 80 bp, synthetic construct
  source 1..80: mol_type = other DNA
ggaagtgtcaaggtcaaagtggcattttagaagatgattctggaaaaggtgtgtaaggtcagagataggagaggctgagg

SEQ ID NO: 38808 - DNA, 80 bp, synthetic construct; identical to SEQ ID NO: 13581
  source 1..80: mol_type = other DNA

SEQ ID NO: 38809 - DNA, 80 bp, synthetic construct
  source 1..80: mol_type = other DNA
gaggaagcagtgaccccccttctaagttgtgagactcacaagaatgatgcctttcaaagcactgtgtaggttgtgatgaa

SEQ ID NO: 38810 - DNA, 80 bp, synthetic construct
  source 1..80: mol_type = other DNA
ccttcttcaaggtggataggcctggctggctggcggcctgtggatacaaaagtgacctgccagcaggagcctttttttct

SEQ ID NO: 38811 - DNA, 80 bp, synthetic construct
  source 1..80: mol_type = other DNA
gaagtttggattgcacaattgtggggtaatgacattttaattgcatgtcatatttagtctggctcaatctgaagcctggg

SEQ ID NO: 38812 - DNA, 80 bp, synthetic construct; identical to SEQ ID NO: 13582
  source 1..80: mol_type = other DNA

SEQ ID NO: 38813 - DNA, 80 bp, synthetic construct
  source 1..80: mol_type = other DNA
cattttccccctttcccctttcccaaaggtagctttccctacctttgtttttccctctctgctttcccttttcccccatc

SEQ ID NO: 38814 - DNA, 80 bp, synthetic construct
  source 1..80: mol_type = other DNA
cacctgcctggctaatttttgtatttttagtacagatgcggtttcaccatgttggccaggctggtctcgaactcctgacc

SEQ ID NO: 38815 - DNA, 80 bp, synthetic construct; identical to SEQ ID NO: 13583
  source 1..80: mol_type = other DNA

SEQ ID NO: 38816 - DNA, 80 bp, synthetic construct
  source 1..80: mol_type = other DNA
tgtttttatggcgatgctcggagcaggagtctctcattccacaatacaggtggaggcctggactgcctattatgatccgt

SEQ ID NO: 38817 - DNA, 80 bp, synthetic construct
  source 1..80: mol_type = other DNA
gtggcataatgaagacaaaatatacactcagagatgagattgtttattcttgtgtgcagcactcctggatgccaaccccc

SEQ ID NO: 38818 - DNA, 80 bp, synthetic construct
  source 1..80: mol_type = other DNA
tggagtctgtgagagaccagatggtaggggacactgtcattcaggagtggcatgcccagaagacagtgcagcatgttctt

SEQ ID NO: 38819 - DNA, 80 bp, synthetic construct; identical to SEQ ID NO: 13584
  source 1..80: mol_type = other DNA

SEQ ID NO: 38820 - DNA, 80 bp, synthetic construct
  source 1..80: mol_type = other DNA
ccagtgagcggacaagactttgatttggattgacagctcgaggcagaaccaggagagggtcagctcaccttcgttcagcc

SEQ ID NO: 38821 - DNA, 80 bp, synthetic construct
  source 1..80: mol_type = other DNA
attactggatgtgtggctgtgagaaagtggtttcatctcttcgggccttagtatctccatctgtcaaagaggaacaataa

SEQ ID NO: 38822 - DNA, 80 bp, synthetic construct
  source 1..80: mol_type = other DNA
acagtttctggcaaaagacaaggaaggcgctcaaaaaatggtgataatggtgtatcataattgttactgttatcatcatg

SEQ ID NO: 38823 - DNA, 80 bp, synthetic construct
  source 1..80: mol_type = other DNA
cactcctgtgtgtggtataacccttcatccatctcttgttggtggagtttgcttgtctctctcccccatctgcctataag

SEQ ID NO: 38824 - DNA, 80 bp, synthetic construct; identical to SEQ ID NO: 13585
  source 1..80: mol_type = other DNA

SEQ ID NO: 38825 - DNA, 80 bp, synthetic construct
  source 1..80: mol_type = other DNA
ttctgtaccgctcctgtaatacttaattcattcttctcctgacatgcttgtcatactttaccttgtcctgtatcacttac

SEQ ID NO: 38826 - DNA, 80 bp, synthetic construct
  source 1..80: mol_type = other DNA
ttgtagtgtggaagcctgttcagctgttatctcattgtaatgctagtttttctcattatccattctacattccgtgagag

SEQ ID NO: 38827 - DNA, 80 bp, synthetic construct
  source 1..80: mol_type = other DNA
aaaaaaaaatcttattagccttgttaaggggtgccaacatttgaaagaattgactaagcctgagtccctatgatgaaacg

SEQ ID NO: 38828 - DNA, 80 bp, synthetic construct
  source 1..80: mol_type = other DNA
ttgacactagaagttgtcagtgtagccctcattatcgggctactttgtggtggatgggaactggctttggggctttgtct

SEQ ID NO: 38829 - DNA, 80 bp, synthetic construct; identical to SEQ ID NO: 13586
  source 1..80: mol_type = other DNA

SEQ ID NO: 38830 - DNA, 80 bp, synthetic construct
  source 1..80: mol_type = other DNA
gctgctgcttagctgattggccttgggtaagttcctcacactttctgtttcttcttctcttgtgtggggtatcataataa

SEQ ID NO: 38831 - DNA, 80 bp, synthetic construct
  source 1..80: mol_type = other DNA
tgtctgcttaattagctgatgttgataagagctttggagatacaaagctcttgataagagctaatccccttaatctgtgt

SEQ ID NO: 38832 - DNA, 80 bp, synthetic construct
  source 1..80: mol_type = other DNA
catgcctcagatggagcttggaggagatgccctccgtgtttttccatccccaaaatgctgtgattctatccttgattgga

SEQ ID NO: 38833 - DNA, 80 bp, synthetic construct; identical to SEQ ID NO: 13587
  source 1..80: mol_type = other DNA

SEQ ID NO: 38834 - DNA, 80 bp, synthetic construct
  source 1..80: mol_type = other DNA
tgttttgactcagcaatgggcaatctgttttctcccaggagtttggtcttaaccttaggttatcaattggttcaccctgc

SEQ ID NO: 38835 - DNA, 80 bp, synthetic construct
  source 1..80: mol_type = other DNA
aagacagaagtaagtgcaagtggttatgtggttggtggtcctgggaaccacacagaaagggggttatggttttttaaaag

SEQ ID NO: 38836 - DNA, 80 bp, synthetic construct
  source 1..80: mol_type = other DNA
gctagggtctagcacttggggcctgtcccatgtgcatgggctgcatgagctccagagaccagaaagttcttggatgagac

SEQ ID NO: 38837 - DNA, 80 bp, synthetic construct; identical to SEQ ID NO: 13588
  source 1..80: mol_type = other DNA

SEQ ID NO: 38838 - DNA, 80 bp, synthetic construct
  source 1..80: mol_type = other DNA
gcgggcgcttgtagtcccagctactcgggaggctgaggcaggagaatggtgtgaacccaggaggcggagcttgcagtgag

SEQ ID NO: 38839 - DNA, 80 bp, synthetic construct
  source 1..80: mol_type = other DNA
tctgtgtatctcatcttggtccttttgatatcccatgaagcaggtgttgttattcttgtttgctatttgaggcaactgag

SEQ ID NO: 38840 - DNA, 80 bp, synthetic construct
  source 1..80: mol_type = other DNA
gtgggcctcctgtgtatagacaccaaaaataagattcaatccaactaaaagcctgttaattatgccccaaaaatatggat

SEQ ID NO: 38841 - DNA, 80 bp, synthetic construct
  source 1..80: mol_type = other DNA
cagctctggcttgtcactctttttgtcccagggagcccctagagacctctcagtaatgcattctacctactgggcttggc

SEQ ID NO: 38842 - DNA, 80 bp, synthetic construct; identical to SEQ ID NO: 13589
  source 1..80: mol_type = other DNA

SEQ ID NO: 38843 - DNA, 80 bp, synthetic construct
  source 1..80: mol_type = other DNA
ttagatcaatctaagagaccttggattctgccagtcctaggcacttcataaaatccctggccttacatctttgttggggt

SEQ ID NO: 38844 - DNA, 80 bp, synthetic construct
  source 1..80: mol_type = other DNA
gtagaatgggccatgatggattgtgaccactcagcttgtgggtcaataatccctttactaagagatccgcaggtgcacct

SEQ ID NO: 38845 - DNA, 80 bp, synthetic construct
  source 1..80: mol_type = other DNA
cattatcttcagacggaagctggatactttggtctggaagatttgaccctaggctattcagccaggatggatggaatagg

SEQ ID NO: 38846 - DNA, 80 bp, synthetic construct; identical to SEQ ID NO: 13590
  source 1..80: mol_type = other DNA

SEQ ID NO: 38847 - DNA, 80 bp, synthetic construct
  source 1..80: mol_type = other DNA
taagaggcttaaaagcctctgctagaatgatcaaagagggttccaggatggcagtggacaggtgtgactggagcaaaaag

SEQ ID NO: 38848 - DNA, 80 bp, synthetic construct
  source 1..80: mol_type = other DNA
taagaaccgcagtcagctctatacagcagggctatgtctgctttgctttccattgttttcttagtacctagcttaggtac

SEQ ID NO: 38849 - DNA, 80 bp, synthetic construct
  source 1..80: mol_type = other DNA
cttgagtgcaatggcacgatctcagctcactgcagcctcagcctcgcaggcccaagtgatcctcccatctcagcctcctg

SEQ ID NO: 38850 - DNA, 80 bp, synthetic construct; identical to SEQ ID NO: 13591
  source 1..80: mol_type = other DNA

SEQ ID NO: 38851 - DNA, 80 bp, synthetic construct
  source 1..80: mol_type = other DNA
aataataatgaaaattggtatcgggagtggggtattgctataaagatacctgaaaatgtggaagcaactttggaactggg

SEQ ID NO: 38852 - DNA, 80 bp, synthetic construct
  source 1..80: mol_type = other DNA
tggaaactggagtaaaaggtcacttttactatgtcttagcaaagagcctggcttcctagtgtccctgttctagggatttg

SEQ ID NO: 38853 - DNA, 80 bp, synthetic construct; identical to SEQ ID NO: 13592
  source 1..80: mol_type = other DNA

SEQ ID NO: 38854 - DNA, 80 bp, synthetic construct
  source 1..80: mol_type = other DNA
ctaggaggacataatggtgtcgtgggccaggcccagggccctgctgccttgcacagcatcaggacactgttccatacagc

SEQ ID NO: 38855 - DNA, 80 bp, synthetic construct
  source 1..80: mol_type = other DNA
tggaggatgtatggaaaagcctattggtctagggagaagcttgctgcagggttggagccctcatggagaacctctacgag

SEQ ID NO: 38856 - DNA, 80 bp, synthetic construct
  source 1..80: mol_type = other DNA
cccttgaaatccactgtgggggctgaaccctgcagagccacaagaggagagctgcttaaggccttgggagcccacccctt

SEQ ID NO: 38857 - DNA, 80 bp, synthetic construct
  source 1..80: mol_type = other DNA
cctatacccccattgcatcttggaagtaactaacttgtttttgattttacaggctcataggcagaagagacttcctttat

SEQ ID NO: 38858 - DNA, 80 bp, synthetic construct; identical to SEQ ID NO: 13593
  source 1..80: mol_type = other DNA

SEQ ID NO: 38859 - DNA, 80 bp, synthetic construct
  source 1..80: mol_type = other DNA
agcagatgctactgtgcttcctgtacagcctgcagaactgtaagctaattaaatctcttttcatcataaattacccagtc

SEQ ID NO: 38860 - DNA, 80 bp, synthetic construct
  source 1..80: mol_type = other DNA
aacctgtgtgtaaaatacgtgcatacttttgatagcacatgtgaaggtacctctctaaaactggcctcattggtttcgtt

SEQ ID NO: 38861 - DNA, 80 bp, synthetic construct; identical to SEQ ID NO: 13594
  source 1..80: mol_type = other DNA

SEQ ID NO: 38862 - DNA, 80 bp, synthetic construct
  source 1..80: mol_type = other DNA
gcacagactaatacagatggggtctccctatgttgttcaggctggtctcaaactcctgggctcaagggatcctcctgcct

SEQ ID NO: 38863 - DNA, 80 bp, synthetic construct
  source 1..80: mol_type = other DNA
tattactagtactgctaccacccccactgtcactattatttccccactgacaactatcagacactacttattgggcatgc

SEQ ID NO: 38864 - DNA, 80 bp, synthetic construct
  source 1..80: mol_type = other DNA
cctaattctaacccaagtcagcctgactccaaaacctatatcctcagccattatttaatcttcggggatgggtggttcag

SEQ ID NO: 38865 - DNA, 80 bp, synthetic construct
  source 1..80: mol_type = other DNA
gatgatcttgacaaccttctccttagttaagcctttcacacagtccattttctccaatcagctgagtgtttgaaggcctg

SEQ ID NO: 38866 - DNA, 80 bp, synthetic construct; identical to SEQ ID NO: 13595
  source 1..80: mol_type = other DNA

SEQ ID NO: 38867 - DNA, 80 bp, synthetic construct
  source 1..80: mol_type = other DNA
cttagactgggagttccaagatggagtctagtcttatctcaagcatgtactaactatgtaaacttgccaagtcacagttc

SEQ ID NO: 38868 - DNA, 80 bp, synthetic construct
  source 1..80: mol_type = other DNA
tttgggccttattttcttcctttctaaagtgaaggcacttaattgcatgattttagtcagttttgacatactgtcatccg

SEQ ID NO: 38869 - DNA, 80 bp, synthetic construct
  source 1..80: mol_type = other DNA
gctggagtccggtggtgcaatctcagctcattgcaacctccacctcctgggttcaagcgattctcctgcctcagcctccc

SEQ ID NO: 38870 - DNA, 80 bp, synthetic construct
  source 1..80: mol_type = other DNA
gcaccgcccccggccttattattatttttaactgtgacaaatgtgcaaccaccaccaacactgggatgtggtacatttaa

SEQ ID NO: 38871 - DNA, 80 bp, synthetic construct; identical to SEQ ID NO: 13596
  source 1..80: mol_type = other DNA

SEQ ID NO: 38872 - DNA, 80 bp, synthetic construct
  source 1..80: mol_type = other DNA
gcatgccctgatagttcttattttctttgcttttggctttctcttttgggagtgtcattattgtattagtttcctgtggc

SEQ ID NO: 38873 - DNA, 80 bp, synthetic construct
  source 1..80: mol_type = other DNA
ggctttagctggtctttgctgcagtctctgcctctgtggtcacgctgccccctcctcttctctgtgtgtctgtcctacgg

SEQ ID NO: 38874 - DNA, 80 bp, synthetic construct
  source 1..80: mol_type = other DNA
tgaatttttacagattcagtgtatttcagtcagttctcctaactattctttttgcatctcaaattgtcccatctttggcc

SEQ ID NO: 38875 - DNA, 80 bp, synthetic construct; identical to SEQ ID NO: 13597
  source 1..80: mol_type = other DNA

SEQ ID NO: 38876 - DNA, 80 bp, synthetic construct
  source 1..80: mol_type = other DNA
ttgtgtgttcctgacccccaaccaggaattcctccaagtcaccctgatttctttcagtaggaaatgacatttctgttatt

SEQ ID NO: 38877 - DNA, 80 bp, synthetic construct
  source 1..80: mol_type = other DNA
ctttctttactttcttcataaatttaggaaattccttcccatcagaaagtgaggtaccctcaaaggcagggtcacgtgtt

SEQ ID NO: 38878 - DNA, 80 bp, synthetic construct
  source 1..80: mol_type = other DNA
cccttactcttcttcctcccccttccctcttcctcctccctctccctcttcctcctcccctttccgccctgcctctctcc

SEQ ID NO: 38879 - DNA, 80 bp, synthetic construct; identical to SEQ ID NO: 13598
  source 1..80: mol_type = other DNA

SEQ ID NO: 38880 - DNA, 80 bp, synthetic construct
  source 1..80: mol_type = other DNA
ctttggtggctatcccatcccctttggcctcctccttgtcccatagccactctctactctgagtagctgtaggtgctcct

SEQ ID NO: 38881 - DNA, 80 bp, synthetic construct
  source 1..80: mol_type = other DNA
cattctctagagcaccttgggaattgctctcaacctgttcttcctcttcctccattagcgtagatcctcatttctttctt

SEQ ID NO: 38882 - DNA, 80 bp, synthetic construct; identical to SEQ ID NO: 13599
  source 1..80: mol_type = other DNA

SEQ ID NO: 38883 - DNA, 80 bp, synthetic construct
  source 1..80: mol_type = other DNA
gcacctgtagtcccagctactcgggaggctgaggcgggagaattgcttgaaccaggaggtggaggttgcagtgagccaag

SEQ ID NO: 38884 - DNA, 80 bp, synthetic construct
  source 1..80: mol_type = other DNA
gagaagaagcagaaaggagggagagcagagccgggggaggcggagagagaagggccatgatgtgaagcagcagctggcca

SEQ ID NO: 38885 - DNA, 80 bp, synthetic construct
  source 1..80: mol_type = other DNA
ggaaacattttggtctgggtctcggtgggcagaagtcattgctggcttttgtgctcttcccttcttacccctggctccaa

SEQ ID NO: 38886 - DNA, 80 bp, synthetic construct; identical to SEQ ID NO: 13600
  source 1..80: mol_type = other DNA

SEQ ID NO: 38887 - DNA, 80 bp, synthetic construct
  source 1..80: mol_type = other DNA
gtcacataaaaatattatgtacatgtatctctttgagtccttagagctgctattagtctagagggctgtcagcagcccag

SEQ ID NO: 38888 - DNA, 80 bp, synthetic construct
  source 1..80: mol_type = other DNA
agatgcgacctcagaaagaacttggaaccattttacctgctttaactggctcggcacactttattggagggaaactgatg

SEQ ID NO: 38889 - DNA, 80 bp, synthetic construct
  source 1..80: mol_type = other DNA
ggtgcactcaagtctcaagctcaccttgatccgtgctttccccagggaacagtagtctcctaggcatcccggagctcatt

SEQ ID NO: 38890 - DNA, 80 bp, synthetic construct; identical to SEQ ID NO: 13601
  source 1..80: mol_type = other DNA

SEQ ID NO: 38891 - DNA, 80 bp, synthetic construct
  source 1..80: mol_type = other DNA
ctgttcttgagagccccggtctgtgtgtctggggttgcacagctcagtgtccctctgtgtcaccagcccactttatctac

SEQ ID NO: 38892 - DNA, 80 bp, synthetic construct
  source 1..80: mol_type = other DNA
ttcccggtcctctccaaaggagaagccacacagcgcagtgcaaggagagcaccaggctaggagtggaaacctggcttctg

SEQ ID NO: 38893 - DNA, 80 bp, synthetic construct
  source 1..80: mol_type = other DNA
caccaggctgggaggtggaatgagcccggcagttcctggagacagtggtttcctggggcccaggaggcaggccctgctgg

SEQ ID NO: 38894 - DNA, 80 bp, synthetic construct; identical to SEQ ID NO: 13602
  source 1..80: mol_type = other DNA

SEQ ID NO: 38895 - DNA, 80 bp, synthetic construct
  source 1..80: mol_type = other DNA
gaatgctcactatgaagatggtgagaggcaatgtatatgaagctctttgaaaggcacaaagggctgtatgagtgtcagcc

SEQ ID NO: 38896 - DNA, 80 bp, synthetic construct
  source 1..80: mol_type = other DNA
gattggagtgctattttcttctatgcttggaggaatcatcaattttgccccagaaatatatctttagccatggtcccagg

SEQ ID NO: 38897 - DNA, 80 bp, synthetic construct
  source 1..80: mol_type = other DNA
cctgaagccaggagctgtgctcccgagggccctcctgacaacatgcgccttgtgcagagagggatagccatggaaaggtt

SEQ ID NO: 38898 - DNA, 80 bp, synthetic construct; identical to SEQ ID NO: 13603
  source 1..80: mol_type = other DNA

SEQ ID NO: 38899 - DNA, 80 bp, synthetic construct
  source 1..80: mol_type = other DNA
tagtcagggagatgaaatcaccaccgagcaaggcggcagaaggaggcacgcggccgctgatggagcggcacagccattca

SEQ ID NO: 38900 - DNA, 80 bp, synthetic construct
  source 1..80: mol_type = other DNA
tctgagtttgaatcctgtctataccatgaaatatccatgtggccttgacaatttcccttcctatgtgagcttcagtttct

SEQ ID NO: 38901 - DNA, 80 bp, synthetic construct
  source 1..80: mol_type = other DNA
aggttgtttgagggttaaatgaaataaaatgtgaactacctagggccaaggttgttccgagtacacgcatattcagaaca

SEQ ID NO: 38902 - DNA, 80 bp, synthetic construct; identical to SEQ ID NO: 13604
  source 1..80: mol_type = other DNA

SEQ ID NO: 38903 - DNA, 80 bp, synthetic construct
  source 1..80: mol_type = other DNA
gaggcatctgcccaccccctcgggaatctgacattttgtctgcaccagggcaggggcctctctgctgacggggcctgtcc

SEQ ID NO: 38904 - DNA, 80 bp, synthetic construct
  source 1..80: mol_type = other DNA
gggtctaggagtccttctgagctccttctgcaagtaaagtggctggaagggtttcctctcttcctgcctagcccagccca

SEQ ID NO: 38905 - DNA, 80 bp, synthetic construct
  source 1..80: mol_type = other DNA
actcagacaaaagactgcctgaccattttgtggtgtgtttctgaaagcagaaagaaacatgcttgaagaagagcagtgaa

SEQ ID NO: 38906 - DNA, 80 bp, synthetic construct
  source 1..80: mol_type = other DNA
tctgctgatggttcttagcagcagccatctccagcctttcctgctctgccaggaaaaagtgaaatgcaaagaaaagcaga

SEQ ID NO: 38907 - DNA, 80 bp, synthetic construct; identical to SEQ ID NO: 13605
  source 1..80: mol_type = other DNA

SEQ ID NO: 38908 - DNA, 80 bp, synthetic construct
  source 1..80: mol_type = other DNA
cgagcggttaagaatggtgggctgcacagtgctggtggtcctgggtctggctctatctctgtcatttacaagctgggtca

SEQ ID NO: 38909 - DNA, 80 bp, synthetic construct
  source 1..80: mol_type = other DNA
attgtaatgatcattgtcgtcatttcattgtatctcctagttctgacagtgttggctctgcagctcaatggggattccca

SEQ ID NO: 38910 - DNA, 80 bp, synthetic construct
  source 1..80: mol_type = other DNA
tactaaagcatcgatgcccagtgtaggtggttgtgtcatccagggccaggcctccgagtcgatgggagcctcttaaggtc

SEQ ID NO: 38911 - DNA, 80 bp, synthetic construct; identical to SEQ ID NO: 13606
  source 1..80: mol_type = other DNA

SEQ ID NO: 38912 - DNA, 80 bp, synthetic construct
  source 1..80: mol_type = other DNA
gaacaccaacttggagtcaggtgatcccaggtttgaagtccagcatgatcatatactgttgagcagtcaggggcaagctc

SEQ ID NO: 38913 - DNA, 80 bp, synthetic construct
  source 1..80: mol_type = other DNA
tgaatgggatgtgtgcccttgtataagagaccccagagagcttgctctctctttccaccatgtgaagatacaagaagctg

SEQ ID NO: 38914 - DNA, 80 bp, synthetic construct; identical to SEQ ID NO: 13607
  source 1..80: mol_type = other DNA

SEQ ID NO: 38915 - DNA, 80 bp, synthetic construct
  source 1..80: mol_type = other DNA
aggtatgagatatagaagtctaacacttgtccccgtttgtcccagccaccttcttcctgctcttgcagctccatttatct

SEQ ID NO: 38916 - DNA, 80 bp, synthetic construct
  source 1..80: mol_type = other DNA
gctcagagttgataagcccttctccaccactggggagactggagtgtgcttctctgctgtagaggaacacccagcttggg

SEQ ID NO: 38917 - DNA, 80 bp, synthetic construct
  source 1..80: mol_type = other DNA
taacagatgaggaaacttagaaggcacatggttcacccaggcacacaaacagatgatggcaccttggtcatctgatccta

SEQ ID NO: 38918 - DNA, 80 bp, synthetic construct; identical to SEQ ID NO: 13608
  source 1..80: mol_type = other DNA

SEQ ID NO: 38919 - DNA, 80 bp, synthetic construct
  source 1..80: mol_type = other DNA
gctttgaaagcctttgacttagacattgtcaggacgttgctctgtgtctgaagctaggctgccatatctgctattgatgg

SEQ ID NO: 38920 - DNA, 80 bp, synthetic construct
  source 1..80: mol_type = other DNA
agttggcttttttaagtaaagagggaaatgaaagccacaggtcccctcaaatgaaaggggatgggctgtgttagcattag

SEQ ID NO: 38921 - DNA, 80 bp, synthetic construct
  source 1..80: mol_type = other DNA
tggagattttttgagataagggccctgcttgcggcacatctcccagtgggatgtgtgaaagacgattgcaaacctctgag

SEQ ID NO: 38922 - DNA, 80 bp, synthetic construct; identical to SEQ ID NO: 13609
  source 1..80: mol_type = other DNA

SEQ ID NO: 38923 - DNA, 80 bp, synthetic construct
  source 1..80: mol_type = other DNA
ttagttgttgaacatgacagctaacgtgtgctgagaccctactcagtgccagggctatgcctgaagttctgcagcaaaca

SEQ ID NO: 38924 - DNA, 80 bp, synthetic construct
  source 1..80: mol_type = other DNA
tcgccttggcctttctggaaggagccctcccagacaccaaagactctcccagcctgccggcctgcctaccccagactctt

SEQ ID NO: 38925 - DNA, 80 bp, synthetic construct
  source 1..80: mol_type = other DNA
gagttctcaagagaccctcgtgggcaggagggggcgattcaccttgccagggcttcccttcctcctctctgccaatcttc

SEQ ID NO: 38926 - DNA, 80 bp, synthetic construct
  source 1..80: mol_type = other DNA
gagaagacagaccagggaggccagaggaccttgagcagctatggggcttgtttcttgccttctttccgttttccagacag

SEQ ID NO: 38927 - DNA, 80 bp, synthetic construct; identical to SEQ ID NO: 13610
  source 1..80: mol_type = other DNA

SEQ ID NO: 38928 - DNA, 80 bp, synthetic construct
  source 1..80: mol_type = other DNA
agctctccttgctcctgctccggatgcctggtgatagttactattttgagttaaagcgattctgctttattaaaaaggaa

SEQ ID NO: 38929 - DNA, 80 bp, synthetic construct
  source 1..80: mol_type = other DNA
aaggagcaagccaagggcgtacaggataagcatgccctgtggttgccagcttatctcatttgtcttaaaaattattttag

SEQ ID NO: 38930 - DNA, 80 bp, synthetic construct; identical to SEQ ID NO: 13611
  source 1..80: mol_type = other DNA

SEQ ID NO: 38931 - DNA, 80 bp, synthetic construct
  source 1..80: mol_type = other DNA
tttgactttcatgaatggtgatgctttaaatgttcttggccatatctgtcttcttcttttatgtctgaggttatgtgctg

SEQ ID NO: 38932 - DNA, 80 bp, synthetic construct
  source 1..80: mol_type = other DNA
gagtgaaggaacaaattttatgtcacagttttgcccagggcttctcttgatatctaagaagagcagtgtggggagactgt

SEQ ID NO: 38933 - DNA, 80 bp, synthetic construct
  source 1..80: mol_type = other DNA
cctgtctccactaaaaatacaaaaattagccgggtgtggtggcgtgcgcctgtaatcccagctacttgggaggctgaggc

SEQ ID NO: 38934 - DNA, 80 bp, synthetic construct
  source 1..80: mol_type = other DNA
ccctgagaatgggctggaggccatggccatggtcagaggtgtctatgagtttcccagggtgccccccagtgataagctgg

SEQ ID NO: 38935 - DNA, 80 bp, synthetic construct; identical to SEQ ID NO: 13612
  source 1..80: mol_type = other DNA

SEQ ID NO: 38936 - DNA, 80 bp, synthetic construct
  source 1..80: mol_type = other DNA
tcacaggcagagtgagtggctttctggtctctccggctgagcagtgctgatggaacaggttattctttcttcatacacct

SEQ ID NO: 38937 - DNA, 80 bp, synthetic construct
  source 1..80: mol_type = other DNA
gccatgtggggtgcagttgctgtgtttccaaagtaaatattacttcttagagaagattcatacccagaataattatttct

SEQ ID NO: 38938 - DNA, 80 bp, synthetic construct; identical to SEQ ID NO: 13613
  source 1..80: mol_type = other DNA

SEQ ID NO: 38939 - DNA, 80 bp, synthetic construct
  source 1..80: mol_type = other DNA
cccaccaccacacctagctaatttttgtatttttagtagagatgggatttcgccacattggccaggctggtctcgaactc

SEQ ID NO: 38940 - DNA, 80 bp, synthetic construct
  source 1..80: mol_type = other DNA
aaaactcttaacactctacagagaggtagagttactacccctttggagaaatgaattagtatccccattttccaaatgta

SEQ ID NO: 38941 - DNA, 80 bp, synthetic construct
  source 1..80: mol_type = other DNA
agtctcgtgtcacccaggctggagtgcagtggcatgatctcggctcactgcaagctccgcctcctgggttcacgccattc

SEQ ID NO: 38942 - DNA, 80 bp, synthetic construct; identical to SEQ ID NO: 13614
  source 1..80: mol_type = other DNA

SEQ ID NO: 38943 - DNA, 80 bp, synthetic construct
  source 1..80: mol_type = other DNA
ttctgtactaaaaatacaaaaaattagctggacatggtggtgggcgcctgtaatcgcccactcaggagtggaggcaggag

SEQ ID NO: 38944 - DNA, 80 bp, synthetic construct
  source 1..80: mol_type = other DNA
cacaagcttgccctaagattcagctgcatcaggggcgcaatggacagaggtggaaaggtgaacttggagcttatcctgga

SEQ ID NO: 38945 - DNA, 80 bp, synthetic construct
  source 1..80: mol_type = other DNA
gcagtctctcctcttggggtcggcccctgtctcagtaagtgactccatcctctaggcaggtgcttagtctggaagcctgg

SEQ ID NO: 38946 - DNA, 80 bp, synthetic construct; identical to SEQ ID NO: 13615
  source 1..80: mol_type = other DNA

SEQ ID NO: 38947 - DNA, 80 bp, synthetic construct
  source 1..80: mol_type = other DNA
gtctcctgtcccctccagttatgggctcatcctcctcccatccctctgcttcccatttgttgccagaaaggggtcttgat

SEQ ID NO: 38948 - DNA, 80 bp, synthetic construct
  source 1..80: mol_type = other DNA
agaatcacaatagtagtaacaggggtcattttttcccaacttactctatgttcaggtgtggaatttctgtctcccaagag

SEQ ID NO: 38949 - DNA, 80 bp, synthetic construct
  source 1..80: mol_type = other DNA
ggtttttataccttgatttcaaggtggaaagaaattgattatgaatctccaataaatttaaatctcttaaaccagtaggt

SEQ ID NO: 38950 - DNA, 80 bp, synthetic construct; identical to SEQ ID NO: 13616
  source 1..80: mol_type = other DNA

SEQ ID NO: 38951 - DNA, 80 bp, synthetic construct
  source 1..80: mol_type = other DNA
gcccagctaagtttttttgtatttttagtggagatagggtttcaccatgtttgccagaccgatcttgaactcctgacctc

SEQ ID NO: 38952 - DNA, 80 bp, synthetic construct
  source 1..80: mol_type = other DNA
tgcaggagagctgttctatgtgaaacatctcagagttgcaaatatcacatgtgaatgatatggctactttaagaagtgtc

SEQ ID NO: 38953 - DNA, 80 bp, synthetic construct
  source 1..80: mol_type = other DNA
ctatatagtaaattgaactgtaaaagttaaaaaaaaaaaaacaactaaaggaataaagcttggctactccataggcaatg

SEQ ID NO: 38954 - DNA, 80 bp, synthetic construct; identical to SEQ ID NO: 13617
  source 1..80: mol_type = other DNA

SEQ ID NO: 38955 - DNA, 80 bp, synthetic construct
  source 1..80: mol_type = other DNA
tgcagcccagtaggtctcagcctcattttacccagctcctattcaagatgcagttgctctgtttcaaacacttctgacgc

SEQ ID NO: 38956 - DNA, 80 bp, synthetic construct
  source 1..80: mol_type = other DNA
ggatttgatggctacctgtgtgtttttcccaacacacattatctgtcttgcacacagctatgtccccagtacggaataca

SEQ ID NO: 38957 - DNA, 80 bp, synthetic construct
  source 1..80: mol_type = other DNA
gggcaagatggagtaagacctccatctgtaagggaaaaaacaaaacaaaacaggtcactgagccagtactatcacgaaaa

SEQ ID NO: 38958 - DNA, 80 bp, synthetic construct
  source 1..80: mol_type = other DNA
gatgtgaggtcctgggacccatcttctgaaccaaggcttcactcttctcatctctcttgactttccaggctgtgaggccc

SEQ ID NO: 38959 - DNA, 80 bp, synthetic construct; identical to SEQ ID NO: 13618
  source 1..80: mol_type = other DNA

SEQ ID NO: 38960 - DNA, 80 bp, synthetic construct
  source 1..80: mol_type = other DNA
tactcattcaacacatttactgagcacccactatgtatggcaggcattgttctaggtgtttaggacccataaagaacaaa

SEQ ID NO: 38961 - DNA, 80 bp, synthetic construct
  source 1..80: mol_type = other DNA
ctatggaaaaaagaaaaaaataaagcagggtagcaaggatgaaagccccctgagagttagagatttgagtcaaggcctgg

SEQ ID NO: 38962 - DNA, 80 bp, synthetic construct
  source 1..80: mol_type = other DNA
cgttgcctgtggactctgcacatcagggtatctgccagagcacaatgcctggagcatagcaggcccaccgctgatattgg

SEQ ID NO: 38963 - DNA, 80 bp, synthetic construct; identical to SEQ ID NO: 13619
  source 1..80: mol_type = other DNA

SEQ ID NO: 38964 - DNA, 80 bp, synthetic construct
  source 1..80: mol_type = other DNA
ttctctgaccctcagtttcctctttcagaaaacagagtataatagtccctgagctgcctactgcttaggctttagtaatt

SEQ ID NO: 38965 - DNA, 80 bp, synthetic construct
  source 1..80: mol_type = other DNA
gtatgtgtgtacagttctgtgacacagggttttttttattatttaataaatgtttcaaggacaaggatactgtatttttt

SEQ ID NO: 38966 - DNA, 80 bp, synthetic construct; identical to SEQ ID NO: 13620
  source 1..80: mol_type = other DNA

SEQ ID NO: 38967 - DNA, 80 bp, synthetic construct
  source 1..80: mol_type = other DNA
aagtgagggagctgggattggaactcagccttccagaaggaatacctatgccagttgctccggaggctgcctggaatatc

SEQ ID NO: 38968 - DNA, 80 bp, synthetic construct
  source 1..80: mol_type = other DNA
aatagacaatgaggacgatcaaagacaaggattgttctctgccctgtacttgaatttgtccttttcctttcggtcttaga

SEQ ID NO: 38969 - DNA, 80 bp, synthetic construct
  source 1..80: mol_type = other DNA
agagctttgggccttacgcttccttcttaggtgcctaaaacctgaggatgcatgtatgtatgtgtctacgtatatgtaca

SEQ ID NO: 38970 - DNA, 80 bp, synthetic construct
  source 1..80: mol_type = other DNA
tgtatgtgtatgtatggtggttgtgtgtgtctgtccttcaagagcagcgtgaagatctgtttctctgcaaagcctcctct

SEQ ID NO: 38971 - DNA, 80 bp, synthetic construct; identical to SEQ ID NO: 13621
  source 1..80: mol_type = other DNA

SEQ ID NO: 38972 - DNA, 80 bp, synthetic construct
  source 1..80: mol_type = other DNA
ttcctatggttggatcacccggatgggacttcaatgccagaaatccttggcatccacgtggacatggggaacatcagtgt

SEQ ID NO: 38973 - DNA, 80 bp, synthetic construct
  source 1..80: mol_type = other DNA
cggctggaaaacgaaagcattgggaagttgctcttccctgtggttaatgtgttccatgcccgctgtgtccccctgcactc

SEQ ID NO: 38974 - DNA, 80 bp, synthetic construct; identical to SEQ ID NO: 13622
  source 1..80: mol_type = other DNA

SEQ ID NO: 38975 - DNA, 80 bp, synthetic construct
  source 1..80: mol_type = other DNA
tatttgcaggcatactgctaagatcgcagctaatatttgacagcaaccttaggaatgtctagcattttctccactttgtg

SEQ ID NO: 38976 - DNA, 80 bp, synthetic construct
  source 1..80: mol_type = other DNA
tttgtgagtggagggagtggggggacatctccagcttgccatcctaattattttttttgctagcattgatattaagatga

SEQ ID NO: 38977 - DNA, 80 bp, synthetic construct
  source 1..80: mol_type = other DNA
tctgagagatagggagtcagacatatcctagaacataagatgggggatgaattggtagggcgcgttggaagaagaatgct

SEQ ID NO: 38978 - DNA, 80 bp, synthetic construct
  source 1..80: mol_type = other DNA
ggcacagagagattcaaggatctgaccacagttacccagggaacaagtggcaaaaccaggtttgaacacaggccttctga

SEQ ID NO: 38979 - DNA, 80 bp, synthetic construct; identical to SEQ ID NO: 13623
  source 1..80: mol_type = other DNA

SEQ ID NO: 38980 - DNA, 80 bp, synthetic construct
  source 1..80: mol_type = other DNA
ttaatggctatttgttgcctggaggataaagtccaaactccttaaccatggcatttggggccttccagaatctgactgca

SEQ ID NO: 38981 - DNA, 80 bp, synthetic construct
  source 1..80: mol_type = other DNA
ttccaagattcttgctgcaactgcaggggcgcagggacatttttctgcctgccttccagcactgttccttgttttgtgac

SEQ ID NO: 38982 - DNA, 80 bp, synthetic construct
  source 1..80: mol_type = other DNA
tggagctgggtgggtcccaagcatgtgggtatgctggcgcagtgccatagagctgtgagatctgcccatgtggcagcccc

SEQ ID NO: 38983 - DNA, 80 bp, synthetic construct; identical to SEQ ID NO: 13624
  source 1..80: mol_type = other DNA

SEQ ID NO: 38984 - DNA, 80 bp, synthetic construct
  source 1..80: mol_type = other DNA
gttccccagagttcctccttccctgagggagggcctgagatccagccaagaactagagccagggatctttgaggtgagaa

SEQ ID NO: 38985 - DNA, 80 bp, synthetic construct
  source 1..80: mol_type = other DNA
gacctaggcaggcccagcattcactgaacacttgaacctgggcataggtgtattagcctcactctgcagaggggggatgc

SEQ ID NO: 38986 - DNA, 80 bp, synthetic construct; identical to SEQ ID NO: 13625
  source 1..80: mol_type = other DNA

SEQ ID NO: 38987 - DNA, 80 bp, synthetic construct
  source 1..80: mol_type = other DNA
atgggccctgcatgtgcccttaggcaattccgagagactattctgagcttggatgactctagtggcataggtctccgaac

SEQ ID NO: 38988 - DNA, 80 bp, synthetic construct
  source 1..80: mol_type = other DNA
gaaaaaaaaaaagatagggcctactttctgacgatggtggataagacaacaaaaagcactgatgtgcaccagaagtggcc

SEQ ID NO: 38989 - DNA, 80 bp, synthetic construct
  source 1..80: mol_type = other DNA
agccgttccagtgctttcctctggctttgacctgagtaccgtcacctgggagtccagcatagccctcgctggcttcaggt

SEQ ID NO: 38990 - DNA, 80 bp, synthetic construct; identical to SEQ ID NO: 13626
  source 1..80: mol_type = other DNA

SEQ ID NO: 38991 - DNA, 80 bp, synthetic construct
  source 1..80: mol_type = other DNA
aagtgtgctataggtggcttcagaactgagctgttttgtttcaaagccttggctcatgtggtctttgccaggagcgcatg

SEQ ID NO: 38992 - DNA, 80 bp, synthetic construct
  source 1..80: mol_type = other DNA
tacctccctttcagtgtactggagatgggagctgcgggctccttgccttttctgtgaaggatgctgagtccagttcaggg

SEQ ID NO: 38993 - DNA, 80 bp, synthetic construct
  source 1..80: mol_type = other DNA
cagagtagatacgcagaaaagaagctctagctttgtggtttcagcagactccctgtgatttctgaaactcactgtgccat

SEQ ID NO: 38994 - DNA, 80 bp, synthetic construct
  source 1..80: mol_type = other DNA
tttccttcacagtctgtaattatggcatcaagacacctgaatatctgattagtgtctcttaatgtcccagactgtaagct

SEQ ID NO: 38995 - DNA, 80 bp, synthetic construct; identical to SEQ ID NO: 13627
  source 1..80: mol_type = other DNA

SEQ ID NO: 38996 - DNA, 80 bp, synthetic construct
  source 1..80: mol_type = other DNA
acgcagccctctacttccaatctgccgatttttctcctctgccagaaggactgacttcttcagggaaagctttgggaatg

SEQ ID NO: 38997 - DNA, 80 bp, synthetic construct
  source 1..80: mol_type = other DNA
cagttcccatttactgactgcattatacttgaggtctcttgaagcaacctttccagggagctattgtctgcagttttaca

SEQ ID NO: 38998 - DNA, 80 bp, synthetic construct; identical to SEQ ID NO: 13628
  source 1..80: mol_type = other DNA

SEQ ID NO: 38999 - DNA, 80 bp, synthetic construct
  source 1..80: mol_type = other DNA
cactgctcttcagtttatttaggtgagtcagaccaggtccagctcccagagtgaatgctcattacccctggctaacctgc

SEQ ID NO: 39000 - DNA, 80 bp, synthetic construct
  source 1..80: mol_type = other DNA
tttagcttgacttattctccaacattattatgatcatcataatcacattcctacattttctcaagtgccaactgcatgct

SEQ ID NO: 39001 - DNA, 80 bp, synthetic construct
  source 1..80: mol_type = other DNA
agttaggatggcagtatctgcttcgcagggttctcctgaggagtaaatgagtctgaagtagtactttgcatatagtaaat

SEQ ID NO: 39002 - DNA, 80 bp, synthetic construct
  source 1..80: mol_type = other DNA
ttcctgattcctgggatagtcttgcatcctggcatctccccatttgttgtcagggagagaggacacctagaaagtgctgc

SEQ ID NO: 39003 - DNA, 80 bp, synthetic construct; identical to SEQ ID NO: 13629
  source 1..80: mol_type = other DNA

SEQ ID NO: 39004 - DNA, 80 bp, synthetic construct
  source 1..80: mol_type = other DNA
atcagcctcctctctgacccacctcagaaaatcacaattaatgatgtagtagccctgtgaggatgagagagaccagcgga

SEQ ID NO: 39005 - DNA, 80 bp, synthetic construct
  source 1..80: mol_type = other DNA
atgaactggctgctgctcatgaatcagcaaacatttattaaacttctagtcagtatggacataatagcaggtgtggcagg

SEQ ID NO: 39006 - DNA, 80 bp, synthetic construct
  source 1..80: mol_type = other DNA
catgcatttgacagtatttatgtgtagctgctgcatgccaggcactgtccaaggtgctgaaggtgaataagcatgttaaa

SEQ ID NO: 39007 - DNA, 80 bp, synthetic construct
  source 1..80: mol_type = other DNA
gttgtaaaaaagtggaaatgagtttccccttatgggaaaagaggagacactgattttttggtgttaaggtaaggacacat

SEQ ID NO: 39008 - DNA, 80 bp, synthetic construct; identical to SEQ ID NO: 13630
  source 1..80: mol_type = other DNA

SEQ ID NO: 39009 - DNA, 80 bp, synthetic construct
  source 1..80: mol_type = other DNA
aaaagcccgaattgctccctgctctcctggcgctcatcaccccggaggtaggcactgccattcccatattactggtggag

SEQ ID NO: 39010 - DNA, 80 bp, synthetic construct
  source 1..80: mol_type = other DNA
atagatggggaatttctgtttttgaactgtctgtcttccaaactacctaaagtacgggaatgaggcccagctctgtctag

SEQ ID NO: 39011 - DNA, 80 bp, synthetic construct; identical to SEQ ID NO: 13631
  source 1..80: mol_type = other DNA

SEQ ID NO: 39012 - DNA, 80 bp, synthetic construct
  source 1..80: mol_type = other DNA
tgatctctgcccactgcgacctctgtctgccggttcaagtgattctcctgcctcagcctcccgagtagctgggattatag

SEQ ID NO: 39013 - DNA, 80 bp, synthetic construct
  source 1..80: mol_type = other DNA
atttattattgagtgcttactctgagcagcagtgcatagcatcttatcatgcaatccttatagcaattccacgaggggac

SEQ ID NO: 39014 - DNA, 80 bp, synthetic construct
  source 1..80: mol_type = other DNA
acatttgtttccctccccttctcggcatatattactgtgattccccttggcctgcatctgctgcattatgtctgcttagg

SEQ ID NO: 39015 - DNA, 80 bp, synthetic construct; identical to SEQ ID NO: 13632
  source 1..80: mol_type = other DNA

SEQ ID NO: 39016 - DNA, 80 bp, synthetic construct
  source 1..80: mol_type = other DNA
cttgcagtccatcaggggatgggactgcattccaagcagaagcacatgcagggggcagagggcacagtgaaaacacacaa

SEQ ID NO: 39017 - DNA, 80 bp, synthetic construct
  source 1..80: mol_type = other DNA
gggcaggagtgtgtcattatcaagtttgtatttctgtaagaagcccctggctgctctatggagaaccaaatggagagaga

SEQ ID NO: 39018 - DNA, 80 bp, synthetic construct
  source 1..80: mol_type = other DNA
gggaacagagaaatctagggtaactctcagccttgtggcttgggtgactggtggattgtggtgttacctactaagaagag

SEQ ID NO: 39019 - DNA, 80 bp, synthetic construct
  source 1..80: mol_type = other DNA
ataagtctgggcttgagctgtagatgtcaatgccacagcatgcaggtggaggagaatataccatgggcaggggagaaacc

SEQ ID NO: 39020 - DNA, 80 bp, synthetic construct; identical to SEQ ID NO: 13633
  source 1..80: mol_type = other DNA

SEQ ID NO: 39021 - DNA, 80 bp, synthetic construct
  source 1..80: mol_type = other DNA
actgagccttacagacatgcaacatggtggctcttttcattcttgtaagatttaagaggaaattatttctcatcactgtg

SEQ ID NO: 39022 - DNA, 80 bp, synthetic construct
  source 1..80: mol_type = other DNA
gcctggtcatcatggtgaagtcccatctccactaaaaaattagccaggcttggtggtgggcatctgtaatcccagctacc

SEQ ID NO: 39023 - DNA, 80 bp, synthetic construct; identical to SEQ ID NO: 13634
  source 1..80: mol_type = other DNA

SEQ ID NO: 39024 - DNA, 80 bp, synthetic construct
  source 1..80: mol_type = other DNA
tttagcagtctgcttaataattatggtgcagcatgctgatcaggcataaatggaaggcatttgaggtaagtgattgtatt

SEQ ID NO: 39025 - DNA, 80 bp, synthetic construct
  source 1..80: mol_type = other DNA
ttgccccacctctattgagcttaaattctagtagggagacagaaaatcactgaataatcaactttatccataataagtaa

SEQ ID NO: 39026 - DNA, 80 bp, synthetic construct
  source 1..80: mol_type = other DNA
gattgcttgaggccttccattcattgaacaaatatgtgctgtgcacctattatgtataaatagaccctggggatgcaaca

SEQ ID NO: 39027 - DNA, 80 bp, synthetic construct
  source 1..80: mol_type = other DNA
caggaagtgacaaggctctgcgtgtggatgaaatgttgagtgtgttgggggaggcggagtgtccctgaacaagatttttt

SEQ ID NO: 39028 - DNA, 80 bp, synthetic construct; identical to SEQ ID NO: 13635
  source 1..80: mol_type = other DNA

SEQ ID NO: 39029 - DNA, 80 bp, synthetic construct
  source 1..80: mol_type = other DNA
tttcatttctgtataacattccactgtgtgcatatataatgtatttctccatcgtgctgctggacatttgggtggtttcc

SEQ ID NO: 39030 - DNA, 80 bp, synthetic construct
  source 1..80: mol_type = other DNA
gctagatgtaaagctctagtataccagttttccaaagtacttatttcagtttacacacctactaccactgcataagagtt

SEQ ID NO: 39031 - DNA, 80 bp, synthetic construct; identical to SEQ ID NO: 13636
  source 1..80: mol_type = other DNA

SEQ ID NO: 39032 - DNA, 80 bp, synthetic construct
  source 1..80: mol_type = other DNA
agcctcccgagcagctgggactataggcgcctgccaccacacctggctaattttttgtatttttagtagagatggggttt

SEQ ID NO: 39033 - DNA, 80 bp, synthetic construct
  source 1..80: mol_type = other DNA
gcgtgagtctgtattaaaattaaacattttaatactactctcccaatccaggcacctgggattagcatatccaggtgctc

SEQ ID NO: 39034 - DNA, 80 bp, synthetic construct
  source 1..80: mol_type = other DNA
ggattggtagaggttgggggtggggctggttttcagcggtagtagagcagatgtggaaagcagctgataacctgggaggt

SEQ ID NO: 39035 - DNA, 80 bp, synthetic construct; identical to SEQ ID NO: 13637
  source 1..80: mol_type = other DNA

SEQ ID NO: 39036 - DNA, 80 bp, synthetic construct
  source 1..80: mol_type = other DNA
atggcgaatagcgcaacctcggctcactgcaacctctgcctcctgtgttcaagtctgtgacacagggtcccgagtagctg

SEQ ID NO: 39037 - DNA, 80 bp, synthetic construct
  source 1..80: mol_type = other DNA
ctggctgcgagcagatgaggttcttcatttctaatgacacgccatgaatcatccaaccacagttacagcaacctgcccca

SEQ ID NO: 39038 - DNA, 80 bp, synthetic construct
  source 1..80: mol_type = other DNA
cagagttatgtcatgcccaggccagcagggggctccatgaggattcatagaagatgccccgcgtctcggcgcctttggtg

SEQ ID NO: 39039 - DNA, 80 bp, synthetic construct; identical to SEQ ID NO: 13638
  source 1..80: mol_type = other DNA

SEQ ID NO: 39040 - DNA, 80 bp, synthetic construct
  source 1..80: mol_type = other DNA
gaagaggtcccttctttcctgtgatcagtccaagaaggcttcctggagagagtgctatgtccacaacttggaagaagcca

SEQ ID NO: 39041 - DNA, 80 bp, synthetic construct
  source 1..80: mol_type = other DNA
gagccctcagcatcccatccctggaggggcgggtctgggaagtcaggtgcctcctccctgctgggactgaacaagacttg

SEQ ID NO: 39042 - DNA, 80 bp, synthetic construct
  source 1..80: mol_type = other DNA
gggtgtctatgtgtacatcgggggatggggattagtgtggacaggtgggtggggcacagcagtgacaaacccagaaaggt

SEQ ID NO: 39043 - DNA, 80 bp, synthetic construct
  source 1..80: mol_type = other DNA
ggcaggaatctagatcttaaacctgagcctgaaagggttagaggctgacttagagcaaagatggcacgatgctgaatctc

SEQ ID NO: 39044 - DNA, 80 bp, synthetic construct; identical to SEQ ID NO: 13639
  source 1..80: mol_type = other DNA

SEQ ID NO: 39045 - DNA, 80 bp, synthetic construct
  source 1..80: mol_type = other DNA
cgtttgctgcaaggtcttctccctctctaaatgagtgaataaagtggcaacccatcaatttccatttgtcgctaatggga

SEQ ID NO: 39046 - DNA, 80 bp, synthetic construct
  source 1..80: mol_type = other DNA
tctgaacaatgcttgttcagctctgtcaagactgctggccctcagttttggttcatgctaggccacttccagccgctttc

SEQ ID NO: 39047 - DNA, 80 bp, synthetic construct; identical to SEQ ID NO: 13640
  source 1..80: mol_type = other DNA

SEQ ID NO: 39048 - DNA, 80 bp, synthetic construct
  source 1..80: mol_type = other DNA
aggggtcacttttccttgcatttgagtttttctggggttttccccaaccccagcctcagaatgggtggctctctgaatgg

SEQ ID NO: 39049 - DNA, 80 bp, synthetic construct
  source 1..80: mol_type = other DNA
gcaggagatacagccaaattgtctattacagtgtttggtgtttacccctcgaatgaggttttgggtaaaagaaagggatt

SEQ ID NO: 39050 - DNA, 80 bp, synthetic construct
  source 1..80: mol_type = other DNA
tttacccctcgaatgaggttttgggtaaaagaaagggattttatttatggctgtgaggctggctgcataaattccccaaa

SEQ ID NO: 39051 - DNA, 80 bp, synthetic construct
  source 1..80: mol_type = other DNA
aaagagaccagagatcattgtcattcttagatccggaagggactgtaaggattcgttatctaacctgctcatcttgcaaa

SEQ ID NO: 39052 - DNA, 80 bp, synthetic construct; identical to SEQ ID NO: 13641
  source 1..80: mol_type = other DNA

SEQ ID NO: 39053 - DNA, 80 bp, synthetic construct
  source 1..80: mol_type = other DNA
ctcccagctttacccattcccctgctctccctatagtgctcttcctcccgtttcatcttctctgcctgcaaaacaaatcc

SEQ ID NO: 39054 - DNA, 80 bp, synthetic construct
  source 1..80: mol_type = other DNA
catctgttccagcacttgccgtgttatattctaaagattatggcattttcccactagactctgaactccatgggagagtg

SEQ ID NO: 39055 - DNA, 80 bp, synthetic construct
  source 1..80: mol_type = other DNA
gaggtaaacttattggagaaagtagaagagaaaggagaaagaggaaaaggagaaaatgtccatctgtctgtcttacttaa

SEQ ID NO: 39056 - DNA, 80 bp, synthetic construct; identical to SEQ ID NO: 13642
  source 1..80: mol_type = other DNA

SEQ ID NO: 39057 - DNA, 80 bp, synthetic construct
  source 1..80: mol_type = other DNA
tgatgaccccctggaaacatttgggatatcccattatcacagccatcacattaaatacattgtgttctgctggtaaggag

SEQ ID NO: 39058 - DNA, 80 bp, synthetic construct
  source 1..80: mol_type = other DNA
ctcagcatgggcatattagacacatcagcaggttattgcagcaattgaatctctcttgtttaaggtttccctgtgtggta

SEQ ID NO: 39059 - DNA, 80 bp, synthetic construct
  source 1..80: mol_type = other DNA
taataggagaattgggggagacaagggaaaaggataaaaaacaccagtttcttatcctgttatgctgtgtattaaataca

SEQ ID NO: 39060 - DNA, 80 bp, synthetic construct
  source 1..80: mol_type = other DNA
agtcacccatatagacaatcaattggtctttcacattagtgacaaatagaaattgatgactttctccttcatctgtcacc

SEQ ID NO: 39061 - DNA, 80 bp, synthetic construct; identical to SEQ ID NO: 13643
  source 1..80: mol_type = other DNA

SEQ ID NO: 39062 - DNA, 80 bp, synthetic construct
  source 1..80: mol_type = other DNA
ggagagtaaatattttaccaaaagaaaaaaaagtctgcgcgtgtgtctgcacacacttgtgcttatgtaaggctatctct

SEQ ID NO: 39063 - DNA, 80 bp, synthetic construct
  source 1..80: mol_type = other DNA
tttgccctttccaaaacccattgtgcactgtaacttcatctgtaatctcttctactgagaggttagagatgaattaggcc

SEQ ID NO: 39064 - DNA, 80 bp, synthetic construct; identical to SEQ ID NO: 13644
  source 1..80: mol_type = other DNA

SEQ ID NO: 39065 - DNA, 80 bp, synthetic construct
  source 1..80: mol_type = other DNA
gaggacagcgttgggacagggtcctgaatagcctgctggcagtgtgttctcgatgagtgagatctgaatgccaccagggg

SEQ ID NO: 39066 - DNA, 80 bp, synthetic construct
  source 1..80: mol_type = other DNA
agacatgaagggatggggctattgttccatatctgaagtcttaggtaacagagctgatttccatatcattttggtatgtg

SEQ ID NO: 39067 - DNA, 80 bp, synthetic construct
  source 1..80: mol_type = other DNA
gatggtgatatttcatgagaatttcaaaagcctgtctccagctctgtgaagtcatttacaaaacgtcttgggatgtggag

SEQ ID NO: 39068 - DNA, 80 bp, synthetic construct
  source 1..80: mol_type = other DNA
ggatttcagcctcaaatgtggtattggacctgttacctctaagacccccttcagtctgggatttggtgatacaatctttt

SEQ ID NO: 39069 - DNA, 80 bp, synthetic construct; identical to SEQ ID NO: 13645
  source 1..80: mol_type = other DNA

SEQ ID NO: 39070 - DNA, 80 bp, synthetic construct
  source 1..80: mol_type = other DNA
gcggctcgtcagcaggcaagacagtggtcacacttagctctcattagtctggataaacaggcacacgttccctatcagct

SEQ ID NO: 39071 - DNA, 80 bp, synthetic construct
  source 1..80: mol_type = other DNA
actgatgaggggtgttgtggagaggacactgaccagtcaggtgcagatgtgcacgcagtggcaaacacagtcctatagct

SEQ ID NO: 39072 - DNA, 80 bp, synthetic construct
  source 1..80: mol_type = other DNA
ggttcatcgtgtctgtagtcccagctacttgggaggctgagagggaagaatcacttgagtccaggtgtttgaggctgcag

SEQ ID NO: 39073 - DNA, 80 bp, synthetic construct; identical to SEQ ID NO: 13646
  source 1..80: mol_type = other DNA

SEQ ID NO: 39074 - DNA, 80 bp, synthetic construct
  source 1..80: mol_type = other DNA
gaaatgaaaagaaagaggcttacctctctgaaaccctaccccggggaagacgtcagccccagccctttaagctcccatca

SEQ ID NO: 39075 - DNA, 80 bp, synthetic construct
  source 1..80: mol_type = other DNA
ggttccttcagtggcttttcatatgattgaggaatggagtcagatgtgttgtggggaaacactggagttggctcccggga

SEQ ID NO: 39076 - DNA, 80 bp, synthetic construct
  source 1..80: mol_type = other DNA
agtccctgttttatgcttttataagaattcaataagttcctgcatagaagcacttaggatggtgtcaggcatacagtaag

SEQ ID NO: 39077 - DNA, 80 bp, synthetic construct; identical to SEQ ID NO: 13647
  source 1..80: mol_type = other DNA

SEQ ID NO: 39078 - DNA, 80 bp, synthetic construct
  source 1..80: mol_type = other DNA
ttttttgaaaccttatttgaattccatctaccctgggaggctaagagcatcctgaggagagagctctgtctttcctaccc

SEQ ID NO: 39079 - DNA, 80 bp, synthetic construct
  source 1..80: mol_type = other DNA
atttttcttcttccttttacagcaaagctctgcaaaagaattgcctattcaagctgtctctatttcctctcctctctctc

SEQ ID NO: 39080 - DNA, 80 bp, synthetic construct
  source 1..80: mol_type = other DNA
acatagtcttttcctccttcttccttgaaacactttttcacttggcttctagaccacgccccatcttgttcttgcactgt

SEQ ID NO: 39081 - DNA, 80 bp, synthetic construct
  source 1..80: mol_type = other DNA
ctcatgcagtcttagggctttaaagcatcaatatgcttatgactctctaatctcatctgtagctctgaccccttccagaa

SEQ ID NO: 39082 - DNA, 80 bp, synthetic construct; identical to SEQ ID NO: 13648
  source 1..80: mol_type = other DNA

SEQ ID NO: 39083 - DNA, 80 bp, synthetic construct
  source 1..80: mol_type = other DNA
ctgcaaacctttcctgttagtttccctgcctctttcttgcccctcacttttcattctcaaaatggcagcaaaaatgactc

SEQ ID NO: 39084 - DNA, 80 bp, synthetic construct
  source 1..80: mol_type = other DNA
attctgatgaattttattgtcatttcctaccaccctgcctctcactcatgccacacaccacccccagctccaccagcttc

SEQ ID NO: 39085 - DNA, 80 bp, synthetic construct; identical to SEQ ID NO: 13649
  source 1..80: mol_type = other DNA

SEQ ID NO: 39086 - DNA, 80 bp, synthetic construct
  source 1..80: mol_type = other DNA
ccatatgttctcattgttcaactcccacttatgagtgagaacatgtggtgtttggttttctgttcctgtgttagtttgct

SEQ ID NO: 39087 - DNA, 80 bp, synthetic construct
  source 1..80: mol_type = other DNA
agtgctgcagtaaacttacgtgtccatatgtctttagagtagactgatttataatcctttgggtatatacccagtaatgg

SEQ ID NO: 39088 - DNA, 80 bp, synthetic construct
  source 1..80: mol_type = other DNA
atcgccattctaactggcgtgagatgatatctcattgtggatttggatttctcatggatatctcattttgatttggattt

SEQ ID NO: 39089 - DNA, 80 bp, synthetic construct
  source 1..80: mol_type = other DNA
tagcccttgtcagatggatagattgcaaaaattttctcccattctgcaggttgcctgttctctctgatgatagttttttt

SEQ ID NO: 39090 - DNA, 80 bp, synthetic construct; identical to SEQ ID NO: 13650
  source 1..80: mol_type = other DNA

SEQ ID NO: 39091 - DNA, 80 bp, synthetic construct
  source 1..80: mol_type = other DNA
gggctcttttttggttccatatgaaatttaagccaggcacagtggctcacgcctgtaatcccagcactttgggtggctga

SEQ ID NO: 39092 - DNA, 80 bp, synthetic construct
  source 1..80: mol_type = other DNA
gcagaggttgcagtgagccaggattgcaccactgcactccagcctggtcaacaagagtgaaactctgtcttaaaaaaaaa

SEQ ID NO: 39093 - DNA, 80 bp, synthetic construct
  source 1..80: mol_type = other DNA
gtgtcctctcttatttccttgagcagcagtttgtagttctccttgaagaggtccttcacatccctctaaagttgtattcc

SEQ ID NO: 39094 - DNA, 80 bp, synthetic construct; identical to SEQ ID NO: 13651
  source 1..80: mol_type = other DNA

SEQ ID NO: 39095 - DNA, 80 bp, synthetic construct
  source 1..80: mol_type = other DNA
cctctatcccctcctctgcccctgacactttctgtccttcttctctgctttatttttctataacattcatcatcatctga

SEQ ID NO: 39096 - DNA, 80 bp, synthetic construct
  source 1..80: mol_type = other DNA
atatctactgaatgaatgaatgatggagacccaagggaggtcccaaaggagctttacatttgaaagcttttggaaggcag

SEQ ID NO: 39097 - DNA, 80 bp, synthetic construct; identical to SEQ ID NO: 13652
  source 1..80: mol_type = other DNA

SEQ ID NO: 39098 - DNA, 80 bp, synthetic construct
  source 1..80: mol_type = other DNA
atgctctggctgtgcccaagctcctctgggactatggtcagacctttttgtctcagtcttgcaggagcctggagaccgga

SEQ ID NO: 39099 - DNA, 80 bp, synthetic construct
  source 1..80: mol_type = other DNA
taactcattcctcctttgaatcattctgaccattggtttttctattgagcctgactctatctctctgtgcctaccgttct

SEQ ID NO: 39100 - DNA, 80 bp, synthetic construct
  source 1..80: mol_type = other DNA
ttggatccaattcatcaacctggtcaccctcctctaaatcagttttcttttttctccatcctaattaggatgtgatcccc

SEQ ID NO: 39101 - DNA, 80 bp, synthetic construct
  source 1..80: mol_type = other DNA
tctcgacacgtgcctataaaacacatccccctgccctggctcttcataggttgggctttgctttcagtagccagaagcaa

SEQ ID NO: 39102 - DNA, 80 bp, synthetic construct; identical to SEQ ID NO: 13653
  source 1..80: mol_type = other DNA

SEQ ID NO: 39103 - DNA, 80 bp, synthetic construct
  source 1..80: mol_type = other DNA
agactttgagctttcagctcccagatgaaagaacagggattttcccagcaatgacagaaaagggaaacatatagccctgg

SEQ ID NO: 39104 - DNA, 80 bp, synthetic construct
  source 1..80: mol_type = other DNA
aaggaattttccttgcacctcctggagctgctggagtttctgaaattaaaagggcctttatctggaaattatggttgaat

SEQ ID NO: 39105 - DNA, 80 bp, synthetic construct
  source 1..80: mol_type = other DNA
gtggattgccccctttggcgctttccctttatttaaccaacctcttcttcatctgccataggaatgatctcccaaagagc

SEQ ID NO: 39106 - DNA, 80 bp, synthetic construct; identical to SEQ ID NO: 13654
  source 1..80: mol_type = other DNA

SEQ ID NO: 39107 - DNA, 80 bp, synthetic construct
  source 1..80: mol_type = other DNA
aatagtagtttgctcaagcaactggatggcatcatagggtagtgagacaggtgtgggctttattgatgtacaaacctgca

SEQ ID NO: 39108 - DNA, 80 bp, synthetic construct
  source 1..80: mol_type = other DNA
tggaaaataggtaggacagtgcctgacagtaggaagcccataaataatagttattatcgatagttctaccataattatta

SEQ ID NO: 39109 - DNA, 80 bp, synthetic construct
  source 1..80: mol_type = other DNA
acctgctcatttgggttgtggatggaattatttccttgtggttataggatggggggccccattttcttgctggctgtcag

SEQ ID NO: 39110 - DNA, 80 bp, synthetic construct
  source 1..80: mol_type = other DNA
ttcgattgaatctcccaggataagccaggatcatctccctgcctcaagatctgtaaccttactcacatttgcaaagctcc

SEQ ID NO: 39111 - DNA, 80 bp, synthetic construct; identical to SEQ ID NO: 13655
  source 1..80: mol_type = other DNA

SEQ ID NO: 39112 - DNA, 80 bp, synthetic construct
  source 1..80: mol_type = other DNA
ttagggataaaatttcaacatgagtttgatggggacaaacaaaccatgtccaaaccatagcaccatggaaggtaatgcat

SEQ ID NO: 39113 - DNA, 80 bp, synthetic construct
  source 1..80: mol_type = other DNA
tgcagggactgcacacttggaaactgtccatagctcgatccttggcccaagttgccttactcctgtgatcatcaaccatt

SEQ ID NO: 39114 - DNA, 80 bp, synthetic construct
  source 1..80: mol_type = other DNA
acagctgggaaggggctgtgtaacaggaagtattttatcacgttgatttagtaatctcgccactcctaacatgtcagggc

SEQ ID NO: 39115 - DNA, 80 bp, synthetic construct; identical to SEQ ID NO: 13656
  source 1..80: mol_type = other DNA

SEQ ID NO: 39116 - DNA, 80 bp, synthetic construct
  source 1..80: mol_type = other DNA
ttggtacatgttctaaatgtggaaaggccagactctcagacatgaaggaactagagggcgatacgaaataaggaagtatt

SEQ ID NO: 39117 - DNA, 80 bp, synthetic construct
  source 1..80: mol_type = other DNA
atactgtacatcacaggagaggggatgacattcatgtttattgagcatctactgtgcccatcacttccataagttatatg

SEQ ID NO: 39118 - DNA, 80 bp, synthetic construct
  source 1..80: mol_type = other DNA
ccagactccctggcgccaaccccatgctctatctattacactagactcctccctgctgtgctcccctctgcagagacccc

SEQ ID NO: 39119 - DNA, 80 bp, synthetic construct; identical to SEQ ID NO: 13657
  source 1..80: mol_type = other DNA

SEQ ID NO: 39120 - DNA, 80 bp, synthetic construct
  source 1..80: mol_type = other DNA
ctaatagctgaacatttattattattgctatttattcagccagctaagtgtaccgggtgcttctctttcaggaaagcacc

SEQ ID NO: 39121 - DNA, 80 bp, synthetic construct
  source 1..80: mol_type = other DNA
accacacctggttaattttttgtatttttaatagagacagggtttcaccatcttggccaggctggtctcgaactcccgac

SEQ ID NO: 39122 - DNA, 80 bp, synthetic construct; identical to SEQ ID NO: 13658
  source 1..80: mol_type = other DNA

SEQ ID NO: 39123 - DNA, 80 bp, synthetic construct
  source 1..80: mol_type = other DNA
acatgtcccttatactgccctgccctccgtcagagtcagtgcccttcttctcttttggttaagcttaactttttgagtaa

SEQ ID NO: 39124 - DNA, 80 bp, synthetic construct
  source 1..80: mol_type = other DNA
aatacagtcctgggacaggccactgcatggcaggcagggtgtctgcctagagttgtgatggtgcagggagcagctgggca

SEQ ID NO: 39125 - DNA, 80 bp, synthetic construct
  source 1..80: mol_type = other DNA
ctcactctttctcagttctgtctttgcaggaggaagctcaaactccttttcagggcatgggaagccttcacaggcaggct

SEQ ID NO: 39126 - DNA, 80 bp, synthetic construct; identical to SEQ ID NO: 13659
  source 1..80: mol_type = other DNA

SEQ ID NO: 39127 - DNA, 80 bp, synthetic construct
  source 1..80: mol_type = other DNA
ctccagcatgcctggctaatttttatatttttagtagagatggggttttgccatgttggccaggctggtctcaagctcct

SEQ ID NO: 39128 - DNA, 80 bp, synthetic construct
  source 1..80: mol_type = other DNA
cctcaccccacatggcgtggtgacatgagtttcagcatcagtctctcaaggcaaagactatgtctcattacctctgactc

SEQ ID NO: 39129 - DNA, 80 bp, synthetic construct
  source 1..80: mol_type = other DNA
actggcttgaaaatggggacatcagggcaggaaacagggactaactgagctaagttatgcaacctgaaataggacagcaa

SEQ ID NO: 39130 - DNA, 80 bp, synthetic construct; identical to SEQ ID NO: 13660
  source 1..80: mol_type = other DNA

SEQ ID NO: 39131 - DNA, 80 bp, synthetic construct
  source 1..80: mol_type = other DNA
ccagatgtcaggaaactcaaagacaggatcatcaaaaagaaagggattggggaggaagactagagagggcctggggtaag

SEQ ID NO: 39132 - DNA, 80 bp, synthetic construct
  source 1..80: mol_type = other DNA
tgggattccatgttcctgtgcggttcctctctctcgaggctgcaacaggtgctgcgcctttagcctccctcctgtccttc

SEQ ID NO: 39133 - DNA, 80 bp, synthetic construct
  source 1..80: mol_type = other DNA
ggagagggagcgtaatgagaacagagaacagcggcggcccacttagtttggattttaataaagtttccagctaacctaaa

SEQ ID NO: 39134 - DNA, 80 bp, synthetic construct; identical to SEQ ID NO: 13661
  source 1..80: mol_type = other DNA

SEQ ID NO: 39135 - DNA, 80 bp, synthetic construct
  source 1..80: mol_type = other DNA
aagctttggctggaatcgtcagaaggaagtcgaattgaaatgcaaatcctggtgtctctcagagcacaggctggaaagaa

SEQ ID NO: 39136 - DNA, 80 bp, synthetic construct
  source 1..80: mol_type = other DNA
gaggagacacacttgcttatttggcctgtagcatggtctggtcttgactccctccatttgcagctcttgatgctttttct

SEQ ID NO: 39137 - DNA, 80 bp, synthetic construct
  source 1..80: mol_type = other DNA
atttatcctacaggtaaaatgccatttctgcattttgaaccatattcccagtgcccgacacagtttccatcttatacatg

SEQ ID NO: 39138 - DNA, 80 bp, synthetic construct; identical to SEQ ID NO: 13662
  source 1..80: mol_type = other DNA

SEQ ID NO: 39139 - DNA, 80 bp, synthetic construct
  source 1..80: mol_type = other DNA
agcattgactaacacagagtggacactccataaactgttgcatgaaccgatagatgaatgagtgtaaagctaaaaaaatg

SEQ ID NO: 39140 - DNA, 80 bp, synthetic construct
  source 1..80: mol_type = other DNA
tctttttgaagttgaactgactagtcttggtagtaggctggatgtgaatgatgaaggaaagctcaacaatgaccaagtag

SEQ ID NO: 39141 - DNA, 80 bp, synthetic construct
  source 1..80: mol_type = other DNA
agtatagatgtcagggagtcagatggacataagatattagaagaagaggtcccaggtggcgacataaatggagaatcttt

SEQ ID NO: 39142 - DNA, 80 bp, synthetic construct; identical to SEQ ID NO: 13663
  source 1..80: mol_type = other DNA

SEQ ID NO: 39143 - DNA, 80 bp, synthetic construct
  source 1..80: mol_type = other DNA
agaaaacgttatccctagcaatgtgttggaagattctgaacacagacttgcaaataagtacagaacttttccagaccact

SEQ ID NO: 39144 - DNA, 80 bp, synthetic construct
  source 1..80: mol_type = other DNA
gagaccctggctctacaaaaaaataaaattagttgggcgtaatggtgcatgcttgtagttccagctatttgggaggctga

SEQ ID NO: 39145 - DNA, 80 bp, synthetic construct
  source 1..80: mol_type = other DNA
tggtcggttggcccattcagttattcatagtatggccaagccattgtaagtcagggttaagaagaaaattgacattattt

SEQ ID NO: 39146 - DNA, 80 bp, synthetic construct; identical to SEQ ID NO: 13664
  source 1..80: mol_type = other DNA

SEQ ID NO: 39147 - DNA, 80 bp, synthetic construct
  source 1..80: mol_type = other DNA
ctgcaagctccgcctcccggcttcacgccattatcctgcctcagcctccgagtagctgggactacaggcgcccgccaccg

SEQ ID NO: 39148 - DNA, 80 bp, synthetic construct
  source 1..80: mol_type = other DNA
cacacctggccataaaggtgctttttaagctgtgaaggaagtcagatggaatggaagggaacctctgagtcagtacttct

SEQ ID NO: 39149 - DNA, 80 bp, synthetic construct
  source 1..80: mol_type = other DNA
ttaaaaatatgaccctcagaccagcagcattgacatcacctaagagagtgtgaaaatccaaaatctccagtcctatccca

SEQ ID NO: 39150 - DNA, 80 bp, synthetic construct; identical to SEQ ID NO: 13665
  source 1..80: mol_type = other DNA

SEQ ID NO: 39151 - DNA, 80 bp, synthetic construct
  source 1..80: mol_type = other DNA
ttcacttttgcagcagttgcagttctgaagctttttgaagctctctcttgatcttggtttccattaggctatggtcgtct

SEQ ID NO: 39152 - DNA, 80 bp, synthetic construct
  source 1..80: mol_type = other DNA
caactccagctgtgcgcagagttcaacatgtgttgatctacttaggctgtagatttcagctgagggatgttgggtaaatt

SEQ ID NO: 39153 - DNA, 80 bp, synthetic construct
  source 1..80: mol_type = other DNA
tcaatctgaacccaattcttcatacctatcctgcatttttaaagtgtgactttactcataccctgccctctgcttagaat

SEQ ID NO: 39154 - DNA, 80 bp, synthetic construct; identical to SEQ ID NO: 13666
  source 1..80: mol_type = other DNA

SEQ ID NO: 39155 - DNA, 80 bp, synthetic construct
  source 1..80: mol_type = other DNA
tgtctcaacgttattgccgttggctttggaaagcatttaggtatttctgcttcagatttaccttgctgattatgttttat

SEQ ID NO: 39156 - DNA, 80 bp, synthetic construct
  source 1..80: mol_type = other DNA
acagtgagttggctgttgtgctattatttccctcttagctttctctggttaaaatcctttataataattagtcaagggca

SEQ ID NO: 39157 - DNA, 80 bp, synthetic construct
  source 1..80: mol_type = other DNA
cttatgtaaatagagtagatgacattatcccatttgacagatatggaaaccaaggctcaggagtgaagcgggttccccag

SEQ ID NO: 39158 - DNA, 80 bp, synthetic construct; identical to SEQ ID NO: 13667
  source 1..80: mol_type = other DNA

SEQ ID NO: 39159 - DNA, 80 bp, synthetic construct
  source 1..80: mol_type = other DNA
cacctgtgaatctgtttctattgtgtgttgttgttgttttttccctcttagattttggccatatgatcctgtagttggat

SEQ ID NO: 39160 - DNA, 80 bp, synthetic construct
  source 1..80: mol_type = other DNA
aaagcctgaactgagtccctgccgggttgtgttttggtcagatttagtttacctctggctcactcctttcccagagcaga

SEQ ID NO: 39161 - DNA, 80 bp, synthetic construct
  source 1..80: mol_type = other DNA
cagaattctgtaaatgacttaaggagaaaattgggaccctatatttgaggaccctcaagtccttaattttctctctctag

SEQ ID NO: 39162 - DNA, 80 bp, synthetic construct; identical to SEQ ID NO: 13668
  source 1..80: mol_type = other DNA

SEQ ID NO: 39163 - DNA, 80 bp, synthetic construct
  source 1..80: mol_type = other DNA
aaacactgtttaaggcattcccttgagtgtctgggctgcctcaccatgaagaaggcagggaaatggatgggagtgtaact

SEQ ID NO: 39164 - DNA, 80 bp, synthetic construct
  source 1..80: mol_type = other DNA
cagataatccaatatggagatctgcatgagagccgaaaataattaatcacattttaatggggttgagagaggctagtcaa

SEQ ID NO: 39165 - DNA, 80 bp, synthetic construct
  source 1..80: mol_type = other DNA
ggatattcccttccatcacagaaacctttctgcaccaggtcttgggaaaacagagataaagaccaaagtcctacccttca

SEQ ID NO: 39166 - DNA, 80 bp, synthetic construct
  source 1..80: mol_type = other DNA
aaggaacaggttgaggaatagtgctgctacaatattgagataacacggacataattctatggaaaccggaagtttccatt

SEQ ID NO: 39167 - DNA, 80 bp, synthetic construct; identical to SEQ ID NO: 13669
  source 1..80: mol_type = other DNA

SEQ ID NO: 39168 - DNA, 80 bp, synthetic construct
  source 1..80: mol_type = other DNA
ttcacctgatgaaaagtctaccctttacctcagacccagatcacatatcacctcctttctggaaacttccctgatcctcc

SEQ ID NO: 39169 - DNA, 80 bp, synthetic construct
  source 1..80: mol_type = other DNA
tcatctccatggtctccaccacagctcctttggtgccttgtgcattcctggtgctcgataaatatttattgatcgaatga

SEQ ID NO: 39170 - DNA, 80 bp, synthetic construct; identical to SEQ ID NO: 13670
  source 1..80: mol_type = other DNA

SEQ ID NO: 39171 - DNA, 80 bp, synthetic construct
  source 1..80: mol_type = other DNA
agagcatggtaagatgtttgtgggtagtgttcacatagaatgccctgcagcttgatgttcgagaatgatcttttgtgtgg

SEQ ID NO: 39172 - DNA, 80 bp, synthetic construct
  source 1..80: mol_type = other DNA
tttttattctaagagtgaagtcgagcatgggcagccaggcagctggagccagggccctacctgtcatgaattggaagccg

SEQ ID NO: 39173 - DNA, 80 bp, synthetic construct
  source 1..80: mol_type = other DNA
cctcaccagccaatgttcctaaggcccagatttaactttctcttattttagtttcaggccatttcttcttttaatggtgt

SEQ ID NO: 39174 - DNA, 80 bp, synthetic construct
  source 1..80: mol_type = other DNA
aacctccctttataggtcaagccttctaattcctttaatcatttttattgcctttctttgcattcagtctccctccttgg

SEQ ID NO: 39175 - DNA, 80 bp, synthetic construct; identical to SEQ ID NO: 13671
  source 1..80: mol_type = other DNA

SEQ ID NO: 39176 - DNA, 80 bp, synthetic construct
  source 1..80: mol_type = other DNA
ttcgatgtgtgatttcagggaactctcacagaatcatgtgagatgtagattattgccccatctttgcagttaaggaaact

SEQ ID NO: 39177 - DNA, 80 bp, synthetic construct
  source 1..80: mol_type = other DNA
gaggctcagcattgttaaataactttctcaagaccatatagctaataaatgataacacctaggatttggacatgggctgt

SEQ ID NO: 39178 - DNA, 80 bp, synthetic construct
  source 1..80: mol_type = other DNA
tctggcatggcctgaaattttaaaactcacttgatttgttccaaatgcctctccctttatcctgaactttgcttatttcc

SEQ ID NO: 39179 - DNA, 80 bp, synthetic construct; identical to SEQ ID NO: 13672
  source 1..80: mol_type = other DNA

SEQ ID NO: 39180 - DNA, 80 bp, synthetic construct
  source 1..80: mol_type = other DNA
tctgtctctggggaggtgaccagagcctgtgatgatctggggcaggcccaaggaaagctggctccaaccctccagggcat

SEQ ID NO: 39181 - DNA, 80 bp, synthetic construct
  source 1..80: mol_type = other DNA
tgggggaggtggtgcataaacagatcttgacaattcatgtgaccatggcggggatagagatttgcactgtggagcccggg

SEQ ID NO: 39182 - DNA, 80 bp, synthetic construct
  source 1..80: mol_type = other DNA
ggaacccaaacgatggagacccggtgtgccttagtaggaagcttgaactttgttttggagaaacaggcaactcttttttt

SEQ ID NO: 39183 - DNA, 80 bp, synthetic construct; identical to SEQ ID NO: 13673
  source 1..80: mol_type = other DNA

SEQ ID NO: 39184 - DNA, 80 bp, synthetic construct
  source 1..80: mol_type = other DNA
ccaggctggagtgcagtggtgcaatcttggcttactgcaacccctgccttccaggttcaagcgactctcctgcctcagcc

SEQ ID NO: 39185 - DNA, 80 bp, synthetic construct
  source 1..80: mol_type = other DNA
tgaccaccgtgccaggctggcaatttatattttagatacatcagcccagcagtaagatgaaggaaacagctttaaagaga

SEQ ID NO: 39186 - DNA, 80 bp, synthetic construct
  source 1..80: mol_type = other DNA
aaaggtgacatagaaaaggtaaggaggcctggacctctcttgtagagcagatagagaaaggaagataaagtaaaaaggcc

SEQ ID NO: 39187 - DNA, 80 bp, synthetic construct
  source 1..80: mol_type = other DNA
tgtagagcagatagagaaaggaagataaagtaaaaaggccttttggaagccagtttatcaggatttggccatggattgga

SEQ ID NO: 39188 - DNA, 80 bp, synthetic construct; identical to SEQ ID NO: 13674
  source 1..80: mol_type = other DNA

SEQ ID NO: 39189 - DNA, 80 bp, synthetic construct
  source 1..80: mol_type = other DNA
aagcatgagggagggatctgggctggaggaattgctttggcattgtcagtgacagaaagcacgagagcagatgaaattat

SEQ ID NO: 39190 - DNA, 80 bp, synthetic construct
  source 1..80: mol_type = other DNA
tggaggccctcatctgtagaatgagatgatcagaacagatcagtggtctccaaacttagtttttagtggttgaacctttt

SEQ ID NO: 39191 - DNA, 80 bp, synthetic construct
  source 1..80: mol_type = other DNA
acatttcactgcagccactgagggtgctctggggggcatagtttggaaaccagaaatgtgccagcttcctgaggtccctg

SEQ ID NO: 39192 - DNA, 80 bp, synthetic construct
  source 1..80: mol_type = other DNA
gttgtctttcagtggcctgattaatatctaagccctttaatttgcttccctttataaaaagaagaagacaggcaagcaac

SEQ ID NO: 39193 - DNA, 80 bp, synthetic construct; identical to SEQ ID NO: 13675
  source 1..80: mol_type = other DNA

SEQ ID NO: 39194 - DNA, 80 bp, synthetic construct
  source 1..80: mol_type = other DNA
cacgagctgggctgtttcttgctgtgagtttgccagctatagggccaccccaacatggctgtgagtaggctgagggcctt

SEQ ID NO: 39195 - DNA, 80 bp, synthetic construct
  source 1..80: mol_type = other DNA
atgcaggcccctgtgagaaagacaaactctgtttccatagaggagtgccagaaaggtttctttgcccatatcaagatgtt

SEQ ID NO: 39196 - DNA, 80 bp, synthetic construct; identical to SEQ ID NO: 13676
  source 1..80: mol_type = other DNA

SEQ ID NO: 39197 - DNA, 80 bp, synthetic construct
  source 1..80: mol_type = other DNA
gcacccctcacacagaggcctgctccatggaccagtaggaggagggcccaggctctcacatgcctcctcccaggggcctc

SEQ ID NO: 39198 - DNA, 80 bp, synthetic construct
  source 1..80: mol_type = other DNA
tctaattgactattaaaggagaaagcagccctgtagatgctgcaggctaattaaccctgggagtgcagagcgagaggaag

SEQ ID NO: 39199 - DNA, 80 bp, synthetic construct
  source 1..80: mol_type = other DNA
cttgaaaagagcctcagcctttccgggagagcttcctaggggaggtgaagtctgagctatgttttgagcaaaatggttct

SEQ ID NO: 39200 - DNA, 80 bp, synthetic construct
  source 1..80: mol_type = other DNA
cagaatggccttggggttgggaaagggggacctggaggaagctggtgccacaggccaggtgagagaggatgagggtctgg

SEQ ID NO: 39201 - DNA, 80 bp, synthetic construct; identical to SEQ ID NO: 13677
  source 1..80: mol_type = other DNA

SEQ ID NO: 39202 - DNA, 80 bp, synthetic construct
  source 1..80: mol_type = other DNA
tgtggttcaacatgagttacgcagtaggttctattcttgaaggagggaccatgagagagagcctttggttggctgtgctg

SEQ ID NO: 39203 - DNA, 80 bp, synthetic construct
  source 1..80: mol_type = other DNA
caggaggatcacctgaggtcaggagttcaagaccagcctggtcaacatggtgaaaccccgtctctactcaaatacaaaaa

SEQ ID NO: 39204 - DNA, 80 bp, synthetic construct; identical to SEQ ID NO: 13678
  source 1..80: mol_type = other DNA

SEQ ID NO: 39205 - DNA, 80 bp, synthetic construct
  source 1..80: mol_type = other DNA
ctcgatggagggtcacagctcctgcacctgccgtgccgtcttctcacatcactgatgcactgctccttacctcctcctgc

SEQ ID NO: 39206 - DNA, 80 bp, synthetic construct
  source 1..80: mol_type = other DNA
ctttgtgtggtgtggcgtttctccactcaaccctgtccattttacaagtgttttgaaaaaacctactttactctgtcaag

SEQ ID NO: 39207 - DNA, 80 bp, synthetic construct
  source 1..80: mol_type = other DNA
taaatccttgggcatcactacacataacagggtgaaatatcccgagtttccagaaagctccacagggtccctgttaagaa

SEQ ID NO: 39208 - DNA, 80 bp, synthetic construct; identical to SEQ ID NO: 13679
  source 1..80: mol_type = other DNA

SEQ ID NO: 39209 - DNA, 80 bp, synthetic construct
  source 1..80: mol_type = other DNA
tctttgcactcccaagtctctgactttcctggggtttgtttggctccaccacccagcagggaggcataacacagatctta

SEQ ID NO: 39210 - DNA, 80 bp, synthetic construct
  source 1..80: mol_type = other DNA
ttgttaaaatggggataaattctatctggattcagggatgatctcccacctgtgtctgtttgcccctgtggcagctcccc

SEQ ID NO: 39211 - DNA, 80 bp, synthetic construct
  source 1..80: mol_type = other DNA
cggtcccagcactactcctccaaagcctggatcaaattgtctgctttaaggaaagatcaaactagctcctccaggggtcc

SEQ ID NO: 39212 - DNA, 80 bp, synthetic construct
  source 1..80: mol_type = other DNA
cataaattggtgaattgaaatgaataggaatccctgcttcatgaggaatataaacagtaagtcaggtgtgtgtatgtgtg

SEQ ID NO: 39213 - DNA, 80 bp, synthetic construct; identical to SEQ ID NO: 13680
  source 1..80: mol_type = other DNA

SEQ ID NO: 39214 - DNA, 80 bp, synthetic construct
  source 1..80: mol_type = other DNA
gtaaaatgggaaccaggtagaacgtttgagcaaagtaaggccatgattggacttcaaattttttacagaaataaacttta

SEQ ID NO: 39215 - DNA, 80 bp, synthetic construct
  source 1..80: mol_type = other DNA
agttacgtgccacatcatgatgtttccatccacaaatggccacatatatgacaaagttcctataagattatattactact

SEQ ID NO: 39216 - DNA, 80 bp, synthetic construct
  source 1..80: mol_type = other DNA
gcctcagcctcctgagtagctgggattacaggcatgtgccaccacacctggctaatttttgtatttttattttttattat

SEQ ID NO: 39217 - DNA, 80 bp, synthetic construct
  source 1..80: mol_type = other DNA
tttttgtatttttagtagagacggggtttcaccatgttagctagactggtctcaaactcccgacctcgtgatccgcccac

SEQ ID NO: 39218 - DNA, 80 bp, synthetic construct; identical to SEQ ID NO: 13681
  source 1..80: mol_type = other DNA

SEQ ID NO: 39219 - DNA, 80 bp, synthetic construct
  source 1..80: mol_type = other DNA
actaaatcaccaaacaaagcatttctcagaccgtatcccattgttaagcaatacagaactgtacaatacggttttattaa

SEQ ID NO: 39220 - DNA, 80 bp, synthetic construct
  source 1..80: mol_type = other DNA
cttcctatatctctgctattttgtgtcctttgacctgtatctctccaattcctacccctctaccatgcccactcataata

SEQ ID NO: 39221 - DNA, 80 bp, synthetic construct; identical to SEQ ID NO: 13682
  source 1..80: mol_type = other DNA

SEQ ID NO: 39222 - DNA, 80 bp, synthetic construct
  source 1..80: mol_type = other DNA
acttagattttaaagggatcactccagttgctgcattgagaataggctgaagggagatccatttaggaggctcttgcagt

SEQ ID NO: 39223 - DNA, 80 bp, synthetic construct
  source 1..80: mol_type = other DNA
ttgaaggtaaagccaacagaatttcttgatggtctggatatgagatgtgtatgtgtaagagagacagatcaagggtgatt

SEQ ID NO: 39224 - DNA, 80 bp, synthetic construct
  source 1..80: mol_type = other DNA
ttgcctcagccacccgagtagctgggactacaggtgcacgccaccacgcctggctaatttttgtatttttagtagagatg

SEQ ID NO: 39225 - DNA, 80 bp, synthetic construct; identical to SEQ ID NO: 13683
  source 1..80: mol_type = other DNA

SEQ ID NO: 39226 - DNA, 80 bp, synthetic construct
  source 1..80: mol_type = other DNA
atttgggagtaatcaatatacagattgtacttaaagccacgagactgggtttgtacagacagagaagaggacaaggacag

SEQ ID NO: 39227 - DNA, 80 bp, synthetic construct
  source 1..80: mol_type = other DNA
ccagggagacgaggactgacaggtgggctcactgctctggagatttttgtttcactttgtttttaatgctccacattaaa

SEQ ID NO: 39228 - DNA, 80 bp, synthetic construct; identical to SEQ ID NO: 13684
  source 1..80: mol_type = other DNA

SEQ ID NO: 39229 - DNA, 80 bp, synthetic construct
  source 1..80: mol_type = other DNA
aaattcatctaaatttaaatataaagagccatctgtggcaagtggctaccttaatggacagaacaattctaagtggtcat

SEQ ID NO: 39230 - DNA, 80 bp, synthetic construct
  source 1..80: mol_type = other DNA
tgacctaggcgtggtctaaagttctagggtttattagccagtttacaagctctctaaagtctcctgaagcctgtttcttc

SEQ ID NO: 39231 - DNA, 80 bp, synthetic construct
  source 1..80: mol_type = other DNA
ctgtcaatttccttcatgaaacttcccctgtccactcagccgtatctcctgagcagcaaatcatttaaattcctttgaaa

SEQ ID NO: 39232 - DNA, 80 bp, synthetic construct; identical to SEQ ID NO: 13685
  source 1..80: mol_type = other DNA

SEQ ID NO: 39233 - DNA, 80 bp, synthetic construct
  source 1..80: mol_type = other DNA
tttgttgccaaaggcgaaaaacgaaactctttgaaacccaatttgctcatctgtcaatttgttcatctatcaaaagcagt

SEQ ID NO: 39234 - DNA, 80 bp, synthetic construct
  source 1..80: mol_type = other DNA
tatggcaaatggggattgtattttactcactgttgtcctccatagcactcacacagtgccctgagcatattaggttctta

SEQ ID NO: 39235 - DNA, 80 bp, synthetic construct
  source 1..80: mol_type = other DNA
tacagtctcattccttctgtttctcaagtggccatttaaattctttagattgcagggctgtcatagataattcctctact

SEQ ID NO: 39236 - DNA, 80 bp, synthetic construct
  source 1..80: mol_type = other DNA
ttttgtaaaggaccaaagagtaggtactttagacttgtatactatagtatctctgttgagattattaacctctgccattc

SEQ ID NO: 39237 - DNA, 80 bp, synthetic construct; identical to SEQ ID NO: 13686
  source 1..80: mol_type = other DNA

SEQ ID NO: 39238 - DNA, 80 bp, synthetic construct
  source 1..80: mol_type = other DNA
tctttttcaatgttgttttggctgttcatagagtcccttgcaattgtatatgagtttgagaatcagcttttccatttctt

SEQ ID NO: 39239 - DNA, 80 bp, synthetic construct
  source 1..80: mol_type = other DNA
cagctaatttttgtatttttagtagagacaaggtttcaccatgttggccaggctggtctcgaactcctgacctcaggtga

SEQ ID NO: 39240 - DNA, 80 bp, synthetic construct
  source 1..80: mol_type = other DNA
tcttccaatccatgaaaacgaaatgtcttttcatttaattgagtcgtctttaatttctttcagcaatattttgtagttct

SEQ ID NO: 39241 - DNA, 80 bp, synthetic construct; identical to SEQ ID NO: 13687
  source 1..80: mol_type = other DNA

SEQ ID NO: 39242 - DNA, 80 bp, synthetic construct
  source 1..80: mol_type = other DNA
caggacattccactccggcatatcaccctaaacactagaagactgctttccagcatcgggcctgctcttgagctttctag

SEQ ID NO: 39243 - DNA, 80 bp, synthetic construct
  source 1..80: mol_type = other DNA
atctctgcctgtaattctttctaacacatttttatcaccaactccacccatagctgccctatgtagaacagatttcttgt

SEQ ID NO: 39244 - DNA, 80 bp, synthetic construct
  source 1..80: mol_type = other DNA
tgtctctcccctcctgcaggcctggagtccttgcatggagcccaggggtgagtcatgtagagaatgggatggatggctgg

SEQ ID NO: 39245 - DNA, 80 bp, synthetic construct; identical to SEQ ID NO: 13688
  source 1..80: mol_type = other DNA

SEQ ID NO: 39246 - DNA, 80 bp, synthetic construct
  source 1..80: mol_type = other DNA
cggactgacagtgctgacagtggtgccatggtgctgtgacctgataccatgtcaggcaccatgaaaagagcgaatagcta

SEQ ID NO: 39247 - DNA, 80 bp, synthetic construct
  source 1..80: mol_type = other DNA
agaggcctggaggcaagaagacagagaaagtaatgagacaagaaccctgggaagccatggaagggaggctaagtacatga

SEQ ID NO: 39248 - DNA, 80 bp, synthetic construct; identical to SEQ ID NO: 13689
  source 1..80: mol_type = other DNA

SEQ ID NO: 39249 - DNA, 80 bp, synthetic construct
  source 1..80: mol_type = other DNA
ttacaaatctttactttgggcaaggctcagtagggaagattcaaaaggctaatctgtgctccatgtagcatcagctgaat

SEQ ID NO: 39250 - DNA, 80 bp, synthetic construct
  source 1..80: mol_type = other DNA
gagcttcctcacaacatggtagctgagttctaagactgagcaacccacaagaaccatgcagaagctgttttgcctttttt

SEQ ID NO: 39251 - DNA, 80 bp, synthetic construct
  source 1..80: mol_type = other DNA
ttaggaaaacataataccatctccatatgagccatggagaaggaatggccatattttgacattaccacatacttagaacc

SEQ ID NO: 39252 - DNA, 80 bp, synthetic construct; identical to SEQ ID NO: 13690
  source 1..80: mol_type = other DNA

SEQ ID NO: 39253 - DNA, 80 bp, synthetic construct
  source 1..80: mol_type = other DNA
agatgcccccagcctggtgctctctaagggaacgtgaacgggctccagaggacagaggcagctgctggttccagaaatga

SEQ ID NO: 39254 - DNA, 80 bp, synthetic construct
  source 1..80: mol_type = other DNA
acacttctcttctgtctcccacctcttaccccctcccgtgctgttggaggttggtttttgcttgcaggactccagcaagc

SEQ ID NO: 39255 - DNA, 80 bp, synthetic construct
  source 1..80: mol_type = other DNA
tccggagtcctttccaaggcatatttttcaaagggagggccaaggatcacctatttaaaatcttacctggagactctatt

SEQ ID NO: 39256 - DNA, 80 bp, synthetic construct
  source 1..80: mol_type = other DNA
ctcacctccgttgagcacctgctctatgccgtgtgttgtgttacatgtcggagacatgaggataaataagacatggtacc

SEQ ID NO: 39257 - DNA, 80 bp, synthetic construct; identical to SEQ ID NO: 13691
  source 1..80: mol_type = other DNA

SEQ ID NO: 39258 - DNA, 80 bp, synthetic construct
  source 1..80: mol_type = other DNA
gtttttctgaactaaaaaatcagagtagtgtagaagacagagtcctggacaaggaataaaatggccgggatgctctcagc

SEQ ID NO: 39259 - DNA, 80 bp, synthetic construct
  source 1..80: mol_type = other DNA
cagaatgctgtaccttggtttcagagtggcttgtaggtcccagttgaacagtagtcagcgcgagacaaggcagaaacaaa

SEQ ID NO: 39260 - DNA, 80 bp, synthetic construct; identical to SEQ ID NO: 13692
  source 1..80: mol_type = other DNA

SEQ ID NO: 39261 - DNA, 80 bp, synthetic construct
  source 1..80: mol_type = other DNA
gggcataacggcccccccattccagctgtgtgaggcagcagtggtgcgggctctttcttctgggcacgtgactcacaata

SEQ ID NO: 39262 - DNA, 80 bp, synthetic construct
  source 1..80: mol_type = other DNA
tgagctgctttgctacctcaggaaagcagagtaagctgttgctgcatcaccattttaaatgttaatgatttgtattattt

SEQ ID NO: 39263 - DNA, 80 bp, synthetic construct
  source 1..80: mol_type = other DNA
cccctgtgaggtggggagggggtgtgagcagctgcagggccctgctctcccattccatctcagggtgggccatgcagggt

SEQ ID NO: 39264 - DNA, 80 bp, synthetic construct; identical to SEQ ID NO: 13693
  source 1..80: mol_type = other DNA

SEQ ID NO: 39265 - DNA, 80 bp, synthetic construct
  source 1..80: mol_type = other DNA
ggatcagtgctgaggcacaccctggcatgggtcatgcttctcttcaaggggtgtctctcaggatagcccaagttcaggag

SEQ ID NO: 39266 - DNA, 80 bp, synthetic construct
  source 1..80: mol_type = other DNA
cttaatgttttccagaaaagaacttcccaaaatgtccattgcaggatgatccaatagaaagagggaagctaatgtaccct

SEQ ID NO: 39267 - DNA, 80 bp, synthetic construct
  source 1..80: mol_type = other DNA
ctacccattccgtggtctgagtagcttcattaagaatccaattcattcatatatccatgcactcaggaaatgattattat

SEQ ID NO: 39268 - DNA, 80 bp, synthetic construct
  source 1..80: mol_type = other DNA
atacagggtgctaagggaacctggggtgcaggggcacccagcctgcccttgggggtagtggaaggcttctcagaggtgat

SEQ ID NO: 39269 - DNA, 80 bp, synthetic construct; identical to SEQ ID NO: 13694
  source 1..80: mol_type = other DNA

SEQ ID NO: 39270 - DNA, 80 bp, synthetic construct
  source 1..80: mol_type = other DNA
aaaaaaaaaaaaaaacttctacttaaattctgccagggacagggagctcactgcctggtcgtcagtttttcctaatgttg

SEQ ID NO: 39271 - DNA, 80 bp, synthetic construct
  source 1..80: mol_type = other DNA
attacttccgatcttctcttccttagaaggagtctttcctgccccctcagtcccttcttatgtgatttgatttttacccg

SEQ ID NO: 39272 - DNA, 80 bp, synthetic construct; identical to SEQ ID NO: 13695
  source 1..80: mol_type = other DNA

SEQ ID NO: 39273 - DNA, 80 bp, synthetic construct
  source 1..80: mol_type = other DNA
agcacaccccctcccagttttgtgccctctgcagattttatcagcatgctctgtgggttgtcattcctggcacctgaaaa

SEQ ID NO: 39274 - DNA, 80 bp, synthetic construct
  source 1..80: mol_type = other DNA
ggcgaggtttaattgcaatgggatttatgaccgtagcttgtaggaggtaatagatgtagctgtgtctcttttatcttctc

SEQ ID NO: 39275 - DNA, 80 bp, synthetic construct
  source 1..80: mol_type = other DNA
aggtgactgctttgctagctttatctcttcacagcagctttggaagatagggaaaggaaggctcaattctccattttaca

SEQ ID NO: 39276 - DNA, 80 bp, synthetic construct
  source 1..80: mol_type = other DNA
actcattcctcttccatcattatttaagagataatgtctatgacagcacattgtaaactaaagtctaaaggtgctatcca

SEQ ID NO: 39277 - DNA, 80 bp, synthetic construct; identical to SEQ ID NO: 13696
  source 1..80: mol_type = other DNA

SEQ ID NO: 39278 - DNA, 80 bp, synthetic construct
  source 1..80: mol_type = other DNA
acttaaatctcgtggaggttagggagaggacacagaagattaagcacttactgaaaagtatcaaatgtgtcctaatagag

SEQ ID NO: 39279 - DNA, 80 bp, synthetic construct
  source 1..80: mol_type = other DNA
tactctagatgaaggggacatggaacagtgctttttcagggcctgagtcaagagagaatatgattctttttgaaatgtag

SEQ ID NO: 39280 - DNA, 80 bp, synthetic construct; identical to SEQ ID NO: 13697
  source 1..80: mol_type = other DNA

SEQ ID NO: 39281 - DNA, 80 bp, synthetic construct
  source 1..80: mol_type = other DNA
cgggggcactaatgcttatcctgggccaggtgctgggattcggcttatctgtggagcaataattgaagccaaggatatgt

SEQ ID NO: 39282 - DNA, 80 bp, synthetic construct
  source 1..80: mol_type = other DNA
tgtctcataaaaacaaaaaaacaaagtaaaacgaaacaaaagcaattggaagctcatgaacccccctagaggttgttctg

SEQ ID NO: 39283 - DNA, 80 bp, synthetic construct
  source 1..80: mol_type = other DNA
gtcaggtatggagaacgacatttgcaaaaggcttggggattctcaaattcctgtggccccaaacctctgggaagaaaacg

SEQ ID NO: 39284 - DNA, 80 bp, synthetic construct; identical to SEQ ID NO: 13698
  source 1..80: mol_type = other DNA

SEQ ID NO: 39285 - DNA, 80 bp, synthetic construct
  source 1..80: mol_type = other DNA
caatggtgagctggctaaggcttctgaactgggagtgactctatcagagctgagaagaaggaaccagagcttgatttgca

SEQ ID NO: 39286 - DNA, 80 bp, synthetic construct
  source 1..80: mol_type = other DNA
caatcctcccccctcagcctcccaagtagctgggattacaggcgcctgccactgtgcccagctaatttttgtatttttag

SEQ ID NO: 39287 - DNA, 80 bp, synthetic construct
  source 1..80: mol_type = other DNA
gctctatgtgaattgagtgactgctatgtgcaggctcagagctatggtacaaaaggtgcaaagagaactaagatgcagtc

SEQ ID NO: 39288 - DNA, 80 bp, synthetic construct; identical to SEQ ID NO: 13699
  source 1..80: mol_type = other DNA

SEQ ID NO: 39289 - DNA, 80 bp, synthetic construct
  source 1..80: mol_type = other DNA
tcatacccaagaggggaaaggatgctgcggcggtggctcctcgtcgctctgacaggcagtttggggtccagccaggagat

SEQ ID NO: 39290 - DNA, 80 bp, synthetic construct
  source 1..80: mol_type = other DNA
gtggtgggcaacgctgcaggaacaggctttcagaagggcagctgctgtggggcatcctttggcaatgtttacagtatcac

SEQ ID NO: 39291 - DNA, 80 bp, synthetic construct
  source 1..80: mol_type = other DNA
agcctgcatagaaagacaccgcagggccaggaaatctgagtcctaaaagtttaaaaaaaaaaaagcgatgggagaacttg

SEQ ID NO: 39292 - DNA, 80 bp, synthetic construct
  source 1..80: mol_type = other DNA
ggtgtgtgggattctgatcagggaagcccagccgcccagcctggggtgcccttccagctctgggctttgtgggcaggaat

SEQ ID NO: 39293 - DNA, 80 bp, synthetic construct; identical to SEQ ID NO: 13700
  source 1..80: mol_type = other DNA

SEQ ID NO: 39294 - DNA, 80 bp, synthetic construct
  source 1..80: mol_type = other DNA
gtaagtccatcagggacctcccagccactccctcctctccccgtctttacccaggctttctggaaacagcagaaaaagct

SEQ ID NO: 39295 - DNA, 80 bp, synthetic construct
  source 1..80: mol_type = other DNA
agagattggtgtcgctggataataatgtggttccctgccactctcctctctagcgttctaagccagggacacttaacctc

SEQ ID NO: 39296 - DNA, 80 bp, synthetic construct
  source 1..80: mol_type = other DNA
tcatatccaagtcaccttaggtgggcaggtggatgtccagggctgtgggtctgccgcctgggagggccagcctggccgct

SEQ ID NO: 39297 - DNA, 80 bp, synthetic construct; identical to SEQ ID NO: 13701
  source 1..80: mol_type = other DNA

SEQ ID NO: 39298 - DNA, 80 bp, synthetic construct
  source 1..80: mol_type = other DNA
caaatcagagatctcacattcttctgcagagacaccatcaataatttcatagcattttatgcatgcttgggtgagtcctt

SEQ ID NO: 39299 - DNA, 80 bp, synthetic construct
  source 1..80: mol_type = other DNA
atatgaaggttttagagtgagacggatctagattcaaatcggctctgatactcactgcctgtgtgaccttgggccagcta

SEQ ID NO: 39300 - DNA, 80 bp, synthetic construct
  source 1..80: mol_type = other DNA
ccttccccctttccttcaggtctcaggagtccagagtcattcatacatactctttctcccactgtaaagaggtatttaat

SEQ ID NO: 39301 - DNA, 80 bp, synthetic construct; identical to SEQ ID NO: 13702
  source 1..80: mol_type = other DNA

SEQ ID NO: 39302 - DNA, 80 bp, synthetic construct
  source 1..80: mol_type = other DNA
atttgtaaaaattcaagctgtttcaggaaataacttttacttaaagcaaactacacctgggattggggagcactgccctg

SEQ ID NO: 39303 - DNA, 80 bp, synthetic construct
  source 1..80: mol_type = other DNA
aggtgggattggtcatgaaatcgataagcactgcattttgtgtttgattctggtttattgtagactgttttctgcagaca

SEQ ID NO: 39304 - DNA, 80 bp, synthetic construct
  source 1..80: mol_type = other DNA
gggaggtaggaactgatggtgttgatgtgtcctgctttggttaagattagctcaggactgaaaggaactaagctttcaga

SEQ ID NO: 39305 - DNA, 80 bp, synthetic construct; identical to SEQ ID NO: 13703
  source 1..80: mol_type = other DNA

SEQ ID NO: 39306 - DNA, 80 bp, synthetic construct
  source 1..80: mol_type = other DNA
gacagaagagagagggacaagaagttaaagatgattctaggttccaaagctggatgagtttgttcattcacgtattcatt

SEQ ID NO: 39307 - DNA, 80 bp, synthetic construct
  source 1..80: mol_type = other DNA
gagggaaagacatgcttttctggaggtaactgtctaatgaagggtttatggatacaaaaatgggcaattacaacatctgt

SEQ ID NO: 39308 - DNA, 80 bp, synthetic construct
  source 1..80: mol_type = other DNA
aaacaaatgtggatgaggcatctggttggcaagcagacatgattgatgacctttgagagtgcagtttcaagagaattaga

SEQ ID NO: 39309 - DNA, 80 bp, synthetic construct
  source 1..80: mol_type = other DNA
ggtcctgggatcactcaggagcaagcaagaacctttactgtggtttctgtgggaagaaccaggtgaagcaaggcaagcag

SEQ ID NO: 39310 - DNA, 80 bp, synthetic construct; identical to SEQ ID NO: 13704
  source 1..80: mol_type = other DNA

SEQ ID NO: 39311 - DNA, 80 bp, synthetic construct
  source 1..80: mol_type = other DNA
catgttttaactcacttctcatggtgtcttttggacttaagtactactttactgaggaggaatcttaagctcagagaggt

SEQ ID NO: 39312 - DNA, 80 bp, synthetic construct
  source 1..80: mol_type = other DNA
atatatggcattcttctttcaaaaacttccaatttgattctactacttccgccatgatggaggtaatggtgttttggcag

SEQ ID NO: 39313 - DNA, 80 bp, synthetic construct
  source 1..80: mol_type = other DNA
gacgtggtggagcatgcctgtaatcccagctacttgggaggctgaggcaggagaatcacttgaacccaggaagcggaggt

SEQ ID NO: 39314 - DNA, 80 bp, synthetic construct; identical to SEQ ID NO: 13705
  source 1..80: mol_type = other DNA

SEQ ID NO: 39315 - DNA, 80 bp, synthetic construct
  source 1..80: mol_type = other DNA
ggtaattatgttttccttaatgaagtttaaaaggggtggtaactaacagggctttatcctgacaccagccattcctcatc

SEQ ID NO: 39316 - DNA, 80 bp, synthetic construct
  source 1..80: mol_type = other DNA
caatgtctctctagttattttgttgtctgaaattcattctttagcagattcctaaaggagggctcttgggaacaatattc

SEQ ID NO: 39317 - DNA, 80 bp, synthetic construct
  source 1..80: mol_type = other DNA
tgccctgagaggtattctagttatccccactgtgagggtgacaagcaacaccaggacccagaagccctggatctgccatt

SEQ ID NO: 39318 - DNA, 80 bp, synthetic construct; identical to SEQ ID NO: 13706
  source 1..80: mol_type = other DNA

SEQ ID NO: 39319 - DNA, 80 bp, synthetic construct
  source 1..80: mol_type = other DNA
ctatgagtgttgacgaatgcatgcaagcatgtaaccatcaccataatcaagatctggaaccattgcagtgccctggaaac

SEQ ID NO: 39320 - DNA, 80 bp, synthetic construct
  source 1..80: mol_type = other DNA
ttttcatctgttttctttcagttagcgtaatgcattttacaatcatccatgttgttgcctgtatcacaagtttgttcctt

SEQ ID NO: 39321 - DNA, 80 bp, synthetic construct; identical to SEQ ID NO: 13707
  source 1..80: mol_type = other DNA

SEQ ID NO: 39322 - DNA, 80 bp, synthetic construct
  source 1..80: mol_type = other DNA
ggtactgggtaccctcaagattcaggacagtccaacacaatgaaggcatttcctgcttcctccaagacttttgcatgttc

SEQ ID NO: 39323 - DNA, 80 bp, synthetic construct
  source 1..80: mol_type = other DNA
ctttgttttgttctgaattttaccaaaattgtgcaccattttggaaaatcatatcaccctcttcactcttgccaacttgg

SEQ ID NO: 39324 - DNA, 80 bp, synthetic construct
  source 1..80: mol_type = other DNA
attgcaaattttctttttattattctttatataattagggattatgtggatttttgaaaacaattaggtatgcagttaca

SEQ ID NO: 39325 - DNA, 80 bp, synthetic construct; identical to SEQ ID NO: 13708
  source 1..80: mol_type = other DNA

SEQ ID NO: 39326 - DNA, 80 bp, synthetic construct
  source 1..80: mol_type = other DNA
tttatacagcagggaagaaatgtaacagtgtgtaagaaaacaggaactagggaggggcaaggaagcagtcatgaggaatg

SEQ ID NO: 39327 - DNA, 80 bp, synthetic construct
  source 1..80: mol_type = other DNA
aaaaaaaaaaaatctatggaactattgggtcactttctgttcccttggccatatccagaggcatttggaaatacatttgg

SEQ ID NO: 39328 - DNA, 80 bp, synthetic construct
  source 1..80: mol_type = other DNA
aaataggtagcacttagggtattcaggaaggcttctctgagttatacctaatggtgagaaagaggcagtgttacaaaaac

SEQ ID NO: 39329 - DNA, 80 bp, synthetic construct; identical to SEQ ID NO: 13709
  source 1..80: mol_type = other DNA

SEQ ID NO: 39330 - DNA, 80 bp, synthetic construct
  source 1..80: mol_type = other DNA
tgaattagagatgtattttggagatagaatactccacatccattaatcacgtccattggccagagcctatggacatgatt

SEQ ID NO: 39331 - DNA, 80 bp, synthetic construct
  source 1..80: mol_type = other DNA
tagacatagatcatgtcaactaatagttgggcatagaagttgagagatgcaggctggggataaacatttgaaagtcatca

SEQ ID NO: 39332 - DNA, 80 bp, synthetic construct
  source 1..80: mol_type = other DNA
tttacaataaaactaggtgacgggagtatttccatgaacttccaaatacaatagggtggggagaaacaattaacaaataa

SEQ ID NO: 39333 - DNA, 80 bp, synthetic construct
  source 1..80: mol_type = other DNA
aatttgaggataggaactgcagttgggaggggtttggcccacttcagtagtaggtatgtgcaacaagtccaccagatgga

SEQ ID NO: 39334 - DNA, 80 bp, synthetic construct; identical to SEQ ID NO: 13710
  source 1..80: mol_type = other DNA

SEQ ID NO: 39335 - DNA, 80 bp, synthetic construct
  source 1..80: mol_type = other DNA
aagcacaccagaaactcatgctcagaaaagcagaaaaaaataaaaacctatggcacactgtttcacgatgagctcaaaag

SEQ ID NO: 39336 - DNA, 80 bp, synthetic construct; identical to SEQ ID NO: 13711
  source 1..80: mol_type = other DNA

SEQ ID NO: 39337 - DNA, 80 bp, synthetic construct
  source 1..80: mol_type = other DNA
aaagaaaaaaaatactttggacatctaagctaaaagtgacatataggagaaagaaaatgacattgtcattctgacttttc

SEQ ID NO: 39338 - DNA, 80 bp, synthetic construct
  source 1..80: mol_type = other DNA
tattgttcccaagagccctccttcgggaatctgctaacgaatgaatttcagacaacaaaataactagagagagattgaca

SEQ ID NO: 39339 - DNA, 80 bp, synthetic construct
  source 1..80: mol_type = other DNA
tgtgggtacatagtaggtgtatatatttatgaggtacatgagatactttgatacaggcatacaatgtataataattacat

SEQ ID NO: 39340 - DNA, 80 bp, synthetic construct; identical to SEQ ID NO: 13712
  source 1..80: mol_type = other DNA

SEQ ID NO: 39341 - DNA, 80 bp, synthetic construct
  source 1..80: mol_type = other DNA
ggctgaatagtactccattgtgtatatgtaccacattttctttatccattcatctgttgacggacacttaagttgcttcc

SEQ ID NO: 39342 - DNA, 80 bp, synthetic construct
  source 1..80: mol_type = other DNA
ttagtggttatactaatctacattcccaccagcagtgtgtgagggttcccttttctccacatgcttgccagcgtttgtta

SEQ ID NO: 39343 - DNA, 80 bp, synthetic construct
  source 1..80: mol_type = other DNA
ttgcccatttcttaattggatcattggactttttcctatagagttgtttgagctccttatatattctggtaattaatctc

SEQ ID NO: 39344 - DNA, 80 bp, synthetic construct
  source 1..80: mol_type = other DNA
gaaatctttgcccagaccagtgtcctggagagtttctccagtgttttcttgtagtagtttcatagattgaagtcttagct

SEQ ID NO: 39345 - DNA, 80 bp, synthetic construct; identical to SEQ ID NO: 13713
  source 1..80: mol_type = other DNA

SEQ ID NO: 39346 - DNA, 80 bp, synthetic construct
  source 1..80: mol_type = other DNA
agaccctgtctcaaagaaagaaaggaaaaaagagttcactgtagatgtatggatttttgtctgggttgtcaattctgttt

SEQ ID NO: 39347 - DNA, 80 bp, synthetic construct
  source 1..80: mol_type = other DNA
ttctatttccgtgaagaatgtaattgatattttcatagagattgcactgcatctgtagatgctgtgggtagtatggacat

SEQ ID NO: 39348 - DNA, 80 bp, synthetic construct; identical to SEQ ID NO: 13714
  source 1..80: mol_type = other DNA

SEQ ID NO: 39349 - DNA, 80 bp, synthetic construct
  source 1..80: mol_type = other DNA
gtctgattgctctagctaggacttccagtactatgttgaataaaagtggggatggtgggcatccttgttgtgttctggat

SEQ ID NO: 39350 - DNA, 80 bp, synthetic construct
  source 1..80: mol_type = other DNA
tttcagcaacaattgaaatgatcatatggtttttgtctgtcattcttttgatataatgtcacgttgcttgattgtcatat

SEQ ID NO: 39351 - DNA, 80 bp, synthetic construct
  source 1..80: mol_type = other DNA
gtctggttttgttctcagggtaatactggccaaatagaatgagtttggaagtattcccttttcctgttttttggaatagt

SEQ ID NO: 39352 - DNA, 80 bp, synthetic construct
  source 1..80: mol_type = other DNA
ggaggccgtatctaggaatttgtctatttcttctagattttccaatttattggtatatagttgcttatagtagccactaa

SEQ ID NO: 39353 - DNA, 80 bp, synthetic construct; identical to SEQ ID NO: 13715
  source 1..80: mol_type = other DNA

SEQ ID NO: 39354 - DNA, 80 bp, synthetic construct
  source 1..80: mol_type = other DNA
ggactacaggtgtgcaccacaacacccggctaatttttgtatattttttagtagagacggggtttcaccatattggctag

SEQ ID NO: 39355 - DNA, 80 bp, synthetic construct
  source 1..80: mol_type = other DNA
caggtataagcttccctcttagtactgttttcactgtattgatagcttttagtatgttgtgtttccattatcgtttgttt

SEQ ID NO: 39356 - DNA, 80 bp, synthetic construct
  source 1..80: mol_type = other DNA
tgtgacgtagcatatggtctgtccttgagaatgatccacgtgctgagaagaagaatgtgtattctgcagccactggatga

SEQ ID NO: 39357 - DNA, 80 bp, synthetic construct; identical to SEQ ID NO: 13716
  source 1..80: mol_type = other DNA

SEQ ID NO: 39358 - DNA, 80 bp, synthetic construct
  source 1..80: mol_type = other DNA
tttcttgtaggcaacagattatgtggtcttgttattttgtgcattcaagcactgtgtgtctttttattggagaatttagt

SEQ ID NO: 39359 - DNA, 80 bp, synthetic construct
  source 1..80: mol_type = other DNA
gctttttattttttgtgtatctgttgtatttttttggggggggagcttaccataaggtttgcaaatactattttataact

SEQ ID NO: 39360 - DNA, 80 bp, synthetic construct; identical to SEQ ID NO: 13717
  source 1..80: mol_type = other DNA

SEQ ID NO: 39361 - DNA, 80 bp, synthetic construct
  source 1..80: mol_type = other DNA
cagactggtcttgaactcctaacctcatgatccacctgcctcagcttcccaaagtgctgggattacaggcgtgagccact

SEQ ID NO: 39362 - DNA, 80 bp, synthetic construct
  source 1..80: mol_type = other DNA
tgaagaactacctttagcatttttttgtaggagaggtctgatgattgatgaaatctctcagcttttgtttgtctgggaaa

SEQ ID NO: 39363 - DNA, 80 bp, synthetic construct
  source 1..80: mol_type = other DNA
tgtatattatttgtttctgttctcttgctgcttttaggatcctttctttatttctgacttttgggagtttgattactaaa

SEQ ID NO: 39364 - DNA, 80 bp, synthetic construct; identical to SEQ ID NO: 13718
  source 1..80: mol_type = other DNA

SEQ ID NO: 39365 - DNA, 80 bp, synthetic construct
  source 1..80: mol_type = other DNA
cctgcttgattctttttaattatttcaatccctttgttaaatttatctgatagaattctgaaatccttttctctattatc

SEQ ID NO: 39366 - DNA, 80 bp, synthetic construct
  source 1..80: mol_type = other DNA
ttgggcattgagcagttaggtgtttatcgtagtcttcacaatttggacttcgcaatctgtgttattcttcttgggaagac

SEQ ID NO: 39367 - DNA, 80 bp, synthetic construct
  source 1..80: mol_type = other DNA
ggcagagactcttgttctcttcccttagtttctctcaaacaaatggcatatttctctctctgtgcttagccacctggagc

SEQ ID NO: 39368 - DNA, 80 bp, synthetic construct
  source 1..80: mol_type = other DNA
caggtagcaaagccagccaggtttgcatcctttctttcaaggcgacaagttcccccaggcccaaagtgggtctatagata

SEQ ID NO: 39369 - DNA, 80 bp, synthetic construct; identical to SEQ ID NO: 13719
  source 1..80: mol_type = other DNA

SEQ ID NO: 39370 - DNA, 80 bp, synthetic construct
  source 1..80: mol_type = other DNA
ctcctgtggccgagctagtaactgaagccagtacatcttagagtctcacccaaggcccatggtctgtattccctgggtat

SEQ ID NO: 39371 - DNA, 80 bp, synthetic construct
  source 1..80: mol_type = other DNA
cccagagtcctatcctactgtggctgagctggtaactaagatgcaagacaaagttgtctttactcttctctcttctgtcc

SEQ ID NO: 39372 - DNA, 80 bp, synthetic construct; identical to SEQ ID NO: 13720
  source 1..80: mol_type = other DNA

SEQ ID NO: 39373 - DNA, 80 bp, synthetic construct
  source 1..80: mol_type = other DNA
agaagaggtaaggttgtagatctggacttgaatttgaatttttaattacatatattctctctctctctctctctctcccc

SEQ ID NO: 39374 - DNA, 80 bp, synthetic construct
  source 1..80: mol_type = other DNA
gtacaatataagcctggaataggtcatgtaaaaggacttagaagccaacgtaagaggattcccactagccgaagatgaca

SEQ ID NO: 39375 - DNA, 80 bp, synthetic construct
  source 1..80: mol_type = other DNA
cctgaggatggccgggaaccactttatcttgaaaactgagtaaatacaggaaatgagcacttttcttgtcactactattt

SEQ ID NO: 39376 - DNA, 80 bp, synthetic construct; identical to SEQ ID NO: 13721
  source 1..80: mol_type = other DNA

SEQ ID NO: 39377 - DNA, 80 bp, synthetic construct
  source 1..80: mol_type = other DNA
aggaaagagatgaaggaggaatccgtaaattaaaagagagttagaagacataaagtttcaaaaactaggcaagactagtg

SEQ ID NO: 39378 - DNA, 80 bp, synthetic construct
  source 1..80: mol_type = other DNA
gacatggggggctttctgggtggttggcaaatttctatatcttaacctgcatagttattatgaggtgttcaccttataat

SEQ ID NO: 39379 - DNA, 80 bp, synthetic construct
  source 1..80: mol_type = other DNA
aaccagaaaaagtgatgaaaacataagcggaatttaaagccttgggaatggataatttcatttgggagagaggatagata

SEQ ID NO: 39380 - DNA, 80 bp, synthetic construct; identical to SEQ ID NO: 13722
  source 1..80: mol_type = other DNA

SEQ ID NO: 39381 - DNA, 80 bp, synthetic construct
  source 1..80: mol_type = other DNA
tgactgtcttagtgccaggcacaatacaagtcagactcagccccaatggcagggcactctgcttggaagatgagctacat

SEQ ID NO: 39382 - DNA, 80 bp, synthetic construct
  source 1..80: mol_type = other DNA
ttctgatccccatcaccacctgccttggcaaagttgagaggatgtattctccctgtgtcttgttcgtgccttccctctga

SEQ ID NO: 39383 - DNA, 80 bp, synthetic construct; identical to SEQ ID NO: 13723
  source 1..80: mol_type = other DNA

SEQ ID NO: 39384 - DNA, 80 bp, synthetic construct
  source 1..80: mol_type = other DNA
atatggaaataatagtagtgcctgcttgtagaattactatcagaaatgggttcctatgcttaaaatgcttagagcagtgc

SEQ ID NO: 39385 - DNA, 80 bp, synthetic construct
  source 1..80: mol_type = other DNA
tggaggtgagagtctgtacattaggactgctcactgcccaatgaggttagagttgcagggaccatggagatgattttcta

SEQ ID NO: 39386 - DNA, 80 bp, synthetic construct
  source 1..80: mol_type = other DNA
agacaacatgtttagacatctcttatttcaacatatacctatcagagcaaaattctgcattgcaatacggggcactttgg

SEQ ID NO: 39387 - DNA, 80 bp, synthetic construct
  source 1..80: mol_type = other DNA
agaggtgacttttgtggctccaaacagagtccactaacaagatcacacacagaccaaacccattacccttgccctaggac

SEQ ID NO: 39388 - DNA, 80 bp, synthetic construct; identical to SEQ ID NO: 13724
  source 1..80: mol_type = other DNA

SEQ ID NO: 39389 - DNA, 80 bp, synthetic construct
  source 1..80: mol_type = other DNA
gcggtggcagtagctcccagcccctccttccctcacccccgcatgagtggcagagccttcagctagagaaaggataggga

SEQ ID NO: 39390 - DNA, 80 bp, synthetic construct
  source 1..80: mol_type = other DNA
attgcctggtaacttgggaggaactatctctggcatctgcctgggatcctggtctccctggtttggtccagaggagttta

SEQ ID NO: 39391 - DNA, 80 bp, synthetic construct; identical to SEQ ID NO: 13725
  source 1..80: mol_type = other DNA

SEQ ID NO: 39392 - DNA, 80 bp, synthetic construct
  source 1..80: mol_type = other DNA
gaatttaccaggtgtcaggggtctttctgagcccctgcatgcattaactcatttaccactcacaatatcctccactttac

SEQ ID NO: 39393 - DNA, 80 bp, synthetic construct
  source 1..80: mol_type = other DNA
ttgacttactgcaacctccacctcccaggttcaagcgattctcctgcctcagcctcccaagtagctgggactacaggcac

SEQ ID NO: 39394 - DNA, 80 bp, synthetic construct
  source 1..80: mol_type = other DNA
gtgctcttaaccacactgtgcaatgctgcctttctgcaaaaatagcaaatgtgtagatttccttcctcaggcggccttct

SEQ ID NO: 39395 - DNA, 80 bp, synthetic construct
  source 1..80: mol_type = other DNA
ttaaatataaaatgccttctgttttcattcatggatatcagtatacatgcacgcatacatgcacaggcaagcacagacac

SEQ ID NO: 39396 - DNA, 80 bp, synthetic construct; identical to SEQ ID NO: 13726
  source 1..80: mol_type = other DNA

SEQ ID NO: 39397 - DNA, 80 bp, synthetic construct
  source 1..80: mol_type = other DNA
aaatacaaaagttagccgggcatgttggtgtgtgcctttagtcccagtcacttgggaggctgaggcatgagaatcgcttg

SEQ ID NO: 39398 - DNA, 80 bp, synthetic construct
  source 1..80: mol_type = other DNA
aaaaagctcaatatcagtgatctttagagaaatgtaaatcaaaaccacgagataccatctcacacgtttcagaatggcta

SEQ ID NO: 39399 - DNA, 80 bp, synthetic construct
  source 1..80: mol_type = other DNA
ggagtgtaaattagttcaaccattgtggaaagcagtatggcatttccacaaagagctaaaagcagaattaccattttact

SEQ ID NO: 39400 - DNA, 80 bp, synthetic construct; identical to SEQ ID NO: 13727
  source 1..80: mol_type = other DNA

SEQ ID NO: 39401 - DNA, 80 bp, synthetic construct
  source 1..80: mol_type = other DNA
cgccactgcactccagcctgggtgacagagcaagactctgtctcagagaaaaaaaaaaaaaaaagaatgagattatgtct

SEQ ID NO: 39402 - DNA, 80 bp, synthetic construct
  source 1..80: mol_type = other DNA
gtggaaggtaggagaagggagaggagtggaaaagataactcttgggtactgggcttaatacctgggtgatgaagtaatct

SEQ ID NO: 39403 - DNA, 80 bp, synthetic construct; identical to SEQ ID NO: 13728
  source 1..80: mol_type = other DNA

SEQ ID NO: 39404 - DNA, 80 bp, synthetic construct
  source 1..80: mol_type = other DNA
tttaaagctgctggtaaagagaaaactatttactgtcggtggaagggctttaatatgtgaacttcaatcttcattgtaac

SEQ ID NO: 39405 - DNA, 80 bp, synthetic construct
  source 1..80: mol_type = other DNA
gtgcaaagcgctttgcagtgatagagtcttttagagatgcttcctaataacaacctacaagctgcccagggggaatgggg

SEQ ID NO: 39406 - DNA, 80 bp, synthetic construct
  source 1..80: mol_type = other DNA
caaccccactgtccctggcccttgtcaatcatgttagcctttttgctgttcatatgttatactttggggttttaattcgt

SEQ ID NO: 39407 - DNA, 80 bp, synthetic construct
  source 1..80: mol_type = other DNA
actaaataggcaggaagatagaactgaaaagcttgttctctggctgcgtacaagaaggacaacaggagtaatgttgactg

SEQ ID NO: 39408 - DNA, 80 bp, synthetic construct; identical to SEQ ID NO: 13729
  source 1..80: mol_type = other DNA

SEQ ID NO: 39409 - DNA, 80 bp, synthetic construct
  source 1..80: mol_type = other DNA
atcaaaatgtgaggtttcaaggtaataactggaccatcagaatcatcattatccatttaaaaggcaatttctgggcttgg

SEQ ID NO: 39410 - DNA, 80 bp, synthetic construct
  source 1..80: mol_type = other DNA
atgtccaaacatgacagctggggagaggcctccagttttcatcctggtcacagttggagggaaaacagtggagacagagg

SEQ ID NO: 39411 - DNA, 80 bp, synthetic construct
  source 1..80: mol_type = other DNA
aagaatggggaacattccatacgtactgcatgacaatgagcccattacactgtatcgtgaacagctttccatatcagttc

SEQ ID NO: 39412 - DNA, 80 bp, synthetic construct
  source 1..80: mol_type = other DNA
ttgtacatttgcaggagcatttctggagagtaattcctagaagtggaagatttgggtgaaagggtatgaacatcttaaag

SEQ ID NO: 39413 - DNA, 80 bp, synthetic construct; identical to SEQ ID NO: 13730
  source 1..80: mol_type = other DNA

SEQ ID NO: 39414 - DNA, 80 bp, synthetic construct
  source 1..80: mol_type = other DNA
ctcttaatgagtttgggacttggggatgtttttttaacctcttcctgggtgaaatgggaccatcacaaatacttcacaga

SEQ ID NO: 39415 - DNA, 80 bp, synthetic construct
  source 1..80: mol_type = other DNA
tattaatcatgtatttgaggttgatttaaagctgaccaaagtattccttccctttcctcccctctccaccacagtgctca

SEQ ID NO: 39416 - DNA, 80 bp, synthetic construct
  source 1..80: mol_type = other DNA
ctgattttttagatacggtgtgggacaggtaggtgcctaggtaggtaggtgggacaggtagataggtcatgagggcaaga

SEQ ID NO: 39417 - DNA, 80 bp, synthetic construct; identical to SEQ ID NO: 13731
  source 1..80: mol_type = other DNA

SEQ ID NO: 39418 - DNA, 80 bp, synthetic construct
  source 1..80: mol_type = other DNA
tcccatcttttctaagcacgtcactcagtaggatttcaaatacagacaactcttgaatgaatgcagtcactacccacgga

SEQ ID NO: 39419 - DNA, 80 bp, synthetic construct
  source 1..80: mol_type = other DNA
gacgatgggcttgctctaagaatgaaatgagatcatccctggctttttttgagtaagcactcagtaattggtagctctgt

SEQ ID NO: 39420 - DNA, 80 bp, synthetic construct
  source 1..80: mol_type = other DNA
attagtgagtgagcagaaggctcttcctcagcacatcctattaatccgctggtctttagttcacatttgttggaagctga

SEQ ID NO: 39421 - DNA, 80 bp, synthetic construct; identical to SEQ ID NO: 13732
  source 1..80: mol_type = other DNA

SEQ ID NO: 39422 - DNA, 80 bp, synthetic construct
  source 1..80: mol_type = other DNA
gtggtattttcgcttagtgatttattttgagcatagctcagtagtactgttaatatttttggtattgtggttaatattgt

SEQ ID NO: 39423 - DNA, 80 bp, synthetic construct
  source 1..80: mol_type = other DNA
ttcaaacaagattcagggtgagggccgtgatgagtaaacttgactatttataacccaagcccatgatccagcaactaagt

SEQ ID NO: 39424 - DNA, 80 bp, synthetic construct
  source 1..80: mol_type = other DNA
taatgtagctaattcaatatcctctctaagaagcgccattggggactgtgattctgctctgaggagcagccttcagcctc

SEQ ID NO: 39425 - DNA, 80 bp, synthetic construct; identical to SEQ ID NO: 13733
  source 1..80: mol_type = other DNA

SEQ ID NO: 39426 - DNA, 80 bp, synthetic construct
  source 1..80: mol_type = other DNA
gtgacctcatggctgtgtctccaagtctaggaagcacctggcacagaggagagtaatgaacagctatagaagagagtgag

SEQ ID NO: 39427 - DNA, 80 bp, synthetic construct
  source 1..80: mol_type = other DNA
cacccaatccctctgtaaagccctccctggtcaccatttgctctttgcatgaaaaagataaggtttctattgaaaccaca

SEQ ID NO: 39428 - DNA, 80 bp, synthetic construct; identical to SEQ ID NO: 13734
  source 1..80: mol_type = other DNA

SEQ ID NO: 39429 - DNA, 80 bp, synthetic construct
  source 1..80: mol_type = other DNA
tttgggattttgtaggcagagttggatccctgcttggccctatagtactttttttttgccccaggggagttctgccaaca

SEQ ID NO: 39430 - DNA, 80 bp, synthetic construct
  source 1..80: mol_type = other DNA
gccaggctagaaagaagccccctcctctcttctgtggctagggcaccatgggcaggtgtcgggagagggggccagcaaca

SEQ ID NO: 39431 - DNA, 80 bp, synthetic construct
  source 1..80: mol_type = other DNA
gtgcaagacagagcagaggaactccccagaatgaatcacaccaaaaggcctgggttcgtccagctgagaattgagggtgt

SEQ ID NO: 39432 - DNA, 80 bp, synthetic construct; identical to SEQ ID NO: 13735
  source 1..80: mol_type = other DNA

SEQ ID NO: 39433 - DNA, 80 bp, synthetic construct
  source 1..80: mol_type = other DNA
gccagcagccttgggtagaaaatccaattttagcactggaaggagcctcagaggtcctggtttagcctcctcattttaca

SEQ ID NO: 39434 - DNA, 80 bp, synthetic construct
  source 1..80: mol_type = other DNA
gtccccgcacagtagtcattaaaacatgttcactgaattgaaaaaaacaaattgccaagacatagtcttggtacacccta

SEQ ID NO: 39435 - DNA, 80 bp, synthetic construct
  source 1..80: mol_type = other DNA
aagtgattctcctgcctcagcctcctaagtagctggaattacaggcatgtgccaccgtgcttggttaatttttttgtatt

SEQ ID NO: 39436 - DNA, 80 bp, synthetic construct
  source 1..80: mol_type = other DNA
gcctggaaacctctgtttctatcattctgttacttcctcatctagaacacaggctctccaaagtgaggtactctgtgttc

SEQ ID NO: 39437 - DNA, 80 bp, synthetic construct; identical to SEQ ID NO: 13736
  source 1..80: mol_type = other DNA

SEQ ID NO: 39438 - DNA, 80 bp, synthetic construct
  source 1..80: mol_type = other DNA
gggagcgattcttttcaccttggcatggccccccaggcttgctcaccacccagactccctacttcaagcacaattaacaa

SEQ ID NO: 39439 - DNA, 80 bp, synthetic construct
  source 1..80: mol_type = other DNA
aaaagccttagcggttcttggctccaaatcccaatttgcatctcatctgggagtcatttgcataggaagtcctatcggta

SEQ ID NO: 39440 - DNA, 80 bp, synthetic construct; identical to SEQ ID NO: 13737
  source 1..80: mol_type = other DNA

SEQ ID NO: 39441 - DNA, 80 bp, synthetic construct
  source 1..80: mol_type = other DNA
ctgagtgggaggatgatcctgggaagcttctcccggtgaaggttcctggatctccttgccaaggctgctgtggtatgtcg

SEQ ID NO: 39442 - DNA, 80 bp, synthetic construct
  source 1..80: mol_type = other DNA
ctgaccagcatcctcccacaacctgtgaagggtctcgtgcatcctcccacaacctgtgaagaagagatcaccaacttctt

SEQ ID NO: 39443 - DNA, 80 bp, synthetic construct
  source 1..80: mol_type = other DNA
ttttgaggcaactgggtcagagcagaatctgtaaccttgctagggaagccacgtcagcagagcccccccatgatctgata

SEQ ID NO: 39444 - DNA, 80 bp, synthetic construct
  source 1..80: mol_type = other DNA
aaagagagtttaacagtgttggcctgatgccccttaaacatcatctagtttatgttttttcattccttttaaagttttcc

SEQ ID NO: 39445 - DNA, 80 bp, synthetic construct; identical to SEQ ID NO: 13738
  source 1..80: mol_type = other DNA

SEQ ID NO: 39446 - DNA, 80 bp, synthetic construct
  source 1..80: mol_type = other DNA
gaagatggtgctcagctggatggggactcccgaatgaggcatcactgctcacctcatcgtgtcctttacaggagagcagc

SEQ ID NO: 39447 - DNA, 80 bp, synthetic construct
  source 1..80: mol_type = other DNA
ctctggagttttgcccaactttattcagagcagaatagaaatgcaggtgaattggaagaatttggtgcggagcctgaggg

SEQ ID NO: 39448 - DNA, 80 bp, synthetic construct; identical to SEQ ID NO: 13739
  source 1..80: mol_type = other DNA

SEQ ID NO: 39449 - DNA, 80 bp, synthetic construct
  source 1..80: mol_type = other DNA
caaatatatgagtagttattctacatccagcccaatcttaggtgctgtgggggagacaacaggtaagagatgatgccggc

SEQ ID NO: 39450 - DNA, 80 bp, synthetic construct
  source 1..80: mol_type = other DNA
gtatttaaccgttaggcaagcttcatcacaatcacttttccaattttttcagcaccccaagaagaaagcccatccccttg

SEQ ID NO: 39451 - DNA, 80 bp, synthetic construct
  source 1..80: mol_type = other DNA
gtgtcactcaggctggaatgcagtggcgtgacttgactcattgcaacctccacttcccgagttcaagtgattctcctgcc

SEQ ID NO: 39452 - DNA, 80 bp, synthetic construct; identical to SEQ ID NO: 13740
  source 1..80: mol_type = other DNA

SEQ ID NO: 39453 - DNA, 80 bp, synthetic construct
  source 1..80: mol_type = other DNA
tgaacattcatgtatatgtttttaggtggacacatgttttcgattctcttggatatatacctaggagtagaattgctaat

SEQ ID NO: 39454 - DNA, 80 bp, synthetic construct
  source 1..80: mol_type = other DNA
gaggatcttttcatgtgcttactgaccatttttatatcatctttggagatctgtctgttcagattttttgccccttttta

SEQ ID NO: 39455 - DNA, 80 bp, synthetic construct
  source 1..80: mol_type = other DNA
tgcaaacgatgtcagtgttaattacaatgaaacatcattaatttggactctggtaatttggaatgggtcagggcagaggt

SEQ ID NO: 39456 - DNA, 80 bp, synthetic construct; identical to SEQ ID NO: 13741
  source 1..80: mol_type = other DNA

SEQ ID NO: 39457 - DNA, 80 bp, synthetic construct
  source 1..80: mol_type = other DNA
tagccagtcatggcagcacttagtcttagctacttgggaggctgaggtgggaggatcacttgagcctgggaggctgaggc

SEQ ID NO: 39458 - DNA, 80 bp, synthetic construct
  source 1..80: mol_type = other DNA
aaaagagcctgcttgtgaaggtccctcaagcctttatggcttttatttccatgctaacagacaatgtgattggccttgcc

SEQ ID NO: 39459 - DNA, 80 bp, synthetic construct
  source 1..80: mol_type = other DNA
gtgacaattactaatttttgagattaggattaggacagaggtgttctgtctccagcatcatgagactctgttctgtgtgt

SEQ ID NO: 39460 - DNA, 80 bp, synthetic construct
  source 1..80: mol_type = other DNA
accacccttaggaataatagtctgaaggtatattttcatttgtcagacatgtgtgtgcccacgctatatactatgctcct

SEQ ID NO: 39461 - DNA, 80 bp, synthetic construct; identical to SEQ ID NO: 13742
  source 1..80: mol_type = other DNA

SEQ ID NO: 39462 - DNA, 80 bp, synthetic construct
  source 1..80: mol_type = other DNA
tggatcttccatattttccattgatctataggggacacagagctcagatcctgacactgagactcctggatgtttttatt

SEQ ID NO: 39463 - DNA, 80 bp, synthetic construct
  source 1..80: mol_type = other DNA
aggtcagtggagctgatttttctgatcttgaaggaggtgaaggatttcacccttgagtgaatcaagtgtgtgctcatcag

SEQ ID NO: 39464 - DNA, 80 bp, synthetic construct; identical to SEQ ID NO: 13743
  source 1..80: mol_type = other DNA

SEQ ID NO: 39465 - DNA, 80 bp, synthetic construct
  source 1..80: mol_type = other DNA
tactacctgtcacacggtggggttgggaggcaaaaagacttagagtatggaaaatagcaaggatgacatgtggcccaggg

SEQ ID NO: 39466 - DNA, 80 bp, synthetic construct
  source 1..80: mol_type = other DNA
ctatattttatttttttggatttcaaaatagggcttgggctctagaaatactggtttgccgaattgggcatggagccacc

SEQ ID NO: 39467 - DNA, 80 bp, synthetic construct
  source 1..80: mol_type = other DNA
acctgaagcttcagcttctccactggagcagtccttggctctgcctcagtgagagactgcaaattatttacagtccatgg

SEQ ID NO: 39468 - DNA, 80 bp, synthetic construct
  source 1..80: mol_type = other DNA
catccatttccctgggcattccttaaggctcagtgcagcacagtccatgcccctcacaccactctggaagcaaggtggca

SEQ ID NO: 39469 - DNA, 80 bp, synthetic construct; identical to SEQ ID NO: 13744
  source 1..80: mol_type = other DNA

SEQ ID NO: 39470 - DNA, 80 bp, synthetic construct
  source 1..80: mol_type = other DNA
gcactgtaaccgtgtctctgagaaatcccgtagtaaaggccactgcttagaatcatctaaatgattcttgaaattattta

SEQ ID NO: 39471 - DNA, 80 bp, synthetic construct
  source 1..80: mol_type = other DNA
tcaccagctgttaattggtctatagtgggcatctataaatgggagtgtcttggtgtcttatctaccaacttctcaaggga

SEQ ID NO: 39472 - DNA, 80 bp, synthetic construct; identical to SEQ ID NO: 13745
  source 1..80: mol_type = other DNA

SEQ ID NO: 39473 - DNA, 80 bp, synthetic construct
  source 1..80: mol_type = other DNA
gtcagagagaagcttttggttgcaagtcacagaaaactaaaccgaaagcagctaaaatgccaagtaaatgaattggcttc

SEQ ID NO: 39474 - DNA, 80 bp, synthetic construct
  source 1..80: mol_type = other DNA
agctttctcccaagattggctttctctccaagattggcttctcccaagattggattccctttgtattgtattgtgggcta

SEQ ID NO: 39475 - DNA, 80 bp, synthetic construct
  source 1..80: mol_type = other DNA
ggctcacttaaccaccctgaactgattattgtcatgggggaatgcctggctctgattgacttagtctgggttcttaaaag

SEQ ID NO: 39476 - DNA, 80 bp, synthetic construct
  source 1..80: mol_type = other DNA
agaatctttttttaaaataaattttttattgtatatatttgaggcttacaacatgatgttaggggatacatatagatagt

SEQ ID NO: 39477 - DNA, 80 bp, synthetic construct; identical to SEQ ID NO: 13746
  source 1..80: mol_type = other DNA

SEQ ID NO: 39478 - DNA, 80 bp, synthetic construct
  source 1..80: mol_type = other DNA
tcacttagcatattgttctctaggtccgtccatgttgtaacaaatagcaagatctccttttctaaagttgaataatatat

SEQ ID NO: 39479 - DNA, 80 bp, synthetic construct
  source 1..80: mol_type = other DNA
attgctctggctagcactagtacttttcatactatactgaatagaagttacatgggcattcctgccttgtaccagatctt

SEQ ID NO: 39480 - DNA, 80 bp, synthetic construct
  source 1..80: mol_type = other DNA
agttgagatgattgtgtggcttttatctttcattctattaatgtgatgtgtcatgctgattgaattgcatatgttaaacc

SEQ ID NO: 39481 - DNA, 80 bp, synthetic construct; identical to SEQ ID NO: 13747
  source 1..80: mol_type = other DNA

SEQ ID NO: 39482 - DNA, 80 bp, synthetic construct
  source 1..80: mol_type = other DNA
ttcagcctctaggttgaaaaataattgttcaaattgttcataatagtctctatgattcttttgtttctgaggccactaca

SEQ ID NO: 39483 - DNA, 80 bp, synthetic construct
  source 1..80: mol_type = other DNA
ttaataatgtaaagacaattcttaacttgcagaccacatcaaacaaagacatgcacacacatacaaacaaaaaacaggtg

SEQ ID NO: 39484 - DNA, 80 bp, synthetic construct
  source 1..80: mol_type = other DNA
gaatggataggaagtcaacttcagtatgctctactaacagcttggtgtttttgagggtctgcaagaagtgtagtttagct

SEQ ID NO: 39485 - DNA, 80 bp, synthetic construct
  source 1..80: mol_type = other DNA
cacttctccctatctgggaactgccatgactccctcccagcttaaccaatatataattaattctttaaaataatggcaat

SEQ ID NO: 39486 - DNA, 80 bp, synthetic construct; identical to SEQ ID NO: 13748
  source 1..80: mol_type = other DNA

SEQ ID NO: 39487 - DNA, 80 bp, synthetic construct
  source 1..80: mol_type = other DNA
aaactgggaagtcacccaaagttaagcttctggctctagccatcctttctaaaaacacgttacctcttttagtggcaaac

SEQ ID NO: 39488 - DNA, 80 bp, synthetic construct
  source 1..80: mol_type = other DNA
tatgcatttaagtattttgtgcctaattctatattttatgcagtgagagactttgactctggggaagtgccatggtctca

SEQ ID NO: 39489 - DNA, 80 bp, synthetic construct; identical to SEQ ID NO: 13749
  source 1..80: mol_type = other DNA

SEQ ID NO: 39490 - DNA, 80 bp, synthetic construct
  source 1..80: mol_type = other DNA
tgctctaacaaatacctaaaatgtggagtcaactttggaactgggtaatgggtagaggctggaagagttttgagatgcat

SEQ ID NO: 39491 - DNA, 80 bp, synthetic construct
  source 1..80: mol_type = other DNA
atgaaatttcaggcagaaatgaggaatatgttattggacaatggaggagtggaggagaggacatccttcttataaagtgg

SEQ ID NO: 39492 - DNA, 80 bp, synthetic construct
  source 1..80: mol_type = other DNA
cttggcttatgagtgcttatagtgatattcgagaggaaagaaatggaacaagacagaacttacaatcaaagggaaaggag

SEQ ID NO: 39493 - DNA, 80 bp, synthetic construct; identical to SEQ ID NO: 13750
  source 1..80: mol_type = other DNA

SEQ ID NO: 39494 - DNA, 80 bp, synthetic construct
  source 1..80: mol_type = other DNA
attgcccagtagaaccacaggggtagaactaccctcatgatcacagattggtagaaatggcagtgattctagtccagagg

SEQ ID NO: 39495 - DNA, 80 bp, synthetic construct
  source 1..80: mol_type = other DNA
taacaggtctagcggccagagccttgagtcagaagattattgtcttagttcattcctactgctatttaaaaaacaaacaa

SEQ ID NO: 39496 - DNA, 80 bp, synthetic construct
  source 1..80: mol_type = other DNA
atcctcaaataaaaattagattttcttgagcacctactgcatgctaggctctgtagtaagtaagtattggggatgacaag

SEQ ID NO: 39497 - DNA, 80 bp, synthetic construct
  source 1..80: mol_type = other DNA
atgctaggctctgtagtaagtaagtattggggatgacaagaggagaactactgtatattccccatcctctgttatcatgc

SEQ ID NO: 39498 - DNA, 80 bp, synthetic construct; identical to SEQ ID NO: 13751
  source 1..80: mol_type = other DNA

SEQ ID NO: 39499 - DNA, 80 bp, synthetic construct
  source 1..80: mol_type = other DNA
catctagtcatctagtcacatcaactcattaaatatttattgaatcctgtgattggccaatattactatgctaggcaatg

SEQ ID NO: 39500 - DNA, 80 bp, synthetic construct
  source 1..80: mol_type = other DNA
gttgatattttcacttgtttttgatggtcaaactgggacatagagattaggtaacctgcacaaggccacatggctaagaa

SEQ ID NO: 39501 - DNA, 80 bp, synthetic construct
  source 1..80: mol_type = other DNA
caggaaatgctggataaaatgtaataacaaacatttttgagaagctagctgagcaagaaggagcaacaggaaaaccacca

SEQ ID NO: 39502 - DNA, 80 bp, synthetic construct
  source 1..80: mol_type = other DNA
ttattgttcaaggaaagataggaggcaaaaccttggaactgtgttaggcgagagttagaattgagaaccccacataaagg

SEQ ID NO: 39503 - DNA, 80 bp, synthetic construct; identical to SEQ ID NO: 13752
  source 1..80: mol_type = other DNA

SEQ ID NO: 39504 - DNA, 80 bp, synthetic construct
  source 1..80: mol_type = other DNA
atgagctcgcaatccaaaattcaataacaaagaggaaagcaacccctgcaaatgagtcagcagaagctacaaacatcagg

SEQ ID NO: 39505 - DNA, 80 bp, synthetic construct
  source 1..80: mol_type = other DNA
tgaagaattggtaggagtttgcgaaagggagtgctagggaggtggctttagggttagagagctgtgtattagggttcttt

SEQ ID NO: 39506 - DNA, 80 bp, synthetic construct
  source 1..80: mol_type = other DNA
tcaggtcaaaaggcagaagtctggagacagaattccctttttggggggacctcagtctttttcttctcttaagtaagtcc

SEQ ID NO: 39507 - DNA, 80 bp, synthetic construct; identical to SEQ ID NO: 13753
  source 1..80: mol_type = other DNA

SEQ ID NO: 39508 - DNA, 80 bp, synthetic construct
  source 1..80: mol_type = other DNA
gtgaatacacgcatgaacaaatagaaacctaaatgacagcagagggcctactgatgcggcatgagtgacactctaccaca

SEQ ID NO: 39509 - DNA, 80 bp, synthetic construct
  source 1..80: mol_type = other DNA
agaggggcagtttatgttttcagcacttctaacttatgtgagttggtgtttaaggagggccttgtaacatggctccttct

SEQ ID NO: 39510 - DNA, 80 bp, synthetic construct
  source 1..80: mol_type = other DNA
gtggtgaaatgtctgatgacggggaggaggaggaaggacctgagagacacagctgggttgggcagcaagaggacagggaa

SEQ ID NO: 39511 - DNA, 80 bp, synthetic construct; identical to SEQ ID NO: 13754
  source 1..80: mol_type = other DNA

SEQ ID NO: 39512 - DNA, 80 bp, synthetic construct
  source 1..80: mol_type = other DNA
tgatgagaactcttggttcagaccaatcaaataacttgcctaagggcaaaaactaaatggtctagctgaaattggagttt

SEQ ID NO: 39513 - DNA, 80 bp, synthetic construct
  source 1..80: mol_type = other DNA
gggaagccttccctgagaaggcatctctcagtttgactaaggacctgggtacctacgaccttcttaaaagtgttaataac

SEQ ID NO: 39514 - DNA, 80 bp, synthetic construct; identical to SEQ ID NO: 13755
  source 1..80: mol_type = other DNA

SEQ ID NO: 39515 - DNA, 80 bp, synthetic construct
  source 1..80: mol_type = other DNA
gaggagttggagttccccctcttttttgcctgacctcattgggaatctctgattagtaacctttgtagaagggacaccct

SEQ ID NO: 39516 - DNA, 80 bp, synthetic construct
  source 1..80: mol_type = other DNA
tcaggaatgtgggagctgcttagcgagtgtttctggcgcagggtcactctcaagctgttgggctgaggctgcagccatcc

SEQ ID NO: 39517 - DNA, 80 bp, synthetic construct
  source 1..80: mol_type = other DNA
aagagacaagagagagaagagtccccttacatagaagtggcagtttcagaagcaacatcccatgatttctgccatgtgct

SEQ ID NO: 39518 - DNA, 80 bp, synthetic construct; identical to SEQ ID NO: 13756
  source 1..80: mol_type = other DNA

SEQ ID NO: 39519 - DNA, 80 bp, synthetic construct
  source 1..80: mol_type = other DNA
tgcaatttcccttctccaaccagtagatttctatcttacaacttggtttagcccatctcctcctttgtgaaaccttcctg

SEQ ID NO: 39520 - DNA, 80 bp, synthetic construct
  source 1..80: mol_type = other DNA
gacaaagaagccaagaaatgtggaatgtgttgggtgttgatatacactatggacaaaaggacagaatagggctgggtgcg

SEQ ID NO: 39521 - DNA, 80 bp, synthetic construct
  source 1..80: mol_type = other DNA
atttgggaggctgaggcaggagaatagcttgaacttgggaggttaaggttgcaatgagttgaggtagcaccactgcactc

SEQ ID NO: 39522 - DNA, 80 bp, synthetic construct
  source 1..80: mol_type = other DNA
actaagtgaggcattgaactgggaggatatctgggaacaacattcaatgcctatcatgttataatgatttgcttttgttt

SEQ ID NO: 39523 - DNA, 80 bp, synthetic construct; identical to SEQ ID NO: 13757
  source 1..80: mol_type = other DNA

SEQ ID NO: 39524 - DNA, 80 bp, synthetic construct
  source 1..80: mol_type = other DNA
actgatttaccctttgggtctgccagctctaataataaataaagcaaaagctgacctcattaccaacagattcatggagt

SEQ ID NO: 39525 - DNA, 80 bp, synthetic construct
  source 1..80: mol_type = other DNA
ctttctgcattcttagaacagggcagcctatggatgcctttgtttggctcaggcagctctgaagtgccagacaataagga

SEQ ID NO: 39526 - DNA, 80 bp, synthetic construct; identical to SEQ ID NO: 13758
  source 1..80: mol_type = other DNA

SEQ ID NO: 39527 - DNA, 80 bp, synthetic construct
  source 1..80: mol_type = other DNA
agagtgagccggtcaggagctggagaaagggcagctggtgggtgggtcccttcagaggaaagggcatttcaggatggcat

SEQ ID NO: 39528 - DNA, 80 bp, synthetic construct
  source 1..80: mol_type = other DNA
tgggagcctgcacccagaagtcacatagacctggattcaaagtcgtggtgaaattggtcaagtgatttaaggactctatt

SEQ ID NO: 39529 - DNA, 80 bp, synthetic construct
  source 1..80: mol_type = other DNA
cattgcttctcactctctccttgcctgttttctttctcttagctaggcaggtagtatttctacatcacttagcacatgaa

SEQ ID NO: 39530 - DNA, 80 bp, synthetic construct
  source 1..80: mol_type = other DNA
aggtgatttactttatagaacattccacaagcattgtgatacactagacagagcgttggtagagcaggagatctggattt

SEQ ID NO: 39531 - DNA, 80 bp, synthetic construct; identical to SEQ ID NO: 13759
  source 1..80: mol_type = other DNA

SEQ ID NO: 39532 - DNA, 80 bp, synthetic construct
  source 1..80: mol_type = other DNA
attaaacaataactctccattccttctcctcccagcccctggcaacaaccttggtacctcacatagtgaaatcatacagt

SEQ ID NO: 39533 - DNA, 80 bp, synthetic construct
  source 1..80: mol_type = other DNA
gctttcaccttttggctgttgtgaataaggttgctatgaacatgggtgtacaaatatcaatttgagaccctgctttctat

SEQ ID NO: 39534 - DNA, 80 bp, synthetic construct
  source 1..80: mol_type = other DNA
ggctggagtgcagtggcacgatctcagctcactgcaagctccgcctcccaggttcacaccattctcctgcctcagcctcc

SEQ ID NO: 39535 - DNA, 80 bp, synthetic construct; identical to SEQ ID NO: 13760
  source 1..80: mol_type = other DNA

SEQ ID NO: 39536 - DNA, 80 bp, synthetic construct
  source 1..80: mol_type = other DNA
tgatttattgatctaattatattgagggactgaaacaaaaattgtgggcatggggtctggcaatttgtggggttttaaaa

SEQ ID NO: 39537 - DNA, 80 bp, synthetic construct
  source 1..80: mol_type = other DNA
atgcccagctaacttttgtattttctgtagagacaggggtctcactatatcgtccatgctgttcttgaactcttgagctt

SEQ ID NO: 39538 - DNA, 80 bp, synthetic construct
  source 1..80: mol_type = other DNA
gtggtctctggaagcctagaatcaggttcaggactttgggctaggtttagaaccctccagtgactgttaatcacacctgg

SEQ ID NO: 39539 - DNA, 80 bp, synthetic construct
  source 1..80: mol_type = other DNA
ctgccaagctccctcttacctttctcctccaacttggcatgttcttcctctctctcctatggcttcttcctcctgattca

SEQ ID NO: 39540 - DNA, 80 bp, synthetic construct; identical to SEQ ID NO: 13761
  source 1..80: mol_type = other DNA

SEQ ID NO: 39541 - DNA, 80 bp, synthetic construct
  source 1..80: mol_type = other DNA
ctcagtctcggctcactgcaagctccgcctcccgggttcacgccattctcctgcctcagcctcctgagtagctgggacta

SEQ ID NO: 39542 - DNA, 80 bp, synthetic construct
  source 1..80: mol_type = other DNA
ccagtatgacttttttattcagcagacattgggatgctctgaggttgttctgaatagtgaagcagccccgtcaaagggtg

SEQ ID NO: 39543 - DNA, 80 bp, synthetic construct
  source 1..80: mol_type = other DNA
tggttctaagctgggggcaatttctccccctctccctcctccagtggacttttggcagtatctggaggcattcttagttg

SEQ ID NO: 39544 - DNA, 80 bp, synthetic construct; identical to SEQ ID NO: 13762
  source 1..80: mol_type = other DNA

SEQ ID NO: 39545 - DNA, 80 bp, synthetic construct
  source 1..80: mol_type = other DNA
ctttaaatctctttggccacagagtgggaagaccacgagaacaggagttcctctgagaatgtgcgtgcatcaaactctgc

SEQ ID NO: 39546 - DNA, 80 bp, synthetic construct
  source 1..80: mol_type = other DNA
cttcttcctttctccctctgctccctctccctttgtcccccatttaacagcccattatgaatatttgaagtttagtaggt

SEQ ID NO: 39547 - DNA, 80 bp, synthetic construct; identical to SEQ ID NO: 13763
  source 1..80: mol_type = other DNA

SEQ ID NO: 39548 - DNA, 80 bp, synthetic construct
  source 1..80: mol_type = other DNA
tgggtttttgagggaggacagacctgagaggtgtttgttttgcgaagtgctttaaagtatgtttgagacttcggcagacg

SEQ ID NO: 39549 - DNA, 80 bp, synthetic construct
  source 1..80: mol_type = other DNA
tcacctttggaaaagggcaacagacaaatgatgagagattatctgaatattatttgaaggaatgatcacaggaatatttt

SEQ ID NO: 39550 - DNA, 80 bp, synthetic construct
  source 1..80: mol_type = other DNA
actccaaggtggaaacaatcgaagtaatggccctccagatttttctacccatattcttgcaaagaactcaaagccattct

SEQ ID NO: 39551 - DNA, 80 bp, synthetic construct; identical to SEQ ID NO: 13764
  source 1..80: mol_type = other DNA

SEQ ID NO: 39552 - DNA, 80 bp, synthetic construct
  source 1..80: mol_type = other DNA
catgagtctttgagagcaggggacagaactacttcatgtcttcatgtcttgtgttctcaacggcatctaccccactggtg

SEQ ID NO: 39553 - DNA, 80 bp, synthetic construct
  source 1..80: mol_type = other DNA
cccgtcccttctgccttcattcccactctgtcccataagtcgtccagaaggctgtcaccggcgggccattagacaagaca

SEQ ID NO: 39554 - DNA, 80 bp, synthetic construct
  source 1..80: mol_type = other DNA
tgactgctttcaaaagagaacacatggggactatcttcctacccaaaagaaaacctacagggaggtgagccggtccacag

SEQ ID NO: 39555 - DNA, 80 bp, synthetic construct; identical to SEQ ID NO: 13765
  source 1..80: mol_type = other DNA

SEQ ID NO: 39556 - DNA, 80 bp, synthetic construct
  source 1..80: mol_type = other DNA
gattctgtgcatgcctccgcgtctccatgcgcatcctcctggtggctctgtgctcatccccagctaacctgccctcctgg

SEQ ID NO: 39557 - DNA, 80 bp, synthetic construct
  source 1..80: mol_type = other DNA
tttcccccattctttcccgatccaagtcctcccctgccttgtgcctgccgttctcatgtagggctcctagccttcctctc

SEQ ID NO: 39558 - DNA, 80 bp, synthetic construct
  source 1..80: mol_type = other DNA
ctctgcttctaaaaccatacatgtccaaatcccatggtctgaaaacagcatcttacccaatctcaccatcgcattcccct

SEQ ID NO: 39559 - DNA, 80 bp, synthetic construct
  source 1..80: mol_type = other DNA
accttcactcatttgtccccagtcctgcccacccacctgatcacctcctactcttagttgtgacatctgcctgccttgct

SEQ ID NO: 39560 - DNA, 80 bp, synthetic construct; identical to SEQ ID NO: 13766
  source 1..80: mol_type = other DNA

SEQ ID NO: 39561 - DNA, 80 bp, synthetic construct
  source 1..80: mol_type = other DNA
tggctcatctgggtggagatgtgctttaaatataaaatgcacactggattttgaagttctggtatgaaaacaagaatacg

SEQ ID NO: 39562 - DNA, 80 bp, synthetic construct
  source 1..80: mol_type = other DNA
tttttttttttaacaacaacaaaaaaaatacgaaaattagccagtcatggtggtgctcacatgtggtcccagctattcac

SEQ ID NO: 39563 - DNA, 80 bp, synthetic construct; identical to SEQ ID NO: 13767
  source 1..80: mol_type = other DNA

SEQ ID NO: 39564 - DNA, 80 bp, synthetic construct
  source 1..80: mol_type = other DNA
ctaatttttgtatttttagtggagatggggtttcactatgttggccaggctggtttggaactcctggcctcacgtgatcc

SEQ ID NO: 39565 - DNA, 80 bp, synthetic construct
  source 1..80: mol_type = other DNA
ttttttttttttttttgagatggagtctcactctgttgccaggctggagtgcagtggcatgatctcggctcacagcagca

SEQ ID NO: 39566 - DNA, 80 bp, synthetic construct
  source 1..80: mol_type = other DNA
tgatctgcccacctcggcctcccaaagtgctgggattacaggtgtgagccaccacatccggctgccttgcattatatttc

SEQ ID NO: 39567 - DNA, 80 bp, synthetic construct
  source 1..80: mol_type = other DNA
cagcacgtgatctctatatgttcttgtatgtgtcattaccaccagccaaaaaggccaggaacatccagggcaaggagatg

SEQ ID NO: 39568 - DNA, 80 bp, synthetic construct; identical to SEQ ID NO: 13768
  source 1..80: mol_type = other DNA

SEQ ID NO: 39569 - DNA, 80 bp, synthetic construct
  source 1..80: mol_type = other DNA
tatcttaatttaaacacccttccttggaggttgtgcttccccccaccgattgtcctaattatgccccctcccttcccaga

SEQ ID NO: 39570 - DNA, 80 bp, synthetic construct
  source 1..80: mol_type = other DNA
cttctgttctccttagatcctctggtctaaccattgcttctcagtctttttccctacactgtcccaaatgttgagtcctc

SEQ ID NO: 39571 - DNA, 80 bp, synthetic construct
  source 1..80: mol_type = other DNA
tgcgccccgaacttaataaatactacaccaaaatcattatctttgcccttctccaaaaacaaaaaaagaacaatcttcct

SEQ ID NO: 39572 - DNA, 80 bp, synthetic construct; identical to SEQ ID NO: 13769
  source 1..80: mol_type = other DNA

SEQ ID NO: 39573 - DNA, 80 bp, synthetic construct
  source 1..80: mol_type = other DNA
tcccatctgccttccctgccaggtgctcaggcccctcccgctgactgagccagtcaccacacactggaacacactttgct

SEQ ID NO: 39574 - DNA, 80 bp, synthetic construct
  source 1..80: mol_type = other DNA
ttccttagaattttgtgattctctctatggaaccacttcattgtacagtaaagtctggctctgtcctctgaccccaggat

SEQ ID NO: 39575 - DNA, 80 bp, synthetic construct
  source 1..80: mol_type = other DNA
aagcagagatacatcttatccttctctgcatacatagtgccttgcttaagataggtgtttaataggtatttggtgaatta

SEQ ID NO: 39576 - DNA, 80 bp, synthetic construct; identical to SEQ ID NO: 13770
  source 1..80: mol_type = other DNA

SEQ ID NO: 39577 - DNA, 80 bp, synthetic construct
  source 1..80: mol_type = other DNA
tgcatctgcagtggagagtagctaggttggtgcaagagagactggaggcagaagacagggtagacatattgcaaaagaaa

SEQ ID NO: 39578 - DNA, 80 bp, synthetic construct
  source 1..80: mol_type = other DNA
gaaactgggaagccagaaagagcccccaattcaataaaaagataatgggttacatttgggacacagaatttggacatttg

SEQ ID NO: 39579 - DNA, 80 bp, synthetic construct
  source 1..80: mol_type = other DNA
gggagaaattgcacaatgaagagtggcttgtggactaaatccagggtgtaaaattgggggacacttacatagtgtctagc

SEQ ID NO: 39580 - DNA, 80 bp, synthetic construct; identical to SEQ ID NO: 13771
  source 1..80: mol_type = other DNA

SEQ ID NO: 39581 - DNA, 80 bp, synthetic construct
  source 1..80: mol_type = other DNA
tccccacctatggcttgtctttcattccaatcttttgaagagcatacattctaagttttgatgacgtctactttaccaat

SEQ ID NO: 39582 - DNA, 80 bp, synthetic construct
  source 1..80: mol_type = other DNA
tttctttaacatatggatatccaaatgttccagcacagtttgtgtaaagactttttttccccactgtacctttgttaaaa

SEQ ID NO: 39583 - DNA, 80 bp, synthetic construct
  source 1..80: mol_type = other DNA
cctcgaaagttgaagactagatgaatgatgggcgtacattataggatgcatgggtttctgtgaaaacacattgtggtgca

SEQ ID NO: 39584 - DNA, 80 bp, synthetic construct
  source 1..80: mol_type = other DNA
gtaaggggtgctatgagtagttcactgcttctagaaggtagagagggatgagcagggaagcacaatataaggtttgacag

SEQ ID NO: 39585 - DNA, 80 bp, synthetic construct; identical to SEQ ID NO: 13772
  source 1..80: mol_type = other DNA

SEQ ID NO: 39586 - DNA, 80 bp, synthetic construct
  source 1..80: mol_type = other DNA
gggaagaggtgggtttactttgggtcttcctaaatttgagatgctctgcagatacgttcatggagatgtcaccaggctgt

SEQ ID NO: 39587 - DNA, 80 bp, synthetic construct
  source 1..80: mol_type = other DNA
tgaggagaaccctaggagagtagtttcatggaagccaaggaggttgattaaatgagataacatatatgctcttcttagga

SEQ ID NO: 39588 - DNA, 80 bp, synthetic construct; identical to SEQ ID NO: 13773
  source 1..80: mol_type = other DNA

SEQ ID NO: 39589 - DNA, 80 bp, synthetic construct
  source 1..80: mol_type = other DNA
gtgggttgtctggagccctcgttacctgagcttgttgggaaggtatggggcacaaagtcaaccagctcactgagagtggc

SEQ ID NO: 39590 - DNA, 80 bp, synthetic construct
  source 1..80: mol_type = other DNA
ttacaggtgaagggtggtgttaggggctgagagcaggtagatggtttgaggggaagggtagtgttaggggctgagagctg

SEQ ID NO: 39591 - DNA, 80 bp, synthetic construct
  source 1..80: mol_type = other DNA
tggtttgaggggaagggtggtgttagggctgagagccgggtgatggttagaggtgagaggagttgttagggctgagagcc

SEQ ID NO: 39592 - DNA, 80 bp, synthetic construct
  source 1..80: mol_type = other DNA
agggctgagagccgggtgatggttacaggtgagggaagttgttagggttgagagccaggcgatggttagcggtgagggga

SEQ ID NO: 39593 - DNA, 80 bp, synthetic construct; identical to SEQ ID NO: 13774
  source 1..80: mol_type = other DNA

SEQ ID NO: 39594 - DNA, 80 bp, synthetic construct
  source 1..80: mol_type = other DNA
cccacaccttgatcttagacttccagcctccagaattgtgagaaaaggaattttggttgtttaagcctttcagtctgtgg

SEQ ID NO: 39595 - DNA, 80 bp, synthetic construct
  source 1..80: mol_type = other DNA
ccagcaagaggggtgaccaaggacaaggggctgaagagtgggacacagaggacagaggtgccagatgagtgatggggatg

SEQ ID NO: 39596 - DNA, 80 bp, synthetic construct; identical to SEQ ID NO: 13775
  source 1..80: mol_type = other DNA

SEQ ID NO: 39597 - DNA, 80 bp, synthetic construct
  source 1..80: mol_type = other DNA
gcgccacgtctactactggctgtaggggatgaaaagacaagcggccttgaattattgattcactcaacaaccattcatta

SEQ ID NO: 39598 - DNA, 80 bp, synthetic construct; identical to SEQ ID NO: 13776
  source 1..80: mol_type = other DNA

SEQ ID NO: 39599 - DNA, 80 bp, synthetic construct
  source 1..80: mol_type = other DNA
ataagtgttatgcaaatagttgctatactgtatttttgttggtgttatttttattattgtattgttattttttggttttt

SEQ ID NO: 39600 - DNA, 80 bp, synthetic construct
  source 1..80: mol_type = other DNA
ccacaacgcctggcatattttttgtatttttagtagagacggggtttcaccatgttagccaagatggtctcgctctcctg

SEQ ID NO: 39601 - DNA, 80 bp, synthetic construct
  source 1..80: mol_type = other DNA
actcacaggtacagatagaaggataaatacccctccaaggcagtgtgcaaggaatagtctgtttgagtggtgggagtttc

SEQ ID NO: 39602 - DNA, 80 bp, synthetic construct
  source 1..80: mol_type = other DNA
aggactgtacatggaggctctgtcaccttgttgggggtggaggggatgctatgaccgtggaagccagacaggacagaagg

SEQ ID NO: 39603 - DNA, 80 bp, synthetic construct; identical to SEQ ID NO: 13777
  source 1..80: mol_type = other DNA

SEQ ID NO: 39604 - DNA, 80 bp, synthetic construct
  source 1..80: mol_type = other DNA
gccccatggatggaaagagcgggaagccccgggtctctgaacgcatctccccatctcagccctgcctttgctgtggcccc

SEQ ID NO: 39605 - DNA, 80 bp, synthetic construct
  source 1..80: mol_type = other DNA
tgagcgttcactgcacattaagtcttgagcaagctgctctccttcattcatctggtctccactcctgggactactgaaga

SEQ ID NO: 39606 - DNA, 80 bp, synthetic construct
  source 1..80: mol_type = other DNA
tggttgaggccgtttccagccagataggaatcactgtcgaaaacctaattaaaagtggtccctgaatcgcacgggggttg

SEQ ID NO: 39607 - DNA, 80 bp, synthetic construct; identical to SEQ ID NO: 13778
  source 1..80: mol_type = other DNA

SEQ ID NO: 39608 - DNA, 80 bp, synthetic construct
  source 1..80: mol_type = other DNA
ttgttctatcctcacgtggcggagagaaaaagagagtgagctctgctgtctctttttttttttttttttttttttttgga

SEQ ID NO: 39609 - DNA, 80 bp, synthetic construct
  source 1..80: mol_type = other DNA
atggggtttcaccaccttagccaggatggtctcaaactcctgacctcacgcaggtaatccacctgcctcagactcccaaa

SEQ ID NO: 39610 - DNA, 80 bp, synthetic construct; identical to SEQ ID NO: 13779
  source 1..80: mol_type = other DNA

SEQ ID NO: 39611 - DNA, 80 bp, synthetic construct
  source 1..80: mol_type = other DNA
gaccttatttaaccttagttttgtcctacagaccctattttttaaggcagtaatattgggggttagaacttcagtatatg

SEQ ID NO: 39612 - DNA, 80 bp, synthetic construct
  source 1..80: mol_type = other DNA
catcaaaacattcccagtccccaggcccacaggggacatgctcattttctgagagattattttactactttatttatctt

SEQ ID NO: 39613 - DNA, 80 bp, synthetic construct
  source 1..80: mol_type = other DNA
actacaagtgattgttaaatagttagtaggttatagatggaaacattggtaacagtgagctcatttggcccaaagggaag

SEQ ID NO: 39614 - DNA, 80 bp, synthetic construct
  source 1..80: mol_type = other DNA
cctttacagtccctggaagcctcatgcacgctccctagcgcaccccctgcttcgcagcaaatccttgagtttttataaga

SEQ ID NO: 39615 - DNA, 80 bp, synthetic construct; identical to SEQ ID NO: 13780
  source 1..80: mol_type = other DNA

SEQ ID NO: 39616 - DNA, 80 bp, synthetic construct
  source 1..80: mol_type = other DNA
ggcatgacctcggctcactgcaacctccacctcccgggttcaagcaattctcctgcctcagcaccccgagtagctgggat

SEQ ID NO: 39617 - DNA, 80 bp, synthetic construct
  source 1..80: mol_type = other DNA
gcctggcccctattatatttttaatagcaaaacattttttcccacatcaactcttaggtggaaccccaacccctgaaatg

SEQ ID NO: 39618 - DNA, 80 bp, synthetic construct
  source 1..80: mol_type = other DNA
ttctcttatgccacagcatgactgtctcggtttctgctttctcagtagccatctcattctggtcgtgcttcccgcaggtg

SEQ ID NO: 39619 - DNA, 80 bp, synthetic construct; identical to SEQ ID NO: 13781
  source 1..80: mol_type = other DNA

SEQ ID NO: 39620 - DNA, 80 bp, synthetic construct
  source 1..80: mol_type = other DNA
gcagacattcaagggccacgtgtcagtgaaatgtattcggcttgattccctgtgttgcttttctgaattctcaacctctg

SEQ ID NO: 39621 - DNA, 80 bp, synthetic construct
  source 1..80: mol_type = other DNA
attatcacaattttaggaacatttcatcacccccaaaaagaacaccacacgcattagcagacactcctcatttctcccaa

SEQ ID NO: 39622 - DNA, 80 bp, synthetic construct
  source 1..80: mol_type = other DNA
cccaggctggagtgcaatgacactgtctcagctcactgcaacctccacttcccgggttcaagtgattctcctacctcagc

SEQ ID NO: 39623 - DNA, 80 bp, synthetic construct; identical to SEQ ID NO: 13782
  source 1..80: mol_type = other DNA

SEQ ID NO: 39624 - DNA, 80 bp, synthetic construct
  source 1..80: mol_type = other DNA
gtacaagtttttgtgtgatcttcatttttgtaacatctccatcaagagaattaagaatctctatagctagatttattgag

SEQ ID NO: 39625 - DNA, 80 bp, synthetic construct
  source 1..80: mol_type = other DNA
aacatttatccttaacactgctcccagaagttgggcaactgttggtattacaccactgcagttgtccacactgaataagt

SEQ ID NO: 39626 - DNA, 80 bp, synthetic construct; identical to SEQ ID NO: 13783
  source 1..80: mol_type = other DNA

SEQ ID NO: 39627 - DNA, 80 bp, synthetic construct
  source 1..80: mol_type = other DNA
tttaaccctctctcacctcagggagagtttctcatatgttcagaatactatttcaaaggacagccactacccgcctcact

SEQ ID NO: 39628 - DNA, 80 bp, synthetic construct
  source 1..80: mol_type = other DNA
cgaggcgtgcatccacattagaattcacttctacacctggctgcaaaccaagacccttaagcttggagagaacttgttct

SEQ ID NO: 39629 - DNA, 80 bp, synthetic construct
  source 1..80: mol_type = other DNA
tgtctccatgtggttgcctgcccacagctgctatcttggacgaccccatggagtgcagcagaggggagcggctctccatc

SEQ ID NO: 39630 - DNA, 80 bp, synthetic construct
  source 1..80: mol_type = other DNA
atgagcagtggtgtgagctgcacctatcagtcaccaggcctctgagatatctgatgtcgatatttccagaggaaggagag

SEQ ID NO: 39631 - DNA, 80 bp, synthetic construct; identical to SEQ ID NO: 13784
  source 1..80: mol_type = other DNA

SEQ ID NO: 39632 - DNA, 80 bp, synthetic construct
  source 1..80: mol_type = other DNA
tatccaaacctcagtttctacatctttaaaataggaatactaggctctattttgcaaatcttgcaggttgttaggttgtt

SEQ ID NO: 39633 - DNA, 80 bp, synthetic construct
  source 1..80: mol_type = other DNA
tgccaccatgcccggctaatttttgtatttttaggagagatggggtttcgccatgttggccaggttggtcttgaactcct

SEQ ID NO: 39634 - DNA, 80 bp, synthetic construct; identical to SEQ ID NO: 13785
  source 1..80: mol_type = other DNA

SEQ ID NO: 39635 - DNA, 80 bp, synthetic construct
  source 1..80: mol_type = other DNA
gcctgttgtttgtattaccttgacaactttacaagactaggcccaagttagtgggctggtgacttgtggctaagctggaa

SEQ ID NO: 39636 - DNA, 80 bp, synthetic construct
  source 1..80: mol_type = other DNA
aacaacttgctcaaatacatctgttcttccatctgaggatccagcaaagctccagcctgggctgttagggtttcaagaaa

SEQ ID NO: 39637 - DNA, 80 bp, synthetic construct
  source 1..80: mol_type = other DNA
tctcttagtttgggttccctggtttattcatcatgtacttgtccataatgactacccagacctgatttactctctgttta

SEQ ID NO: 39638 - DNA, 80 bp, synthetic construct
  source 1..80: mol_type = other DNA
ctcttaatgtgcatccccaaggtctggctctgattggatcagctcaacttgcagtgtggccagtctcacaagctgcaggt

SEQ ID NO: 39639 - DNA, 80 bp, synthetic construct; identical to SEQ ID NO: 13786
  source 1..80: mol_type = other DNA

SEQ ID NO: 39640 - DNA, 80 bp, synthetic construct
  source 1..80: mol_type = other DNA
ccagggaggcaagtctcagacaagggtccagatttctaaatagttcagtagtccatactttgaaaagccagcccttctct

SEQ ID NO: 39641 - DNA, 80 bp, synthetic construct
  source 1..80: mol_type = other DNA
aataaaggaaacaggtatctttattccatcttagagaactttgggcatctttttaatgggcttcttttaggcaccaggta

SEQ ID NO: 39642 - DNA, 80 bp, synthetic construct
  source 1..80: mol_type = other DNA
ccagagtgcccctccacagtgggttttaaacactacccaggtaaagttcattgaaagattccagcccagttctttccctc

SEQ ID NO: 39643 - DNA, 80 bp, synthetic construct; identical to SEQ ID NO: 13787
  source 1..80: mol_type = other DNA

SEQ ID NO: 39644 - DNA, 80 bp, synthetic construct
  source 1..80: mol_type = other DNA
ctgcacatagcaggacttcaggaagtggcagctgtggcttttgttgttggcttcattctctcaccccacatttgaacggg

SEQ ID NO: 39645 - DNA, 80 bp, synthetic construct
  source 1..80: mol_type = other DNA
cgtaattggatattccccttctccttccagttttctgggcttgatgcatctgatagctctgagccttttaaagttgtggt

SEQ ID NO: 39646 - DNA, 80 bp, synthetic construct
  source 1..80: mol_type = other DNA
ctctgcttcagggggatgaaagagaccctagtgatgatatctttgactgtggaaagcagaggctctgattgaagctgggg

SEQ ID NO: 39647 - DNA, 80 bp, synthetic construct; identical to SEQ ID NO: 13788
  source 1..80: mol_type = other DNA

SEQ ID NO: 39648 - DNA, 80 bp, synthetic construct
  source 1..80: mol_type = other DNA
cagattttcatataatgggtttatttaaagtgagggtcacttgtaaagctttctccagcctgcatctgacatcccccacc

SEQ ID NO: 39649 - DNA, 80 bp, synthetic construct
  source 1..80: mol_type = other DNA
cctgagcctttcttctgcagggagctaccacaagctacctcctctgttcctatagatcagcgtttctcctgcggttaatg

SEQ ID NO: 39650 - DNA, 80 bp, synthetic construct
  source 1..80: mol_type = other DNA
tgcctcagtttgtctctgtgaggccaagcatgctatcagctgtccgcacagtttccccttgaaactagaggcgccctggt

SEQ ID NO: 39651 - DNA, 80 bp, synthetic construct; identical to SEQ ID NO: 13789
  source 1..80: mol_type = other DNA

SEQ ID NO: 39652 - DNA, 80 bp, synthetic construct
  source 1..80: mol_type = other DNA
ttacggatggggaaactgaggttcaagatcttctccaggaagttcagatgtacacatctgcaaaacgacaccatctttag

SEQ ID NO: 39653 - DNA, 80 bp, synthetic construct
  source 1..80: mol_type = other DNA
cataatagcatgagcaaaggcttaaggcaggaaaaaaaatgggatacattgggatgcagtgacagacagtatggctgaaa

SEQ ID NO: 39654 - DNA, 80 bp, synthetic construct; identical to SEQ ID NO: 13790
  source 1..80: mol_type = other DNA

SEQ ID NO: 39655 - DNA, 80 bp, synthetic construct
  source 1..80: mol_type = other DNA
cctcacacactttcttccttggctcaagagccagcaaggccaatccatttagtcccctgtctactcccagagagttcaga

SEQ ID NO: 39656 - DNA, 80 bp, synthetic construct
  source 1..80: mol_type = other DNA
tggttctttggaagtgatgaggcaattgtttgccttgccctaggatggccagggcttcacgtgtactctgtgcagtataa

SEQ ID NO: 39657 - DNA, 80 bp, synthetic construct
  source 1..80: mol_type = other DNA
gagcagctcctcactgtcaggcaggaggacctggccccctgggtccatccaggaagctgctccttcctggaggggggcta

SEQ ID NO: 39658 - DNA, 80 bp, synthetic construct
  source 1..80: mol_type = other DNA
cagcctgggcttctaaggggtctccaatccattgccagtgctgacattttgagatgaagaagtccctccatggggccact

SEQ ID NO: 39659 - DNA, 80 bp, synthetic construct; identical to SEQ ID NO: 13791
  source 1..80: mol_type = other DNA

SEQ ID NO: 39660 - DNA, 80 bp, synthetic construct
  source 1..80: mol_type = other DNA
gacatgacccctgatctcaaggccatttatgatccagtgagggagatggacacattgacacacgtgtatgagaagctcag

SEQ ID NO: 39661 - DNA, 80 bp, synthetic construct
  source 1..80: mol_type = other DNA
gaccagcctgggcgatgtagtggggccccatctctacaaaaaataaaaaattagccaagaatggtggcatgcacctgtag

SEQ ID NO: 39662 - DNA, 80 bp, synthetic construct
  source 1..80: mol_type = other DNA
taccatatgtaaagttgaatctccagtaaccccatactcaaacaaatgcatgcttatattcaaatactcacacattgtaa

SEQ ID NO: 39663 - DNA, 80 bp, synthetic construct; identical to SEQ ID NO: 13792
  source 1..80: mol_type = other DNA

SEQ ID NO: 39664 - DNA, 80 bp, synthetic construct
  source 1..80: mol_type = other DNA
agcctagaccatggtagtctggagatgctaatgaatcccttctcagataaatgtttttaaatgaataaaaacctttttat

SEQ ID NO: 39665 - DNA, 80 bp, synthetic construct
  source 1..80: mol_type = other DNA
cataatcttgaagtaataatgaatataactggtatttgaagatatccttagcactgtagtgtcatatgaaaactgcggtg

SEQ ID NO: 39666 - DNA, 80 bp, synthetic construct
  source 1..80: mol_type = other DNA
ccccaggctacaggttaagaacccctgatctagagatagccatttgggaacaggatcaggcaggaaaatatgtacagagt

SEQ ID NO: 39667 - DNA, 80 bp, synthetic construct; identical to SEQ ID NO: 13793
  source 1..80: mol_type = other DNA

SEQ ID NO: 39668 - DNA, 80 bp, synthetic construct
  source 1..80: mol_type = other DNA
acctatttcctcagtttgttttgggaattaaatatgtcagttcccgtaagagtgcttcgaacgggccatagttaacactc

SEQ ID NO: 39669 - DNA, 80 bp, synthetic construct
  source 1..80: mol_type = other DNA
aaactgttcataagtattttaaatgcctaaataatattccatttgggcatacagcccacattttatatacttattccctt

SEQ ID NO: 39670 - DNA, 80 bp, synthetic construct; identical to SEQ ID NO: 13794
  source 1..80: mol_type = other DNA

SEQ ID NO: 39671 - DNA, 80 bp, synthetic construct
  source 1..80: mol_type = other DNA
gaaagaggccaggatgactgtggctttgagcttgaggagataagaggagtaaagtagagtgggtaagagcactggctttg

SEQ ID NO: 39672 - DNA, 80 bp, synthetic construct
  source 1..80: mol_type = other DNA
gaaaaatatataacaaatctgatatggtggggataataataaaagggtcatgtagcatgtcaggtaccattctgaatgtt

SEQ ID NO: 39673 - DNA, 80 bp, synthetic construct
  source 1..80: mol_type = other DNA
aagctcttacagaactgagtgtgagatgccagagggaaggccctgtggcaacgtccagcaggtggttggaacttgacttt

SEQ ID NO: 39674 - DNA, 80 bp, synthetic construct; identical to SEQ ID NO: 13795
  source 1..80: mol_type = other DNA

SEQ ID NO: 39675 - DNA, 80 bp, synthetic construct
  source 1..80: mol_type = other DNA
tgagagaggaacatgaaccctggatgcgggtcaggagacttgaatccagatgccaactctggccttgattaggtgtgtga

SEQ ID NO: 39676 - DNA, 80 bp, synthetic construct
  source 1..80: mol_type = other DNA
gataacccccatggaagtagcttggaatttgaagagactcttcaaagatgaagcctgatcatcactactttggccagaca

SEQ ID NO: 39677 - DNA, 80 bp, synthetic construct
  source 1..80: mol_type = other DNA
atgttgtgggatgcctgcccaagccataggctaagagaagactccaagatctatagttcatatggtaaattgcaatgctg

SEQ ID NO: 39678 - DNA, 80 bp, synthetic construct; identical to SEQ ID NO: 13796
  source 1..80: mol_type = other DNA

SEQ ID NO: 39679 - DNA, 80 bp, synthetic construct
  source 1..80: mol_type = other DNA
ctcccatccttcctttctcagtctctagcattttaaaatcttagattctctccccctcctctgattacacatcccattcc

SEQ ID NO: 39680 - DNA, 80 bp, synthetic construct
  source 1..80: mol_type = other DNA
agaggtttgaaatctagtgagaggagagcactaaacaacaaacccaaatagatacagtgtcttagactagaggtatgaac

SEQ ID NO: 39681 - DNA, 80 bp, synthetic construct
  source 1..80: mol_type = other DNA
ggtcaggagttcaagaccagcctggccaacatggtgaaaccccgtcgctactaaaaatacaaaaattagccaggcgtggt

SEQ ID NO: 39682 - DNA, 80 bp, synthetic construct; identical to SEQ ID NO: 13797
  source 1..80: mol_type = other DNA

SEQ ID NO: 39683 - DNA, 80 bp, synthetic construct
  source 1..80: mol_type = other DNA
ccgctccttttgactttagccacccctgctctcttcctgtctgcgtcatcctcgccctccttcatacccccgcctgcctg

SEQ ID NO: 39684 - DNA, 80 bp, synthetic construct
  source 1..80: mol_type = other DNA
tatacaccctgttggctatggccgtatgttgtcataacctgggtcatttcctcatttaatgctgcccataaactccaata

SEQ ID NO: 39685 - DNA, 80 bp, synthetic construct
  source 1..80: mol_type = other DNA
gcttctttccctgtccctgccgctggctgcagtgtgtcagatcctccccaagggggtggtcgctgtcctcggaccatcgt

SEQ ID NO: 39686 - DNA, 80 bp, synthetic construct; identical to SEQ ID NO: 13798
  source 1..80: mol_type = other DNA

SEQ ID NO: 39687 - DNA, 80 bp, synthetic construct
  source 1..80: mol_type = other DNA
acatatcgggattctggggaagaatgccttcggggaaggcattgccacattttattgctaaaataaagtttgaaagcctc

SEQ ID NO: 39688 - DNA, 80 bp, synthetic construct
  source 1..80: mol_type = other DNA
ccagtttcaaagtgttgagtccatttgctctagttctgtttccatgggagaaaaaaaatggtagggcacaagtttcagag

SEQ ID NO: 39689 - DNA, 80 bp, synthetic construct
  source 1..80: mol_type = other DNA
caatccttccccttcagatatatcctcgggagacagtgagaaattggccccttagcccctgtctgccccaagggccttcc

SEQ ID NO: 39690 - DNA, 80 bp, synthetic construct
  source 1..80: mol_type = other DNA
gttcttagaaacaggaggaacacttgctgcaggagggactggatgcctcctcagtgagccgctcctgccagggcaggagc

SEQ ID NO: 39691 - DNA, 80 bp, synthetic construct; identical to SEQ ID NO: 13799
  source 1..80: mol_type = other DNA

SEQ ID NO: 39692 - DNA, 80 bp, synthetic construct
  source 1..80: mol_type = other DNA
cgtgtaatttacatctttcttgcggcactctgagaaacagcttaaatctatggcaggtcattattgtagcagtggctctg

SEQ ID NO: 39693 - DNA, 80 bp, synthetic construct
  source 1..80: mol_type = other DNA
tcagtggctatttaatctcagccaacacatcccttcaccctgtctggcatttcaggccagaagccaagcccatgatctgc

SEQ ID NO: 39694 - DNA, 80 bp, synthetic construct; identical to SEQ ID NO: 13800
  source 1..80: mol_type = other DNA

SEQ ID NO: 39695 - DNA, 80 bp, synthetic construct
  source 1..80: mol_type = other DNA
acacacctccgtgatggcttcctgggatacatttgcaattgcacattgagtatagatcgatctttgtcccagagagggaa

SEQ ID NO: 39696 - DNA, 80 bp, synthetic construct
  source 1..80: mol_type = other DNA
gggaggaaggagaaagagccttgcgcaagcacttattatacattaggtattgaactattatataccctacacacaggttc

SEQ ID NO: 39697 - DNA, 80 bp, synthetic construct
  source 1..80: mol_type = other DNA
ctgtagactccaaaacccatttgttcttcaccttcctgagtccttcccatccatctctaggatccgtggattcacggtat

SEQ ID NO: 39698 - DNA, 80 bp, synthetic construct; identical to SEQ ID NO: 13801
  source 1..80: mol_type = other DNA

SEQ ID NO: 39699 - DNA, 80 bp, synthetic construct
  source 1..80: mol_type = other DNA
agttgaattcagaagtttttcccctagtttctgctaaatctttatcctcttcccacctcagtctcagaggagctctggtc

SEQ ID NO: 39700 - DNA, 80 bp, synthetic construct
  source 1..80: mol_type = other DNA
tactcaccaccaggaagttcttcctgctgtctactatcgatcttccttgctttaacatctatacacactgatattcagct

SEQ ID NO: 39701 - DNA, 80 bp, synthetic construct
  source 1..80: mol_type = other DNA
atagatgcagagggaagctgacactgtcctaatgaagccaaaccacgtatttatttacctggctgtgttcagaggttctc

SEQ ID NO: 39702 - DNA, 80 bp, synthetic construct; identical to SEQ ID NO: 13802
  source 1..80: mol_type = other DNA

SEQ ID NO: 39703 - DNA, 80 bp, synthetic construct
  source 1..80: mol_type = other DNA
gcattcatccgggtctctggacaaatagttttctgtcctggggctgcttctttgaagcatcatcagggatgtcatcgctc

SEQ ID NO: 39704 - DNA, 80 bp, synthetic construct
  source 1..80: mol_type = other DNA
tcttgccaggtccctcacttcaaagtggccccagaggagttcgtcaagttccagttccagagattcacaaccctgaacct

SEQ ID NO: 39705 - DNA, 80 bp, synthetic construct
  source 1..80: mol_type = other DNA
gtgcccctggctggagaccctccaggaaggggaggcttccttcagatccacagggctgataaccaatgggtttgggcatt

SEQ ID NO: 39706 - DNA, 80 bp, synthetic construct; identical to SEQ ID NO: 13803
  source 1..80: mol_type = other DNA

SEQ ID NO: 39707 - DNA, 80 bp, synthetic construct
  source 1..80: mol_type = other DNA
tgtgttttctatgactctcagtcaatttgtgacataaatttagtgtttatgagatttagctaatttaagccagcaccttc

SEQ ID NO: 39708 - DNA, 80 bp, synthetic construct
  source 1..80: mol_type = other DNA
gggttgcactgcagagcgattccatctttattagggctcctttctatggcttctcagaactgctctgccttctcaagccc

SEQ ID NO: 39709 - DNA, 80 bp, synthetic construct
  source 1..80: mol_type = other DNA
tacaattttattgaatattcaatctgtgctacccaagaaatcaaggaactgagttccaactcagctgtgaccacccagtg

SEQ ID NO: 39710 - DNA, 80 bp, synthetic construct; identical to SEQ ID NO: 13804
  source 1..80: mol_type = other DNA

SEQ ID NO: 39711 - DNA, 80 bp, synthetic construct
  source 1..80: mol_type = other DNA
tgctgtgcctaggggaagtaggttggagcctagagtccatgctggataaagatggaaagagaggctggggaaggtagcag

SEQ ID NO: 39712 - DNA, 80 bp, synthetic construct
  source 1..80: mol_type = other DNA
ttgggaactggaattagacccaaggagctggggaccctcagacgtggagaaagaaagttgaactcaaagccttgttcaac

SEQ ID NO: 39713 - DNA, 80 bp, synthetic construct
  source 1..80: mol_type = other DNA
gatgaagcagacttgatggaaaactaagcagggtcgatggtcatgaagcaattaacacagtaaaatcggtgcggtggctc

SEQ ID NO: 39714 - DNA, 80 bp, synthetic construct
  source 1..80: mol_type = other DNA
gtagtagaaaccccgtttctactgaatatgtaaaaattagacgggtgtggtggtacgcgcctgtaatcccagctacttgg

SEQ ID NO: 39715 - DNA, 80 bp, synthetic construct; identical to SEQ ID NO: 13805
  source 1..80: mol_type = other DNA

SEQ ID NO: 39716 - DNA, 80 bp, synthetic construct
  source 1..80: mol_type = other DNA
gattctgtgaatcacagtccagtgcaccatcgtcattacacctgtatttatcaaatgggtttcctctggatctgtgatga

SEQ ID NO: 39717 - DNA, 80 bp, synthetic construct
  source 1..80: mol_type = other DNA
acattcccatcatggaggaaagttctacaggacagctcggctttgatgatacgtgttttgtggaccaggagttttatggc

SEQ ID NO: 39718 - DNA, 80 bp, synthetic construct; identical to SEQ ID NO: 13806
  source 1..80: mol_type = other DNA

SEQ ID NO: 39719 - DNA, 80 bp, synthetic construct
  source 1..80: mol_type = other DNA
aagagacagagggtatccgcaaatgtctccaggcaaagatggtcctgcagtcttcctcaatgctggtacaatatctcacc

SEQ ID NO: 39720 - DNA, 80 bp, synthetic construct
  source 1..80: mol_type = other DNA
taagcatctactacacactaagcactatgctaatactgttgcctcccagcccagggctcttcccattagaattatgacat

SEQ ID NO: 39721 - DNA, 80 bp, synthetic construct
  source 1..80: mol_type = other DNA
gactttatcttagtcctctgatcttcaagctggctcttccctctccatgacccccttccaccatcatggtctgcacaaac

SEQ ID NO: 39722 - DNA, 80 bp, synthetic construct
  source 1..80: mol_type = other DNA
tgcagtaggggacggcccacatcccagcggacttggcaggcacacaacacagagctgctggaactcacctgctgaggctg

SEQ ID NO: 39723 - DNA, 80 bp, synthetic construct; identical to SEQ ID NO: 13807
  source 1..80: mol_type = other DNA

SEQ ID NO: 39724 - DNA, 80 bp, synthetic construct
  source 1..80: mol_type = other DNA
ttctttaatgggaaaaaaagaacatttgcaagtgcctgtttctgatgaggctgggggaggagatgtgatgagcagcccag

SEQ ID NO: 39725 - DNA, 80 bp, synthetic construct
  source 1..80: mol_type = other DNA
gccacaggtataacatgccgtgtatttccctgctatcttcctacatgtctcaaatcttattttttttccttctttttttt

SEQ ID NO: 39726 - DNA, 80 bp, synthetic construct
  source 1..80: mol_type = other DNA
cgcctggctaatttttttatttttttgtagagacaggtttcaccatgttggccaggctggtctcgaacccctgacctcag

SEQ ID NO: 39727 - DNA, 80 bp, synthetic construct; identical to SEQ ID NO: 13808
  source 1..80: mol_type = other DNA

SEQ ID NO: 39728 - DNA, 80 bp, synthetic construct
  source 1..80: mol_type = other DNA
tctttctgaatattttaatgtcctttttgtggttacatggcctgtgtccccacatcttctgctacttattttctacctgt

SEQ ID NO: 39729 - DNA, 80 bp, synthetic construct
  source 1..80: mol_type = other DNA
ctttcctcccttactctgatctctttcaaatgaggcaaggccagacctgggagcaagagtcagctgaggtcgggctttgt

SEQ ID NO: 39730 - DNA, 80 bp, synthetic construct; identical to SEQ ID NO: 13809
  source 1..80: mol_type = other DNA

SEQ ID NO: 39731 - DNA, 80 bp, synthetic construct
  source 1..80: mol_type = other DNA
atgataaaaaattaaccatgcagctctgtgctgataccaggaaggtcacagtcctcccattacagagcacttactacgtg

SEQ ID NO: 39732 - DNA, 80 bp, synthetic construct
  source 1..80: mol_type = other DNA
ttcctgctaccttctctcccagctttcctaaagaagacagagaagtgagggaccatctttcctacagtatgggacgaccg

SEQ ID NO: 39733 - DNA, 80 bp, synthetic construct
  source 1..80: mol_type = other DNA
gcagtcaggaggatgaaatcagttgtgtatgtgaaggaatttaggaaacactgaaggttattctcagagcagggatgtct

SEQ ID NO: 39734 - DNA, 80 bp, synthetic construct
  source 1..80: mol_type = other DNA
gaagcctcagctggctcctctctccctctcctcttgccctgctggtcttccctgcctgttcctggagcaaagcttaggtg

SEQ ID NO: 39735 - DNA, 80 bp, synthetic construct; identical to SEQ ID NO: 13810
  source 1..80: mol_type = other DNA

SEQ ID NO: 39736 - DNA, 80 bp, synthetic construct
  source 1..80: mol_type = other DNA
gaggtgtttatttttataatattttttgatacaagggtcctctgtgtcccctgcagactcatcgcttaggtcttggtgtc

SEQ ID NO: 39737 - DNA, 80 bp, synthetic construct
  source 1..80: mol_type = other DNA
cagcctgcctgccgactctctcatcgatccgtcccgctgcatcctgagcaaggctaataggttccctaggcccctctcag

SEQ ID NO: 39738 - DNA, 80 bp, synthetic construct; identical to SEQ ID NO: 13811
  source 1..80: mol_type = other DNA

SEQ ID NO: 39739 - DNA, 80 bp, synthetic construct
  source 1..80: mol_type = other DNA
tttggtctttccttgactacctccagtgatggggaactcactacctcatgggcagcccactgcatcataaaggaagagtt

SEQ ID NO: 39740 - DNA, 80 bp, synthetic construct
  source 1..80: mol_type = other DNA
ggcgacggttcctgcctggcactgctgctcccctgacttgttaggatttagttactttcttcccccacagtctctacatc

SEQ ID NO: 39741 - DNA, 80 bp, synthetic construct
  source 1..80: mol_type = other DNA
gtgctctcaaatactttctatggtttaaaaccaagactatctttggtgggttggataatcctgtaagaggtgggagacgt

SEQ ID NO: 39742 - DNA, 80 bp, synthetic construct
  source 1..80: mol_type = other DNA
aaggaaactgaggcacagaggggtggggctgttgccatagtaacctgcctggcattgctggggttggcactcatgtcccc

SEQ ID NO: 39743 - DNA, 80 bp, synthetic construct; identical to SEQ ID NO: 13812
  source 1..80: mol_type = other DNA

SEQ ID NO: 39744 - DNA, 80 bp, synthetic construct
  source 1..80: mol_type = other DNA
actgaatttcattgcctgtctgaagaatcccagggaatttggcctctttcccagtcaggctccaaagattcttcatgctc

SEQ ID NO: 39745 - DNA, 80 bp, synthetic construct
  source 1..80: mol_type = other DNA
tcagacacccagacctttgtccaggtaggagttagcttttcacatcatctctgaggaagaggcggtaaatactctctcca

SEQ ID NO: 39746 - DNA, 80 bp, synthetic construct
  source 1..80: mol_type = other DNA
tgcctggtgtcctgtctgcacaatgcctggcactcaggacatgccagagactgttggttgaacagatgtgtccttgcctg

SEQ ID NO: 39747 - DNA, 80 bp, synthetic construct; identical to SEQ ID NO: 13813
  source 1..80: mol_type = other DNA

SEQ ID NO: 39748 - DNA, 80 bp, synthetic construct
  source 1..80: mol_type = other DNA
ccctgtcagggaagagaggaaaggccagcattgtggtttgcacagctgggctgtttctgaagcatcttaataaataacag

SEQ ID NO: 39749 - DNA, 80 bp, synthetic construct
  source 1..80: mol_type = other DNA
agaaaaaaaaaaaaaaaagcacagacacacaaccagcatcagcttccctctcctaatccctgagacacgtgtctctggac

SEQ ID NO: 39750 - DNA, 80 bp, synthetic construct
  source 1..80: mol_type = other DNA
tctgcaatgcgaggaggtggatgggaggctctccctcctttttggcctgggtggtgagtaacctatgcaggaaagtcttc

SEQ ID NO: 39751 - DNA, 80 bp, synthetic construct; identical to SEQ ID NO: 13814
  source 1..80: mol_type = other DNA

SEQ ID NO: 39752 - DNA, 80 bp, synthetic construct
  source 1..80: mol_type = other DNA
taccctctgctggctggcatgcctttccaaagacaaggcagaattaagaccctcatgtctcagtgacatcattctggaac

SEQ ID NO: 39753 - DNA, 80 bp, synthetic construct
  source 1..80: mol_type = other DNA
tatgatcatcataatactttgtcttaatgcagccacaaggctctgaggagttcaaagcgttttactagatctgttttctg

SEQ ID NO: 39754 - DNA, 80 bp, synthetic construct
  source 1..80: mol_type = other DNA
tggctgctgtgataattctaacttctcaattgaggaaactgaggccaagacaactggccacatggagaagtccatgaatt

SEQ ID NO: 39755 - DNA, 80 bp, synthetic construct; identical to SEQ ID NO: 13815
  source 1..80: mol_type = other DNA

SEQ ID NO: 39756 - DNA, 80 bp, synthetic construct
  source 1..80: mol_type = other DNA
gagaagctgctccggcaattccttatctccaaggacacgctgtccgtccgcatgctggatgacacccgggaccccacccc

SEQ ID NO: 39757 - DNA, 80 bp, synthetic construct
  source 1..80: mol_type = other DNA
caaacctctctctgtgcttctgttttcaatgagcggttcccgaaaaatgaaagaagaaagcagggtgagggtgatgtcgt

SEQ ID NO: 39758 - DNA, 80 bp, synthetic construct; identical to SEQ ID NO: 13816
  source 1..80: mol_type = other DNA

SEQ ID NO: 39759 - DNA, 80 bp, synthetic construct
  source 1..80: mol_type = other DNA
agggctgagcctgcacaaccctctcttatctgcaaatcaggtagtgtctcctaagctcctggagttggaggggcagtgcc

SEQ ID NO: 39760 - DNA, 80 bp, synthetic construct
  source 1..80: mol_type = other DNA
gctgggctgggcatgaacttcggagagaacgggccccgtttccaggctccttggcggctcccccaacctctccaggcgca

SEQ ID NO: 39761 - DNA, 80 bp, synthetic construct
  source 1..80: mol_type = other DNA
ctcctcagctcgtttttgactcagagttaataagagatttgaatgagttctctcagtactgagggctgtcccttcagccc

SEQ ID NO: 39762 - DNA, 80 bp, synthetic construct; identical to SEQ ID NO: 13817
  source 1..80: mol_type = other DNA

SEQ ID NO: 39763 - DNA, 80 bp, synthetic construct
  source 1..80: mol_type = other DNA
gggggccagccttgtgccctccatagctcccagcatctgatgttgcactattattttttttattcgaatagcattactag

SEQ ID NO: 39764 - DNA, 80 bp, synthetic construct
  source 1..80: mol_type = other DNA
ctgcacaaacttttctgtaagcgctttttgtccacacttaattctatgccgtgcattttccccatgtcattaaacatttt

SEQ ID NO: 39765 - DNA, 80 bp, synthetic construct
  source 1..80: mol_type = other DNA
tactgagttaaaggtacgcatgcttttaaggattctgatatgatttgccagattgcattttagaaaggctgtaacagttt

SEQ ID NO: 39766 - DNA, 80 bp, synthetic construct; identical to SEQ ID NO: 13818
  source 1..80: mol_type = other DNA

SEQ ID NO: 39767 - DNA, 80 bp, synthetic construct
  source 1..80: mol_type = other DNA
tggggctccgtactcttccctccaggagggcacaacagggcctctcagggcctcagcaaggatgggaagcagagtgggca

SEQ ID NO: 39768 - DNA, 80 bp, synthetic construct
  source 1..80: mol_type = other DNA
aatcaggccttaaaaaccaaggatctcttgtcttttatctctaggacagcagatttcacaaagcgggttttagctcccca

SEQ ID NO: 39769 - DNA, 80 bp, synthetic construct
  source 1..80: mol_type = other DNA
ttgccacatcatcctcttgaaagtgaaggaggaaatatagcttggcctggaggaagaaggagcctcaccaaagaggcttt

SEQ ID NO: 39770 - DNA, 80 bp, synthetic construct
  source 1..80: mol_type = other DNA
tcacttgaggtcaagagttcaagaccagcctggccaatatggcgaaatcccatctctactaaaaatacaaaaattagcca

SEQ ID NO: 39771 - DNA, 80 bp, synthetic construct; identical to SEQ ID NO: 13819
  source 1..80: mol_type = other DNA

SEQ ID NO: 39772 - DNA, 80 bp, synthetic construct
  source 1..80: mol_type = other DNA
agaacggggctcattattttcctgatctacgtgtcagtttctatagtacctgtcacactcaaagccaggcacactgacgg

SEQ ID NO: 39773 - DNA, 80 bp, synthetic construct
  source 1..80: mol_type = other DNA
acccaagtttgcaaatgagtcacttgtttccgacgtcactgcagattcaagaatacccttatgactctgccctgcactct

SEQ ID NO: 39774 - DNA, 80 bp, synthetic construct
  source 1..80: mol_type = other DNA
ttttatcttttccattaatgagacatgtgatcttgtgcaagtcacttagcctttcgttgtgtcagtttcctcagctgtaa

SEQ ID NO: 39775 - DNA, 80 bp, synthetic construct; identical to SEQ ID NO: 13820
  source 1..80: mol_type = other DNA

SEQ ID NO: 39776 - DNA, 80 bp, synthetic construct
  source 1..80: mol_type = other DNA
tggtagacacttggaacccctactgctcatttgcttcaagtgagtttttgttttcttctctaatctccttctcttcgcct

SEQ ID NO: 39777 - DNA, 80 bp, synthetic construct
  source 1..80: mol_type = other DNA
atacatcttcactaatctggtaagatgttctcacagctcacctccttggaagagagtgttgtcagtggtcaggattgatg

SEQ ID NO: 39778 - DNA, 80 bp, synthetic construct; identical to SEQ ID NO: 13821
  source 1..80: mol_type = other DNA

SEQ ID NO: 39779 - DNA, 80 bp, synthetic construct
  source 1..80: mol_type = other DNA
tctatgaacagtcctttccaggggctgctgtgggattgttaaccctgtagcatctgacaggcctttgttctcagagttga

SEQ ID NO: 39780 - DNA, 80 bp, synthetic construct
  source 1..80: mol_type = other DNA
tagtctagcgtgcacatagatgaaagccacacatattatatgcgcgtagcttaagaaaactttttccaagtaagcacacc

SEQ ID NO: 39781 - DNA, 80 bp, synthetic construct
  source 1..80: mol_type = other DNA
gcaccccagaatccccctcatgcccctcaaaacataaaacagatgaacttgtttcctttttttttttttaacctaacact

SEQ ID NO: 39782 - DNA, 80 bp, synthetic construct
  source 1..80: mol_type = other DNA
caaaggagcaaagagagattaaagtacagttgtgttccattttgggagcctgggaaatagaaggaggagagggaaaaggc

SEQ ID NO: 39783 - DNA, 80 bp, synthetic construct
  source 1..80: mol_type = other DNA
tggagttgcttggcttagaggtttttaagacagcatcctccacagtgtaccactatttcccattcatagaaatcataaga

SEQ ID NO: 39784 - DNA, 80 bp, synthetic construct; identical to SEQ ID NO: 13822
  source 1..80: mol_type = other DNA

SEQ ID NO: 39785 - DNA, 80 bp, synthetic construct
  source 1..80: mol_type = other DNA
ctttcagttttcaaagagcttttctcctttttgggtgggcatgaatgagatcagctttgggaattaacaggactcatgga

SEQ ID NO: 39786 - DNA, 80 bp, synthetic construct
  source 1..80: mol_type = other DNA
aaagggacaaacctctaataggagtaaagaaactgtttttaggaccactctttctgcccagttgcagttggtgttttttt

SEQ ID NO: 39787 - DNA, 80 bp, synthetic construct
  source 1..80: mol_type = other DNA
cctcccaagtagctgggattacaggcacacgccaccatgcctcgctaatttttgtatttttagtagagacggcgtttcac

SEQ ID NO: 39788 - DNA, 80 bp, synthetic construct; identical to SEQ ID NO: 13823
  source 1..80: mol_type = other DNA

SEQ ID NO: 39789 - DNA, 80 bp, synthetic construct
  source 1..80: mol_type = other DNA
ggtactcatgactcaaaacttttgtttgactagctactggctgtgtgatcctgtgcagtttacttaacctttctgagccc

SEQ ID NO: 39790 - DNA, 80 bp, synthetic construct
  source 1..80: mol_type = other DNA
ttgctccccagccatgcatgacctgtgaaagtgactcctaaaatgccattttatttatttccagataagaaataggacta

SEQ ID NO: 39791 - DNA, 80 bp, synthetic construct; identical to SEQ ID NO: 13824
  source 1..80: mol_type = other DNA

SEQ ID NO: 39792 - DNA, 80 bp, synthetic construct
  source 1..80: mol_type = other DNA
agccagagagagcggaggctgctcgggggtcacacagccatcacaggcggagctggaagaagctgggcaagtccagggaa

SEQ ID NO: 39793 - DNA, 80 bp, synthetic construct
  source 1..80: mol_type = other DNA
atgaaggcacacagtcagaggaaacagtgaactgacatctgggccttttatttatattatctatttcaaaatgagatctg

SEQ ID NO: 39794 - DNA, 80 bp, synthetic construct
  source 1..80: mol_type = other DNA
ttatgaggtccaaatcgtgagaacttgacaggtaaattgacagcacttggccagaggtcgggcacgcagagagcaactat

SEQ ID NO: 39795 - DNA, 80 bp, synthetic construct
  source 1..80: mol_type = other DNA
atgccaacacagagaactagtttctgccttcatccagaaatcaatctgcctgcctgcctgcctttgtttgcagtttagtg

SEQ ID NO: 39796 - DNA, 80 bp, synthetic construct; identical to SEQ ID NO: 13825
  source 1..80: mol_type = other DNA

SEQ ID NO: 39797 - DNA, 80 bp, synthetic construct
  source 1..80: mol_type = other DNA
tgcaaccaccaataccatccacctccagaacatttttcaccttttcagaatgaaactctgtacccattagacgcaaactc

SEQ ID NO: 39798 - DNA, 80 bp, synthetic construct
  source 1..80: mol_type = other DNA
tatgtgtgtgtagacacacacataccagattttgtgtatccgttcattcatcgatggacacgtgggtcgcctccaccttt

SEQ ID NO: 39799 - DNA, 80 bp, synthetic construct
  source 1..80: mol_type = other DNA
cgtttatttattgagaaaccaccgaacattttccagaatgaccacaccatttttcgttcctgtcagcaatgtacaaaggt

SEQ ID NO: 39800 - DNA, 80 bp, synthetic construct; identical to SEQ ID NO: 13826
  source 1..80: mol_type = other DNA

SEQ ID NO: 39801 - DNA, 80 bp, synthetic construct
  source 1..80: mol_type = other DNA
aacactgtacctggtaggtaatgctagctgctataacagataaacccccagatctcatcgtttcacacaatggaagaaaa

SEQ ID NO: 39802 - DNA, 80 bp, synthetic construct
  source 1..80: mol_type = other DNA
aaacaacatggaagatcatacatgggagggtttatgggtcaggcctggaagtgacacgtattatttcagctcacaattcc

SEQ ID NO: 39803 - DNA, 80 bp, synthetic construct
  source 1..80: mol_type = other DNA
gtatactaaaaaagcaactagaatcccaagccctggcttgtctttttagaggataactgatcctaaaagtggaaatcagc

SEQ ID NO: 39804 - DNA, 80 bp, synthetic construct
  source 1..80: mol_type = other DNA
agtcagcctctgggtttggttgggggaaacctttgttgtgcaagactgatggaagtttgaataaaagacataaagaatta

SEQ ID NO: 39805 - DNA, 80 bp, synthetic construct; identical to SEQ ID NO: 13827
  source 1..80: mol_type = other DNA

SEQ ID NO: 39806 - DNA, 80 bp, synthetic construct
  source 1..80: mol_type = other DNA
agtgttgagatttaagggtaaaggtcaaaagtcagggactgccaatgaaagatgggaaataattgggcactggaagcagg

SEQ ID NO: 39807 - DNA, 80 bp, synthetic construct
  source 1..80: mol_type = other DNA
gtgtcaacagaggcagtgggcacccagagtttttcttttggggaatctagagagaagggactgagagctgggtatgccat

SEQ ID NO: 39808 - DNA, 80 bp, synthetic construct; identical to SEQ ID NO: 13828
  source 1..80: mol_type = other DNA

SEQ ID NO: 39809 - DNA, 80 bp, synthetic construct
  source 1..80: mol_type = other DNA
aagggccttttcagccttggacctgtttcatcctatatgtggtttggggcatttcagttcacaatgccttggaattgggg

SEQ ID NO: 39810 - DNA, 80 bp, synthetic construct
  source 1..80: mol_type = other DNA
ttgttttggcagaatggatatatgcagccaattttcctcccctgggttcgttttattgtcagtagacctgagcctatgtt

SEQ ID NO: 39811 - DNA, 80 bp, synthetic construct
  source 1..80: mol_type = other DNA
atttgaaattgctaaaattattacagaaaggggacccagggcagacagagagggaaaaaataattgattccaggaggaaa

SEQ ID NO: 39812 - DNA, 80 bp, synthetic construct; identical to SEQ ID NO: 13829
  source 1..80: mol_type = other DNA

SEQ ID NO: 39813 - DNA, 80 bp, synthetic construct
  source 1..80: mol_type = other DNA
gggctggccaagtaagataagtcatctctttagatcccacaggaattcagttcatcccaactaagcctcagacacaaagg

SEQ ID NO: 39814 - DNA, 80 bp, synthetic construct
  source 1..80: mol_type = other DNA
gggtggtttagttcaggatccaagagacacaatttcaggggttctgctgagtgagagtgatgtcaaaacctgaggcccag

SEQ ID NO: 39815 - DNA, 80 bp, synthetic construct
  source 1..80: mol_type = other DNA
ccaacacctggcagctgactcatagagccagaacccaagggtctttagaagaaacctctccttcaggttataaaggccat

SEQ ID NO: 39816 - DNA, 80 bp, synthetic construct
  source 1..80: mol_type = other DNA
acattagatgtacatgcggcaagttacttaacctgttggcctatcagttttccctcttgtaaaatggagataatcatgct

SEQ ID NO: 39817 - DNA, 80 bp, synthetic construct; identical to SEQ ID NO: 13830
  source 1..80: mol_type = other DNA

SEQ ID NO: 39818 - DNA, 80 bp, synthetic construct
  source 1..80: mol_type = other DNA
gttcttcacggaaaatgcaacaggcacacatgaacatatacacacacatccctatgcacacttctacacacacacacaca

SEQ ID NO: 39819 - DNA, 80 bp, synthetic construct
  source 1..80: mol_type = other DNA
gtatactttgatgaataaatatgttttagtgcaactagaaaaaagagtgatggagtgaaagctccttgtgtgtcagtctg

SEQ ID NO: 39820 - DNA, 80 bp, synthetic construct
  source 1..80: mol_type = other DNA
acctgtgttttccaaagctgctaaccctcctgtacctattctctgcacatggttgttggaagatggaaatatgttcagaa

SEQ ID NO: 39821 - DNA, 80 bp, synthetic construct; identical to SEQ ID NO: 13831
  source 1..80: mol_type = other DNA

SEQ ID NO: 39822 - DNA, 80 bp, synthetic construct
  source 1..80: mol_type = other DNA
ggcttcccttactgaagcatgggttagagatggcaattggagagtgacatgtaggcagtggtaagttatagttccttttg

SEQ ID NO: 39823 - DNA, 80 bp, synthetic construct
  source 1..80: mol_type = other DNA
tgtgtgatcttggacaagccctttcttctctggagacaagctagaaggtctccaaagacctttcaactctgaaattctat

SEQ ID NO: 39824 - DNA, 80 bp, synthetic construct
  source 1..80: mol_type = other DNA
tgaattctcctggtgaattttttccagatgaaatcggccaccctcctcttcacggttttccagtgtcctcatctggctgg

SEQ ID NO: 39825 - DNA, 80 bp, synthetic construct; identical to SEQ ID NO: 13832
  source 1..80: mol_type = other DNA

SEQ ID NO: 39826 - DNA, 80 bp, synthetic construct
  source 1..80: mol_type = other DNA
atacaatgaagaataaaattctgattttccaggaggtcagactagaggggaagaagaacacaagcagattatcataaatc

SEQ ID NO: 39827 - DNA, 80 bp, synthetic construct
  source 1..80: mol_type = other DNA
ttctaagtgggggatacacacagttaatggctcatgcatcccagacatttgctttttagctaaggccttaaccaaggaag

SEQ ID NO: 39828 - DNA, 80 bp, synthetic construct
  source 1..80: mol_type = other DNA
cctttagcttggtggtggcttgtcacaaatgcctgtcccaggctaaatatcataaaatcccagacccagggattaccact

SEQ ID NO: 39829 - DNA, 80 bp, synthetic construct
  source 1..80: mol_type = other DNA
atctgaaaggtgaactttattctgccaacactggagtgcatccctgttcctgaccctggaagccttctcaccctgagatc

SEQ ID NO: 39830 - DNA, 80 bp, synthetic construct; identical to SEQ ID NO: 13833
  source 1..80: mol_type = other DNA

SEQ ID NO: 39831 - DNA, 80 bp, synthetic construct
  source 1..80: mol_type = other DNA
ttcccttggcaagctcaggtgatcagaagaatcaccccaagctgcatgggaactttccccaagagtaccccaatattagg

SEQ ID NO: 39832 - DNA, 80 bp, synthetic construct
  source 1..80: mol_type = other DNA
aatagccagacactgtaccctggggatgcaggatcactaaaaatgaaaattaaccaattaggtctttatcccacccagag

SEQ ID NO: 39833 - DNA, 80 bp, synthetic construct
  source 1..80: mol_type = other DNA
gcattcaacaggggatgttgagaccctggtggaggtaaagaaactcttctttgcttcggaggaaccaattatcagacaac

SEQ ID NO: 39834 - DNA, 80 bp, synthetic construct; identical to SEQ ID NO: 13834
  source 1..80: mol_type = other DNA

SEQ ID NO: 39835 - DNA, 80 bp, synthetic construct
  source 1..80: mol_type = other DNA
agatgcctcggccttccgtctactgatccaacaatttccaattattcacaatcaagagagtctaataataaaaatctacc

SEQ ID NO: 39836 - DNA, 80 bp, synthetic construct
  source 1..80: mol_type = other DNA
cagagatgttcaagggtcttcactcaataagtggcagatgtgagaatctgctttttacctcccagtctacatcttgtact

SEQ ID NO: 39837 - DNA, 80 bp, synthetic construct
  source 1..80: mol_type = other DNA
aatctaagtgtcaccaactacattttcatctggagcacaaggtccccctgcaagttcattcctgtggttggcagaatcta

SEQ ID NO: 39838 - DNA, 80 bp, synthetic construct; identical to SEQ ID NO: 13835
  source 1..80: mol_type = other DNA

SEQ ID NO: 39839 - DNA, 80 bp, synthetic construct
  source 1..80: mol_type = other DNA
tcttagaatcctgcctaccacacatgccaactgtgtaaattagtttattttcttttcctttctcctctaccatctggtga

SEQ ID NO: 39840 - DNA, 80 bp, synthetic construct
  source 1..80: mol_type = other DNA
ggagagtgctggagacacttgaggcaggaaatccatacatcccttgatcatgcaaatgataaactctgtgttgtctctgc

SEQ ID NO: 39841 - DNA, 80 bp, synthetic construct
  source 1..80: mol_type = other DNA
atttgggccctgctgagaagagtgtttgagatttaatgaatgtttggaaagcagaaggagactgaaaataaaaggcatta

SEQ ID NO: 39842 - DNA, 80 bp, synthetic construct; identical to SEQ ID NO: 13836
  source 1..80: mol_type = other DNA

SEQ ID NO: 39843 - DNA, 80 bp, synthetic construct
  source 1..80: mol_type = other DNA
gttgagatagtcctaaacccattcctgatcatattgctctcttgcttaaaacccttcagtggctgtctccccattaccct

SEQ ID NO: 39844 - DNA, 80 bp, synthetic construct
  source 1..80: mol_type = other DNA
cagctttcaggtctcaacttgcagtcagctctcagctcaggaatatcagcagcaattctggtagaaaagaccaccttata

SEQ ID NO: 39845 - DNA, 80 bp, synthetic construct
  source 1..80: mol_type = other DNA
atgaaggaatgagtgagactaactaagatctaaaaagtgtccaagagctgaaaatctgttatgcatatccctgcccctcc

SEQ ID NO: 39846 - DNA, 80 bp, synthetic construct; identical to SEQ ID NO: 13837
  source 1..80: mol_type = other DNA

SEQ ID NO: 39847 - DNA, 80 bp, synthetic construct
  source 1..80: mol_type = other DNA
ttctcattgtcaacttgacttactgaggcttcagctacacagttaaccacacagttaataactacttatttagcacctag

SEQ ID NO: 39848 - DNA, 80 bp, synthetic construct
  source 1..80: mol_type = other DNA
acatgaattaatttaatgaatgtgtattgagcacttgctaagcgcaagtgtaggatatagtgaaggggatagagcatgaa

SEQ ID NO: 39849 - DNA, 80 bp, synthetic construct
  source 1..80: mol_type = other DNA
gatttaggaccaaatctcctattaaatagaattcattgacaggtgtgaattagcctcccagctgctactgtcttcaaaga

SEQ ID NO: 39850 - DNA, 80 bp, synthetic construct
  source 1..80: mol_type = other DNA
ctgcaaaaaggctaagagaggacttctgagacaagggtctggggcctggcttctgtgatgcattagatctagctatgaag

SEQ ID NO: 39851 - DNA, 80 bp, synthetic construct; identical to SEQ ID NO: 13838
  source 1..80: mol_type = other DNA

SEQ ID NO: 39852 - DNA, 80 bp, synthetic construct
  source 1..80: mol_type = other DNA
aggtaggcaggaatcatagcatgaaaagacttgtgtgtctagccaaggggtttctgtcctgtattcagtaaaggagtatt

SEQ ID NO: 39853 - DNA, 80 bp, synthetic construct
  source 1..80: mol_type = other DNA
atggggtggagggcagggatcagattcaagagatgtaaaggaattataatgtcctcaaatgacaataaatgagtgcatac

SEQ ID NO: 39854 - DNA, 80 bp, synthetic construct; identical to SEQ ID NO: 13839
  source 1..80: mol_type = other DNA

SEQ ID NO: 39855 - DNA, 80 bp, synthetic construct
  source 1..80: mol_type = other DNA
aagatagaataatcactggtcttatttgccaaggacctggatcttaattccatgtctgtcttaggggcaagacatttaac

SEQ ID NO: 39856 - DNA, 80 bp, synthetic construct
  source 1..80: mol_type = other DNA
agtaataaattgatatttcataaatcactttgatgtgggtgacatgaggctgccagcctcctctcccaggcagttagggt

SEQ ID NO: 39857 - DNA, 80 bp, synthetic construct
  source 1..80: mol_type = other DNA
agggccagttataacccaaatgggtgcaagcgttaacacttggagagatttcagaggtcacagaggtgttggagtgacac

SEQ ID NO: 39858 - DNA, 80 bp, synthetic construct
  source 1..80: mol_type = other DNA
cctgctaatgatccctgaaagtgcatgaaacatgcattccttgagctattctattattacttctaataatactaataagg

SEQ ID NO: 39859 - DNA, 80 bp, synthetic construct; identical to SEQ ID NO: 13840
  source 1..80: mol_type = other DNA

SEQ ID NO: 39860 - DNA, 80 bp, synthetic construct
  source 1..80: mol_type = other DNA
ttctcctaaccatttaattaagcccaaaaggcaacttttgatttcactgatttttctaggtgccagggacacagcagtga

SEQ ID NO: 39861 - DNA, 80 bp, synthetic construct
  source 1..80: mol_type = other DNA
cctgtttctctgagccatcttagccacacaagcctgcagttatactgcattgacttctaattccttcccacctgctgcac

SEQ ID NO: 39862 - DNA, 80 bp, synthetic construct; identical to SEQ ID NO: 13841
  source 1..80: mol_type = other DNA

SEQ ID NO: 39863 - DNA, 80 bp, synthetic construct
  source 1..80: mol_type = other DNA
tcctgcctcagactcccaagtagctgggactacaggcagatgccacacaaccacgcccagctaatttttgtatttttagt

SEQ ID NO: 39864 - DNA, 80 bp, synthetic construct
  source 1..80: mol_type = other DNA
ggtgacttatttagcaaaacttttcccatttgacaagtagctaagagtcacctcttgccaaacaaagaggaagagaaaga

SEQ ID NO: 39865 - DNA, 80 bp, synthetic construct
  source 1..80: mol_type = other DNA
agtacctgtgtgccaggcacttctcatggattacctgtgcaaggtagatgctcttacccgcactttacaggtgaacacat

SEQ ID NO: 39866 - DNA, 80 bp, synthetic construct
  source 1..80: mol_type = other DNA
attcacatggtcatcagtataaatggcacctgggaattgaacagcatagtggctaggtatcctaagatcagaggcacgat

SEQ ID NO: 39867 - DNA, 80 bp, synthetic construct; identical to SEQ ID NO: 13842
  source 1..80: mol_type = other DNA

SEQ ID NO: 39868 - DNA, 80 bp, synthetic construct
  source 1..80: mol_type = other DNA
acctggacctgtgctttggtttcttgcttttctacttaaggtcaaactcagaaacaatctgggccattaaaagttcttgt

SEQ ID NO: 39869 - DNA, 80 bp, synthetic construct
  source 1..80: mol_type = other DNA
tttcccttatccctccatgttcccagacaccagacactaaagctctacatttcttggcactggaccctgtgtggtataag

SEQ ID NO: 39870 - DNA, 80 bp, synthetic construct
  source 1..80: mol_type = other DNA
gcgatgaacaggctgtagacccataaagcttcctgcagcttgcagtgaatggatgcctgtttgtaaaccaggacattgga

SEQ ID NO: 39871 - DNA, 80 bp, synthetic construct; identical to SEQ ID NO: 13843
  source 1..80: mol_type = other DNA

SEQ ID NO: 39872 - DNA, 80 bp, synthetic construct
  source 1..80: mol_type = other DNA
ttcatgtgaaagcccagtgatgataaagcaagctgtcaggatttaaaaaaaaaatacaataatgcaattcacagaggaca

SEQ ID NO: 39873 - DNA, 80 bp, synthetic construct
  source 1..80: mol_type = other DNA
aagcactctctagatgcagtgtgaacttcaaaaatgaggcagacatatctttgcttcctggaaacacacagccccctgta

SEQ ID NO: 39874 - DNA, 80 bp, synthetic construct
  source 1..80: mol_type = other DNA
caatgggagtcgattcctgttgggagcagggaccctcaggatatcccttcctgggatatttataagaagaggatcaaggt

SEQ ID NO: 39875 - DNA, 80 bp, synthetic construct; identical to SEQ ID NO: 13844
  source 1..80: mol_type = other DNA

SEQ ID NO: 39876 - DNA, 80 bp, synthetic construct
  source 1..80: mol_type = other DNA
aaaaacccatagtcctgctttgttccatggtcagtgtgtttgggaagttcagggttaaacaaaattaaaccagctgcttc

SEQ ID NO: 39877 - DNA, 80 bp, synthetic construct
  source 1..80: mol_type = other DNA
tctgttggtgtcacctggaaacctaatgccctgaggaacacactttgataaatactggcacataagatgttcattgtttg

SEQ ID NO: 39878 - DNA, 80 bp, synthetic construct
  source 1..80: mol_type = other DNA
gtgcccctcccccttccttgtccttccacaggctatcccatgagtcattataaatagaatgaattatcaaggaagcttct

SEQ ID NO: 39879 - DNA, 80 bp, synthetic construct; identical to SEQ ID NO: 13845
  source 1..80: mol_type = other DNA

SEQ ID NO: 39880 - DNA, 80 bp, synthetic construct
  source 1..80: mol_type = other DNA
ctaatattgtttctttttaaaaaacaaggatctgaagcccagaaggttacagaccttgccgaaagtcaaacagccagtat

SEQ ID NO: 39881 - DNA, 80 bp, synthetic construct
  source 1..80: mol_type = other DNA
ctgcccacaatgataaggaagccagggaagaggacattttccagcccctgccaaccatgcccagccaggccccttggttt

SEQ ID NO: 39882 - DNA, 80 bp, synthetic construct; identical to SEQ ID NO: 13846
  source 1..80: mol_type = other DNA

SEQ ID NO: 39883 - DNA, 80 bp, synthetic construct
  source 1..80: mol_type = other DNA
gcagctaagtcttcagaagaggagactgcctggaggaaagcaatctttcttcctggccagaaggaaagcctaaggcactt

SEQ ID NO: 39884 - DNA, 80 bp, synthetic construct
  source 1..80: mol_type = other DNA
tttttgtgtgaaaaggtggcctgacgcacatttgaaggcatctttccgggagcggggatcagtgagctgaataatctaca

SEQ ID NO: 39885 - DNA, 80 bp, synthetic construct
  source 1..80: mol_type = other DNA
ccatgggttgcagggagaactcctttgagcttctaaatgtcactgcctttagatgggatttccctgactgcgtcatctaa

SEQ ID NO: 39886 - DNA, 80 bp, synthetic construct; identical to SEQ ID NO: 13847
  source 1..80: mol_type = other DNA

SEQ ID NO: 39887 - DNA, 80 bp, synthetic construct
  source 1..80: mol_type = other DNA
ccctctcccaggcccccttgtatccagtgtgctaacccacacttcaggtgtataagacttagggtcctgctggaaatgca

SEQ ID NO: 39888 - DNA, 80 bp, synthetic construct
  source 1..80: mol_type = other DNA
gcaacctccgcctcctgggttcaagcgattctcctgcctcaccctcccaagtagctgggattacaggaatgcaccaccac

SEQ ID NO: 39889 - DNA, 80 bp, synthetic construct
  source 1..80: mol_type = other DNA
gaacctggatgatgctgatggtagaatcacactttaagaagtgatgtcttcatcaaagtacaagcacaccatgggcagtt

SEQ ID NO: 39890 - DNA, 80 bp, synthetic construct
  source 1..80: mol_type = other DNA
ctagtgctgcccccactaggcacatggcttttttctttctctctctagctagtgcatcttgtatataacttgtgtagaga

SEQ ID NO: 39891 - DNA, 80 bp, synthetic construct; identical to SEQ ID NO: 13848
  source 1..80: mol_type = other DNA

SEQ ID NO: 39892 - DNA, 80 bp, synthetic construct
  source 1..80: mol_type = other DNA
ttcactgggcctgcggtaagtacccgccagagctcttcctggtgccccttggcctctgcacattgcccctctgtgggcca

SEQ ID NO: 39893 - DNA, 80 bp, synthetic construct
  source 1..80: mol_type = other DNA
gtcacttagtgatggctgcaagtcccctgtggccagactctcaataatacaattgccgagagctgcctgagtttaggatc

SEQ ID NO: 39894 - DNA, 80 bp, synthetic construct
  source 1..80: mol_type = other DNA
cctggctcctggtctggtgctctgtccaccccctggccacttcctgcgtcacggctcatccagaatggctcccttctgcc

SEQ ID NO: 39895 - DNA, 80 bp, synthetic construct; identical to SEQ ID NO: 13849
  source 1..80: mol_type = other DNA

SEQ ID NO: 39896 - DNA, 80 bp, synthetic construct
  source 1..80: mol_type = other DNA
agtttatatttttaacctctgttccactgtgcatctctctaggactgtcatttccttgccacgctgtactgtaattgagc

SEQ ID NO: 39897 - DNA, 80 bp, synthetic construct
  source 1..80: mol_type = other DNA
tgttaactacattattcagtacagtcacataccgtacaggtttgtagcctaggagcactacactataccatatagcctag

SEQ ID NO: 39898 - DNA, 80 bp, synthetic construct; identical to SEQ ID NO: 13850
  source 1..80: mol_type = other DNA

SEQ ID NO: 39899 - DNA, 80 bp, synthetic construct
  source 1..80: mol_type = other DNA
aaagtcatatctagacatctatacacttggcatctaattagtacttggccaacacggtgaccttggaggtggcctgcgga

SEQ ID NO: 39900 - DNA, 80 bp, synthetic construct
  source 1..80: mol_type = other DNA
gagaaagagtttcatgcaggtttatggaacccatcccaacaagatattttagacctaaaagaggcaaaaatccatgggaa

SEQ ID NO: 39901 - DNA, 80 bp, synthetic construct
  source 1..80: mol_type = other DNA
ctcattccagtatttttatttttatttatttatttatttatttatttatttatttatttatttatttatttttgagatgg

SEQ ID NO: 39902 - DNA, 80 bp, synthetic construct
  source 1..80: mol_type = other DNA
gagatggggtttcaccgtgttagccaggagtgtctcgatctcctgacttcgtgatccgcccgcctcggcctcccaaagtg

SEQ ID NO: 39903 - DNA, 80 bp, synthetic construct; identical to SEQ ID NO: 13851
  source 1..80: mol_type = other DNA

SEQ ID NO: 39904 - DNA, 80 bp, synthetic construct
  source 1..80: mol_type = other DNA
attttctcaccgtgtgatctgaggtagtgacgtaacccccgtgggccgcagattctttttccataactttaggtgaatta

SEQ ID NO: 39905 - DNA, 80 bp, synthetic construct
  source 1..80: mol_type = other DNA
gtaacagccaactcctaaatctcatgatacacaataaatatgcatatacgattctatctccaattcacaatcattcacta

SEQ ID NO: 39906 - DNA, 80 bp, synthetic construct
  source 1..80: mol_type = other DNA
ctgtgtaacagccaactcctaaatctcatgatacacaataaatatgcatacaatacacatttatgtagcccgcggacctg

SEQ ID NO: 39907 - DNA, 80 bp, synthetic construct; identical to SEQ ID NO: 13852
  source 1..80: mol_type = other DNA

SEQ ID NO: 39908 - DNA, 80 bp, synthetic construct
  source 1..80: mol_type = other DNA
cccgaatacagagtgtgtcttagaccatttgtattgccatcaaggaatactcgaggttgggtgatttgtgaagaaaatag

SEQ ID NO: 39909 - DNA, 80 bp, synthetic construct
  source 1..80: mol_type = other DNA
ggagtgaaacttcactcactcctgtgagaatggcacaaagccatttgtgaagcatccaccccctttatccaacccacccg

SEQ ID NO: 39910 - DNA, 80 bp, synthetic construct; identical to SEQ ID NO: 13853
  source 1..80: mol_type = other DNA

SEQ ID NO: 39911 - DNA, 80 bp, synthetic construct
  source 1..80: mol_type = other DNA
acctcgtttgtctccttcccagtccaatgtcagacctcccaaggcctcagcatcttatgctccccaagaatgcttggggg

SEQ ID NO: 39912 - DNA, 80 bp, synthetic construct
  source 1..80: mol_type = other DNA
cagattctgcgtctactttagtcagctttctctcagccaagcccctttggttttcttgccaataaaatggacgagtgttc

SEQ ID NO: 39913 - DNA, 80 bp, synthetic construct
  source 1..80: mol_type = other DNA
acaagtggggaaactgaggcacggacgtgctggatggcacatcaagggtcctctgaggtcagcactccaatataacctgg

SEQ ID NO: 39914 - DNA, 80 bp, synthetic construct
  source 1..80: mol_type = other DNA
cactttagcaaccagcttttgaaaagtggtgcctcttcctgtctctttgggggctgagaaattcacagcacaaacagccc

SEQ ID NO: 39915 - DNA, 80 bp, synthetic construct; identical to SEQ ID NO: 13854
  source 1..80: mol_type = other DNA

SEQ ID NO: 39916 - DNA, 80 bp, synthetic construct
  source 1..80: mol_type = other DNA
caggagatgcaaatgtgcttctacctgagacaatgcaagcagaagaagggatgtcgcaaatggagacacacacccgctag

SEQ ID NO: 39917 - DNA, 80 bp, synthetic construct
  source 1..80: mol_type = other DNA
ttccatgggattttaatggttcctgtcctggtattatattggggggtagagtttaagctgcagaagttcagagacaaatg

SEQ ID NO: 39918 - DNA, 80 bp, synthetic construct; identical to SEQ ID NO: 13855
  source 1..80: mol_type = other DNA

SEQ ID NO: 39919 - DNA, 80 bp, synthetic construct
  source 1..80: mol_type = other DNA
cagagacaaaagcgagaggcgtgcacacacagatgaggagtagaggccatggaaagacagaaaggaaaaggaaatgtatt

SEQ ID NO: 39920 - DNA, 80 bp, synthetic construct
  source 1..80: mol_type = other DNA
ctgcctcctgggttcaagcaattctcctgcctcagcctcccaagtagctgggagtacaggcatgtgccaccatgcccagc

SEQ ID NO: 39921 - DNA, 80 bp, synthetic construct
  source 1..80: mol_type = other DNA
gaaactgcttctccctgactgtagccccaaatgctttccagagctaaatgagtaagtaatagcggagggaaaaaacaatt

SEQ ID NO: 39922 - DNA, 80 bp, synthetic construct; identical to SEQ ID NO: 13856
  source 1..80: mol_type = other DNA

SEQ ID NO: 39923 - DNA, 80 bp, synthetic construct
  source 1..80: mol_type = other DNA
cgggggacacgtcagtggtttcacccctctgaaggccacacacaggtggagaggagaccacaaccttgaggattttcctt

SEQ ID NO: 39924 - DNA, 80 bp, synthetic construct
  source 1..80: mol_type = other DNA
gaaaaccatgtcccagacggagtgggaatagtggcaaccgtgtggcaggaaccagctgggggcctggtgggaggatgtga

SEQ ID NO: 39925 - DNA, 80 bp, synthetic construct
  source 1..80: mol_type = other DNA
tggtaccagagtactctcggcaacagaaaccctgtatcaaaacgtcttgtgagaaaacggaaatgtgttattgcgtggct

SEQ ID NO: 39926 - DNA, 80 bp, synthetic construct; identical to SEQ ID NO: 13857
  source 1..80: mol_type = other DNA

SEQ ID NO: 39927 - DNA, 80 bp, synthetic construct
  source 1..80: mol_type = other DNA
tacctaaatcaaatgggaggaagaaggggagaatgggtgctaggtaggcagccaatggctaatggctgttaactgagggg

SEQ ID NO: 39928 - DNA, 80 bp, synthetic construct
  source 1..80: mol_type = other DNA
atgctcccatctgctgcagagaaggcaacaatgaaagattgccccaagttgtcctgggagatgaggcataagaataaatc

SEQ ID NO: 39929 - DNA, 80 bp, synthetic construct
  source 1..80: mol_type = other DNA
ttgggcaagagaagaatgccttgtgcctcagtttcttcattcgtgaaagaagacagatgagtggttttttttttttttgg

SEQ ID NO: 39930 - DNA, 80 bp, synthetic construct; identical to SEQ ID NO: 13858
  source 1..80: mol_type = other DNA

SEQ ID NO: 39931 - DNA, 80 bp, synthetic construct
  source 1..80: mol_type = other DNA
gacagaaattggtttatagcatcatttaaatagccaaacagaaggatctagaagccagtttcagttggggcagctaactt

SEQ ID NO: 39932 - DNA, 80 bp, synthetic construct
  source 1..80: mol_type = other DNA
agggcgaatcaaatgaagaaggagctgagggcaaaggggaagagcagggaagcagagaagagagagtagaagatgatgga

SEQ ID NO: 39933 - DNA, 80 bp, synthetic construct
  source 1..80: mol_type = other DNA
tggagcaggggaggcaggagactcgacggaggccgagggcagtggcctgatccagtatctctgtggagagtgggaaggtg

SEQ ID NO: 39934 - DNA, 80 bp, synthetic construct; identical to SEQ ID NO: 13859
  source 1..80: mol_type = other DNA

SEQ ID NO: 39935 - DNA, 80 bp, synthetic construct
  source 1..80: mol_type = other DNA
ctgagggggcacagcccctgccctcaggaatgctgtcttctgacgctggcagtttgcagagcacttttacagacttgtga

SEQ ID NO: 39936 - DNA, 80 bp, synthetic construct
  source 1..80: mol_type = other DNA
gttcatgcttttaagctctttcctcgacacctcactgtctcacactgcttacactctgcctggagagcttgaaaaacccc

SEQ ID NO: 39937 - DNA, 80 bp, synthetic construct
  source 1..80: mol_type = other DNA
agaggaggctcggaaggggcaatgttgagtcgccagtgatggaatgtcgtgtttcagtgaaggaacttgccttgtaatgg

SEQ ID NO: 39938 - DNA, 80 bp, synthetic construct
  source 1..80: mol_type = other DNA
accccgcatacattaacatagtgtggtattatctcctccttagatggcacgttcctcaaggacaggtgtcttctgtcttt

SEQ ID NO: 39939 - DNA, 80 bp, synthetic construct; identical to SEQ ID NO: 13860
  source 1..80: mol_type = other DNA

SEQ ID NO: 39940 - DNA, 80 bp, synthetic construct
  source 1..80: mol_type = other DNA
cagttccacgctctggaatgcctttccctcttctcagcgactccccatccttcagtgctcagttccaatgcagcatcctc

SEQ ID NO: 39941 - DNA, 80 bp, synthetic construct
  source 1..80: mol_type = other DNA
gctcctactcatctttgggctttgaacttaccatgtgcttcatacctactcatcaagttgtacagtacaaagtggactaa

SEQ ID NO: 39942 - DNA, 80 bp, synthetic construct
  source 1..80: mol_type = other DNA
cataagcagccgtgccctcttcttcaggattcctggtagcagtggcagttgcttgtttccctggagcagagagaaaaggg

SEQ ID NO: 39943 - DNA, 80 bp, synthetic construct; identical to SEQ ID NO: 13861
  source 1..80: mol_type = other DNA

SEQ ID NO: 39944 - DNA, 80 bp, synthetic construct
  source 1..80: mol_type = other DNA
cacggcaccagcctcatgaactacctgcgcatggtgaggagcggctgaggccctgcagggctgtgcccaggctagtgggg

SEQ ID NO: 39945 - DNA, 80 bp, synthetic construct
  source 1..80: mol_type = other DNA
atggaagtttgttcagaaggcaacagccctcgagccttacactattagtgggcccctgaattccagacttagcacctggc

SEQ ID NO: 39946 - DNA, 80 bp, synthetic construct; identical to SEQ ID NO: 13862
  source 1..80: mol_type = other DNA

SEQ ID NO: 39947 - DNA, 80 bp, synthetic construct
  source 1..80: mol_type = other DNA
gggttattgggggagcattcttctcctactccaggccaagccaagtctgaattgtctccacagacatcacatttgtcatc

SEQ ID NO: 39948 - DNA, 80 bp, synthetic construct
  source 1..80: mol_type = other DNA
tggaaggtcttaccggccacattgaattcaacagcaaaggccagaggtccaactacgctttgaaaatcttacagttcaca

SEQ ID NO: 39949 - DNA, 80 bp, synthetic construct
  source 1..80: mol_type = other DNA
cagcctctcccttcctgccaccagatcagccattgtggctcagggactgcacccccagcaaaatactaagaaggagagaa

SEQ ID NO: 39950 - DNA, 80 bp, synthetic construct
  source 1..80: mol_type = other DNA
aaggcagagactgtatcacatgtgggccaaggaaacccttcagtgttgcagtgcatggctgggtctctcctgtctgccct

SEQ ID NO: 39951 - DNA, 80 bp, synthetic construct; identical to SEQ ID NO: 13863
  source 1..80: mol_type = other DNA

SEQ ID NO: 39952 - DNA, 80 bp, synthetic construct
  source 1..80: mol_type = other DNA
gcttcctgactgtcagagtggctgaacaagggagcacaccactgaagggttgcacaatcaccttttccaggagattatga

SEQ ID NO: 39953 - DNA, 80 bp, synthetic construct
  source 1..80: mol_type = other DNA
tcaccaccaccactaccaccatcatcaccaccaccacaaccacaaaaccactaccaccattatcactaccaccactatca

SEQ ID NO: 39954 - DNA, 80 bp, synthetic construct
  source 1..80: mol_type = other DNA
tgtcatcatcatagcagcctccatttattaagcttttaccatgagccttataccatgttaagtgtgtcatatatattttc

SEQ ID NO: 39955 - DNA, 80 bp, synthetic construct; identical to SEQ ID NO: 13864
  source 1..80: mol_type = other DNA

SEQ ID NO: 39956 - DNA, 80 bp, synthetic construct
  source 1..80: mol_type = other DNA
ccagcatctgagaggctccgatcagccctccttagagtccagtggagttctttctaggagatcgtaattatgctgggccc

SEQ ID NO: 39957 - DNA, 80 bp, synthetic construct
  source 1..80: mol_type = other DNA
tctcaaatgagagcagggttaggtaggcagccagaaatttcggggatggcatttcacaaaatggtcattttattcatcta

SEQ ID NO: 39958 - DNA, 80 bp, synthetic construct
  source 1..80: mol_type = other DNA
gacatagaaaaccgtaagtgcaaatgtgggttattacactcagatcgtgccctcaggctcctaattccctgaataggtga

SEQ ID NO: 39959 - DNA, 80 bp, synthetic construct; identical to SEQ ID NO: 13865
  source 1..80: mol_type = other DNA

SEQ ID NO: 39960 - DNA, 80 bp, synthetic construct
  source 1..80: mol_type = other DNA
acatgatgctcactccacagaaagcctgatcccagactttgaaacactccccttagacctcagtcctgctttgtgagtgc

SEQ ID NO: 39961 - DNA, 80 bp, synthetic construct
  source 1..80: mol_type = other DNA
ctagcttgtgctagccctgaggccagaggactgcctgagtcattaagaaacagcgtcatcagcccccagggctcatcctt

SEQ ID NO: 39962 - DNA, 80 bp, synthetic construct; identical to SEQ ID NO: 13866
  source 1..80: mol_type = other DNA

SEQ ID NO: 39963 - DNA, 80 bp, synthetic construct
  source 1..80: mol_type = other DNA
cagaagtgaccattaaagaggatgtgctttgaccttcggctactctaagggacacatactcttgattggacttgtgaagt

SEQ ID NO: 39964 - DNA, 80 bp, synthetic construct
  source 1..80: mol_type = other DNA
ccaggtcccatcccaatcaccgcccgatctttgcctcttgacaggtgtccttcccctgcttattacaagatgaagaaatg

SEQ ID NO: 39965 - DNA, 80 bp, synthetic construct
  source 1..80: mol_type = other DNA
aggaacaggggaaataacatcttttgagtactttttgcataccagacaccacatgcgcactttgcacaaatcacttccaa

SEQ ID NO: 39966 - DNA, 80 bp, synthetic construct
  source 1..80: mol_type = other DNA
atcccccactcctggctattcctcactttcctggaatccctaaaaccccaaatcaaaccccttcagccaggtctgttggt

SEQ ID NO: 39967 - DNA, 80 bp, synthetic construct; identical to SEQ ID NO: 13867
  source 1..80: mol_type = other DNA

SEQ ID NO: 39968 - DNA, 80 bp, synthetic construct
  source 1..80: mol_type = other DNA
ggattgttttctactattttaaaaatgactattttgattctgttcggagagggttttcagtcttgggactgaccttgtgg

SEQ ID NO: 39969 - DNA, 80 bp, synthetic construct
  source 1..80: mol_type = other DNA
gctgtccatctcatatcctcccttttcatgacacggaagatggcctggacagtattaggaaagtatagtctcccttcctg

SEQ ID NO: 39970 - DNA, 80 bp, synthetic construct
  source 1..80: mol_type = other DNA
ggattggaaatggcttgacaggctctaattaagcctttgaggtttgctattcctagttaaagatgcagatctaaactttt

SEQ ID NO: 39971 - DNA, 80 bp, synthetic construct; identical to SEQ ID NO: 13868
  source 1..80: mol_type = other DNA

SEQ ID NO: 39972 - DNA, 80 bp, synthetic construct
  source 1..80: mol_type = other DNA
gattgaagaactgggtctgagtacaagtccaagtacaagtacaaggcaggactgggtctgccttcaaagtccaaggtctt

SEQ ID NO: 39973 - DNA, 80 bp, synthetic construct
  source 1..80: mol_type = other DNA
ctcaagggacacattccaaatacttccaggcactgggtcaaaatctgcctcctaattctgccataataggaatagtctgc

SEQ ID NO: 39974 - DNA, 80 bp, synthetic construct; identical to SEQ ID NO: 13869
  source 1..80: mol_type = other DNA

SEQ ID NO: 39975 - DNA, 80 bp, synthetic construct
  source 1..80: mol_type = other DNA
tggggctgaacagcacagagctgagagcactggaggattatgaatttcctcaaactgaacgccaaatttctatttgccac

SEQ ID NO: 39976 - DNA, 80 bp, synthetic construct
  source 1..80: mol_type = other DNA
gtgaacttttctagaaattagacctgagccacactttccttagaccatggatttatttcactctgctcctacagagctgg

SEQ ID NO: 39977 - DNA, 80 bp, synthetic construct
  source 1..80: mol_type = other DNA
tcctgagtcacccttgcgaaccaagaactcagggatccagtgtcatctttagaaggctcagagaattcaacccaactcct

SEQ ID NO: 39978 - DNA, 80 bp, synthetic construct; identical to SEQ ID NO: 13870
  source 1..80: mol_type = other DNA

SEQ ID NO: 39979 - DNA, 80 bp, synthetic construct
  source 1..80: mol_type = other DNA
aaagcgccctgcctgtcagatgacattctgcactgacattgccttcacatggcatggaagaatagtgaggggcatttcat

SEQ ID NO: 39980 - DNA, 80 bp, synthetic construct
  source 1..80: mol_type = other DNA
agtactgtgattgctactgtctaatacattttcaatttgaggaaggaatttaccataaatatgcagatcctttgaagctg

SEQ ID NO: 39981 - DNA, 80 bp, synthetic construct
  source 1..80: mol_type = other DNA
gggagcagaaaaagagatgggtggctggggggctgctttgaaggttactgagaagtcacttatttcttctttttaattaa

SEQ ID NO: 39982 - DNA, 80 bp, synthetic construct
  source 1..80: mol_type = other DNA
caggatgacaggtgctgggtgctgcatacctttgagtcccctcgtctgcactggcccttctgaggctctgccccagcaat

SEQ ID NO: 39983 - DNA, 80 bp, synthetic construct; identical to SEQ ID NO: 13871
  source 1..80: mol_type = other DNA

SEQ ID NO: 39984 - DNA, 80 bp, synthetic construct
  source 1..80: mol_type = other DNA
ggacctgaggattttgtcatgagagttctctaaagctactgttcaccaagttgttcaagagagatttcctatgacaaacc

SEQ ID NO: 39985 - DNA, 80 bp, synthetic construct
  source 1..80: mol_type = other DNA
ccatcctccaagaacagtgctcccctacttcactaaaaggctctgaaatactttctcctgtgagtgaatcaggctctcct

SEQ ID NO: 39986 - DNA, 80 bp, synthetic construct; identical to SEQ ID NO: 13872
  source 1..80: mol_type = other DNA

SEQ ID NO: 39987 - DNA, 80 bp, synthetic construct
  source 1..80: mol_type = other DNA
ggacctgctaattcggtctcaggaagcagcctgcgtcagtcagctctgatgggaggtgggccaggccaccggccagaggt

SEQ ID NO: 39988 - DNA, 80 bp, synthetic construct
  source 1..80: mol_type = other DNA
tagcattctgtttctcaatttcctcctcagtcaagcagggatggtgatcatcatcatatctgctttatgtgcatcataaa

SEQ ID NO: 39989 - DNA, 80 bp, synthetic construct
  source 1..80: mol_type = other DNA
agggcagagagaagaacaaaacgggggtgagcgagacgcccagggccaggtcactctggctgtaaccacgcaaagaccgg

SEQ ID NO: 39990 - DNA, 80 bp, synthetic construct
  source 1..80: mol_type = other DNA
cttggcagtggctctggttttgtgtgaagctgagggaagcagaagctatggtcccactcctatgagaatcccagcacccc

SEQ ID NO: 39991 - DNA, 80 bp, synthetic construct; identical to SEQ ID NO: 13873
  source 1..80: mol_type = other DNA

SEQ ID NO: 39992 - DNA, 80 bp, synthetic construct
  source 1..80: mol_type = other DNA
cctgtgtcatgttctttggcagtaaatctccagcatgcctgagctctctgataaattctttcctcggcagctaattcaaa

SEQ ID NO: 39993 - DNA, 80 bp, synthetic construct
  source 1..80: mol_type = other DNA
atgtttagaagtgagtctgtgagattttcaactatgcaagaaaagaagaggaagttggggtgtaggcaacataaattctt

SEQ ID NO: 39994 - DNA, 80 bp, synthetic construct
  source 1..80: mol_type = other DNA
tggctaatttttgtattttagtagagatggggttttgccatgttggtcaggctgatctcgaactcctgacctcaggtcac

SEQ ID NO: 39995 - DNA, 80 bp, synthetic construct; identical to SEQ ID NO: 13874
  source 1..80: mol_type = other DNA

SEQ ID NO: 39996 - DNA, 80 bp, synthetic construct
  source 1..80: mol_type = other DNA
ttggcacaagctacacattcgagagcagacaagtacggttgatcctcattatttgtggattccatgtttgcaaattcaac

SEQ ID NO: 39997 - DNA, 80 bp, synthetic construct
  source 1..80: mol_type = other DNA
tgtccttctcacagtccacttcatgtcacatcttgtctatttttgtgctttttcttggtaatgtttctgtttaaaatgac

SEQ ID NO: 39998 - DNA, 80 bp, synthetic construct
  source 1..80: mol_type = other DNA
tttaatgttaacgcatcaacagcatatattaagcgaggtgcctgcaaacagcaacacatgtaaaacaaagtgattgattg

SEQ ID NO: 39999 - DNA, 80 bp, synthetic construct; identical to SEQ ID NO: 13875
  source 1..80: mol_type = other DNA

SEQ ID NO: 40000 - DNA, 80 bp, synthetic construct
  source 1..80: mol_type = other DNA
aagaatactaaagggcttctagaccagcactctaattggctgcttggattcttgcaaatggatcatcatagagtctgttt

SEQ ID NO: 40001 - DNA, 80 bp, synthetic construct
  source 1..80: mol_type = other DNA
tattccacccttcctgtttctaccttcatttcgttcagctcagagagggctgttttgtggcagattggagaggagccttc

SEQ ID NO: 40002 - DNA, 80 bp, synthetic construct
  source 1..80: mol_type = other DNA
taagcccatctctctcaggctctgccccaagccactctgcaaatttacatcactttataaataaacccagcattttcagg

SEQ ID NO: 40003 - DNA, 80 bp, synthetic construct; identical to SEQ ID NO: 13876
  source 1..80: mol_type = other DNA

SEQ ID NO: 40004 - DNA, 80 bp, synthetic construct
  source 1..80: mol_type = other DNA
caaacgtgatgagtgctacaaagcagtagttcagggcactatgcacaagtctgtgatgtgggtcttgatggagacaaaag

SEQ ID NO: 40005 - DNA, 80 bp, synthetic construct
  source 1..80: mol_type = other DNA
ttatttctctgccgcctagcctccccttcctcaagctttatttacgtatcctcttctaaatatgtaactcagaatcaaag

SEQ ID NO: 40006 - DNA, 80 bp, synthetic construct; identical to SEQ ID NO: 13877
  source 1..80: mol_type = other DNA

SEQ ID NO: 40007 - DNA, 80 bp, synthetic construct
  source 1..80: mol_type = other DNA
actgtagttagtccttcagttataacaagtgaccaggactaggagttcattgatgcaaaagaatatatttattgagaacc

SEQ ID NO: 40008 - DNA, 80 bp, synthetic construct
  source 1..80: mol_type = other DNA
gtcaggatgcacataaacatccatctatatgtaactgaaaccaaagcttgtgaaacaaggtacccctgctatgtgcatta

SEQ ID NO: 40009 - DNA, 80 bp, synthetic construct
  source 1..80: mol_type = other DNA
cagccttccctggacttgtttttgatctcttacccttggcatttaccattgctttcttttgatcctgaattttcagcatt

SEQ ID NO: 40010 - DNA, 80 bp, synthetic construct; identical to SEQ ID NO: 13878
  source 1..80: mol_type = other DNA

SEQ ID NO: 40011 - DNA, 80 bp, synthetic construct
  source 1..80: mol_type = other DNA
tataagagactttgaaactctaacaatctcagtttattcctgggatccctggccatagtgttttcacctgaatgtcactt

SEQ ID NO: 40012 - DNA, 80 bp, synthetic construct
  source 1..80: mol_type = other DNA
agagtcattggttatggttcatctgactttggatgtccctggagaacaaggatctgaaatagaataaaatagaaagagct

SEQ ID NO: 40013 - DNA, 80 bp, synthetic construct
  source 1..80: mol_type = other DNA
aggcatgtgccactactcctgattaattttctgtttttagtagagacagggtttcaccatgttggtcaggctggtcttga

SEQ ID NO: 40014 - DNA, 80 bp, synthetic construct; identical to SEQ ID NO: 13879
  source 1..80: mol_type = other DNA

SEQ ID NO: 40015 - DNA, 80 bp, synthetic construct
  source 1..80: mol_type = other DNA
taggcaggttcatttatttccagatggagaaggttcagagaggttaaatgccttaccccagctcatacagcttatgcatg

SEQ ID NO: 40016 - DNA, 80 bp, synthetic construct
  source 1..80: mol_type = other DNA
atcagagaggaattgagaaggcccaggccttaaggtcaagacaagatacacctgtcctaactcaaccagatggtatagta

SEQ ID NO: 40017 - DNA, 80 bp, synthetic construct
  source 1..80: mol_type = other DNA
tgaagtacctccattaagcctacatttctcaggtgggaataataacaaggttgttgtgcagaatcaaggagatttacgta

SEQ ID NO: 40018 - DNA, 80 bp, synthetic construct; identical to SEQ ID NO: 13880
  source 1..80: mol_type = other DNA

SEQ ID NO: 40019 - DNA, 80 bp, synthetic construct
  source 1..80: mol_type = other DNA
tgagcctgtgggcctccaggactggtctataggaaagggcctgagggctcactgactgcagcctggaaggaatctgagcc

SEQ ID NO: 40020 - DNA, 80 bp, synthetic construct
  source 1..80: mol_type = other DNA
catcttggtacttagcagcatgtgactttggggacattcatgacctaaacttgctaagattcaggacgtttaaaatctgt

SEQ ID NO: 40021 - DNA, 80 bp, synthetic construct
  source 1..80: mol_type = other DNA
tggccatgatccctactctcatgaagcttattatctagtaagaaagataggcggtaagcaatggtcacatcgatgaatgt

SEQ ID NO: 40022 - DNA, 80 bp, synthetic construct; identical to SEQ ID NO: 13881
  source 1..80: mol_type = other DNA

SEQ ID NO: 40023 - DNA, 80 bp, synthetic construct
  source 1..80: mol_type = other DNA
gttcatgtggcaaggagagttccagacagggaatggcatgtgcaaaggctgtggcgggaaggagcctgttgcacttgaac

SEQ ID NO: 40024 - DNA, 80 bp, synthetic construct
  source 1..80: mol_type = other DNA
tggtctctatccttaagccaacatgggaaagaattgaagggttttaagcagggactggcgtgtatgtgagatttggtagt

SEQ ID NO: 40025 - DNA, 80 bp, synthetic construct
  source 1..80: mol_type = other DNA
agtgccaggtactaatgggggtctcctgatgccaggtgacacactgcagcctctgtcaggaagccccagaggacccctgt

SEQ ID NO: 40026 - DNA, 80 bp, synthetic construct
  source 1..80: mol_type = other DNA
actgatgccacggaaccattcactacaaccctgtggccctatcagcccccttgtctaggctctccttaaaattctttcaa

SEQ ID NO: 40027 - DNA, 80 bp, synthetic construct; identical to SEQ ID NO: 13882
  source 1..80: mol_type = other DNA

SEQ ID NO: 40028 - DNA, 80 bp, synthetic construct
  source 1..80: mol_type = other DNA
gtcccttggggatgttgggtaaatgatacattctatgtacgtgcaaacacatcccatatcggttatatttacctaaattt

SEQ ID NO: 40029 - DNA, 80 bp, synthetic construct
  source 1..80: mol_type = other DNA
gttaggtaaattattaacttatctggaccctgctttccttatgaatacagtgggggtgggaatgggattagtatgcatca

SEQ ID NO: 40030 - DNA, 80 bp, synthetic construct; identical to SEQ ID NO: 13883
  source 1..80: mol_type = other DNA

SEQ ID NO: 40031 - DNA, 80 bp, synthetic construct
  source 1..80: mol_type = other DNA
gagaatttgcatttctaatgctgatactgttggtctgggaactatactttgagacaccgtcctaatctgcctaatcaact

SEQ ID NO: 40032 - DNA, 80 bp, synthetic construct
  source 1..80: mol_type = other DNA
aagggttgacacagtaccttgcacatacaccatctcccttaatcttaagaacccctatgaggtaataattactattttaa

SEQ ID NO: 40033 - DNA, 80 bp, synthetic construct
  source 1..80: mol_type = other DNA
gcattcccagggtgcagtggcagggccacatcagcccagaggggtgcttttttcttatctgcattaagatgctgtttgta

SEQ ID NO: 40034 - DNA, 80 bp, synthetic construct
  source 1..80: mol_type = other DNA
agagacattatttgaagcaaaatcaagcctgcacatgtgggcatgtggaagcggcttacaaaacagctgttcctacagga

SEQ ID NO: 40035 - DNA, 80 bp, synthetic construct; identical to SEQ ID NO: 13884
  source 1..80: mol_type = other DNA

SEQ ID NO: 40036 - DNA, 80 bp, synthetic construct
  source 1..80: mol_type = other DNA
tgggtgtatagttcctacccctggcttttacctgtctcatggcttgggtcagaccagggagtctggggccggggcttctt

SEQ ID NO: 40037 - DNA, 80 bp, synthetic construct
  source 1..80: mol_type = other DNA
ctaaggagttcagtcctgttccatacatcccagtgctgacatctagcccaattgctctttctgttctttctgcctaaata

SEQ ID NO: 40038 - DNA, 80 bp, synthetic construct
  source 1..80: mol_type = other DNA
gaagaaagctatgtatttggacttcttaatggaatggccctagaagccattccccggttagcctggcctgcttaagtgaa

SEQ ID NO: 40039 - DNA, 80 bp, synthetic construct; identical to SEQ ID NO: 13885
  source 1..80: mol_type = other DNA

SEQ ID NO: 40040 - DNA, 80 bp, synthetic construct
  source 1..80: mol_type = other DNA
tcggagaaagagaaagtgccttccgccctagcctcaccaacaacagcaatctgctgatagacaatggttttccctcgctt

SEQ ID NO: 40041 - DNA, 80 bp, synthetic construct
  source 1..80: mol_type = other DNA
gaagattcatctgggcttaagagtgcagggcttaaagctcaggcctctcagctgacaggctctgtgacctcaggcaagtt

SEQ ID NO: 40042 - DNA, 80 bp, synthetic construct
  source 1..80: mol_type = other DNA
ggtggcattcttgcagggcgtggacgggagcatttggtcatctccccttttccacaggaaaggcccaactgtagagacca

SEQ ID NO: 40043 - DNA, 80 bp, synthetic construct; identical to SEQ ID NO: 13886
  source 1..80: mol_type = other DNA

SEQ ID NO: 40044 - DNA, 80 bp, synthetic construct
  source 1..80: mol_type = other DNA
ggctgcccacctaaaaacactcagcaacagcaatgatttgccaggggctccagctagtagagatatattgggattttatg

SEQ ID NO: 40045 - DNA, 80 bp, synthetic construct
  source 1..80: mol_type = other DNA
gtcttattaaaaaaattaaaaggagacatccgttgggaaaaacaagcaatctaaaaacccattgctgttgagtttagatt

SEQ ID NO: 40046 - DNA, 80 bp, synthetic construct
  source 1..80: mol_type = other DNA
taggtaacttaccagaatgaagaactgagtaagttgtggatttttttcacctggagttctttgagacaatgagacagaca

SEQ ID NO: 40047 - DNA, 80 bp, synthetic construct; identical to SEQ ID NO: 13887
  source 1..80: mol_type = other DNA

SEQ ID NO: 40048 - DNA, 80 bp, synthetic construct
  source 1..80: mol_type = other DNA
aaacgaaagacaacgtggaaggaaagcagcatgtattgagtgccaggttaaatacattcttacaatgacccaatgaggtt

SEQ ID NO: 40049 - DNA, 80 bp, synthetic construct
  source 1..80: mol_type = other DNA
tatcatccccatttatacatggggaaactggggttctgaaagatgtgaataacttgcctgagttctcacagctaataaat

SEQ ID NO: 40050 - DNA, 80 bp, synthetic construct
  source 1..80: mol_type = other DNA
ttcattctttcagccatccagcaaatgtttatcaaagggcatagttctctccagtatagccttctggttcttattttgat

SEQ ID NO: 40051 - DNA, 80 bp, synthetic construct; identical to SEQ ID NO: 13888
  source 1..80: mol_type = other DNA

SEQ ID NO: 40052 - DNA, 80 bp, synthetic construct
  source 1..80: mol_type = other DNA
ccagtcctctccgttggtctcctcagatcggccagtggcacgtggcagagggcctcagcatggacagccacctctatgcc

SEQ ID NO: 40053 - DNA, 80 bp, synthetic construct
  source 1..80: mol_type = other DNA
gcactgagcccaatttatgacagcgtaattacactcaagttgctgtttcatatggaaatgatatttgatgagttccagag

SEQ ID NO: 40054 - DNA, 80 bp, synthetic construct
  source 1..80: mol_type = other DNA
cagcccaccttgctgggtgcctgctgtgtacaaaacaggaccctcccccaccacatcctgaagcggacatgggaatgtca

SEQ ID NO: 40055 - DNA, 80 bp, synthetic construct
  source 1..80: mol_type = other DNA
ggccaacacggcgaaaccctgtctctactaaaaaaaaatagaaaaattagctgggcacggtggcacacgcctgaaattcc

SEQ ID NO: 40056 - DNA, 80 bp, synthetic construct; identical to SEQ ID NO: 13889
  source 1..80: mol_type = other DNA

SEQ ID NO: 40057 - DNA, 80 bp, synthetic construct
  source 1..80: mol_type = other DNA
aactacatgtattaagcagtaattagtttgttcctcccctcccccttttaactaatctaaagcacttttccctgcctggc

SEQ ID NO: 40058 - DNA, 80 bp, synthetic construct
  source 1..80: mol_type = other DNA
tgcaaatgtgtccatgtcttttaggcttttggagataataaaaagagttcaaggacctccatcactatctttatgaactc

SEQ ID NO: 40059 - DNA, 80 bp, synthetic construct
  source 1..80: mol_type = other DNA
ataaacagaaagagataaaagctggaaagagacacacacctaggactgtggggtttcaaggagagagaggtcccctccca

SEQ ID NO: 40060 - DNA, 80 bp, synthetic construct; identical to SEQ ID NO: 13890
  source 1..80: mol_type = other DNA

SEQ ID NO: 40061 - DNA, 80 bp, synthetic construct
  source 1..80: mol_type = other DNA
aaccaaaaagacaagaatccctgcctgtaaggagcttacattccagcaaggaatgtgtgatagacagtaaaaagcaatgt

SEQ ID NO: 40062 - DNA, 80 bp, synthetic construct
  source 1..80: mol_type = other DNA
cagccaagtagttgccgggggaggggtattcttggcacagggagctgtcgaagcaagcactgagagagcagttccagccc

SEQ ID NO: 40063 - DNA, 80 bp, synthetic construct; identical to SEQ ID NO: 13891
  source 1..80: mol_type = other DNA

SEQ ID NO: 40064 - DNA, 80 bp, synthetic construct
  source 1..80: mol_type = other DNA
tgaaaatcagaattggcctggcatttccttccttacaatccttcagccactgcccaggccctgctgccccttaccttggg

SEQ ID NO: 40065 - DNA, 80 bp, synthetic construct
  source 1..80: mol_type = other DNA
ttccctctaatttctgtttccagctggaaatgtctatgcatccttcaaggctctgctcagatgtcacgtctcccacgaag

SEQ ID NO: 40066 - DNA, 80 bp, synthetic construct
  source 1..80: mol_type = other DNA
ttagaatctgagtgaaggaattccttcctacagggtaggggtgtcccttaaaagccagcaagactttgggagggagatgg

SEQ ID NO: 40067 - DNA, 80 bp, synthetic construct; identical to SEQ ID NO: 13892
  source 1..80: mol_type = other DNA

SEQ ID NO: 40068 - DNA, 80 bp, synthetic construct
  source 1..80: mol_type = other DNA
gtcagggcacacttggggacgtgtggatggtttattggttaatgccagcaaacatggaattggctgccgctcccattccc

SEQ ID NO: 40069 - DNA, 80 bp, synthetic construct
  source 1..80: mol_type = other DNA
ccaagaccggccttgtgtctgttcactttgaatatgtcaataagttttaaattaacttgagagtagtgagtatttgggga

SEQ ID NO: 40070 - DNA, 80 bp, synthetic construct
  source 1..80: mol_type = other DNA
gcaggtgacgagtctgtcccaggacccactcccattctacctagagcaggcgcaaatcggaaaacattggagggtgattg

SEQ ID NO: 40071 - DNA, 80 bp, synthetic construct; identical to SEQ ID NO: 13893
  source 1..80: mol_type = other DNA

SEQ ID NO: 40072 - DNA, 80 bp, synthetic construct
  source 1..80: mol_type = other DNA
ccagcctagaagtccttctcagaacgagctcagcccatcaggatttcagtgctttcctctctgggctcctagaatcgtga

SEQ ID NO: 40073 - DNA, 80 bp, synthetic construct
  source 1..80: mol_type = other DNA
cagctctcctctgtccctgtcgcatcccctgagcggctctgctgaaaatcttcccacacaccaagactcaagcctatctg

SEQ ID NO: 40074 - DNA, 80 bp, synthetic construct
  source 1..80: mol_type = other DNA
gttctttcctcctcttttctccccttttccagggattttcccttcctgcctgtaaatacaccctggactgtcccatccta

SEQ ID NO: 40075 - DNA, 80 bp, synthetic construct
  source 1..80: mol_type = other DNA
gtgcctgccgccttgcctcccttagctcctaacctgtcaaaatgctgaacagccctcactcctgtggcactcgctcagtc

SEQ ID NO: 40076 - DNA, 80 bp, synthetic construct; identical to SEQ ID NO: 13894
  source 1..80: mol_type = other DNA

SEQ ID NO: 40077 - DNA, 80 bp, synthetic construct
  source 1..80: mol_type = other DNA
cagcttcagccttgatctctgtacatgtgcaatctctggcccctgtcttacccttgctccacattttaaacacccagtgg

SEQ ID NO: 40078 - DNA, 80 bp, synthetic construct
  source 1..80: mol_type = other DNA
ctgttcctttctgtgcctcttacatccttctggctttctccaatccaacctgcagcccaggattcagggtctcatctcag

SEQ ID NO: 40079 - DNA, 80 bp, synthetic construct
  source 1..80: mol_type = other DNA
cctcccatctcgcccctgctcacaacctgtgctccggctaccctggaaggtccatcgtccactgagcagccactcaggat

SEQ ID NO: 40080 - DNA, 80 bp, synthetic construct; identical to SEQ ID NO: 13895
  source 1..80: mol_type = other DNA

SEQ ID NO: 40081 - DNA, 80 bp, synthetic construct
  source 1..80: mol_type = other DNA
aaccactgtgtgttcctgacaacagaagcaccttgaaggacagctttaaggagcacatcagggagaggagctggtcatca

SEQ ID NO: 40082 - DNA, 80 bp, synthetic construct
  source 1..80: mol_type = other DNA
tgctgaaggggaaccaccaggagatggaaggcaatgaccgctacgagggcttctgtgtggacatgctcaaggagctggca

SEQ ID NO: 40083 - DNA, 80 bp, synthetic construct; identical to SEQ ID NO: 13896
  source 1..80: mol_type = other DNA

SEQ ID NO: 40084 - DNA, 80 bp, synthetic construct
  source 1..80: mol_type = other DNA
tgattaacacagatgagggagtttgggttccatttttggtgctttttgattgttctgattattttgtggctcattagcac

SEQ ID NO: 40085 - DNA, 80 bp, synthetic construct
  source 1..80: mol_type = other DNA
cttgtgttatctttggttagcgttaatgtccttttacagaccgagggccaaggtgtgcttggacctgctgtagattttca

SEQ ID NO: 40086 - DNA, 80 bp, synthetic construct
  source 1..80: mol_type = other DNA
attcaccatccatatttccataactgagttttaatgatcaggataggtgatgaggacacaatgcagagagcacagacctg

SEQ ID NO: 40087 - DNA, 80 bp, synthetic construct; identical to SEQ ID NO: 13897
  source 1..80: mol_type = other DNA

SEQ ID NO: 40088 - DNA, 80 bp, synthetic construct
  source 1..80: mol_type = other DNA
gtattaaataagcagtccttgacaagggattgggaaaagtcctatgtagatgagaactgtggaaaaggtgtttaagaact

SEQ ID NO: 40089 - DNA, 80 bp, synthetic construct
  source 1..80: mol_type = other DNA
aggggcgcttgcaaacagacggctgacaagtcaacagaaggctgcagaaggcctagggagccctggacgactgccatggg

SEQ ID NO: 40090 - DNA, 80 bp, synthetic construct
  source 1..80: mol_type = other DNA
tttggtttccactgtgaaggtgcagctcagtagttagaccatagaaagccgaaatgccaggccttttctttaccttctta

SEQ ID NO: 40091 - DNA, 80 bp, synthetic construct; identical to SEQ ID NO: 13898
  source 1..80: mol_type = other DNA

SEQ ID NO: 40092 - DNA, 80 bp, synthetic construct
  source 1..80: mol_type = other DNA
ctggactagtgagtgagacggagatcaatgaatgatcgcattcttgtgtaatttcaagctgtgataagtgcaggggaggc

SEQ ID NO: 40093 - DNA, 80 bp, synthetic construct
  source 1..80: mol_type = other DNA
cgttggtgtgccactggggttggtcctggatgggagttgatgacactgggaccccaccatccccaggtttgaaggattgg

SEQ ID NO: 40094 - DNA, 80 bp, synthetic construct
  source 1..80: mol_type = other DNA
gagaccttagaagccattgcatctaaatctgtcccttatacagatgaggaaatggtggcccagggaggttaggtaacctg

SEQ ID NO: 40095 - DNA, 80 bp, synthetic construct; identical to SEQ ID NO: 13899
  source 1..80: mol_type = other DNA

SEQ ID NO: 40096 - DNA, 80 bp, synthetic construct
  source 1..80: mol_type = other DNA
gtgagggaaaggggaaggtggcaggcaggcggggagagtatgcagaaggggtgtgttagctgctggtcatagctttgtat

SEQ ID NO: 40097 - DNA, 80 bp, synthetic construct
  source 1..80: mol_type = other DNA
cgcccagaccctttggccaccttcaaagaagttggttcccaagacactggtaacagcactcgaggtgcaaagcataaaat

SEQ ID NO: 40098 - DNA, 80 bp, synthetic construct
  source 1..80: mol_type = other DNA
aaggtcagccagagcagacaccatgggccgggccaggccagcaggcagagcaccaccaaggcagtggcagaacctgctga

SEQ ID NO: 40099 - DNA, 80 bp, synthetic construct; identical to SEQ ID NO: 13900
  source 1..80: mol_type = other DNA

SEQ ID NO: 40100 - DNA, 80 bp, synthetic construct
  source 1..80: mol_type = other DNA
tccaggggctctcacttatgcagcacatgtggaacttggggaagaaagagaatgtgtacaaggatgaggtgccagggtat

SEQ ID NO: 40101 - DNA, 80 bp, synthetic construct
  source 1..80: mol_type = other DNA
atggtgactgcctgtatgtctgagtgatatgaattaaagtgtagaggcccagggttatctccagtggaaattgtagagcc

SEQ ID NO: 40102 - DNA, 80 bp, synthetic construct
  source 1..80: mol_type = other DNA
ccttaggaatggattcatgtcatcatcgaggaaggttagttactggaagagcaggttgttataaagtgagtcaggcctct

SEQ ID NO: 40103 - DNA, 80 bp, synthetic construct; identical to SEQ ID NO: 13901
  source 1..80: mol_type = other DNA

SEQ ID NO: 40104 - DNA, 80 bp, synthetic construct
  source 1..80: mol_type = other DNA
gggctgtgtctgggcagtggagatgagaaggatggttgttcgagaggctctcaggtttgaatttgttttgcctggtcagc

SEQ ID NO: 40105 - DNA, 80 bp, synthetic construct
  source 1..80: mol_type = other DNA
gatgtataaacagttttggtgaaactgttcaaggcattcaggtacaaagatgtctctagactcaaggaggccactctttg

SEQ ID NO: 40106 - DNA, 80 bp, synthetic construct
  source 1..80: mol_type = other DNA
gccatcaaagaagagacacggagagagaagaacatgccagtgaggagagagtacgagagccaagtcatggggccatgaag

SEQ ID NO: 40107 - DNA, 80 bp, synthetic construct; identical to SEQ ID NO: 13902
  source 1..80: mol_type = other DNA

SEQ ID NO: 40108 - DNA, 80 bp, synthetic construct
  source 1..80: mol_type = other DNA
gcgccaccatgcccggctaatttttgtatttttagtagagacggggtttcaccgtgttagccaggatggtctcgatctcc

SEQ ID NO: 40109 - DNA, 80 bp, synthetic construct
  source 1..80: mol_type = other DNA
gaggtcaggagttcaagaccagcctggccaacatggtgaaaccccgtctctactaaaaatacaaaaattagccaggcgtg

SEQ ID NO: 40110 - DNA, 80 bp, synthetic construct
  source 1..80: mol_type = other DNA
aaaggtttttctcttatacggaggtagacatgctttttgaaaaatagataaggttttaaaaaactaaaaattatttgtaa

SEQ ID NO: 40111 - DNA, 80 bp, synthetic construct
  source 1..80: mol_type = other DNA
gtgtaacccattaaaaactatttaatagagaaatcatcaggaccaggggacccagtggatgtggaatgtgagagagaggg

SEQ ID NO: 40112 - DNA, 80 bp, synthetic construct; identical to SEQ ID NO: 13903
  source 1..80: mol_type = other DNA

SEQ ID NO: 40113 - DNA, 80 bp, synthetic construct
  source 1..80: mol_type = other DNA
tgaaagagaatgggtaaagaggttttctgccgcttgaaaggaagtacagaagaacatttcccaggctgagcaatacgggg

SEQ ID NO: 40114 - DNA, 80 bp, synthetic construct
  source 1..80: mol_type = other DNA
gctagagggagctgtggagattgactgtaagtcaagatgaaatcgcttatgtaagcagctgctcagaattgagaatgctt

SEQ ID NO: 40115 - DNA, 80 bp, synthetic construct
  source 1..80: mol_type = other DNA
tttggagtttttgtcgagatgctagtacttcttcccacagctggtatctgggaaccagcacagtcaggcaagtatctgtc

SEQ ID NO: 40116 - DNA, 80 bp, synthetic construct; identical to SEQ ID NO: 13904
  source 1..80: mol_type = other DNA

SEQ ID NO: 40117 - DNA, 80 bp, synthetic construct
  source 1..80: mol_type = other DNA
gggtgcccagaatttgatacccaagttcaactctggcccataaagagattgcactccatctgtaaagtgacagaaccaga

SEQ ID NO: 40118 - DNA, 80 bp, synthetic construct
  source 1..80: mol_type = other DNA
gttcacagttcagaacaaagtaccccgttggcattcaactccatgttggcggaatggcacatttaagttcaaagagaaaa

SEQ ID NO: 40119 - DNA, 80 bp, synthetic construct
  source 1..80: mol_type = other DNA
gggctttggaaggcttagattcaaggctcataagccttggacatcaaatagctcttaccaatgacattttgatgaattaa

SEQ ID NO: 40120 - DNA, 80 bp, synthetic construct
  source 1..80: mol_type = other DNA
aaaaaaaaatacaagtggtcccctgagattacttttcaccttgaagccagagactattttaactacaaataggtcacaga

SEQ ID NO: 40121 - DNA, 80 bp, synthetic construct; identical to SEQ ID NO: 13905
  source 1..80: mol_type = other DNA

SEQ ID NO: 40122 - DNA, 80 bp, synthetic construct
  source 1..80: mol_type = other DNA
gactgtattaactcaagcctcacaataactgaatgtggcaggtgaggtggcaaaacagttaaggaacctgctcaaagtcc

SEQ ID NO: 40123 - DNA, 80 bp, synthetic construct
  source 1..80: mol_type = other DNA
aaatgacgagtgagcagagcactgaggatcaagaaggatcgccttggcagaaaaggatattatattctaggtgaggtgga

SEQ ID NO: 40124 - DNA, 80 bp, synthetic construct; identical to SEQ ID NO: 13906
  source 1..80: mol_type = other DNA

SEQ ID NO: 40125 - DNA, 80 bp, synthetic construct
  source 1..80: mol_type = other DNA
gaatggggtctgaattaagcagtgactgtgaggatgcccaagagaggattatggctgtgtggggacttcagcatttgagt

SEQ ID NO: 40126 - DNA, 80 bp, synthetic construct
  source 1..80: mol_type = other DNA
gcatgcaacccactgagacctgggaagggaggaaatccatcttctccagctcattattcacagacaggtgtacttgaaaa

SEQ ID NO: 40127 - DNA, 80 bp, synthetic construct
  source 1..80: mol_type = other DNA
agttcccaaaaggttcttttctgtcagtaggagtcctttcactcacctgagaaaagggcaataatggcagtttcgtgact

SEQ ID NO: 40128 - DNA, 80 bp, synthetic construct
  source 1..80: mol_type = other DNA
gcagctgccaaccgtgcgagcccagccaatgccctacctgcgctcggtggagggctctgctgtggctttctgatttgccc

SEQ ID NO: 40129 - DNA, 80 bp, synthetic construct; identical to SEQ ID NO: 13907
  source 1..80: mol_type = other DNA

SEQ ID NO: 40130 - DNA, 80 bp, synthetic construct
  source 1..80: mol_type = other DNA
tctctgcatcagcctcctagaagaatgaggaggaaggaataagttggcccaggagaatggtaaacaaggaggtggctctg

SEQ ID NO: 40131 - DNA, 80 bp, synthetic construct
  source 1..80: mol_type = other DNA
ctctaggagcctttcagctaaaaaggcagacagatgcgagcagaagttattttaatgaggtcatacaggataagtgctgt

SEQ ID NO: 40132 - DNA, 80 bp, synthetic construct; identical to SEQ ID NO: 13908
  source 1..80: mol_type = other DNA

SEQ ID NO: 40133 - DNA, 80 bp, synthetic construct
  source 1..80: mol_type = other DNA
taaaatattgtatgaaattaccttcaggctacgtgtctaaggtgtctatgaaacagaaatgaacttcgtgtttagacttg

SEQ ID NO: 40134 - DNA, 80 bp, synthetic construct
  source 1..80: mol_type = other DNA
tagaaagccaggctttccggccaggtgtggtggctcacgcctgtaatcccagcactttgggaggccgaggcgagcggatc

SEQ ID NO: 40135 - DNA, 80 bp, synthetic construct
  source 1..80: mol_type = other DNA
gccgtgagctgagatcatgccattgcactccagcctgggtaacaagagcgaaactccgtctcaaaaaaaaaaaaaaaaaa

SEQ ID NO: 40136 - DNA, 80 bp, synthetic construct
  source 1..80: mol_type = other DNA
tctgaaagcttacagaccgggcggtaaaaggcaaggggggcacaggcatgtaagataataaagtgtaggtgtgagtacat

SEQ ID NO: 40137 - DNA, 80 bp, synthetic construct; identical to SEQ ID NO: 13909
  source 1..80: mol_type = other DNA

SEQ ID NO: 40138 - DNA, 80 bp, synthetic construct
  source 1..80: mol_type = other DNA
ttaaggggagtgaagggtctgcaaaggaaatgaaaatgtattaattaaggcatctgaaagccttctaagagatcagcttg

SEQ ID NO: 40139 - DNA, 80 bp, synthetic construct
  source 1..80: mol_type = other DNA
gtcagagacaggaaaggaagctacagacaatgtgatcttaatgtcttctaagaattctctagtctcgattccccagccac

SEQ ID NO: 40140 - DNA, 80 bp, synthetic construct
  source 1..80: mol_type = other DNA
ctccttcccacccagactgagaaatccagcttctgatgattccccaagcctaagtctctgagcttgccaaactggttctc

SEQ ID NO: 40141 - DNA, 80 bp, synthetic construct; identical to SEQ ID NO: 13910
  source 1..80: mol_type = other DNA

SEQ ID NO: 40142 - DNA, 80 bp, synthetic construct
  source 1..80: mol_type = other DNA
taattcatacaacgtccccaactgtactgggaatgagacccggtgtataagttagtttgagacgttagcatgtgatatat

SEQ ID NO: 40143 - DNA, 80 bp, synthetic construct
  source 1..80: mol_type = other DNA
cggtgtataagttagtttgagacgttagcatgtgatatatacaaaagggaatcctacgcaaaatggtatgggagcacaga

SEQ ID NO: 40144 - DNA, 80 bp, synthetic construct
  source 1..80: mol_type = other DNA
tcatatttcataaccaagatgccaaggttgactttggcttaacagagaaggccaaatcagggtcacacagctaacaagtg

SEQ ID NO: 40145 - DNA, 80 bp, synthetic construct
  source 1..80: mol_type = other DNA
gtgtgaggtctgaaatgtatgccaagtttaaggaacatgaagagtgcattgtgtccacatcgcaggctgaagagaggtca

SEQ ID NO: 40146 - DNA, 80 bp, synthetic construct; identical to SEQ ID NO: 13911
  source 1..80: mol_type = other DNA

SEQ ID NO: 40147 - DNA, 80 bp, synthetic construct
  source 1..80: mol_type = other DNA
agtctcagctgagtggatggatggcgtgggaaagaactggaagcaaagagaccagtgcagaagctactgaataattcaaa

SEQ ID NO: 40148 - DNA, 80 bp, synthetic construct
  source 1..80: mol_type = other DNA
tgacggatggggaagtcattaatggcacacagggaaagagtagctttagacggcagagataaggaattagacatgggtat

SEQ ID NO: 40149 - DNA, 80 bp, synthetic construct
  source 1..80: mol_type = other DNA
acaagtctcccaacgtttctcaaccctggtgtcttcaccctcaaaatgaaaataatagtacccacccctggattactatg

SEQ ID NO: 40150 - DNA, 80 bp, synthetic construct
  source 1..80: mol_type = other DNA
ctggagctcagctcctcagcctcacccacctcggtccccaaacacatgcccatctacgtgcatgtctgcctgctcccctg

SEQ ID NO: 40151 - DNA, 80 bp, synthetic construct; identical to SEQ ID NO: 13912
  source 1..80: mol_type = other DNA

SEQ ID NO: 40152 - DNA, 80 bp, synthetic construct
  source 1..80: mol_type = other DNA
gtctgtcccagaaccataaattagtatctgaatcttcatgggctaccatttgctcacatcttcaatgagcataaacattt

SEQ ID NO: 40153 - DNA, 80 bp, synthetic construct
  source 1..80: mol_type = other DNA
gccttcacatttgcgccttcttctttcaaaaacctgtctcccaaatctccagtctatttccatttcattatctctgtcta

SEQ ID NO: 40154 - DNA, 80 bp, synthetic construct; identical to SEQ ID NO: 13913
  source 1..80: mol_type = other DNA

SEQ ID NO: 40155 - DNA, 80 bp, synthetic construct
  source 1..80: mol_type = other DNA
tggagcctggaacaaagagcccaatgctggggaccagttgtaggttttcggaagatccttttgctaacagggaaagcaca

SEQ ID NO: 40156 - DNA, 80 bp, synthetic construct
  source 1..80: mol_type = other DNA
ccccatctcacttcccagggcagtattatcttgagaaagaagaatttaagcatcccttgccctccctcctctctccatgg

SEQ ID NO: 40157 - DNA, 80 bp, synthetic construct
  source 1..80: mol_type = other DNA
tctttaggataaatctgctctatcaagcttgcaggctttctttcctgaagtatgtgtgttggtgaggtgtggtggcagca

SEQ ID NO: 40158 - DNA, 80 bp, synthetic construct
  source 1..80: mol_type = other DNA
cacagatagtactagcctcattactgtgtgccaggaacaatacttgctttacaaatgttctcctatttaatcttaggaca

SEQ ID NO: 40159 - DNA, 80 bp, synthetic construct; identical to SEQ ID NO: 13914
  source 1..80: mol_type = other DNA

SEQ ID NO: 40160 - DNA, 80 bp, synthetic construct
  source 1..80: mol_type = other DNA
cacagctaggccctgctcatcccttgccttcctgtgaatagatagtcctgcttcaaagaattccaaatgtggcacctcct

SEQ ID NO: 40161 - DNA, 80 bp, synthetic construct
  source 1..80: mol_type = other DNA
ctgggagcttatttacagatgatttttcttgccatcctatagcttgtcaggaacaactgacatcctcccatttgtcagcg

SEQ ID NO: 40162 - DNA, 80 bp, synthetic construct
  source 1..80: mol_type = other DNA
tggccctagctgtgtctgcatttgctcttgaggcaacaatgcaaaggcccagatccttagaaatagcagcatgtagtatg

SEQ ID NO: 40163 - DNA, 80 bp, synthetic construct
  source 1..80: mol_type = other DNA
gacacaggtgggagatcaaaacagatgctaggtgtggccggtaagtccagcaagtgtgcaagctggggttagtctggcca

SEQ ID NO: 40164 - DNA, 80 bp, synthetic construct; identical to SEQ ID NO: 13915
  source 1..80: mol_type = other DNA

SEQ ID NO: 40165 - DNA, 80 bp, synthetic construct
  source 1..80: mol_type = other DNA
gggttcacaccattctcctgcctcagcctcctgagtagctgggactacaggcacccaccaccacccctggctaatttttt

SEQ ID NO: 40166 - DNA, 80 bp, synthetic construct
  source 1..80: mol_type = other DNA
cccggccccattcgctcatttaatcctcagaataaacccgtgaagcggaaactggtaccattcatactttactcatgaga

SEQ ID NO: 40167 - DNA, 80 bp, synthetic construct
  source 1..80: mol_type = other DNA
tggctctctggcctagtgtcagattctggtgggtagttcatccacccagcacactgtcagggcatcactgttgaatctag

SEQ ID NO: 40168 - DNA, 80 bp, synthetic construct; identical to SEQ ID NO: 13916
  source 1..80: mol_type = other DNA

SEQ ID NO: 40169 - DNA, 80 bp, synthetic construct
  source 1..80: mol_type = other DNA
tcaccacagagtcagcagagcgtttagtggcaggctcaacagtggccattctcctacttgggaaaatcacttaacttaaa

SEQ ID NO: 40170 - DNA, 80 bp, synthetic construct
  source 1..80: mol_type = other DNA
ctttcctgtttcactctctacacctttcgtctgcccaaaggtaaccattattccaaatttaacaccacatgacttcttga

SEQ ID NO: 40171 - DNA, 80 bp, synthetic construct
  source 1..80: mol_type = other DNA
cagttttggggtatgactattgatgggcatatgagccatgtcaacaagtgggacacctctcagaaaaagaccaaatacac

SEQ ID NO: 40172 - DNA, 80 bp, synthetic construct
  source 1..80: mol_type = other DNA
gcacatactgataggaaatgagaaggggccagatgctgtccactttgtggatccaattggtcacatcactgctcactccc

SEQ ID NO: 40173 - DNA, 80 bp, synthetic construct; identical to SEQ ID NO: 13917
  source 1..80: mol_type = other DNA

SEQ ID NO: 40174 - DNA, 80 bp, synthetic construct
  source 1..80: mol_type = other DNA
gatcacgcctggaacccatagcctcgaaataagtgtagggctggctaggccagcacaagcccttgctcattagttcaggt

SEQ ID NO: 40175 - DNA, 80 bp, synthetic construct
  source 1..80: mol_type = other DNA
ggtgaaaattcagtgccccttgtcccatggcctattggtgactgtattgtgggccagagatttttatcaataaagggtgc

SEQ ID NO: 40176 - DNA, 80 bp, synthetic construct
  source 1..80: mol_type = other DNA
tagccaggtgtggtggtgtgcgcctgtaatcccagctactcaggaggctgaggcaggggatttgcttgaccccaggaggt

SEQ ID NO: 40177 - DNA, 80 bp, synthetic construct; identical to SEQ ID NO: 13918
  source 1..80: mol_type = other DNA

SEQ ID NO: 40178 - DNA, 80 bp, synthetic construct
  source 1..80: mol_type = other DNA
tgaagtgaatcctttaagttgcaacaaaataataaaggctgacacttctggaacattccctatgtttcaggcactgttct

SEQ ID NO: 40179 - DNA, 80 bp, synthetic construct
  source 1..80: mol_type = other DNA
ggtgtacccttggtcaaaacattctactacaaaatcgttccctcagttgagagccaaggatagagaataatgttaactga

SEQ ID NO: 40180 - DNA, 80 bp, synthetic construct; identical to SEQ ID NO: 13919
  source 1..80: mol_type = other DNA

SEQ ID NO: 40181 - DNA, 80 bp, synthetic construct
  source 1..80: mol_type = other DNA
agcatatgtggaggggaaagagtaaactccaagaccccaaggtggaaagtgaacttgtcatgttcagaaatcaggatggg

SEQ ID NO: 40182 - DNA, 80 bp, synthetic construct
  source 1..80: mol_type = other DNA
tttatgaacttggaagtctctcggttcttttcctaggtccacatacacccatggtctgaggatagcattgagagtccaca

SEQ ID NO: 40183 - DNA, 80 bp, synthetic construct
  source 1..80: mol_type = other DNA
gtgtggtggtgcgtgcctgtagtcccaggtactcaggaggctgaggcaggagaactgcttgaacctgagaggcggaggtt

SEQ ID NO: 40184 - DNA, 80 bp, synthetic construct
  source 1..80: mol_type = other DNA
ttatgaatgtggtcaacaaagcttcatggtattaaccacacctgtgactttgtcaccaatggtattaatttagtgttgct

SEQ ID NO: 40185 - DNA, 80 bp, synthetic construct; identical to SEQ ID NO: 13920
  source 1..80: mol_type = other DNA

SEQ ID NO: 40186 - DNA, 80 bp, synthetic construct
  source 1..80: mol_type = other DNA
tcgggaggctgaggcaggagaatggctggaacctgggaggtggagctgcagtgagccgagatcgcaccactgcactccag

SEQ ID NO: 40187 - DNA, 80 bp, synthetic construct
  source 1..80: mol_type = other DNA
tacacagggagttgaatttaaccctcaccacaatcttaagaagtatacattattttgcctattttagagatgaggaaact

SEQ ID NO: 40188 - DNA, 80 bp, synthetic construct; identical to SEQ ID NO: 13921
  source 1..80: mol_type = other DNA

SEQ ID NO: 40189 - DNA, 80 bp, synthetic construct
  source 1..80: mol_type = other DNA
gatgacattgccactttcccaggaatgctaatgctccactgggcctctgcctcttcaatcattgctgtggataggcctgg

SEQ ID NO: 40190 - DNA, 80 bp, synthetic construct
  source 1..80: mol_type = other DNA
attgggtgctatttactgttcctttattccctgatctttgttcctatatcctggttctgaaagaagggagaggtggtggg

SEQ ID NO: 40191 - DNA, 80 bp, synthetic construct
  source 1..80: mol_type = other DNA
catgtggcaggagagcagatgtgtgtgttctcaggcatgtgacgctgaagtctaagggatgagccctgcggatgctcgtg

SEQ ID NO: 40192 - DNA, 80 bp, synthetic construct; identical to SEQ ID NO: 13922
  source 1..80: mol_type = other DNA

SEQ ID NO: 40193 - DNA, 80 bp, synthetic construct
  source 1..80: mol_type = other DNA
cgggctgtaattaacacccctccgctgatagctgctttaagccagattggagcatggggcccttcctcttctggttgggc

SEQ ID NO: 40194 - DNA, 80 bp, synthetic construct
  source 1..80: mol_type = other DNA
tcgcatccacagcatgacctgaatctggttctaatgttccagcctcctgacaaaaatccctcctgcatacaggcatctgt

SEQ ID NO: 40195 - DNA, 80 bp, synthetic construct
  source 1..80: mol_type = other DNA
ataagaaagccaagcgcacagtcctgagaatgtgtacatgggggtctgaagctagctttcttcatgtcctagctgcgtgt

SEQ ID NO: 40196 - DNA, 80 bp, synthetic construct
  source 1..80: mol_type = other DNA
aaacagcagtaatagtaagagctaacatttattgtgagttatctgtgtcaggcctaagctttgtgtgggttgctcattta

SEQ ID NO: 40197 - DNA, 80 bp, synthetic construct; identical to SEQ ID NO: 13923
  source 1..80: mol_type = other DNA

SEQ ID NO: 40198 - DNA, 80 bp, synthetic construct
  source 1..80: mol_type = other DNA
aagagtaggtggagttgatgtttggacttttgatgtggagtaaatttaactgcagaaaagtacaaggtgtgttgagagcc

SEQ ID NO: 40199 - DNA, 80 bp, synthetic construct
  source 1..80: mol_type = other DNA
atagttgctgtggtgcgtaagtgagttttgctagaaatattgagcacccgctttattccaggtaatgtgttttgtgcatt

SEQ ID NO: 40200 - DNA, 80 bp, synthetic construct
  source 1..80: mol_type = other DNA
gccagtgacccaggcaatgtagtcacaggtcagagcaggtggagggaagcagttatgtctttgaccttggccttattagg

SEQ ID NO: 40201 - DNA, 80 bp, synthetic construct; identical to SEQ ID NO: 13924
  source 1..80: mol_type = other DNA

SEQ ID NO: 40202 - DNA, 80 bp, synthetic construct
  source 1..80: mol_type = other DNA
atgtaaagggcttagttcagtgcctgatacataggaagagatatgtgttagctgtattgatattacaagtccaatactgt

SEQ ID NO: 40203 - DNA, 80 bp, synthetic construct
  source 1..80: mol_type = other DNA
agctccctcctgcatcggggccttgacacatgttgtaccttctgtgggaatactcacccaggccttctcactggtccctc

SEQ ID NO: 40204 - DNA, 80 bp, synthetic construct; identical to SEQ ID NO: 13925
  source 1..80: mol_type = other DNA

SEQ ID NO: 40205 - DNA, 80 bp, synthetic construct
  source 1..80: mol_type = other DNA
ctctcggcccatatcctcatccagagccaaatgtgcattatccctcccaggaaagccaggcttgctaggcacagagctgc

SEQ ID NO: 40206 - DNA, 80 bp, synthetic construct
  source 1..80: mol_type = other DNA
ctcatcccaactgtagcctcccaaagctttccggagttaagtaacacaattacagagttaaatgacattgaagaatggga

SEQ ID NO: 40207 - DNA, 80 bp, synthetic construct
  source 1..80: mol_type = other DNA
agatctggaagctgatcagagatagaagagaggatctgaaagaggattcagagggagctggagaggccatttaattcatt

SEQ ID NO: 40208 - DNA, 80 bp, synthetic construct
  source 1..80: mol_type = other DNA
agaatgactggctttccaagctaggtactggatttttcccagagttttccaaaggactggacagcatgaggtctgggagg

SEQ ID NO: 40209 - DNA, 80 bp, synthetic construct; identical to SEQ ID NO: 13926
  source 1..80: mol_type = other DNA

SEQ ID NO: 40210 - DNA, 80 bp, synthetic construct
  source 1..80: mol_type = other DNA
ggcttagaaaaagttgaataaatgacttgtccaaggtcatacaacaggtaagtgagtgcgagtccaggtagttctaagcc

SEQ ID NO: 40211 - DNA, 80 bp, synthetic construct
  source 1..80: mol_type = other DNA
tcacataatattgataggctggtattgccccattttacagtggagaaaaatgagtcccagagaagggaagtaaattgcac

SEQ ID NO: 40212 - DNA, 80 bp, synthetic construct
  source 1..80: mol_type = other DNA
tgtaatcccagcactttgggaggccaaggcgggtggatcacgaggtcaggagatcgagaccatcctggctaacacagtga

SEQ ID NO: 40213 - DNA, 80 bp, synthetic construct; identical to SEQ ID NO: 13927
  source 1..80: mol_type = other DNA

SEQ ID NO: 40214 - DNA, 80 bp, synthetic construct
  source 1..80: mol_type = other DNA
caggcagacgcagaccacagccttattgtgaaggctcatcttcctcccagccaggctcatgtcccaggagaagagcagtg

SEQ ID NO: 40215 - DNA, 80 bp, synthetic construct
  source 1..80: mol_type = other DNA
gggatctctcagaggcagaacacaaagctcttcaaagaacactttcagtcaaaaatagggagaggagagaggtctttctc

SEQ ID NO: 40216 - DNA, 80 bp, synthetic construct; identical to SEQ ID NO: 13928
  source 1..80: mol_type = other DNA

SEQ ID NO: 40217 - DNA, 80 bp, synthetic construct
  source 1..80: mol_type = other DNA
ttcattttacagttgaggacactattccagacggtggaataatttgcctaaggtcgtgatgaggttgtggcccacaagtg

SEQ ID NO: 40218 - DNA, 80 bp, synthetic construct
  source 1..80: mol_type = other DNA
tgtattcccagctacttgggaggctgagacaggagaatcactcgaatgtgggaggtggaggttgcagtgagccaagatcg

SEQ ID NO: 40219 - DNA, 80 bp, synthetic construct
  source 1..80: mol_type = other DNA
acggaacgacagttatcatgtgtaagcttcatcggagtcaactaaagatgaataagccaccacccccatacataactaat

SEQ ID NO: 40220 - DNA, 80 bp, synthetic construct; identical to SEQ ID NO: 13929
  source 1..80: mol_type = other DNA

SEQ ID NO: 40221 - DNA, 80 bp, synthetic construct
  source 1..80: mol_type = other DNA
ttctgctgcatcggactttcttttagctcagtttgcagcaatatcctttggcatttttcctccagcttcacagccctctt

SEQ ID NO: 40222 - DNA, 80 bp, synthetic construct
  source 1..80: mol_type = other DNA
atcttttaactttttttctgtctcccctttaggagagatacgggtttcatttctctttcataacaggtcttttccacctt

SEQ ID NO: 40223 - DNA, 80 bp, synthetic construct
  source 1..80: mol_type = other DNA
tgtcagcttcttagggtcgtctttgcctgtgtttagctatttgttttcagcaaggcacagagctgcccatttcccatctg

SEQ ID NO: 40224 - DNA, 80 bp, synthetic construct; identical to SEQ ID NO: 13930
  source 1..80: mol_type = other DNA

SEQ ID NO: 40225 - DNA, 80 bp, synthetic construct
  source 1..80: mol_type = other DNA
cagctcactgcaacctccatctcccgggttcaagtgattctccctgtctcagcctcccgagtagctgggactacagacgt

SEQ ID NO: 40226 - DNA, 80 bp, synthetic construct
  source 1..80: mol_type = other DNA
ctttgactaggtaaaataacgaaggcacatgtgattggaataatctgatcccatgtgattgttgctgataccccagtgcc

SEQ ID NO: 40227 - DNA, 80 bp, synthetic construct
  source 1..80: mol_type = other DNA
aaaggaaagaaagactgggactggtgggaatgtgccagcaatgtgtgcatgaagccggttccctgtttgtagggaagtgt

SEQ ID NO: 40228 - DNA, 80 bp, synthetic construct; identical to SEQ ID NO: 13931
  source 1..80: mol_type = other DNA

SEQ ID NO: 40229 - DNA, 80 bp, synthetic construct
  source 1..80: mol_type = other DNA
tcacttttaatttttctaatcttgccatctttcctccagtttcttcattccagcccatttaactcttgtttcctcccctc

SEQ ID NO: 40230 - DNA, 80 bp, synthetic construct
  source 1..80: mol_type = other DNA
atcctctaatcaaacctaactttgaatgcaagtgtcaattcacttgctagcagtcatcagcactgtcttggagaaataca

SEQ ID NO: 40231 - DNA, 80 bp, synthetic construct
  source 1..80: mol_type = other DNA
gattggggttgaggtggagaagaaactgatctttgccaatggatttatccttcctgtacacaaatcataattcccttgtg

SEQ ID NO: 40232 - DNA, 80 bp, synthetic construct; identical to SEQ ID NO: 13932
  source 1..80: mol_type = other DNA

SEQ ID NO: 40233 - DNA, 80 bp, synthetic construct
  source 1..80: mol_type = other DNA
tcaggaattcacattttaattgacccagcaggtgattctgaggtaggtggccccatagacagcattttgagaaccaccat

SEQ ID NO: 40234 - DNA, 80 bp, synthetic construct
  source 1..80: mol_type = other DNA
tgtgtaggagagtagactaataggaaacagacttgctttccacaggattgatttaaattagatacaaggaaaaacttcct

SEQ ID NO: 40235 - DNA, 80 bp, synthetic construct
  source 1..80: mol_type = other DNA
ttattgaacaaatgctggttgttgtgcattaaggggaccagaaactcttcttcgggtctgctaatgacatctgaagtttc

SEQ ID NO: 40236 - DNA, 80 bp, synthetic construct; identical to SEQ ID NO: 13933
  source 1..80: mol_type = other DNA

SEQ ID NO: 40237 - DNA, 80 bp, synthetic construct
  source 1..80: mol_type = other DNA
cctggccagcatggtgaagccctgtgtctactaaaattacaaaaataagccaggcatggtggcccacgcctgtagttcca

SEQ ID NO: 40238 - DNA, 80 bp, synthetic construct
  source 1..80: mol_type = other DNA
aaaaaaaaaaagtattgagaatgcaggagcccaatctgccaatttcctcctcccaagcccctaccctaggacactttgag

SEQ ID NO: 40239 - DNA, 80 bp, synthetic construct
  source 1..80: mol_type = other DNA
acatgagttatagcttcaatatccatgtacttttatgagtgatcattcagatctgtatgcagtgttgacttagagccact

SEQ ID NO: 40240 - DNA, 80 bp, synthetic construct
  source 1..80: mol_type = other DNA
gaacgggagaaggtgattgatttctctaagccattcatgactctgggaattagcattctttaccgcgttcatatggtaag

SEQ ID NO: 40241 - DNA, 80 bp, synthetic construct; identical to SEQ ID NO: 13934
  source 1..80: mol_type = other DNA

SEQ ID NO: 40242 - DNA, 80 bp, synthetic construct
  source 1..80: mol_type = other DNA
gattccttctctctcgatgatctgtcctggagaataaatggtagataatttaatgtcatttatacctggcctgccctttt

SEQ ID NO: 40243 - DNA, 80 bp, synthetic construct
  source 1..80: mol_type = other DNA
ggtctcatccatcagtgaataatcatgacagtgccagcaaatagctgactttgctagtttatcttgctggaccagaagag

SEQ ID NO: 40244 - DNA, 80 bp, synthetic construct
  source 1..80: mol_type = other DNA
gatcacccaacatgcctgctgaagaagtgaccccttgccaggccccacatcccagctctagagaaaaggagatcgtccac

SEQ ID NO: 40245 - DNA, 80 bp, synthetic construct; identical to SEQ ID NO: 13935
  source 1..80: mol_type = other DNA

SEQ ID NO: 40246 - DNA, 80 bp, synthetic construct
  source 1..80: mol_type = other DNA
tggcagtcctgggagatgaatagagctgtgtcattcttattttagaaatgaggaaactaagttgtaatcagtttaaaaac

SEQ ID NO: 40247 - DNA, 80 bp, synthetic construct; identical to SEQ ID NO: 13936
  source 1..80: mol_type = other DNA

SEQ ID NO: 40248 - DNA, 80 bp, synthetic construct
  source 1..80: mol_type = other DNA
ccaaaagaaatggaggcacacagcctttgtccaaactaccctgctgtggcttgtggtagccactcaactaggctctggcc

SEQ ID NO: 40249 - DNA, 80 bp, synthetic construct
  source 1..80: mol_type = other DNA
ccaactctggccagaaagaaaccacaattcaccaatcctctggacatcccaaattggattgttgactaaatgtttcctac

SEQ ID NO: 40250 - DNA, 80 bp, synthetic construct
  source 1..80: mol_type = other DNA
aaggtatttgtagacaggattaacaactacaatgaattgacttcctaaaggagagtactcttgataacgtgggtgggcct

SEQ ID NO: 40251 - DNA, 80 bp, synthetic construct; identical to SEQ ID NO: 13937
  source 1..80: mol_type = other DNA

SEQ ID NO: 40252 - DNA, 80 bp, synthetic construct
  source 1..80: mol_type = other DNA
tctggcctccacactgaagcgccaggatgccacgtggctgcctagacctgattgataacagggggccaagcaagaaatga

SEQ ID NO: 40253 - DNA, 80 bp, synthetic construct
  source 1..80: mol_type = other DNA
tatggttagaataagtctgagatgaacgttgttatgtctgaaacagaggagggccttaggaagatctgctgtggctaaag

SEQ ID NO: 40254 - DNA, 80 bp, synthetic construct
  source 1..80: mol_type = other DNA
gatgaactggtagagtccaccccaagagcctaattctaaacttacatagagactctatctctaatatcatagtgttaagg

SEQ ID NO: 40255 - DNA, 80 bp, synthetic construct
  source 1..80: mol_type = other DNA
gttaccaaaaagtgagcatctggtggcaatcaaacctgtgtgcgaatgtaaaaataattaacttagagtgcctagttaag

SEQ ID NO: 40256 - DNA, 80 bp, synthetic construct; identical to SEQ ID NO: 13938
  source 1..80: mol_type = other DNA

SEQ ID NO: 40257 - DNA, 80 bp, synthetic construct
  source 1..80: mol_type = other DNA
tctttctctttctttctcacccaacttaaatgtccatggtccttttctattcttattctaccaactctccctggataatc

SEQ ID NO: 40258 - DNA, 80 bp, synthetic construct
  source 1..80: mol_type = other DNA
tcacaagctgaattctgtgtgtttctgagtcacacttatgcctccttccctgtgccccatatcaggcaatggaatttcca

SEQ ID NO: 40259 - DNA, 80 bp, synthetic construct; identical to SEQ ID NO: 13939
  source 1..80: mol_type = other DNA

SEQ ID NO: 40260 - DNA, 80 bp, synthetic construct
  source 1..80: mol_type = other DNA
ttcccagcttttacagttattagatgcatgtcacatacatctcaccttcttcatttgtaaaaatgtgttgtcgtgcaaaa

SEQ ID NO: 40261 - DNA, 80 bp, synthetic construct
  source 1..80: mol_type = other DNA
atcaacctccttcttgaaatcattcaccagctgcccatcactcacaaaaaaaagttcaactttcctgcatccaggtcttt

SEQ ID NO: 40262 - DNA, 80 bp, synthetic construct
  source 1..80: mol_type = other DNA
acgcagctcccctagatggagctgcttgccctctgcctatacttctattacaacacttttaggttgcattacattattct

SEQ ID NO: 40263 - DNA, 80 bp, synthetic construct
  source 1..80: mol_type = other DNA
ttgtttatctatctctccctttgtatcctccgatgggaggtatattaagggaaaggtaccctcttgtcagaccatagatt

SEQ ID NO: 40264 - DNA, 80 bp, synthetic construct; identical to SEQ ID NO: 13940
  source 1..80: mol_type = other DNA

SEQ ID NO: 40265 - DNA, 80 bp, synthetic construct
  source 1..80: mol_type = other DNA
catccacctgagaaagtatcagaatccgtggctagggccagatgggcttctaggctatatatagatggtccagcctttag

SEQ ID NO: 40266 - DNA, 80 bp, synthetic construct
  source 1..80: mol_type = other DNA
ttttatggtattgatgcatactttgagctctcaaatatctgtgtgaatggaggggaaaagaacatgaaaaaccaaaacca

SEQ ID NO: 40267 - DNA, 80 bp, synthetic construct
  source 1..80: mol_type = other DNA
aagccaaactgggattaagtgtttggcccatagaacccccacatgaataaatttcatctaaacagttcgttgttgctggg

SEQ ID NO: 40268 - DNA, 80 bp, synthetic construct; identical to SEQ ID NO: 13941
  source 1..80: mol_type = other DNA

SEQ ID NO: 40269 - DNA, 80 bp, synthetic construct
  source 1..80: mol_type = other DNA
ccaaatctccatacatgtccaactacctgtctttacagtatcataggtgtatttctttcagtgtcaacgctattctttag

SEQ ID NO: 40270 - DNA, 80 bp, synthetic construct
  source 1..80: mol_type = other DNA
ccaacttgttccacctttggttaacaaatgggaaagttttatactctcttctttttctcttcttaactcttagctagagt

SEQ ID NO: 40271 - DNA, 80 bp, synthetic construct
  source 1..80: mol_type = other DNA
acgccatctctactaaaaatacaaaaattagccgggcatggtggcacacgcctgtaatcccaactactcaggaggctgag

SEQ ID NO: 40272 - DNA, 80 bp, synthetic construct
  source 1..80: mol_type = other DNA
gatatattacccgcttttcaagaaggtctgtttcatttcagaaagactgtctaggaaaatggagaacaatgctaagtaaa

SEQ ID NO: 40273 - DNA, 80 bp, synthetic construct; identical to SEQ ID NO: 13942
  source 1..80: mol_type = other DNA

SEQ ID NO: 40274 - DNA, 80 bp, synthetic construct
  source 1..80: mol_type = other DNA
agttctatgggcaacagacccatctgggtgctttacgtggataggaattaattacttgcttccttttttcctcttggagt

SEQ ID NO: 40275 - DNA, 80 bp, synthetic construct
  source 1..80: mol_type = other DNA
ttcagccctggacagtgtgtgattgaccattgggcactgctgggagttgactatatcacaagcaacctttctataaattg

SEQ ID NO: 40276 - DNA, 80 bp, synthetic construct
  source 1..80: mol_type = other DNA
ggtgactaagctacagagccctaacacagatccaagagaacctgcaacgtgtctggtccactctgtcaatgacgtctttg

SEQ ID NO: 40277 - DNA, 80 bp, synthetic construct; identical to SEQ ID NO: 13943
  source 1..80: mol_type = other DNA

SEQ ID NO: 40278 - DNA, 80 bp, synthetic construct
  source 1..80: mol_type = other DNA
cacgaggtaggttttattattccttccatgttatacaggaggaaacagagacctagaggttacccaacttacccaggatt

SEQ ID NO: 40279 - DNA, 80 bp, synthetic construct
  source 1..80: mol_type = other DNA
tcttccagtatatatagagtgaagtatcaatgagtcaacagattgtttttaaggataagaggaactttgggcatgaaagg

SEQ ID NO: 40280 - DNA, 80 bp, synthetic construct
  source 1..80: mol_type = other DNA
gtccaaatgtcaagggagctaattctaattttgctgttgtctaattttcaatttcatccgcagagcttgacctgtcttca

SEQ ID NO: 40281 - DNA, 80 bp, synthetic construct; identical to SEQ ID NO: 13944
  source 1..80: mol_type = other DNA

SEQ ID NO: 40282 - DNA, 80 bp, synthetic construct
  source 1..80: mol_type = other DNA
cttaacctccctgggtcccagttcttccatctgtcagtatggaaaattgggtattgaaatcaagagaacatagtgaagca

SEQ ID NO: 40283 - DNA, 80 bp, synthetic construct
  source 1..80: mol_type = other DNA
tagaaaaaaatggtaggcattcagaatcttgcaagacacatacttctctttggcatcatagagacagcatggatttagcc

SEQ ID NO: 40284 - DNA, 80 bp, synthetic construct; identical to SEQ ID NO: 13945
  source 1..80: mol_type = other DNA

SEQ ID NO: 40285 - DNA, 80 bp, synthetic construct
  source 1..80: mol_type = other DNA
gatttttcagttgagagacagattgaaatagtcataagtgacagggcatgtggaattcatgcacatttactcagagaaac

SEQ ID NO: 40286 - DNA, 80 bp, synthetic construct
  source 1..80: mol_type = other DNA
ggaaacacagtcaagccatgatggacacaggaatgattaactggggacttggattctgctgctctggagtcctttgcctt

SEQ ID NO: 40287 - DNA, 80 bp, synthetic construct
  source 1..80: mol_type = other DNA
gggtcagagaacttgcaattggtatcaaagggcagttccgtggtctgagccaatactgtgaaagaaaaacagtttcagat

SEQ ID NO: 40288 - DNA, 80 bp, synthetic construct
  source 1..80: mol_type = other DNA
gaaaagcatccagaagaggagcggaaaatcacccatgatgggggctatgcaaatacaacaggagcgtgcagaactgtctc

SEQ ID NO: 40289 - DNA, 80 bp, synthetic construct; identical to SEQ ID NO: 13946
  source 1..80: mol_type = other DNA

SEQ ID NO: 40290 - DNA, 80 bp, synthetic construct
  source 1..80: mol_type = other DNA
tccatttacaatagtccttagggtgcatctagtccagtggttttatagtaaatgaaagaaaccagcctgggacaagacag

SEQ ID NO: 40291 - DNA, 80 bp, synthetic construct
  source 1..80: mol_type = other DNA
gctggcaactaatacaaactaggtagatgctgcaggataaacaattcaactctgtgggccgtatgcatccataagccact

SEQ ID NO: 40292 - DNA, 80 bp, synthetic construct
  source 1..80: mol_type = other DNA
ggattccattcctggctccattgtctggctcacaggactctggccagactcatccctggccttgcaacgtgttttcccac

SEQ ID NO: 40293 - DNA, 80 bp, synthetic construct; identical to SEQ ID NO: 13947
  source 1..80: mol_type = other DNA

SEQ ID NO: 40294 - DNA, 80 bp, synthetic construct
  source 1..80: mol_type = other DNA
gccagcacaaagcctgcctcaccccagggagtggcatggcccctgctgctgttctgtgtcacctgctgaggtcagggctg

SEQ ID NO: 40295 - DNA, 80 bp, synthetic construct
  source 1..80: mol_type = other DNA
gtgaatcttgtttttctctccatttccagggacgcaaacccggctatttctccttcctggacccattttctccgggcgtc

SEQ ID NO: 40296 - DNA, 80 bp, synthetic construct
  source 1..80: mol_type = other DNA
ttgggaagatcttggtgccaaactagaaggacaggagaaggactgggggcctgaaatgctctctgcccagctgtcgacct

SEQ ID NO: 40297 - DNA, 80 bp, synthetic construct; identical to SEQ ID NO: 13948
  source 1..80: mol_type = other DNA

SEQ ID NO: 40298 - DNA, 80 bp, synthetic construct
  source 1..80: mol_type = other DNA
aggagacgggatggagagaggcgttttcaagaagtgctgagttgagacgcacgggccagaccagggaggggggagaataa

SEQ ID NO: 40299 - DNA, 80 bp, synthetic construct
  source 1..80: mol_type = other DNA
accctccagaagtgggatgagccctggtggctcccaggccactcactcaggtccctagtgctgctaaccctccacttact

SEQ ID NO: 40300 - DNA, 80 bp, synthetic construct
  source 1..80: mol_type = other DNA
atctctgtggggtgggtggggtcttcccctagggcacgttcattcactggattgatgggggcacttggggatggagctgc

SEQ ID NO: 40301 - DNA, 80 bp, synthetic construct; identical to SEQ ID NO: 13949
  source 1..80: mol_type = other DNA

SEQ ID NO: 40302 - DNA, 80 bp, synthetic construct
  source 1..80: mol_type = other DNA
ggctgtctccgtgagcctggtgccactgctctgtaattcacacttgccccttggatgtgagcccttgcgtgtggcatgcc

SEQ ID NO: 40303 - DNA, 80 bp, synthetic construct
  source 1..80: mol_type = other DNA
cctccagcatctagcatcacagaaaggttaacagaaaatgtgctaaagggctaaccatacggcctctctctctcactaca

SEQ ID NO: 40304 - DNA, 80 bp, synthetic construct; identical to SEQ ID NO: 13950
  source 1..80: mol_type = other DNA

SEQ ID NO: 40305 - DNA, 80 bp, synthetic construct
  source 1..80: mol_type = other DNA
acagctcttaggtagccattcccaagagagctgatcttcagagtcctgtagggagcttttagacatttgaattcccaggt

SEQ ID NO: 40306 - DNA, 80 bp, synthetic construct
  source 1..80: mol_type = other DNA
caggtcaaaggaccaatgctgagacgtttgtgttgtactcaggaaggagaggcgcggatggaaacgggaggcagcgacag

SEQ ID NO: 40307 - DNA, 80 bp, synthetic construct
  source 1..80: mol_type = other DNA
tgcaagcatctccctggcgggcaggggaagagcaggcattctgggcatcagaggggccattcagagagacgccagtggtg

SEQ ID NO: 40308 - DNA, 80 bp, synthetic construct; identical to SEQ ID NO: 13951
  source 1..80: mol_type = other DNA

SEQ ID NO: 40309 - DNA, 80 bp, synthetic construct
  source 1..80: mol_type = other DNA
gtggttctgaggtaggctaaggctggagggccactgctctaggctgagggtcttcaaaccgtggttctaagggacactaa

SEQ ID NO: 40310 - DNA, 80 bp, synthetic construct
  source 1..80: mol_type = other DNA
atcttggctcactgcagcctttacctcccggactcaagtgattctcccacctcatcctcttgagtagctaggattacagg

SEQ ID NO: 40311 - DNA, 80 bp, synthetic construct
  source 1..80: mol_type = other DNA
tcctctattctgtattttggagttccacatcagaatttattgggggtaaaaatgtctctttgattaaaaaaaagtttgag

SEQ ID NO: 40312 - DNA, 80 bp, synthetic construct; identical to SEQ ID NO: 13952
  source 1..80: mol_type = other DNA

SEQ ID NO: 40313 - DNA, 80 bp, synthetic construct
  source 1..80: mol_type = other DNA
gtggggtggggacacaaaaggggccctctgataagccggctctagcttctagagccccagagcctctgcctcttacagca

SEQ ID NO: 40314 - DNA, 80 bp, synthetic construct
  source 1..80: mol_type = other DNA
atgaatttcagcaaagcaatggtaacttcctgacctgaaaatgacctgaggtttgagaaggcatatgcagatttatgcaa

SEQ ID NO: 40315 - DNA, 80 bp, synthetic construct
  source 1..80: mol_type = other DNA
cgttcagagttgagcaaatgattcaatgtgtgggaaagctctttgaaaacttgaaagtgctacataaacatatggactga

SEQ ID NO: 40316 - DNA, 80 bp, synthetic construct; identical to SEQ ID NO: 13953
  source 1..80: mol_type = other DNA

SEQ ID NO: 40317 - DNA, 80 bp, synthetic construct
  source 1..80: mol_type = other DNA
agctgagatagccatgccttcctgtctggggtttccattatccctgataaacaacaaatgtagcacgatttaaacctggg

SEQ ID NO: 40318 - DNA, 80 bp, synthetic construct
  source 1..80: mol_type = other DNA
gagaggagcatcgggggatgtcgatctccttctccctggggcttttccttctggagagtgcctgctcccacagatggatg

SEQ ID NO: 40319 - DNA, 80 bp, synthetic construct
  source 1..80: mol_type = other DNA
tgctttaaatggctggccccaggtggcttggtcactgttccagagctgtgtgagaaggggctcagcgcgaatgcaagccg

SEQ ID NO: 40320 - DNA, 80 bp, synthetic construct; identical to SEQ ID NO: 13954
  source 1..80: mol_type = other DNA

SEQ ID NO: 40321 - DNA, 80 bp, synthetic construct
  source 1..80: mol_type = other DNA
gtcatgtccacacctagggctcattaacccccagcacacaccaccacagctaagcagctgcagagtgctggcttcctcct

SEQ ID NO: 40322 - DNA, 80 bp, synthetic construct
  source 1..80: mol_type = other DNA
gtgattttcatcccatattcagtctgatggtctctctatacatttctctatatctcacatccctctagtcctttacagat

SEQ ID NO: 40323 - DNA, 80 bp, synthetic construct
  source 1..80: mol_type = other DNA
atatttattagacaagtaaatgagctcagagaaggcgagtggttttcccccacattctcacagtggaacacagccagaac

SEQ ID NO: 40324 - DNA, 80 bp, synthetic construct; identical to SEQ ID NO: 13955
  source 1..80: mol_type = other DNA

SEQ ID NO: 40325 - DNA, 80 bp, synthetic construct
  source 1..80: mol_type = other DNA
atgtagatccatactgttgaccagatgggagaaggcttgtttaacctactaaaatgaacacacagtttttaatggactta

SEQ ID NO: 40326 - DNA, 80 bp, synthetic construct
  source 1..80: mol_type = other DNA
attaaagatgttctgttgttacaatttacagaactggttttaaaatacaaatttatcagctggcacaggggctcacacct

SEQ ID NO: 40327 - DNA, 80 bp, synthetic construct
  source 1..80: mol_type = other DNA
ggatcacaaggtcaagagatagagaccatcctggccaacacagtgaaaccccgtctctactaagaatacaaaaatttgct

SEQ ID NO: 40328 - DNA, 80 bp, synthetic construct; identical to SEQ ID NO: 13956
  source 1..80: mol_type = other DNA

SEQ ID NO: 40329 - DNA, 80 bp, synthetic construct
  source 1..80: mol_type = other DNA
tcattcactagctcatttctcacagtctccaaaactgtctcatgtgcatggactacacctcttttgaataataacccaat

SEQ ID NO: 40330 - DNA, 80 bp, synthetic construct
  source 1..80: mol_type = other DNA
atgtcacagcaggactggggtcaggggccaagactccagggagtgcccgggcaatgatgacttcctcgtcttttcctaca

SEQ ID NO: 40331 - DNA, 80 bp, synthetic construct
  source 1..80: mol_type = other DNA
ttcttccaagtaaaccccatttggttgctcaccagcatcgggaattgggcagaataaagttgagatgtttctctgctgga

SEQ ID NO: 40332 - DNA, 80 bp, synthetic construct
  source 1..80: mol_type = other DNA
tgcgttaatatcagccggtgccagagtggtggtacttgagatgattttaggtctgatgtggtggaactgttttttagttg

SEQ ID NO: 40333 - DNA, 80 bp, synthetic construct; identical to SEQ ID NO: 13957
  source 1..80: mol_type = other DNA

SEQ ID NO: 40334 - DNA, 80 bp, synthetic construct
  source 1..80: mol_type = other DNA
ttggaaagcaggtttcccctggggttaaaaggtgtctaaccaacctaatatccaagaagttcattttcccatgaaacaag

SEQ ID NO: 40335 - DNA, 80 bp, synthetic construct
  source 1..80: mol_type = other DNA
tcaattggtttagggtggatggaaaataggaaactgcttcttcaaagggtatctctgtatagtcctaaatgaacctagtc

SEQ ID NO: 40336 - DNA, 80 bp, synthetic construct; identical to SEQ ID NO: 13958
  source 1..80: mol_type = other DNA

SEQ ID NO: 40337 - DNA, 80 bp, synthetic construct
  source 1..80: mol_type = other DNA
accagacctaccaacgcatgtggaattacatgtattccaagcagcccagcgtgttcgtgaagagcacagaggagggaatc

SEQ ID NO: 40338 - DNA, 80 bp, synthetic construct
  source 1..80: mol_type = other DNA
ttgggtagctttgtccagacagggtcagggtagctcaaaccactgaatacagcattgaatccagtaccccctgttgttag

SEQ ID NO: 40339 - DNA, 80 bp, synthetic construct
  source 1..80: mol_type = other DNA
ctaatagtaattattaaagggcatgttaatgtctttggtgtgtatttaggccttttgttccttttctggcttgcttctcc

SEQ ID NO: 40340 - DNA, 80 bp, synthetic construct; identical to SEQ ID NO: 13959
  source 1..80: mol_type = other DNA

SEQ ID NO: 40341 - DNA, 80 bp, synthetic construct
  source 1..80: mol_type = other DNA
taacagaacctccccaagaagatgaggagagaacatgtttagctgctgtggtgattgtgaaggggatctgaatgttcctc

SEQ ID NO: 40342 - DNA, 80 bp, synthetic construct
  source 1..80: mol_type = other DNA
tgctcatctttgtagttacagtacacatccctgctgttgatctttaccttagctcaaaactctgtaaattgcaggattca

SEQ ID NO: 40343 - DNA, 80 bp, synthetic construct
  source 1..80: mol_type = other DNA
aaacctgataatctagttaggtgccttacctcagtgtctcacactgagcctaccttggggtatattagtgtccttctcat

SEQ ID NO: 40344 - DNA, 80 bp, synthetic construct
  source 1..80: mol_type = other DNA
ctcagcctcccgagtagctgggactacagacgtgcactaccacacccagctaatttttgtatttttggtagagacggggt

SEQ ID NO: 40345 - DNA, 80 bp, synthetic construct; identical to SEQ ID NO: 13960
  source 1..80: mol_type = other DNA

SEQ ID NO: 40346 - DNA, 80 bp, synthetic construct
  source 1..80: mol_type = other DNA
agcaatttgaactaaatttcaaatgcttccaaagttttcatggaacaaaactatggagagttggggtaagatagaccaca

SEQ ID NO: 40347 - DNA, 80 bp, synthetic construct
  source 1..80: mol_type = other DNA
tggttattcccatcctatagaggacagaactcagattcagagcagatagattacttgtccaaggtcacagaataggtaga

SEQ ID NO: 40348 - DNA, 80 bp, synthetic construct; identical to SEQ ID NO: 13961
  source 1..80: mol_type = other DNA

SEQ ID NO: 40349 - DNA, 80 bp, synthetic construct
  source 1..80: mol_type = other DNA
tctgaggttgggttgaacatgccttgaaactgcttgaaatgctttgctgggctagacagttctctctaaacctgaaatgt

SEQ ID NO: 40350 - DNA, 80 bp, synthetic construct
  source 1..80: mol_type = other DNA
aatgtgtaagatgtgtaataagtacttactctacatgaagctctgctggtggttgcccaaatcactgacacacatccagt

SEQ ID NO: 40351 - DNA, 80 bp, synthetic construct
  source 1..80: mol_type = other DNA
caggcctactgaatcagattctgcagttcagcgaaatccccaggtgattgcaatgcacttgaaaatttgaaaagcactca

SEQ ID NO: 40352 - DNA, 80 bp, synthetic construct; identical to SEQ ID NO: 13962
  source 1..80: mol_type = other DNA

SEQ ID NO: 40353 - DNA, 80 bp, synthetic construct
  source 1..80: mol_type = other DNA
attctcacactctggggtggctcttctctcattgattggtgacttctctggataaacagttgtcaggtgtaatgtagtga

SEQ ID NO: 40354 - DNA, 80 bp, synthetic construct
  source 1..80: mol_type = other DNA
ggttcaagcaattcttctgtctcagcctcctgagcagctggggctacaggtgcgcaccatcacacccagctaattcttgt

SEQ ID NO: 40355 - DNA, 80 bp, synthetic construct
  source 1..80: mol_type = other DNA
ctggctgtgagaaattaatttaaataaagtagaaattggacacacctgactaaaaggtttgtgtcacagaaacacaaact

SEQ ID NO: 40356 - DNA, 80 bp, synthetic construct; identical to SEQ ID NO: 13963
  source 1..80: mol_type = other DNA

SEQ ID NO: 40357 - DNA, 80 bp, synthetic construct
  source 1..80: mol_type = other DNA
aacagggcattcacaacctgtgtcctgggctctcccgtaacccccgcaggctcggttttccgggacgagtttgatctggc

SEQ ID NO: 40358 - DNA, 80 bp, synthetic construct
  source 1..80: mol_type = other DNA
ttcaaattccaggtacacataatgacttgtaggacccattgagaacggccttggaaggaacctaggtataaagtgggctg

SEQ ID NO: 40359 - DNA, 80 bp, synthetic construct
  source 1..80: mol_type = other DNA
tgtgcagtcacagtcgcctggtttcagtttcccattcttgcgtctctacagtatattctccgctactagccagagtgatc

SEQ ID NO: 40360 - DNA, 80 bp, synthetic construct; identical to SEQ ID NO: 13964
  source 1..80: mol_type = other DNA

SEQ ID NO: 40361 - DNA, 80 bp, synthetic construct
  source 1..80: mol_type = other DNA
caccttaaccccaccttatttcccttctcagacctcatcgctacctgatattatatttcttgtgtatttgtttactttcc

SEQ ID NO: 40362 - DNA, 80 bp, synthetic construct
  source 1..80: mol_type = other DNA
ttttatcgaaaggatgagcaaatgttaaattaggctgaatagaaagcagtcacttactgagatgtatggctaagaagtgt

SEQ ID NO: 40363 - DNA, 80 bp, synthetic construct
  source 1..80: mol_type = other DNA
catatggtcacgtaccatatctactactccatctactgcagccttgttaaaatatgcaacagatttacctgtccacgctc

SEQ ID NO: 40364 - DNA, 80 bp, synthetic construct
  source 1..80: mol_type = other DNA
tatggatatacggagcaagtattttttataatttaaaggaaatgctgccctcagaggaactgagtgaggccacacacttc

SEQ ID NO: 40365 - DNA, 80 bp, synthetic construct; identical to SEQ ID NO: 13965
  source 1..80: mol_type = other DNA

SEQ ID NO: 40366 - DNA, 80 bp, synthetic construct
  source 1..80: mol_type = other DNA
ctcagctagccattccatcaatagggatatgctgagtgacagtgaggtatcccagcacatcacttcacactcctgggaat

SEQ ID NO: 40367 - DNA, 80 bp, synthetic construct
  source 1..80: mol_type = other DNA
aagaaaatgggggggatgcagaaaaaagtgtcaaggcacttttgtggattggatagaatgaactggattttgaagatgcc

SEQ ID NO: 40368 - DNA, 80 bp, synthetic construct
  source 1..80: mol_type = other DNA
gtccatgtggaacagataagaattcgcatttggggagttgggttgtgtaatgggtttgtactagggaaggtgtgggtagc

SEQ ID NO: 40369 - DNA, 80 bp, synthetic construct; identical to SEQ ID NO: 13966
  source 1..80: mol_type = other DNA

SEQ ID NO: 40370 - DNA, 80 bp, synthetic construct
  source 1..80: mol_type = other DNA
ttgataagtgaaatagaagaaatgtctaggtatctttcttcctagaaacgcttgatctccctctcccctcaccacagtgg

SEQ ID NO: 40371 - DNA, 80 bp, synthetic construct
  source 1..80: mol_type = other DNA
tgtttgtgggatgtgtgatgaaaactgctgctagctgtcagaagctaccaattgttgtgttttcctgggtcatgctaacg

SEQ ID NO: 40372 - DNA, 80 bp, synthetic construct
  source 1..80: mol_type = other DNA
ggcagtgcagggaccctccaaaggatcctgtcattgacccatcaggtccaggccgcaagctctggtcagttccaagtctc

SEQ ID NO: 40373 - DNA, 80 bp, synthetic construct; identical to SEQ ID NO: 13967
  source 1..80: mol_type = other DNA

SEQ ID NO: 40374 - DNA, 80 bp, synthetic construct
  source 1..80: mol_type = other DNA
cctttcttttgttcatccctccccacctacctcttaagactggagctcattaaatgtttaccctcctgcgtatgtgtttg

SEQ ID NO: 40375 - DNA, 80 bp, synthetic construct
  source 1..80: mol_type = other DNA
taataatagcatggccacctcccagggctgttgcgaaggttgagtaagataaatcaagcattcagcaaagtgcctggcac

SEQ ID NO: 40376 - DNA, 80 bp, synthetic construct
  source 1..80: mol_type = other DNA
ggctgaagggctcttcaaaaatcaacacttaagacatatattttctgtctgttgacattttcccccctatagacaataag

SEQ ID NO: 40377 - DNA, 80 bp, synthetic construct; identical to SEQ ID NO: 13968
  source 1..80: mol_type = other DNA

SEQ ID NO: 40378 - DNA, 80 bp, synthetic construct
  source 1..80: mol_type = other DNA
gctagagagagacacagatagttgctgtaatggttgcagtatgggagagttttaatagcggtataaagagaatgtctgga

SEQ ID NO: 40379 - DNA, 80 bp, synthetic construct
  source 1..80: mol_type = other DNA
tgttacactgagaactcggtttgaataggtaggatgaggttggacttaagggactgttgaaaaccgggtaaaggtacttg

SEQ ID NO: 40380 - DNA, 80 bp, synthetic construct
  source 1..80: mol_type = other DNA
gcatcttactctgtaatacaggcatatttatttaatgtaagaatttttttcccacccaagccctaagtaaaatcagtgtc

SEQ ID NO: 40381 - DNA, 80 bp, synthetic construct; identical to SEQ ID NO: 13969
  source 1..80: mol_type = other DNA

SEQ ID NO: 40382 - DNA, 80 bp, synthetic construct
  source 1..80: mol_type = other DNA
gctagaagttagagtgaaaaaaaagagaaagaaatagaagaaccaggccaccaagtctgcaaatcagataaaaggatgcc

SEQ ID NO: 40383 - DNA, 80 bp, synthetic construct
  source 1..80: mol_type = other DNA
ttctaaatagatttttacttgtgcaggggctgtgggtggtacatgtggagcagagaagaatttctggagaaattcttctg

SEQ ID NO: 40384 - DNA, 80 bp, synthetic construct; identical to SEQ ID NO: 13970
  source 1..80: mol_type = other DNA

SEQ ID NO: 40385 - DNA, 80 bp, synthetic construct
  source 1..80: mol_type = other DNA
aatggaagttggaggtggaatagaaatataaagttataattgttgcagttgttggccttggaaacagttccgcatccaca

SEQ ID NO: 40386 - DNA, 80 bp, synthetic construct
  source 1..80: mol_type = other DNA
ggcatgaaggagagaactgaacagatgaaagggaaaataaacagtggaagtcatcctgtccaggtcccaaatgcatccga

SEQ ID NO: 40387 - DNA, 80 bp, synthetic construct
  source 1..80: mol_type = other DNA
tgctatgcaaatcactctgaaagccaggacttcagctactgtcccagccatagctgctagtgccagtttaatgtggtggc

SEQ ID NO: 40388 - DNA, 80 bp, synthetic construct; identical to SEQ ID NO: 13971
  source 1..80: mol_type = other DNA

SEQ ID NO: 40389 - DNA, 80 bp, synthetic construct
  source 1..80: mol_type = other DNA
cccagctaatttttgtatttttagtagagatgggatatcaccatgttggccaggctggtctcgaactcctgacctcaagt

SEQ ID NO: 40390 - DNA, 80 bp, synthetic construct
  source 1..80: mol_type = other DNA
aagcagctctaaatttgttttttagaatttgaatcagttggctttcacgtgtgcctaaaggaaggagagaaatatggaat

SEQ ID NO: 40391 - DNA, 80 bp, synthetic construct
  source 1..80: mol_type = other DNA
atttcaaagaaaaggaactggtgcttaccccacttctaatccaatattacagctcaaacattactgccaaattccagaga

SEQ ID NO: 40392 - DNA, 80 bp, synthetic construct; identical to SEQ ID NO: 13972
  source 1..80: mol_type = other DNA

SEQ ID NO: 40393 - DNA, 80 bp, synthetic construct
  source 1..80: mol_type = other DNA
cttaactgctataaaaagaaaatatcgctagccactcacagatgctggcatcccaattcaaggagattggattactgaag

SEQ ID NO: 40394 - DNA, 80 bp, synthetic construct
  source 1..80: mol_type = other DNA
ggctgtgaaaatcagggttccctttcaagaatggaaaagaggccagtggcattgactcacagaatccttggaaaacagga

SEQ ID NO: 40395 - DNA, 80 bp, synthetic construct
  source 1..80: mol_type = other DNA
ccgaggctggaaacctgaatatgggaatttagatagtgtttcagagagatgctgtggaggaagcctctctctgatcaaat

SEQ ID NO: 40396 - DNA, 80 bp, synthetic construct; identical to SEQ ID NO: 13973
  source 1..80: mol_type = other DNA

SEQ ID NO: 40397 - DNA, 80 bp, synthetic construct
  source 1..80: mol_type = other DNA
tttagatccaggcacttccacttgtcagccgtggaaccttgggcaagttacctaactcctctgcaccttggtttctgtgt

SEQ ID NO: 40398 - DNA, 80 bp, synthetic construct
  source 1..80: mol_type = other DNA
cacgttagttatgaaaacatgaacaacctaagttctctgaatttctctttctttaactgtaaagtggggacaatgggcct

SEQ ID NO: 40399 - DNA, 80 bp, synthetic construct
  source 1..80: mol_type = other DNA
tccttttgcctacttttctcctattattctctccagaatgtgctaggtctagtcaccagatgccttggtgaatacaagaa

SEQ ID NO: 40400 - DNA, 80 bp, synthetic construct; identical to SEQ ID NO: 13974
  source 1..80: mol_type = other DNA

SEQ ID NO: 40401 - DNA, 80 bp, synthetic construct
  source 1..80: mol_type = other DNA
ctttttgttcaaaaggagctttccctctgtattttagttgcagatttccacagtggttcgtggagatatgtgagtgtttt

SEQ ID NO: 40402 - DNA, 80 bp, synthetic construct
  source 1..80: mol_type = other DNA
catttgcatttgtgaactatcattttttgggcaaaatatttgcgggcaatctgcgggtgacaccaaagttagtatttagc

SEQ ID NO: 40403 - DNA, 80 bp, synthetic construct
  source 1..80: mol_type = other DNA
ggaaagacatgactagatgtcttcccagtcccccttgccattgctgaggcatctgtgagtgccgcgtgggccttgtaggc

SEQ ID NO: 40404 - DNA, 80 bp, synthetic construct; identical to SEQ ID NO: 13975
  source 1..80: mol_type = other DNA

SEQ ID NO: 40405 - DNA, 80 bp, synthetic construct
  source 1..80: mol_type = other DNA
tttccctgatctaataaaaattatcccagtgcaggccacatgcctgttaataactctcccaatacccccacccaatacag

SEQ ID NO: 40406 - DNA, 80 bp, synthetic construct
  source 1..80: mol_type = other DNA
taattaaaaaggaatacatatgggtccagagcttttggtaatgcagccctctgcatctggaatgtctttatcctctttct

SEQ ID NO: 40407 - DNA, 80 bp, synthetic construct
  source 1..80: mol_type = other DNA
tagtgataaacaaggtattattagtaaaacacaaaagtagtatacctaaaagtcaggtaagagtagagaaggcagcctgg

SEQ ID NO: 40408 - DNA, 80 bp, synthetic construct
  source 1..80: mol_type = other DNA
agcaacgatgctgtgtgctgggaactataaacaattctgttacttgaggatgtgtcacagttagattttgcatttcagaa

SEQ ID NO: 40409 - DNA, 80 bp, synthetic construct; identical to SEQ ID NO: 13976
  source 1..80: mol_type = other DNA

SEQ ID NO: 40410 - DNA, 80 bp, synthetic construct
  source 1..80: mol_type = other DNA
ccaagatgggagtgtgactgacagtgtcaagtgctaacaaaggtcatgcaagatcaggactagaaaatttccattaggct

SEQ ID NO: 40411 - DNA, 80 bp, synthetic construct
  source 1..80: mol_type = other DNA
cctttagatctcatagacagaattacttggagcttaaaagctttttgagtgtccaaattatgtttgaggtctgaataaaa

SEQ ID NO: 40412 - DNA, 80 bp, synthetic construct
  source 1..80: mol_type = other DNA
ttaactttgcaacattcttttgtatgtatgtgcaatgattgctgagaaagcacagccagttgtaagttaactgtttcttg

SEQ ID NO: 40413 - DNA, 80 bp, synthetic construct; identical to SEQ ID NO: 13977
  source 1..80: mol_type = other DNA

SEQ ID NO: 40414 - DNA, 80 bp, synthetic construct
  source 1..80: mol_type = other DNA
cagaagaagacctaaaggggaaagaaaaccccctctacagaaacaagaggaatgcgagaccctctgcaagggggccttgt

SEQ ID NO: 40415 - DNA, 80 bp, synthetic construct
  source 1..80: mol_type = other DNA
tatctcagccttccgagtagctgggattaacaggtgtgagccaccatgcccggctaatttttgcatttttagtggagatg

SEQ ID NO: 40416 - DNA, 80 bp, synthetic construct
  source 1..80: mol_type = other DNA
atcctgtagactctcagcagtcacttggggactccagttacctgagcaggtggccatccttcatgtcaccattgtcattt

SEQ ID NO: 40417 - DNA, 80 bp, synthetic construct; identical to SEQ ID NO: 13978
  source 1..80: mol_type = other DNA

SEQ ID NO: 40418 - DNA, 80 bp, synthetic construct
  source 1..80: mol_type = other DNA
aagcaccttccccctggaaggtagaattgagtttttaaatgatcccctatttttgattgttcaaaatacaggattcccac

SEQ ID NO: 40419 - DNA, 80 bp, synthetic construct
  source 1..80: mol_type = other DNA
gacagctactgcactgtgttattttaaaaacaaaagtcagacatccacttagggctttgtaaaaggaaaccctgggcata

SEQ ID NO: 40420 - DNA, 80 bp, synthetic construct; identical to SEQ ID NO: 13979
  source 1..80: mol_type = other DNA

SEQ ID NO: 40421 - DNA, 80 bp, synthetic construct
  source 1..80: mol_type = other DNA
tcatgctttgcaatgaggacatgaccagaaacaatgtctgactcccaggaacttacatacttgcacaatgcttctaaaat

SEQ ID NO: 40422 - DNA, 80 bp, synthetic construct
  source 1..80: mol_type = other DNA
gactgggaatcaatatttttagtcagctttctaggcagttctgatggcagctggtttgtgaaccactcgtttggtgggat

SEQ ID NO: 40423 - DNA, 80 bp, synthetic construct
  source 1..80: mol_type = other DNA
gacaggtattttggtgtcatgtctctctctataagctgtcaagagtttgcccgagcccttttcttaaatggtcctcacct

SEQ ID NO: 40424 - DNA, 80 bp, synthetic construct; identical to SEQ ID NO: 13980
  source 1..80: mol_type = other DNA

SEQ ID NO: 40425 - DNA, 80 bp, synthetic construct
  source 1..80: mol_type = other DNA
tatttgtggcttaatcgtggccatttttatggctatgttggagtttttatggactctcagacactcagaagcaactgagg

SEQ ID NO: 40426 - DNA, 80 bp, synthetic construct
  source 1..80: mol_type = other DNA
gcccagcagaggggatttggatcaatgcttcattacttagtaattattatgaacaacaaagccttctagaactatcattt

SEQ ID NO: 40427 - DNA, 80 bp, synthetic construct
  source 1..80: mol_type = other DNA
tgaataagttcaattccccagctgtggcttagagacagggttaacataaactttacccaggttgaacagtttgaaaagaa

SEQ ID NO: 40428 - DNA, 80 bp, synthetic construct; identical to SEQ ID NO: 13981
  source 1..80: mol_type = other DNA

SEQ ID NO: 40429 - DNA, 80 bp, synthetic construct
  source 1..80: mol_type = other DNA
gcccctctgcttctgcatgcgtagagcttcattttacttcccatctcccaagaaatcaggagtggctagccctgaattaa

SEQ ID NO: 40430 - DNA, 80 bp, synthetic construct
  source 1..80: mol_type = other DNA
accattgtgaacgtgtctgccatatttcaaaataataggaagattactgttgctcttgctctatccctctcctcttccaa

SEQ ID NO: 40431 - DNA, 80 bp, synthetic construct
  source 1..80: mol_type = other DNA
tgacccctcccagtggaccaaaccaaagagaatctactgggccttattggactttggtgtgtcccttgatgatggggata

SEQ ID NO: 40432 - DNA, 80 bp, synthetic construct; identical to SEQ ID NO: 13982
  source 1..80: mol_type = other DNA

SEQ ID NO: 40433 - DNA, 80 bp, synthetic construct
  source 1..80: mol_type = other DNA
ctgtgtcttttatccctgtgcttgacatgcagtagacagtcaataaatctacattgttatagtattgtcacatgtaatag

SEQ ID NO: 40434 - DNA, 80 bp, synthetic construct
  source 1..80: mol_type = other DNA
gacatcacctttctgtagctgcctcacattttgttattctccccaaagctcacccatggtctggaagtatattgaaaaat

SEQ ID NO: 40435 - DNA, 80 bp, synthetic construct
  source 1..80: mol_type = other DNA
tcaactcagagtagagcactcaacagagcatgtacaggcttggagttgataggtttaggtccaaattcagagtcagctat

SEQ ID NO: 40436 - DNA, 80 bp, synthetic construct
  source 1..80: mol_type = other DNA
atcatgaggtcggcagttcaagaccagcctggccaacatagtgaaaccccgtctctaccaagaaatacaaaatttagccg

SEQ ID NO: 40437 - DNA, 80 bp, synthetic construct; identical to SEQ ID NO: 13983
  source 1..80: mol_type = other DNA

SEQ ID NO: 40438 - DNA, 80 bp, synthetic construct
  source 1..80: mol_type = other DNA
gcccagctaaattttgtggttttagtagagacagggtttcaccatgttggccaggctggtcccgaactcctgacctcaag

SEQ ID NO: 40439 - DNA, 80 bp, synthetic construct
  source 1..80: mol_type = other DNA
ggcttggctgatgtttgtggcctttatctcacacggtgtgagatgttgctacagaaatatgagcgggtttgaattcaagt

SEQ ID NO: 40440 - DNA, 80 bp, synthetic construct; identical to SEQ ID NO: 13984
  source 1..80: mol_type = other DNA

SEQ ID NO: 40441 - DNA, 80 bp, synthetic construct
  source 1..80: mol_type = other DNA
atattatggtatggagggtgtttgaacattaaatgggagtggagtgaggagatggactgaaaggcttttatcatcttcat

SEQ ID NO: 40442 - DNA, 80 bp, synthetic construct
  source 1..80: mol_type = other DNA
gtccgtctgccaggagatggtgaccgagctgcgcagcattatcctgtgtcaggacagtatccacccccgccggcggcgcg

SEQ ID NO: 40443 - DNA, 80 bp, synthetic construct
  source 1..80: mol_type = other DNA
ccgcgtctgccccgagtgccgccgcttccagggcctgcgggcacggccgtcgcccgcccgcagcgaggagagcctggagt

SEQ ID NO: 40444 - DNA, 80 bp, synthetic construct
  source 1..80: mol_type = other DNA
cacttttcaaaaagatcaaggagcctgacgccccagccagagaccgcgcccggtcagggagcagggtccacccggaaacg

SEQ ID NO: 40445 - DNA, 80 bp, synthetic construct; identical to SEQ ID NO: 13985
  source 1..80: mol_type = other DNA

SEQ ID NO: 40446 - DNA, 80 bp, synthetic construct
  source 1..80: mol_type = other DNA
attttggaatattgcgttaccagtgcatccgatttcaggtgcttaactctctgtatggtgactgaggggcctgcaggagc

SEQ ID NO: 40447 - DNA, 80 bp, synthetic construct
  source 1..80: mol_type = other DNA
gactgtcactattactgggtttgatttgatctttttgtgaatgtagtctctgaagacagacaggggaggagaacagaatg

SEQ ID NO: 40448 - DNA, 80 bp, synthetic construct
  source 1..80: mol_type = other DNA
accaaactcaaatgagtggctgcctatgaagccagacccccaagactatcatggattgggtggtttcttgctacttagac

SEQ ID NO: 40449 - DNA, 80 bp, synthetic construct; identical to SEQ ID NO: 13986
  source 1..80: mol_type = other DNA

SEQ ID NO: 40450 - DNA, 80 bp, synthetic construct
  source 1..80: mol_type = other DNA
ctgcttgacctttgcttggcttcactaattgggagtttcacgcagagttctcattggctgatggaaaacaaattctatgc

SEQ ID NO: 40451 - DNA, 80 bp, synthetic construct
  source 1..80: mol_type = other DNA
caaatgtactaaaataaagacatctttggaagatgacgagcttaattcatgtttttgccatttgggttggtcggcatcct

SEQ ID NO: 40452 - DNA, 80 bp, synthetic construct
  source 1..80: mol_type = other DNA
atcttttttctctttaaccatcaaatgacaacaagctgtgcaagacacttgtgtctttttttaaaccttgccttgatcct

SEQ ID NO: 40453 - DNA, 80 bp, synthetic construct; identical to SEQ ID NO: 13987
  source 1..80: mol_type = other DNA

SEQ ID NO: 40454 - DNA, 80 bp, synthetic construct
  source 1..80: mol_type = other DNA
tttgcaaccagctaatactcttccttggtttgtttccactttttatctgttggttgttggctttcttttccattctgtat

SEQ ID NO: 40455 - DNA, 80 bp, synthetic construct
  source 1..80: mol_type = other DNA
tgtttgggtttagaaagtatggttcagtgtgtctaatatccaggtactagacttgaaaagcaaataaaatcataaaccca

SEQ ID NO: 40456 - DNA, 80 bp, synthetic construct
  source 1..80: mol_type = other DNA
gtagtgccccggccgcggcggcgaggggcgctccctcttcagctaagccgttagcgccgagcccgcccgggagcgggtcg

SEQ ID NO: 40457 - DNA, 80 bp, synthetic construct
  source 1..80: mol_type = other DNA
cagctgggacccgccgcggtcgggctgccccctcccctcgccccgaccgctcccctgctggtgagggcctgcggaggcgg

SEQ ID NO: 40458 - DNA, 80 bp, synthetic construct
  source 1..80: mol_type = other DNA
ggcggcggcggcgccaggacatggagctcgagaacatcgtggccaactcgctgctgctgaaagcgcgtcaaggtgggtgc

SEQ ID NO: 40459 - DNA, 80 bp, synthetic construct
  source 1..80: mol_type = other DNA
tctgtgcagtgtggtcaggctgcccgggccaggtcccagtccccatctcctggcccagatgagagaagtctgcgctttgc

SEQ ID NO: 40460 - DNA, 80 bp, synthetic construct; identical to SEQ ID NO: 13988
  source 1..80: mol_type = other DNA

SEQ ID NO: 40461 - DNA, 80 bp, synthetic construct
  source 1..80: mol_type = other DNA
tcagccttttatcattattaaagtgaggcagaaatttaaaaatagtaataagtactgcattcattcactccaagaaaaga

SEQ ID NO: 40462 - DNA, 80 bp, synthetic construct
  source 1..80: mol_type = other DNA
gagcaggggtgaagaaaaaaaaaaaagaggacaaatatctgtgtttagccagttcttggttttttctttcaacgcagcta

SEQ ID NO: 40463 - DNA, 80 bp, synthetic construct
  source 1..80: mol_type = other DNA
tgtgaatccactgagctggtgcgtaccttaacataaatatcctcctgttttcacccatgctggtctctctagtcctctgc

SEQ ID NO: 40464 - DNA, 80 bp, synthetic construct; identical to SEQ ID NO: 13989
  source 1..80: mol_type = other DNA

SEQ ID NO: 40465 - DNA, 80 bp, synthetic construct
  source 1..80: mol_type = other DNA
gcaaaacacagcaagaccatctctttaaaaaagtctaaaacaaagacttcatcttctcagtatttttgtgcaccaactca

SEQ ID NO: 40466 - DNA, 80 bp, synthetic construct
  source 1..80: mol_type = other DNA
tcatggaaaataatcatccttagtggaagtcagattgaagctaagccagttttctttttacactaccttcctatctgcat

SEQ ID NO: 40467 - DNA, 80 bp, synthetic construct
  source 1..80: mol_type = other DNA
tggccgggcacggtggctcacagctgtaatcccagcacttttggaggccgaggcgggcggatcacaaggtcaggagattg

SEQ ID NO: 40468 - DNA, 80 bp, synthetic construct; identical to SEQ ID NO: 13990
  source 1..80: mol_type = other DNA

SEQ ID NO: 40469 - DNA, 80 bp, synthetic construct
  source 1..80: mol_type = other DNA
ttggttataatttagggctttttcccaagttgatgactgtgtttgttactttaaagtatctcccaggaagtaccaggagg

SEQ ID NO: 40470 - DNA, 80 bp, synthetic construct
  source 1..80: mol_type = other DNA
tttcctggatttatttcaaatagaatcagtcagtctcaatcccccctccctctctggtccctgctatggtctgaatattt

SEQ ID NO: 40471 - DNA, 80 bp, synthetic construct
  source 1..80: mol_type = other DNA
tttataaaagaaactagagagacacccctcactccttctaccatggacacagaaagaagatgccagctatgaatcagaaa

SEQ ID NO: 40472 - DNA, 80 bp, synthetic construct; identical to SEQ ID NO: 13991
  source 1..80: mol_type = other DNA

SEQ ID NO: 40473 - DNA, 80 bp, synthetic construct
  source 1..80: mol_type = other DNA
cctgggttcaagtgattctcctgcctcagcctcccaagtagctgggactacaggcacccaccattcccggctaatttttt

SEQ ID NO: 40474 - DNA, 80 bp, synthetic construct
  source 1..80: mol_type = other DNA
ttttttttccttgatataattcataggttcatagatcatattgttaataaatataaaaacaatttttttttgaggcgtcg

SEQ ID NO: 40475 - DNA, 80 bp, synthetic construct
  source 1..80: mol_type = other DNA
gtagagacgggggtttctccatgttggtcaggctggtctcgaactcctgatcacaggtgatccacccgcctcagcctccc

SEQ ID NO: 40476 - DNA, 80 bp, synthetic construct; identical to SEQ ID NO: 13992
  source 1..80: mol_type = other DNA

SEQ ID NO: 40477 - DNA, 80 bp, synthetic construct
  source 1..80: mol_type = other DNA
ttatggagaagatattgggtagctcaaagaatcaaagtaagaacctaacaatcagtctggaaagaacaggatgtgggact

SEQ ID NO: 40478 - DNA, 80 bp, synthetic construct
  source 1..80: mol_type = other DNA
agaaattcctgccattctggagaccacattcttataggggaggcagtcttgaggcacataaataagacgtgtggcatatt

SEQ ID NO: 40479 - DNA, 80 bp, synthetic construct; identical to SEQ ID NO: 13993
  source 1..80: mol_type = other DNA

SEQ ID NO: 40480 - DNA, 80 bp, synthetic construct
  source 1..80: mol_type = other DNA
aggaaagaggagatcagagagatgctgaaggtagaagacactggatagaggagcgattgcagagaatcctcaaagttgcc

SEQ ID NO: 40481 - DNA, 80 bp, synthetic construct
  source 1..80: mol_type = other DNA
tttcttttctttttttttttttttaaagagagtttcgctcttgttgcccaggctggagtgcaatggcacaatctcggctc

SEQ ID NO: 40482 - DNA, 80 bp, synthetic construct
  source 1..80: mol_type = other DNA
ggtgatccgcccacctcggcctcccaaagtgctaggatttacaggcgtgagccatggtgcccagccttttttttttttaa

SEQ ID NO: 40483 - DNA, 80 bp, synthetic construct; identical to SEQ ID NO: 13994
  source 1..80: mol_type = other DNA

SEQ ID NO: 40484 - DNA, 80 bp, synthetic construct
  source 1..80: mol_type = other DNA
tatttctctgccaacaaaaggttaccccattttccctaagcaataatgtctaccgtctgttactatcattatggtacagc

SEQ ID NO: 40485 - DNA, 80 bp, synthetic construct
  source 1..80: mol_type = other DNA
taggaccaaaaatatctataccactgatactataaaataatattcttggccaggcacggtggctcatgcctgtaatccca

SEQ ID NO: 40486 - DNA, 80 bp, synthetic construct
  source 1..80: mol_type = other DNA
tcacttgaacccgggaggtggaggttgcagtgagccgagatcgtgccactgcactccaacctggcgacacggtgagactc

SEQ ID NO: 40487 - DNA, 80 bp, synthetic construct
  source 1..80: mol_type = other DNA
aggcacacgccgccatgcctggctaatttttttgcatttttagtagagatggagtttcactgtgttagccaggatggtct

SEQ ID NO: 40488 - DNA, 80 bp, synthetic construct; identical to SEQ ID NO: 13995
  source 1..80: mol_type = other DNA

SEQ ID NO: 40489 - DNA, 80 bp, synthetic construct
  source 1..80: mol_type = other DNA
tgctacctttacctcaaacaaaataatctgtaggattcttcatgcttgtttcagcaccttttgcccagctttgcttgctt

SEQ ID NO: 40490 - DNA, 80 bp, synthetic construct
  source 1..80: mol_type = other DNA
taaggatgaggaaatgaacacggtaggtatgcctggatctgaagcagaagtggcccaaaaatggaaggaaaagaaacttg

SEQ ID NO: 40491 - DNA, 80 bp, synthetic construct
  source 1..80: mol_type = other DNA
ttccttctgtgggctgtgaggaagaatctgtcgcaggcctctctcccagcctctgctggctcgctggcagtctctggtgt

SEQ ID NO: 40492 - DNA, 80 bp, synthetic construct; identical to SEQ ID NO: 13996
  source 1..80: mol_type = other DNA

SEQ ID NO: 40493 - DNA, 80 bp, synthetic construct
  source 1..80: mol_type = other DNA
caaaaacttaagaggaatcctctgacagttttcaacccagtatgctgcccagactttagtgtctgtggatggtcctcctt

SEQ ID NO: 40494 - DNA, 80 bp, synthetic construct
  source 1..80: mol_type = other DNA
ggggacgtggaaccagactgctgtgctgtgccagtggagacttttggaactgaggacagctgaatgaggggtagagtggc

SEQ ID NO: 40495 - DNA, 80 bp, synthetic construct; identical to SEQ ID NO: 13997
  source 1..80: mol_type = other DNA

SEQ ID NO: 40496 - DNA, 80 bp, synthetic construct
  source 1..80: mol_type = other DNA
tccccagctaatgtttgtattttttgtagagatggggtttcaccatgttgccctggctggtcttaaactcctgaacccaa

SEQ ID NO: 40497 - DNA, 80 bp, synthetic construct
  source 1..80: mol_type = other DNA
tcacctccaccacctcaccaaagccacccttgccacatcccaggcatcagttcttggtccttgtcttgctgcccccgtgg

SEQ ID NO: 40498 - DNA, 80 bp, synthetic construct
  source 1..80: mol_type = other DNA
cttctctatccacactcattcccttgtgatcttgtagtactatggcttgaaagaagctcctgtcaccagttcacgcctgc

SEQ ID NO: 40499 - DNA, 80 bp, synthetic construct
  source 1..80: mol_type = other DNA
caccccgatgtttccatctgcacctcagttaatgctcatgtagctgcacttgacttactcgcacccccacactcaatcct

SEQ ID NO: 40500 - DNA, 80 bp, synthetic construct; identical to SEQ ID NO: 13998
  source 1..80: mol_type = other DNA

SEQ ID NO: 40501 - DNA, 80 bp, synthetic construct
  source 1..80: mol_type = other DNA
ggtttcctctgtctcttgagaattttttcttacggggcttgttctctcacctgaggaatttcctgaccactaccccttcc

SEQ ID NO: 40502 - DNA, 80 bp, synthetic construct
  source 1..80: mol_type = other DNA
ctttattttttcccatagcacttattattatctcatatacgtatattttacttgtactttgttcgtcgggctttctccct

SEQ ID NO: 40503 - DNA, 80 bp, synthetic construct
  source 1..80: mol_type = other DNA
cagccagacctgggctttatatctcagtgccctctttatactatctcaacgacggtgtcagttacttcagtttcactcaa

SEQ ID NO: 40504 - DNA, 80 bp, synthetic construct; identical to SEQ ID NO: 13999
  source 1..80: mol_type = other DNA

SEQ ID NO: 40505 - DNA, 80 bp, synthetic construct
  source 1..80: mol_type = other DNA
tctgtgccatgtctgccctctagccaccaaatatccatgcacagccttcttcccttacaggtatcctaatctcccttcaa

SEQ ID NO: 40506 - DNA, 80 bp, synthetic construct
  source 1..80: mol_type = other DNA
cgcgcacctgtagtcccagctacttgggaggctgaggcaggagaatcgcttgaacctgggaggtggagattgcagtgagc

SEQ ID NO: 40507 - DNA, 80 bp, synthetic construct
  source 1..80: mol_type = other DNA
ctaatataccgtgggggagcagaggcagggtgactattgtagaaattcccttttagaaaaggaggagcagggagccctca

SEQ ID NO: 40508 - DNA, 80 bp, synthetic construct; identical to SEQ ID NO: 14000
  source 1..80: mol_type = other DNA

SEQ ID NO: 40509 - DNA, 80 bp, synthetic construct
  source 1..80: mol_type = other DNA
attgagtcagtcctgctaaagttccatgtcaccatgctgaaagttgtttgacctttggagaaatcaggagagatacatag

SEQ ID NO: 40510 - DNA, 80 bp, synthetic construct
  source 1..80: mol_type = other DNA
ttctctgtgtctgcttgcttcagcccttttctgcctataaaaccaaactcctctgtttagctcattgaaacactcattgt

SEQ ID NO: 40511 - DNA, 80 bp, synthetic construct
  source 1..80: mol_type = other DNA
cagtgatcctcccacctcagcctcctgagtagctgggactacaggtgcacaccaccatgcctgagtaattttttttttag

SEQ ID NO: 40512 - DNA, 80 bp, synthetic construct; identical to SEQ ID NO: 14001
  source 1..80: mol_type = other DNA

SEQ ID NO: 40513 - DNA, 80 bp, synthetic construct
  source 1..80: mol_type = other DNA
ctgggattgcaggcacatgccaccacgtccggctaattttgtatttttagtagatacagggttcctccatgttggtcagg

SEQ ID NO: 40514 - DNA, 80 bp, synthetic construct
  source 1..80: mol_type = other DNA
aaaaccacacccctgatctgcttgctgcacagagctgagtttttatctgcttttgtctttcaaagccttttccagtctta

SEQ ID NO: 40515 - DNA, 80 bp, synthetic construct
  source 1..80: mol_type = other DNA
ttttttattgctgcttacaaagccagcaattcttgcttgagctcccttccccagcaaaataccttcctcggtatgatgag

SEQ ID NO: 40516 - DNA, 80 bp, synthetic construct; identical to SEQ ID NO: 14002
  source 1..80: mol_type = other DNA

SEQ ID NO: 40517 - DNA, 80 bp, synthetic construct
  source 1..80: mol_type = other DNA
tggcagaagttctgagtcatcagcacatggctcccaagatcctcctgtggatctcggtccatctacgaaacaaagaagcg

SEQ ID NO: 40518 - DNA, 80 bp, synthetic construct
  source 1..80: mol_type = other DNA
agctctgttgtgactattaggagttcactatatattctgattactcatcccttatcaggtatataatgtgcaaatgtttt

SEQ ID NO: 40519 - DNA, 80 bp, synthetic construct
  source 1..80: mol_type = other DNA
tcagttgctgtattaatctatcctaaagatccatattgagtgggaagaaaaagggaaaacaactttcatctttaaaatta

SEQ ID NO: 40520 - DNA, 80 bp, synthetic construct; identical to SEQ ID NO: 14003
  source 1..80: mol_type = other DNA

SEQ ID NO: 40521 - DNA, 80 bp, synthetic construct
  source 1..80: mol_type = other DNA
tggcatcagttctgtggtggagatgccactagggggcaggtgttctttcaagagcatcttatctcaattgctgccgtcct

SEQ ID NO: 40522 - DNA, 80 bp, synthetic construct
  source 1..80: mol_type = other DNA
ctcttctctacaaaagctttttaaaaaaatagccatgtgtggccaggcacagtggctcatgcctgtaatcccagcacttt

SEQ ID NO: 40523 - DNA, 80 bp, synthetic construct
  source 1..80: mol_type = other DNA
tgaggtcaggagatcgagaccatcctggttaacgtggtgaaacaccgtctgtaaatacaaaaaaattagccaggcatggt

SEQ ID NO: 40524 - DNA, 80 bp, synthetic construct; identical to SEQ ID NO: 14004
  source 1..80: mol_type = other DNA

SEQ ID NO: 40525 - DNA, 80 bp, synthetic construct
  source 1..80: mol_type = other DNA
atcacctgaggtcaggagttcgagaccagcctgaccaacatggagaaaccctgtctctactaaagatacaaaattagccg

SEQ ID NO: 40526 - DNA, 80 bp, synthetic construct
  source 1..80: mol_type = other DNA
aatccatgtgtggtggtgcatgcttgtggtcccagctgctgaggaggctgaggtagctggatctcttgagtccaggaagt

SEQ ID NO: 40527 - DNA, 80 bp, synthetic construct
  source 1..80: mol_type = other DNA
gaaagaatttcttgtggggttattttagacactcctcctaatggttcttatctcagacatgtaagcaagaacccttcttt

SEQ ID NO: 40528 - DNA, 80 bp, synthetic construct
  source 1..80: mol_type = other DNA
ggacagcagatgtcttctcaataaataatttgttagccaggattcacagtatggaaggatgactggggctgccatggcca

SEQ ID NO: 40529 - DNA, 80 bp, synthetic construct; identical to SEQ ID NO: 14005
  source 1..80: mol_type = other DNA

SEQ ID NO: 40530 - DNA, 80 bp, synthetic construct
  source 1..80: mol_type = other DNA
agtgccacatacccgtgaacacaaacccactggggctgagcggctgtgccactgtcacaggatccttagggtgtcacttc

SEQ ID NO: 40531 - DNA, 80 bp, synthetic construct
  source 1..80: mol_type = other DNA
gttgcatgagcaaatgagtgtggggtctggccattgggcacagccaggcatgccagctgtggcagggcaggcagctccag

SEQ ID NO: 40532 - DNA, 80 bp, synthetic construct; identical to SEQ ID NO: 14006
  source 1..80: mol_type = other DNA

SEQ ID NO: 40533 - DNA, 80 bp, synthetic construct
  source 1..80: mol_type = other DNA
cccaaaatgggtagctcctttctgcaggcagatcatcccatcgtctgtgcagccctcagaggagaggagacctggagtgg

SEQ ID NO: 40534 - DNA, 80 bp, synthetic construct
  source 1..80: mol_type = other DNA
atgctgattggtccgtgggcgggcccagaaaaaccaccataagttctcactccagtctgcagaactggcagcccggctgt

SEQ ID NO: 40535 - DNA, 80 bp, synthetic construct
  source 1..80: mol_type = other DNA
tgccatgctcattggtgtccaaagtctggagggggctgaggtggcaggtggctggtgtgtcagcaccgcccctatcgtgc

SEQ ID NO: 40536 - DNA, 80 bp, synthetic construct
  source 1..80: mol_type = other DNA
cccaggtcagcagctgtggctgggtggctgcagctgctcccagtagtgtggggctcctgccccaccaacctggaaggggg

SEQ ID NO: 40537 - DNA, 80 bp, synthetic construct; identical to SEQ ID NO: 14007
  source 1..80: mol_type = other DNA

SEQ ID NO: 40538 - DNA, 80 bp, synthetic construct
  source 1..80: mol_type = other DNA
gcaagtgacagctcagctctgtactcctttaagaggtcagataaaaatggcatatcccaaagaacagttcttatttcaac

SEQ ID NO: 40539 - DNA, 80 bp, synthetic construct
  source 1..80: mol_type = other DNA
atggctgtcactgacacagcacttgacatattctctggcattggcaggtggttgttacatgtttattaaataaacaaatc

SEQ ID NO: 40540 - DNA, 80 bp, synthetic construct
  source 1..80: mol_type = other DNA
aaactaaggctgaggaagaagctcttacatctttgatggttttcttttttgcagatatcaagtctgtatctctagccgag

SEQ ID NO: 40541 - DNA, 80 bp, synthetic construct; identical to SEQ ID NO: 14008
  source 1..80: mol_type = other DNA

SEQ ID NO: 40542 - DNA, 80 bp, synthetic construct
  source 1..80: mol_type = other DNA
aatgtgacccctgtagggaggtcttctctgatcctaccttagtcaaaacagcaccttccacctttaccctgcttgatttt

SEQ ID NO: 40543 - DNA, 80 bp, synthetic construct
  source 1..80: mol_type = other DNA
gttctgcatggctagaggggcctcaggaaacttacaatcatggtgaaaagcgaaggggaagcaaggcacgtcttacatgg

SEQ ID NO: 40544 - DNA, 80 bp, synthetic construct
  source 1..80: mol_type = other DNA
gccaaaccatatcactccctcacttagaatgcgagggagggacttggtcttttttaccatcatatgcctagtgctttgaa

SEQ ID NO: 40545 - DNA, 80 bp, synthetic construct; identical to SEQ ID NO: 14009
  source 1..80: mol_type = other DNA

SEQ ID NO: 40546 - DNA, 80 bp, synthetic construct
  source 1..80: mol_type = other DNA
gccttttttctcccaaattcaggaggatatggcaaaaaaagtggtcgtagtaaaaaatggaaggagatactgacactgcc

SEQ ID NO: 40547 - DNA, 80 bp, synthetic construct
  source 1..80: mol_type = other DNA
cttcatgattcctctcaggaaaaaaaatcctttagattttctgatctgcagttataaagttggctgttgactttttcatt

SEQ ID NO: 40548 - DNA, 80 bp, synthetic construct; identical to SEQ ID NO: 14010
  source 1..80: mol_type = other DNA

SEQ ID NO: 40549 - DNA, 80 bp, synthetic construct
  source 1..80: mol_type = other DNA
gggaggccgaggtgggcggatcacgaggtcaggagatcgagaccacggtgaaaccccgtctctactaaaaatacaaaaaa

SEQ ID NO: 40550 - DNA, 80 bp, synthetic construct
  source 1..80: mol_type = other DNA
aaaaaaattattgagccaggcatggtggcacatacctgtaggtgcacctacttaggaggctgaggcaggaggatcccttg

SEQ ID NO: 40551 - DNA, 80 bp, synthetic construct
  source 1..80: mol_type = other DNA
ctgcaactgtaaagaatgagagttagctacaggtcctaacatgagcctaaggagtcagatacagaaggccgggtgtggtg

SEQ ID NO: 40552 - DNA, 80 bp, synthetic construct
  source 1..80: mol_type = other DNA
tgggaagctgaggcaggagaatggtgtgaacctggggagcttggagatcccaccactgcactccagcctgggtgacagaa

SEQ ID NO: 40553 - DNA, 80 bp, synthetic construct; identical to SEQ ID NO: 14011
  source 1..80: mol_type = other DNA

SEQ ID NO: 40554 - DNA, 80 bp, synthetic construct
  source 1..80: mol_type = other DNA
tttttgagacagagtctcgctgtgtcgccaggctggagtgcaatggcatgatctcggctcactgcaagctccgcctccca

SEQ ID NO: 40555 - DNA, 80 bp, synthetic construct
  source 1..80: mol_type = other DNA
cccaaagtgctgggattacagacctgagccaccgcgcctggccctcagtgtctttttttcatacagaagttttagtattt

SEQ ID NO: 40556 - DNA, 80 bp, synthetic construct; identical to SEQ ID NO: 14012
  source 1..80: mol_type = other DNA

SEQ ID NO: 40557 - DNA, 80 bp, synthetic construct
  source 1..80: mol_type = other DNA
cccattgatagccactcctgactccttcctgcccgctacctccagagctagacaactacaaatccactttctgtctatgt

SEQ ID NO: 40558 - DNA, 80 bp, synthetic construct
  source 1..80: mol_type = other DNA
ttcatcagttaatagacatttgagttgttttctacttttgcctgttatgaataatgctgctatgaatattcatgtactag

SEQ ID NO: 40559 - DNA, 80 bp, synthetic construct
  source 1..80: mol_type = other DNA
tgatggacattgggttgttccaagtttttggctgtgtgaatagtgttgctgggaacattggtgtgcaaatacctgtttga

SEQ ID NO: 40560 - DNA, 80 bp, synthetic construct; identical to SEQ ID NO: 14013
  source 1..80: mol_type = other DNA

SEQ ID NO: 40561 - DNA, 80 bp, synthetic construct
  source 1..80: mol_type = other DNA
ttgggtgtggaggcatgtgcctataatccaaggtactcaggaggctgaggcatgagaattgcttgaacccgggaggtaga

SEQ ID NO: 40562 - DNA, 80 bp, synthetic construct
  source 1..80: mol_type = other DNA
gtgttacattcccagtagcaatgtgttcagttgcttcacatctttcccaacgcttttgattttcctctttatttttcatt

SEQ ID NO: 40563 - DNA, 80 bp, synthetic construct
  source 1..80: mol_type = other DNA
tctttttgttgttgaggtataagatttctttctatgttctagatattagatgcttaacagataagcaggagaatcgcctg

SEQ ID NO: 40564 - DNA, 80 bp, synthetic construct
  source 1..80: mol_type = other DNA
ggcaaatactgttcttgacttttactgtatcgagtgagaactgtaaggcttagaacagcatgtggtggactgtaatgatt

SEQ ID NO: 40565 - DNA, 80 bp, synthetic construct; identical to SEQ ID NO: 14014
  source 1..80: mol_type = other DNA

SEQ ID NO: 40566 - DNA, 80 bp, synthetic construct
  source 1..80: mol_type = other DNA
gtctctactaaaatacaaaaagttagccgggcgtggtggcgcgtgcctgtagtcccagctacttgggaggctgaggcagg

SEQ ID NO: 40567 - DNA, 80 bp, synthetic construct
  source 1..80: mol_type = other DNA
gggcaatgatgtaggagtggagggactggttgtcttggtgtcatattatcttattaggacagaaatccctttagtctgaa

SEQ ID NO: 40568 - DNA, 80 bp, synthetic construct
  source 1..80: mol_type = other DNA
ttttttattttttatttttttgaaatggagtctctctctgtctcccaggctggactgcagtggcatgatcttggcttact

SEQ ID NO: 40569 - DNA, 80 bp, synthetic construct; identical to SEQ ID NO: 14015
  source 1..80: mol_type = other DNA

SEQ ID NO: 40570 - DNA, 80 bp, synthetic construct
  source 1..80: mol_type = other DNA
gaagcaagtgaccaatagaaaattggtggaatttagcagaaaatctctctcacttttgtaccagggttatgatccttcct

SEQ ID NO: 40571 - DNA, 80 bp, synthetic construct
  source 1..80: mol_type = other DNA
ttttcagaaaaacatttgcggctgttttgttgtttgcttccttccctcagatctctcccagtcctttcctttctggcact

SEQ ID NO: 40572 - DNA, 80 bp, synthetic construct
  source 1..80: mol_type = other DNA
ctcagcctcctgagtagctgggactacaggcatgtgccaccacacccaactaatttttgtatttttagtagagacggggt

SEQ ID NO: 40573 - DNA, 80 bp, synthetic construct; identical to SEQ ID NO: 14016
  source 1..80: mol_type = other DNA

SEQ ID NO: 40574 - DNA, 80 bp, synthetic construct
  source 1..80: mol_type = other DNA
tgatacctgtcgttatgaggtgacagctatgtgactgcagttacaggttatgtttttgtttttttgatggcagttgtgta

SEQ ID NO: 40575 - DNA, 80 bp, synthetic construct
  source 1..80: mol_type = other DNA
ccccctcatggcacatggcatggttgtttgccctatttcttgctcattaaatgaattagtggcatctgtatcagtcagga

SEQ ID NO: 40576 - DNA, 80 bp, synthetic construct
  source 1..80: mol_type = other DNA
cgtcctcaggcagaatttcttcctccaggaagactcatctctgttcttaacaccttccaactgattaggtcagagccacc

SEQ ID NO: 40577 - DNA, 80 bp, synthetic construct; identical to SEQ ID NO: 14017
  source 1..80: mol_type = other DNA

SEQ ID NO: 40578 - DNA, 80 bp, synthetic construct
  source 1..80: mol_type = other DNA
tagtacagacgggttttcactatgttggccaggctggtctccaactcccagcctcagatgatctgcctgcctcggcctcc

SEQ ID NO: 40579 - DNA, 80 bp, synthetic construct
  source 1..80: mol_type = other DNA
tttcccaaagaagagctgtagactcttgatcagtagagttggtctgtgactctgaggatatcaaaccaaataatttgaaa

SEQ ID NO: 40580 - DNA, 80 bp, synthetic construct; identical to SEQ ID NO: 14018
  source 1..80: mol_type = other DNA

SEQ ID NO: 40581 - DNA, 80 bp, synthetic construct
  source 1..80: mol_type = other DNA
taattagagtgcatagccatttttactttgttagataagacgtaacatatgttaaaagctttaatttggctgggtgtgat

SEQ ID NO: 40582 - DNA, 80 bp, synthetic construct
  source 1..80: mol_type = other DNA
tacttgggaggtgaggtgggaggatcgcttgagcccaggagattgaggtggctgtgagccaaggtcatgccactgcattc

SEQ ID NO: 40583 - DNA, 80 bp, synthetic construct
  source 1..80: mol_type = other DNA
ttgctacaaaaaagaaaaaaaaaattagctaagcatggtggcgtgcacctgtgttctcagctacttgggaggctcaggtg

SEQ ID NO: 40584 - DNA, 80 bp, synthetic construct
  source 1..80: mol_type = other DNA
ttgcattttgtttgatgtcatgaggaaactaacaattagatctcttagaaaattgattcagtgtatttaaagtttcagaa

SEQ ID NO: 40585 - DNA, 80 bp, synthetic construct; identical to SEQ ID NO: 14019
  source 1..80: mol_type = other DNA

SEQ ID NO: 40586 - DNA, 80 bp, synthetic construct
  source 1..80: mol_type = other DNA
aggcgtggtggtgcatgcctgtaatcccagctaatagggaggctgaagcatgagaatcacttgaacctgggaggtaaagg

SEQ ID NO: 40587 - DNA, 80 bp, synthetic construct
  source 1..80: mol_type = other DNA
agtgacttacccaaggttacacacctagtaagtgtcagaaccaggaatcgaacatgtggagaatggaattagtgaatagt

SEQ ID NO: 40588 - DNA, 80 bp, synthetic construct; identical to SEQ ID NO: 14020
  source 1..80: mol_type = other DNA

SEQ ID NO: 40589 - DNA, 80 bp, synthetic construct
  source 1..80: mol_type = other DNA
gcctctgcctcccgggttcaagtgattcacatgcctcagccacctgggtagcttggattacaggtgtgcaccaccacact

SEQ ID NO: 40590 - DNA, 80 bp, synthetic construct
  source 1..80: mol_type = other DNA
ctttttaaattagctcccttttctttcttcacctcttctgaagaaatacccatatagcaagggagggcatcaagaagaaa

SEQ ID NO: 40591 - DNA, 80 bp, synthetic construct
  source 1..80: mol_type = other DNA
acatgtgcaggtttgttacgtaggtaaacttgcatcatggggtttgttgtacagattatttcatcacccaggtattaagc

SEQ ID NO: 40592 - DNA, 80 bp, synthetic construct; identical to SEQ ID NO: 14021
  source 1..80: mol_type = other DNA

SEQ ID NO: 40593 - DNA, 80 bp, synthetic construct
  source 1..80: mol_type = other DNA
gctcacagttttagaggctaggatgcccagttcaaggtgttgttgacctaaaatgaagaagctgagacacaaaatgtaat

SEQ ID NO: 40594 - DNA, 80 bp, synthetic construct
  source 1..80: mol_type = other DNA
attaactggatgtggtggtgcatgcctataatcccagctccttgggaggctgaggtaggagaatcacctgaacctgggag

SEQ ID NO: 40595 - DNA, 80 bp, synthetic construct
  source 1..80: mol_type = other DNA
ctggcagggttttaaaggcaaagggaacaaggagtgagctgatacaatgttgtttgacccgaattctcactggtttaaga

SEQ ID NO: 40596 - DNA, 80 bp, synthetic construct; identical to SEQ ID NO: 14022
  source 1..80: mol_type = other DNA

SEQ ID NO: 40597 - DNA, 80 bp, synthetic construct
  source 1..80: mol_type = other DNA
cacttggtggaagtggaaagagagggattgcttgcacacatgtctgagcatgtggacacaaaagggggcaaacctactcc

SEQ ID NO: 40598 - DNA, 80 bp, synthetic construct
  source 1..80: mol_type = other DNA
atggtgaaaccccgtctctactaacaatacaaaaattagccaggcatggtggcaggtgcctatgatcccagctactcagg

SEQ ID NO: 40599 - DNA, 80 bp, synthetic construct
  source 1..80: mol_type = other DNA
attaaatgtcatcatgagctttgtgggggatagacaaatgtttagataatagcacttggtaatagagagatgtttatggg

SEQ ID NO: 40600 - DNA, 80 bp, synthetic construct
  source 1..80: mol_type = other DNA
attgtagtttttccttttcttgtcttttattttaaaacagcaagaataaacttctctttcttttacatgctaaaaaggga

SEQ ID NO: 40601 - DNA, 80 bp, synthetic construct; identical to SEQ ID NO: 14023
  source 1..80: mol_type = other DNA

SEQ ID NO: 40602 - DNA, 80 bp, synthetic construct
  source 1..80: mol_type = other DNA
atgattatcttaataaaaatagaaaaagtatttgataaaatccacaccccttcgtgataaaagcactgagcaaactagga

SEQ ID NO: 40603 - DNA, 80 bp, synthetic construct
  source 1..80: mol_type = other DNA
ctttgaggggaagggaccaacgttcaaatgatagcacttgataatagagagagagagacgtttatgggctgctcagcctg

SEQ ID NO: 40604 - DNA, 80 bp, synthetic construct
  source 1..80: mol_type = other DNA
aaccccatctctactaaaaatacaaatattagccggccatggtggtgcacgcctatagtcccagctactgaggaggctga

SEQ ID NO: 40605 - DNA, 80 bp, synthetic construct; identical to SEQ ID NO: 14024
  source 1..80: mol_type = other DNA

SEQ ID NO: 40606 - DNA, 80 bp, synthetic construct
  source 1..80: mol_type = other DNA
agctgggcatggtggtaggcacctgtaatcccagctacttggaagctgaggcaggagaattgcttgaacccgggaggagg

SEQ ID NO: 40607 - DNA, 80 bp, synthetic construct
  source 1..80: mol_type = other DNA
aaattcacacatacacacataaagaaaaagactgttggagctaataagtgagtctggtaaggctgcaagatactaagtca

SEQ ID NO: 40608 - DNA, 80 bp, synthetic construct
  source 1..80: mol_type = other DNA
gcactgaaaaaaattaaagaagatctcaagaaatggaaagacatctcctgttcgtggatcagaagacttaatattgttaa

SEQ ID NO: 40609 - DNA, 80 bp, synthetic construct; identical to SEQ ID NO: 14025
  source 1..80: mol_type = other DNA

SEQ ID NO: 40610 - DNA, 80 bp, synthetic construct
  source 1..80: mol_type = other DNA
ctctaacagaatacctgagattgggtaatttataaagaacagagatttatttcttacagttctgaaagccggaagtccaa

SEQ ID NO: 40611 - DNA, 80 bp, synthetic construct
  source 1..80: mol_type = other DNA
gagattgcagcatgaatccattcctgaggggcagagtcctcatgatcttatcacctttttaaaggtcccacctctcaaca

SEQ ID NO: 40612 - DNA, 80 bp, synthetic construct; identical to SEQ ID NO: 14026
  source 1..80: mol_type = other DNA

SEQ ID NO: 40613 - DNA, 80 bp, synthetic construct
  source 1..80: mol_type = other DNA
cttcaaagaacactatcaagaagtgaaaacataaccaacagaatggggaaaaggatttgtaaatcaaatactggtaaggg

SEQ ID NO: 40614 - DNA, 80 bp, synthetic construct
  source 1..80: mol_type = other DNA
tgtaattttcaacacagaaaaagaagcatatttctgcaaaatccaccctcccttccctctccaccagtggtctttcctat

SEQ ID NO: 40615 - DNA, 80 bp, synthetic construct
  source 1..80: mol_type = other DNA
ccatacttcaggtcaccttagcttacctccctctctctcatggatattagaaacactgcttttcctttgtgtgagaataa

SEQ ID NO: 40616 - DNA, 80 bp, synthetic construct; identical to SEQ ID NO: 14027
  source 1..80: mol_type = other DNA

SEQ ID NO: 40617 - DNA, 80 bp, synthetic construct
  source 1..80: mol_type = other DNA
agtagctgggactacaggcacgtgccattatgcccagctaattttttttttgtatttttagtagagatggggtttcacca

SEQ ID NO: 40618 - DNA, 80 bp, synthetic construct
  source 1..80: mol_type = other DNA
catagaaagaaaggactggagagtccagcagggtgtgtgtgtttcagtcttggctctccccttggtgatgcaggtgcact

SEQ ID NO: 40619 - DNA, 80 bp, synthetic construct
  source 1..80: mol_type = other DNA
atatatgtgtatgtgtatatatatgtatatatgtgtatgtgtatatatatgtatatatgtgtatgtgtatatatatacat

SEQ ID NO: 40620 - DNA, 80 bp, synthetic construct
  source 1..80: mol_type = other DNA
ggctggagtggagtggcgtgatcttggctcactgcaacctctgcctcctgggttcaagtgattcccctgcctcagcctcc

SEQ ID NO: 40621 - DNA, 80 bp, synthetic construct; identical to SEQ ID NO: 14028
  source 1..80: mol_type = other DNA

SEQ ID NO: 40622 - DNA, 80 bp, synthetic construct
  source 1..80: mol_type = other DNA
tctaattacaaattaggtggacaattgagcatgacttgggtattttttcattgaatctggacagtggttttgtcatgtgt

SEQ ID NO: 40623 - DNA, 80 bp, synthetic construct
  source 1..80: mol_type = other DNA
tgtgtttaggaatctatcctatagaaatacacatgtatagagacgttcacggtggtgctgtttgcgtgggaaaactggca

SEQ ID NO: 40624 - DNA, 80 bp, synthetic construct; identical to SEQ ID NO: 14029
  source 1..80: mol_type = other DNA

SEQ ID NO: 40625 - DNA, 80 bp, synthetic construct
  source 1..80: mol_type = other DNA
ccaagatcatgcactgcactccagcctggaccacagaacaagactccatctcaaaaaaactagccaggtgtggtggcatg

SEQ ID NO: 40626 - DNA, 80 bp, synthetic construct
  source 1..80: mol_type = other DNA
gtgtgtgtgtttgatttttaattttaattgtgataaaaaaacacgtaacatgaaggttaccaacgtcagcatttgtaagt

SEQ ID NO: 40627 - DNA, 80 bp, synthetic construct
  source 1..80: mol_type = other DNA
tgactactctagggaccatatataagtggaatcatacaggatttgtcactttgtgactggcttctttatttatttttgag

SEQ ID NO: 40628 - DNA, 80 bp, synthetic construct
  source 1..80: mol_type = other DNA
agtaaagacagggtttcaccatgttggccaggctggtcttgaactcctgacctcaactgatccacataactctgcctccc

SEQ ID NO: 40629 - DNA, 80 bp, synthetic construct; identical to SEQ ID NO: 14030
  source 1..80: mol_type = other DNA

SEQ ID NO: 40630 - DNA, 80 bp, synthetic construct
  source 1..80: mol_type = other DNA
ctcagcctcccaagtagctacctaccacgcctggctaatagttttgtatttttagtagagacggagtttcaccatgttgg

SEQ ID NO: 40631 - DNA, 80 bp, synthetic construct
  source 1..80: mol_type = other DNA
ggggtggagggtccaggtggcactttgactttcattttatacactttgtgtttcatttttttacaataagcattaggttc

SEQ ID NO: 40632 - DNA, 80 bp, synthetic construct; identical to SEQ ID NO: 14031
  source 1..80: mol_type = other DNA

SEQ ID NO: 40633 - DNA, 80 bp, synthetic construct
  source 1..80: mol_type = other DNA
ctgataacataaacagcagatgaacacatattttgtatatgtattatatgctatactcttacaataaagtatgctagaaa

SEQ ID NO: 40634 - DNA, 80 bp, synthetic construct
  source 1..80: mol_type = other DNA
tggcagaggcggaagaaaatacatacataagtggctcctggcgtctcaacccgcattgttcaagggtcaactgtacttta

SEQ ID NO: 40635 - DNA, 80 bp, synthetic construct
  source 1..80: mol_type = other DNA
aaagatttttttcagacctaggtactcaccaaaaacatcttttttcagggcatttccaaggagaattccgaggtaaagca

SEQ ID NO: 40636 - DNA, 80 bp, synthetic construct; identical to SEQ ID NO: 14032
  source 1..80: mol_type = other DNA

SEQ ID NO: 40637 - DNA, 80 bp, synthetic construct
  source 1..80: mol_type = other DNA
ggtggctcacgccggtaatcccagcactttgggaggccgaggcgggcagatcgcttgaggccaggagttcaagaccagcc

SEQ ID NO: 40638 - DNA, 80 bp, synthetic construct
  source 1..80: mol_type = other DNA
actccagcctgggcaacacagcgagactctgtctcataaataaataaataaataaaaataaaaaacaaggctttctctct

SEQ ID NO: 40639 - DNA, 80 bp, synthetic construct; identical to SEQ ID NO: 14033
  source 1..80: mol_type = other DNA

SEQ ID NO: 40640 - DNA, 80 bp, synthetic construct
  source 1..80: mol_type = other DNA
aatcgcctgaacccaggaggtggaggttgtggtgagccaagatcacgccattgcactccagcctggtcaacaagagcaaa

SEQ ID NO: 40641 - DNA, 80 bp, synthetic construct
  source 1..80: mol_type = other DNA
gcactttgggaggccaaggcagaaggattgcgtgacctcaggagttcgagaccagcctggacaacatggtgaaaccctgt

SEQ ID NO: 40642 - DNA, 80 bp, synthetic construct
  source 1..80: mol_type = other DNA
aaaagaaaagagatgttggctccatggctccatttgattgcttctctggtatggcagacaggacaggcttggtctttgct

SEQ ID NO: 40643 - DNA, 80 bp, synthetic construct
  source 1..80: mol_type = other DNA
tctcctgggcatgtacacaccctaaactctttcttgtacatgtgcactaagtgacatgtaatagtaataacacaacaatt

SEQ ID NO: 40644 - DNA, 80 bp, synthetic construct; identical to SEQ ID NO: 14034
  source 1..80: mol_type = other DNA

SEQ ID NO: 40645 - DNA, 80 bp, synthetic construct
  source 1..80: mol_type = other DNA
ccctcactcccaagaagggaatgcatccttctatttcactgcttttttcattcattctatttcacttctgttttcactta

SEQ ID NO: 40646 - DNA, 80 bp, synthetic construct
  source 1..80: mol_type = other DNA
tctagagttgcccataactacctaagaggggaaccatttgaagaataccaagaaagctcatatttttctcagtttttaca

SEQ ID NO: 40647 - DNA, 80 bp, synthetic construct
  source 1..80: mol_type = other DNA
ctctaatacaacagaaaaaaagaaaagagacctcaataaaagaagtgttaacttctcacaatgcatactgattgacgtag

SEQ ID NO: 40648 - DNA, 80 bp, synthetic construct; identical to SEQ ID NO: 14035
  source 1..80: mol_type = other DNA

SEQ ID NO: 40649 - DNA, 80 bp, synthetic construct
  source 1..80: mol_type = other DNA
gaaatgtgtgtacaacgcttatagcacaatgtttggtgcacaaaataagtgcttaaaaagtgttagctgtgggccgggcg

SEQ ID NO: 40650 - DNA, 80 bp, synthetic construct
  source 1..80: mol_type = other DNA
acttagccaggcacggtggcatgcacctgtactcccagctacttgggaggctgaggcaggagaaatcgcctgaacccagg

SEQ ID NO: 40651 - DNA, 80 bp, synthetic construct; identical to SEQ ID NO: 14036
  source 1..80: mol_type = other DNA

SEQ ID NO: 40652 - DNA, 80 bp, synthetic construct
  source 1..80: mol_type = other DNA
ttaagattaattggccgggtggtggctcacgcctataatcccagcactttgggaggctgaggcgggtgaatcatgaggtc

SEQ ID NO: 40653 - DNA, 80 bp, synthetic construct
  source 1..80: mol_type = other DNA
tagatcgtgccactgcactccagccctggcgacagagtgagactccatctcaaaaaaaaaaaaaaaaaaaaagatgaatt

SEQ ID NO: 40654 - DNA, 80 bp, synthetic construct
  source 1..80: mol_type = other DNA
aatgtgagacctgaaacttgtttttctcattgattaggcaacccgtaacaaagaacacatttagacattacagagttcta

SEQ ID NO: 40655 - DNA, 80 bp, synthetic construct
  source 1..80: mol_type = other DNA
ctgtgagaatccacatggaattttgagcaaaaggtttttaagaatcccttctcttggtgacttcaccttttacctcatag

SEQ ID NO: 40656 - DNA, 80 bp, synthetic construct; identical to SEQ ID NO: 14037
  source 1..80: mol_type = other DNA

SEQ ID NO: 40657 - DNA, 80 bp, synthetic construct
  source 1..80: mol_type = other DNA
attctcctgcctcagcctcccgagtagctggtattacaggcatgcgccaccacacctagctaattttcgtatttttagta

SEQ ID NO: 40658 - DNA, 80 bp, synthetic construct
  source 1..80: mol_type = other DNA
tgtagttggtggatggagaacagcagcagttctggtctggggatttaaagagatattaattaccttactagttacctgga

SEQ ID NO: 40659 - DNA, 80 bp, synthetic construct; identical to SEQ ID NO: 14038
  source 1..80: mol_type = other DNA

SEQ ID NO: 40660 - DNA, 80 bp, synthetic construct
  source 1..80: mol_type = other DNA
ctccatgatagatatttctgtaagaaatccaccctctgtttgaatatgtcctagaacaggaaagtcattttcttacttgg

SEQ ID NO: 40661 - DNA, 80 bp, synthetic construct
  source 1..80: mol_type = other DNA
atataatagggacatgttagcaaattttagctattgtgaaagacctggtgctgggcgcggtggctcacgcctgtaatcct

SEQ ID NO: 40662 - DNA, 80 bp, synthetic construct
  source 1..80: mol_type = other DNA
ttactttttaacagatttacttgggttcccaaacaaatgattggctgcacgaataaagcatggcagtttcccacagactt

SEQ ID NO: 40663 - DNA, 80 bp, synthetic construct; identical to SEQ ID NO: 14039
  source 1..80: mol_type = other DNA

SEQ ID NO: 40664 - DNA, 80 bp, synthetic construct
  source 1..80: mol_type = other DNA
gcacaatggtaaaggaattgagtagacatctctgctgtcatggttttaggccacagactgtagtggaaagagcacgtact

SEQ ID NO: 40665 - DNA, 80 bp, synthetic construct
  source 1..80: mol_type = other DNA
tgcctggcactcttgtctgctttccattccctttctctgatttgcccattccacttagaataatttgttttaaattaacg

SEQ ID NO: 40666 - DNA, 80 bp, synthetic construct
  source 1..80: mol_type = other DNA
gattttttaaaaggaggttaggaaatattacctattttacaatacgagaccagttttgccatgaaaggctggagtggtgg

SEQ ID NO: 40667 - DNA, 80 bp, synthetic construct
  source 1..80: mol_type = other DNA
ggcccaaaatcaaatagagcaaaatattaacagtcattatcttggaattacgggtgagtttttatcactgtccttattac

SEQ ID NO: 40668 - DNA, 80 bp, synthetic construct; identical to SEQ ID NO: 14040
  source 1..80: mol_type = other DNA

SEQ ID NO: 40669 - DNA, 80 bp, synthetic construct
  source 1..80: mol_type = other DNA
caggagttcaagaccagcctggccaaaatggtgaaatcccgtctttactaaaaatacaagaaaaattagccaggcatggt

SEQ ID NO: 40670 - DNA, 80 bp, synthetic construct
  source 1..80: mol_type = other DNA
gtagctggggctacaggcacccgccaccatgcctagttaatttttttgtttttttatttttcgtagagacggggtgtcgc

SEQ ID NO: 40671 - DNA, 80 bp, synthetic construct
  source 1..80: mol_type = other DNA
tacacatatggggacatttaaaaattaaacatttaccgtgatcacctatgccaactagttccatttgtacactgtcttag

SEQ ID NO: 40672 - DNA, 80 bp, synthetic construct
  source 1..80: mol_type = other DNA
aagcaaagagcttcctttgtgtggcctaagaaatgccaggtggacataaacctcctttattttgctgtttaaactaggtt

SEQ ID NO: 40673 - DNA, 80 bp, synthetic construct; identical to SEQ ID NO: 14041
  source 1..80: mol_type = other DNA

SEQ ID NO: 40674 - DNA, 80 bp, synthetic construct
  source 1..80: mol_type = other DNA
attcaaaccttagaaaacatagaaggagtgatactgcttctaacttctggtttgttataaatctgtagtcccccgcctcc

SEQ ID NO: 40675 - DNA, 80 bp, synthetic construct
  source 1..80: mol_type = other DNA
actgtgacttggctgtgcttgaggataccttctctctctctctctcttttttttttttttttttgacacagggtttcgct

SEQ ID NO: 40676 - DNA, 80 bp, synthetic construct; identical to SEQ ID NO: 14042
  source 1..80: mol_type = other DNA

SEQ ID NO: 40677 - DNA, 80 bp, synthetic construct
  source 1..80: mol_type = other DNA
aggttgcagtgagctgagattgcaccaccgcactccagcctgggcaacagagcgagactccgtttcaaaaaaaagagaga

SEQ ID NO: 40678 - DNA, 80 bp, synthetic construct
  source 1..80: mol_type = other DNA
ctggcctcaatctgctttccgtcttttcctttttctgggaagtttaccgctaggccctcaactagcatatcccaattgta

SEQ ID NO: 40679 - DNA, 80 bp, synthetic construct
  source 1..80: mol_type = other DNA
tagcagctactgaagtatgaagactggttgaagggagagtgtgaacgagaatttataaaatgatttgtagtgttagagct

SEQ ID NO: 40680 - DNA, 80 bp, synthetic construct
  source 1..80: mol_type = other DNA
cgaggcaggcgtcaggagatcgagaccctcctggctaacacagtgaaaccccatctctactaaaaatacaaagaattagc

SEQ ID NO: 40681 - DNA, 80 bp, synthetic construct; identical to SEQ ID NO: 14043
  source 1..80: mol_type = other DNA

SEQ ID NO: 40682 - DNA, 80 bp, synthetic construct
  source 1..80: mol_type = other DNA
cagagtctcgcactgtctcccgggctggagtgcagtggcgcgatcttggctcactgcaacatccggctcccgggctcaag

SEQ ID NO: 40683 - DNA, 80 bp, synthetic construct
  source 1..80: mol_type = other DNA
atgctggggattacaggtgtgagccaccaagcctggcctctacaaaaaaaattttttttaaaaggccaggcactgtggct

SEQ ID NO: 40684 - DNA, 80 bp, synthetic construct; identical to SEQ ID NO: 14044
  source 1..80: mol_type = other DNA

SEQ ID NO: 40685 - DNA, 80 bp, synthetic construct
  source 1..80: mol_type = other DNA
ttattgcccactgcactccagcctgggtgacagagtgagatcccatctcaaaaacaaagcaaaacaaaaaaaaaaataca

SEQ ID NO: 40686 - DNA, 80 bp, synthetic construct
  source 1..80: mol_type = other DNA
tctccttccctatggtgttttctccctgcttaacctagagacatttttctccttctgtgatggtgtttaccccctgctta

SEQ ID NO: 40687 - DNA, 80 bp, synthetic construct
  source 1..80: mol_type = other DNA
cagtctgtggacaagttaaattagtcatccactttcctgattaaaaactccagtggccacctgccactctgagaataaaa

SEQ ID NO: 40688 - DNA, 80 bp, synthetic construct
  source 1..80: mol_type = other DNA
tctgttggatggtttctttgcattggttcatctgtcatctgtaactgcccaggcctcctccaccacgatattaggacaga

SEQ ID NO: 40689 - DNA, 80 bp, synthetic construct; identical to SEQ ID NO: 14045
  source 1..80: mol_type = other DNA

SEQ ID NO: 40690 - DNA, 80 bp, synthetic construct
  source 1..80: mol_type = other DNA
agagcttttgatagaagctaatgcccagtcatgcttaaaaactcgaagcaaaccaggtacagaaaggaacttccttcaga

SEQ ID NO: 40691 - DNA, 80 bp, synthetic construct
  source 1..80: mol_type = other DNA
agtgcagtaaggtaaaggaaaaagtgaaagggattaaggttagagaaaagaagaaaaaaggttaaaaaaaagccctcatc

SEQ ID NO: 40692 - DNA, 80 bp, synthetic construct
  source 1..80: mol_type = other DNA
acaactcattattttcgaacaacatcattgtatgtggagacattcccagatttttagataacctattaaggatttaacca

SEQ ID NO: 40693 - DNA, 80 bp, synthetic construct; identical to SEQ ID NO: 14046
  source 1..80: mol_type = other DNA

SEQ ID NO: 40694 - DNA, 80 bp, synthetic construct
  source 1..80: mol_type = other DNA
aacatggtgaaacctcatctctactataaatacaaaaattagccgggcgtggtgacaggtgcctataatcccagctactc

SEQ ID NO: 40695 - DNA, 80 bp, synthetic construct
  source 1..80: mol_type = other DNA
attggaagacccgatgctgtaaagatgctggttttccctaattgatctgtagattaaatgaattgaatgcagccccaatc

SEQ ID NO: 40696 - DNA, 80 bp, synthetic construct
  source 1..80: mol_type = other DNA
caaattaagaccgcagtaagagactactccaccagcattattcaaactaaaaagattgacagcacaaaatgttggaagga

SEQ ID NO: 40697 - DNA, 80 bp, synthetic construct; identical to SEQ ID NO: 14047
  source 1..80: mol_type = other DNA

SEQ ID NO: 40698 - DNA, 80 bp, synthetic construct
  source 1..80: mol_type = other DNA
gttctgtttttatgatgttgctgtctttaggttagtttagcctacgcttatgaaaccaaagatgccttgtgcttggtgct

SEQ ID NO: 40699 - DNA, 80 bp, synthetic construct
  source 1..80: mol_type = other DNA
atggagcctgcaagtcttggagccggtttctcccagccctaggcttccctggttcacactggctgcttccaggatgggca

SEQ ID NO: 40700 - DNA, 80 bp, synthetic construct
  source 1..80: mol_type = other DNA
tcactgcagttcgagtgattctcctgcctcagactcccaagtagctgggactacaggcacccgccaccatgcccagctaa

SEQ ID NO: 40701 - DNA, 80 bp, synthetic construct; identical to SEQ ID NO: 14048
  source 1..80: mol_type = other DNA

SEQ ID NO: 40702 - DNA, 80 bp, synthetic construct
  source 1..80: mol_type = other DNA
tttagttttaggaaaaaacaattccccctcctgtcccttaaatgctggagttcctgggctctgagtctcttctcagtcac

SEQ ID NO: 40703 - DNA, 80 bp, synthetic construct
  source 1..80: mol_type = other DNA
aaatcctgctcaacaggatgaaagggggaaaaaaaagagaaaatattcagaaaaaaaaggatgcttgcgtctgtattgaa

SEQ ID NO: 40704 - DNA, 80 bp, synthetic construct; identical to SEQ ID NO: 14049
  source 1..80: mol_type = other DNA

SEQ ID NO: 40705 - DNA, 80 bp, synthetic construct
  source 1..80: mol_type = other DNA
gtcctcacttcattgtacctttgcacaaggtgttcctgtgtgggtgccactctccacccagcccctcttcctgtcattct

SEQ ID NO: 40706 - DNA, 80 bp, synthetic construct
  source 1..80: mol_type = other DNA
tcagacgatgagcttcttgggagtccttgatctcatttcttcctattctgatggacctttggcttctccttatcttatat

SEQ ID NO: 40707 - DNA, 80 bp, synthetic construct
  source 1..80: mol_type = other DNA
ttgttgccattgcttagaggtaagagtctggtggtattggaccatggaacacacccataggagatttgattcttttgtta

SEQ ID NO: 40708 - DNA, 80 bp, synthetic construct
  source 1..80: mol_type = other DNA
tgtctgccccatccaccgctgtgtccacgggactcaccatcagtaggtatcactaagcatttgttgaatgaatgaccgat

SEQ ID NO: 40709 - DNA, 80 bp, synthetic construct; identical to SEQ ID NO: 14050
  source 1..80: mol_type = other DNA

SEQ ID NO: 40710 - DNA, 80 bp, synthetic construct
  source 1..80: mol_type = other DNA
ccaacttctgaataattgggccttttgttgttgtttcttgtagagacttgaagcctgagaatattctccttgatgatcgt

SEQ ID NO: 40711 - DNA, 80 bp, synthetic construct
  source 1..80: mol_type = other DNA
tactgacaatttggtcattcccctgtgtttaggcaagaagcagagatggtcataattttcaattaatgattgagttttag

SEQ ID NO: 40712 - DNA, 80 bp, synthetic construct
  source 1..80: mol_type = other DNA
taatttttaaattttttttgtagagataggggtcatgctatgttgcccaggctgttctcaaactactgccctcaagcagt

SEQ ID NO: 40713 - DNA, 80 bp, synthetic construct; identical to SEQ ID NO: 14051
  source 1..80: mol_type = other DNA

SEQ ID NO: 40714 - DNA, 80 bp, synthetic construct
  source 1..80: mol_type = other DNA
ttgcactgctggggagggtggttgtgctcacacatagctcacaagcagtgctgggagagagcttctttcaagtgagtttt

SEQ ID NO: 40715 - DNA, 80 bp, synthetic construct
  source 1..80: mol_type = other DNA
atctaattcatgtatgacaccctgccctgtgaggaaggagggtactggaattctcatttaatggaaggcgataccaagat

SEQ ID NO: 40716 - DNA, 80 bp, synthetic construct; identical to SEQ ID NO: 14052
  source 1..80: mol_type = other DNA

SEQ ID NO: 40717 - DNA, 80 bp, synthetic construct
  source 1..80: mol_type = other DNA
ggagcacactgataacctttttctgtgtttttaggagatttttctgtgtagttctctcttctttagaactttaccccaca

SEQ ID NO: 40718 - DNA, 80 bp, synthetic construct
  source 1..80: mol_type = other DNA
gggaccacagtcctctgatgccgatgaccacagttttcctttttttaaagttctttttaaggtcagggtctctctatgct

SEQ ID NO: 40719 - DNA, 80 bp, synthetic construct
  source 1..80: mol_type = other DNA
caccaccacatccagcagcgattaaggatattttagttgttacggtgcaattatgcctcactgcagttttgacctccagg

SEQ ID NO: 40720 - DNA, 80 bp, synthetic construct
  source 1..80: mol_type = other DNA
agagttcgagaccagcctggccaacatggtgaaaccctgtctctactaaaaatacaaaaattagccgggcgtggcagtgc

SEQ ID NO: 40721 - DNA, 80 bp, synthetic construct; identical to SEQ ID NO: 14053
  source 1..80: mol_type = other DNA

SEQ ID NO: 40722 - DNA, 80 bp, synthetic construct
  source 1..80: mol_type = other DNA
tgaaaccctgtctctactaaaaatacaaaaattagctgggtgtggtaatacatgcctgtagtcccagctacttgaggggc

SEQ ID NO: 40723 - DNA, 80 bp, synthetic construct
  source 1..80: mol_type = other DNA
tcactcagtatcattcccttctgtgcggttaaaccaccagctggatacaccattaggttcattttcttaattttgctttc

SEQ ID NO: 40724 - DNA, 80 bp, synthetic construct
  source 1..80: mol_type = other DNA
aggcgcccgccaccacgcccggctaattttttatattttttttagtagagacggggtttcaccgtgttagccaggatggt

SEQ ID NO: 40725 - DNA, 80 bp, synthetic construct; identical to SEQ ID NO: 14054
  source 1..80: mol_type = other DNA

SEQ ID NO: 40726 - DNA, 80 bp, synthetic construct
  source 1..80: mol_type = other DNA
aaagtagtagaccacatgtattgtcctccacgtggctatttcactgaatatacggtggagatggctctgcaacactcatg

SEQ ID NO: 40727 - DNA, 80 bp, synthetic construct
  source 1..80: mol_type = other DNA
ttgggcacatgtaatttcctatttcgttgaatgtatccttgatagagtcctagaagtgggtgaattcatacgcaatttgt

SEQ ID NO: 40728 - DNA, 80 bp, synthetic construct
  source 1..80: mol_type = other DNA
ttaagttgcatttctcagtttaaaaatccatttttataagaaaaataagacaatgatacgaaaaaaataagtcacaacat

SEQ ID NO: 40729 - DNA, 80 bp, synthetic construct; identical to SEQ ID NO: 14055
  source 1..80: mol_type = other DNA

SEQ ID NO: 40730 - DNA, 80 bp, synthetic construct
  source 1..80: mol_type = other DNA
cagactgttttaaaatgactacagtgccttggagggcatgtcgcatatttttagtttttagcaaacatttattggttatt

SEQ ID NO: 40731 - DNA, 80 bp, synthetic construct
  source 1..80: mol_type = other DNA
ataagttgaagatagtgtccgcttccagggctggctaatctttctacacactcaacagaatgttttcgataatttcgtat

SEQ ID NO: 40732 - DNA, 80 bp, synthetic construct
  source 1..80: mol_type = other DNA
tttaaaaatctttttttatagagacagggtcttgtcatgtttcccaggctggtctcaaaatgtggaactcaagtaatcct

SEQ ID NO: 40733 - DNA, 80 bp, synthetic construct
  source 1..80: mol_type = other DNA
ttccctgactctattaccatttgttctcaagagaataactccatatcattcatgtgtagctgtccctgtgtatagtactg

SEQ ID NO: 40734 - DNA, 80 bp, synthetic construct; identical to SEQ ID NO: 14056
  source 1..80: mol_type = other DNA

SEQ ID NO: 40735 - DNA, 80 bp, synthetic construct
  source 1..80: mol_type = other DNA
ttgttgttacggtgtcattacttcccccgtgacctgtgtaataacatatttgaacacacaggacacatccggatttcaga

SEQ ID NO: 40736 - DNA, 80 bp, synthetic construct
  source 1..80: mol_type = other DNA
ggcctcggtttggacacactagtagatggcgcagtggtgttttgaatctctaacctgtcagagtgttgaggctgctgggg

SEQ ID NO: 40737 - DNA, 80 bp, synthetic construct
  source 1..80: mol_type = other DNA
tcaggaaatcaccccactctggttattccaaagatccgggggcagtgccagccaacccccaggggtggcctctgagagcc

SEQ ID NO: 40738 - DNA, 80 bp, synthetic construct; identical to SEQ ID NO: 14057
  source 1..80: mol_type = other DNA

SEQ ID NO: 40739 - DNA, 80 bp, synthetic construct
  source 1..80: mol_type = other DNA
acaacttttttttttttttgagacagagtctcactcagtcgcccaggctagaatgcagtggcacaatcttggctcactgc

SEQ ID NO: 40740 - DNA, 80 bp, synthetic construct
  source 1..80: mol_type = other DNA
atctgcctgccttcgcctcccaaaatgctgggattataggtgtgagccaccgctcccagccttaacataatgtttttaag

SEQ ID NO: 40741 - DNA, 80 bp, synthetic construct
  source 1..80: mol_type = other DNA
tgtcaataatgaaaagtatacgtttagtcccgattggtggggacttggctgtctgatctatgaaatgattcagggacatt

SEQ ID NO: 40742 - DNA, 80 bp, synthetic construct; identical to SEQ ID NO: 14058
  source 1..80: mol_type = other DNA

SEQ ID NO: 40743 - DNA, 80 bp, synthetic construct
  source 1..80: mol_type = other DNA
cagcagggaggacacgtgtgttcaggaggctcaggtccacctgtctcctggcccagcagggaggacacgcgtgttcagga

SEQ ID NO: 40744 - DNA, 80 bp, synthetic construct
  source 1..80: mol_type = other DNA
acaaaaagagccagtgagaaaagtttccagacatgatctggaaatgacttaattgggttttgattggagcaaaacacagt

SEQ ID NO: 40745 - DNA, 80 bp, synthetic construct
  source 1..80: mol_type = other DNA
tagacataaaaccaatctttcatgtattttgaggtgggtaagggtttagccacctgccagggattgtagtcccagagaca

SEQ ID NO: 40746 - DNA, 80 bp, synthetic construct; identical to SEQ ID NO: 14059
  source 1..80: mol_type = other DNA

SEQ ID NO: 40747 - DNA, 80 bp, synthetic construct
  source 1..80: mol_type = other DNA
tagacgtgtgggctgtggggaggacccgcactctggaggacggggaactgcctggaggggcggcaggctctagggggtga

SEQ ID NO: 40748 - DNA, 80 bp, synthetic construct
  source 1..80: mol_type = other DNA
attgtcaagccttgagtgttgcttcctctgatggccatgaagccatcgcagggctctgtgaagagtgatgtgatgagact

SEQ ID NO: 40749 - DNA, 80 bp, synthetic construct; identical to SEQ ID NO: 14060
  source 1..80: mol_type = other DNA

SEQ ID NO: 40750 - DNA, 80 bp, synthetic construct
  source 1..80: mol_type = other DNA
aggaaaggggaggcttgaaggcttggaaagcaggggtttcctcaacagcatcaagagcccatgcggacctgaagggaggg

SEQ ID NO: 40751 - DNA, 80 bp, synthetic construct
  source 1..80: mol_type = other DNA
gctcgacgctggctccagtggacgaggaaatggacacagggaacggcaggttcaacaggatgggcaaagcatggtccaag

SEQ ID NO: 40752 - DNA, 80 bp, synthetic construct
  source 1..80: mol_type = other DNA
gtcactggagaagagaaggccacaggaccaagcagccaggcataggcccctgcctgggtgtgggcattcctagcagctgt

SEQ ID NO: 40753 - DNA, 80 bp, synthetic construct; identical to SEQ ID NO: 14061
  source 1..80: mol_type = other DNA

SEQ ID NO: 40754 - DNA, 80 bp, synthetic construct
  source 1..80: mol_type = other DNA
ggcaggtggatcatgaggtcaggagtttgagaccagcctggccaagatggtgaaatcctatctctactaaaaaaaaaatt

SEQ ID NO: 40755 - DNA, 80 bp, synthetic construct
  source 1..80: mol_type = other DNA
aataaagcaggatgcaatgggtgtcgtaagtggatagaaacaaaggctcaggggctttcaagatgaaatccgtggtgttg

SEQ ID NO: 40756 - DNA, 80 bp, synthetic construct
  source 1..80: mol_type = other DNA
ttagtagcaaataatcctccataattactaagaggagaaacagttcgttcttaaagaatgggttctatgggttaacgacg

SEQ ID NO: 40757 - DNA, 80 bp, synthetic construct; identical to SEQ ID NO: 14062
  source 1..80: mol_type = other DNA

SEQ ID NO: 40758 - DNA, 80 bp, synthetic construct
  source 1..80: mol_type = other DNA
aagaaagatggagccttctcactgcaccctcacagggcagaggacaaaccagctccctggggccccttttctaatggcag

SEQ ID NO: 40759 - DNA, 80 bp, synthetic construct
  source 1..80: mol_type = other DNA
cagcaagctcaaccatggggctgtggagtccctgagatgcagaaatggtatttgcattacacttaattttcagatctgtt

SEQ ID NO: 40760 - DNA, 80 bp, synthetic construct
  source 1..80: mol_type = other DNA
attctcctgcctcaggctcctgagtagctgggactacaggcatctgccaccacgtccggctaatttttgtatttttagta

SEQ ID NO: 40761 - DNA, 80 bp, synthetic construct; identical to SEQ ID NO: 14063
  source 1..80: mol_type = other DNA

SEQ ID NO: 40762 - DNA, 80 bp, synthetic construct
  source 1..80: mol_type = other DNA
atttggggagcctaatctagtgcaggtatgggggccagaaagctaaaacctgaagaatttagcaggagtcagcaagccga

SEQ ID NO: 40763 - DNA, 80 bp, synthetic construct
  source 1..80: mol_type = other DNA
agactttgcaggtctattacagcgattcaactctgccgctatagtggaaaagggtggtgtcgataaagccttgtttccaa

SEQ ID NO: 40764 - DNA, 80 bp, synthetic construct
  source 1..80: mol_type = other DNA
ttgatgagaattgcggaggaaggcttatttgcctttgtgatgatggtaaatatgtatgtgaggaatactttctaaagaga

SEQ ID NO: 40765 - DNA, 80 bp, synthetic construct; identical to SEQ ID NO: 14064
  source 1..80: mol_type = other DNA

SEQ ID NO: 40766 - DNA, 80 bp, synthetic construct
  source 1..80: mol_type = other DNA
atggagaccacggtgaaaccccgtctccactaaaaatacaaaaaattagctgggcacggtggcgggtgcccatagtccca

SEQ ID NO: 40767 - DNA, 80 bp, synthetic construct
  source 1..80: mol_type = other DNA
ccctcccgagtcctttggttattattatgcaggggagttttgagttttcatttttatccagaggctcaagtgggttgcat

SEQ ID NO: 40768 - DNA, 80 bp, synthetic construct
  source 1..80: mol_type = other DNA
cattgccaggacgagcagggccctaggaacagtgatccgcacagcacggtttttctctttcttttttcaaaaatagagat

SEQ ID NO: 40769 - DNA, 80 bp, synthetic construct; identical to SEQ ID NO: 14065
  source 1..80: mol_type = other DNA

SEQ ID NO: 40770 - DNA, 80 bp, synthetic construct
  source 1..80: mol_type = other DNA
gggtctccctatgttgcccaggctacttttgaactcctggccccaagtgatcctcctgccttgacctcccagaatgctgg

SEQ ID NO: 40771 - DNA, 80 bp, synthetic construct
  source 1..80: mol_type = other DNA
tggcctggccccgtactgaggaccctgaagtggtcactgtgcctccttgtgagtgtgctgttgggacaccttcctctgga

SEQ ID NO: 40772 - DNA, 80 bp, synthetic construct
  source 1..80: mol_type = other DNA
gtttctcaggactgcgggtgcctccggcatgagcagatgagggtcccacagctgccgacttccgtgctttttgttccttt

SEQ ID NO: 40773 - DNA, 80 bp, synthetic construct
  source 1..80: mol_type = other DNA
gctgagcggagggatgaggtcccttgcagccttggagaccactcagtggacctgcaggaggatgggaagtgggagctgct

SEQ ID NO: 40774 - DNA, 80 bp, synthetic construct; identical to SEQ ID NO: 14066
  source 1..80: mol_type = other DNA

SEQ ID NO: 40775 - DNA, 80 bp, synthetic construct
  source 1..80: mol_type = other DNA
gatttagaaaatgcctcaagtgagaggggcctggcaaaagaatggagacagggagagtggcggtgtttatgcgtcagttt

SEQ ID NO: 40776 - DNA, 80 bp, synthetic construct
  source 1..80: mol_type = other DNA
agatgaagacttctatgctcggtttgctaccgggtgtgtctccatcccctggcagaatgaggtactgcccttccagcaca

SEQ ID NO: 40777 - DNA, 80 bp, synthetic construct
  source 1..80: mol_type = other DNA
cagatcatgaggtcaggagttcgagaccagcctggccaacatagtgaaaccctgtctctactaaaagtacaaaaattagc

SEQ ID NO: 40778 - DNA, 80 bp, synthetic construct; identical to SEQ ID NO: 14067
  source 1..80: mol_type = other DNA

SEQ ID NO: 40779 - DNA, 80 bp, synthetic construct
  source 1..80: mol_type = other DNA
gttcccatggtagttccctgctttgggagtacactcagagacaaggggagaggagaccacattacttattccaagaagag

SEQ ID NO: 40780 - DNA, 80 bp, synthetic construct
  source 1..80: mol_type = other DNA
tgcagatgatcgaatctgggtgtttcaaagacatcaacaaaagtgaaagtgaggaagctttgccattagatctagacaag

SEQ ID NO: 40781 - DNA, 80 bp, synthetic construct; identical to SEQ ID NO: 14068
  source 1..80: mol_type = other DNA

SEQ ID NO: 40782 - DNA, 80 bp, synthetic construct
  source 1..80: mol_type = other DNA
cgtgtcgctgacaaaatagtttacactgggctcagaaatcggcatcctgtggaaccttcgtcagatggcactcacagtgc

SEQ ID NO: 40783 - DNA, 80 bp, synthetic construct
  source 1..80: mol_type = other DNA
tttgagaccagcctggccaacatggcaaaaccccaattctactaaaaatacaaaacttagccgggtgtggtggcacatgc

SEQ ID NO: 40784 - DNA, 80 bp, synthetic construct
  source 1..80: mol_type = other DNA
gactttctgtaatagcattaaatgtagacaagccttttttccatgcaaagtgtctctccttggattcgtgggccatccta

SEQ ID NO: 40785 - DNA, 80 bp, synthetic construct
  source 1..80: mol_type = other DNA
agttcaagaccagcttagccaacatggtgaaaccccatctctactaaaaatataaaaattagccggtcatggtggcatgt

SEQ ID NO: 40786 - DNA, 80 bp, synthetic construct; identical to SEQ ID NO: 14069
  source 1..80: mol_type = other DNA

SEQ ID NO: 40787 - DNA, 80 bp, synthetic construct
  source 1..80: mol_type = other DNA
aagcccattctccccacactgcttcttaggcagccagagaccctgtgacattcatgcctcagccatggtacatgcagaac

SEQ ID NO: 40788 - DNA, 80 bp, synthetic construct
  source 1..80: mol_type = other DNA
tgggaggatcacttgagatcaggagttcgagagcaacctggccaacatggtgaaaccccgtctctgctaaaaatacaaaa

SEQ ID NO: 40789 - DNA, 80 bp, synthetic construct
  source 1..80: mol_type = other DNA
taaataaataaaaaataaaaaagcaccccccacccaaaagtttgtaaatggttgtctgcacttaaggaaagtgaaacctt

SEQ ID NO: 40790 - DNA, 80 bp, synthetic construct; identical to SEQ ID NO: 14070
  source 1..80: mol_type = other DNA

SEQ ID NO: 40791 - DNA, 80 bp, synthetic construct
  source 1..80: mol_type = other DNA
agaagcatccgaggcattaaagcatccgagggagccggaggggaggagaatggagtgacagagacacgcggagggtgggg

SEQ ID NO: 40792 - DNA, 80 bp, synthetic construct
  source 1..80: mol_type = other DNA
cggctccggcagcagcggcggcagcccgagcagcggcagcagcagcggcagcaccccaggcgctgacagccccgccggcc

SEQ ID NO: 40793 - DNA, 80 bp, synthetic construct
  source 1..80: mol_type = other DNA
gcgcccgtgcaggatgcccgctgccggcgagtgggtcgcgagcaggacacttcggagagcggctctgcagacccttcagg

SEQ ID NO: 40794 - DNA, 80 bp, synthetic construct
  source 1..80: mol_type = other DNA
ttgaaaggtcagttggaaaagcattcattcggggagcgacgagcaaacatgcacataaaatagcgtttcaagtcggcccg

SEQ ID NO: 40795 - DNA, 80 bp, synthetic construct; identical to SEQ ID NO: 14071
  source 1..80: mol_type = other DNA

SEQ ID NO: 40796 - DNA, 80 bp, synthetic construct
  source 1..80: mol_type = other DNA
cattagatttcctgcatttagctggcaggaaatattgtctaaatggagtgtgtaagatcctgagtcaaaccctaagaacg

SEQ ID NO: 40797 - DNA, 80 bp, synthetic construct
  source 1..80: mol_type = other DNA
atttgagctctagtgtgcgacctttttcataaaaggggaagaggtttttccctttcacgggagaacgctttatttgatac

SEQ ID NO: 40798 - DNA, 80 bp, synthetic construct
  source 1..80: mol_type = other DNA
gttccatcaccttgtggctccctacacactgtgggggtaggtgatgcatagccttccgtgggcagcgtttcagcaactca

SEQ ID NO: 40799 - DNA, 80 bp, synthetic construct; identical to SEQ ID NO: 14072
  source 1..80: mol_type = other DNA

SEQ ID NO: 40800 - DNA, 80 bp, synthetic construct
  source 1..80: mol_type = other DNA
gctggccacctagtggtgggacacggttgtgtatctcaggattcgggggctgggaaagttttcactctcgctccattctg

SEQ ID NO: 40801 - DNA, 80 bp, synthetic construct
  source 1..80: mol_type = other DNA
cttttataatgctttgcttagagtgggcaaagtgatatcaattccacccgccccctccaaattgttctccccagtatttt

SEQ ID NO: 40802 - DNA, 80 bp, synthetic construct
  source 1..80: mol_type = other DNA
tgtgcctttcacttttttttttccttttaaaggctttttcaattttgctgtgagagtttggtcgtcatctcatggtgaga

SEQ ID NO: 40803 - DNA, 80 bp, synthetic construct; identical to SEQ ID NO: 14073
  source 1..80: mol_type = other DNA

SEQ ID NO: 40804 - DNA, 80 bp, synthetic construct
  source 1..80: mol_type = other DNA
tctgagttgtttaaaaggtttaaaaacacttcttaaagattcttgtcagtggttacagatgagaaatataattggcaaat

SEQ ID NO: 40805 - DNA, 80 bp, synthetic construct
  source 1..80: mol_type = other DNA
ttggtgggtaacactgggacctatcttttctttttgttttgcattaaagacagatggctcctaaattcactgtatcttca

SEQ ID NO: 40806 - DNA, 80 bp, synthetic construct; identical to SEQ ID NO: 14074
  source 1..80: mol_type = other DNA

SEQ ID NO: 40807 - DNA, 80 bp, synthetic construct
  source 1..80: mol_type = other DNA
agactgaattcatggcaatttatgggaatgagctaagtgattaagcatttcatgaaaaagaggcccagactaactctatc

SEQ ID NO: 40808 - DNA, 80 bp, synthetic construct
  source 1..80: mol_type = other DNA
aaaggtttttgtgtttttctcatcttctagatctgttgcctttcttctgagtgaacagtggtgagaaaaaattttgcaag

SEQ ID NO: 40809 - DNA, 80 bp, synthetic construct
  source 1..80: mol_type = other DNA
actggaacaactttgtcatttgtcacaattgccaaacattagaatacacaggaaccgttttttcaggtaactctgtgact

SEQ ID NO: 40810 - DNA, 80 bp, synthetic construct
  source 1..80: mol_type = other DNA
ttcccttgcacccctaattcatggtgataaaaccaaaacatggtgaattaggttattagaacgttggaacatctctgaag

SEQ ID NO: 40811 - DNA, 80 bp, synthetic construct
  source 1..80: mol_type = other DNA
cagctcggtgtgtgtaaaagcagcctggcctgttaaacacaatgccgttaaatcaaactgcctttcttttttttttttta

SEQ ID NO: 40812 - DNA, 80 bp, synthetic construct; identical to SEQ ID NO: 14075
  source 1..80: mol_type = other DNA

SEQ ID NO: 40813 - DNA, 80 bp, synthetic construct
  source 1..80: mol_type = other DNA
attcacctttaccaagggctattcaatccatatctgggatgttttaaataaaactatccaggactgtgggcaatattcaa

SEQ ID NO: 40814 - DNA, 80 bp, synthetic construct; identical to SEQ ID NO: 14076
  source 1..80: mol_type = other DNA

SEQ ID NO: 40815 - DNA, 80 bp, synthetic construct
  source 1..80: mol_type = other DNA
ccaagttgcccaaggaggggtgaactggcttggtgggaaacagaacaggtaaaaactccatgctgatcagcagtgggact

SEQ ID NO: 40816 - DNA, 80 bp, synthetic construct
  source 1..80: mol_type = other DNA
ttttaaatgactaaaatggtctgggcatggtggctcatgtctgtaatcccagcactttgggaggccgaggcaggcggatc

SEQ ID NO: 40817 - DNA, 80 bp, synthetic construct
  source 1..80: mol_type = other DNA
cagtgagccagtattgcaccaccgtactccggactgggtgacagagtaagactctgtttcaaaaaagaaaaataaaaaat

SEQ ID NO: 40818 - DNA, 80 bp, synthetic construct; identical to SEQ ID NO: 14077
  source 1..80: mol_type = other DNA

SEQ ID NO: 40819 - DNA, 80 bp, synthetic construct
  source 1..80: mol_type = other DNA
ggtgtcagcctcagataatacaatgtgaaatgactgaaaagatgcaattgggcactgccgttctctttttacatgttttt

SEQ ID NO: 40820 - DNA, 80 bp, synthetic construct
  source 1..80: mol_type = other DNA
agcctggctaatttttgtatttttagtagaggcggggtttcgccatgttggccaggctggtctcaaactcctggcctcag

SEQ ID NO: 40821 - DNA, 80 bp, synthetic construct
  source 1..80: mol_type = other DNA
gtgtagactgcattgactctactgtgcctagaatttggacaatggcctgagggaccagtatgtgatttaagcataattaa

SEQ ID NO: 40822 - DNA, 80 bp, synthetic construct
  source 1..80: mol_type = other DNA
ctgggctcaagtgatcctcccacctcagcctcctgagtagctgggactataggctcgtgccaacatgcctggctaatttt

SEQ ID NO: 40823 - DNA, 80 bp, synthetic construct; identical to SEQ ID NO: 14078
  source 1..80: mol_type = other DNA

SEQ ID NO: 40824 - DNA, 80 bp, synthetic construct
  source 1..80: mol_type = other DNA
cgaaaagattaaaggtacctgttcctcttcaggggctctgttcaacgtagtagccactagctgtatgttgttatttatac

SEQ ID NO: 40825 - DNA, 80 bp, synthetic construct
  source 1..80: mol_type = other DNA
tctgtgcatttagtgagtgtgataaccccatgacttctgacatgaaaaattagggaaaattaaaagaagcagagggaggc

SEQ ID NO: 40826 - DNA, 80 bp, synthetic construct; identical to SEQ ID NO: 14079
  source 1..80: mol_type = other DNA

SEQ ID NO: 40827 - DNA, 80 bp, synthetic construct
  source 1..80: mol_type = other DNA
caggtgatctaaaatgggggtgaagacaggcaaaaccattttaagggttttcattttttctgagctgggaagacatcagg

SEQ ID NO: 40828 - DNA, 80 bp, synthetic construct
  source 1..80: mol_type = other DNA
cacttagaaagaaagtgtttgaaacaataaaacagttcattgcttgttccctggtgtccgaagcaagggagtctatctga

SEQ ID NO: 40829 - DNA, 80 bp, synthetic construct
  source 1..80: mol_type = other DNA
aatgaaccccaaggacagcttctggggcctgtgcagaaagcaagggtaaacagataagctgagataaacagataagaaca

SEQ ID NO: 40830 - DNA, 80 bp, synthetic construct
  source 1..80: mol_type = other DNA
gggtgcagtggctcacgcctgtaatcccagcattttgggaggctgaggcaggaggattgcttgaggccaggagttcaaga

SEQ ID NO: 40831 - DNA, 80 bp, synthetic construct; identical to SEQ ID NO: 14080
  source 1..80: mol_type = other DNA

SEQ ID NO: 40832 - DNA, 80 bp, synthetic construct
  source 1..80: mol_type = other DNA
ggggagcaattgcaagtggatctcccctatcctccaaagtgcttttatgttccaaaataaatctttcttccttcctctca

SEQ ID NO: 40833 - DNA, 80 bp, synthetic construct
  source 1..80: mol_type = other DNA
caaattgggaatataatttctgtctcagaccgtgatttcagctgagggccagtttgagagcagttgggtaaattaattcc

SEQ ID NO: 40834 - DNA, 80 bp, synthetic construct; identical to SEQ ID NO: 14081
  source 1..80: mol_type = other DNA

SEQ ID NO: 40835 - DNA, 80 bp, synthetic construct
  source 1..80: mol_type = other DNA
gccccatgggtggtggtggtggggacagtcatgggagtttaggtgtgggccacatcattggcagcagcaccacctccttt

SEQ ID NO: 40836 - DNA, 80 bp, synthetic construct
  source 1..80: mol_type = other DNA
aggctcaggtttctgcagctctctttacttactacccaagtagggggttagagagggggaggcgaggagggtttttcttg

SEQ ID NO: 40837 - DNA, 80 bp, synthetic construct
  source 1..80: mol_type = other DNA
tgtgtgtgtgtgttgcgttaatgttgcaactctgcttttcagggggctttgtgaggcaagggagtgtataagagccatgc

SEQ ID NO: 40838 - DNA, 80 bp, synthetic construct
  source 1..80: mol_type = other DNA
taggagatagaattacccaactgctggatggagagaacccagccaatgtaattgctctgcaagtctgataaaaagtcttg

SEQ ID NO: 40839 - DNA, 80 bp, synthetic construct
  source 1..80: mol_type = other DNA
tgcactcaggaggggcttgttgggatatgtagataacatcccaggagaaggaactcctagctctaggaagaataggggtg

SEQ ID NO: 40840 - DNA, 80 bp, synthetic construct; identical to SEQ ID NO: 14082
  source 1..80: mol_type = other DNA

SEQ ID NO: 40841 - DNA, 80 bp, synthetic construct
  source 1..80: mol_type = other DNA
ggatttttttgtatttttagtagagagcgggtttcaccgtgttagccaggatggtctcgatctcctgacctcgtgatcct

SEQ ID NO: 40842 - DNA, 80 bp, synthetic construct
  source 1..80: mol_type = other DNA
gcagccttggcctcctgggctcaagtgatcctcctgcctcagcctccaaagtagctgggactacaggtgcgtgccaccac

SEQ ID NO: 40843 - DNA, 80 bp, synthetic construct; identical to SEQ ID NO: 14083
  source 1..80: mol_type = other DNA

SEQ ID NO: 40844 - DNA, 80 bp, synthetic construct
  source 1..80: mol_type = other DNA
aaaatgtttggcaaactccccctcccccctaatttggaagtggtttgttttagtcgttttggaagaaataaatatttgca

SEQ ID NO: 40845 - DNA, 80 bp, synthetic construct
  source 1..80: mol_type = other DNA
atgtgagcttcacatgcttttcacataactgctagaatgaggttgagcaaatggaaagaaaagaggaagccaagcagctt

SEQ ID NO: 40846 - DNA, 80 bp, synthetic construct
  source 1..80: mol_type = other DNA
taatcctctctgaagaggaagaggccaacatgatgaggctttatggatggtgccaagccctgtgatatataataattagt

SEQ ID NO: 40847 - DNA, 80 bp, synthetic construct; identical to SEQ ID NO: 14084
  source 1..80: mol_type = other DNA

SEQ ID NO: 40848 - DNA, 80 bp, synthetic construct
  source 1..80: mol_type = other DNA
gatcacctgaggtcaggagtttgagaccaccctggccaacatggcaaaaccccgtctctattaaaaatccaagaattagc

SEQ ID NO: 40849 - DNA, 80 bp, synthetic construct
  source 1..80: mol_type = other DNA
ggtgacagaggctcaaaaaaaaaaaaaatttgcaaaggtaatactcactaaagaaagtccaggccagaagtggtggctca

SEQ ID NO: 40850 - DNA, 80 bp, synthetic construct
  source 1..80: mol_type = other DNA
gaggctgaagggagagaatggcgtgaacccgggaggcggaggttgcagtgagccgagatcgtgccactgcactccagcct

SEQ ID NO: 40851 - DNA, 80 bp, synthetic construct; identical to SEQ ID NO: 14085
  source 1..80: mol_type = other DNA

SEQ ID NO: 40852 - DNA, 80 bp, synthetic construct
  source 1..80: mol_type = other DNA
ttctagcagactcttaggggttatccagttctaaaggggtctgtgtttttcattgtctttgactagttttataatatatt

SEQ ID NO: 40853 - DNA, 80 bp, synthetic construct
  source 1..80: mol_type = other DNA
gggaagaatcataataatttgtgaaataggcttcagtgaccctagggatgtacaatgtagattttcttatgagaaaggag

SEQ ID NO: 40854 - DNA, 80 bp, synthetic construct
  source 1..80: mol_type = other DNA
ttggattttgcatgtgtaaatcaggcagggggtacactcagaaaacaagcccacagcttcgtaaggtgtcttggatctct

SEQ ID NO: 40855 - DNA, 80 bp, synthetic construct; identical to SEQ ID NO: 14086
  source 1..80: mol_type = other DNA

SEQ ID NO: 40856 - DNA, 80 bp, synthetic construct
  source 1..80: mol_type = other DNA
ctctgtggaattctgtagctcttcctctggtaactgctttcactaaaggtttgcatggaatttacctagacaagggccct

SEQ ID NO: 40857 - DNA, 80 bp, synthetic construct
  source 1..80: mol_type = other DNA
agaatggcattttcttctgggaaacatttgcagatgtgtgagctagctctacatggggaagggctgccccttcactgcgt

SEQ ID NO: 40858 - DNA, 80 bp, synthetic construct
  source 1..80: mol_type = other DNA
ctggcctggattttcctccagggcagctctgcaactctaacacccatccccaggctgtgtgtttcctagggatacgtaat

SEQ ID NO: 40859 - DNA, 80 bp, synthetic construct
  source 1..80: mol_type = other DNA
gtcttctccctgtgcgtcttcctcttgtgcatctgtccctgtgtccagagttatcctttgtataaggacaccagtgctat

SEQ ID NO: 40860 - DNA, 80 bp, synthetic construct; identical to SEQ ID NO: 14087
  source 1..80: mol_type = other DNA

SEQ ID NO: 40861 - DNA, 80 bp, synthetic construct
  source 1..80: mol_type = other DNA
tcttctgctcaaatatttctagagacggggagctcataccttcttctaagcagcctatccgattttaaaccactggatta

SEQ ID NO: 40862 - DNA, 80 bp, synthetic construct
  source 1..80: mol_type = other DNA
gacttcctgagggctgacaccagggctttttctttgtatcttactggaactaacgagatgctaaaagtaaacccaagtcg

SEQ ID NO: 40863 - DNA, 80 bp, synthetic construct
  source 1..80: mol_type = other DNA
ccaagtccggcacggtggcactcacctgtagtcccagctactcccaagccaggaagatcacttgagccaggagttctggg

SEQ ID NO: 40864 - DNA, 80 bp, synthetic construct; identical to SEQ ID NO: 14088
  source 1..80: mol_type = other DNA

SEQ ID NO: 40865 - DNA, 80 bp, synthetic construct
  source 1..80: mol_type = other DNA
cttctgcctcccaggttcaagcggttctcttgcctcagcgccccgagtagctgggattacaggcgcccgccaccatgccc

SEQ ID NO: 40866 - DNA, 80 bp, synthetic construct
  source 1..80: mol_type = other DNA
attttcgaggtaatatggtatcttctcctgctgtgcattgaggcaagatgtttccattccattgaaagcttgatcaaggt

SEQ ID NO: 40867 - DNA, 80 bp, synthetic construct
  source 1..80: mol_type = other DNA
cttctcacccttcaaatcttgagaatttgcaggtgcattttccactgataattcaactgtgggtacttcagaataaaatt

SEQ ID NO: 40868 - DNA, 80 bp, synthetic construct; identical to SEQ ID NO: 14089
  source 1..80: mol_type = other DNA

SEQ ID NO: 40869 - DNA, 80 bp, synthetic construct
  source 1..80: mol_type = other DNA
aaatattgttgagaaaatgtaagaattttccatctagatgtgaggggtggaaatattgccatgtggacttcaagacatcc

SEQ ID NO: 40870 - DNA, 80 bp, synthetic construct
  source 1..80: mol_type = other DNA
aaggtttgtctagatactagctgtatcctgactggtgatgctcagatttcatagtttagggtgatgtggagaggactgct

SEQ ID NO: 40871 - DNA, 80 bp, synthetic construct; identical to SEQ ID NO: 14090
  source 1..80: mol_type = other DNA

SEQ ID NO: 40872 - DNA, 80 bp, synthetic construct
  source 1..80: mol_type = other DNA
gctaatttttgtatttttagtagagatggtgtttcaccatgttggccaggatggtctcgatctcccgacctcatgatcca

SEQ ID NO: 40873 - DNA, 80 bp, synthetic construct
  source 1..80: mol_type = other DNA
tacaggtgtgagccactgtgcctggcatcttcttctttttcttttttttttttttaattttaattttttttttttttttg

SEQ ID NO: 40874 - DNA, 80 bp, synthetic construct
  source 1..80: mol_type = other DNA
gaagtagcaaaaggtggagactagtgatgtgagttctgtcctagctttgttgctaacctgccagagaccaaggctggtaa

SEQ ID NO: 40875 - DNA, 80 bp, synthetic construct
  source 1..80: mol_type = other DNA
cctgctaccatgcccggcttttttttttctttttcttttttttgtatttttagtagagatggggtttcaccatgttggtc

SEQ ID NO: 40876 - DNA, 80 bp, synthetic construct; identical to SEQ ID NO: 14091
  source 1..80: mol_type = other DNA

SEQ ID NO: 40877 - DNA, 80 bp, synthetic construct
  source 1..80: mol_type = other DNA
ttatcatcacataggaataatgccctattgatcacagagaccaaataaaaaatgtaaataagatggggagtccagatgca

SEQ ID NO: 40878 - DNA, 80 bp, synthetic construct
  source 1..80: mol_type = other DNA
acaaaaattagccgggcatggtggcgcatgcctgtaaactcagctactagggaggaggttgaggcaagagaatcgcttga

SEQ ID NO: 40879 - DNA, 80 bp, synthetic construct
  source 1..80: mol_type = other DNA
aggtagtttctaaggaaaaaagcaagtcctggttagacaggtagtatgtagggatccactacacatgaaaagatgctcga

SEQ ID NO: 40880 - DNA, 80 bp, synthetic construct; identical to SEQ ID NO: 14092
  source 1..80: mol_type = other DNA

SEQ ID NO: 40881 - DNA, 80 bp, synthetic construct
  source 1..80: mol_type = other DNA
gagatccagactgggcagcatggtgaaaccccatctctacaaaaaacaaaaacaaaaaactaaaattagctgggcatggt

SEQ ID NO: 40882 - DNA, 80 bp, synthetic construct
  source 1..80: mol_type = other DNA
caacccgcccccccgcaaaaacgttatggagatctagttcgagaccagcctgggcaacatagtgagacccaatctctaaa

SEQ ID NO: 40883 - DNA, 80 bp, synthetic construct
  source 1..80: mol_type = other DNA
accatgtctctgagaaaaaaagaaaaaagaattatggagacctattcttattggcatggagagacgatcataacatagtg

SEQ ID NO: 40884 - DNA, 80 bp, synthetic construct
  source 1..80: mol_type = other DNA
tgagaggactgtacagaaataaaatccttaaagaaaagtaaacatgccaggtcttctgaatctcagcaagggttggcctt

SEQ ID NO: 40885 - DNA, 80 bp, synthetic construct; identical to SEQ ID NO: 14093
  source 1..80: mol_type = other DNA

SEQ ID NO: 40886 - DNA, 80 bp, synthetic construct
  source 1..80: mol_type = other DNA
ggctttgttaggctgggctcttctgggtgtgcagcgttgtgtgtttgttttaatagtaaccaccattattttataataaa

SEQ ID NO: 40887 - DNA, 80 bp, synthetic construct
  source 1..80: mol_type = other DNA
ttatctctgtctagtgaactagtgaccaactaatgagcagggaggggtgctttagcatgtgcaaaatccgagtcaattga

SEQ ID NO: 40888 - DNA, 80 bp, synthetic construct
  source 1..80: mol_type = other DNA
gtacatgatcaactccattacaaagtaatctaagtacagaggcagccttgatggggggcagggatcagtaaagctttcat

SEQ ID NO: 40889 - DNA, 80 bp, synthetic construct; identical to SEQ ID NO: 14094
  source 1..80: mol_type = other DNA

SEQ ID NO: 40890 - DNA, 80 bp, synthetic construct
  source 1..80: mol_type = other DNA
atagggtcatatggggaggtctctgagtgtcaggctagaatttgggagttaaggttttaggcaaaaaatagccggccagg

SEQ ID NO: 40891 - DNA, 80 bp, synthetic construct
  source 1..80: mol_type = other DNA
tgcatgaaaaagggtttaatggacttacagttctacgtggctgggaggcctcacaatcatggcagaaggcaaggaagagc

SEQ ID NO: 40892 - DNA, 80 bp, synthetic construct
  source 1..80: mol_type = other DNA
catgtgggaattcaagatgaaatttgggtggggacacagccaaaccgtatcaccccatctctacaaaaaataaaaaaatt

SEQ ID NO: 40893 - DNA, 80 bp, synthetic construct; identical to SEQ ID NO: 14095
  source 1..80: mol_type = other DNA

SEQ ID NO: 40894 - DNA, 80 bp, synthetic construct
  source 1..80: mol_type = other DNA
ttggagcagctttggggagactaaatctatagcacttggcacctgataggacatggcggtgagtggaaggacaacactgt

SEQ ID NO: 40895 - DNA, 80 bp, synthetic construct
  source 1..80: mol_type = other DNA
ggcagatgatctggacagacatttctcaaaagaagacatacacaccactaaagaacttactcatgtaaccaaatactgct

SEQ ID NO: 40896 - DNA, 80 bp, synthetic construct
  source 1..80: mol_type = other DNA
aggtcaggagttcgaaaccagcctgaccaacatggtgaaaccttgtctctactaaaaataaaaaaaattagctgggcgtg

SEQ ID NO: 40897 - DNA, 80 bp, synthetic construct; identical to SEQ ID NO: 14096
  source 1..80: mol_type = other DNA

SEQ ID NO: 40898 - DNA, 80 bp, synthetic construct
  source 1..80: mol_type = other DNA
actactgggcatttatccaaaataaaggaaataagtgcatcaaagagacatctgcacccccatgtttattgcagcactat

SEQ ID NO: 40899 - DNA, 80 bp, synthetic construct
  source 1..80: mol_type = other DNA
gtgaaataaaccaggcacagaaagttaaatgctatgtgttctcacttatacgtggaagctaaaaaaaagttgattcatag

SEQ ID NO: 40900 - DNA, 80 bp, synthetic construct
  source 1..80: mol_type = other DNA
ttcaaatagctagaaggaggatattgaatgttcctaactgatatggtttggctgtgttcccacccacatctcatcttgaa

SEQ ID NO: 40901 - DNA, 80 bp, synthetic construct; identical to SEQ ID NO: 14097
  source 1..80: mol_type = other DNA

SEQ ID NO: 40902 - DNA, 80 bp, synthetic construct
  source 1..80: mol_type = other DNA
tgtaccccataaatacgtagttatgtgtcagctaaaagataaaaaactataatatttgcacccaggtgatgctgcagggc

SEQ ID NO: 40903 - DNA, 80 bp, synthetic construct
  source 1..80: mol_type = other DNA
acctggcagtagctttgaagaaatgtgggagcagacggtgtctgttgtttttctggcccacatctaccccctcttcttct

SEQ ID NO: 40904 - DNA, 80 bp, synthetic construct
  source 1..80: mol_type = other DNA
ggattcttggttccaaaagggctgctcttctgctgctggggttgccaagctggtggagggaaacttggagctcttggtgg

SEQ ID NO: 40905 - DNA, 80 bp, synthetic construct; identical to SEQ ID NO: 14098
  source 1..80: mol_type = other DNA

SEQ ID NO: 40906 - DNA, 80 bp, synthetic construct
  source 1..80: mol_type = other DNA
ctggctgcccttgtgagactccaactgtagcaaagaaagattaggaaacaaacatcccagtcaccatggaaatgtgaacc

SEQ ID NO: 40907 - DNA, 80 bp, synthetic construct
  source 1..80: mol_type = other DNA
ttggtttcatcatcaccaaaatagctgtaaacctaatacactgcttatgcatgtcagaacctccttacagcctccctcgg

SEQ ID NO: 40908 - DNA, 80 bp, synthetic construct; identical to SEQ ID NO: 14099
  source 1..80: mol_type = other DNA

SEQ ID NO: 40909 - DNA, 80 bp, synthetic construct
  source 1..80: mol_type = other DNA
cagtaggaggcaaaagtacatttgggggttacttttttcaggtggatttgaaatgataatgtgtcttaaatttaatttgg

SEQ ID NO: 40910 - DNA, 80 bp, synthetic construct
  source 1..80: mol_type = other DNA
cacccaggctggagtgcagtggcacgatctcggctcactgcaacctctgcctcctgggttcaagtgattgtcctgcctca

SEQ ID NO: 40911 - DNA, 80 bp, synthetic construct
  source 1..80: mol_type = other DNA
ggcctaattaattaatttttttgagatggagtctcactctgttgcccaggctggagtgcagtgacaccatctcagctcac

SEQ ID NO: 40912 - DNA, 80 bp, synthetic construct; identical to SEQ ID NO: 14100
  source 1..80: mol_type = other DNA

SEQ ID NO: 40913 - DNA, 80 bp, synthetic construct
  source 1..80: mol_type = other DNA
ccctggaaaaccatatcctggaactcactagcatgtaagtaattggaaaatgttaaagcaaaagagccaggtttagaaac

SEQ ID NO: 40914 - DNA, 80 bp, synthetic construct
  source 1..80: mol_type = other DNA
ttgttcagactccatgaagctcatgaattggctcaataacaaaaagcatgaatcatttgaacgtgaaggtacagggacat

SEQ ID NO: 40915 - DNA, 80 bp, synthetic construct
  source 1..80: mol_type = other DNA
caataggtgctcaataagtactttgtgtaaatggtgactttaggagcacctggattctgccccaggagattcctgagggg

SEQ ID NO: 40916 - DNA, 80 bp, synthetic construct; identical to SEQ ID NO: 14101
  source 1..80: mol_type = other DNA

SEQ ID NO: 40917 - DNA, 80 bp, synthetic construct
  source 1..80: mol_type = other DNA
ctgcaagctccgcctcccgggttcacgccattctcctgcctcagcctcccgagtagctgggactacaggcgcccgcacct

SEQ ID NO: 40918 - DNA, 80 bp, synthetic construct
  source 1..80: mol_type = other DNA
aaatcgggaaatttcacgtaacctttctgatttaagacttcttttagataattcaaagttttggcgacattaggtaagaa

SEQ ID NO: 40919 - DNA, 80 bp, synthetic construct
  source 1..80: mol_type = other DNA
ccaggttcaagcaattctcctgcctcagcctcacaagtagctgggcacacgccactgcacctgactaatttttgtatttt

SEQ ID NO: 40920 - DNA, 80 bp, synthetic construct; identical to SEQ ID NO: 14102
  source 1..80: mol_type = other DNA

SEQ ID NO: 40921 - DNA, 80 bp, synthetic construct
  source 1..80: mol_type = other DNA
tcgtgtctcagccacttgagtagctgggattacaggcatgtgccaccattcccagctaagttttgtatttttagtagaaa

SEQ ID NO: 40922 - DNA, 80 bp, synthetic construct
  source 1..80: mol_type = other DNA
ccttacaaactgcaagtgatctaaaaagaacaaattctcatttgaaaaaataagcactatggccagcacaggactgactt

SEQ ID NO: 40923 - DNA, 80 bp, synthetic construct
  source 1..80: mol_type = other DNA
gagtctccagcatactaaagggaagggctttcttcaaggaaatgaaaagtgataaagaaagctacttgatagaagtattc

SEQ ID NO: 40924 - DNA, 80 bp, synthetic construct; identical to SEQ ID NO: 14103
  source 1..80: mol_type = other DNA

SEQ ID NO: 40925 - DNA, 80 bp, synthetic construct
  source 1..80: mol_type = other DNA
tgagggggtgctgatctagggaggaaggaggttgctttctgtgtgcgtgtttttctgtttcatgtcctgactatttcctg

SEQ ID NO: 40926 - DNA, 80 bp, synthetic construct
  source 1..80: mol_type = other DNA
tgaagatctcaattaaactttggactggctcatccagggaggtggcgcgatttcctctggaggtttaaaataaatagcag

SEQ ID NO: 40927 - DNA, 80 bp, synthetic construct
  source 1..80: mol_type = other DNA
gctagaaataaagcatccctggatcctttggcttcttggacaatatgcaggaaaacacccgccttctcttagacatgtag

SEQ ID NO: 40928 - DNA, 80 bp, synthetic construct
  source 1..80: mol_type = other DNA
ctgatgagaaatgatgaccccggagaagggtggtcatatggccagtgtcaggattaatagaatcccctttcattcttgaa

SEQ ID NO: 40929 - DNA, 80 bp, synthetic construct; identical to SEQ ID NO: 14104
  source 1..80: mol_type = other DNA

SEQ ID NO: 40930 - DNA, 80 bp, synthetic construct
  source 1..80: mol_type = other DNA
gcttcgggataacaagagcttgaactgccttctgtcacatggggcaggtccttaaggagcagaaggtttttttttttttt

SEQ ID NO: 40931 - DNA, 80 bp, synthetic construct
  source 1..80: mol_type = other DNA
atttttagtagagatggggttttgccgtgttgccaggctggtctcaaactcctgacctcaggtgatccgtctgcctcagc

SEQ ID NO: 40932 - DNA, 80 bp, synthetic construct; identical to SEQ ID NO: 14105
  source 1..80: mol_type = other DNA

SEQ ID NO: 40933 - DNA, 80 bp, synthetic construct
  source 1..80: mol_type = other DNA
gggttggttccaagtctttgctattgtgaacagtgctgcaataaacatacgtgtgcgtgtgtctttatagtagaataatt

SEQ ID NO: 40934 - DNA, 80 bp, synthetic construct
  source 1..80: mol_type = other DNA
ccagcatctgtttcccgactttttttttttttttttttttttttttttgagacggagtctcactctgtcactcaggctgg

SEQ ID NO: 40935 - DNA, 80 bp, synthetic construct
  source 1..80: mol_type = other DNA
caggatggtctcgacctcctgacatcatgatctgcccgcctcagcctcccaaagtgctgggattacaggcatgagccacc

SEQ ID NO: 40936 - DNA, 80 bp, synthetic construct
  source 1..80: mol_type = other DNA
tcatatcctttgcccgctttttgatggggttgtttttttcttgtaaatttaagttctttgtagattctggacattagccc

SEQ ID NO: 40937 - DNA, 80 bp, synthetic construct; identical to SEQ ID NO: 14106
  source 1..80: mol_type = other DNA

SEQ ID NO: 40938 - DNA, 80 bp, synthetic construct
  source 1..80: mol_type = other DNA
actgacctgtagcagatagccctcctcctccggcctcagcttcctcgtctgtgacgtgggcagggtgccgtcatctatcc

SEQ ID NO: 40939 - DNA, 80 bp, synthetic construct
  source 1..80: mol_type = other DNA
cactctcttcccagccctgtcagcaactgacaggttcaataagactttgccaaaatgttcaactagcttttcctgatgcg

SEQ ID NO: 40940 - DNA, 80 bp, synthetic construct; identical to SEQ ID NO: 14107
  source 1..80: mol_type = other DNA

SEQ ID NO: 40941 - DNA, 80 bp, synthetic construct
  source 1..80: mol_type = other DNA
gtggagaggaggaagagccgttttcctccgccctcttaggttcattggttgggggttacaaatgaagttgacaaaagatt

SEQ ID NO: 40942 - DNA, 80 bp, synthetic construct
  source 1..80: mol_type = other DNA
aaggggaggaaatgtatggtaaataagggttgtttagtaggtaagagttgtctcaggtgctaagagttgtctgcttttct

SEQ ID NO: 40943 - DNA, 80 bp, synthetic construct
  source 1..80: mol_type = other DNA
acttacaccctattaaagaagaataacgactgagtgaccagagattgaatgctgagtggaaaagttttactgccaggtgg

SEQ ID NO: 40944 - DNA, 80 bp, synthetic construct
  source 1..80: mol_type = other DNA
tgtcagtgagctgggtacctgactggctgacagtgctctcctgcatccaagagctgccctggcatcatggtgcccagtgt

SEQ ID NO: 40945 - DNA, 80 bp, synthetic construct; identical to SEQ ID NO: 14108
  source 1..80: mol_type = other DNA

SEQ ID NO: 40946 - DNA, 80 bp, synthetic construct
  source 1..80: mol_type = other DNA
tccccccgcccccagccatgctgaactgtgagtcaattaaacccccttcctttataaattacccagtctcgggcagttct

SEQ ID NO: 40947 - DNA, 80 bp, synthetic construct
  source 1..80: mol_type = other DNA
caccatgatgaaaccctgtctctactaaaaatacaaaaattagctggacatggaggtgtgcctgtaatcccaactactca

SEQ ID NO: 40948 - DNA, 80 bp, synthetic construct; identical to SEQ ID NO: 14109
  source 1..80: mol_type = other DNA

SEQ ID NO: 40949 - DNA, 80 bp, synthetic construct
  source 1..80: mol_type = other DNA
aatttatggattcatatgtctgggagtattcctggatttctggatccaaggattcaaacaatgttcccagtttttctttt

SEQ ID NO: 40950 - DNA, 80 bp, synthetic construct
  source 1..80: mol_type = other DNA
tcttgggaaggatggtgggggtcatgtggaatgacttactgaagaaggggatgaaggagtgccacacagtgaaaaccaca

SEQ ID NO: 40951 - DNA, 80 bp, synthetic construct
  source 1..80: mol_type = other DNA
atgattggggacaaagtagacatgctcttcagcttgatcatatagtagctaccagggtttagtacactgtctctataaag

SEQ ID NO: 40952 - DNA, 80 bp, synthetic construct; identical to SEQ ID NO: 14110
  source 1..80: mol_type = other DNA

SEQ ID NO: 40953 - DNA, 80 bp, synthetic construct
  source 1..80: mol_type = other DNA
aaggtatacaaatgactataagtatatgaaaagatgctcaatatcactagtcattagaaaaatgcaaatcaaaacctcaa

SEQ ID NO: 40954 - DNA, 80 bp, synthetic construct
  source 1..80: mol_type = other DNA
aatactgcactccagcctgagcaacagagttgagaccctgtctcaacaaaacaaaacaaaaacccaaaaaaccacaatga

SEQ ID NO: 40955 - DNA, 80 bp, synthetic construct
  source 1..80: mol_type = other DNA
ttaaaagtaggattaccacatggtccagcaatctcacttctgggtttttatccaaaagaattcaaggctgggcgcggtgg

SEQ ID NO: 40956 - DNA, 80 bp, synthetic construct
  source 1..80: mol_type = other DNA
tggagactgaggcagaagaatctcttgaacccagtaggcggaggttgcagtgagccaagatcgcactactgcactgcagc

SEQ ID NO: 40957 - DNA, 80 bp, synthetic construct; identical to SEQ ID NO: 14111
  source 1..80: mol_type = other DNA

SEQ ID NO: 40958 - DNA, 80 bp, synthetic construct
  source 1..80: mol_type = other DNA
ggaaatggagaattgttgctcagtgggtataaagtttctgatatacaagatgagaaagtttgagaggtctgctgtataac

SEQ ID NO: 40959 - DNA, 80 bp, synthetic construct
  source 1..80: mol_type = other DNA
actaaaaaaatacaaaaaagttagctgggcatggtggcgggtgcctgtagtcccagctactcgggaggctgaggcaggag

SEQ ID NO: 40960 - DNA, 80 bp, synthetic construct
  source 1..80: mol_type = other DNA
ttttaaaatcacaataaaaatatacagttatcccttagtatcctttggtcattggttccaggtccccccttatatactaa

SEQ ID NO: 40961 - DNA, 80 bp, synthetic construct; identical to SEQ ID NO: 14112
  source 1..80: mol_type = other DNA

SEQ ID NO: 40962 - DNA, 80 bp, synthetic construct
  source 1..80: mol_type = other DNA
aattgatcccatcacaaaagaggaattaagattgccttgggttaagggttaagtaatgtcctatcaccagttaatctgcc

SEQ ID NO: 40963 - DNA, 80 bp, synthetic construct
  source 1..80: mol_type = other DNA
attgtgtggcagagcgtacaattatgtcacgaatttgggattagcatggcatacctagttgaggtttaaagctccctcct

SEQ ID NO: 40964 - DNA, 80 bp, synthetic construct
  source 1..80: mol_type = other DNA
taactggcacagagggcctcgctgagagcctcttgggttctatccagatctgagaaggaatctgggatgccggggtcaga

SEQ ID NO: 40965 - DNA, 80 bp, synthetic construct; identical to SEQ ID NO: 14113
  source 1..80: mol_type = other DNA

SEQ ID NO: 40966 - DNA, 80 bp, synthetic construct
  source 1..80: mol_type = other DNA
aaccaaaataactttataaattaaagtttatgtagtcaggaaagctatgcctggactatcacacaccagatgaaaccctt

SEQ ID NO: 40967 - DNA, 80 bp, synthetic construct
  source 1..80: mol_type = other DNA
gtttgtttgttttgccctctggaaaaaatgtctttgtcctgccataattaattgtaaccagcttttgtttagagggggcc

SEQ ID NO: 40968 - DNA, 80 bp, synthetic construct; identical to SEQ ID NO: 14114
  source 1..80: mol_type = other DNA

SEQ ID NO: 40969 - DNA, 80 bp, synthetic construct
  source 1..80: mol_type = other DNA
tctcaggctggagtgcactggtgtgatcatagctcactgcagcctcaacctcctggactctagcaatcctcccaccttgg

SEQ ID NO: 40970 - DNA, 80 bp, synthetic construct
  source 1..80: mol_type = other DNA
aagtgagccactatcgctggctgttgtcgttatttttgatccataaaaagagggtcatgatgtgtgtgttgatgtacagc

SEQ ID NO: 40971 - DNA, 80 bp, synthetic construct
  source 1..80: mol_type = other DNA
cctcaccctttctttttgatactaaatgaagcaatgatagcatgagattatgaatgtgccttgtggagcttagactgcct

SEQ ID NO: 40972 - DNA, 80 bp, synthetic construct
  source 1..80: mol_type = other DNA
taatatatgaaaacggtgtgaaattcaaaattcagtgtccattaacttgttttgttgaacagcatgctcatttgtggatc

SEQ ID NO: 40973 - DNA, 80 bp, synthetic construct; identical to SEQ ID NO: 14115
  source 1..80: mol_type = other DNA

SEQ ID NO: 40974 - DNA, 80 bp, synthetic construct
  source 1..80: mol_type = other DNA
tgagacaggagaataacttgaacccaggaagcggaggttgcagtgagccgagatcgtgccattgtgctccagcctgggca

SEQ ID NO: 40975 - DNA, 80 bp, synthetic construct
  source 1..80: mol_type = other DNA
tatcaaataaatattatgtgacacaccaggtatatcatgtatcaaatatgtatgaattgtgtgtaaacactttaaacatt

SEQ ID NO: 40976 - DNA, 80 bp, synthetic construct
  source 1..80: mol_type = other DNA
ccatgcccatctaattttttaaatatttttagtagagatggggtttcatcatgttggccaggctggtcttgaactcctga

SEQ ID NO: 40977 - DNA, 80 bp, synthetic construct; identical to SEQ ID NO: 14116
  source 1..80: mol_type = other DNA

SEQ ID NO: 40978 - DNA, 80 bp, synthetic construct
  source 1..80: mol_type = other DNA
ggaaagccttcagtcagaacatgctcattgtttgttgagtgagagtctcttctgtgttaagcctttgacctgtaaatttt

SEQ ID NO: 40979 - DNA, 80 bp, synthetic construct
  source 1..80: mol_type = other DNA
ggtttgaactcagttgtgggggccttcatacaactttctttgccattctccctaattccaggaaggataaggcaacgtca

SEQ ID NO: 40980 - DNA, 80 bp, synthetic construct
  source 1..80: mol_type = other DNA
tggcgtcatcacaacctattacaaccttgatctcccaggctccaggcatcctacagcctcatttaaattttttttttttt

SEQ ID NO: 40981 - DNA, 80 bp, synthetic construct; identical to SEQ ID NO: 14117
  source 1..80: mol_type = other DNA

SEQ ID NO: 40982 - DNA, 80 bp, synthetic construct
  source 1..80: mol_type = other DNA
ccgttgttgggtgatatgtctatttctaggcatctccacgctctcctatcgagggcctttgcaacagtatttcccatgtt

SEQ ID NO: 40983 - DNA, 80 bp, synthetic construct
  source 1..80: mol_type = other DNA
gaaacaacaacaaaacgctgcttgctcccaaactgtttgaatttaaaactctgaatcttaatttgcatagacagtagttc

SEQ ID NO: 40984 - DNA, 80 bp, synthetic construct; identical to SEQ ID NO: 14118
  source 1..80: mol_type = other DNA

SEQ ID NO: 40985 - DNA, 80 bp, synthetic construct
  source 1..80: mol_type = other DNA
ctaaagcgatgatgaaagatgtctgggggaaagaaaataaaacaaaaaaccttctagcatctacacacctaaagcagggt

SEQ ID NO: 40986 - DNA, 80 bp, synthetic construct
  source 1..80: mol_type = other DNA
aaaattgctcctggttgagaaccactcgcctcgattttggtggtctagaatttgcaagctgcttctccgccctgtgcata

SEQ ID NO: 40987 - DNA, 80 bp, synthetic construct
  source 1..80: mol_type = other DNA
gaccatccctcttgctgctggcctgcgtggcgtgctcgtgccgataggggcagctgtgtgagtagcaggaccatcctgga

SEQ ID NO: 40988 - DNA, 80 bp, synthetic construct
  source 1..80: mol_type = other DNA
gaagggcagagacagggtgaagttgccaggagaggctttcagctggatcctaggggccagcgtgcagccctttcccaggg

SEQ ID NO: 40989 - DNA, 80 bp, synthetic construct; identical to SEQ ID NO: 14119
  source 1..80: mol_type = other DNA

SEQ ID NO: 40990 - DNA, 80 bp, synthetic construct
  source 1..80: mol_type = other DNA
tacctcaataaatagcatttttcttccctgaacaaattgagagatgaggccatggttgaaactttgaactttggaacttg

SEQ ID NO: 40991 - DNA, 80 bp, synthetic construct
  source 1..80: mol_type = other DNA
gccctggttttcctgatacgcccccttagtgctcaaggctggtttcaaccctgctgtactaatctgctgatgagggagag

SEQ ID NO: 40992 - DNA, 80 bp, synthetic construct; identical to SEQ ID NO: 14120
  source 1..80: mol_type = other DNA

SEQ ID NO: 40993 - DNA, 80 bp, synthetic construct
  source 1..80: mol_type = other DNA
aaatcagaagcttaggctcctccgtgtagctgctctatttttcatgcctcttgcctgggtctaagccctggagcttaggg

SEQ ID NO: 40994 - DNA, 80 bp, synthetic construct
  source 1..80: mol_type = other DNA
gggtggatgcaaggcctgagagtgaactttgttgtgaatgatgacacaattccagaaaaatgcagtgtctcccagatacg

SEQ ID NO: 40995 - DNA, 80 bp, synthetic construct
  source 1..80: mol_type = other DNA
catgctttttcatgaggcacacttattttcagatgttcacatggactctttttgagattccccaggggaaaaggagaaag

SEQ ID NO: 40996 - DNA, 80 bp, synthetic construct; identical to SEQ ID NO: 14121
  source 1..80: mol_type = other DNA

SEQ ID NO: 40997 - DNA, 80 bp, synthetic construct
  source 1..80: mol_type = other DNA
tgtgataagttttagatttttttttttgtactctgctcttattcattcaacaactctggggatttactggggaacaggca

SEQ ID NO: 40998 - DNA, 80 bp, synthetic construct
  source 1..80: mol_type = other DNA
atttcagctctgtggcctgggtcaggtgcccagcccagcaatctgagtgtggatgactctggactatttctccaggagga

SEQ ID NO: 40999 - DNA, 80 bp, synthetic construct
  source 1..80: mol_type = other DNA
tcgagaccagcctggccaatgtggtgaaaccccatctctactaaaaatgcaaaagttagctgggcatgttggcaggtgcc

SEQ ID NO: 41000 - DNA, 80 bp, synthetic construct; identical to SEQ ID NO: 14122
  source 1..80: mol_type = other DNA

SEQ ID NO: 41001 - DNA, 80 bp, synthetic construct
  source 1..80: mol_type = other DNA
gctatggccagaggtggatctcttattctcaggggtatcagggacccaggctctttccacttggaacacaagatagcagg

SEQ ID NO: 41002 - DNA, 80 bp, synthetic construct
  source 1..80: mol_type = other DNA
cttgtgtgattttcactggcgtggactcttccccagatgctcactttgtactaacaccgctggctcattatcacagagtc

SEQ ID NO: 41003 - DNA, 80 bp, synthetic construct
  source 1..80: mol_type = other DNA
ccttgagggacaaggtggtgagttagccctcttgcttcgagccatcatttatcatggattgtgctagcagtcgtaggtac

SEQ ID NO: 41004 - DNA, 80 bp, synthetic construct; identical to SEQ ID NO: 14123
  source 1..80: mol_type = other DNA

SEQ ID NO: 41005 - DNA, 80 bp, synthetic construct
  source 1..80: mol_type = other DNA
gcctcccagagccaccctctcgctgcctgcagggctgcccttcagtggcctcgactcctgtggagactctgcattcccgg

SEQ ID NO: 41006 - DNA, 80 bp, synthetic construct
  source 1..80: mol_type = other DNA
taggcctactcttctctttgcagaaaggctccttggggttcagagaatgtaggaaacttgttggagctcacacagctgag

SEQ ID NO: 41007 - DNA, 80 bp, synthetic construct
  source 1..80: mol_type = other DNA
tttattctatctctgaggtcgtgactgtgtctctggtaatgaatattttgctttggaacatcccccctctttttattgag

SEQ ID NO: 41008 - DNA, 80 bp, synthetic construct
  source 1..80: mol_type = other DNA
acttgcccctaccacggtccctggcaaccgccaatctgggttgtctctggatttatctattgtggacatttcacgtaaat

SEQ ID NO: 41009 - DNA, 80 bp, synthetic construct; identical to SEQ ID NO: 14124
  source 1..80: mol_type = other DNA

SEQ ID NO: 41010 - DNA, 80 bp, synthetic construct
  source 1..80: mol_type = other DNA
aaacacggaagcagtgattctgaaatggaaaagagaacattctctcccataggcccccctgtctgatataactccctggt

SEQ ID NO: 41011 - DNA, 80 bp, synthetic construct
  source 1..80: mol_type = other DNA
ctggccaacatggtgaaaccctgtctctactaaaaatacaaaaattagccaggtgtggtggcggatgcctgtagtcccag

SEQ ID NO: 41012 - DNA, 80 bp, synthetic construct
  source 1..80: mol_type = other DNA
gcccactggtgaaaaggcgctgtggatggggtgcctccgacttgtgtgcagctcctcagttatggctatgccctggctgt

SEQ ID NO: 41013 - DNA, 80 bp, synthetic construct; identical to SEQ ID NO: 14125
  source 1..80: mol_type = other DNA

SEQ ID NO: 41014 - DNA, 80 bp, synthetic construct
  source 1..80: mol_type = other DNA
tgagatttgtctgtgttgttatgtgtatcagtttccctttatttctgagcaagagttcagggtttgtttattccccaatt

SEQ ID NO: 41015 - DNA, 80 bp, synthetic construct
  source 1..80: mol_type = other DNA
taagaaacctgcaagctgctttccaaagagctgtaccgtcttgcattctcaacagtgatgcatgagcattcattatcttt

SEQ ID NO: 41016 - DNA, 80 bp, synthetic construct
  source 1..80: mol_type = other DNA
atgccaggaaactccccccacctccagcaggggagtggagaggggagaggaaaaggaaggtagctggtaaagggtatgtc

SEQ ID NO: 41017 - DNA, 80 bp, synthetic construct; identical to SEQ ID NO: 14126
  source 1..80: mol_type = other DNA

SEQ ID NO: 41018 - DNA, 80 bp, synthetic construct
  source 1..80: mol_type = other DNA
cccaccaccgcgcctggctaattttttgtatttttagtagagacggggtttcaccgtgttagccaggatggtctcgatct

SEQ ID NO: 41019 - DNA, 80 bp, synthetic construct
  source 1..80: mol_type = other DNA
gttcccactaccagctaactgaatgttgacaccccaaagagagaaaaattggttggtgagttagtcactgcttttctctt

SEQ ID NO: 41020 - DNA, 80 bp, synthetic construct; identical to SEQ ID NO: 14127
  source 1..80: mol_type = other DNA

SEQ ID NO: 41021 - DNA, 80 bp, synthetic construct
  source 1..80: mol_type = other DNA
gaataaagccactataagcattcacgaacagctttttctatgaacataagttgtcatgttcttggcctcttctctccact

SEQ ID NO: 41022 - DNA, 80 bp, synthetic construct
  source 1..80: mol_type = other DNA
ctgggttcatgccattctcctgcctcagcctcccaagtagctgggactacaggtgcccaccatcatgcccggctaaattt

SEQ ID NO: 41023 - DNA, 80 bp, synthetic construct
  source 1..80: mol_type = other DNA
gcaccggccaaggtcagttttttaaaaagccaattaatatctgatttgtgattctgaatctttaacatatttaaccgtct

SEQ ID NO: 41024 - DNA, 80 bp, synthetic construct; identical to SEQ ID NO: 14128
  source 1..80: mol_type = other DNA

SEQ ID NO: 41025 - DNA, 80 bp, synthetic construct
  source 1..80: mol_type = other DNA
cagatcaacaggatcccaaggcagaagaatttttcttagtacagaacaaaatgaaaagtctcccatgtctacttctttct

SEQ ID NO: 41026 - DNA, 80 bp, synthetic construct
  source 1..80: mol_type = other DNA
agtaggggcggccgggcagaggcacccctcacctcccggacggggcggctggccgggcagggggctgacccccccacctc

SEQ ID NO: 41027 - DNA, 80 bp, synthetic construct
  source 1..80: mol_type = other DNA
acttatcagacggggcggccgggcagagacactcctcacctcccagacggggtggcggccgggcagaggcgctcctcaca

SEQ ID NO: 41028 - DNA, 80 bp, synthetic construct
  source 1..80: mol_type = other DNA
acgatgggcggccaggcagagacgctcctcacttcccagacggggtggcggccgggcagaggctgcaatctcggcacttt

SEQ ID NO: 41029 - DNA, 80 bp, synthetic construct; identical to SEQ ID NO: 14129
  source 1..80: mol_type = other DNA

SEQ ID NO: 41030 - DNA, 80 bp, synthetic construct
  source 1..80: mol_type = other DNA
agggagagggagaggaccgtctgctttaaaaatgggaaatatcagtatttgaggcaatgaagtcaaaattgacctaatga

SEQ ID NO: 41031 - DNA, 80 bp, synthetic construct
  source 1..80: mol_type = other DNA
tatactgtacctattttgtgttgtcagatgtacgtgtgtgagttactgattttcttcctcacacatggagacacttggca

SEQ ID NO: 41032 - DNA, 80 bp, synthetic construct; identical to SEQ ID NO: 14130
  source 1..80: mol_type = other DNA

SEQ ID NO: 41033 - DNA, 80 bp, synthetic construct
  source 1..80: mol_type = other DNA
accacacccagctaattttttaaaaatatttttagtagagatggggtttcaccatgttggccaggctgatctcgaactcc

SEQ ID NO: 41034 - DNA, 80 bp, synthetic construct
  source 1..80: mol_type = other DNA
gatgcctgattaagattattttggaatcattataatgggatggagcttcgagtagcattggacagggagtcaaggaacca

SEQ ID NO: 41035 - DNA, 80 bp, synthetic construct
  source 1..80: mol_type = other DNA
taaaaattattccatggcaccccattgcaggagatattaatagatacagctgaggaaaagggttctatggtcaaagttgt

SEQ ID NO: 41036 - DNA, 80 bp, synthetic construct
  source 1..80: mol_type = other DNA
cccagtagctgggattacaggcgcgcacaccacacccagctagtttttgtatttttagtagagatggggtttcaccatgt

SEQ ID NO: 41037 - DNA, 80 bp, synthetic construct; identical to SEQ ID NO: 14131
  source 1..80: mol_type = other DNA

SEQ ID NO: 41038 - DNA, 80 bp, synthetic construct
  source 1..80: mol_type = other DNA
gtctcagtgtccttggacaaggaagaagttaagtctcttttcaatcatgttctcagctttttctctcctctcttctcttc

SEQ ID NO: 41039 - DNA, 80 bp, synthetic construct
  source 1..80: mol_type = other DNA
ggctaacatggtgaaaccccatctctacttaaaaaatacaaaaaaattagccgggcgtggtggcgggcgcctgtatagtc

SEQ ID NO: 41040 - DNA, 80 bp, synthetic construct
  source 1..80: mol_type = other DNA
cttgttgataactaattgtgggtcttttccttttccctgacacacattctgcaagagaagacagatggcaggcaggaggc

SEQ ID NO: 41041 - DNA, 80 bp, synthetic construct; identical to SEQ ID NO: 14132
  source 1..80: mol_type = other DNA

SEQ ID NO: 41042 - DNA, 80 bp, synthetic construct
  source 1..80: mol_type = other DNA
cctaccatctggtgtttgtccttctctgtttcctgcctcctgcttcctacagctcttggctctgctgctttctgagtgtt

SEQ ID NO: 41043 - DNA, 80 bp, synthetic construct
  source 1..80: mol_type = other DNA
gttttgtgtacacatctgaaattgatcgtcatggacaggggttcacgttctgtgcttcgtgagatctgagtcctgtgtgg

SEQ ID NO: 41044 - DNA, 80 bp, synthetic construct
  source 1..80: mol_type = other DNA
acgtgcctcactgtcatctgaccaatgagaatcatttgttcagaaaactaaggtccatagagcaaggcacagacctgtcc

SEQ ID NO: 41045 - DNA, 80 bp, synthetic construct; identical to SEQ ID NO: 14133
  source 1..80: mol_type = other DNA

SEQ ID NO: 41046 - DNA, 80 bp, synthetic construct
  source 1..80: mol_type = other DNA
tgaggcccccccgcaggtgagtggcagatcaaggatgttgacctaaagttggtgctatgggcctaatgtttttgtgccca

SEQ ID NO: 41047 - DNA, 80 bp, synthetic construct
  source 1..80: mol_type = other DNA
gacgcagtaagaaggtggcctgcactgaggaaccaaatgggccagcacctagatattggacttcctaacttttagactca

SEQ ID NO: 41048 - DNA, 80 bp, synthetic construct
  source 1..80: mol_type = other DNA
ttttggagcctccagggaaaccctgggccctgcaggttcttgtccagaaccactggccacacgccctctcagccgcactc

SEQ ID NO: 41049 - DNA, 80 bp, synthetic construct; identical to SEQ ID NO: 14134
  source 1..80: mol_type = other DNA

SEQ ID NO: 41050 - DNA, 80 bp, synthetic construct
  source 1..80: mol_type = other DNA
ttcgagaccagcctggccaacatggtgaaacccagtatctataaaaacacaagcattagccaggcatgatggtgctcatg

SEQ ID NO: 41051 - DNA, 80 bp, synthetic construct
  source 1..80: mol_type = other DNA
tatcaagaagagcccttcccaaacacccagctaccttccaatgggcttttccttcccttcataacttgggtgttttcaag

SEQ ID NO: 41052 - DNA, 80 bp, synthetic construct; identical to SEQ ID NO: 14135
  source 1..80: mol_type = other DNA

SEQ ID NO: 41053 - DNA, 80 bp, synthetic construct
  source 1..80: mol_type = other DNA
tgcccagttaattaaaaaattatttttgtagggctgggagcggtgactcatgcctgtaatcccagcactttgggaggccg

SEQ ID NO: 41054 - DNA, 80 bp, synthetic construct
  source 1..80: mol_type = other DNA
aggcggaggttgcagcgagccgagatcacaccattgcactccagcctgggcaacaagagcgaaactctgtctcaaaaaaa

SEQ ID NO: 41055 - DNA, 80 bp, synthetic construct
  source 1..80: mol_type = other DNA
gacccctgctgctgtcagattgcccgtctgggagctggggtcatacttgtggggtcataacagggccttgggcagcagac

SEQ ID NO: 41056 - DNA, 80 bp, synthetic construct
  source 1..80: mol_type = other DNA
agcaaggaggtccagcaccgctcgtggacccaaactgtcctccaggaaaggcgggaggcagcttaggtgacctctgcacg

SEQ ID NO: 41057 - DNA, 80 bp, synthetic construct; identical to SEQ ID NO: 14136
  source 1..80: mol_type = other DNA

SEQ ID NO: 41058 - DNA, 80 bp, synthetic construct
  source 1..80: mol_type = other DNA
ccatgcacacgcctagatgcagaaattttctgtattggttgtttatccatcaccaacttctaaagcagcagatgggaaaa

SEQ ID NO: 41059 - DNA, 80 bp, synthetic construct
  source 1..80: mol_type = other DNA
cttccttctgcccctgggcagccccgttggtttcagcagatggtcctgatgtctgaggacctgccacagtttgcgccagt

SEQ ID NO: 41060 - DNA, 80 bp, synthetic construct; identical to SEQ ID NO: 14137
  source 1..80: mol_type = other DNA

SEQ ID NO: 41061 - DNA, 80 bp, synthetic construct
  source 1..80: mol_type = other DNA
aggtgggattcatccatcatccaccacggcccaggagccagctgtcctcacttctggggtgacttgtgagtagataacaa

SEQ ID NO: 41062 - DNA, 80 bp, synthetic construct
  source 1..80: mol_type = other DNA
acctcattctagactcttccaggcagctttctgtttgttctctaacagaaacatagaaacaaaccagcatcttttctaaa

SEQ ID NO: 41063 - DNA, 80 bp, synthetic construct
  source 1..80: mol_type = other DNA
gatgttgggagcccccaaacccatggaaggggtttcctgaggacgtcctatagtccctgaacatgcagccgagggttcct

SEQ ID NO: 41064 - DNA, 80 bp, synthetic construct
  source 1..80: mol_type = other DNA
ctgtaatcttagcactttgggaggccaaagcgggtggatcacctgaggtcaggagtttgagaccagcctggccaacatgg

SEQ ID NO: 41065 - DNA, 80 bp, synthetic construct; identical to SEQ ID NO: 14138
  source 1..80: mol_type = other DNA

SEQ ID NO: 41066 - DNA, 80 bp, synthetic construct
  source 1..80: mol_type = other DNA
tgctctcctctccacattccttcactgctcattggcattcagggttgggcataaatattaccttcttgggggcctgttat

SEQ ID NO: 41067 - DNA, 80 bp, synthetic construct
  source 1..80: mol_type = other DNA
tgtccagtcagccttctgtatctgcaactttcacatctgtggatacaactgaccgcagattgaaaatactcagaaataaa

SEQ ID NO: 41068 - DNA, 80 bp, synthetic construct
  source 1..80: mol_type = other DNA
tttatacaaatactacaccattttatatcagggacttgagcatccatggactttgccatctgaggggggcaccagaacca

SEQ ID NO: 41069 - DNA, 80 bp, synthetic construct; identical to SEQ ID NO: 14139
  source 1..80: mol_type = other DNA

SEQ ID NO: 41070 - DNA, 80 bp, synthetic construct
  source 1..80: mol_type = other DNA
gagagcaaggctgaagcgataggatgaaatgcatttaaatgtcatgagtgttattattagtcgtaatcttatctttgtta

SEQ ID NO: 41071 - DNA, 80 bp, synthetic construct
  source 1..80: mol_type = other DNA
atcctccacgccctttgggcgctggtcattcagagaggccctctcagacacgcctggcctctttagaggctctctcatcc

SEQ ID NO: 41072 - DNA, 80 bp, synthetic construct; identical to SEQ ID NO: 14140
  source 1..80: mol_type = other DNA

SEQ ID NO: 41073 - DNA, 80 bp, synthetic construct
  source 1..80: mol_type = other DNA
agggaaaaacaggtgtgtgagcactaggttggtgacgaggtttagcagcaggtggactctggagcgtgactctggagttg

SEQ ID NO: 41074 - DNA, 80 bp, synthetic construct
  source 1..80: mol_type = other DNA
aggagttcatctgtggaaatcatttggcatgatgcctactcttattccttgtctgtggggccctgttttgtgggcttgcc

SEQ ID NO: 41075 - DNA, 80 bp, synthetic construct
  source 1..80: mol_type = other DNA
gtatgggaccctgtgccggctgaatcgcatggtagctcagggcatagatgctaaatgggacggtcctgggtttgcaccct

SEQ ID NO: 41076 - DNA, 80 bp, synthetic construct
  source 1..80: mol_type = other DNA
gttcaagaccagactggccaacatggtgaaaccctgtctctacaaaaatacaaaaattagccaggcatgatggcgggtga

SEQ ID NO: 41077 - DNA, 80 bp, synthetic construct; identical to SEQ ID NO: 14141
  source 1..80: mol_type = other DNA

SEQ ID NO: 41078 - DNA, 80 bp, synthetic construct
  source 1..80: mol_type = other DNA
acctgtcagatattcacagttgtctgtgtcacttgttctcgcattgatagacctggagggacagggaggccagcccgttg

SEQ ID NO: 41079 - DNA, 80 bp, synthetic construct
  source 1..80: mol_type = other DNA
gtccttctaggattcttttacggaaccaaagataatagtcccctttgataccacatacaagccagtcgtattccatgcct

SEQ ID NO: 41080 - DNA, 80 bp, synthetic construct
  source 1..80: mol_type = other DNA
tcatgagtagacagaatgtggatttccagaaggtgcctcggcagctccactgtaggcataaagcaggtgattttgagatg

SEQ ID NO: 41081 - DNA, 80 bp, synthetic construct; identical to SEQ ID NO: 14142
  source 1..80: mol_type = other DNA

SEQ ID NO: 41082 - DNA, 80 bp, synthetic construct
  source 1..80: mol_type = other DNA
gaactcatctccccaagctttgtccccatgggtcacctactttgcaaccctagtttcgtgatttggttaatggtgtttaa

SEQ ID NO: 41083 - DNA, 80 bp, synthetic construct
  source 1..80: mol_type = other DNA
tcaccaaggctggagtgcagtggtgcagtctcagctcactgcaacctccatctcctgggttcaaatgattctcctgcctc

SEQ ID NO: 41084 - DNA, 80 bp, synthetic construct
  source 1..80: mol_type = other DNA
attcttttaaacttcagctcattagagctgggtttgtgtcataagtgagagagccctgaggtgcttggtttgaagcaaag

SEQ ID NO: 41085 - DNA, 80 bp, synthetic construct; identical to SEQ ID NO: 14143
  source 1..80: mol_type = other DNA

SEQ ID NO: 41086 - DNA, 80 bp, synthetic construct
  source 1..80: mol_type = other DNA
cttacctgtgcttccttcagaaggtgaccaaccagtgaactctgcatgttaccttggccttgtatagggtggctgggtcg

SEQ ID NO: 41087 - DNA, 80 bp, synthetic construct
  source 1..80: mol_type = other DNA
tttttgcctgttgaatgaagttagagttttcggtttctctgtccccttagctgaggggctttcacatcctttaagagagc

SEQ ID NO: 41088 - DNA, 80 bp, synthetic construct; identical to SEQ ID NO: 14144
  source 1..80: mol_type = other DNA

SEQ ID NO: 41089 - DNA, 80 bp, synthetic construct
  source 1..80: mol_type = other DNA
tattaccaccagagtgaagttcctgactgtgaggtttcagacgggataagcgcctggagtaaagtgtcagggcacatggt

SEQ ID NO: 41090 - DNA, 80 bp, synthetic construct
  source 1..80: mol_type = other DNA
tcctgagacagccagtcctctcacttctgtgtttcctttattacactttactatgaaggagaattgatacagaggaagaa

SEQ ID NO: 41091 - DNA, 80 bp, synthetic construct
  source 1..80: mol_type = other DNA
taatggttttaaagtcatgacatactgtgcttttggctgctgctgtttctgactgatgaccccaatgagactccaaaaaa

SEQ ID NO: 41092 - DNA, 80 bp, synthetic construct
  source 1..80: mol_type = other DNA
gcatgtgtaaaaatgagtgttatgcgcttagtgttccgaattcaacatcagtgaggaaagggagggccgcaggagtttgg

SEQ ID NO: 41093 - DNA, 80 bp, synthetic construct; identical to SEQ ID NO: 14145
  source 1..80: mol_type = other DNA

SEQ ID NO: 41094 - DNA, 80 bp, synthetic construct
  source 1..80: mol_type = other DNA
cttcctgtgtctatgtgttctcattgttcaattcccacctatgaatgagaacacgtggtgtttggttttttgtccttgct

SEQ ID NO: 41095 - DNA, 80 bp, synthetic construct
  source 1..80: mol_type = other DNA
agtctatcattgttggacatttgggttggttccaagtctttgctattgtgaatagtgccgcaataaacatacgtgtgcat

SEQ ID NO: 41096 - DNA, 80 bp, synthetic construct; identical to SEQ ID NO: 14146
  source 1..80: mol_type = other DNA

SEQ ID NO: 41097 - DNA, 80 bp, synthetic construct
  source 1..80: mol_type = other DNA
ggaatagcttcctgcagttcacaagggtcgtaccatgatcaattattattacgttacacatcacttctgtaccaatttat

SEQ ID NO: 41098 - DNA, 80 bp, synthetic construct
  source 1..80: mol_type = other DNA
aaatctttaacctccatgtcttcaagtgcagcatcagtgggtcatggatccagaaggttggctgattgggattctcttgc

SEQ ID NO: 41099 - DNA, 80 bp, synthetic construct
  source 1..80: mol_type = other DNA
ggacgcgaaggggtttcctgatgtcaaaataaaaataacgatgtctgtagtttcccaggaggaataattgttgatgttga

SEQ ID NO: 41100 - DNA, 80 bp, synthetic construct; identical to SEQ ID NO: 14147
  source 1..80: mol_type = other DNA

SEQ ID NO: 41101 - DNA, 80 bp, synthetic construct
  source 1..80: mol_type = other DNA
tcgctctggattcgcttgtattttctggatttgcttgtattttctggatttgtctatagatggaatcatatagcaagtac

SEQ ID NO: 41102 - DNA, 80 bp, synthetic construct
  source 1..80: mol_type = other DNA
cagtttgtttacccactcaactgtttgcgcaggtgggttgtttctagtctctctatggacagagatttccttttctcttg

SEQ ID NO: 41103 - DNA, 80 bp, synthetic construct
  source 1..80: mol_type = other DNA
tggttattctttgggacaaggaatcgttgtttttagataagcttccccaattctcctgtggcctctcccttcccgagacg

SEQ ID NO: 41104 - DNA, 80 bp, synthetic construct
  source 1..80: mol_type = other DNA
gaagccatggcagatgcgttgactctctgtagggctggcaagctgtgtggcgagtcccttatccaatgtcgctgtgtccc

SEQ ID NO: 41105 - DNA, 80 bp, synthetic construct; identical to SEQ ID NO: 14148
  source 1..80: mol_type = other DNA

SEQ ID NO: 41106 - DNA, 80 bp, synthetic construct
  source 1..80: mol_type = other DNA
tgcaccccggtgtctttctgtgtcctgacctcttcttttttcttcaagacggagtctcgctctgttgcccaggctggagt

SEQ ID NO: 41107 - DNA, 80 bp, synthetic construct
  source 1..80: mol_type = other DNA
aggatggtctcgatctcctgacctcgtgatccacccgccttggcctcccaaagtgctgggattacaggcgtgagccactg

SEQ ID NO: 41108 - DNA, 80 bp, synthetic construct; identical to SEQ ID NO: 14149
  source 1..80: mol_type = other DNA

SEQ ID NO: 41109 - DNA, 80 bp, synthetic construct
  source 1..80: mol_type = other DNA
ggctcctcattcctgttgatggtgtgtccttcaaaacgtgccgtggttctcaaggagtgagtggcggtggcctgcagccc

SEQ ID NO: 41110 - DNA, 80 bp, synthetic construct
  source 1..80: mol_type = other DNA
gatcatgtgaaaagtagagcagctttgggaaagtgtgaagtctctgttgtgtctctggagaagttatcgcctggtttgca

SEQ ID NO: 41111 - DNA, 80 bp, synthetic construct
  source 1..80: mol_type = other DNA
gtattgcactggggccagaatgggaagagccctgaatacaagagaactgtggtattggggctatacctataagcatcagg

SEQ ID NO: 41112 - DNA, 80 bp, synthetic construct; identical to SEQ ID NO: 14150
  source 1..80: mol_type = other DNA

SEQ ID NO: 41113 - DNA, 80 bp, synthetic construct
  source 1..80: mol_type = other DNA
cactgtcacacttgttgcctcaagctcacaaatggagtttttcttgttggttttaatacctgcaggaacgtgaatgtcgg

SEQ ID NO: 41114 - DNA, 80 bp, synthetic construct
  source 1..80: mol_type = other DNA
cagcatggaaatatattggtgtataagtacctgttccagtccttgttttcacttctcttgggactatacctagaattgga

SEQ ID NO: 41115 - DNA, 80 bp, synthetic construct
  source 1..80: mol_type = other DNA
actctgtcacccaggccagagtgccgtggcccaatcccagctcactgcaacctctgcctcccgggttcaagcaattctcc

SEQ ID NO: 41116 - DNA, 80 bp, synthetic construct
  source 1..80: mol_type = other DNA
tacaggcatgaaccaccacgcccatctgatttcccgttttctgcagggtaaagcctcagggccggcccattgctttcagg

SEQ ID NO: 41117 - DNA, 80 bp, synthetic construct; identical to SEQ ID NO: 14151
  source 1..80: mol_type = other DNA

SEQ ID NO: 41118 - DNA, 80 bp, synthetic construct
  source 1..80: mol_type = other DNA
ccacacagcctgtatttgagccactgttctgtaatcagcctctcctgtggtggcatcttcttcacagggagggatctggc

SEQ ID NO: 41119 - DNA, 80 bp, synthetic construct
  source 1..80: mol_type = other DNA
accagtgatggagaaccaggctgctacttagctttgtagatggattcggtaaagactaaatctcttatttctaagacgtg

SEQ ID NO: 41120 - DNA, 80 bp, synthetic construct; identical to SEQ ID NO: 14152
  source 1..80: mol_type = other DNA

SEQ ID NO: 41121 - DNA, 80 bp, synthetic construct
  source 1..80: mol_type = other DNA
tctcccaggtcttcaccaggccagttcctcctggagctccagactgcagcagagctgtctcttgctgggatgggagacac

SEQ ID NO: 41122 - DNA, 80 bp, synthetic construct
  source 1..80: mol_type = other DNA
gggttccggctggggcaggagaggcgtgtgctgcggccctggatgggctcatgggcagatggactatcgagcagatggat

SEQ ID NO: 41123 - DNA, 80 bp, synthetic construct
  source 1..80: mol_type = other DNA
gccccagaggcttccgggaggcttctagaagctcttgagcgctttctcctgcccaacatgaatgtcttgtcttaaaggtg

SEQ ID NO: 41124 - DNA, 80 bp, synthetic construct
  source 1..80: mol_type = other DNA
tcagggcctttcagagctgataaggggcctggcctgctttcagttttttggttttgttttgaggcttccagttcattaaa

SEQ ID NO: 41125 - DNA, 80 bp, synthetic construct; identical to SEQ ID NO: 14153
  source 1..80: mol_type = other DNA

SEQ ID NO: 41126 - DNA, 80 bp, synthetic construct
  source 1..80: mol_type = other DNA
agatgagatgaagtatttgactttgaggcttctgtgaaaatgaatccacaccccattcccacctcgtcccctaacctgca

SEQ ID NO: 41127 - DNA, 80 bp, synthetic construct
  source 1..80: mol_type = other DNA
atggtgtctctggcaaaaatgcaagtacccttggaggctaggccttggggtggagctagctcagacacctgccctctggg

SEQ ID NO: 41128 - DNA, 80 bp, synthetic construct; identical to SEQ ID NO: 14154
  source 1..80: mol_type = other DNA

SEQ ID NO: 41129 - DNA, 80 bp, synthetic construct
  source 1..80: mol_type = other DNA
ctgggtacaggtaggaaatgaaacctgcccaacatcaaacaaccagtcaaggaagctgaggtttgggcccagatggtgta

SEQ ID NO: 41130 - DNA, 80 bp, synthetic construct
  source 1..80: mol_type = other DNA
ctgcaaatggttatcattttagtatatcattaatataaaaatccttttcttttttgtagaaatgttgcctgggctggtct

SEQ ID NO: 41131 - DNA, 80 bp, synthetic construct
  source 1..80: mol_type = other DNA
agttacaatccagtttatcttacctcagagcacctctgaactcccaccagccacatctcaagtgctcctcagcttctgtg

SEQ ID NO: 41132 - DNA, 80 bp, synthetic construct
  source 1..80: mol_type = other DNA
ctgccagtgacaccacgtgtctctcccaagtgtgagtgctggatgcaaggctgccgtcctggcaaagggatgtctcactg

SEQ ID NO: 41133 - DNA, 80 bp, synthetic construct; identical to SEQ ID NO: 14155
  source 1..80: mol_type = other DNA

SEQ ID NO: 41134 - DNA, 80 bp, synthetic construct
  source 1..80: mol_type = other DNA
cctgttttctcaaatgggtctctaatgaaagaggttaaagaaactgtcacttaaagcatttcctgggttggtcctgagta

SEQ ID NO: 41135 - DNA, 80 bp, synthetic construct
  source 1..80: mol_type = other DNA
aaaaagcaaatcagggtttgtaacagttaagtctgtcccggggaagtgttccattgcaccttgatttatgccactggaaa

SEQ ID NO: 41136 - DNA, 80 bp, synthetic construct; identical to SEQ ID NO: 14156
  source 1..80: mol_type = other DNA

SEQ ID NO: 41137 - DNA, 80 bp, synthetic construct
  source 1..80: mol_type = other DNA
ggctcataacccctcctttccttgcaagctcatattagatgctgcatgtggaagtacagagcaaagtaccccacaaatcc

SEQ ID NO: 41138 - DNA, 80 bp, synthetic construct
  source 1..80: mol_type = other DNA
aatgtactcaaaaaatagagaggatagtgtaatgaacaccctgtaccctgcagccaccactacaactcttaactatttca

SEQ ID NO: 41139 - DNA, 80 bp, synthetic construct
  source 1..80: mol_type = other DNA
ctcattcttgccacagtctgtgattggatttttcagtaccatctaattgttggttgtacaatatagagacagtcacacgt

SEQ ID NO: 41140 - DNA, 80 bp, synthetic construct; identical to SEQ ID NO: 14157
  source 1..80: mol_type = other DNA

SEQ ID NO: 41141 - DNA, 80 bp, synthetic construct
  source 1..80: mol_type = other DNA
gaaggccgattgtttttatctgtttgggatcaaaggctcagtgtgtataacaagcttctggtaaaactctttttcttgtc

SEQ ID NO: 41142 - DNA, 80 bp, synthetic construct
  source 1..80: mol_type = other DNA
cactaatgtgtcccctgtgtctagaacagtgttcgcacagagcacatgctcaataaatttatattgaagaataggaggga

SEQ ID NO: 41143 - DNA, 80 bp, synthetic construct
  source 1..80: mol_type = other DNA
agggaagaaaggaagggagggagagagggagggaggaagggagagaggaggaagggaaggaggaagggagggagagaaga

SEQ ID NO: 41144 - DNA, 80 bp, synthetic construct
  source 1..80: mol_type = other DNA
gagaggaagaagggagtgaaaagctacatctgtccgtccattattaataattcatcacaaatctttcatttcaggataag

SEQ ID NO: 41145 - DNA, 80 bp, synthetic construct; identical to SEQ ID NO: 14158
  source 1..80: mol_type = other DNA

SEQ ID NO: 41146 - DNA, 80 bp, synthetic construct
  source 1..80: mol_type = other DNA
ggctttcaggtgaagtgagttgcccaggtagacacagccaggaagcaggcttagatccaaacacttgtctgatcccaaag

SEQ ID NO: 41147 - DNA, 80 bp, synthetic construct
  source 1..80: mol_type = other DNA
agtaatcaaactgggcacatcctctggggctgcacctcatgttagagacagtggtgtgggctctgttcccctccccaccc

SEQ ID NO: 41148 - DNA, 80 bp, synthetic construct; identical to SEQ ID NO: 14159
  source 1..80: mol_type = other DNA

SEQ ID NO: 41149 - DNA, 80 bp, synthetic construct
  source 1..80: mol_type = other DNA
acatggtgggctcttggctggctggaacgtgaccccacaccctgcgtctggttggacaagcatccctcagcatggactgg

SEQ ID NO: 41150 - DNA, 80 bp, synthetic construct
  source 1..80: mol_type = other DNA
aacatggtgtctgagctactaacctcccaccttgggtatgcccttgaacttttctgtaagccaggctttccaacccccaa

SEQ ID NO: 41151 - DNA, 80 bp, synthetic construct
  source 1..80: mol_type = other DNA
agggagcagattttattttcagaaactgtgatttttcaagatttttttttatttaaaaaagaaaggctttgggggatggg

SEQ ID NO: 41152 - DNA, 80 bp, synthetic construct; identical to SEQ ID NO: 14160
  source 1..80: mol_type = other DNA

SEQ ID NO: 41153 - DNA, 80 bp, synthetic construct
  source 1..80: mol_type = other DNA
tggtgacttggccatagtcacacagccacctggatagagatgagtggtgagtggtgaacccggagaaacatggcttcttg

SEQ ID NO: 41154 - DNA, 80 bp, synthetic construct
  source 1..80: mol_type = other DNA
gcctaggtgtggttctttggtttttcagtttgtataaccatgttctttgttcagctcctatcagggttagggaggtcaaa

SEQ ID NO: 41155 - DNA, 80 bp, synthetic construct
  source 1..80: mol_type = other DNA
ttgagtaataaggaccccagttgctgaacagctcctggaagactatctgttcccggctgggcgtgatggctcaagcctgt

SEQ ID NO: 41156 - DNA, 80 bp, synthetic construct
  source 1..80: mol_type = other DNA
gcaggagaatcgcttgaacctgagaggcggaggttacaatgagctgagatcatgccgctgcattccagcctgagtgacag

SEQ ID NO: 41157 - DNA, 80 bp, synthetic construct; identical to SEQ ID NO: 14161
  source 1..80: mol_type = other DNA

SEQ ID NO: 41158 - DNA, 80 bp, synthetic construct
  source 1..80: mol_type = other DNA
tgtgtgtgtagccttctgctcacatcggtcctgcaacagccctgtgttgagacataatcatctcttccttgtttgtctca

SEQ ID NO: 41159 - DNA, 80 bp, synthetic construct
  source 1..80: mol_type = other DNA
gattgttctgtagtggtggctttgcagaggggcaagacttctgcaagtcagtccttgagggatgagcggacattagattg

SEQ ID NO: 41160 - DNA, 80 bp, synthetic construct; identical to SEQ ID NO: 14162
  source 1..80: mol_type = other DNA

SEQ ID NO: 41161 - DNA, 80 bp, synthetic construct
  source 1..80: mol_type = other DNA
aaggaactgctgctgctgcctcctcctcctcctcttcctcctcctcctcttcctcctcctcctcttcctcctcctcctct

SEQ ID NO: 41162 - DNA, 80 bp, synthetic construct
  source 1..80: mol_type = other DNA
tcttctcttcttcctcttcatcctcttcctcatcctcctccttatcctcatcctcctccttcttctcttcctcctcatcc

SEQ ID NO: 41163 - DNA, 80 bp, synthetic construct
  source 1..80: mol_type = other DNA
tctcctcctcttcctccttcttctcctcctcttcctccttctcctcctcttcctccttcttctcctcctcttcctccttc

SEQ ID NO: 41164 - DNA, 80 bp, synthetic construct
  source 1..80: mol_type = other DNA
cctcctcctcttcctccttctcctcctattcctccttcccctcctcttcctcttcctcctccttctcctcctcttcctct

SEQ ID NO: 41165 - DNA, 80 bp, synthetic construct; identical to SEQ ID NO: 14163
  source 1..80: mol_type = other DNA

SEQ ID NO: 41166 - DNA, 80 bp, synthetic construct
  source 1..80: mol_type = other DNA
tgaggataccaaaatctgcagatgcacaagtccctgacagaaaatggtgtcatatttgcatataacctatacacagcctc

SEQ ID NO: 41167 - DNA, 80 bp, synthetic construct
  source 1..80: mol_type = other DNA
aatccacaaatgcagagcccgtggatatgggaggccaactgcgtgttgactttatgttttacaaagcaccctctaatcat

SEQ ID NO: 41168 - DNA, 80 bp, synthetic construct
  source 1..80: mol_type = other DNA
ttatgcagccaggaagtggcttactctctttgaatcttaccccattcttgtgaaacaggtggaggacatatttttatctc

SEQ ID NO: 41169 - DNA, 80 bp, synthetic construct; identical to SEQ ID NO: 14164
  source 1..80: mol_type = other DNA

SEQ ID NO: 41170 - DNA, 80 bp, synthetic construct
  source 1..80: mol_type = other DNA
ttatgttgactgcggattgccaggtaccaagtatcaggcaaattggcttctttgtacattcctccttccggatagacctt

SEQ ID NO: 41171 - DNA, 80 bp, synthetic construct
  source 1..80: mol_type = other DNA
ggagtaggaacaatactctattgttacgttaaacctgaaatagacgccttcagatggagggggtgagtatgaatctatta

SEQ ID NO: 41172 - DNA, 80 bp, synthetic construct
  source 1..80: mol_type = other DNA
tggggaaaaacagagacccaggagctgtgaaatgagggaggctcagcttctccacttactttcatggtgtgaggagacgc

SEQ ID NO: 41173 - DNA, 80 bp, synthetic construct; identical to SEQ ID NO: 14165
  source 1..80: mol_type = other DNA

SEQ ID NO: 41174 - DNA, 80 bp, synthetic construct
  source 1..80: mol_type = other DNA
gacccaacctgccgccagccacctgtcaagctggacctctgggcttttctctccaaatgctcttgttctcaggaaagggc

SEQ ID NO: 41175 - DNA, 80 bp, synthetic construct
  source 1..80: mol_type = other DNA
tctaggacaggggccagcaaactgtgacccttaggccagttctatttttacaaataaagttctttagttcttttggaaca

SEQ ID NO: 41176 - DNA, 80 bp, synthetic construct; identical to SEQ ID NO: 14166
  source 1..80: mol_type = other DNA

SEQ ID NO: 41177 - DNA, 80 bp, synthetic construct
  source 1..80: mol_type = other DNA
gtggtggcatgcacctgtagtcccagctactcaggaggctgaggcaggagaatcgcttgaacctgggaggcggaggttgc

SEQ ID NO: 41178 - DNA, 80 bp, synthetic construct
  source 1..80: mol_type = other DNA
cactggtcaggacacagttggcgctcaatagatattagctgaataaataagtggaaaacccatcaggcattgctggtggg

SEQ ID NO: 41179 - DNA, 80 bp, synthetic construct
  source 1..80: mol_type = other DNA
agcaaaatcatggaaccatcccaaatgcctgtcaatcaatgagtagataaagaaactgagatatatatatatatgatgga

SEQ ID NO: 41180 - DNA, 80 bp, synthetic construct
  source 1..80: mol_type = other DNA
aagaatgatacgatggacttcagggacttgtggggaagggtggggggtggtggggcataaaatagtaaggtgcagcgtat

SEQ ID NO: 41181 - DNA, 80 bp, synthetic construct; identical to SEQ ID NO: 14167
  source 1..80: mol_type = other DNA

SEQ ID NO: 41182 - DNA, 80 bp, synthetic construct
  source 1..80: mol_type = other DNA
ttccaggcgtcacgtctagtcccatttagatgctcagctgaagaaggtacttttggaaaagaacctttcctaaagctccc

SEQ ID NO: 41183 - DNA, 80 bp, synthetic construct
  source 1..80: mol_type = other DNA
tgaacaggcactgttcaatgtctgccacaaagttctgctgcagatggaagaagagatgtttagttgtggctggggagggc

SEQ ID NO: 41184 - DNA, 80 bp, synthetic construct; identical to SEQ ID NO: 14168
  source 1..80: mol_type = other DNA

SEQ ID NO: 41185 - DNA, 80 bp, synthetic construct
  source 1..80: mol_type = other DNA
agccacctgacctgtgagaacttggattctgtcctggtatctggtggccacagctgaagctggcagctcccctcacacca

SEQ ID NO: 41186 - DNA, 80 bp, synthetic construct
  source 1..80: mol_type = other DNA
ggtttggaaatagaagctaccagagagatctcattctttcttgggtgtaatttcaaagtcatggtgagaaaatgaaatgt

SEQ ID NO: 41187 - DNA, 80 bp, synthetic construct
  source 1..80: mol_type = other DNA
cccactgtacagaggtcagatgtctctcccatcctccaccaggctgctctggcaaaggactttgctatggtttgaatgtc

SEQ ID NO: 41188 - DNA, 80 bp, synthetic construct
  source 1..80: mol_type = other DNA
aggagcgggtttgttatgacaagaataggttgttataacaacctactcctgtttggccccctcttgctctcttgctcttg

SEQ ID NO: 41189 - DNA, 80 bp, synthetic construct; identical to SEQ ID NO: 14169
  source 1..80: mol_type = other DNA

SEQ ID NO: 41190 - DNA, 80 bp, synthetic construct
  source 1..80: mol_type = other DNA
tgtctttctagctatgtttcttcctgaaatattgacagccctggactcaggcctcagcattctgggggaagtgcctctac

SEQ ID NO: 41191 - DNA, 80 bp, synthetic construct
  source 1..80: mol_type = other DNA
cacaattccaagtgcctaataaggcagatgtgttcctacctctggggagctgacacctagtgggaattattcaggttaac

SEQ ID NO: 41192 - DNA, 80 bp, synthetic construct; identical to SEQ ID NO: 14170
  source 1..80: mol_type = other DNA

SEQ ID NO: 41193 - DNA, 80 bp, synthetic construct
  source 1..80: mol_type = other DNA
cgcacttcctggacacccttcgttcttttcatgctctggcatgttcagctttgctttctcttcactgagcctttgcacat

SEQ ID NO: 41194 - DNA, 80 bp, synthetic construct
  source 1..80: mol_type = other DNA
agtcacaccttttattaaagtaaaggctggcacatccacttcccaccaccctgggagacggggaccaggccctgtctcct

SEQ ID NO: 41195 - DNA, 80 bp, synthetic construct
  source 1..80: mol_type = other DNA
ggcgggtggatcacctgaggtcaggagtttgagaccagcctggccaacatggcaaaaccccgtctctactaaaaatgcaa

SEQ ID NO: 41196 - DNA, 80 bp, synthetic construct; identical to SEQ ID NO: 14171
  source 1..80: mol_type = other DNA

SEQ ID NO: 41197 - DNA, 80 bp, synthetic construct
  source 1..80: mol_type = other DNA
gcaaggcctcattttctgcaagaaggaagtgcagagaaggaatgggttgaaggtgcccttgaccatatagtgactgagcc

SEQ ID NO: 41198 - DNA, 80 bp, synthetic construct
  source 1..80: mol_type = other DNA
tgtgcacaacctgcaggtttgttacatatgtatacatgtgccatgttggtgtgctgcatccgttaactcgtcatttacat

SEQ ID NO: 41199 - DNA, 80 bp, synthetic construct
  source 1..80: mol_type = other DNA
cttccctggcatcaagcattccctgcaaaaggcttggtggggatttttctttaaacttaaaatgttgttctccctaaaga

SEQ ID NO: 41200 - DNA, 80 bp, synthetic construct
  source 1..80: mol_type = other DNA
agcaaggaaggagaatataagtcgtcttttttgcaggatgcaaaattgggtttatttgcagactgatgtgttaccttcta

SEQ ID NO: 41201 - DNA, 80 bp, synthetic construct; identical to SEQ ID NO: 14172
  source 1..80: mol_type = other DNA

SEQ ID NO: 41202 - DNA, 80 bp, synthetic construct
  source 1..80: mol_type = other DNA
gtattttaagaggtgagtccttctatgaatatcttgaccttgaggtttacaaaggacttccagaccatggggtttgcttt

SEQ ID NO: 41203 - DNA, 80 bp, synthetic construct
  source 1..80: mol_type = other DNA
accagcctggccaacatggtaaaaccccgtatcaactaaaatgcaaaaaaaacaaaaaacaaaaaaagctaggcatgatg

SEQ ID NO: 41204 - DNA, 80 bp, synthetic construct; identical to SEQ ID NO: 14173
  source 1..80: mol_type = other DNA

SEQ ID NO: 41205 - DNA, 80 bp, synthetic construct
  source 1..80: mol_type = other DNA
cccttttgaggctggctcctttcactcaccattgtctttgagatttgggcctgtggctgtgtgcagttgtgtttggttca

SEQ ID NO: 41206 - DNA, 80 bp, synthetic construct
  source 1..80: mol_type = other DNA
atccgatggctgctgaggaagtgacttgatctttctaggagcgtcttgtcctctgcccaagaagttgccagcagctttct

SEQ ID NO: 41207 - DNA, 80 bp, synthetic construct
  source 1..80: mol_type = other DNA
tgaattcctggaagtgctcttttagctgcttttctgatccctgaacagcaaacacttatcgtgggtagcattttcctctg

SEQ ID NO: 41208 - DNA, 80 bp, synthetic construct; identical to SEQ ID NO: 14174
  source 1..80: mol_type = other DNA

SEQ ID NO: 41209 - DNA, 80 bp, synthetic construct
  source 1..80: mol_type = other DNA
atcccactttcaaggagacttgaagctagtaaaatgaataactgggcttcttcccagcctgtggaggcctcacagtggta

SEQ ID NO: 41210 - DNA, 80 bp, synthetic construct
  source 1..80: mol_type = other DNA
gagctccttgccctgctgtttatttccagagcagaaccttggggctcactggagcagtgaccacctctaatcacaagagc

SEQ ID NO: 41211 - DNA, 80 bp, synthetic construct
  source 1..80: mol_type = other DNA
tacctggtggtttcaaaccagacttaatcaaaatgtaaatacttcttggggccagaaagcaggactgtccaggtgtttga

SEQ ID NO: 41212 - DNA, 80 bp, synthetic construct; identical to SEQ ID NO: 14175
  source 1..80: mol_type = other DNA

SEQ ID NO: 41213 - DNA, 80 bp, synthetic construct
  source 1..80: mol_type = other DNA
aggatggtgaattgagagtaaaacgctagttggacgagatcatgttatatctgtaaacagacgatctatacatgtgtaaa

SEQ ID NO: 41214 - DNA, 80 bp, synthetic construct
  source 1..80: mol_type = other DNA
tccaagtgtgggtgtgtggaggtcatattagttgagacctagttgtcagaaaagggatggtcaggcaggggcacagccag

SEQ ID NO: 41215 - DNA, 80 bp, synthetic construct
  source 1..80: mol_type = other DNA
aggatttcaaatgagagaattccatgagttgctttgggtttgcataactctggctgctgggtggagatagtttgaaaggg

SEQ ID NO: 41216 - DNA, 80 bp, synthetic construct
  source 1..80: mol_type = other DNA
aagtgaaggaccccagccgtcccttgggtttggggctcaactagggctcctttgatcactcatctcccactgcatggtgt

SEQ ID NO: 41217 - DNA, 80 bp, synthetic construct; identical to SEQ ID NO: 14176
  source 1..80: mol_type = other DNA

SEQ ID NO: 41218 - DNA, 80 bp, synthetic construct
  source 1..80: mol_type = other DNA
ccaggctggagtgcagtggcatgatctcagctcactgcaacctccgcctcctagggttcaagcaattctccctgcctcag

SEQ ID NO: 41219 - DNA, 80 bp, synthetic construct
  source 1..80: mol_type = other DNA
agaaactgaggctcaaagagcttttggcctaaggtcatccacctagcgagcagctgagctcacccacaggcccctgagtc

SEQ ID NO: 41220 - DNA, 80 bp, synthetic construct
  source 1..80: mol_type = other DNA
tgtgcacgcagatgcggaccagcagggcatttgcagaaaggcagttgttcgcttaatgagaggtgtttgggcaactccct

SEQ ID NO: 41221 - DNA, 80 bp, synthetic construct; identical to SEQ ID NO: 14177
  source 1..80: mol_type = other DNA

SEQ ID NO: 41222 - DNA, 80 bp, synthetic construct
  source 1..80: mol_type = other DNA
ttcgctgacagaacaaggggccggcagaggacatgtcaggtgtgtctcagagacctgggggaagatgggctcaacatgac

SEQ ID NO: 41223 - DNA, 80 bp, synthetic construct
  source 1..80: mol_type = other DNA
agtgaaaatttgctgacaaattttgatagctgctttttcaaagccagacactgactgaggagtggtgggagagagctgtg

SEQ ID NO: 41224 - DNA, 80 bp, synthetic construct; identical to SEQ ID NO: 14178
  source 1..80: mol_type = other DNA

SEQ ID NO: 41225 - DNA, 80 bp, synthetic construct
  source 1..80: mol_type = other DNA
gtatctctgctctcagccacccctgagaccatggaaaggctccgtgttgagcccttggaaggcctccctgggagtcctgg

SEQ ID NO: 41226 - DNA, 80 bp, synthetic construct
  source 1..80: mol_type = other DNA
ttcttgtcgccttttgtggagaaatttgcccgctaacaggccatctgtgtgaggtgagtcactgtttcccccgttttgtt

SEQ ID NO: 41227 - DNA, 80 bp, synthetic construct
  source 1..80: mol_type = other DNA
ggattttctgaaacttggtcaggggctcctggatcatgattgcagattgagagccactgagccattccaggtcctgtttt

SEQ ID NO: 41228 - DNA, 80 bp, synthetic construct; identical to SEQ ID NO: 14179
  source 1..80: mol_type = other DNA

SEQ ID NO: 41229 - DNA, 80 bp, synthetic construct
  source 1..80: mol_type = other DNA
gggagacatgggggatgcttctttgggctcgtctgtactaggtatggttatagggtactgggggttgcctaaaaaaatgc

SEQ ID NO: 41230 - DNA, 80 bp, synthetic construct
  source 1..80: mol_type = other DNA
actttcttaactatgctaaatgctttacgtgcatcagctcattgatgcctatatctatgtggttacagaggagccagttg

SEQ ID NO: 41231 - DNA, 80 bp, synthetic construct
  source 1..80: mol_type = other DNA
tgaatcatggtcccctaaagatgtcgtatccgaatccctgcaacttgtgaatatgttacctacctgataaaagggccttt

SEQ ID NO: 41232 - DNA, 80 bp, synthetic construct
  source 1..80: mol_type = other DNA
gattctcccctggagtctccagaaggcacactgccctgccgacacctggatttagcccggtgaatctgattccagacttc

SEQ ID NO: 41233 - DNA, 80 bp, synthetic construct; identical to SEQ ID NO: 14180
  source 1..80: mol_type = other DNA

SEQ ID NO: 41234 - DNA, 80 bp, synthetic construct
  source 1..80: mol_type = other DNA
ggtcccctgggagtgggcacccatggcgggtctgcactgtatgcccagtgcgcctttgtaggccgaacctgcagggtcag

SEQ ID NO: 41235 - DNA, 80 bp, synthetic construct
  source 1..80: mol_type = other DNA
cggcctcagcttcctgatctacaaaatgggtgtcatgctgcagccctgccgaaattgtgtgctcatggtagaagtgactg

SEQ ID NO: 41236 - DNA, 80 bp, synthetic construct; identical to SEQ ID NO: 14181
  source 1..80: mol_type = other DNA

SEQ ID NO: 41237 - DNA, 80 bp, synthetic construct
  source 1..80: mol_type = other DNA
tgcttcctggttccagggggccaggaggaggatcttagtgttagcctgagatcctgggcaggtccagttctgaggcaggg

SEQ ID NO: 41238 - DNA, 80 bp, synthetic construct
  source 1..80: mol_type = other DNA
ggctgggagggctggtgcccagggcccgggctcttgagcctagatggaaactggggccaccttcggagttcttgccacat

SEQ ID NO: 41239 - DNA, 80 bp, synthetic construct
  source 1..80: mol_type = other DNA
gcatgggtcagtgccgcccacgagcctgtgagctcttgtagggcaggggccacgtgccaagcaccaagtaggtcctcgat

SEQ ID NO: 41240 - DNA, 80 bp, synthetic construct; identical to SEQ ID NO: 14182
  source 1..80: mol_type = other DNA

SEQ ID NO: 41241 - DNA, 80 bp, synthetic construct
  source 1..80: mol_type = other DNA
gaaccctcatctctgtgttggaatcctctctacaggtgcctctgtgctgtgctggtttttgcttctgtggcttcagactt

SEQ ID NO: 41242 - DNA, 80 bp, synthetic construct
  source 1..80: mol_type = other DNA
tgtgtgcccagacccctgtcctctctgggcttgtttcctcctctgcaaaacaaatctactttactgtagggtcatgaggc

SEQ ID NO: 41243 - DNA, 80 bp, synthetic construct
  source 1..80: mol_type = other DNA
atttgtttagcttctttgaaataggggatgcaaaaattctggggagagcggaagtaattagtactcacaggaaaatgcaa

SEQ ID NO: 41244 - DNA, 80 bp, synthetic construct
  source 1..80: mol_type = other DNA
ccccttcaacccagagaaaacattatgaggcaaaagtgaccaaatttgggccttgctgagagaaggggattactcttgta

SEQ ID NO: 41245 - DNA, 80 bp, synthetic construct; identical to SEQ ID NO: 14183
  source 1..80: mol_type = other DNA

SEQ ID NO: 41246 - DNA, 80 bp, synthetic construct
  source 1..80: mol_type = other DNA
aagggcatttggttattaagccaattgggaaactgtggttcagagaggttggggaagtggcctgtggttattcagcttgt

SEQ ID NO: 41247 - DNA, 80 bp, synthetic construct
  source 1..80: mol_type = other DNA
ttgctgggaaggtggttgtattccctttttcagagcagaaaatggaggctcagagattatggtgtgcagtgtggcttatt

SEQ ID NO: 41248 - DNA, 80 bp, synthetic construct; identical to SEQ ID NO: 14184
  source 1..80: mol_type = other DNA

SEQ ID NO: 41249 - DNA, 80 bp, synthetic construct
  source 1..80: mol_type = other DNA
gagctcaggagtttgagatcagcctggcaacatggcaaaaccccatctctactaaaaatacaaaaattagctgggcgtgg

SEQ ID NO: 41250 - DNA, 80 bp, synthetic construct
  source 1..80: mol_type = other DNA
ggattttccttcctagtgacagaaatgttttaaatgttttggaattaaacggaggtggtggaagctcaacactgtgagtg

SEQ ID NO: 41251 - DNA, 80 bp, synthetic construct
  source 1..80: mol_type = other DNA
ggactacatccacccgctgctaatttttgtttttgtatttttagtagagatggggtttcaccgtgttagccaggatggtc

SEQ ID NO: 41252 - DNA, 80 bp, synthetic construct
  source 1..80: mol_type = other DNA
aatttcatttcaataaatgattattttttaatggcgatcagggtcagcctcatggagaacgtgagagctgtgcaaaagct

SEQ ID NO: 41253 - DNA, 80 bp, synthetic construct; identical to SEQ ID NO: 14185
  source 1..80: mol_type = other DNA

SEQ ID NO: 41254 - DNA, 80 bp, synthetic construct
  source 1..80: mol_type = other DNA
atgtcgggacagacgctggcatcatgctgatgtggaagctctgggagtatgtgtgtgtatgtagggcatagtagggtaga

SEQ ID NO: 41255 - DNA, 80 bp, synthetic construct
  source 1..80: mol_type = other DNA
tggtagtgatggtggtaatggtggtgctggtggctgtggtgatggtgatgctgatggtggtggtaatggtggtcgtgacg

SEQ ID NO: 41256 - DNA, 80 bp, synthetic construct
  source 1..80: mol_type = other DNA
gtaatgatggtagtggtgatggtggtggtaatggtagtggtggtggtgatggtgatgatgatggtggtggtaatggtagt

SEQ ID NO: 41257 - DNA, 80 bp, synthetic construct; identical to SEQ ID NO: 14186
  source 1..80: mol_type = other DNA

SEQ ID NO: 41258 - DNA, 80 bp, synthetic construct
  source 1..80: mol_type = other DNA
tgcagtgaagatgtcatgaggcagtggacggttgtgtcctggtgaacagtgcagctgtcagggaggggaggtagcctttg

SEQ ID NO: 41259 - DNA, 80 bp, synthetic construct
  source 1..80: mol_type = other DNA
ttacccagcctggtgttggttttggttttcctcatttgaggttgtgggatccctctggttgaggctgaggtttttctgct

SEQ ID NO: 41260 - DNA, 80 bp, synthetic construct; identical to SEQ ID NO: 14187
  source 1..80: mol_type = other DNA

SEQ ID NO: 41261 - DNA, 80 bp, synthetic construct
  source 1..80: mol_type = other DNA
gcccctctcgccgcctcctggcctgacagttctggcagctgctccctggcctggctgtgcccacatcagagtgtcagccc

SEQ ID NO: 41262 - DNA, 80 bp, synthetic construct
  source 1..80: mol_type = other DNA
ccagaccaccccacttccctctcttgcctgccacctggggtcctatgctcagctaggaaagtgcgggatacactcaaagg

SEQ ID NO: 41263 - DNA, 80 bp, synthetic construct
  source 1..80: mol_type = other DNA
gatagttactgggagcagtctcctcctgacgccactagaccttgacctcgcagctccagcactctggggcagcgtagtaa

SEQ ID NO: 41264 - DNA, 80 bp, synthetic construct
  source 1..80: mol_type = other DNA
gcctgtatctgccccactccatcccttccctgccttgcccactcagtgggctccccatcgtctgtctcacttatggggat

SEQ ID NO: 41265 - DNA, 80 bp, synthetic construct; identical to SEQ ID NO: 14188
  source 1..80: mol_type = other DNA

SEQ ID NO: 41266 - DNA, 80 bp, synthetic construct
  source 1..80: mol_type = other DNA
gtggatggaaaataagcatcagtggaggggagggaggaacaggaggcagtagacacaggggtaacccattctcatcagaa

SEQ ID NO: 41267 - DNA, 80 bp, synthetic construct
  source 1..80: mol_type = other DNA
aaagcccacctgggtagaaaagaactggatggagtctttagtcctgcagacatcacaggcagaattgtgacactgccttc

SEQ ID NO: 41268 - DNA, 80 bp, synthetic construct; identical to SEQ ID NO: 14189
  source 1..80: mol_type = other DNA

SEQ ID NO: 41269 - DNA, 80 bp, synthetic construct
  source 1..80: mol_type = other DNA
tgtgcctggccccaacccaggggcttctgctctgagctgagagctgggctggccatgccatgtcaccctgccctctccat

SEQ ID NO: 41270 - DNA, 80 bp, synthetic construct
  source 1..80: mol_type = other DNA
tcctgaagacatagcagcctcaacagctgcaacacagttctaactacccaggattagtgcagacatcacaaatgaagagc

SEQ ID NO: 41271 - DNA, 80 bp, synthetic construct
  source 1..80: mol_type = other DNA
ataattcgctagactccctcgcagaacccagtgcagcgctacactgacaattacagttctattgttgcaaaaagataccc

SEQ ID NO: 41272 - DNA, 80 bp, synthetic construct
  source 1..80: mol_type = other DNA
cagtgtctggagtttttactggagcatcatgattttggcatgattgatggaatcactgggcacatggtcgaacccagtgt

SEQ ID NO: 41273 - DNA, 80 bp, synthetic construct; identical to SEQ ID NO: 14190
  source 1..80: mol_type = other DNA

SEQ ID NO: 41274 - DNA, 80 bp, synthetic construct
  source 1..80: mol_type = other DNA
gccttcccatccccagggatgactctcttttctctgggatctgtaaacaataaaggtccaagggtcaccagaaggcaaag

SEQ ID NO: 41275 - DNA, 80 bp, synthetic construct
  source 1..80: mol_type = other DNA
ggcccggacccctcaaggccgcagctgagcagtgctctccctgcagtctcccttaggctttccggtataggaggggcctc

SEQ ID NO: 41276 - DNA, 80 bp, synthetic construct; identical to SEQ ID NO: 14191
  source 1..80: mol_type = other DNA

SEQ ID NO: 41277 - DNA, 80 bp, synthetic construct
  source 1..80: mol_type = other DNA
cttttctcactgatttccaggcactttctcttgacttacagcagtggttctcaaagtgagagtgcatcagaatcacctgc

SEQ ID NO: 41278 - DNA, 80 bp, synthetic construct
  source 1..80: mol_type = other DNA
gctccttccaacaaatgcatggaaccttcctcagtttcccccgtggaacctttctctgatcgattgcacatttgtcacca

SEQ ID NO: 41279 - DNA, 80 bp, synthetic construct
  source 1..80: mol_type = other DNA
tgaggattgaactagatgacatgttactggtgcaaattccctgactctgagggtacagcaaaggccatataagcagtcca

SEQ ID NO: 41280 - DNA, 80 bp, synthetic construct
  source 1..80: mol_type = other DNA
tccactccactgtgccaggtgatcacagggctctgggggctgtaggccgctcactgctcagaatccatcatcgctgcacc

SEQ ID NO: 41281 - DNA, 80 bp, synthetic construct; identical to SEQ ID NO: 14192
  source 1..80: mol_type = other DNA

SEQ ID NO: 41282 - DNA, 80 bp, synthetic construct
  source 1..80: mol_type = other DNA
aatcagtggctttttattattacttggcttctgccttccatcaggcactcctttccctgataggacatgccctcctcctg

SEQ ID NO: 41283 - DNA, 80 bp, synthetic construct
  source 1..80: mol_type = other DNA
gggattggacaagcaatgccctccctagagtctgtcccttctaaagggccagtggcagcccgagccatgaatcaggggac

SEQ ID NO: 41284 - DNA, 80 bp, synthetic construct; identical to SEQ ID NO: 14193
  source 1..80: mol_type = other DNA

SEQ ID NO: 41285 - DNA, 80 bp, synthetic construct
  source 1..80: mol_type = other DNA
ggaaatagcggtgagccagtgccagcagaagattgtgctcccgcctgggtgtgtggcttattccctggctccattaattc

SEQ ID NO: 41286 - DNA, 80 bp, synthetic construct
  source 1..80: mol_type = other DNA
aagtaacttaatggaagcttgcaattaaacaagaattagctgcacccgcctccttcccgggagcaggtctgacctgagct

SEQ ID NO: 41287 - DNA, 80 bp, synthetic construct
  source 1..80: mol_type = other DNA
gccaggtggccaggtggctggatgtaaagcatgacacttgcattcactcagcagatactgtttgggcttctacagtggac

SEQ ID NO: 41288 - DNA, 80 bp, synthetic construct; identical to SEQ ID NO: 14194
  source 1..80: mol_type = other DNA

SEQ ID NO: 41289 - DNA, 80 bp, synthetic construct
  source 1..80: mol_type = other DNA
aagactggaagtgtgggtgagaaacattcggaaaggtaggaagaaggtgctcctggcagaatgaacagtgagtgtaaagg

SEQ ID NO: 41290 - DNA, 80 bp, synthetic construct
  source 1..80: mol_type = other DNA
gccccagccccttgtaggcctaacacccctccccagcagtgaggtgggcctagggcagcgggggccgtagggccaggtca

SEQ ID NO: 41291 - DNA, 80 bp, synthetic construct
  source 1..80: mol_type = other DNA
cgtggtgccttctctgaggcaggttttgtttgttgttaagaagtgaaaccttctcccagcccatctgagtcaggaaggtt

SEQ ID NO: 41292 - DNA, 80 bp, synthetic construct; identical to SEQ ID NO: 14195
  source 1..80: mol_type = other DNA

SEQ ID NO: 41293 - DNA, 80 bp, synthetic construct
  source 1..80: mol_type = other DNA
caggattatgtccctatcattatccataatctcatccacaaacttaatgctcatttgtcatggaacctaacgtattcaca

SEQ ID NO: 41294 - DNA, 80 bp, synthetic construct
  source 1..80: mol_type = other DNA
actaacagatctcccccaacccctgttcttttcctaaatgttggtaaaatggtcattaagtaaagcagcattttttccac

SEQ ID NO: 41295 - DNA, 80 bp, synthetic construct
  source 1..80: mol_type = other DNA
ctgtgcgccaccacgcccagctacttattttatttttatttttaatagagacggagtcttgctatgttgcctaagctggt

SEQ ID NO: 41296 - DNA, 80 bp, synthetic construct; identical to SEQ ID NO: 14196
  source 1..80: mol_type = other DNA

SEQ ID NO: 41297 - DNA, 80 bp, synthetic construct
  source 1..80: mol_type = other DNA
ttaactttcttaatgaataaatctataagtgtgcatgtataaaatagactcctgggttccatagactggctgcctgagag

SEQ ID NO: 41298 - DNA, 80 bp, synthetic construct
  source 1..80: mol_type = other DNA
ccaaaagaatggaaagcagggacttgaacagatacttgtttgcaaatatccatagcagcgttatacgtaatagctaaaag

SEQ ID NO: 41299 - DNA, 80 bp, synthetic construct
  source 1..80: mol_type = other DNA
caaaagaacatgtatgattcccttatacgaggtatctagagtagtcacaatcacagacatggagtgtaggagagaggttg

SEQ ID NO: 41300 - DNA, 80 bp, synthetic construct; identical to SEQ ID NO: 14197
  source 1..80: mol_type = other DNA

SEQ ID NO: 41301 - DNA, 80 bp, synthetic construct
  source 1..80: mol_type = other DNA
ggacatcagactctgctgagctagggtttaggctgatttcttgagagggtggccctatctgggcgtgcacagaagaacct

SEQ ID NO: 41302 - DNA, 80 bp, synthetic construct
  source 1..80: mol_type = other DNA
gctgtgggagagacgtccaaggtctggatttcgatgtgaaatctcctcatttttatttatttcaatagttttgggggaac

SEQ ID NO: 41303 - DNA, 80 bp, synthetic construct
  source 1..80: mol_type = other DNA
tgtgcctttgtgtcctcatctgagctcctgggaatctcctaatttttcaatgttggcaactggttcagtgaacaagcaag

SEQ ID NO: 41304 - DNA, 80 bp, synthetic construct; identical to SEQ ID NO: 14198
  source 1..80: mol_type = other DNA

SEQ ID NO: 41305 - DNA, 80 bp, synthetic construct
  source 1..80: mol_type = other DNA
aatcccagcactttgggaggccaaggcaggcggatcacttgaggtcaggagtttgagaccggcctggccaacatggtgaa

SEQ ID NO: 41306 - DNA, 80 bp, synthetic construct
  source 1..80: mol_type = other DNA
cagagtgagactctgtctcaaaaaaagaaaaaaaaaagttcctgccttgtagagtaagggtgaagcctgcaggtgagggg

SEQ ID NO: 41307 - DNA, 80 bp, synthetic construct
  source 1..80: mol_type = other DNA
caagataatgtacaggtggagcctcaccacggcaggtgccgcctcaccacggcaggtgcccaatacgcattccttctgtc

SEQ ID NO: 41308 - DNA, 80 bp, synthetic construct; identical to SEQ ID NO: 14199
  source 1..80: mol_type = other DNA

SEQ ID NO: 41309 - DNA, 80 bp, synthetic construct
  source 1..80: mol_type = other DNA
cagagcaaggtggaggacaggttgggctggctgggagagggctggagctgagtgccactgggctcccctgggttgctggt

SEQ ID NO: 41310 - DNA, 80 bp, synthetic construct
  source 1..80: mol_type = other DNA
gctaagcgccactgtaagggtggagagtgggtgacggcaccttggtccccaggagccctctggccacatggcacagcagt

SEQ ID NO: 41311 - DNA, 80 bp, synthetic construct
  source 1..80: mol_type = other DNA
tctgcacgttacacgtgactgttcattacatgtgttcattactagtgcacattcattgtgcgtgtgcatgttcatcatgt

SEQ ID NO: 41312 - DNA, 80 bp, synthetic construct; identical to SEQ ID NO: 14200
  source 1..80: mol_type = other DNA

SEQ ID NO: 41313 - DNA, 80 bp, synthetic construct
  source 1..80: mol_type = other DNA
agggggccggggtcaggcaggactgtgcgggatactggggctcacagcccacctgggaggaagagtgtgtgtgtttgtgt

SEQ ID NO: 41314 - DNA, 80 bp, synthetic construct
  source 1..80: mol_type = other DNA
gcaaagggaaaagcaagaagtggaaagaaatcctgaagttccctcacattagccagtgtgaagacctccgaaggaccata

SEQ ID NO: 41315 - DNA, 80 bp, synthetic construct
  source 1..80: mol_type = other DNA
ggctgacctttttgctaatcaacataaacaggcaaccagtattcattgaatatatggcatgtgccgggcagagtgacctc

SEQ ID NO: 41316 - DNA, 80 bp, synthetic construct; identical to SEQ ID NO: 14201
  source 1..80: mol_type = other DNA

SEQ ID NO: 41317 - DNA, 80 bp, synthetic construct
  source 1..80: mol_type = other DNA
ggtctgtgcctggtcccacgcaggacacggctgtggtgaggaggcctgggtgcctgggcgagagcgcccaggggacaggc

SEQ ID NO: 41318 - DNA, 80 bp, synthetic construct
  source 1..80: mol_type = other DNA
ctgaaggctgggcacggggtggtgctgcccagaactccataggcccagcttttctggggacttctgcccagggcctcggg

SEQ ID NO: 41319 - DNA, 80 bp, synthetic construct
  source 1..80: mol_type = other DNA
tccacactccatgtttataggtgataggaggccatctgtgccccgccccacgacggcagacatgagcaggtgaagcaagg

SEQ ID NO: 41320 - DNA, 80 bp, synthetic construct; identical to SEQ ID NO: 14202
  source 1..80: mol_type = other DNA

SEQ ID NO: 41321 - DNA, 80 bp, synthetic construct
  source 1..80: mol_type = other DNA
caccacggtgccgtggatgccgtgtgcacccttgatgatcagcttttctgctggaggcagtcgaggtcgggtggaagaga

SEQ ID NO: 41322 - DNA, 80 bp, synthetic construct
  source 1..80: mol_type = other DNA
tgggggaccattttgttcttcatgctaattttggctcagagagaatagggcctgttgtgggactggggaggagaccttag

SEQ ID NO: 41323 - DNA, 80 bp, synthetic construct
  source 1..80: mol_type = other DNA
ccattcactgtggccccagggaacgtcttgcactcatccacagggccacagggctgctcggagagacctttctggggtgt

SEQ ID NO: 41324 - DNA, 80 bp, synthetic construct; identical to SEQ ID NO: 14203
  source 1..80: mol_type = other DNA

SEQ ID NO: 41325 - DNA, 80 bp, synthetic construct
  source 1..80: mol_type = other DNA
ttagttggatgaacgagggaaggaaagaataaatgaggtgtaagtgaccactcaacttatgaagtgtttctaataaatag

SEQ ID NO: 41326 - DNA, 80 bp, synthetic construct
  source 1..80: mol_type = other DNA
tgaaatataggatttatggttccagacaagagggagtagatgcggtgtttcctgtccttcccgctaaggacagtcaaaaa

SEQ ID NO: 41327 - DNA, 80 bp, synthetic construct
  source 1..80: mol_type = other DNA
tttatatcccagagtggatactagacaaacttgcaacccacaatgccagtgggtgcagactaaaaagctccttccctcaa

SEQ ID NO: 41328 - DNA, 80 bp, synthetic construct; identical to SEQ ID NO: 14204
  source 1..80: mol_type = other DNA

SEQ ID NO: 41329 - DNA, 80 bp, synthetic construct
  source 1..80: mol_type = other DNA
tgccatcacgcccagctaatttttgtatttttagtagagacagggttttgccatgttggccaggctggtttcaaactcct

SEQ ID NO: 41330 - DNA, 80 bp, synthetic construct
  source 1..80: mol_type = other DNA
agcagatctgatgtcctcatcagtttttcctggtttacagttggctgtcttcttgtatccttgcatggtggggcggggga

SEQ ID NO: 41331 - DNA, 80 bp, synthetic construct
  source 1..80: mol_type = other DNA
tgtgtgttgcagggaggatgcggacattcagtccatagtctaggactaggttcagtgccaacctattcctagattcaaag

SEQ ID NO: 41332 - DNA, 80 bp, synthetic construct; identical to SEQ ID NO: 14205
  source 1..80: mol_type = other DNA

SEQ ID NO: 41333 - DNA, 80 bp, synthetic construct
  source 1..80: mol_type = other DNA
gagcacctgagtgtccctcagcttccagtctgcctggccccacctcattcacttccactgtgggggacctgggagcacag

SEQ ID NO: 41334 - DNA, 80 bp, synthetic construct
  source 1..80: mol_type = other DNA
tcttctgttctgccggagggtattgaaaaggctctgtgtgtgagtgccgtgggagagaggcccgggaagggcaggaaggc

SEQ ID NO: 41335 - DNA, 80 bp, synthetic construct
  source 1..80: mol_type = other DNA
aaaccaaacagtggccaataccgcatttatttttcttgtggacacatgagctcactttctgaagttctttgggaggatgt

SEQ ID NO: 41336 - DNA, 80 bp, synthetic construct; identical to SEQ ID NO: 14206
  source 1..80: mol_type = other DNA

SEQ ID NO: 41337 - DNA, 80 bp, synthetic construct
  source 1..80: mol_type = other DNA
agggttacagaggaaactgatcctttttaaatatacttactacatacttctaaaatttatgatacagaaatatatgtgct

SEQ ID NO: 41338 - DNA, 80 bp, synthetic construct
  source 1..80: mol_type = other DNA
atcctcccacctcagcctcctgagtagctgggactacaaacgtgcactaccatgcccagctaatttttgtattttttgta

SEQ ID NO: 41339 - DNA, 80 bp, synthetic construct
  source 1..80: mol_type = other DNA
cagatatctgcaacaactgataggaatggatctttgatttctgccggtgacaagtccccggcactgctgacatcattgta

SEQ ID NO: 41340 - DNA, 80 bp, synthetic construct
  source 1..80: mol_type = other DNA
ccctcaccttcatcttggatccttccctcctcctccattcacaagctggtctcccttttgtcctttgaataacacacgct

SEQ ID NO: 41341 - DNA, 80 bp, synthetic construct; identical to SEQ ID NO: 14207
  source 1..80: mol_type = other DNA

SEQ ID NO: 41342 - DNA, 80 bp, synthetic construct
  source 1..80: mol_type = other DNA
acatgtgtttgctgtacccatttaaccttagccagtagtttacacttaaagtaattaaagtctggccttaggaggcactg

SEQ ID NO: 41343 - DNA, 80 bp, synthetic construct
  source 1..80: mol_type = other DNA
gtagtcggagtcatgatcacagtgatgtcaggttttcacagaatccttagctcaggggactggagagcatcttgtccacc

SEQ ID NO: 41344 - DNA, 80 bp, synthetic construct
  source 1..80: mol_type = other DNA
taggtgctcaaaggggtggacgtttctgtctctcttgtatcttgtaagtgtgtgcagcgagttcctctgcttattcaatg

SEQ ID NO: 41345 - DNA, 80 bp, synthetic construct; identical to SEQ ID NO: 14208
  source 1..80: mol_type = other DNA

SEQ ID NO: 41346 - DNA, 80 bp, synthetic construct
  source 1..80: mol_type = other DNA
tccattgctgtagcagcatgagtgggtggatggatgttgccttctcttcaacctggaagccaggactgtgagtggcagcc

SEQ ID NO: 41347 - DNA, 80 bp, synthetic construct
  source 1..80: mol_type = other DNA
agctatgaatgtgctgctgcaccgctccagcctaggtgacagagcgagaccctctaaaaaaaagaaaaagagagagagag

SEQ ID NO: 41348 - DNA, 80 bp, synthetic construct
  source 1..80: mol_type = other DNA
gataattgttcatgggagatcattagagagcccaaatcaaagaatttcttaggatgtccgaaacttggaaggctggaatg

SEQ ID NO: 41349 - DNA, 80 bp, synthetic construct; identical to SEQ ID NO: 14209
  source 1..80: mol_type = other DNA

SEQ ID NO: 41350 - DNA, 80 bp, synthetic construct
  source 1..80: mol_type = other DNA
agtcccaggctgtgggggattcctagaggaaaatgtagaatcttttaacatgggggaaaaaaaatcatcttcatagtgtg

SEQ ID NO: 41351 - DNA, 80 bp, synthetic construct
  source 1..80: mol_type = other DNA
ctttcctcctttccttctttatctttctctgatatttattttttgagacagaatcccactatgttgcctaggcagggctc

SEQ ID NO: 41352 - DNA, 80 bp, synthetic construct
  source 1..80: mol_type = other DNA
tggagtgcagtggtgtaatcttggctcattgcaacctctgcctcccagattcaagcaattcttctgcctcagtctcccaa

SEQ ID NO: 41353 - DNA, 80 bp, synthetic construct; identical to SEQ ID NO: 14210
  source 1..80: mol_type = other DNA

SEQ ID NO: 41354 - DNA, 80 bp, synthetic construct
  source 1..80: mol_type = other DNA
tttgagcaagtagcttactttctctagtttgcagtttatttgtgtataaactggagacactaacaccaacctggtagagc

SEQ ID NO: 41355 - DNA, 80 bp, synthetic construct
  source 1..80: mol_type = other DNA
atggatgaggccagctgtttttgtgctgaggtgaagtgggttcagtgtcccagagactgttgccttggagtcatcggaat

SEQ ID NO: 41356 - DNA, 80 bp, synthetic construct; identical to SEQ ID NO: 14211
  source 1..80: mol_type = other DNA

SEQ ID NO: 41357 - DNA, 80 bp, synthetic construct
  source 1..80: mol_type = other DNA
cttgttagctttgtgccccctgatgagtctggggcccctgagaggatgatcagaatctcacacgtcttggtgacccagtc

SEQ ID NO: 41358 - DNA, 80 bp, synthetic construct
  source 1..80: mol_type = other DNA
cttggagggcgaaataaatttagatgtgtcgggtttggaacatcaggtgacctgtccgcagctggagctctcaggaggga

SEQ ID NO: 41359 - DNA, 80 bp, synthetic construct
  source 1..80: mol_type = other DNA
ttttacagatcacctggagttgtggttttcaaagactgctctgcagggagagtgtgtgatctagaccaggcttttaccca

SEQ ID NO: 41360 - DNA, 80 bp, synthetic construct
  source 1..80: mol_type = other DNA
tttgactccaaggcaggctctctcccctactgcgttagtttttcctgaggttgccatagtgaaataccagagaccaggtg

SEQ ID NO: 41361 - DNA, 80 bp, synthetic construct; identical to SEQ ID NO: 14212
  source 1..80: mol_type = other DNA

SEQ ID NO: 41362 - DNA, 80 bp, synthetic construct
  source 1..80: mol_type = other DNA
cactgtgcccggctaattttttttatatttttagtagagacggggtttcaccaggttgccaggctggttttgaactcctg

SEQ ID NO: 41363 - DNA, 80 bp, synthetic construct
  source 1..80: mol_type = other DNA
ttaggacttcagtgtatcttctttaggggatccagttgaacccataacatattcacgtgctcatgtggtctggtggagtt

SEQ ID NO: 41364 - DNA, 80 bp, synthetic construct; identical to SEQ ID NO: 14213
  source 1..80: mol_type = other DNA

SEQ ID NO: 41365 - DNA, 80 bp, synthetic construct
  source 1..80: mol_type = other DNA
acctcttttcttaacatagtatcaaaaatgttttcccttgtcattaaaatcttcataaatgtgatgtacatttttccatt

SEQ ID NO: 41366 - DNA, 80 bp, synthetic construct
  source 1..80: mol_type = other DNA
tctcccaacctatggcttacttcctgttggtgaattcttcctttaagcgatcttgaaaataagcccttgcttattttcaa

SEQ ID NO: 41367 - DNA, 80 bp, synthetic construct
  source 1..80: mol_type = other DNA
tgaacatctttgtacttcattgtgacattttgatctatggctcaaagtaagaaagtccactgtctttttgaaggccagaa

SEQ ID NO: 41368 - DNA, 80 bp, synthetic construct
  source 1..80: mol_type = other DNA
tcactgcagtcagcaggtgtgagaaggatttttctgtctattttaaggcccctcactgaaaatgggaaaaacaagctcgt

SEQ ID NO: 41369 - DNA, 80 bp, synthetic construct; identical to SEQ ID NO: 14214
  source 1..80: mol_type = other DNA

SEQ ID NO: 41370 - DNA, 80 bp, synthetic construct
  source 1..80: mol_type = other DNA
tggggggttgcagggaagaaaagccatgggttgtaggatatttggggccaatataaacttccaaattcaaaaacaaaaac

SEQ ID NO: 41371 - DNA, 80 bp, synthetic construct
  source 1..80: mol_type = other DNA
gtagttccagctacttgggaggttgaggcaggagaaattgcatgagccagggaggcagaggttgcagtgagctgtgatca

SEQ ID NO: 41372 - DNA, 80 bp, synthetic construct; identical to SEQ ID NO: 14215
  source 1..80: mol_type = other DNA

SEQ ID NO: 41373 - DNA, 80 bp, synthetic construct
  source 1..80: mol_type = other DNA
caagtagctgggattacaggtgtgcgccaccacgcccagctaaattttgtatttttaatagagacagggctttgccatat

SEQ ID NO: 41374 - DNA, 80 bp, synthetic construct
  source 1..80: mol_type = other DNA
ccaaaacaattttaaaaggggaaaataaaaactgccaatgagataaggataaacactgttaacactttggtctgttgccc

SEQ ID NO: 41375 - DNA, 80 bp, synthetic construct
  source 1..80: mol_type = other DNA
tcctgtggccttgggaaagccacttaaccttgatttgctcgtctttaaaatggggactcagtattcctcaccttagcaga

SEQ ID NO: 41376 - DNA, 80 bp, synthetic construct; identical to SEQ ID NO: 14216
  source 1..80: mol_type = other DNA

SEQ ID NO: 41377 - DNA, 80 bp, synthetic construct
  source 1..80: mol_type = other DNA
tgaactcctgtgtcagctccttgctccctccaggcgcacctacttccaaccaagctccatgcagcagccaggaggctctt

SEQ ID NO: 41378 - DNA, 80 bp, synthetic construct
  source 1..80: mol_type = other DNA
ttccttcatgtttcttcttttctccaggcctttgcctgggctgttccctctgctggatacacttccctaaccctgcttgg

SEQ ID NO: 41379 - DNA, 80 bp, synthetic construct
  source 1..80: mol_type = other DNA
ttgtctgatgactcacctttgtcttctgtttggctgtgggctctgtgagagtagagcctgggtctgcctgactgtgtttt

SEQ ID NO: 41380 - DNA, 80 bp, synthetic construct; identical to SEQ ID NO: 14217
  source 1..80: mol_type = other DNA

SEQ ID NO: 41381 - DNA, 80 bp, synthetic construct
  source 1..80: mol_type = other DNA
ggcgagatgggcacaggcacggctctgctaaaggccttggctgagcccagcttggggcagagcaagccactgagaatggc

SEQ ID NO: 41382 - DNA, 80 bp, synthetic construct
  source 1..80: mol_type = other DNA
catgagctccagtgtcagagggacctggttttcatccaggctctattccttactggttgtgactttgagcaagtgattag

SEQ ID NO: 41383 - DNA, 80 bp, synthetic construct
  source 1..80: mol_type = other DNA
gctttgcttcttggttctgcctgcttggtggttgccaggtcccgccagcttaagtttatctgttcgttcattcattcatt

SEQ ID NO: 41384 - DNA, 80 bp, synthetic construct; identical to SEQ ID NO: 14218
  source 1..80: mol_type = other DNA

SEQ ID NO: 41385 - DNA, 80 bp, synthetic construct
  source 1..80: mol_type = other DNA
tctctagttgggaagacagcagaaagccaacacgtgacactgggtgacagccctgtgcaagtgtgcaaggcgggtggctg

SEQ ID NO: 41386 - DNA, 80 bp, synthetic construct
  source 1..80: mol_type = other DNA
tttcctggatgcttactgtgggccaggcaccaggctatgtgctttgcagacacacactcgtccaatcactacaaagccct

SEQ ID NO: 41387 - DNA, 80 bp, synthetic construct
  source 1..80: mol_type = other DNA
atattggccatggcttccccgtggacgtggaacaatatgggcatgtttgggagaggaggtgtattctgctttggtgggct

SEQ ID NO: 41388 - DNA, 80 bp, synthetic construct; identical to SEQ ID NO: 14219
  source 1..80: mol_type = other DNA

SEQ ID NO: 41389 - DNA, 80 bp, synthetic construct
  source 1..80: mol_type = other DNA
gcggggggtaacagatccttttttattttttatttttttggcctatgcagcagttattttattttattttttttcagtat

SEQ ID NO: 41390 - DNA, 80 bp, synthetic construct
  source 1..80: mol_type = other DNA
tcccccaccccacgacaggtcctggtgtgtgatgttccccatcctgtgtccaagtgatctcattgttcaattcccaccta

SEQ ID NO: 41391 - DNA, 80 bp, synthetic construct
  source 1..80: mol_type = other DNA
ttggggatggtttctcgctcccctgctgtctgtcctctctttcccctccccctgcagggccttttggaaggtggcagatg

SEQ ID NO: 41392 - DNA, 80 bp, synthetic construct; identical to SEQ ID NO: 14220
  source 1..80: mol_type = other DNA

SEQ ID NO: 41393 - DNA, 80 bp, synthetic construct
  source 1..80: mol_type = other DNA
ctccacctcctgggttcaagcaattctcctgcctcagcctcccgagtagctgagactacaggcgcccacaaccacgcctg

SEQ ID NO: 41394 - DNA, 80 bp, synthetic construct
  source 1..80: mol_type = other DNA
ggcaggtcagcaggttttgtgctcatttggctttagcatgagaggagtggttcccagccccgcaatccagctgcagtgtt

SEQ ID NO: 41395 - DNA, 80 bp, synthetic construct
  source 1..80: mol_type = other DNA
tggtcctctgtttctagctggtatcttttttcttccttcccatttattatgactttcttgcttgctgttcttaacactca

SEQ ID NO: 41396 - DNA, 80 bp, synthetic construct; identical to SEQ ID NO: 14221
  source 1..80: mol_type = other DNA

SEQ ID NO: 41397 - DNA, 80 bp, synthetic construct
  source 1..80: mol_type = other DNA
ctgtcccaaataaccacccaccccctcccccaaggccctagagcattccacatgtgtccccaccaaacattcccaaggaa

SEQ ID NO: 41398 - DNA, 80 bp, synthetic construct
  source 1..80: mol_type = other DNA
aagtgtgtacaaaaccagtgagcaagcaagggaatcagtgaggaaggggaaggaggaatgaatgatgaggcagcatcgcc

SEQ ID NO: 41399 - DNA, 80 bp, synthetic construct
  source 1..80: mol_type = other DNA
tgatctcctaggtcagatttatcatttactgggtcaggaaagaaaaagccccatggggccaggtttatagagattaaatc

SEQ ID NO: 41400 - DNA, 80 bp, synthetic construct
  source 1..80: mol_type = other DNA
tgccacctggctggccatcagaatgccatcagagagggctggctggctggctcctgggcctcccaggaagaccatacagg

SEQ ID NO: 41401 - DNA, 80 bp, synthetic construct; identical to SEQ ID NO: 14222
  source 1..80: mol_type = other DNA

SEQ ID NO: 41402 - DNA, 80 bp, synthetic construct
  source 1..80: mol_type = other DNA
cacaagagtctgcagggattctctcttattgatgggacacagattgtcctcagccaggccttcatgaaacaccacagtat

SEQ ID NO: 41403 - DNA, 80 bp, synthetic construct
  source 1..80: mol_type = other DNA
gtgcccatgtgtgtttgcgagtgtgcatgtgtgtgcgtgtgtatacatgcaagtttgtatgtgtccgtgcatgtttgcaa

SEQ ID NO: 41404 - DNA, 80 bp, synthetic construct; identical to SEQ ID NO: 14223
  source 1..80: mol_type = other DNA

SEQ ID NO: 41405 - DNA, 80 bp, synthetic construct
  source 1..80: mol_type = other DNA
cttggtaggcagagaagggagcctcacctgccatggttgcagtggggtgaatgccgaggctgccaccacttgtccctttc

SEQ ID NO: 41406 - DNA, 80 bp, synthetic construct
  source 1..80: mol_type = other DNA
agtggctgcacaccgtaggtgcttgctatgtgtgttggcttaatgaggagtccaggggcctggctttgagtttctttcta

SEQ ID NO: 41407 - DNA, 80 bp, synthetic construct
  source 1..80: mol_type = other DNA
ttatggaacaattgaacatgtgcctttattggaagatgctgtggatcgttttgggaagtaagcaggcaatgaataagtca

SEQ ID NO: 41408 - DNA, 80 bp, synthetic construct
  source 1..80: mol_type = other DNA
gcagcaatgggcatgtccttcttccagggctctagaaggtgggtctactcaggcaggacgatgctatgtggctcagggaa

SEQ ID NO: 41409 - DNA, 80 bp, synthetic construct; identical to SEQ ID NO: 14224
  source 1..80: mol_type = other DNA

SEQ ID NO: 41410 - DNA, 80 bp, synthetic construct
  source 1..80: mol_type = other DNA
tggccatcataacacagaatttcaaagaatgagctcccagtggggagaggttaaacactgtggatttgttgtttcaggga

SEQ ID NO: 41411 - DNA, 80 bp, synthetic construct
  source 1..80: mol_type = other DNA
cagccgctgaaggcagaggcatggctttgagaggtggccgtagtgatgctgtgtccagctctgtgtctgactctgcccag

SEQ ID NO: 41412 - DNA, 80 bp, synthetic construct
  source 1..80: mol_type = other DNA
catgggcaccagccaagacctgtgtgggaggggagggcctgtgcactcagggcctggggccttcgggtggggaacatggc

SEQ ID NO: 41413 - DNA, 80 bp, synthetic construct; identical to SEQ ID NO: 14225
  source 1..80: mol_type = other DNA

SEQ ID NO: 41414 - DNA, 80 bp, synthetic construct
  source 1..80: mol_type = other DNA
cggtcacccacttataggcaaagcctgagccacgacagcttaaccacaggtgtgaccagctcatggccagaatgtgccac

SEQ ID NO: 41415 - DNA, 80 bp, synthetic construct
  source 1..80: mol_type = other DNA
cctacacctgtcttattttttcagtgcggcatttagccatgggagggagaggtggtgggagaagtaagttaccttcaagt

SEQ ID NO: 41416 - DNA, 80 bp, synthetic construct; identical to SEQ ID NO: 14226
  source 1..80: mol_type = other DNA

SEQ ID NO: 41417 - DNA, 80 bp, synthetic construct
  source 1..80: mol_type = other DNA
cagcaaaagctgtttgagtttcatggacacgtttgtggaaacaattgcagactcctctgttgacagtctacttccagtgt

SEQ ID NO: 41418 - DNA, 80 bp, synthetic construct
  source 1..80: mol_type = other DNA
gtttgcccacccattaggcagatattcaatgggctccgtctgtgttgcagatactgggctaatcacagagataagtgcaa

SEQ ID NO: 41419 - DNA, 80 bp, synthetic construct
  source 1..80: mol_type = other DNA
tccactatgttattacttagaaagactaagttggaaaaagacaggaggggcagttaattacaacctaagttaaagaaaga

SEQ ID NO: 41420 - DNA, 80 bp, synthetic construct
  source 1..80: mol_type = other DNA
ttcttgtggtagtgaataagcctcaccagatctgatggttttataagggaaaacccctttcacttggctctcattctctc

SEQ ID NO: 41421 - DNA, 80 bp, synthetic construct; identical to SEQ ID NO: 14227
  source 1..80: mol_type = other DNA

SEQ ID NO: 41422 - DNA, 80 bp, synthetic construct
  source 1..80: mol_type = other DNA
gtcccaactgacagctgataaaagctcataaagttcaaagaagtgaaatgattcatccaaggtcacatgactagtaagtg

SEQ ID NO: 41423 - DNA, 80 bp, synthetic construct
  source 1..80: mol_type = other DNA
tttagcaagggaagtttgggtggtaaggtagaatgtcccatgggtcagatacccataattattggctggatggtttgaat

SEQ ID NO: 41424 - DNA, 80 bp, synthetic construct; identical to SEQ ID NO: 14228
  source 1..80: mol_type = other DNA

SEQ ID NO: 41425 - DNA, 80 bp, synthetic construct
  source 1..80: mol_type = other DNA
aggtgcttacagcagatcgaactgcttctcgttgaagctgtaaaggagactgcagttgagtgggtaagaaaaagcctcct

SEQ ID NO: 41426 - DNA, 80 bp, synthetic construct
  source 1..80: mol_type = other DNA
gacaagagtcactcttggtacaaaccagtctcattccaccacctgccatcctctggtgcaattagagcaagagcccactt

SEQ ID NO: 41427 - DNA, 80 bp, synthetic construct
  source 1..80: mol_type = other DNA
gcttttcacttcttatctcaggagggtatgctggccagttgccagaaatatcaaaagtttggagagttctttaaaatcag

SEQ ID NO: 41428 - DNA, 80 bp, synthetic construct; identical to SEQ ID NO: 14229
  source 1..80: mol_type = other DNA

SEQ ID NO: 41429 - DNA, 80 bp, synthetic construct
  source 1..80: mol_type = other DNA
ccaggcatctgcctttgttctgtaattacctccaagtaaatagtcttggaaggaagtttagagagatgtttcatagggtg

SEQ ID NO: 41430 - DNA, 80 bp, synthetic construct
  source 1..80: mol_type = other DNA
gtccatattctttggtgaaagctctaaatccaggctttccctatgaacagccagcccttttctttggattcagtaggttc

SEQ ID NO: 41431 - DNA, 80 bp, synthetic construct
  source 1..80: mol_type = other DNA
tagcaatgacatcactgctactggttttatttttagattgatgctgcaggtgctgtttggaaatgtcttttttccccaca

SEQ ID NO: 41432 - DNA, 80 bp, synthetic construct
  source 1..80: mol_type = other DNA
tcacttttgtcctggaagtacccagtatatgagggaaacaaaatggcagccaccccaccaagggcaatccattttttctt

SEQ ID NO: 41433 - DNA, 80 bp, synthetic construct
  source 1..80: mol_type = other DNA
acatgtgatctcaagggtttctttatttaaaaaaatgtctataaggtagataacatgatgttttgctatatatgtactta

SEQ ID NO: 41434 - DNA, 80 bp, synthetic construct; identical to SEQ ID NO: 14230
  source 1..80: mol_type = other DNA

SEQ ID NO: 41435 - DNA, 80 bp, synthetic construct
  source 1..80: mol_type = other DNA
tttgtattttttgtagagacggggttttgccatgttgcccagattggtctcaaactcctaggctcaagtgatcctcccac

SEQ ID NO: 41436 - DNA, 80 bp, synthetic construct
  source 1..80: mol_type = other DNA
aaaatacagtattcaagggatacaaaaccctgagtattggaaaggctgacttttcatatactcaggttctgtagggccaa

SEQ ID NO: 41437 - DNA, 80 bp, synthetic construct; identical to SEQ ID NO: 14231
  source 1..80: mol_type = other DNA

SEQ ID NO: 41438 - DNA, 80 bp, synthetic construct
  source 1..80: mol_type = other DNA
tagtataaataatgctgcaatgaacatatgagtacaggtatctctacgaggtgcttattttatttcctttgggtatatat

SEQ ID NO: 41439 - DNA, 80 bp, synthetic construct
  source 1..80: mol_type = other DNA
gagtttgagaccagcctgaccaacatggcgaaacccctgtctctattaaaaatacaaaaattagccaagtgtggtggcat

SEQ ID NO: 41440 - DNA, 80 bp, synthetic construct
  source 1..80: mol_type = other DNA
ctttgggatctataataatttgtagaggtatcaaggtgtcctgagtccataaagtttcagagtcactgcagtagagggaa

SEQ ID NO: 41441 - DNA, 80 bp, synthetic construct; identical to SEQ ID NO: 14232
  source 1..80: mol_type = other DNA

SEQ ID NO: 41442 - DNA, 80 bp, synthetic construct
  source 1..80: mol_type = other DNA
tataatgacagttcatttgcttagaccttcttccttagttaagttgaatgttagtggtccatcagggaatctggagcata

SEQ ID NO: 41443 - DNA, 80 bp, synthetic construct
  source 1..80: mol_type = other DNA
ttgtttgtctatcttcttgatgcccaataagatcagcccctttactgtgcctggatttctatatccagcattacctaaat

SEQ ID NO: 41444 - DNA, 80 bp, synthetic construct
  source 1..80: mol_type = other DNA
aggctcagcccaagccactaccgatcccttttctcacaagttttcaatgcaatctacaggaggctttgtattctcatata

SEQ ID NO: 41445 - DNA, 80 bp, synthetic construct; identical to SEQ ID NO: 14233
  source 1..80: mol_type = other DNA

SEQ ID NO: 41446 - DNA, 80 bp, synthetic construct
  source 1..80: mol_type = other DNA
tctcattttaatgacagagcagggctgggtaaggaataactgtaagtgcagatgaagcttgtttatgctccaaagataaa

SEQ ID NO: 41447 - DNA, 80 bp, synthetic construct
  source 1..80: mol_type = other DNA
cgggggtcagggagatgtttggaaaggctgtggctgataatgagacgcgggtaaccctggtggatatcgttccatcctgg

SEQ ID NO: 41448 - DNA, 80 bp, synthetic construct
  source 1..80: mol_type = other DNA
attctgactgaagtccattcaacaatagcaatagcggctcacactcaggcctgctggccccaccattgacagctttgcat

SEQ ID NO: 41449 - DNA, 80 bp, synthetic construct
  source 1..80: mol_type = other DNA
gggtggtggggcacgcttcctgactcggatgccttgaccccacagggactgagttttggacaaggtgcagcggcagcctc

SEQ ID NO: 41450 - DNA, 80 bp, synthetic construct; identical to SEQ ID NO: 14234
  source 1..80: mol_type = other DNA

SEQ ID NO: 41451 - DNA, 80 bp, synthetic construct
  source 1..80: mol_type = other DNA
tgtagcaaatgctctgcaaatagtagctgctctgaccatgtgatttgactggcattgcccagatgctgagtggtggtgcc

SEQ ID NO: 41452 - DNA, 80 bp, synthetic construct
  source 1..80: mol_type = other DNA
ctcttccacaggcctctcagggaggcaggcagggcagagtcagcagccccattttagagaccaggaaactaaggcccagg

SEQ ID NO: 41453 - DNA, 80 bp, synthetic construct
  source 1..80: mol_type = other DNA
gccacagttcaagatccaggtgcctcagggctggcttctgcccttgctggtttgtagatccactgtcttcctgttatgtc

SEQ ID NO: 41454 - DNA, 80 bp, synthetic construct; identical to SEQ ID NO: 14235
  source 1..80: mol_type = other DNA

SEQ ID NO: 41455 - DNA, 80 bp, synthetic construct
  source 1..80: mol_type = other DNA
tcagggaaccccacatgtaatccacaccagtaactcagatgagctgtagctgttttccaggagccactttctctccatgg

SEQ ID NO: 41456 - DNA, 80 bp, synthetic construct; identical to SEQ ID NO: 14236
  source 1..80: mol_type = other DNA

SEQ ID NO: 41457 - DNA, 80 bp, synthetic construct
  source 1..80: mol_type = other DNA
caagtcccatgcagagtccggggcaaattcaggtcctgagtgaggtcgtagtgggtacctggctagcaggctgaagggag

SEQ ID NO: 41458 - DNA, 80 bp, synthetic construct
  source 1..80: mol_type = other DNA
aggctgaggaggccgagggaatctgagggaggcagggagggaggctgaagagtctgagggggtgaaggaagttgagggag

SEQ ID NO: 41459 - DNA, 80 bp, synthetic construct
  source 1..80: mol_type = other DNA
catttcttgggtgtgtagtgtgcctttggcttctctttagttgtgccttggaatggcacacggggctgggtgggattctg

SEQ ID NO: 41460 - DNA, 80 bp, synthetic construct; identical to SEQ ID NO: 14237
  source 1..80: mol_type = other DNA

SEQ ID NO: 41461 - DNA, 80 bp, synthetic construct
  source 1..80: mol_type = other DNA
cccggcccggggccctttgctctgggtcatgctctgttcccaggccctgtggggatgctgggaaccctgggaacacagct

SEQ ID NO: 41462 - DNA, 80 bp, synthetic construct
  source 1..80: mol_type = other DNA
ctcctggctaggtgggctctggctccctgggagtactgtgggctttggagccaaaaagacctggacgcagatcccagctc

SEQ ID NO: 41463 - DNA, 80 bp, synthetic construct
  source 1..80: mol_type = other DNA
tgggagtgtctgggcgcctggtgcgggaacatgagcagaagccccaccccacttggatgtctggtggtcttcgctgcttt

SEQ ID NO: 41464 - DNA, 80 bp, synthetic construct; identical to SEQ ID NO: 14238
  source 1..80: mol_type = other DNA

SEQ ID NO: 41465 - DNA, 80 bp, synthetic construct
  source 1..80: mol_type = other DNA
cgggcagatcacttgaggtcaggagttcgagaccagcctggccaacatggcgaaaccctgtctttactaaaaatacaaaa

SEQ ID NO: 41466 - DNA, 80 bp, synthetic construct
  source 1..80: mol_type = other DNA
agcctgggtgacagagcgagactctatctcaaaaaaaaaaaaaaaaaaaaaaaaaaaaaagaattgaaaggcagccttga

SEQ ID NO: 41467 - DNA, 80 bp, synthetic construct
  source 1..80: mol_type = other DNA
cggtagtaaccctgtaacaatctggtgtttaatcatttagataaagccatagcctggggtcaaagattggctggaggtgt

SEQ ID NO: 41468 - DNA, 80 bp, synthetic construct
  source 1..80: mol_type = other DNA
acaagggcagtcttgcgcaactcttccatcttgggaaaacaaatgtgattcctaatgtgttgcctcgagttcctggaacc

SEQ ID NO: 41469 - DNA, 80 bp, synthetic construct; identical to SEQ ID NO: 14239
  source 1..80: mol_type = other DNA

SEQ ID NO: 41470 - DNA, 80 bp, synthetic construct
  source 1..80: mol_type = other DNA
atttagtagatgagactaagctggtgaacactcagttccatttaaccccttattggcagcctatgctcacactctttcct

SEQ ID NO: 41471 - DNA, 80 bp, synthetic construct
  source 1..80: mol_type = other DNA
ccaacatggtgaaaccctgtctctactaaaaatacaaaaaattatctgggagtggtggcagacgcctgtaatcccagcta

SEQ ID NO: 41472 - DNA, 80 bp, synthetic construct; identical to SEQ ID NO: 14240
  source 1..80: mol_type = other DNA

SEQ ID NO: 41473 - DNA, 80 bp, synthetic construct
  source 1..80: mol_type = other DNA
tctttttctggccttacaatgttgccctcgttgacatgggccaagatggtgcccactgtgtttacattctagcctctggg

SEQ ID NO: 41474 - DNA, 80 bp, synthetic construct
  source 1..80: mol_type = other DNA
gagctaaaaatgggagatctattactatagaaaacatgatgaacagctattgggtgacagctagtgtttctgtcccagag

SEQ ID NO: 41475 - DNA, 80 bp, synthetic construct
  source 1..80: mol_type = other DNA
cggattctctgggcctagcacagtgtagggcgcaaagcagggttcagtaaatccatcttaaagaaagggagggagaggga

SEQ ID NO: 41476 - DNA, 80 bp, synthetic construct; identical to SEQ ID NO: 14241
  source 1..80: mol_type = other DNA

SEQ ID NO: 41477 - DNA, 80 bp, synthetic construct
  source 1..80: mol_type = other DNA
ccctcctgctgtaccccagctgcccactttagctggccctgacttatctagtacaaaatgcagttacggtctgacctttc

SEQ ID NO: 41478 - DNA, 80 bp, synthetic construct
  source 1..80: mol_type = other DNA
tgcaggtgcgcagaaggaaaaataagtaagcataagaggttccagtttggaatttttcaatcatctgaatgttgttcttg

SEQ ID NO: 41479 - DNA, 80 bp, synthetic construct
  source 1..80: mol_type = other DNA
ttagcgtcagttacagacctgtttcaagcctggcagttggagggaagagaaaagcattaacacggagcagcagcgcccca

SEQ ID NO: 41480 - DNA, 80 bp, synthetic construct; identical to SEQ ID NO: 14242
  source 1..80: mol_type = other DNA

SEQ ID NO: 41481 - DNA, 80 bp, synthetic construct
  source 1..80: mol_type = other DNA
gggtttggaaagacctgaataagggtctgtatgccaggcttgggtgggacccttcggtgagggtctttgaattttaataa

SEQ ID NO: 41482 - DNA, 80 bp, synthetic construct
  source 1..80: mol_type = other DNA
ccaggaagatgaggccatcagactagctttcctttcggttttctacaagctctatgactatgttcccctcaacacaccct

SEQ ID NO: 41483 - DNA, 80 bp, synthetic construct
  source 1..80: mol_type = other DNA
tatgttatgatgcagccatcagctgcagttgatgtgttgggtcatgaattcattcattcattcactggtcaaacgttatt

SEQ ID NO: 41484 - DNA, 80 bp, synthetic construct; identical to SEQ ID NO: 14243
  source 1..80: mol_type = other DNA

SEQ ID NO: 41485 - DNA, 80 bp, synthetic construct
  source 1..80: mol_type = other DNA
gagagagaatttacagcttagttggggaggcaaggccagctctcaggatagccagcgaaggtgtgagacagcacatcagt

SEQ ID NO: 41486 - DNA, 80 bp, synthetic construct
  source 1..80: mol_type = other DNA
cattctcctggcccagccactagatgttgaggcccagttgatagccagccccaaagctgccacagctttcccatgtcttt

SEQ ID NO: 41487 - DNA, 80 bp, synthetic construct
  source 1..80: mol_type = other DNA
gtctttgtctgctgctgccatggatcccttaaaagttaaaagatgcagaataattgttctgctgtcagcaagagctgagt

SEQ ID NO: 41488 - DNA, 80 bp, synthetic construct; identical to SEQ ID NO: 14244
  source 1..80: mol_type = other DNA

SEQ ID NO: 41489 - DNA, 80 bp, synthetic construct
  source 1..80: mol_type = other DNA
ccatctctcatctggagtgtgggcattggtgagctcgtgtgcctgtgaaacacccatctcttcctccttcaggacacgaa

SEQ ID NO: 41490 - DNA, 80 bp, synthetic construct
  source 1..80: mol_type = other DNA
tcacatggttggctgggagaatcggagctgtatctaagactctaagagcacagaataattgctttcaaacatttgtcctc

SEQ ID NO: 41491 - DNA, 80 bp, synthetic construct
  source 1..80: mol_type = other DNA
cccttgatggggatcatgttgggaggattaagggtggctgggggtcttgggaccctgagacatcaggactttcaggagac

SEQ ID NO: 41492 - DNA, 80 bp, synthetic construct
  source 1..80: mol_type = other DNA
gccttggtccctggcttgcccagccgtttcctggcccggccctccgtggcttttgcttgattagctcatagctccagggg

SEQ ID NO: 41493 - DNA, 80 bp, synthetic construct; identical to SEQ ID NO: 14245
  source 1..80: mol_type = other DNA

SEQ ID NO: 41494 - DNA, 80 bp, synthetic construct
  source 1..80: mol_type = other DNA
ccaggctcacagccccactgtgaagctaccgaaatgggaggcatttaagccccccttgttcatcagccctattttgtaaa

SEQ ID NO: 41495 - DNA, 80 bp, synthetic construct
  source 1..80: mol_type = other DNA
tcacttctgggggctctgggcttactgtgctgcagctctgagcagcaggcagcctggcccagccttgcctccgcccaggg

SEQ ID NO: 41496 - DNA, 80 bp, synthetic construct; identical to SEQ ID NO: 14246
  source 1..80: mol_type = other DNA

SEQ ID NO: 41497 - DNA, 80 bp, synthetic construct
  source 1..80: mol_type = other DNA
actgcatgtatctggatgaaatttctttacaaggagaaaaaaggttgtagaaagaatgtccttctaagtggatggtgtcc

SEQ ID NO: 41498 - DNA, 80 bp, synthetic construct
  source 1..80: mol_type = other DNA
agcagctgcgcattccccaggccccgcacggaaaggagagctgtctggcagtcacagttctttgctttccaggctcttcc

SEQ ID NO: 41499 - DNA, 80 bp, synthetic construct
  source 1..80: mol_type = other DNA
tgccttttctgcggacgcctctttggtgtccccaggctagcacaaaagtggaggttgcagtcagcctgccgggcttccgg

SEQ ID NO: 41500 - DNA, 80 bp, synthetic construct; identical to SEQ ID NO: 14247
  source 1..80: mol_type = other DNA

SEQ ID NO: 41501 - DNA, 80 bp, synthetic construct
  source 1..80: mol_type = other DNA
cccttccacccacccttttcttccttccacagacccacagcctagagccttctttcctccccactgtccccgccacactt

SEQ ID NO: 41502 - DNA, 80 bp, synthetic construct
  source 1..80: mol_type = other DNA
cgagagggacgaatggcacaggaagatggcagggcttggtttgggtgtgtttgtgtgacacaccatatgtcattttttat

SEQ ID NO: 41503 - DNA, 80 bp, synthetic construct
  source 1..80: mol_type = other DNA
tttttcctcggagcaaacgcccgattgttttttccagctttggcaggaatttttaagagaaagctgttttcgaatcactt

SEQ ID NO: 41504 - DNA, 80 bp, synthetic construct; identical to SEQ ID NO: 14248
  source 1..80: mol_type = other DNA

SEQ ID NO: 41505 - DNA, 80 bp, synthetic construct
  source 1..80: mol_type = other DNA
tgcctggggcaacaatgcacacagtcccaagcaggtttcagtggggtggacagccctccccgcacccgggctgcagcttc

SEQ ID NO: 41506 - DNA, 80 bp, synthetic construct
  source 1..80: mol_type = other DNA
agtccacatactgcaggctcttaattaagaaagtatgttcccatttcatgtcactcgaaaagaatgaaaacagtgacagc

SEQ ID NO: 41507 - DNA, 80 bp, synthetic construct
  source 1..80: mol_type = other DNA
atttatttatcttaactatcaatatcattcctgtttctcagtccgctgggggtatgagtcttgaaggaattgactgggtt

SEQ ID NO: 41508 - DNA, 80 bp, synthetic construct; identical to SEQ ID NO: 14249
  source 1..80: mol_type = other DNA

SEQ ID NO: 41509 - DNA, 80 bp, synthetic construct
  source 1..80: mol_type = other DNA
ttgcccaagaccacacagccatccagagttgctccactgtggagacactattgccatttggagcagaataattatgtgtg

SEQ ID NO: 41510 - DNA, 80 bp, synthetic construct
  source 1..80: mol_type = other DNA
ctttaggatccaggcagcgtggtagtgctttggtgtttctgaactatgtactaatcagctatagatataggcattctaga

SEQ ID NO: 41511 - DNA, 80 bp, synthetic construct; identical to SEQ ID NO: 14250
  source 1..80: mol_type = other DNA

SEQ ID NO: 41512 - DNA, 80 bp, synthetic construct
  source 1..80: mol_type = other DNA
agcaactccaggcttacatggtcctaagagttaaaggcttcaaataaagaaaaagtaactttccttagagtgccaaaaaa

SEQ ID NO: 41513 - DNA, 80 bp, synthetic construct
  source 1..80: mol_type = other DNA
ggactgattttactggtctgtgataagtacagagatgcttagaaacactcatagcaattcgttgtggctgtagcatccag

SEQ ID NO: 41514 - DNA, 80 bp, synthetic construct
  source 1..80: mol_type = other DNA
agcactgctttaaactggagagtatgttaaaacacagatttctgggccctaccagtggaattctgattcagtcagtaggt

SEQ ID NO: 41515 - DNA, 80 bp, synthetic construct
  source 1..80: mol_type = other DNA
ggttttataaaggggagttcccttgcaaacgctctgtcttgcctgccaccatgtaagacgtcccttgctcttctgtcatg

SEQ ID NO: 41516 - DNA, 80 bp, synthetic construct; identical to SEQ ID NO: 14251
  source 1..80: mol_type = other DNA

SEQ ID NO: 41517 - DNA, 80 bp, synthetic construct
  source 1..80: mol_type = other DNA
agagaccatatggccctcaaactactaccatatggctagtagtaaatatctcccactagccctttacagaaaagtttgcc

SEQ ID NO: 41518 - DNA, 80 bp, synthetic construct
  source 1..80: mol_type = other DNA
tctaagtccctgtaatcatctgcatttgtgaagctggcatgccaagaaggtttgcaggttgagaaggggcttagaggtta

SEQ ID NO: 41519 - DNA, 80 bp, synthetic construct
  source 1..80: mol_type = other DNA
tctttagtggcttacaatgagaataggctaagaggcaagcgaggtctctcccaagcacccaaacctcaccaggtgaaggt

SEQ ID NO: 41520 - DNA, 80 bp, synthetic construct; identical to SEQ ID NO: 14252
  source 1..80: mol_type = other DNA

SEQ ID NO: 41521 - DNA, 80 bp, synthetic construct
  source 1..80: mol_type = other DNA
gtgacatgcctgctcctgcttcaccttctaccacgattgtaagcttcctgaggcctcccctgaagcagatgccagtgcta

SEQ ID NO: 41522 - DNA, 80 bp, synthetic construct
  source 1..80: mol_type = other DNA
ccatccctgagtgacctaccactttctgtctgttttctttaggacagtcttgaagatccactcagtgacatcctatggtg

SEQ ID NO: 41523 - DNA, 80 bp, synthetic construct
  source 1..80: mol_type = other DNA
acctttttccctcttcttcacctggactcagcttctccccctgcctgcattgtctgctcattcccatattctagtgtgct

SEQ ID NO: 41524 - DNA, 80 bp, synthetic construct; identical to SEQ ID NO: 14253
  source 1..80: mol_type = other DNA

SEQ ID NO: 41525 - DNA, 80 bp, synthetic construct
  source 1..80: mol_type = other DNA
atcccttgaagaaacaaacaacacatgtcgttttcttgaagccagttcagtccagctgctcaccaaagcaggatcccagc

SEQ ID NO: 41526 - DNA, 80 bp, synthetic construct
  source 1..80: mol_type = other DNA
cccttttctgtggactgcacgtgaatcatttttgctctaaattattgatttaccagtgagacactgaatccattccagac

SEQ ID NO: 41527 - DNA, 80 bp, synthetic construct
  source 1..80: mol_type = other DNA
tttctagacccttcccctttcccagtcaccttcctcttccaaatgtcacatcacagagatgatgtcctccattcttggcc

SEQ ID NO: 41528 - DNA, 80 bp, synthetic construct; identical to SEQ ID NO: 14254
  source 1..80: mol_type = other DNA

SEQ ID NO: 41529 - DNA, 80 bp, synthetic construct
  source 1..80: mol_type = other DNA
agtagctgggattacaggtgcctgccaccacgcctggctaattattttgtatttttagtagagacagggtttcactatgt

SEQ ID NO: 41530 - DNA, 80 bp, synthetic construct
  source 1..80: mol_type = other DNA
acatggaaagcaggagttccatgttctagaagagcaagtgcgcatgcgcgtgcgtgtgtgtatgtgcgtgcgtgtgtgtg

SEQ ID NO: 41531 - DNA, 80 bp, synthetic construct; identical to SEQ ID NO: 14255
  source 1..80: mol_type = other DNA

SEQ ID NO: 41532 - DNA, 80 bp, synthetic construct
  source 1..80: mol_type = other DNA
tataggaactgtaaatgttgcactagggatgattttgtttttgtgtgtgtgcttgctcagaaaatgaacccattgatctt

SEQ ID NO: 41533 - DNA, 80 bp, synthetic construct
  source 1..80: mol_type = other DNA
ctgtgctgggagtttataacggccttgtttccatactgacagcaaatgccatatggagagaaaaaaaaatctgtcaaatg

SEQ ID NO: 41534 - DNA, 80 bp, synthetic construct
  source 1..80: mol_type = other DNA
ataaaaatggaatttgacacaaggtaatttactttggttctgtgtttgtgctgggaaaaactgattgggaaaggatgcaa

SEQ ID NO: 41535 - DNA, 80 bp, synthetic construct; identical to SEQ ID NO: 14256
  source 1..80: mol_type = other DNA

SEQ ID NO: 41536 - DNA, 80 bp, synthetic construct
  source 1..80: mol_type = other DNA
caagaggggacttggcaggttgctcatccatgctgatccaaatactcactcgggagagaatgaaacgttttagagtgcct

SEQ ID NO: 41537 - DNA, 80 bp, synthetic construct
  source 1..80: mol_type = other DNA
ccgggagggcgggctgccttcagggctcctctctccgctcatctccgcttgtgtgcgggctgcgcctccgtgggctctcg

SEQ ID NO: 41538 - DNA, 80 bp, synthetic construct
  source 1..80: mol_type = other DNA
ggctagaactgaggcatggccacccttgaacctgtcattatggccagagagagaggcctctgattggctgtgactaagtg

SEQ ID NO: 41539 - DNA, 80 bp, synthetic construct; identical to SEQ ID NO: 14257
  source 1..80: mol_type = other DNA

SEQ ID NO: 41540 - DNA, 80 bp, synthetic construct
  source 1..80: mol_type = other DNA
tcaaaccaaggcagtttagctccagagcccacactgacactcacagctaccacgagatcctccctcccggcaagccatag

SEQ ID NO: 41541 - DNA, 80 bp, synthetic construct
  source 1..80: mol_type = other DNA
gtgtcttagctcctctacaccaggtagactatagtcatcccttccctgcaagttgctgtccttcccaggctctatcgccc

SEQ ID NO: 41542 - DNA, 80 bp, synthetic construct
  source 1..80: mol_type = other DNA
actgcaggaagaaccaaaagggaaagggcccccatcccaactccagcatgcccttcttgttttcagaggagaacacagag

SEQ ID NO: 41543 - DNA, 80 bp, synthetic construct; identical to SEQ ID NO: 14258
  source 1..80: mol_type = other DNA

SEQ ID NO: 41544 - DNA, 80 bp, synthetic construct
  source 1..80: mol_type = other DNA
cagggcaccaactctacttcttctaatttcccagctctcacctccttgatgtgtcaggctcatcctcatcgcggcttttc

SEQ ID NO: 41545 - DNA, 80 bp, synthetic construct
  source 1..80: mol_type = other DNA
gtaatcagagaatgtgatgtgcttaatggccaccaaggagatggaatcacagtccccagaactgctggcatgtccataca

SEQ ID NO: 41546 - DNA, 80 bp, synthetic construct
  source 1..80: mol_type = other DNA
gccttctcctgggtctcatcacattcttcttttcttgtctccagacagagattactgcagtttatgtgacaagcagccaa

SEQ ID NO: 41547 - DNA, 80 bp, synthetic construct; identical to SEQ ID NO: 14259
  source 1..80: mol_type = other DNA

SEQ ID NO: 41548 - DNA, 80 bp, synthetic construct
  source 1..80: mol_type = other DNA
ggatctcaaggccccttcctccagctgagaacccattttatagaattccaaagcttttgtctgtttgtacaattgtttat

SEQ ID NO: 41549 - DNA, 80 bp, synthetic construct
  source 1..80: mol_type = other DNA
tctggcatggatgacatgcctgacaccatggagtcttccttcacatgtgcttgttattctttgtttaacaaatgctgatt

SEQ ID NO: 41550 - DNA, 80 bp, synthetic construct
  source 1..80: mol_type = other DNA
gtgtgaagtcatccaggcccctcccctccccgccaggtgcaggggccgagaggctgctgtttcctgaagggccctcatgc

SEQ ID NO: 41551 - DNA, 80 bp, synthetic construct; identical to SEQ ID NO: 14260
  source 1..80: mol_type = other DNA

SEQ ID NO: 41552 - DNA, 80 bp, synthetic construct
  source 1..80: mol_type = other DNA
ttcgggcaggctcttggcgcctcttgtgtgagtgattacagtagttttcaatcttagctgggcgttagaaacacctgggg

SEQ ID NO: 41553 - DNA, 80 bp, synthetic construct
  source 1..80: mol_type = other DNA
caccccacctttatgaacccacaattatgaactcatggccaatcttctttcatccattcctccatcctttactctgtaac

SEQ ID NO: 41554 - DNA, 80 bp, synthetic construct; identical to SEQ ID NO: 14261
  source 1..80: mol_type = other DNA

SEQ ID NO: 41555 - DNA, 80 bp, synthetic construct
  source 1..80: mol_type = other DNA
gagtacagtggtgcgatctcagcagactgcaagctccgcctcccaggttcacaccattctcctgcctcagcctcccgagt

SEQ ID NO: 41556 - DNA, 80 bp, synthetic construct
  source 1..80: mol_type = other DNA
gcgcctggcctggctcctttatatttcttatacgttgctagttggatctagaaacttgaccaaattcggtttccgttttt

SEQ ID NO: 41557 - DNA, 80 bp, synthetic construct
  source 1..80: mol_type = other DNA
ttcttccatcaggggacatacaccatctggttgtctttctttttgaaatggtagcagctattgctagtctgtacctgaat

SEQ ID NO: 41558 - DNA, 80 bp, synthetic construct
  source 1..80: mol_type = other DNA
aggaaatggttgattcttttctcgcattaatgtttctaaaataccaaactggttcactaccatcctccagtagcagtaac

SEQ ID NO: 41559 - DNA, 80 bp, synthetic construct; identical to SEQ ID NO: 14262
  source 1..80: mol_type = other DNA

SEQ ID NO: 41560 - DNA, 80 bp, synthetic construct
  source 1..80: mol_type = other DNA
aagtaatgacatctaggataaagtccaggttccgaggctgacttaccagatcttccagcatcagctcctgcccacctttt

SEQ ID NO: 41561 - DNA, 80 bp, synthetic construct
  source 1..80: mol_type = other DNA
tgcctacttgtccttctgtcccctgttctcagaggccctcccgatctccctcttcctctctctcctgctgtgcccctctg

SEQ ID NO: 41562 - DNA, 80 bp, synthetic construct
  source 1..80: mol_type = other DNA
gtacttcgtgtcttcatctgtaagtggggatatagctgtatctgatgatgggcgaggtgttaggtagagactacatgagt

SEQ ID NO: 41563 - DNA, 80 bp, synthetic construct
  source 1..80: mol_type = other DNA
ggtctgtgaatcctcagcccacagtgccacacgtaacagttgagtgatgctcagattgggcccagtggaggttggtggct

SEQ ID NO: 41564 - DNA, 80 bp, synthetic construct; identical to SEQ ID NO: 14263
  source 1..80: mol_type = other DNA

SEQ ID NO: 41565 - DNA, 80 bp, synthetic construct
  source 1..80: mol_type = other DNA
gagggggtaggagaggaggtgatcatgtaaaactttgtgccatcagagaactttgactttgggtgaaatgggggagccac

SEQ ID NO: 41566 - DNA, 80 bp, synthetic construct
  source 1..80: mol_type = other DNA
cttcctaccttggcctcctaagtagctgcaaatacgggtgtgcaccaccatgcccatctgtgacttaggtttttcaagaa

SEQ ID NO: 41567 - DNA, 80 bp, synthetic construct; identical to SEQ ID NO: 14264
  source 1..80: mol_type = other DNA

SEQ ID NO: 41568 - DNA, 80 bp, synthetic construct
  source 1..80: mol_type = other DNA
gagatgggtgttcaagccaggcttcatgagaaagatctgggctggaaatggaaaattgggagttgtcaactttttttttt

SEQ ID NO: 41569 - DNA, 80 bp, synthetic construct
  source 1..80: mol_type = other DNA
atttttgtattctttgtagagacagagttttgccatgttgccatggctggtctcaaattcctgggctcaagtgatctgcc

SEQ ID NO: 41570 - DNA, 80 bp, synthetic construct
  source 1..80: mol_type = other DNA
gccccggaccaagggctgctccccatttggaaaagaggaggcagcagcagctttgggagccatctagagagttgatgagg

SEQ ID NO: 41571 - DNA, 80 bp, synthetic construct; identical to SEQ ID NO: 14265
  source 1..80: mol_type = other DNA

SEQ ID NO: 41572 - DNA, 80 bp, synthetic construct
  source 1..80: mol_type = other DNA
tacgcacggagactttattgagttttccagggctggcgtaacttctcgtctaaaatccgttttttcttccatcctgactg

SEQ ID NO: 41573 - DNA, 80 bp, synthetic construct
  source 1..80: mol_type = other DNA
ggagcttttaaaaataacctgtcctcgttggactctgatgtagtccctgggaaaggctcctctcctgcacagtatttttt

SEQ ID NO: 41574 - DNA, 80 bp, synthetic construct
  source 1..80: mol_type = other DNA
attttgtatttttaatagagatggggtttcgccatgttggctggtctggtcctgaattcctgacctcaagtgatccgcct

SEQ ID NO: 41575 - DNA, 80 bp, synthetic construct; identical to SEQ ID NO: 14266
  source 1..80: mol_type = other DNA

SEQ ID NO: 41576 - DNA, 80 bp, synthetic construct
  source 1..80: mol_type = other DNA
ttggagactgatggacttctctctaacctgttccctgggagccttgaccacatgctggctcatttgaaaccatcttatct

SEQ ID NO: 41577 - DNA, 80 bp, synthetic construct
  source 1..80: mol_type = other DNA
ctaagttcctgcccttgtgcagcttgctttctggttaaatgaaagattaaaaaaataaagaagattttttttttctagga

SEQ ID NO: 41578 - DNA, 80 bp, synthetic construct
  source 1..80: mol_type = other DNA
tttttttagagatggggtctctctgtattgcctaggctggtcttgaacttctggcctcaagtgatgcttccaccttggct

SEQ ID NO: 41579 - DNA, 80 bp, synthetic construct
  source 1..80: mol_type = other DNA
cttttgcccaggctgcagtacagtggtgtgacctcagctcactgtaacctccacctcctgggttcaagtgattctcgtgc

SEQ ID NO: 41580 - DNA, 80 bp, synthetic construct; identical to SEQ ID NO: 14267
  source 1..80: mol_type = other DNA

SEQ ID NO: 41581 - DNA, 80 bp, synthetic construct
  source 1..80: mol_type = other DNA
tggcaggttggtgctggctgttggcaggagggagcctctccatgggattgcttgagtgtcctcacaacatggctggcttt

SEQ ID NO: 41582 - DNA, 80 bp, synthetic construct
  source 1..80: mol_type = other DNA
aggattattgaaggccaccttggaggcaggcgactacaaatatgaggttacaacaaatgaaatctcatataggaaatgct

SEQ ID NO: 41583 - DNA, 80 bp, synthetic construct; identical to SEQ ID NO: 14268
  source 1..80: mol_type = other DNA

SEQ ID NO: 41584 - DNA, 80 bp, synthetic construct
  source 1..80: mol_type = other DNA
agaccccgggagcagggctgtcttgaaaaagtgccacttctaaaatgggtttatatagtgcacatctgtgggatcatcca

SEQ ID NO: 41585 - DNA, 80 bp, synthetic construct
  source 1..80: mol_type = other DNA
aggggaagttcttccctgctagagaaagcttaacataaaaaccctgggaactgtggactgccatgtttcctacactggaa

SEQ ID NO: 41586 - DNA, 80 bp, synthetic construct
  source 1..80: mol_type = other DNA
ttgttcagctcatcctcagattccaggagccaggagcttacagttttgttgaactaggttaggctgggattgttttcact

SEQ ID NO: 41587 - DNA, 80 bp, synthetic construct
  source 1..80: mol_type = other DNA
gtgaggatgggtggagctcttaggagaaaagtgatggggcagacaggaagcaggatggcacagcccgtctgtattagtcc

SEQ ID NO: 41588 - DNA, 80 bp, synthetic construct; identical to SEQ ID NO: 14269
  source 1..80: mol_type = other DNA

SEQ ID NO: 41589 - DNA, 80 bp, synthetic construct
  source 1..80: mol_type = other DNA
cttgaacccaggaggcagaggttgcagtgagccgagattgcaccactgcattccagcctgggcaacagagtgagactcca

SEQ ID NO: 41590 - DNA, 80 bp, synthetic construct
  source 1..80: mol_type = other DNA
agatttgggtggggacacagctaaaccatgtcaccctctgccactggggtgcttatcacttcccctgagatgggcgagcc

SEQ ID NO: 41591 - DNA, 80 bp, synthetic construct; identical to SEQ ID NO: 14270
  source 1..80: mol_type = other DNA

SEQ ID NO: 41592 - DNA, 80 bp, synthetic construct
  source 1..80: mol_type = other DNA
ctcgccattctcactggggagcagaaaggaagcaaggccagtgcccacccatctgaagcaccgtgcagggcatcagccag

SEQ ID NO: 41593 - DNA, 80 bp, synthetic construct
  source 1..80: mol_type = other DNA
gatcgtgggagaagactgcccacaggagtcgggtctggagaagagggtccgggagcctgcggtgcccaggcggggacgga

SEQ ID NO: 41594 - DNA, 80 bp, synthetic construct
  source 1..80: mol_type = other DNA
ctgaccaggcgtgtcacttgtccctgcctcaaggactctggaaaagctgaccacatcaataattacagaagctggaggtg

SEQ ID NO: 41595 - DNA, 80 bp, synthetic construct; identical to SEQ ID NO: 14271
  source 1..80: mol_type = other DNA

SEQ ID NO: 41596 - DNA, 80 bp, synthetic construct
  source 1..80: mol_type = other DNA
atgtagaaataattctttgttccttaagctcaatgtaatagtctgcattttgtgttagagcagcatctccccgcaaaggc

SEQ ID NO: 41597 - DNA, 80 bp, synthetic construct
  source 1..80: mol_type = other DNA
ggagtgcaatggcacaatctcagcttactgcaacctctgcctcccgagttcaatcgattctcctgcctcagcctcccaag

SEQ ID NO: 41598 - DNA, 80 bp, synthetic construct
  source 1..80: mol_type = other DNA
accgcccctggctaagagagctttaaatgaacagaacagcagaggtgcctgtgtttcggggaggggacaaggcccatctc

SEQ ID NO: 41599 - DNA, 80 bp, synthetic construct; identical to SEQ ID NO: 14272
  source 1..80: mol_type = other DNA

SEQ ID NO: 41600 - DNA, 80 bp, synthetic construct
  source 1..80: mol_type = other DNA
gcctgtcactaggtgtcttaatcagtgcgaaaagcccagctggaggccttccatccgttttccacctcccaacacaaatg

SEQ ID NO: 41601 - DNA, 80 bp, synthetic construct
  source 1..80: mol_type = other DNA
tttttttaacgtgggttttagtacccacagcaagagtatttttagctggttattgaggctgattagtgagccccaggcct

SEQ ID NO: 41602 - DNA, 80 bp, synthetic construct
  source 1..80: mol_type = other DNA
ccatttggttaaatagagccaccttcacagatgtattttcgtacagtgcaaatctagtgttctggatggtatagagttac

SEQ ID NO: 41603 - DNA, 80 bp, synthetic construct; identical to SEQ ID NO: 14273
  source 1..80: mol_type = other DNA

SEQ ID NO: 41604 - DNA, 80 bp, synthetic construct
  source 1..80: mol_type = other DNA
aggtgtgtgtgggtatgtgtgtgtgtgtctgggtctgggggggtgcgggtgtgtttgtgtggatgggtatctgtgggtgt

SEQ ID NO: 41605 - DNA, 80 bp, synthetic construct
  source 1..80: mol_type = other DNA
tgtgggtacgtgtgggtgtgggtgtgtgggtgtctgtgtgtggatgtatctgtgtgtgtgtgggcgtgtgtgtgggtgtg

SEQ ID NO: 41606 - DNA, 80 bp, synthetic construct
  source 1..80: mol_type = other DNA
cttagtgggcacgtgtgtggatgtgtgtgggtgtgtgtatctgcgtgtctgtgggcacgtgtgtgtgggtgtgtgtgggt

SEQ ID NO: 41607 - DNA, 80 bp, synthetic construct
  source 1..80: mol_type = other DNA
gtgtgtgggtgtgtatctgtgtgtgtgggggcacgtgtatgtttgggtgtgtgtgtgtctgtgtgtgggtgtgtatctgt

SEQ ID NO: 41608 - DNA, 80 bp, synthetic construct; identical to SEQ ID NO: 14274
  source 1..80: mol_type = other DNA

SEQ ID NO: 41609 - DNA, 80 bp, synthetic construct
  source 1..80: mol_type = other DNA
tccttacagaaccactgccctatctccctgtgatctaaatgattgtagtgttcatgtttcttcatgggagaaaatcattg

SEQ ID NO: 41610 - DNA, 80 bp, synthetic construct; identical to SEQ ID NO: 14275
  source 1..80: mol_type = other DNA

SEQ ID NO: 41611 - DNA, 80 bp, synthetic construct
  source 1..80: mol_type = other DNA
tgggattcagggaaattaaaaagtctgttttttggagacctcccatctttagagcttgggccccctggcttggctagtta

SEQ ID NO: 41612 - DNA, 80 bp, synthetic construct
  source 1..80: mol_type = other DNA
ctgttctcctgcgtcactgccctggctctttcgaggttcagataagaacatcttaaaaaacctgtgtatgttcactttgt

SEQ ID NO: 41613 - DNA, 80 bp, synthetic construct
  source 1..80: mol_type = other DNA
atacctaggtgctggtaccatctgcgttttatagaagggttaagcaaattgtctacgatcacacagcttacaaggtctga

SEQ ID NO: 41614 - DNA, 80 bp, synthetic construct
  source 1..80: mol_type = other DNA
tgatgtgcagtctgcatggagcaccgccatcctgagacccagcatctgtgagagagggcaaagtagtttggactaaacat

SEQ ID NO: 41615 - DNA, 80 bp, synthetic construct; identical to SEQ ID NO: 14276
  source 1..80: mol_type = other DNA

SEQ ID NO: 41616 - DNA, 80 bp, synthetic construct
  source 1..80: mol_type = other DNA
agtgcccaagcctggcagggccaagatggggatggtctaggccaggactggagtaggggcgggatgcctgcttcttgggg

SEQ ID NO: 41617 - DNA, 80 bp, synthetic construct
  source 1..80: mol_type = other DNA
actgggagggaaagggggtgcccaacgacatcaaagaatgaagagaattctgaaacatattctggagtattctgaagggt

SEQ ID NO: 41618 - DNA, 80 bp, synthetic construct; identical to SEQ ID NO: 14277
  source 1..80: mol_type = other DNA

SEQ ID NO: 41619 - DNA, 80 bp, synthetic construct
  source 1..80: mol_type = other DNA
ttggccatcagtcccctcaacctcctgcacctcttgcaccaaatgtagccctcgttcttctccagcatcagcagttggta

SEQ ID NO: 41620 - DNA, 80 bp, synthetic construct
  source 1..80: mol_type = other DNA
aatccatgcacttctctttctgtgaactgcaaacacccccagcccttttgcacttttcagaaatgacagaatttatgttt

SEQ ID NO: 41621 - DNA, 80 bp, synthetic construct
  source 1..80: mol_type = other DNA
tcagcagggtccctgttcacccagtcgcagccgatgtcatattggtggggctctggctagatacatttttgatctcctgg

SEQ ID NO: 41622 - DNA, 80 bp, synthetic construct; identical to SEQ ID NO: 14278
  source 1..80: mol_type = other DNA

SEQ ID NO: 41623 - DNA, 80 bp, synthetic construct
  source 1..80: mol_type = other DNA
tccttgctgtcactgtgggatgcagattatatttgttccatcttaccgataaggaaggagaggctcaggggagctgtcac

SEQ ID NO: 41624 - DNA, 80 bp, synthetic construct
  source 1..80: mol_type = other DNA
tgctccctttgcctgaccttgctgtctggataggctcttgtggcttagccaagaacagggtacaggcaggcactggggca

SEQ ID NO: 41625 - DNA, 80 bp, synthetic construct
  source 1..80: mol_type = other DNA
ttttacaagtgcctcagagcctgccagcattttttcccttaagttctcctcaatttaaaaaatttaagccacaccatatg

SEQ ID NO: 41626 - DNA, 80 bp, synthetic construct; identical to SEQ ID NO: 14279
  source 1..80: mol_type = other DNA

SEQ ID NO: 41627 - DNA, 80 bp, synthetic construct
  source 1..80: mol_type = other DNA
ctcagtatgtagcttgtgtgtctcagctctgagcagtgcttcccaaaaggtagaccataggagagtggccagtggagaag

SEQ ID NO: 41628 - DNA, 80 bp, synthetic construct
  source 1..80: mol_type = other DNA
tattgaccataattttttttcaattttccattctgctgagcacactttgggctacagaacacatccaagagcctcacgcc

SEQ ID NO: 41629 - DNA, 80 bp, synthetic construct
  source 1..80: mol_type = other DNA
ctctgtctttctcgcttctgtatccctgcatgtattgaggacacttgtgtcaggcaccactgtctgcagtcatctccaac

SEQ ID NO: 41630 - DNA, 80 bp, synthetic construct
  source 1..80: mol_type = other DNA
ccaaatgccccacgatgggagcagtggtggagctgtgctcagggaagtgtggggtcaggtgagctagaggacgcttccag

SEQ ID NO: 41631 - DNA, 80 bp, synthetic construct; identical to SEQ ID NO: 14280
  source 1..80: mol_type = other DNA

SEQ ID NO: 41632 - DNA, 80 bp, synthetic construct
  source 1..80: mol_type = other DNA
agtgcttcgagtgccacttgtattttaggacgatctccctgaccacatggaggaggaataagggggatgaggaaggactg

SEQ ID NO: 41633 - DNA, 80 bp, synthetic construct
  source 1..80: mol_type = other DNA
agagcacaggatgagggccgtgggaaggtccacctgctctcggcagaggcaggggaattcattttggatggagacagtgg

SEQ ID NO: 41634 - DNA, 80 bp, synthetic construct; identical to SEQ ID NO: 14281
  source 1..80: mol_type = other DNA

SEQ ID NO: 41635 - DNA, 80 bp, synthetic construct
  source 1..80: mol_type = other DNA
caagggtgggcttggaaggggttgaaagctgttggagagctcacagaagggcagcagagtgctgagaaggacgtgagctt

SEQ ID NO: 41636 - DNA, 80 bp, synthetic construct
  source 1..80: mol_type = other DNA
atgaggatcataaataaaagcagcaagtactgagcatggtagctggggcatcttaagtgcccagcagcagtgcttgtcat

SEQ ID NO: 41637 - DNA, 80 bp, synthetic construct
  source 1..80: mol_type = other DNA
gatttatactagctgccacaacaaacaaacccccaaatctcaggggctcctcccagcaaaggttcatttctttctcacgc

SEQ ID NO: 41638 - DNA, 80 bp, synthetic construct; identical to SEQ ID NO: 14282
  source 1..80: mol_type = other DNA

SEQ ID NO: 41639 - DNA, 80 bp, synthetic construct
  source 1..80: mol_type = other DNA
atctctggtgctgattagacagccgtgagcgtggcttgtcttagggattgtctcgggtttgtcagctcacagaagctggc

SEQ ID NO: 41640 - DNA, 80 bp, synthetic construct
  source 1..80: mol_type = other DNA
gagggtcactccgagctgaggtggcccaggaaatgttcccattgtaataataataataagtgaaaacagaattatatttc

SEQ ID NO: 41641 - DNA, 80 bp, synthetic construct
  source 1..80: mol_type = other DNA
aaaaatacaaaaaatcagctgggcatggtggcccacacctgtaatcccagctactccagaggctgaggtacaagaatcgc

SEQ ID NO: 41642 - DNA, 80 bp, synthetic construct; identical to SEQ ID NO: 14283
  source 1..80: mol_type = other DNA

SEQ ID NO: 41643 - DNA, 80 bp, synthetic construct
  source 1..80: mol_type = other DNA
ggctggagtgcagtggtgtgatctcggctcactgcaagctccgcctcccgggttcacgccattctcctgcctcagcctcc

SEQ ID NO: 41644 - DNA, 80 bp, synthetic construct
  source 1..80: mol_type = other DNA
caccgcaccagccgactggtttcttttgtagcataatgtttttaagattcatccacattgtaacatgtatcagcacttca

SEQ ID NO: 41645 - DNA, 80 bp, synthetic construct
  source 1..80: mol_type = other DNA
tggcgggatctcggctcactgtaacctccaccccccgggttcaagtgatcctcctgccaccgcctcccaagtagctggga

SEQ ID NO: 41646 - DNA, 80 bp, synthetic construct
  source 1..80: mol_type = other DNA
aacctgcttctattttttgtttctacatttttgctcttgtggaataataatgctgtgaaaatgcaggtacaagtttttgt

SEQ ID NO: 41647 - DNA, 80 bp, synthetic construct; identical to SEQ ID NO: 14284
  source 1..80: mol_type = other DNA

SEQ ID NO: 41648 - DNA, 80 bp, synthetic construct
  source 1..80: mol_type = other DNA
taatgtcaagtcataagagttcttcatatgttcaggatacaaggtccttatcagtatatgacttacacatattttctccc

SEQ ID NO: 41649 - DNA, 80 bp, synthetic construct
  source 1..80: mol_type = other DNA
gaaagggtgtgtatggaaacaaagtaaagaaatcctaatgtacatttagccccatgacccggtcttcctttgaagaacga

SEQ ID NO: 41650 - DNA, 80 bp, synthetic construct; identical to SEQ ID NO: 14285
  source 1..80: mol_type = other DNA

SEQ ID NO: 41651 - DNA, 80 bp, synthetic construct
  source 1..80: mol_type = other DNA
agttttgatgtggctttgttagggactatcagtggattctaggggaagctcaaacccagtcctggtcctgctgaaagggc

SEQ ID NO: 41652 - DNA, 80 bp, synthetic construct
  source 1..80: mol_type = other DNA
ctgggccctccatagatgcagggctgcctctttgtttcaataaacaatgatagggtaagacagggaagttggttcttgtg

SEQ ID NO: 41653 - DNA, 80 bp, synthetic construct
  source 1..80: mol_type = other DNA
cacattttataaagtcaagagcttgaatgaaaggaaataataacgactccaaattccctcctctggctccccacccccac

SEQ ID NO: 41654 - DNA, 80 bp, synthetic construct
  source 1..80: mol_type = other DNA
aactgagtatggggctgataaaaatggcgcctacctgtgcttgtggccatcagtcattctctagcacttgcgtggttttg

SEQ ID NO: 41655 - DNA, 80 bp, synthetic construct; identical to SEQ ID NO: 14286
  source 1..80: mol_type = other DNA

SEQ ID NO: 41656 - DNA, 80 bp, synthetic construct
  source 1..80: mol_type = other DNA
tcatcatctttagaagatgctgggctaactctctgcttcctagctatgatgcgttatggaaatggaaatgctggcttgtt

SEQ ID NO: 41657 - DNA, 80 bp, synthetic construct
  source 1..80: mol_type = other DNA
gggaagcttgggcaaatggctcccttccaagtacctgtcccattctccctggggcttggggtcccagacactggccctgg

SEQ ID NO: 41658 - DNA, 80 bp, synthetic construct
  source 1..80: mol_type = other DNA
tccagcttcctgtcacagccttgcgtacaggctggagggcggaagaggattgaaaagaaaacttgagaaagggacttcca

SEQ ID NO: 41659 - DNA, 80 bp, synthetic construct; identical to SEQ ID NO: 14287
  source 1..80: mol_type = other DNA

SEQ ID NO: 41660 - DNA, 80 bp, synthetic construct
  source 1..80: mol_type = other DNA
ctgactttgaggagaacatttagggttctgtggatcccagtttaagcaccatggagctgagctaaactcctcatttccta

SEQ ID NO: 41661 - DNA, 80 bp, synthetic construct
  source 1..80: mol_type = other DNA
ctgggtttcaattcctctgaggtgctttttctttaagccagtaagtgtctaaatgctgagacattcgtaatgtctgtgca

SEQ ID NO: 41662 - DNA, 80 bp, synthetic construct; identical to SEQ ID NO: 14288
  source 1..80: mol_type = other DNA

SEQ ID NO: 41663 - DNA, 80 bp, synthetic construct
  source 1..80: mol_type = other DNA
tggtggctcacgcctgtaattccagcactttgggaggccaaggcgggcaaatcagctgaggtcgggagttcaagaccagc

SEQ ID NO: 41664 - DNA, 80 bp, synthetic construct
  source 1..80: mol_type = other DNA
ccagcctaggcaacaagagtgaaactccatctcaaaaaaaaaaaaaaaaaaaaaaattaattaggtgggtatggtggcgc

SEQ ID NO: 41665 - DNA, 80 bp, synthetic construct
  source 1..80: mol_type = other DNA
aacacagatgcaaacagatactagtgtgcaaatatttatagcagcattatcacaatggccaaaaaatggcaacaaccaaa

SEQ ID NO: 41666 - DNA, 80 bp, synthetic construct; identical to SEQ ID NO: 14289
  source 1..80: mol_type = other DNA

SEQ ID NO: 41667 - DNA, 80 bp, synthetic construct
  source 1..80: mol_type = other DNA
ctgtgatctttctcttcctctgcgttgtcttcttgaaagttaaccaaagacaaaagttcccactgaatcagcttcccagg

SEQ ID NO: 41668 - DNA, 80 bp, synthetic construct
  source 1..80: mol_type = other DNA
actgtgtaattgtccttcaaatagacacaccccacccctcaccaacctttcctggaaaacaaattgtctttgcccacagc

SEQ ID NO: 41669 - DNA, 80 bp, synthetic construct
  source 1..80: mol_type = other DNA
tgcctctgaccctgtccttaatgtgtgtgcatagtgtttcctgtccagaatgcctctcttttggagtggcggcagacaga

SEQ ID NO: 41670 - DNA, 80 bp, synthetic construct; identical to SEQ ID NO: 14290
  source 1..80: mol_type = other DNA

SEQ ID NO: 41671 - DNA, 80 bp, synthetic construct
  source 1..80: mol_type = other DNA
agtgacctgcatgtggttgcattggcctgagcggagctggctgcatgcaaaccactggccaggaagaatcccactcctgc

SEQ ID NO: 41672 - DNA, 80 bp, synthetic construct
  source 1..80: mol_type = other DNA
ttgcattttgttaattatcgtcttttgcttttgacgtaaagggtcggggtctgggtcagggtcactgtgtattttccttt

SEQ ID NO: 41673 - DNA, 80 bp, synthetic construct
  source 1..80: mol_type = other DNA
cagtccattttatttttcttgaagggctgcagctatttctgaagggctgggtttttctactttgttggcccagagaacat

SEQ ID NO: 41674 - DNA, 80 bp, synthetic construct; identical to SEQ ID NO: 14291
  source 1..80: mol_type = other DNA

SEQ ID NO: 41675 - DNA, 80 bp, synthetic construct
  source 1..80: mol_type = other DNA
agcgctctctcctaggtgctgaggggctgtgacctgcactctacagcctgcagtccttgctgaccttgaactcctgccat

SEQ ID NO: 41676 - DNA, 80 bp, synthetic construct
  source 1..80: mol_type = other DNA
cagctcccatgccttgaagtctcttcctggcctggtggaaaacccagctaccctcatggtcaccaccaaagaggtacaag

SEQ ID NO: 41677 - DNA, 80 bp, synthetic construct
  source 1..80: mol_type = other DNA
cccagagaccccttagactctaggtctttggactgttcaccaaggaaagataaaaatggcagactggatgccatcttcct

SEQ ID NO: 41678 - DNA, 80 bp, synthetic construct; identical to SEQ ID NO: 14292
  source 1..80: mol_type = other DNA

SEQ ID NO: 41679 - DNA, 80 bp, synthetic construct
  source 1..80: mol_type = other DNA
cggcctcctcagcttcattgcagatctgcttcttttttttttttttttttttttttttgagatagagtcttgctctgtcg

SEQ ID NO: 41680 - DNA, 80 bp, synthetic construct
  source 1..80: mol_type = other DNA
atgttggccaggctggtctcgaactcctgacctcaggtgatccacctccctcggcctcccaaagtgctgggattccaggc

SEQ ID NO: 41681 - DNA, 80 bp, synthetic construct
  source 1..80: mol_type = other DNA
tgtgtctctgcctggcagggctgtgcctggcacggtgcccgggccgtgcagtccatcgcctgggctgaccacgaggacac

SEQ ID NO: 41682 - DNA, 80 bp, synthetic construct
  source 1..80: mol_type = other DNA
tctttcctttggtctgttcttgtctggggcttgtggatcacgtctcctgcctggccatggacagagaaaggaaccactcc

SEQ ID NO: 41683 - DNA, 80 bp, synthetic construct; identical to SEQ ID NO: 14293
  source 1..80: mol_type = other DNA

SEQ ID NO: 41684 - DNA, 80 bp, synthetic construct
  source 1..80: mol_type = other DNA
ggtgaattcgtctggattcttggcagcaagtggcagatactttcctcccagttgctcaaacaaagagggaatttactgca

SEQ ID NO: 41685 - DNA, 80 bp, synthetic construct
  source 1..80: mol_type = other DNA
tttaattaagaaaattccttagcactgtgattggcccagcatgttacaaaggcaggaggcagagcagatgaccccataaa

SEQ ID NO: 41686 - DNA, 80 bp, synthetic construct
  source 1..80: mol_type = other DNA
acctactatgtgccaggaacatcatcagttcattcagcaaagcagagtggagagattgcagggtttggaactgggcaggc

SEQ ID NO: 41687 - DNA, 80 bp, synthetic construct; identical to SEQ ID NO: 14294
  source 1..80: mol_type = other DNA

SEQ ID NO: 41688 - DNA, 80 bp, synthetic construct
  source 1..80: mol_type = other DNA
agatcccctcgaggagggtcaaggggcggccagggtatggttgtgggagtgcccctcctctgttcccgccccggaggaga

SEQ ID NO: 41689 - DNA, 80 bp, synthetic construct
  source 1..80: mol_type = other DNA
attgcaaatagtttacatggggaatgtcagctgcccacatatgaaaatatacacatcattaagccctaagtgcttgcgtc

SEQ ID NO: 41690 - DNA, 80 bp, synthetic construct
  source 1..80: mol_type = other DNA
agcactatacaaacaccattggtcaaaacacacagagtccaccgcacctccttatccagcccccatgggcctccagggag

SEQ ID NO: 41691 - DNA, 80 bp, synthetic construct; identical to SEQ ID NO: 14295
  source 1..80: mol_type = other DNA

SEQ ID NO: 41692 - DNA, 80 bp, synthetic construct
  source 1..80: mol_type = other DNA
ggccaacatggtgaaacaccgtctctactaaaaatacaaaaattagtcaggtgttgtggggcgtgcctgtaatcccagct

SEQ ID NO: 41693 - DNA, 80 bp, synthetic construct; identical to SEQ ID NO: 14296
  source 1..80: mol_type = other DNA

SEQ ID NO: 41694 - DNA, 80 bp, synthetic construct
  source 1..80: mol_type = other DNA
aggcattgggggccgctgatgctgtgtggtgcagaaaaactcctttggggaccattgtgtcaaatgaaagagcaaagagt

SEQ ID NO: 41695 - DNA, 80 bp, synthetic construct
  source 1..80: mol_type = other DNA
gctggttttgactggggccaaggaggccaaagccatgtccttcctagagggctggctcaggatacctggttaagggctta

SEQ ID NO: 41696 - DNA, 80 bp, synthetic construct
  source 1..80: mol_type = other DNA
atctccacctcctccgccgtctcactcctgaatctctgaacgagtatcaggcctgtgtttctggacagttcccagggtga

SEQ ID NO: 41697 - DNA, 80 bp, synthetic construct; identical to SEQ ID NO: 14297
  source 1..80: mol_type = other DNA

SEQ ID NO: 41698 - DNA, 80 bp, synthetic construct
  source 1..80: mol_type = other DNA
tgcttatttcccatgatcttcactagtccctctgactccgaacagcatctccctttctgttcagtgctgactctgtcctc

SEQ ID NO: 41699 - DNA, 80 bp, synthetic construct
  source 1..80: mol_type = other DNA
ctcagtgatctcggctcactgcaacctccgcctcctgggttcaagcgattctcgtgcctcagcctcctgagtagctggga

SEQ ID NO: 41700 - DNA, 80 bp, synthetic construct
  source 1..80: mol_type = other DNA
gctgaattgatcccctttttcccctcagttgttgttgcagaggccgtactcctctggtctgagattatagtcagttggta

SEQ ID NO: 41701 - DNA, 80 bp, synthetic construct
  source 1..80: mol_type = other DNA
ggccttggctgaatgcgtggaggcagaactggggttgggctgtcgcctgcccttgtgcttgggtccctacctctgtaatg

SEQ ID NO: 41702 - DNA, 80 bp, synthetic construct; identical to SEQ ID NO: 14298
  source 1..80: mol_type = other DNA

SEQ ID NO: 41703 - DNA, 80 bp, synthetic construct
  source 1..80: mol_type = other DNA
ttgaaaattccaaggcctcccgtgcattgaatcgttagtggtcagcaatacatcatccacaccatgcctgaatatcccag

SEQ ID NO: 41704 - DNA, 80 bp, synthetic construct
  source 1..80: mol_type = other DNA
atgcatgagatgaggacaaaaaggaggggagaggcttagagaggagtgaaggtgcgaagtcaccctaggcgtacttcatc

SEQ ID NO: 41705 - DNA, 80 bp, synthetic construct
  source 1..80: mol_type = other DNA
ccagaaccagtggcatagagcagagagcgagtctgggccatagggaagaggtggtaagaaggagtgagtcatcgggggtc

SEQ ID NO: 41706 - DNA, 80 bp, synthetic construct; identical to SEQ ID NO: 14299
  source 1..80: mol_type = other DNA

SEQ ID NO: 41707 - DNA, 80 bp, synthetic construct
  source 1..80: mol_type = other DNA
tcctgccagcaccccaggctacacagctgtgtccccagggcgtatcttggtgtcttcagctgtcccagagagatgattac

SEQ ID NO: 41708 - DNA, 80 bp, synthetic construct
  source 1..80: mol_type = other DNA
cttccagttaacttgatcctttcaaaggaaccttggtgcccaaattcactgttgtgttaaagtcgaggtctgcagctaga

SEQ ID NO: 41709 - DNA, 80 bp, synthetic construct; identical to SEQ ID NO: 14300
  source 1..80: mol_type = other DNA

SEQ ID NO: 41710 - DNA, 80 bp, synthetic construct
  source 1..80: mol_type = other DNA
cccaccgcccaccagccaggcatctgaaactgcatggaattctcctgccttgaaagacccagtggatggatcccggtgct

SEQ ID NO: 41711 - DNA, 80 bp, synthetic construct
  source 1..80: mol_type = other DNA
tgatgcaaataataaatgtccgactacaactactcgcttcttacccttctggcaggtttgggctttagtttcagacgcaa

SEQ ID NO: 41712 - DNA, 80 bp, synthetic construct
  source 1..80: mol_type = other DNA
tgtttaatctcttcaagtcgagccagtggttataaagccagacattattacccactcattaactcccttgttagggcttt

SEQ ID NO: 41713 - DNA, 80 bp, synthetic construct; identical to SEQ ID NO: 14301
  source 1..80: mol_type = other DNA

SEQ ID NO: 41714 - DNA, 80 bp, synthetic construct
  source 1..80: mol_type = other DNA
ctgaggggataaggtgagagtggggcacaggtggcccagacagcccactccctccagccagatctcactcattagacacc

SEQ ID NO: 41715 - DNA, 80 bp, synthetic construct
  source 1..80: mol_type = other DNA
tcaggatatgattcagtgaattaatgaagcaatgtgtttagcccaggacctaactagagttagccttcagtatatgtaag

SEQ ID NO: 41716 - DNA, 80 bp, synthetic construct
  source 1..80: mol_type = other DNA
ttttgtacatcaccatgtacagtacaaccgagaggcataagaacttttctgttgggatattataccttataatatatcat

SEQ ID NO: 41717 - DNA, 80 bp, synthetic construct
  source 1..80: mol_type = other DNA
tcactgcagcctcgacctcttgggttcaaggaatcctcccgcctcagcctcccaagtagccgagactacaggcaagccac

SEQ ID NO: 41718 - DNA, 80 bp, synthetic construct; identical to SEQ ID NO: 14302
  source 1..80: mol_type = other DNA

SEQ ID NO: 41719 - DNA, 80 bp, synthetic construct
  source 1..80: mol_type = other DNA
tgctcacgaacagacaaccagcaccagctccgtgccaggccttgggccctcctggactaagggtgccaagccatcggctc

SEQ ID NO: 41720 - DNA, 80 bp, synthetic construct
  source 1..80: mol_type = other DNA
ccaaatctcaaaggacccttcaggcatctctggagcagctccttcctgtttcagagggtgagacggaggcacaaaatggc

SEQ ID NO: 41721 - DNA, 80 bp, synthetic construct
  source 1..80: mol_type = other DNA
ccactacccaggctgctgttggtaactgggaaatgtgctctgagactgctgtttggtgggaatggcttggcctgcacttg

SEQ ID NO: 41722 - DNA, 80 bp, synthetic construct; identical to SEQ ID NO: 14303
  source 1..80: mol_type = other DNA

SEQ ID NO: 41723 - DNA, 80 bp, synthetic construct
  source 1..80: mol_type = other DNA
ccagcaattttctcaattatctctttaatttattaaaaacccatctcaaagcccagctggtgagtcagcccctgggaaca

SEQ ID NO: 41724 - DNA, 80 bp, synthetic construct
  source 1..80: mol_type = other DNA
aaagataaagaaacaacggtggtgacatttattacgtgcttgctactactgccagatctgggccaaatgccttacctgaa

SEQ ID NO: 41725 - DNA, 80 bp, synthetic construct; identical to SEQ ID NO: 14304
  source 1..80: mol_type = other DNA

SEQ ID NO: 41726 - DNA, 80 bp, synthetic construct
  source 1..80: mol_type = other DNA
ggtgttcatcttctcttttgccctcggaggaaagaagcccagcatggccaaggggcgtcaccaagcctgctgggggctca

SEQ ID NO: 41727 - DNA, 80 bp, synthetic construct
  source 1..80: mol_type = other DNA
cagcctgtaagtgacacagtcagaagtctcatcctgaacctaggctcattcaccaccttccagctcagccacctccccaa

SEQ ID NO: 41728 - DNA, 80 bp, synthetic construct
  source 1..80: mol_type = other DNA
ctcactgaccacctcccttcccttccttcttccagtcccctgttttcatagcccaagttggccaagacctggtctcccag

SEQ ID NO: 41729 - DNA, 80 bp, synthetic construct; identical to SEQ ID NO: 14305
  source 1..80: mol_type = other DNA

SEQ ID NO: 41730 - DNA, 80 bp, synthetic construct
  source 1..80: mol_type = other DNA
agggggagcttctcagccaaaccccatcaccttgtctgcaggtggcacgtctgccgtgcaggaggtgacacaagtcgatg

SEQ ID NO: 41731 - DNA, 80 bp, synthetic construct
  source 1..80: mol_type = other DNA
acacacatacacacacacaggctcatgaaagttctccaaagccaggttaccccacatagttggatgatcttaggggcttt

SEQ ID NO: 41732 - DNA, 80 bp, synthetic construct
  source 1..80: mol_type = other DNA
ccaaggtgaacaagaacccaatcctggctttcatggagtttttacaagaaaaacagcaacctgcatgcactttgagggga

SEQ ID NO: 41733 - DNA, 80 bp, synthetic construct
  source 1..80: mol_type = other DNA
atcttggctcccaacgatggctttcaggtttggcaggacacagactctgacgtgccccacctgccatagtcccctccctt

SEQ ID NO: 41734 - DNA, 80 bp, synthetic construct; identical to SEQ ID NO: 14306
  source 1..80: mol_type = other DNA

SEQ ID NO: 41735 - DNA, 80 bp, synthetic construct
  source 1..80: mol_type = other DNA
gtccccccaaactcattcatgatgacatacctctgggatcatttatttcatgtttgctattcactgtttgtgtcccacat

SEQ ID NO: 41736 - DNA, 80 bp, synthetic construct
  source 1..80: mol_type = other DNA
gaggccctgtttacttgcatttccaaagctggacacagctttgcccccctgcttgaagatcgggattataaaatgttcat

SEQ ID NO: 41737 - DNA, 80 bp, synthetic construct
  source 1..80: mol_type = other DNA
catttttcatctgagaattcatataaaaatcagttacctcccgtgggctcatggttaaaacaaaattaacccgactcccc

SEQ ID NO: 41738 - DNA, 80 bp, synthetic construct; identical to SEQ ID NO: 14307
  source 1..80: mol_type = other DNA

SEQ ID NO: 41739 - DNA, 80 bp, synthetic construct
  source 1..80: mol_type = other DNA
tttgtacataaatctttaagtacttctgcaagtacatccagagaaattcctagcagaggaatttctgggtcagaaggcac

SEQ ID NO: 41740 - DNA, 80 bp, synthetic construct
  source 1..80: mol_type = other DNA
cttgtctctctaataatgggggagaccaagtgtcttttcttgtgtgcttgctgtctaattctcttcaaagtactcgccca

SEQ ID NO: 41741 - DNA, 80 bp, synthetic construct
  source 1..80: mol_type = other DNA
gcagagcggggcgatgcctgtgtaaaatccatgccgggccgagctggtagatgagggtgggagcctcccctcccacagcc

SEQ ID NO: 41742 - DNA, 80 bp, synthetic construct; identical to SEQ ID NO: 14308
  source 1..80: mol_type = other DNA

SEQ ID NO: 41743 - DNA, 80 bp, synthetic construct
  source 1..80: mol_type = other DNA
agggcaccagagcccccagcctgggtccgagtcccgcctctgcctcttcccaaggagggtcctcagaaagggtcactcac

SEQ ID NO: 41744 - DNA, 80 bp, synthetic construct
  source 1..80: mol_type = other DNA
gcagttgttgcatccatcaccaccatcatcaccatcaccaccatcatcagcatcactgcatcaatatcccaccgccatca

SEQ ID NO: 41745 - DNA, 80 bp, synthetic construct
  source 1..80: mol_type = other DNA
aacagcatcaccaccatcatcagcatcactgctgttatcaatatcccaccaccatcaacagcatcactgccataaacagc

SEQ ID NO: 41746 - DNA, 80 bp, synthetic construct; identical to SEQ ID NO: 14309
  source 1..80: mol_type = other DNA

SEQ ID NO: 41747 - DNA, 80 bp, synthetic construct
  source 1..80: mol_type = other DNA
tcagcatcaccaccatcatcagcatcactgccatcaacagcgtcaccaccatcagcagcatcactgccatcatcagcatc

SEQ ID NO: 41748 - DNA, 80 bp, synthetic construct
  source 1..80: mol_type = other DNA
tcactgccatcatcagcatcactgctatcatcagtatcacctccatcatcagcatcactgctgttatcaatatcccagtg

SEQ ID NO: 41749 - DNA, 80 bp, synthetic construct; identical to SEQ ID NO: 14310
  source 1..80: mol_type = other DNA

SEQ ID NO: 41750 - DNA, 80 bp, synthetic construct
  source 1..80: mol_type = other DNA
ctggaggatcagtcctgattctgccaattacagggcagtctagtggagctgtgttcgccatgcccacgcccggttctgga

SEQ ID NO: 41751 - DNA, 80 bp, synthetic construct
  source 1..80: mol_type = other DNA
ttctcatctgcagaatggggacaataatgatccctgctccctgagcttgtgtgaggattatagaagcccccatgtgtgct

SEQ ID NO: 41752 - DNA, 80 bp, synthetic construct
  source 1..80: mol_type = other DNA
tgacacatcaccagtttacaaagagccctccactggatgtaaggccttctcatgatcattttcctcagaggagttggagc

SEQ ID NO: 41753 - DNA, 80 bp, synthetic construct; identical to SEQ ID NO: 14311
  source 1..80: mol_type = other DNA

SEQ ID NO: 41754 - DNA, 80 bp, synthetic construct
  source 1..80: mol_type = other DNA
tgcggagatgtcaaccaaccgtttctcctccatgcatcgtaaactgttaggcgggccgccttcatgtggtttccgggggc

SEQ ID NO: 41755 - DNA, 80 bp, synthetic construct
  source 1..80: mol_type = other DNA
tgaagggagaagtgagccatggcacgcaaattcaagatggggtgccagagagtaccctggcttttcagggccttcctcag

SEQ ID NO: 41756 - DNA, 80 bp, synthetic construct
  source 1..80: mol_type = other DNA
taggagcaggagtttagtcttggagagccaagagccaattttcacgttttaagctgattatttgtagccaaacagaccag

SEQ ID NO: 41757 - DNA, 80 bp, synthetic construct; identical to SEQ ID NO: 14312
  source 1..80: mol_type = other DNA

SEQ ID NO: 41758 - DNA, 80 bp, synthetic construct
  source 1..80: mol_type = other DNA
agtgccctcaggaaggaataagccatgcccaggacaggaagcactgtcatcctgctgggcagactgagatgcacaggtgt

SEQ ID NO: 41759 - DNA, 80 bp, synthetic construct
  source 1..80: mol_type = other DNA
agagagaggagaaccacatggagagtgtggtcaagcacctctgcactcaggtttttcaagctttctgagcaagcgaggct

SEQ ID NO: 41760 - DNA, 80 bp, synthetic construct
  source 1..80: mol_type = other DNA
cagctgctctcaatgtgccactgtttcctgtggattctgagtcttggcaccatgagaccagtgtgggattcttctttctt

SEQ ID NO: 41761 - DNA, 80 bp, synthetic construct; identical to SEQ ID NO: 14313
  source 1..80: mol_type = other DNA

SEQ ID NO: 41762 - DNA, 80 bp, synthetic construct
  source 1..80: mol_type = other DNA
cagcctgcagaggacaaatgggcagccctggtcgtgtgtggggaggagatgtgagggcgtgaggaggctgggcaaccttg

SEQ ID NO: 41763 - DNA, 80 bp, synthetic construct
  source 1..80: mol_type = other DNA
caatgtgaggcagagctaagacttaagcccaaatgctttggttcccgcttatctggattatgaagtcagtgttcttgagg

SEQ ID NO: 41764 - DNA, 80 bp, synthetic construct
  source 1..80: mol_type = other DNA
aggagaggaggagggagggcaagggcccaggacagctgtgggccccaggccaggcatcactgggtcctgggagcctggag

SEQ ID NO: 41765 - DNA, 80 bp, synthetic construct; identical to SEQ ID NO: 14314
  source 1..80: mol_type = other DNA

SEQ ID NO: 41766 - DNA, 80 bp, synthetic construct
  source 1..80: mol_type = other DNA
gcagcgctgagctacagaaaggccgcaagacattcctccatcacacggcccattgtggtcgactgtggctggctttgtcc

SEQ ID NO: 41767 - DNA, 80 bp, synthetic construct
  source 1..80: mol_type = other DNA
ctgctgcagtaacacatttgccccaaaccctaagtagctaaatacagcagaggttcatctgtcactcacctgaagtccaa

SEQ ID NO: 41768 - DNA, 80 bp, synthetic construct; identical to SEQ ID NO: 14315
  source 1..80: mol_type = other DNA

SEQ ID NO: 41769 - DNA, 80 bp, synthetic construct
  source 1..80: mol_type = other DNA
ggtaaaaatttaaacagcacagaaggatacacaataaaacgaaaagcttccctctttgagtaatcactccaggcatgttt

SEQ ID NO: 41770 - DNA, 80 bp, synthetic construct
  source 1..80: mol_type = other DNA
ttttaaagttgggcatcattctcctgaagagataaagcataatccatatagtcagtccccatggatggaaattgttttcc

SEQ ID NO: 41771 - DNA, 80 bp, synthetic construct
  source 1..80: mol_type = other DNA
catggtggtgggcgcctgtaattccagctacttgggaggctgaggcatgagaatcacttgaacctgggaggcagagattg

SEQ ID NO: 41772 - DNA, 80 bp, synthetic construct
  source 1..80: mol_type = other DNA
gccagccttgtcgggggtgcaggtgtgggcagtgccatggtatgtggagatgaggcagatgaggctaacttcagccatca

SEQ ID NO: 41773 - DNA, 80 bp, synthetic construct; identical to SEQ ID NO: 14316
  source 1..80: mol_type = other DNA

SEQ ID NO: 41774 - DNA, 80 bp, synthetic construct
  source 1..80: mol_type = other DNA
cagaagcacagtccccatgagcttgctcatccttggctgccattttatctcctttcctcaaaaatagctgatgttgatgc

SEQ ID NO: 41775 - DNA, 80 bp, synthetic construct
  source 1..80: mol_type = other DNA
agcagaggactagaccccctctcttggtggccctttgccaagtggaccagtgtattagtccattttcacactgctgatta

SEQ ID NO: 41776 - DNA, 80 bp, synthetic construct; identical to SEQ ID NO: 14317
  source 1..80: mol_type = other DNA

SEQ ID NO: 41777 - DNA, 80 bp, synthetic construct
  source 1..80: mol_type = other DNA
caaaatcttaactcatttcagcattaactcaaaagtccatacatagtccaaagtcccatctgagacaaagcaagtccttt

SEQ ID NO: 41778 - DNA, 80 bp, synthetic construct
  source 1..80: mol_type = other DNA
tcttaaagctctaaaatgatctctttgacctcatgtctcacatccagatcatgccgatgccaagacgtgggttcccacgg

SEQ ID NO: 41779 - DNA, 80 bp, synthetic construct
  source 1..80: mol_type = other DNA
agctccaataggcaatgccccagtagggactctgtgtggggtctctgaccccacatttcccttctgcactgccctagcag

SEQ ID NO: 41780 - DNA, 80 bp, synthetic construct; identical to SEQ ID NO: 14318
  source 1..80: mol_type = other DNA

SEQ ID NO: 41781 - DNA, 80 bp, synthetic construct
  source 1..80: mol_type = other DNA
cttgttacttatgcaaatttaggcagccagcctgaatttctcctcagaaaatgggattttcttttctattgcattgtcag

SEQ ID NO: 41782 - DNA, 80 bp, synthetic construct
  source 1..80: mol_type = other DNA
gcaggggcaaaatgccagcagtttctttgctaaaagataacaagagtcacctttgctccagttcccaacaagttcctcgt

SEQ ID NO: 41783 - DNA, 80 bp, synthetic construct
  source 1..80: mol_type = other DNA
caaagtcatgtctacctttttgggtatttttttcagcagtgcctcactcttctggtaccaatttactctattagtccgtt

SEQ ID NO: 41784 - DNA, 80 bp, synthetic construct
  source 1..80: mol_type = other DNA
tgaaatgggcttccccttataaaaccatcaggtctgtgagacatattcactaccacaagagcagtatgggagaaactgcc

SEQ ID NO: 41785 - DNA, 80 bp, synthetic construct; identical to SEQ ID NO: 14319
  source 1..80: mol_type = other DNA

SEQ ID NO: 41786 - DNA, 80 bp, synthetic construct
  source 1..80: mol_type = other DNA
tgaaagggaggagcaggtgtgagccccttatcagccaaggaggccgcaggcagggtcaccgcagaggccatctgggtgca

SEQ ID NO: 41787 - DNA, 80 bp, synthetic construct
  source 1..80: mol_type = other DNA
gcttggtcctgaccatcatgaatgggggtgacctgaagttccacatctacaacatgggcaaccctggcttcgaggaggag

SEQ ID NO: 41788 - DNA, 80 bp, synthetic construct; identical to SEQ ID NO: 14320
  source 1..80: mol_type = other DNA

SEQ ID NO: 41789 - DNA, 80 bp, synthetic construct
  source 1..80: mol_type = other DNA
gcagccagggaagctgggagggggcctggtggccgctatctgggatcagtcctgggaagacttgggtcgggtcactgccc

SEQ ID NO: 41790 - DNA, 80 bp, synthetic construct
  source 1..80: mol_type = other DNA
ttctcccagtccttctgaaagaattttgaaaaatctctgtgatgctgcattttaagtagacatttgaaatattccatcat

SEQ ID NO: 41791 - DNA, 80 bp, synthetic construct
  source 1..80: mol_type = other DNA
atttccttcactctctccatccccccagaatgttaataatatatttttttgcctgaaagtctttcactgattagcgtaca

SEQ ID NO: 41792 - DNA, 80 bp, synthetic construct
  source 1..80: mol_type = other DNA
ggtttgagatcagcctggccaacgtggtgaaaccctgtctctactaaaaatacaaaaagtagccggatgcggtggcacgc

SEQ ID NO: 41793 - DNA, 80 bp, synthetic construct; identical to SEQ ID NO: 14321
  source 1..80: mol_type = other DNA

SEQ ID NO: 41794 - DNA, 80 bp, synthetic construct
  source 1..80: mol_type = other DNA
cctggcagaccccgacacgcagcccagtttgaagacctttgcagtggagctcatcttgggaccaagaaggttttgaaaac

SEQ ID NO: 41795 - DNA, 80 bp, synthetic construct
  source 1..80: mol_type = other DNA
tctctacgtgattgccttttatttaaaaagaaaaaagaaagccctccaagttccagctcgtcttcttccgggggaaagag

SEQ ID NO: 41796 - DNA, 80 bp, synthetic construct
  source 1..80: mol_type = other DNA
gatggctgctgcccttatttggaattgttaacacatcaaaagaatgccatttaaataacagcaacaaaagtattttatga

SEQ ID NO: 41797 - DNA, 80 bp, synthetic construct; identical to SEQ ID NO: 14322
  source 1..80: mol_type = other DNA

SEQ ID NO: 41798 - DNA, 80 bp, synthetic construct
  source 1..80: mol_type = other DNA
gtgttgggggatatgccagtctcctgcaggccccatcccaaagggggtctttttcctgtgtccccaccttctcccctttg

SEQ ID NO: 41799 - DNA, 80 bp, synthetic construct
  source 1..80: mol_type = other DNA
agtcaccctccaggattgggaaatgcctgtggcaaacggcagtgttgctttaaattactggaaggagaaaaattagctga

SEQ ID NO: 41800 - DNA, 80 bp, synthetic construct; identical to SEQ ID NO: 14323
  source 1..80: mol_type = other DNA

SEQ ID NO: 41801 - DNA, 80 bp, synthetic construct
  source 1..80: mol_type = other DNA
ttgaaattcagagtttttgaaattccctttgaccataaggctctaagtgttaaaataacttctggccgggcgtggtctct

SEQ ID NO: 41802 - DNA, 80 bp, synthetic construct
  source 1..80: mol_type = other DNA
tgacagcttgagagggaattgcttgtcagtctagccagctgtaaatgtctcaggcattacgtttgtgcattaccatcatt

SEQ ID NO: 41803 - DNA, 80 bp, synthetic construct
  source 1..80: mol_type = other DNA
tcacttgctcaggctagagtgcaatggcgtgatctcggcctactgcaacctctgcctcccaggttcaagtgattctcctg

SEQ ID NO: 41804 - DNA, 80 bp, synthetic construct
  source 1..80: mol_type = other DNA
tgcaatctcaactcagtgcaacctctacctcccaagttcaagtgattctgctgcctcagcctcccaagtagctgagatta

SEQ ID NO: 41805 - DNA, 80 bp, synthetic construct; identical to SEQ ID NO: 14324
  source 1..80: mol_type = other DNA

SEQ ID NO: 41806 - DNA, 80 bp, synthetic construct
  source 1..80: mol_type = other DNA
tgggatactgccctgtggaggggcggtcggagggcccaggcctgccgcccctctctggatgtgcccggtgcctcccttgg

SEQ ID NO: 41807 - DNA, 80 bp, synthetic construct
  source 1..80: mol_type = other DNA
gaagggaaggggacgtgttccttcctgtggggtaagttgtggccgcgaccctgcccaggtgggctgtgggagggacaaag

SEQ ID NO: 41808 - DNA, 80 bp, synthetic construct; identical to SEQ ID NO: 14325
  source 1..80: mol_type = other DNA

SEQ ID NO: 41809 - DNA, 80 bp, synthetic construct
  source 1..80: mol_type = other DNA
ttgcatctttatgttccactcctgaagagtgggcattttcctgtgtcctcccacacctgcactctcccaaggctcttgtg

SEQ ID NO: 41810 - DNA, 80 bp, synthetic construct
  source 1..80: mol_type = other DNA
tctcagacctgggcttggctgtgaagatccccgagggagacctgatccgcggccgggtgggcactgttggctacatgggt

SEQ ID NO: 41811 - DNA, 80 bp, synthetic construct
  source 1..80: mol_type = other DNA
cagggggagggggagcacaggggccccagatgtgatgactgctctgagctctctgcactcccaggcccccagccccacct

SEQ ID NO: 41812 - DNA, 80 bp, synthetic construct
  source 1..80: mol_type = other DNA
aagcatgattccagtagagagcagccttgggctcctgccacctttcctcagtctgctctgagaccagcgtcctgggggtt

SEQ ID NO: 41813 - DNA, 80 bp, synthetic construct; identical to SEQ ID NO: 14326
  source 1..80: mol_type = other DNA

SEQ ID NO: 41814 - DNA, 80 bp, synthetic construct
  source 1..80: mol_type = other DNA
gcctgggtctccttttgcagagtgttccatgcatctgtctgccccggctcttgtgtgcaaaccagcacatgtgtggatgc

SEQ ID NO: 41815 - DNA, 80 bp, synthetic construct
  source 1..80: mol_type = other DNA
ctttattcattgaaacaaatatactgatagcacctgttctgtgccaggtgtcatattgttacggtagtgaataaagtagc

SEQ ID NO: 41816 - DNA, 80 bp, synthetic construct
  source 1..80: mol_type = other DNA
ttggtggcggccatgaaactccaggccttctgtgagcagcgccaccagctgtctccctcctcctcactcctctctcctct

SEQ ID NO: 41817 - DNA, 80 bp, synthetic construct; identical to SEQ ID NO: 14327
  source 1..80: mol_type = other DNA

SEQ ID NO: 41818 - DNA, 80 bp, synthetic construct
  source 1..80: mol_type = other DNA
cagcggagacttccaggagaaagcctgggtggggcagggacacccaggaaccaagggaagaggggtgaggggaacagtgt

SEQ ID NO: 41819 - DNA, 80 bp, synthetic construct
  source 1..80: mol_type = other DNA
gacgaagggctacagggggtgggggcgacgatttcagtctttgaacatcttataacaaagttttccaccactagatggac

SEQ ID NO: 41820 - DNA, 80 bp, synthetic construct
  source 1..80: mol_type = other DNA
cgtgcacccctgccactgggccgccccatgccggccctcaggcccttccctgggaaccaggactagtggctggctttgtg

SEQ ID NO: 41821 - DNA, 80 bp, synthetic construct; identical to SEQ ID NO: 14328
  source 1..80: mol_type = other DNA

SEQ ID NO: 41822 - DNA, 80 bp, synthetic construct
  source 1..80: mol_type = other DNA
cccggagtttaggaagcagcagtcctgggagttgattaaaagtcgcaatgcttctgctcaggaagacctgagatctgcgc

SEQ ID NO: 41823 - DNA, 80 bp, synthetic construct
  source 1..80: mol_type = other DNA
cccacagctgttggcccgccatgcagctggggcctcagagaaagccacatggtcatcgcagccagggctagggtgggggg

SEQ ID NO: 41824 - DNA, 80 bp, synthetic construct
  source 1..80: mol_type = other DNA
gtcagggccaggcaatcagagaagcaggtcttgagagatctcagcagggatatgggacgtactaagaggatgacgaggcg

SEQ ID NO: 41825 - DNA, 80 bp, synthetic construct; identical to SEQ ID NO: 14329
  source 1..80: mol_type = other DNA

SEQ ID NO: 41826 - DNA, 80 bp, synthetic construct
  source 1..80: mol_type = other DNA
gctccagccctgcctgcctaagagggtccctccacaatcagtgaggaagccagtctctggcccccaggtctgtcccccat

SEQ ID NO: 41827 - DNA, 80 bp, synthetic construct
  source 1..80: mol_type = other DNA
cagctccctcttgcctttcagccgtcttggtctcacttgtccttccagcccatctgtacccctcctccaggaagcccgct

SEQ ID NO: 41828 - DNA, 80 bp, synthetic construct; identical to SEQ ID NO: 14330
  source 1..80: mol_type = other DNA

SEQ ID NO: 41829 - DNA, 80 bp, synthetic construct
  source 1..80: mol_type = other DNA
agaaggagacttgcctctgagggactgcttagaacagtgcagcacctgggcccagcccaacccagtgccttgagcctttg

SEQ ID NO: 41830 - DNA, 80 bp, synthetic construct
  source 1..80: mol_type = other DNA
cttcgattcctttgtttggggggcagccccctccagaccctgagccccaagaggccagtctggctgctcactctccccgg

SEQ ID NO: 41831 - DNA, 80 bp, synthetic construct
  source 1..80: mol_type = other DNA
agacaccaactgcgtacagctgcagcgctcagtaaggcagaggagaagagagaatcacgaggctggggcactgggagtgc

SEQ ID NO: 41832 - DNA, 80 bp, synthetic construct
  source 1..80: mol_type = other DNA
gttctgatgaagacactctcctacctcaaccatccctggctccttctacctccagatgaaaatcccgccacctgacctgg

SEQ ID NO: 41833 - DNA, 80 bp, synthetic construct; identical to SEQ ID NO: 14331
  source 1..80: mol_type = other DNA

SEQ ID NO: 41834 - DNA, 80 bp, synthetic construct
  source 1..80: mol_type = other DNA
cacccaggaggtacaactctgcaaattagctgagtatgtgcacgagacagagctattgatgcagtccttgccttttgttg

SEQ ID NO: 41835 - DNA, 80 bp, synthetic construct
  source 1..80: mol_type = other DNA
gcatctagccaggctgtgagtgtgtgagcacagatgcacgccaagactcagaggcagccctgaagcaagacctttgcagg

SEQ ID NO: 41836 - DNA, 80 bp, synthetic construct; identical to SEQ ID NO: 14332
  source 1..80: mol_type = other DNA

SEQ ID NO: 41837 - DNA, 80 bp, synthetic construct
  source 1..80: mol_type = other DNA
gctgcagatgaacttcacgccaggcagtgcagaagaggcgtgggccagggagcccacattggctgtccagagacttgggc

SEQ ID NO: 41838 - DNA, 80 bp, synthetic construct
  source 1..80: mol_type = other DNA
aactgaatggggaatgctttcaagagcattgacggccactacattcagttcatcttgaccagcatgcatgcatcgagcac

SEQ ID NO: 41839 - DNA, 80 bp, synthetic construct
  source 1..80: mol_type = other DNA
gcaagattccagctgaggtagaattgtccttgaaagtcccctacatggtctataaatcatgagctctcagctggatcaga

SEQ ID NO: 41840 - DNA, 80 bp, synthetic construct
  source 1..80: mol_type = other DNA
ggggactgggccggggactatggaggccgtgggagcagcagtgtgctgcaggcgaatgactgcatctccagagagctcat

SEQ ID NO: 41841 - DNA, 80 bp, synthetic construct; identical to SEQ ID NO: 14333
  source 1..80: mol_type = other DNA

SEQ ID NO: 41842 - DNA, 80 bp, synthetic construct
  source 1..80: mol_type = other DNA
tggctcatgcctataatcccagcacttgggaaggctgaggcagtcgggttaggagttcgagaccagcctgaccaacgtgg

SEQ ID NO: 41843 - DNA, 80 bp, synthetic construct
  source 1..80: mol_type = other DNA
ggagcgagactgcatctcaaaaaataaaaagtgaaagtcactgaatgctgcaaactcaatctgcagatgagcttgagcag

SEQ ID NO: 41844 - DNA, 80 bp, synthetic construct; identical to SEQ ID NO: 14334
  source 1..80: mol_type = other DNA

SEQ ID NO: 41845 - DNA, 80 bp, synthetic construct
  source 1..80: mol_type = other DNA
cacatagtgttgagtgcatgaacatcacggttgtgccattgggctgatgtccgaaattggagaggatgtgggcatccaga

SEQ ID NO: 41846 - DNA, 80 bp, synthetic construct
  source 1..80: mol_type = other DNA
tggcacacaaaacagttggttgtttccagtctgaagaggagcaggggtgtcagcaaaaccccttaaatagaagtagaaat

SEQ ID NO: 41847 - DNA, 80 bp, synthetic construct
  source 1..80: mol_type = other DNA
ctttgcctgggactgtcctgcttttagcactgaaagtcctgtgtcctggggagacagggacagttggtcaccctgggagt

SEQ ID NO: 41848 - DNA, 80 bp, synthetic construct; identical to SEQ ID NO: 14335
  source 1..80: mol_type = other DNA

SEQ ID NO: 41849 - DNA, 80 bp, synthetic construct
  source 1..80: mol_type = other DNA
gccagccccccaccgtcgtccctgccagccccccacagtcatccatgccagccccccacagtcatcccatccccacacca

SEQ ID NO: 41850 - DNA, 80 bp, synthetic construct
  source 1..80: mol_type = other DNA
aggaaataatagccatgaaagaggggtttgggtgtgccaggtaactttctgttccattacagatttttaaaatacgctca

SEQ ID NO: 41851 - DNA, 80 bp, synthetic construct
  source 1..80: mol_type = other DNA
taaatgtggaacatggaccctgcgttttcattctgcgctgagcatgtgaatgatgtggtcttgcttccagctaaaagtcc

SEQ ID NO: 41852 - DNA, 80 bp, synthetic construct
  source 1..80: mol_type = other DNA
agaccagagcagactggaggggagagtcccagaaagtgccgagccctgagaccattgctagaaccttcctggcatggcgg

SEQ ID NO: 41853 - DNA, 80 bp, synthetic construct; identical to SEQ ID NO: 14336
  source 1..80: mol_type = other DNA

SEQ ID NO: 41854 - DNA, 80 bp, synthetic construct
  source 1..80: mol_type = other DNA
aggaaacaggacataggcctcaggggatatgagacttccccaaagttcctaagccccacagctgggactctagcccacgt

SEQ ID NO: 41855 - DNA, 80 bp, synthetic construct
  source 1..80: mol_type = other DNA
catctgaggtggacaggaagcccagccaagccactggggccgacccctcccctggactcacctgcatctgagccacacac

SEQ ID NO: 41856 - DNA, 80 bp, synthetic construct; identical to SEQ ID NO: 14337
  source 1..80: mol_type = other DNA

SEQ ID NO: 41857 - DNA, 80 bp, synthetic construct
  source 1..80: mol_type = other DNA
ggcggcaggaggctgagcgcatggtttctgttttctccatgaaggcagcacacaaaagctgtcagtggccaagtagggag

SEQ ID NO: 41858 - DNA, 80 bp, synthetic construct
  source 1..80: mol_type = other DNA
cacggcccctccagatgatagaaacagaatgctttaaggagctgaacgtgtttggacctaatggtaccctcccgccagat

SEQ ID NO: 41859 - DNA, 80 bp, synthetic construct
  source 1..80: mol_type = other DNA
gaaggcttggaagtctggggcagtagcagcttggaagggcaactgattatgtccaaggcccctgatacccacggcagctg

SEQ ID NO: 41860 - DNA, 80 bp, synthetic construct; identical to SEQ ID NO: 14338
  source 1..80: mol_type = other DNA

SEQ ID NO: 41861 - DNA, 80 bp, synthetic construct
  source 1..80: mol_type = other DNA
ggcagccagaggagacagggcccttgggaaatgacacttagagcctggccctgggtaagggttggtgtgggccaatggag

SEQ ID NO: 41862 - DNA, 80 bp, synthetic construct
  source 1..80: mol_type = other DNA
gagccagctccaggatggacacactcagccagtgataatataaaaatacaacgcttcaatgcttccatcaagtaaaacgg

SEQ ID NO: 41863 - DNA, 80 bp, synthetic construct
  source 1..80: mol_type = other DNA
gacttcttggttatgtggcaacttacggaacctctcccacctcagtttgcctgcctgaaacatcaggatagaaatgccca

SEQ ID NO: 41864 - DNA, 80 bp, synthetic construct
  source 1..80: mol_type = other DNA
aggccggccctcgctagagccctttgcatatgaggccccattgtatcctcccagccaccctgtgcggaagctgctcttct

SEQ ID NO: 41865 - DNA, 80 bp, synthetic construct; identical to SEQ ID NO: 14339
  source 1..80: mol_type = other DNA

SEQ ID NO: 41866 - DNA, 80 bp, synthetic construct
  source 1..80: mol_type = other DNA
tcagaacaattccaagagttcgcccagctccaagaccagttttaaccaccacataaactcaaaccatgtcagctcgaact

SEQ ID NO: 41867 - DNA, 80 bp, synthetic construct
  source 1..80: mol_type = other DNA
agaacctcgaggtttctcaaagaaatttccactcaggtctgttttccgaggcggccccggccggggtggattggatttgt

SEQ ID NO: 41868 - DNA, 80 bp, synthetic construct; identical to SEQ ID NO: 14340
  source 1..80: mol_type = other DNA

SEQ ID NO: 41869 - DNA, 80 bp, synthetic construct
  source 1..80: mol_type = other DNA
ccttctgtcggcttggaacaatctgaattaaatgttccagacacacgtgggacttccccctcccagccagaatgtcctct

SEQ ID NO: 41870 - DNA, 80 bp, synthetic construct
  source 1..80: mol_type = other DNA
caggtcctgactgctaaagccagtcatttgcaagaggtttgcattgggggatttttgctctatttttaacagaagcatag

SEQ ID NO: 41871 - DNA, 80 bp, synthetic construct
  source 1..80: mol_type = other DNA
cagggttttgagaccttcacagccccatcaatgtgctggcccatgtggcatggatggggtagtctctctgggcaaatgag

SEQ ID NO: 41872 - DNA, 80 bp, synthetic construct
  source 1..80: mol_type = other DNA
cagcccccagacccttgtagcagggctgtccatccccagggagcagctggccacctcctcctgcctcgaagaagtgacca

SEQ ID NO: 41873 - DNA, 80 bp, synthetic construct; identical to SEQ ID NO: 14341
  source 1..80: mol_type = other DNA

SEQ ID NO: 41874 - DNA, 80 bp, synthetic construct
  source 1..80: mol_type = other DNA
aaagggtcctggcctttgggactgatcattttgaggcccttttacaaagaaatgggggagaagaaatagctgggcttccc

SEQ ID NO: 41875 - DNA, 80 bp, synthetic construct
  source 1..80: mol_type = other DNA
aggaagtagaaaactctttgaatggtatcttaagatccttaagctcttgctgaacttcctttttcaatgaaaagaaggac

SEQ ID NO: 41876 - DNA, 80 bp, synthetic construct; identical to SEQ ID NO: 14342
  source 1..80: mol_type = other DNA

SEQ ID NO: 41877 - DNA, 80 bp, synthetic construct
  source 1..80: mol_type = other DNA
cctcctgttccttctggctcatgcattgctttgtggtaagagaaaggaagtctttagaacagcgcctgggaatcagccct

SEQ ID NO: 41878 - DNA, 80 bp, synthetic construct
  source 1..80: mol_type = other DNA
caaactcctgagtccaagctatcctcctgcctcagcctccgaggtagctgggaccataggcgtgcaccaccatactcagc

SEQ ID NO: 41879 - DNA, 80 bp, synthetic construct
  source 1..80: mol_type = other DNA
aaagatattttaaaattaaaagcaaacaacactgtccacccatctacctgtccaggataaggcatatttggacggtgaac

SEQ ID NO: 41880 - DNA, 80 bp, synthetic construct; identical to SEQ ID NO: 14343
  source 1..80: mol_type = other DNA

SEQ ID NO: 41881 - DNA, 80 bp, synthetic construct
  source 1..80: mol_type = other DNA
ttctcgcctcttccttggccgggaacccggggctctagggctgctcgctgctgctgtggcctgcgcagccacgggaggct

SEQ ID NO: 41882 - DNA, 80 bp, synthetic construct
  source 1..80: mol_type = other DNA
aagtaggatcagagcccaggtgagcccctgaggataccgaggccttccctccctgaggcccgcaagtctccatgcgtctc

SEQ ID NO: 41883 - DNA, 80 bp, synthetic construct
  source 1..80: mol_type = other DNA
caggccttgccaaaggggacggtggcttcctggataattggaaatctctgagaagaagaggaaacacctgagtgacactc

SEQ ID NO: 41884 - DNA, 80 bp, synthetic construct; identical to SEQ ID NO: 14344
  source 1..80: mol_type = other DNA

SEQ ID NO: 41885 - DNA, 80 bp, synthetic construct
  source 1..80: mol_type = other DNA
agtggaatttagatgtctttccctagtccatcaagaagtcatttttgtaacagtccctaagcgagtgttctcaattagaa

SEQ ID NO: 41886 - DNA, 80 bp, synthetic construct
  source 1..80: mol_type = other DNA
ctgtgtgttccgtctatcgcgtcacagtgccgctggatctagatggagccactgttgttgtttttaaaagagaaataaat

SEQ ID NO: 41887 - DNA, 80 bp, synthetic construct; identical to SEQ ID NO: 14345
  source 1..80: mol_type = other DNA

SEQ ID NO: 41888 - DNA, 80 bp, synthetic construct
  source 1..80: mol_type = other DNA
cccacgccatccgcctgctcctggaatacacagactcaagctatgaggaaaagaagtacacgatgggggacggtaatggc

SEQ ID NO: 41889 - DNA, 80 bp, synthetic construct
  source 1..80: mol_type = other DNA
ggcagaatgctggggtgggatgctgggccccctgtctaattgggacgggtgtccctcagggcttgcctaaaccctggaag

SEQ ID NO: 41890 - DNA, 80 bp, synthetic construct
  source 1..80: mol_type = other DNA
ctggggaggtttgttttcacttcttcttccccaccacagctcctgattatgacagaagccagtggctgaatgaaaaattc

SEQ ID NO: 41891 - DNA, 80 bp, synthetic construct; identical to SEQ ID NO: 14346
  source 1..80: mol_type = other DNA

SEQ ID NO: 41892 - DNA, 80 bp, synthetic construct
  source 1..80: mol_type = other DNA
ccatcttgtgctacattgcccgcaagcacaacctgtgtgagtgtgggtggctgcaatgtgtggggggaaggtggcctcct

SEQ ID NO: 41893 - DNA, 80 bp, synthetic construct
  source 1..80: mol_type = other DNA
aatccagaatttgtgagtgtccccagtgagctgcatctgacagagtttggatttggggccaggactcttgcattcctgca

SEQ ID NO: 41894 - DNA, 80 bp, synthetic construct
  source 1..80: mol_type = other DNA
attcagttcctgtatggtaaagtttgtgttcagaatctccttcatcagctctggcctctgacttctgtcctgggtcattt

SEQ ID NO: 41895 - DNA, 80 bp, synthetic construct
  source 1..80: mol_type = other DNA
cctttattcctctccctccttcctttcaacttgaacttctcatctccctggaaactagtcaatgttcattgttttcttct

SEQ ID NO: 41896 - DNA, 80 bp, synthetic construct; identical to SEQ ID NO: 14347
  source 1..80: mol_type = other DNA

SEQ ID NO: 41897 - DNA, 80 bp, synthetic construct
  source 1..80: mol_type = other DNA
gctgttttctgcctcaggagaaactgaagccaaagtacttggaggaactccctgaaaagctaaagctctactcagagttt

SEQ ID NO: 41898 - DNA, 80 bp, synthetic construct
  source 1..80: mol_type = other DNA
atattcttggccttctgcagatcacttttgtagattttctcgtctatgatgtccttgacctccaccgtatatttgagccc

SEQ ID NO: 41899 - DNA, 80 bp, synthetic construct; identical to SEQ ID NO: 14348
  source 1..80: mol_type = other DNA

SEQ ID NO: 41900 - DNA, 80 bp, synthetic construct
  source 1..80: mol_type = other DNA
ccatttgtgacagaagaaaaagccttaggcttcacctagcctgggtttcacagcccaggacactttggaagaggcagaga

SEQ ID NO: 41901 - DNA, 80 bp, synthetic construct
  source 1..80: mol_type = other DNA
tgtggctgtagctggattaaggtacatatgtgggtgtccctgttgaaggagtatatgttgaaatgcccggtgctggggca

SEQ ID NO: 41902 - DNA, 80 bp, synthetic construct
  source 1..80: mol_type = other DNA
gcacgattagttgggattacaggtgtgcaccaccacgtctggctaatttttgtatttttagtagagatggggttttgcca

SEQ ID NO: 41903 - DNA, 80 bp, synthetic construct; identical to SEQ ID NO: 14349
  source 1..80: mol_type = other DNA

SEQ ID NO: 41904 - DNA, 80 bp, synthetic construct
  source 1..80: mol_type = other DNA
ttgctgatcttgtttcagagcacaaatcctactttagtacagatctgggaatttgaggcattagtccaacgggcttctga

SEQ ID NO: 41905 - DNA, 80 bp, synthetic construct
  source 1..80: mol_type = other DNA
gagctgaggtctatggcctatgacatgccagggtcaatcagtttgagaacaggcagtcctggatcttttttttttttttt

SEQ ID NO: 41906 - DNA, 80 bp, synthetic construct
  source 1..80: mol_type = other DNA
cggatgtttttgaataccttatctgggcattcaatcctggtaagattgtgcacagcacatctgagtatcatgtagcctga

SEQ ID NO: 41907 - DNA, 80 bp, synthetic construct; identical to SEQ ID NO: 14350
  source 1..80: mol_type = other DNA

SEQ ID NO: 41908 - DNA, 80 bp, synthetic construct
  source 1..80: mol_type = other DNA
ctacactgcagttctattccccttactaggtatttaaatgtaaggaagttgctgaacttctgtttcccacatgagaaatg

SEQ ID NO: 41909 - DNA, 80 bp, synthetic construct
  source 1..80: mol_type = other DNA
attacttaaaggaagttggaagagttaactccgcaaatctggggaccctaagaagctgtgtgatgcctcagcacttgagc

SEQ ID NO: 41910 - DNA, 80 bp, synthetic construct
  source 1..80: mol_type = other DNA
cttcctcccaagacctgtgttctcaaagatggctgtctggggcaacaagtagggccttgaaggccaggaggtgggagtga

SEQ ID NO: 41911 - DNA, 80 bp, synthetic construct
  source 1..80: mol_type = other DNA
tttgaagcctcagctacccactatccttcgtgaacatcccctcccatcattacccttccctgcactaaagccagcctgac

SEQ ID NO: 41912 - DNA, 80 bp, synthetic construct; identical to SEQ ID NO: 14351
  source 1..80: mol_type = other DNA

SEQ ID NO: 41913 - DNA, 80 bp, synthetic construct
  source 1..80: mol_type = other DNA
cttggcctggatgtcccattcattcatccagccgtattgagtactttccataattgcacagagcttgtgtctcattgaat

SEQ ID NO: 41914 - DNA, 80 bp, synthetic construct
  source 1..80: mol_type = other DNA
tcatcaggacgttctctctgggtttacttcctctctttcctgggtacctgtgagagaaatgtctttagtccttgcataac

SEQ ID NO: 41915 - DNA, 80 bp, synthetic construct
  source 1..80: mol_type = other DNA
accatggcagaaggcgaatgaggaccaaagtaatgtcttacatggcagcagggaagagggcgtgtgcaggggaactccca

SEQ ID NO: 41916 - DNA, 80 bp, synthetic construct; identical to SEQ ID NO: 14352
  source 1..80: mol_type = other DNA

SEQ ID NO: 41917 - DNA, 80 bp, synthetic construct
  source 1..80: mol_type = other DNA
ttcccaggttcaaacgattctccttcctcagcctcccaagtaggtggaactataggcgcacaccactgtgcccagctaat

SEQ ID NO: 41918 - DNA, 80 bp, synthetic construct
  source 1..80: mol_type = other DNA
cttaagctttttctgtttatcattctgaggtctataattccaaaggccgtgtggggatctacaggttgatctcttcctga

SEQ ID NO: 41919 - DNA, 80 bp, synthetic construct
  source 1..80: mol_type = other DNA
tgataccagaaatagttgttgagtctgtgggtcaggtattcacgcaaggctcagcagggagtacttgttacaaatcaaca

SEQ ID NO: 41920 - DNA, 80 bp, synthetic construct; identical to SEQ ID NO: 14353
  source 1..80: mol_type = other DNA

SEQ ID NO: 41921 - DNA, 80 bp, synthetic construct
  source 1..80: mol_type = other DNA
aaaagcagctttattttaaatagccaataactgaaaacaatccaaattccatgaatagaagaatgaacaaatgaactgtg

SEQ ID NO: 41922 - DNA, 80 bp, synthetic construct
  source 1..80: mol_type = other DNA
cattccacttacacgaaaatcaggggagggaaatgagtccatggtatcagaggtcagatgattggtgaccttggtgagaa

SEQ ID NO: 41923 - DNA, 80 bp, synthetic construct; identical to SEQ ID NO: 14354
  source 1..80: mol_type = other DNA

SEQ ID NO: 41924 - DNA, 80 bp, synthetic construct
  source 1..80: mol_type = other DNA
tttattcatgcctacttctttggataggtgagactggtgtgcatgtatactcttagattgtaccattttttctctttaac

SEQ ID NO: 41925 - DNA, 80 bp, synthetic construct
  source 1..80: mol_type = other DNA
acacctggctaatttttgtatttttggtagagatgaagttttgccatgatggccaggctggtctcgaactccgggcctca

SEQ ID NO: 41926 - DNA, 80 bp, synthetic construct
  source 1..80: mol_type = other DNA
ggtcaggagagcgagaccatcctggctaacatggtgaaaccacttccctagtaaaaatacaaaaattagccgggtgtggt

SEQ ID NO: 41927 - DNA, 80 bp, synthetic construct
  source 1..80: mol_type = other DNA
tggcagtctatatgcatgcctacttctaatattgatggctatctcacattagttcctgtggattaactatagtttgccta

SEQ ID NO: 41928 - DNA, 80 bp, synthetic construct; identical to SEQ ID NO: 14355
  source 1..80: mol_type = other DNA

SEQ ID NO: 41929 - DNA, 80 bp, synthetic construct
  source 1..80: mol_type = other DNA
tcaggagtttgagaccagcctagccaatgtggtgaaaccctgtctctactaaaaatacaaaaattagccaggcgtggtgg

SEQ ID NO: 41930 - DNA, 80 bp, synthetic construct
  source 1..80: mol_type = other DNA
caacaacaacaaaaagaatacccttaaattttctaccttcaccttttttgtttataggttgtgcatgtttctgccaatga

SEQ ID NO: 41931 - DNA, 80 bp, synthetic construct; identical to SEQ ID NO: 14356
  source 1..80: mol_type = other DNA

SEQ ID NO: 41932 - DNA, 80 bp, synthetic construct
  source 1..80: mol_type = other DNA
ccaacaaactgtcaaggtctagagagaagaaaaaacagaggaagggtgaatttgacctctctgactgggacatccatctc

SEQ ID NO: 41933 - DNA, 80 bp, synthetic construct
  source 1..80: mol_type = other DNA
agccagctgatcgtgggacttcactccaaaattatgtgagccagttcccacaagagatacataaatttgtaaataaacac

SEQ ID NO: 41934 - DNA, 80 bp, synthetic construct
  source 1..80: mol_type = other DNA
tctattacctgggtttttttctatatggaaagcactgtctgagatgcctcacagtaaactccaaggagattttgagggaa

SEQ ID NO: 41935 - DNA, 80 bp, synthetic construct
  source 1..80: mol_type = other DNA
tgttttaaagtctccagagatgaaaacatctgcttgcacattttgctaattcattttgggtgagggtctctggcaggctt

SEQ ID NO: 41936 - DNA, 80 bp, synthetic construct; identical to SEQ ID NO: 14357
  source 1..80: mol_type = other DNA

SEQ ID NO: 41937 - DNA, 80 bp, synthetic construct
  source 1..80: mol_type = other DNA
tgtaccctggaagaccaggctgcccagcctgtccacctagtagaccgtttgcctgcccaattctccttctctgattcctg

SEQ ID NO: 41938 - DNA, 80 bp, synthetic construct
  source 1..80: mol_type = other DNA
gaccctgtcctggatcacagactagggtttcttaaggtcggccgtacagagatttggagggcagaattctttgttgtggg

SEQ ID NO: 41939 - DNA, 80 bp, synthetic construct; identical to SEQ ID NO: 14358
  source 1..80: mol_type = other DNA

SEQ ID NO: 41940 - DNA, 80 bp, synthetic construct
  source 1..80: mol_type = other DNA
gtttgagaaattgtagaaagattagaaacgactctgattaccctagatactaatgtttccacatgggctttctgcccccc

SEQ ID NO: 41941 - DNA, 80 bp, synthetic construct
  source 1..80: mol_type = other DNA
gtgacagtgatttataatcatccttgcctgtgttgtccttcccatgttaggtcatgtctgtagtttatgacaatctgtgt

SEQ ID NO: 41942 - DNA, 80 bp, synthetic construct
  source 1..80: mol_type = other DNA
ttccacttggtggtaacatcaattaacatagagtttagaaaaatgtttccccaatttaaaaaatcacttgtactacatct

SEQ ID NO: 41943 - DNA, 80 bp, synthetic construct
  source 1..80: mol_type = other DNA
cggctcactgcaagctccacctccctggttcatgccattctccggcctcagcctcccaagtagctgggactacaggtgtc

SEQ ID NO: 41944 - DNA, 80 bp, synthetic construct; identical to SEQ ID NO: 14359
  source 1..80: mol_type = other DNA

SEQ ID NO: 41945 - DNA, 80 bp, synthetic construct
  source 1..80: mol_type = other DNA
gaaaagattctttatatttcagatttcctaagtttacccaaacaatatttaagagactttaatacatttccatgaattag

SEQ ID NO: 41946 - DNA, 80 bp, synthetic construct
  source 1..80: mol_type = other DNA
aggtcccattacaggcccttggtaaagtgggacccagtgcattttgactgtctggcacagcattgttttaaaaattagaa

SEQ ID NO: 41947 - DNA, 80 bp, synthetic construct
  source 1..80: mol_type = other DNA
ccacagacccactttccccgctggtgtgatccttgtggccactatggcagctactttggagagccgctagtccagtcctt

SEQ ID NO: 41948 - DNA, 80 bp, synthetic construct; identical to SEQ ID NO: 14360
  source 1..80: mol_type = other DNA

SEQ ID NO: 41949 - DNA, 80 bp, synthetic construct
  source 1..80: mol_type = other DNA
attaagaataagtcgtaacttctcttagaagcaaaatttattcaaagaccggtgctgatattctgaaatatctgctagct

SEQ ID NO: 41950 - DNA, 80 bp, synthetic construct
  source 1..80: mol_type = other DNA
ccacaagtgagttcccccttcctttgttctcctctgcctctgcctcttttaaaaagttctaagttgctagccaatcagga

SEQ ID NO: 41951 - DNA, 80 bp, synthetic construct; identical to SEQ ID NO: 14361
  source 1..80: mol_type = other DNA

SEQ ID NO: 41952 - DNA, 80 bp, synthetic construct
  source 1..80: mol_type = other DNA
tgtacaaattgattgtaaaacatgtgtgtttgaacaatatgaaatcagtgcaccttgaaaaagaacagaataacagcgat

SEQ ID NO: 41953 - DNA, 80 bp, synthetic construct
  source 1..80: mol_type = other DNA
atattaatactctgggaaaggaaagcattcctggggggaggtctataaatggtcgctttgggaatgaatgtctgtcctat

SEQ ID NO: 41954 - DNA, 80 bp, synthetic construct
  source 1..80: mol_type = other DNA
gacaatacatgcaccgctgaacatagacccttatcaggagttctattttgcccttgtcctgtttcctcagaagcatgtga

SEQ ID NO: 41955 - DNA, 80 bp, synthetic construct
  source 1..80: mol_type = other DNA
tccagcagcccagctgtaaaattcctctctttgtactctttctctttatttctcagccagccgacacttatggaaagtag

SEQ ID NO: 41956 - DNA, 80 bp, synthetic construct; identical to SEQ ID NO: 14362
  source 1..80: mol_type = other DNA

SEQ ID NO: 41957 - DNA, 80 bp, synthetic construct
  source 1..80: mol_type = other DNA
aaaattccaggaactgatcccatcaggaaattatgttcccttcactgtttggggtgattgggccttggtatgtgccatcc

SEQ ID NO: 41958 - DNA, 80 bp, synthetic construct
  source 1..80: mol_type = other DNA
aatatctaactccggtgactttggcttaatgtcacccccgatggtcttatttcttttcatgaagacctgatacttgtagc

SEQ ID NO: 41959 - DNA, 80 bp, synthetic construct
  source 1..80: mol_type = other DNA
tcctgtcatttcggtccctcaaccagtcactttgccattcactcaacctgcttctctgtacccttcttcacacatggacg

SEQ ID NO: 41960 - DNA, 80 bp, synthetic construct; identical to SEQ ID NO: 14363
  source 1..80: mol_type = other DNA

SEQ ID NO: 41961 - DNA, 80 bp, synthetic construct
  source 1..80: mol_type = other DNA
tggcattacagactctttgtactgaggtcattttgcttccttcagaatgggaccttttggcgaaagctgttctaactcca

SEQ ID NO: 41962 - DNA, 80 bp, synthetic construct
  source 1..80: mol_type = other DNA
cccaattagactttgacgctctcaccacggaacaagtaacaaagttgtgtatgagagtttgggataaactaggtgcccca

SEQ ID NO: 41963 - DNA, 80 bp, synthetic construct
  source 1..80: mol_type = other DNA
gtgtaaagtggtcatgcgttctgtctaatgacaaaatttacctgatcacgaggtgtgcctgcatatattaaagcttgtga

SEQ ID NO: 41964 - DNA, 80 bp, synthetic construct; identical to SEQ ID NO: 14364
  source 1..80: mol_type = other DNA

SEQ ID NO: 41965 - DNA, 80 bp, synthetic construct
  source 1..80: mol_type = other DNA
caagcaaatttacctacagccaacccagatgggtcccagtcgcttcttctgtctcagtacaatgcttgtctacctccaca

SEQ ID NO: 41966 - DNA, 80 bp, synthetic construct
  source 1..80: mol_type = other DNA
ttcatactggtctcattaattctgattcctctgatgagattaaaataatcgtgtctgccaaggttcctgtttccattccg

SEQ ID NO: 41967 - DNA, 80 bp, synthetic construct; identical to SEQ ID NO: 14365
  source 1..80: mol_type = other DNA

SEQ ID NO: 41968 - DNA, 80 bp, synthetic construct
  source 1..80: mol_type = other DNA
taatggaaaacgtggggactgttcctggactcagtctcggtccaaaacatgaaggaattactaaattcctttatggttta

SEQ ID NO: 41969 - DNA, 80 bp, synthetic construct
  source 1..80: mol_type = other DNA
aatgaaagcaagccagtgttatggaaaaactcccagacaaatacctgggaacctggaacaattataatgtggggaagagg

SEQ ID NO: 41970 - DNA, 80 bp, synthetic construct
  source 1..80: mol_type = other DNA
ctcctcaaaaactggcacaccaaatcaaaatggatctcattcaatcctccctaatggcaacagagacccctctaactaat

SEQ ID NO: 41971 - DNA, 80 bp, synthetic construct
  source 1..80: mol_type = other DNA
ctgtctcaccagtttcccctcacactgatttgcctgctacacaaaattattcttattgggcttatgtgccttttcctcca

SEQ ID NO: 41972 - DNA, 80 bp, synthetic construct; identical to SEQ ID NO: 14366
  source 1..80: mol_type = other DNA

SEQ ID NO: 41973 - DNA, 80 bp, synthetic construct
  source 1..80: mol_type = other DNA
actcacatgcagtagtattaaaaaatgactcatatgctttagtaatagactgggcaccaaagggctatttaaaaaacact

SEQ ID NO: 41974 - DNA, 80 bp, synthetic construct
  source 1..80: mol_type = other DNA
ttggctattgtcatgtctggactgccagtatctgtgattctgaaccccatgataaatcccctttgaacctttttcctctt

SEQ ID NO: 41975 - DNA, 80 bp, synthetic construct
  source 1..80: mol_type = other DNA
agaacatcgggcattgccaccgccgctcctctccctcagtatcaacatagattcaagcattctgctttgtttacctccaa

SEQ ID NO: 41976 - DNA, 80 bp, synthetic construct; identical to SEQ ID NO: 14367
  source 1..80: mol_type = other DNA

SEQ ID NO: 41977 - DNA, 80 bp, synthetic construct
  source 1..80: mol_type = other DNA
actttttacatttcttacgcctgtcttactttaatctcttaatcctgttatcttcataagctgaggatatatgtcacctc

SEQ ID NO: 41978 - DNA, 80 bp, synthetic construct
  source 1..80: mol_type = other DNA
gactgcgtgcagggtcaggcaaaatagagccatatttttcttcttgcagggagcctataaatggacatggaagtagggaa

SEQ ID NO: 41979 - DNA, 80 bp, synthetic construct
  source 1..80: mol_type = other DNA
gccgtgactcagcactggggcggagcggggcgggaccacccttataaggctcggaggccgcgaggccttcgctggagttt

SEQ ID NO: 41980 - DNA, 80 bp, synthetic construct
  source 1..80: mol_type = other DNA
agtgccgttagcggctttcagggggcccggagcgcctcggggagggatgggaccccgggggcggggagggggggcagact

SEQ ID NO: 41981 - DNA, 80 bp, synthetic construct
  source 1..80: mol_type = other DNA
acccccttatccctccgtcgtgtggcttttaccccgggcctccttcctgttccccgcctctcccgccatgcctgctcccc

SEQ ID NO: 41982 - DNA, 80 bp, synthetic construct; identical to SEQ ID NO: 14368
  source 1..80: mol_type = other DNA

SEQ ID NO: 41983 - DNA, 80 bp, synthetic construct
  source 1..80: mol_type = other DNA
ggtgagtcttgaacctccaagtccagggcaggcatgggcaagcctctgcccccggagcccttttgtttaaatcagctgcc

SEQ ID NO: 41984 - DNA, 80 bp, synthetic construct
  source 1..80: mol_type = other DNA
tcccaggctggggctcacagacagccccctggttggcccatccccagtgactgtgtgttgatcaggcgcccagtcacgcg

SEQ ID NO: 41985 - DNA, 80 bp, synthetic construct; identical to SEQ ID NO: 14369
  source 1..80: mol_type = other DNA

SEQ ID NO: 41986 - DNA, 80 bp, synthetic construct
  source 1..80: mol_type = other DNA
aggatttgtcgccagtttctggatggaggtgctggcacttttagctgaggaaaatatgcagacacagagcacatttgggg

SEQ ID NO: 41987 - DNA, 80 bp, synthetic construct
  source 1..80: mol_type = other DNA
cattgagaagtctgaacagggctgtgtctgaatgtgaggtctagaaggatcctccagagaagccagctctaaagcttttg

SEQ ID NO: 41988 - DNA, 80 bp, synthetic construct
  source 1..80: mol_type = other DNA
agagtaggatgatacatggtggtgtctggcaggaggcgggcaaggatgactatgtgaaggcactgcccgggcaactgaag

SEQ ID NO: 41989 - DNA, 80 bp, synthetic construct; identical to SEQ ID NO: 14370
  source 1..80: mol_type = other DNA

SEQ ID NO: 41990 - DNA, 80 bp, synthetic construct
  source 1..80: mol_type = other DNA
cagtgagggttggggggactctgagcgggaggcagagtttgccttcctttctccaggaccaataaaatttctaagagagc

SEQ ID NO: 41991 - DNA, 80 bp, synthetic construct
  source 1..80: mol_type = other DNA
gaagcaggaggtgaggaaaaggagcagaggaaagaatttgaaagcagcagaattcttaggtttaaagacattgttttatg

SEQ ID NO: 41992 - DNA, 80 bp, synthetic construct
  source 1..80: mol_type = other DNA
tcctaaaaacaggcagtgcatgagcactagtgaggggcattgtgactgccttgaacagttgcaactttgaggtgaataaa

SEQ ID NO: 41993 - DNA, 80 bp, synthetic construct; identical to SEQ ID NO: 14371
  source 1..80: mol_type = other DNA

SEQ ID NO: 41994 - DNA, 80 bp, synthetic construct
  source 1..80: mol_type = other DNA
acaacaaaaatctacacctccattcccagatcaagcttactctctggcaccaaactccatggggtgatttttcttctaga

SEQ ID NO: 41995 - DNA, 80 bp, synthetic construct
  source 1..80: mol_type = other DNA
cagagcgcttcgcacaggagcagaggggtcagggcgaagtcccagggccccaggcgtggctctcagagtctcaggccccg

SEQ ID NO: 41996 - DNA, 80 bp, synthetic construct
  source 1..80: mol_type = other DNA
tcagtgtcgtcgcggtcgctgttctaaagcccgcacgcacccaccgggactcagattctccccagacgccgaggatggcc

SEQ ID NO: 41997 - DNA, 80 bp, synthetic construct
  source 1..80: mol_type = other DNA
caggtctcagccactgctcgcccccaggctcccactccatgaggtatttcttcacatccgtgtcccggcccggccgcggg

SEQ ID NO: 41998 - DNA, 80 bp, synthetic construct
  source 1..80: mol_type = other DNA
agtggacctggggaccctgcgcggctactacaaccagagcgaggccggtgagtgaccccggccgggggcgcaggtcagga

SEQ ID NO: 41999 - DNA, 80 bp, synthetic construct
  source 1..80: mol_type = other DNA
ggctcgggggactgggctgaccgcggggtcggggccaggttctcacaccatccagataatgtatggctgcgacgtggggt

SEQ ID NO: 42000 - DNA, 80 bp, synthetic construct
  source 1..80: mol_type = other DNA
ggcacgtgcgtggagtggctccgcagatacctggagaacgggaaggagacgctgcagcgcacgggtaccaggggccacgg

SEQ ID NO: 42001 - DNA, 80 bp, synthetic construct; identical to SEQ ID NO: 14373
  source 1..80: mol_type = other DNA

SEQ ID NO: 42002 - DNA, 80 bp, synthetic construct
  source 1..80: mol_type = other DNA
gtcctgtccattctcaagatggccacatgcgtgctggtggagtgtcccatgacagatgcaaaatgcctgaattttctgac

SEQ ID NO: 42003 - DNA, 80 bp, synthetic construct
  source 1..80: mol_type = other DNA
gcaggggatggaaccttccagaagtgggcggctgtggtggtgccttctggagaggagcagagatacacctgccatgtgca

SEQ ID NO: 42004 - DNA, 80 bp, synthetic construct
  source 1..80: mol_type = other DNA
atccccatcgtgggcatcattgctggcctggttctccttggagctgtgatcactggagctgtggtcgctgccgtgatgtg

SEQ ID NO: 42005 - DNA, 80 bp, synthetic construct; identical to SEQ ID NO: 14374
  source 1..80: mol_type = other DNA

SEQ ID NO: 42006 - DNA, 80 bp, synthetic construct
  source 1..80: mol_type = other DNA
ctcctttctggtatctcacaggacattttcttctcacagatagaaaaggagggagttacactcaggctgcaagtaagtat

SEQ ID NO: 42007 - DNA, 80 bp, synthetic construct
  source 1..80: mol_type = other DNA
gtgtccctcacagcttgtaaaggtgagagcttggaggacctaatgtgtgttgggtgttgggcggaacagtggacacagct

SEQ ID NO: 42008 - DNA, 80 bp, synthetic construct
  source 1..80: mol_type = other DNA
ccttccctttgtgacttgaagaaccctgactttgtttctgcaaaggcacctgcatgtgtctgtgttcgtgtaggcataat

SEQ ID NO: 42009 - DNA, 80 bp, synthetic construct; identical to SEQ ID NO: 14375
  source 1..80: mol_type = other DNA

SEQ ID NO: 42010 - DNA, 80 bp, synthetic construct
  source 1..80: mol_type = other DNA
gaggttgatgagttaattaaaggagaagattcctaaaatttgagagacaaaataaatggaagacatgagaaccttccaga

SEQ ID NO: 42011 - DNA, 80 bp, synthetic construct
  source 1..80: mol_type = other DNA
ttctggaaggttctcaggtctttatttgctctctcaaattccaggaattgacttatttaattaatccatcaacctctcat

SEQ ID NO: 42012 - DNA, 80 bp, synthetic construct
  source 1..80: mol_type = other DNA
agttgcagctcagtgcacgtaaagttgagacagagatggagacatccagccccacctctctggaacaagaaagatgactg

SEQ ID NO: 42013 - DNA, 80 bp, synthetic construct
  source 1..80: mol_type = other DNA
gaagaaatcctgcatctcagtccctcacaagacagctgtctcaggctacagaaaacaacagtcatgaacaaattctggtt

SEQ ID NO: 42014 - DNA, 80 bp, synthetic construct
  source 1..80: mol_type = other DNA
atctcaccttttcaagctgtgagagacacatcagagccctgggcactgtcgctgcctggagtagaacaaaaacaggacct

SEQ ID NO: 42015 - DNA, 80 bp, synthetic construct; identical to SEQ ID NO: 14376
  source 1..80: mol_type = other DNA

SEQ ID NO: 42016 - DNA, 80 bp, synthetic construct
  source 1..80: mol_type = other DNA
ctggaatcaggaccccaacaccacaaccatcaaggtgatacatccatccttcattgtcacatgtgctgcacaaaagagta

SEQ ID NO: 42017 - DNA, 80 bp, synthetic construct
  source 1..80: mol_type = other DNA
ctcttcctcctacacatcacagcagcgaccacagctccgatgaccacaactgctaggacagccaggccagcaacaatgcc

SEQ ID NO: 42018 - DNA, 80 bp, synthetic construct
  source 1..80: mol_type = other DNA
cagcccctcatgctgtacatggcatgtgtatctctgctcttctccagaaggcaccaccacagctgcccacttctggaagg

SEQ ID NO: 42019 - DNA, 80 bp, synthetic construct
  source 1..80: mol_type = other DNA
tcacgtgtgtctttggggggtctgatgggaagagtcagaaaattcaggcgctttgcatctttcatgggacaccctaggac

SEQ ID NO: 42020 - DNA, 80 bp, synthetic construct; identical to SEQ ID NO: 14377
  source 1..80: mol_type = other DNA

SEQ ID NO: 42021 - DNA, 80 bp, synthetic construct
  source 1..80: mol_type = other DNA
caggaaaactcatgccattctccattcaacggagggcgacattctagcgctgatcccattttcctcctcttctcgtggga

SEQ ID NO: 42022 - DNA, 80 bp, synthetic construct
  source 1..80: mol_type = other DNA
cccacttgcgctgggtgatctgagccgccgtgtccgcggcggtccaggagcgcaggtcctcgttcagggcgatgtaatcc

SEQ ID NO: 42023 - DNA, 80 bp, synthetic construct
  source 1..80: mol_type = other DNA
tggcctcaactgaaaatgaaaccgggtaaacgcgcctggggctctcgccggtcgagggtctgggcgggtcccgcggcctc

SEQ ID NO: 42024 - DNA, 80 bp, synthetic construct; identical to SEQ ID NO: 14372
  source 1..80: mol_type = other DNA

SEQ ID NO: 42025 - DNA, 80 bp, synthetic construct
  source 1..80: mol_type = other DNA
ctcctcccggcgcggctcctcaggtcctgcgcccccgcctgcggtcccctcgctcctcccggcagaggccatttccctcc

SEQ ID NO: 42026 - DNA, 80 bp, synthetic construct
  source 1..80: mol_type = other DNA
ttggcttctctagatatccaatacccaatgggagtgggaagtggggacgcgtcacgagtatcctggaagaaggacccgac

SEQ ID NO: 42027 - DNA, 80 bp, synthetic construct; identical to SEQ ID NO: 14379
  source 1..80: mol_type = other DNA

SEQ ID NO: 42028 - DNA, 80 bp, synthetic construct
  source 1..80: mol_type = other DNA
tctctttaaacctggtgaagttttctctgaaggcaccgcatagggattctcatagagaccagtttcctttttgtttgtta

SEQ ID NO: 42029 - DNA, 80 bp, synthetic construct; identical to SEQ ID NO: 14394
  source 1..80: mol_type = other DNA

SEQ ID NO: 42030 - DNA, 80 bp, synthetic construct
  source 1..80: mol_type = other DNA
atcataaggagccaattagtttttaggaagtccaacaaaatgtattaaataccgaatgcaaagaaccctctgccaggctc

SEQ ID NO: 42031 - DNA, 80 bp, synthetic construct; identical to SEQ ID NO: 14380
  source 1..80: mol_type = other DNA

SEQ ID NO: 42032 - DNA, 80 bp, synthetic construct
  source 1..80: mol_type = other DNA
agaatggaaacccgattccttgacttttcacagtgaagttcaggttatattaagctgcatccagcaaaataaaggacact

SEQ ID NO: 42033 - DNA, 80 bp, synthetic construct
  source 1..80: mol_type = other DNA
tgtgtatgtgcatcatttctgttgttaattgttcctttctgtatatctgggtcaccatctagtatcattttccttcaccc

SEQ ID NO: 42034 - DNA, 80 bp, synthetic construct
  source 1..80: mol_type = other DNA
aattcaccagttttagctgcgcttttttggcgaatattggtaattatttatagtcatgtaactaccacactgcccagtag

SEQ ID NO: 42035 - DNA, 80 bp, synthetic construct
  source 1..80: mol_type = other DNA
gttacctctgagttgtggcgctgtagagaaccgtttcttttccctaaaaactttctttctgcccctttctatttaatcct

SEQ ID NO: 42036 - DNA, 80 bp, synthetic construct; identical to SEQ ID NO: 14381
  source 1..80: mol_type = other DNA

SEQ ID NO: 42037 - DNA, 80 bp, synthetic construct
  source 1..80: mol_type = other DNA
agaaactgccataccactttacaaattggctgccacattttttgcattcctaccagcaatatcagacattcctatttttt

SEQ ID NO: 42038 - DNA, 80 bp, synthetic construct
  source 1..80: mol_type = other DNA
aattcagtgattaattccagagactttttcagaattccctagtgttttctacatatgcaatgaagttggtgacaaagact

SEQ ID NO: 42039 - DNA, 80 bp, synthetic construct; identical to SEQ ID NO: 14382
  source 1..80: mol_type = other DNA

SEQ ID NO: 42040 - DNA, 80 bp, synthetic construct
  source 1..80: mol_type = other DNA
gcaaatcaaaaccacaatgatgtactatctcctgcgagccagaatggcgattattaaaaagtgaggaaacaatagatgct

SEQ ID NO: 42041 - DNA, 80 bp, synthetic construct
  source 1..80: mol_type = other DNA
gtagatatacaccatggaatactacacggccataaaaaggaatgagttcatgtcctttgcagggacatggatgaagctgg

SEQ ID NO: 42042 - DNA, 80 bp, synthetic construct
  source 1..80: mol_type = other DNA
gatgggtgaataggtgcagcaaaccactatggcagactatacgtatgtaacaaacctgcacgttctgcacatgtatctgg

SEQ ID NO: 42043 - DNA, 80 bp, synthetic construct; identical to SEQ ID NO: 14383
  source 1..80: mol_type = other DNA

SEQ ID NO: 42044 - DNA, 80 bp, synthetic construct
  source 1..80: mol_type = other DNA
agctaatgggaactaagacttaatacttgggtgggtactaatgggcatagaaataatttgtgaaacaaaaccccatgaca

SEQ ID NO: 42045 - DNA, 80 bp, synthetic construct
  source 1..80: mol_type = other DNA
gtcattattgatatgataagtttcacgtctaccatgttattttcccggtttttgtttctctgttcctcttgtcctgatca

SEQ ID NO: 42046 - DNA, 80 bp, synthetic construct
  source 1..80: mol_type = other DNA
gtcaccagcagatctgtacaattacaattggtaaagaaaattcttcagactagaggcaaatgataccaggtggaaaatga

SEQ ID NO: 42047 - DNA, 80 bp, synthetic construct; identical to SEQ ID NO: 14384
  source 1..80: mol_type = other DNA

SEQ ID NO: 42048 - DNA, 80 bp, synthetic construct
  source 1..80: mol_type = other DNA
caaatcctagccagtcttgagtatcatcatcctacgatttcagaactatcgtgaatataaaagtaatcaaagaacagtcc

SEQ ID NO: 42049 - DNA, 80 bp, synthetic construct
  source 1..80: mol_type = other DNA
gtctgctgctgtgtccacacttggagaaggaaatcttgaaggtgtcagtacattacaagctgggcatgacagctcacccc

SEQ ID NO: 42050 - DNA, 80 bp, synthetic construct; identical to SEQ ID NO: 14385
  source 1..80: mol_type = other DNA

SEQ ID NO: 42051 - DNA, 80 bp, synthetic construct
  source 1..80: mol_type = other DNA
aaactagaaatcacatccactttccagtgttaaaaagcccagtccaggcaggtgagaaggagacagtcctcattagcact

SEQ ID NO: 42052 - DNA, 80 bp, synthetic construct
  source 1..80: mol_type = other DNA
caaaagtcttacaatgaaaacaacagtcctgccagttgttctctcgagaggcaaacacttttcattctcttagtttttcc

SEQ ID NO: 42053 - DNA, 80 bp, synthetic construct
  source 1..80: mol_type = other DNA
ttcaagtgggtgcatatattaatacatgtaattttaaaaagcctcttcagtttataatgcatcctaacagtcccctgccc

SEQ ID NO: 42054 - DNA, 80 bp, synthetic construct
  source 1..80: mol_type = other DNA
cttcacttttccccccatattgtcccaaagtagttaccagatttaggggctaagtagtcaccacatcattatgagtatgt

SEQ ID NO: 42055 - DNA, 80 bp, synthetic construct; identical to SEQ ID NO: 14386
  source 1..80: mol_type = other DNA

SEQ ID NO: 42056 - DNA, 80 bp, synthetic construct
  source 1..80: mol_type = other DNA
ttctttttaaagccagctccatagctggaatatttcctgtgttggatcctatttgctggatccatgtcattctctggttt

SEQ ID NO: 42057 - DNA, 80 bp, synthetic construct
  source 1..80: mol_type = other DNA
aataactttctttctggaattctgaaggcatggttccattgttttcagcttctttttcgagacaaggtctcttctgtcac

SEQ ID NO: 42058 - DNA, 80 bp, synthetic construct; identical to SEQ ID NO: 14387
  source 1..80: mol_type = other DNA

SEQ ID NO: 42059 - DNA, 80 bp, synthetic construct
  source 1..80: mol_type = other DNA
atcttaaatcacagtttcttactacatgcaaccctttggttcaaactaccatcatccctcacttgaacttagaattggtt

SEQ ID NO: 42060 - DNA, 80 bp, synthetic construct
  source 1..80: mol_type = other DNA
gtttgagaccagcctgaccaacattgtgaaaccccgtcttcaccaaaaacacaaaattagccaggcgtcgtggcacgtgc

SEQ ID NO: 42061 - DNA, 80 bp, synthetic construct
  source 1..80: mol_type = other DNA
aaacatgaaattgctttaagtgtttgccattcactgttcacatgcatgccagcagcttcttactgcaaacacctgggact

SEQ ID NO: 42062 - DNA, 80 bp, synthetic construct
  source 1..80: mol_type = other DNA
ggttttcttaccttctcagttccatttctccgtacctcaattgatgatttctggtaagacctagaaaataaactgctttc

SEQ ID NO: 42063 - DNA, 80 bp, synthetic construct; identical to SEQ ID NO: 14388
  source 1..80: mol_type = other DNA

SEQ ID NO: 42064 - DNA, 80 bp, synthetic construct
  source 1..80: mol_type = other DNA
ctgatatagtcaagattagtggggagtaaaaacatgttgcttagaaataattatccaaagatctaaagtcaacaaaagtc

SEQ ID NO: 42065 - DNA, 80 bp, synthetic construct
  source 1..80: mol_type = other DNA
tcaatttctggaaaaaacgtgtcactttcaaagtcctgcatgatctttgtcacaaatagtttaagatggcctgggcgact

SEQ ID NO: 42066 - DNA, 80 bp, synthetic construct; identical to SEQ ID NO: 14389
  source 1..80: mol_type = other DNA

SEQ ID NO: 42067 - DNA, 80 bp, synthetic construct
  source 1..80: mol_type = other DNA
aagattggccggaaggtttttacttggaaactggaggatgagccatgacatccctctctccacctcaaagctcgtcctgg

SEQ ID NO: 42068 - DNA, 80 bp, synthetic construct; identical to SEQ ID NO: 14390
  source 1..80: mol_type = other DNA

SEQ ID NO: 42069 - DNA, 80 bp, synthetic construct
  source 1..80: mol_type = other DNA
caggttcttaacttcattagggaagtaagaagttgcagctcagtgcaccatgaatttgagacagagatggagacatccag

SEQ ID NO: 42070 - DNA, 80 bp, synthetic construct
  source 1..80: mol_type = other DNA
tgaagaaatcctgcatctcagtcccacacaggcagctgtctcaggctacagaacacaatagtcatgaacaaattcaggtc

SEQ ID NO: 42071 - DNA, 80 bp, synthetic construct
  source 1..80: mol_type = other DNA
gggtagaacaaaaaaaaagacctggtcagagcccgcaggagatgtgggacaagaggaattatggagtaggtgagctcctc

SEQ ID NO: 42072 - DNA, 80 bp, synthetic construct
  source 1..80: mol_type = other DNA
atcaggaaacatggggaaagcagttgtgggttctggaccaactgccctcctaaggtctgtccttagcagggaccttcccc

SEQ ID NO: 42073 - DNA, 80 bp, synthetic construct; identical to SEQ ID NO: 14391
  source 1..80: mol_type = other DNA

SEQ ID NO: 42074 - DNA, 80 bp, synthetic construct
  source 1..80: mol_type = other DNA
tttctctgataagagatgtgaccccccattcccctccttaccccagctcagggtgaggggctcttgcagcccctcgtgct

SEQ ID NO: 42075 - DNA, 80 bp, synthetic construct
  source 1..80: mol_type = other DNA
ggtgggtcacgtgtgtctttgggggttctgacgggaagagtcagaaaattcagacactttgcatctctcttgggacactc

SEQ ID NO: 42076 - DNA, 80 bp, synthetic construct; identical to SEQ ID NO: 14392
  source 1..80: mol_type = other DNA

SEQ ID NO: 42077 - DNA, 80 bp, synthetic construct
  source 1..80: mol_type = other DNA
ttccagtgctgatcccattttcctcccctcctcgtgggaggccatcccgggagatctataggagatggggaaggctcccc

SEQ ID NO: 42078 - DNA, 80 bp, synthetic construct
  source 1..80: mol_type = other DNA
gttcagggcgatgtaatccttgccgtcgtaggcggactggtcatacccgcggaggaggcgcccgtcgggccccaggtcgc

SEQ ID NO: 42079 - DNA, 80 bp, synthetic construct
  source 1..80: mol_type = other DNA
ccttggggtggatctcagacggggagactctgggcgacccgggccgtccgtgggggatggggaggggtcgtgacctgcgc

SEQ ID NO: 42080 - DNA, 80 bp, synthetic construct; identical to SEQ ID NO: 14393
  source 1..80: mol_type = other DNA

SEQ ID NO: 42081 - DNA, 80 bp, synthetic construct
  source 1..80: mol_type = other DNA
gccaggcctcccgagagcagcaggaggagggctcggggcgccatgacccgcatctcggcctctggggagaatgtgagtcc

SEQ ID NO: 42082 - DNA, 80 bp, synthetic construct
  source 1..80: mol_type = other DNA
ccttcttttcctgactgcagctcttttcattttgccatccttttccagctccatgatggttctgcaggtttctgcggccc

SEQ ID NO: 42083 - DNA, 80 bp, synthetic construct
  source 1..80: mol_type = other DNA
cgaactgccattcttggagggtctggctcagggaacaattcctaggggacgttatctttaagggatcaaattctgagaca

SEQ ID NO: 42084 - DNA, 80 bp, synthetic construct
  source 1..80: mol_type = other DNA
tgtctttggggaaaatgggaccaagaggtcctggataaccttggacagacaaggtttgcagagagagaagttggcaagtg

SEQ ID NO: 42085 - DNA, 80 bp, synthetic construct
  source 1..80: mol_type = other DNA
atcccttggacaattaaggagagaagggagggagggggataggttttagcccctgaaggcattctcattaaaggtacttc

SEQ ID NO: 42086 - DNA, 80 bp, synthetic construct; identical to SEQ ID NO: 14395
  source 1..80: mol_type = other DNA

SEQ ID NO: 42087 - DNA, 80 bp, synthetic construct
  source 1..80: mol_type = other DNA
tcattgttcagttcccacctatgagtgagaacatgtggtctttggttttttgtccttgcaatagtttgctgtgaatgatg

SEQ ID NO: 42088 - DNA, 80 bp, synthetic construct
  source 1..80: mol_type = other DNA
aataaacatatgtgtgcatgtgtctttatagcagcatgatttataatcctttgggtatatatccagtaatgggatggctg

SEQ ID NO: 42089 - DNA, 80 bp, synthetic construct; identical to SEQ ID NO: 14396
  source 1..80: mol_type = other DNA

SEQ ID NO: 42090 - DNA, 80 bp, synthetic construct
  source 1..80: mol_type = other DNA
cctcaagccctaaaacctcttatctattaccttgggttcattgtccaggaaggggaggagaacttgaacttgtagtcaca

SEQ ID NO: 42091 - DNA, 80 bp, synthetic construct; identical to SEQ ID NO: 14397
  source 1..80: mol_type = other DNA

SEQ ID NO: 42092 - DNA, 80 bp, synthetic construct
  source 1..80: mol_type = other DNA
gctggagccataggggagtgggtaaagtgggcagggctgattccacaattccctgcatgctcccccaactccacacacat

SEQ ID NO: 42093 - DNA, 80 bp, synthetic construct
  source 1..80: mol_type = other DNA
gatcagtggtttcaaaccgtgctctgggcaactcaattgctaagggttccacaaacaggataaagtttcttatatacaaa

SEQ ID NO: 42094 - DNA, 80 bp, synthetic construct
  source 1..80: mol_type = other DNA
ttcttgaatgaaaaacgttctcttactggtgattgaggaggagaaacaaagactaacaaatgaaaatgggagaatccaca

SEQ ID NO: 42095 - DNA, 80 bp, synthetic construct
  source 1..80: mol_type = other DNA
atctgagtcaagacctgggatcttgccttagcaatgacactggagactaaaggtggactccatggtgcccttgagcccag

SEQ ID NO: 42096 - DNA, 80 bp, synthetic construct; identical to SEQ ID NO: 14398
  source 1..80: mol_type = other DNA

SEQ ID NO: 42097 - DNA, 80 bp, synthetic construct
  source 1..80: mol_type = other DNA
taagatcctcaaaaagaggaccaacaagttcatgaggcaccaatcagactgaaatgtcaaaattaagcataactggcgga

SEQ ID NO: 42098 - DNA, 80 bp, synthetic construct
  source 1..80: mol_type = other DNA
gatgtgcaacaaatcttactgtgctgagatcgctcacaaaatttcctccagaactgcaaagtcatcatggaaagagtcac

SEQ ID NO: 42099 - DNA, 80 bp, synthetic construct
  source 1..80: mol_type = other DNA
tccctggttgttgtggtgattttcattgtgtaaaatactttccacatcttttgacaccaagtctttctgcagccatgttt

SEQ ID NO: 42100 - DNA, 80 bp, synthetic construct; identical to SEQ ID NO: 14399
  source 1..80: mol_type = other DNA

SEQ ID NO: 42101 - DNA, 80 bp, synthetic construct
  source 1..80: mol_type = other DNA
ctgttttttctcccagtgaccccacgtgaaacgtctccgcctcctccagccaccagcagaagggactgccttcccctcag

SEQ ID NO: 42102 - DNA, 80 bp, synthetic construct
  source 1..80: mol_type = other DNA
ctattttaaaatccagccctgggtgggaagatttgggaagaatcgttaatattgagagagagagggagaaagaggattag

SEQ ID NO: 42103 - DNA, 80 bp, synthetic construct
  source 1..80: mol_type = other DNA
gttccgggcggtgacggagctggggcggcctgctgcggagtactggaacagccagaaggacatcctggaggagaagcggg

SEQ ID NO: 42104 - DNA, 80 bp, synthetic construct; identical to SEQ ID NO: 14400
  source 1..80: mol_type = other DNA

SEQ ID NO: 42105 - DNA, 80 bp, synthetic construct
  source 1..80: mol_type = other DNA
ccacacagagaagaaacctacagggaggtagctgggtttgaggtgcttgaggggcagatgggtggtctgatgggcaggta

SEQ ID NO: 42106 - DNA, 80 bp, synthetic construct
  source 1..80: mol_type = other DNA
aacccaagtgcagtgtgaggagaggcccgcagagaagagtcttggaagctgaggggaggtgacctcagcagcacagtgga

SEQ ID NO: 42107 - DNA, 80 bp, synthetic construct
  source 1..80: mol_type = other DNA
ggattttacttgtcttgggttccccacggctgtcacagggcagtgtctcagttcattcgtctttttccttcaggaagtct

SEQ ID NO: 42108 - DNA, 80 bp, synthetic construct; identical to SEQ ID NO: 14401
  source 1..80: mol_type = other DNA

SEQ ID NO: 42109 - DNA, 80 bp, synthetic construct
  source 1..80: mol_type = other DNA
actgttactaagactttgtagaggcaccaatcagtgacatggcagcattttctttcacagtaatcaactgccagattgca

SEQ ID NO: 42110 - DNA, 80 bp, synthetic construct
  source 1..80: mol_type = other DNA
atctctgcttgtaatcagctccctagaggttcccatgtagccagataagtattgtcagaacactgaagatttttgaaaaa

SEQ ID NO: 42111 - DNA, 80 bp, synthetic construct
  source 1..80: mol_type = other DNA
agaggtggaagggggaggaaagaagtagtgacaattccagggtggatgtccacccaaatctagaagtaattgagcaaatg

SEQ ID NO: 42112 - DNA, 80 bp, synthetic construct; identical to SEQ ID NO: 14402
  source 1..80: mol_type = other DNA

SEQ ID NO: 42113 - DNA, 80 bp, synthetic construct
  source 1..80: mol_type = other DNA
ggctgacaatgtggatcagtctgaaaacaaggcaaaaatacaatagggagtaagggttgtgtgtcagttcaagactgtac

SEQ ID NO: 42114 - DNA, 80 bp, synthetic construct
  source 1..80: mol_type = other DNA
agctgttctctagtggatctccctgaatgaactgttctctaggagcacttgacccttttctgtgtttgttttttgttttg

SEQ ID NO: 42115 - DNA, 80 bp, synthetic construct; identical to SEQ ID NO: 14403
  source 1..80: mol_type = other DNA

SEQ ID NO: 42116 - DNA, 80 bp, synthetic construct
  source 1..80: mol_type = other DNA
gacgggatttctactactcaagcatgtaggagctcaggatattctgtaaatatgaagattttgagtttttgtaggtgagg

SEQ ID NO: 42117 - DNA, 80 bp, synthetic construct
  source 1..80: mol_type = other DNA
tcctttgtatcaagatagaactttgaaaaggtaggtaatttcacagttgatcaaatattctttgcccaaattacttttgg

SEQ ID NO: 42118 - DNA, 80 bp, synthetic construct
  source 1..80: mol_type = other DNA
tattcctattttcaacatctaggaatcaattacatagtgaacatgcctaagaaataataatctgggcagatgcagtggct

SEQ ID NO: 42119 - DNA, 80 bp, synthetic construct
  source 1..80: mol_type = other DNA
gcacctataatcccagctattcgggaggctgaggaaggagaattggttgaagcccggaggtggaggttgcagtgagccaa

SEQ ID NO: 42120 - DNA, 80 bp, synthetic construct; identical to SEQ ID NO: 14404
  source 1..80: mol_type = other DNA

SEQ ID NO: 42121 - DNA, 80 bp, synthetic construct
  source 1..80: mol_type = other DNA
ggtgatgctggaaatgaccccccagcagggagatgtctacacctgccaagtggagcacaccagcctggatagtcctgtca

SEQ ID NO: 42122 - DNA, 80 bp, synthetic construct
  source 1..80: mol_type = other DNA
aaatggagacttcctgaccttggcttaggggttcctgaagattcatagttctcccccttgtcagagaatctagggacact

SEQ ID NO: 42123 - DNA, 80 bp, synthetic construct; identical to SEQ ID NO: 14405
  source 1..80: mol_type = other DNA

SEQ ID NO: 42124 - DNA, 80 bp, synthetic construct
  source 1..80: mol_type = other DNA
ggcatattcacacttattccacgatgaggggtttgacagaaaagaaatgtcagaaagctctagaggccactgatatcaga

SEQ ID NO: 42125 - DNA, 80 bp, synthetic construct
  source 1..80: mol_type = other DNA
tgaggtggtttcaatggctgattatataacctttcgtctttcatttcagttcaacgaggatctgcataaacaggtaatat

SEQ ID NO: 42126 - DNA, 80 bp, synthetic construct
  source 1..80: mol_type = other DNA
tggctccattgctgaaggaagcagagatcaactctgttatttatcagcctgagacgcatcctctcaccataatttttctc

SEQ ID NO: 42127 - DNA, 80 bp, synthetic construct; identical to SEQ ID NO: 14406
  source 1..80: mol_type = other DNA

SEQ ID NO: 42128 - DNA, 80 bp, synthetic construct
  source 1..80: mol_type = other DNA
acataggaaagaagagaaccatgaaaatggggatatgttaactattgtataatggggcctgttacacatgacactcttct

SEQ ID NO: 42129 - DNA, 80 bp, synthetic construct
  source 1..80: mol_type = other DNA
gcctgataggacccatattcccacagcactaattcaacatataccttactgagagcatgttttatcattaccattaagaa

SEQ ID NO: 42130 - DNA, 80 bp, synthetic construct
  source 1..80: mol_type = other DNA
cctgtcttaattttcatacagacagaaatgactccccactggggaaagagcaaagcaatacatgtagcactctttttcaa

SEQ ID NO: 42131 - DNA, 80 bp, synthetic construct; identical to SEQ ID NO: 14407
  source 1..80: mol_type = other DNA

SEQ ID NO: 42132 - DNA, 80 bp, synthetic construct
  source 1..80: mol_type = other DNA
ggcacagatataagtaaatacagctggagtctgcagagaggctggactgagtcagggagtcaggaaagagaagccacaca

SEQ ID NO: 42133 - DNA, 80 bp, synthetic construct
  source 1..80: mol_type = other DNA
tcacataataagctaaggaagacagtatatagtaaataaggaccctttatctgtcttattttcccttttggcttcacagg

SEQ ID NO: 42134 - DNA, 80 bp, synthetic construct
  source 1..80: mol_type = other DNA
cagttaacattacaaattacaaaccatatccagtcagagtcattctctttcctgcttgtctcctgtactcatgttacagg

SEQ ID NO: 42135 - DNA, 80 bp, synthetic construct
  source 1..80: mol_type = other DNA
gtatcagatgtgtctcactctgacatatgcaggtgtttatgaaactctgggatttctaaggaaggatgcagtgcagagac

SEQ ID NO: 42136 - DNA, 80 bp, synthetic construct; identical to SEQ ID NO: 14408
  source 1..80: mol_type = other DNA

SEQ ID NO: 42137 - DNA, 80 bp, synthetic construct
  source 1..80: mol_type = other DNA
acagacaacactgcctcagatggttatcaaggggtaccctaagaagaaatcatctcaccctctctttgtccccatttgtc

SEQ ID NO: 42138 - DNA, 80 bp, synthetic construct
  source 1..80: mol_type = other DNA
ttgcattgtaaactgtccctgaaattactgtgcacttggcttatgggatgaaacatcctcctagttcttttgtctctcag

SEQ ID NO: 42139 - DNA, 80 bp, synthetic construct; identical to SEQ ID NO: 14409
  source 1..80: mol_type = other DNA

SEQ ID NO: 42140 - DNA, 80 bp, synthetic construct
  source 1..80: mol_type = other DNA
tgtaaatcatatggctgcaactaacttcaaataagtgggaatacttgaaggtggaaaacatttaagaagtacacactaaa

SEQ ID NO: 42141 - DNA, 80 bp, synthetic construct; identical to SEQ ID NO: 14410
  source 1..80: mol_type = other DNA

SEQ ID NO: 42142 - DNA, 80 bp, synthetic construct
  source 1..80: mol_type = other DNA
aagctctgtttttaggtgcatatgcacttaagattgttatgtctctttagagaaataaccctttatcattaagtgatgtc

SEQ ID NO: 42143 - DNA, 80 bp, synthetic construct
  source 1..80: mol_type = other DNA
gttgctgataggttatagttcaatattccatttttattcaatctgttcttctctatcatttaattggtctgtctggacca

SEQ ID NO: 42144 - DNA, 80 bp, synthetic construct
  source 1..80: mol_type = other DNA
caaatctaccttagattagcatactccagatttctctcttattcattgtgcaattgttgtcatataatttctttctcata

SEQ ID NO: 42145 - DNA, 80 bp, synthetic construct; identical to SEQ ID NO: 14411
  source 1..80: mol_type = other DNA

SEQ ID NO: 42146 - DNA, 80 bp, synthetic construct
  source 1..80: mol_type = other DNA
tttttcctgatcctctccctcctcccatcctccactcttcaataggtcctagtgtgtgtggttcccctctatgtgtccat

SEQ ID NO: 42147 - DNA, 80 bp, synthetic construct
  source 1..80: mol_type = other DNA
ctctctctgtcgcccaggctggagtgcagtggcacgatctcggctcactgcaagctccgcctcctgggttcacaccattc

SEQ ID NO: 42148 - DNA, 80 bp, synthetic construct
  source 1..80: mol_type = other DNA
ccgtgccggccgatctcattctttttaatggctgcgtagtattccatggtgtatatgtaccaaattttctttatccagtc

SEQ ID NO: 42149 - DNA, 80 bp, synthetic construct
  source 1..80: mol_type = other DNA
gggtctttgaggtattgccacactgtcttccacaatggttgaactaatttacactcccgccaacagtgtataaacgttcc

SEQ ID NO: 42150 - DNA, 80 bp, synthetic construct; identical to SEQ ID NO: 14412
  source 1..80: mol_type = other DNA

SEQ ID NO: 42151 - DNA, 80 bp, synthetic construct
  source 1..80: mol_type = other DNA
gcttttgttgcaattacttttgccgatgcctatgtcctgagtagtattgcctaagttgtcttccagggtttttatagttt

SEQ ID NO: 42152 - DNA, 80 bp, synthetic construct
  source 1..80: mol_type = other DNA
gttgaagatcagatagttgtaggtatgaggtcttatttctggtgggttctctattctgctccattgctgtatgtgtctgt

SEQ ID NO: 42153 - DNA, 80 bp, synthetic construct
  source 1..80: mol_type = other DNA
ggaatagcattgaatctataaattgctttgggcagcacttgcttttaaagcttttattaaaaattatttgtcatttgttt

SEQ ID NO: 42154 - DNA, 80 bp, synthetic construct; identical to SEQ ID NO: 14413
  source 1..80: mol_type = other DNA

SEQ ID NO: 42155 - DNA, 80 bp, synthetic construct
  source 1..80: mol_type = other DNA
ggagctatggagaaggtagatctggacatggaggtaattttgcatgtttttcagtagaatagcattacaaagcaatcttt

SEQ ID NO: 42156 - DNA, 80 bp, synthetic construct
  source 1..80: mol_type = other DNA
ggactacaggcgcccgccatcacccctggctaattttgtttttgtatttttagtagagatggggtttcactgtgttagcg

SEQ ID NO: 42157 - DNA, 80 bp, synthetic construct; identical to SEQ ID NO: 14414
  source 1..80: mol_type = other DNA

SEQ ID NO: 42158 - DNA, 80 bp, synthetic construct
  source 1..80: mol_type = other DNA
gattagtaaagataagatcttgactggtaggtgagtgggtggaatttatttcaaatatgggggctctccaatccttgcac

SEQ ID NO: 42159 - DNA, 80 bp, synthetic construct
  source 1..80: mol_type = other DNA
aacagaatgtaatggaagtgatgttgtgagttttaagtttcagctcaagacacctactgtttctatcttgcacaggagag

SEQ ID NO: 42160 - DNA, 80 bp, synthetic construct
  source 1..80: mol_type = other DNA
aaaccactcaggtgggttgagcacaatttcctgtcttacagaatcatgaggagacactaaacaattatttgaagtcatta

SEQ ID NO: 42161 - DNA, 80 bp, synthetic construct
  source 1..80: mol_type = other DNA
gctacagggagaaggttaaatgaatgaggaaaaattgataggctttcccagcccaaagcatgatgttattatcattatca

SEQ ID NO: 42162 - DNA, 80 bp, synthetic construct; identical to SEQ ID NO: 14415
  source 1..80: mol_type = other DNA

SEQ ID NO: 42163 - DNA, 80 bp, synthetic construct
  source 1..80: mol_type = other DNA
tctttttactttgctactctagactctcttattattgtgaagcagctttaactactgcaagacagaagtcttggccttca

SEQ ID NO: 42164 - DNA, 80 bp, synthetic construct
  source 1..80: mol_type = other DNA
tggcacatcccattgttattttagtcatggaatcaatggcatgtcaataagtgctttctgagaaaattgttggacaaagt

SEQ ID NO: 42165 - DNA, 80 bp, synthetic construct
  source 1..80: mol_type = other DNA
cttacattaaaattatgacctgaagacataagcaactggaacaacgttcactgtgttatggccggatgaagcaggaagag

SEQ ID NO: 42166 - DNA, 80 bp, synthetic construct; identical to SEQ ID NO: 14416
  source 1..80: mol_type = other DNA

SEQ ID NO: 42167 - DNA, 80 bp, synthetic construct
  source 1..80: mol_type = other DNA
gcaccctcaacttcccatccaagatacaattctaatcctacatttaacaccctaacttcttaactggagttgagttattt

SEQ ID NO: 42168 - DNA, 80 bp, synthetic construct
  source 1..80: mol_type = other DNA
gagtggcaaagggagcacatctcaaaggggacctcaaaaaccctcttcatccacaatggcaggagctagaaagaataaag

SEQ ID NO: 42169 - DNA, 80 bp, synthetic construct
  source 1..80: mol_type = other DNA
tgggaaaagtccttcaactctctgggctttaatgtcctcctcggaaaatgagaacgatattaaaatatgacaagtatatg

SEQ ID NO: 42170 - DNA, 80 bp, synthetic construct; identical to SEQ ID NO: 14417
  source 1..80: mol_type = other DNA

SEQ ID NO: 42171 - DNA, 80 bp, synthetic construct
  source 1..80: mol_type = other DNA
cagctctgctcttaaggcttttcaacagcttagattaagctcacccagttttcctaggataaattcttaaagtcaactga

SEQ ID NO: 42172 - DNA, 80 bp, synthetic construct
  source 1..80: mol_type = other DNA
aagaaagagggattttgcttttaattggattctgacagaaagtggagggttggggtggcaatgttatgattgggtagctt

SEQ ID NO: 42173 - DNA, 80 bp, synthetic construct
  source 1..80: mol_type = other DNA
ctgagcattcaggtgttctgtctcaatccactgtgctcacagagtacctgtctgattctgatgttctatgaaatccttta

SEQ ID NO: 42174 - DNA, 80 bp, synthetic construct; identical to SEQ ID NO: 14418
  source 1..80: mol_type = other DNA

SEQ ID NO: 42175 - DNA, 80 bp, synthetic construct
  source 1..80: mol_type = other DNA
taaggcagtgcaattcttattctaccctcaacttttgacttcatattcttaattaaaaaaaaaattcttagagtaattga

SEQ ID NO: 42176 - DNA, 80 bp, synthetic construct
  source 1..80: mol_type = other DNA
tttattgccctggccaaaaccacctggagcttttgagcacttgagaagaacttacccagctggatttatacaagtagaaa

SEQ ID NO: 42177 - DNA, 80 bp, synthetic construct
  source 1..80: mol_type = other DNA
agggaaatcaactcagggaaaaattcctggaggttgtaagccagaacatcctgaaggatgccgtataactgatgacctca

SEQ ID NO: 42178 - DNA, 80 bp, synthetic construct
  source 1..80: mol_type = other DNA
actaaaaatacaaaaattagctgggcgtggtggcaggtgcctgcagtcccagctacttgggagggtgagggaggagaatc

SEQ ID NO: 42179 - DNA, 80 bp, synthetic construct; identical to SEQ ID NO: 14419
  source 1..80: mol_type = other DNA

SEQ ID NO: 42180 - DNA, 80 bp, synthetic construct
  source 1..80: mol_type = other DNA
ggtcctcacaattactctacagctcagaacaccaactgctgaggctgccttgggaagaggatgatcctaaacaaagctct

SEQ ID NO: 42181 - DNA, 80 bp, synthetic construct
  source 1..80: mol_type = other DNA
agggccctttcagtattaagacaattaaaaattatagctgttcctccttcaggaaaccagagccccaacctactcttttt

SEQ ID NO: 42182 - DNA, 80 bp, synthetic construct; identical to SEQ ID NO: 14420
  source 1..80: mol_type = other DNA

SEQ ID NO: 42183 - DNA, 80 bp, synthetic construct
  source 1..80: mol_type = other DNA
ggtcctcacttactctcagctgcctcatatgtgtcacctcacaagtaatcaaataaaatgggcatgtggctaagctttgt

SEQ ID NO: 42184 - DNA, 80 bp, synthetic construct
  source 1..80: mol_type = other DNA
ttatcaacccaaattacctgttcttcacctcatctaataaagtcctataaaaagaaaagtgggccagacaaggtggctca

SEQ ID NO: 42185 - DNA, 80 bp, synthetic construct
  source 1..80: mol_type = other DNA
cagaaggctgccgtgggaggaccacttgagtccatgaggcggaagctgcagtgagccatggtggcaccactacactccag

SEQ ID NO: 42186 - DNA, 80 bp, synthetic construct; identical to SEQ ID NO: 14421
  source 1..80: mol_type = other DNA

SEQ ID NO: 42187 - DNA, 80 bp, synthetic construct
  source 1..80: mol_type = other DNA
aaactttcacaactttattaaccgtggctgctcccattatgattttgttcggcagtggaagtttcacctgcttctccaga

SEQ ID NO: 42188 - DNA, 80 bp, synthetic construct
  source 1..80: mol_type = other DNA
ataatggaatattagagcctaagaaaatgttttaacttttaattcagcctagattatattgtctttataccaattcagtc

SEQ ID NO: 42189 - DNA, 80 bp, synthetic construct
  source 1..80: mol_type = other DNA
atctatgtggtcctcgaatatagcaactgtcattcaatacacatgtttgagcacacagtgagctaagttttaaggattca

SEQ ID NO: 42190 - DNA, 80 bp, synthetic construct
  source 1..80: mol_type = other DNA
tgacgtcctctagcaaaatttggcacccaagacaagtaccagaagaaaagaaagactgcatgtattccacatatattcat

SEQ ID NO: 42191 - DNA, 80 bp, synthetic construct; identical to SEQ ID NO: 14422
  source 1..80: mol_type = other DNA

SEQ ID NO: 42192 - DNA, 80 bp, synthetic construct
  source 1..80: mol_type = other DNA
cagatacttttgaaggatgttggactgtaaggctgtcgatatcctcctcagagaacttactacagtacattgtatctgtt

SEQ ID NO: 42193 - DNA, 80 bp, synthetic construct
  source 1..80: mol_type = other DNA
atacgatggtaaaaggcttacacatgtcttgacaaaaaagtccagtttggctcatttggctggagtcgtactgcatggct

SEQ ID NO: 42194 - DNA, 80 bp, synthetic construct
  source 1..80: mol_type = other DNA
actagtagagcttccacttttcatttcagaagaaatcagttgctctcctctaaggaccattactattaacaaaacagaga

SEQ ID NO: 42195 - DNA, 80 bp, synthetic construct; identical to SEQ ID NO: 14423
  source 1..80: mol_type = other DNA

SEQ ID NO: 42196 - DNA, 80 bp, synthetic construct
  source 1..80: mol_type = other DNA
gaaatagtaaaaattggacatgcgatattctgcccttgtgtagcgcacactagagtgggaaagaaagtgcacttttaact

SEQ ID NO: 42197 - DNA, 80 bp, synthetic construct
  source 1..80: mol_type = other DNA
atttgaaagtcagtttcttccatcattttgtgtattaaggttctttcttcccctgttctccgccttcctgcttgtcatct

SEQ ID NO: 42198 - DNA, 80 bp, synthetic construct; identical to SEQ ID NO: 14424
  source 1..80: mol_type = other DNA

SEQ ID NO: 42199 - DNA, 80 bp, synthetic construct
  source 1..80: mol_type = other DNA
agggttcattattttcttcccaagaggtccccagatcttcttatggcaattgctgaaattttatcatctcccatctctaa

SEQ ID NO: 42200 - DNA, 80 bp, synthetic construct
  source 1..80: mol_type = other DNA
aagcagaaggtaaataagacctctttgactatcaggtggtgaaatgctggtaggagggctcttccaggatgtaatgcaga

SEQ ID NO: 42201 - DNA, 80 bp, synthetic construct
  source 1..80: mol_type = other DNA
caacatcacatggctgagcaatgggcagtcagtcacagaaggtgtttctgagaccagcttcctctccaagagtgatcatt

SEQ ID NO: 42202 - DNA, 80 bp, synthetic construct; identical to SEQ ID NO: 14425
  source 1..80: mol_type = other DNA

SEQ ID NO: 42203 - DNA, 80 bp, synthetic construct
  source 1..80: mol_type = other DNA
caaccctctaccccatcccatcccacacacatgcacatgagcacactctgcattctgacctcaacaacttcacttccaca

SEQ ID NO: 42204 - DNA, 80 bp, synthetic construct
  source 1..80: mol_type = other DNA
ttgtgaatcccatcctggaagggaaggtaagattgagactggttacagttgaagcggcagtatgaaaggaaggaaagtgg

SEQ ID NO: 42205 - DNA, 80 bp, synthetic construct
  source 1..80: mol_type = other DNA
tagcactattctctggcccgatttatcatatcccttttctcctccaaatatttctcctctcaccttttctctgggactta

SEQ ID NO: 42206 - DNA, 80 bp, synthetic construct
  source 1..80: mol_type = other DNA
tccttttatgagatctatgtcaaatttttccatctttcatccagggctgactgaaactatggctaataattggggtactc

SEQ ID NO: 42207 - DNA, 80 bp, synthetic construct; identical to SEQ ID NO: 14426
  source 1..80: mol_type = other DNA

SEQ ID NO: 42208 - DNA, 80 bp, synthetic construct
  source 1..80: mol_type = other DNA
cagtagaagccttcctcttcccttgtcaccttgagataaaaattctttaggcaggaaaagaaatggaagtcagaaaaaca

SEQ ID NO: 42209 - DNA, 80 bp, synthetic construct
  source 1..80: mol_type = other DNA
ctagataaccatgtagctttccctgtgccactctggcatgaaggagacagtatagtgaatatggctacaggatgtttctt

SEQ ID NO: 42210 - DNA, 80 bp, synthetic construct; identical to SEQ ID NO: 14427
  source 1..80: mol_type = other DNA

SEQ ID NO: 42211 - DNA, 80 bp, synthetic construct
  source 1..80: mol_type = other DNA
gtgaagtctctaacatttctggccttacttttctcatccacaatgtaggagtaataatactttccttgcagagttattga

SEQ ID NO: 42212 - DNA, 80 bp, synthetic construct
  source 1..80: mol_type = other DNA
ataattgaaggatatttttctttttccagaatgagagaggctgagattggattggtaagagaactcttagcactagaagt

SEQ ID NO: 42213 - DNA, 80 bp, synthetic construct
  source 1..80: mol_type = other DNA
aatttaaaacacagactgggaatcagtaagcacaggaaatctgaaccagtgatgatcatgaaaatgtccatcacagagca

SEQ ID NO: 42214 - DNA, 80 bp, synthetic construct; identical to SEQ ID NO: 14428
  source 1..80: mol_type = other DNA

SEQ ID NO: 42215 - DNA, 80 bp, synthetic construct
  source 1..80: mol_type = other DNA
gattctcataaggaacatgcaacctagatctcttgcatgcacagttaaaaatagggttcgcactcctatgagaatctaat

SEQ ID NO: 42216 - DNA, 80 bp, synthetic construct
  source 1..80: mol_type = other DNA
tttctgtgaacctacaaccgctttaaaataaggtctatttttaaaaaggaaaagagaaggtaaccaattatgatcctaaa

SEQ ID NO: 42217 - DNA, 80 bp, synthetic construct
  source 1..80: mol_type = other DNA
tgtgtgtgtgtctgtaatataaggggtatactgaatggcataatgaccagagtcatgcagaaatctacaaatgctgccca

SEQ ID NO: 42218 - DNA, 80 bp, synthetic construct; identical to SEQ ID NO: 14429
  source 1..80: mol_type = other DNA

SEQ ID NO: 42219 - DNA, 80 bp, synthetic construct
  source 1..80: mol_type = other DNA
tcattaatacttaatatcacactatttaaaatttacaaaattagtgggtcacagaggctcgtgcttgtgatcttagcact

SEQ ID NO: 42220 - DNA, 80 bp, synthetic construct
  source 1..80: mol_type = other DNA
agtgcttgagcccaggagttcaatacttcagtgggctaagattgtgccactgtgctcactccagcctaggcagcagagca

SEQ ID NO: 42221 - DNA, 80 bp, synthetic construct
  source 1..80: mol_type = other DNA
ggcacatagtaagtagtcgataggtgttaacaatttgtgttattgttattttctggagtccaactaacaaatcccacagt

SEQ ID NO: 42222 - DNA, 80 bp, synthetic construct; identical to SEQ ID NO: 14430
  source 1..80: mol_type = other DNA

SEQ ID NO: 42223 - DNA, 80 bp, synthetic construct
  source 1..80: mol_type = other DNA
tttagactcaaaaatagtatttttattgctggttatgctttcttaaaaataaaaaatattcttgatcgatgtgactttcc

SEQ ID NO: 42224 - DNA, 80 bp, synthetic construct
  source 1..80: mol_type = other DNA
attgaattattttctacctcctctgcccacccttacttcacaccccaaaatgctttcagtgtcttttcaaggtacaatcc

SEQ ID NO: 42225 - DNA, 80 bp, synthetic construct; identical to SEQ ID NO: 14431
  source 1..80: mol_type = other DNA

SEQ ID NO: 42226 - DNA, 80 bp, synthetic construct
  source 1..80: mol_type = other DNA
attctgggcaggcataagcaggcatcacagaagagtgataaccaatcctagttaaaatagtctcaggagtcagtgcagaa

SEQ ID NO: 42227 - DNA, 80 bp, synthetic construct
  source 1..80: mol_type = other DNA
agctcatgaggacacagaacttcagcttgatgcagatgtgtgggaggtggggaacagctgttattcttctggggaatatg

SEQ ID NO: 42228 - DNA, 80 bp, synthetic construct; identical to SEQ ID NO: 14432
  source 1..80: mol_type = other DNA

SEQ ID NO: 42229 - DNA, 80 bp, synthetic construct
  source 1..80: mol_type = other DNA
aaaaggaagttatgcagagaaaggtctcattacacaaacagccactctctcaccccaaaggaaaatgacacacatgactt

SEQ ID NO: 42230 - DNA, 80 bp, synthetic construct
  source 1..80: mol_type = other DNA
aatggtaaggatgccctggaataagctctatcagtcagctctgtgacagcgctacctttcaaccagtaaaatcagattcc

SEQ ID NO: 42231 - DNA, 80 bp, synthetic construct
  source 1..80: mol_type = other DNA
atgataaggcccagcccaaggaagatcagccccagcacgaagcctccaacgccactcagcatcttgctctgggcagattc

SEQ ID NO: 42232 - DNA, 80 bp, synthetic construct; identical to SEQ ID NO: 14433
  source 1..80: mol_type = other DNA

SEQ ID NO: 42233 - DNA, 80 bp, synthetic construct
  source 1..80: mol_type = other DNA
ctagtctcctgtgattcccagctcagtagtgacatcagggataagagatgggaaggaatgggtcagaaggagctctttgt

SEQ ID NO: 42234 - DNA, 80 bp, synthetic construct
  source 1..80: mol_type = other DNA
taataaggggggtggacacaacgccggctgtctcctcctgatcattccgaaaccaccggactttgatctggcctggatag

SEQ ID NO: 42235 - DNA, 80 bp, synthetic construct
  source 1..80: mol_type = other DNA
cctccttggaccagagtggaaagatacctggagtcgaagtcttggattaaggttcattcaacaaatataaatttgacaat

SEQ ID NO: 42236 - DNA, 80 bp, synthetic construct
  source 1..80: mol_type = other DNA
aaaaagtaggcaggccttcaaaacaaataacccttgatcaaacatcatgtttgtccacaactcaattcctttatcttctc

SEQ ID NO: 42237 - DNA, 80 bp, synthetic construct; identical to SEQ ID NO: 14434
  source 1..80: mol_type = other DNA

SEQ ID NO: 42238 - DNA, 80 bp, synthetic construct
  source 1..80: mol_type = other DNA
ccccaattaaatggcactcttgagccatcatccggaaggaatcatggtttctgcttggacttgaacttttctttaggttc

SEQ ID NO: 42239 - DNA, 80 bp, synthetic construct
  source 1..80: mol_type = other DNA
acttgctggcattaggatgtgagtcaaaagaaggcaagggagtgtaaagcaaactaaaagttttgtgaacctgcatagat

SEQ ID NO: 42240 - DNA, 80 bp, synthetic construct
  source 1..80: mol_type = other DNA
gaatgttgtgtactttgggaggcttaagatcttggtgagtaattgtgggctgattacttaaagtgtttatcatgtaccaa

SEQ ID NO: 42241 - DNA, 80 bp, synthetic construct; identical to SEQ ID NO: 14435
  source 1..80: mol_type = other DNA

SEQ ID NO: 42242 - DNA, 80 bp, synthetic construct
  source 1..80: mol_type = other DNA
tccaagtcagtaagagtttacttgaaagcattaagcaaaatgttagaaaataattgataaagttcatttgtaagcctctg

SEQ ID NO: 42243 - DNA, 80 bp, synthetic construct
  source 1..80: mol_type = other DNA
tcgcctcaaagatctccgccattagtggtagccatttaagaaaacagaattacgatgaataatgatttgaagccaaaaag

SEQ ID NO: 42244 - DNA, 80 bp, synthetic construct
  source 1..80: mol_type = other DNA
aagagggtgggcactgggggcagagagaactgcttagcgaaggtaaggtacgaggaggcaaacacataaggcacgaggcg

SEQ ID NO: 42245 - DNA, 80 bp, synthetic construct; identical to SEQ ID NO: 14436
  source 1..80: mol_type = other DNA

SEQ ID NO: 42246 - DNA, 80 bp, synthetic construct
  source 1..80: mol_type = other DNA
gcgtcaccgcgcggtacacccccacgtcgctgtcgaagcgcgcgtactcctctcggttatagatgtatctggtcacaaga

SEQ ID NO: 42247 - DNA, 80 bp, synthetic construct
  source 1..80: mol_type = other DNA
tccagttcccgcccgcccgtgcctggcgctccagacctgggatcctcccggcggctctgcccagctctgcccgccttctt

SEQ ID NO: 42248 - DNA, 80 bp, synthetic construct; identical to SEQ ID NO: 14437
  source 1..80: mol_type = other DNA

SEQ ID NO: 42249 - DNA, 80 bp, synthetic construct
  source 1..80: mol_type = other DNA
atggaaagagcacaagcttttgaatttgataaactagattccaattaaactgtggcagtcaccagtttgggcaggttatg

SEQ ID NO: 42250 - DNA, 80 bp, synthetic construct
  source 1..80: mol_type = other DNA
tcctactaaattcagtccaccattaactcgggtctctgaatcccactcaagtcaccatttgcccataaatcagtgaaacc

SEQ ID NO: 42251 - DNA, 80 bp, synthetic construct
  source 1..80: mol_type = other DNA
atcctaagtccaggcagtcttggggcacgcctaaatgacaaatcctgctgtgtctttggagaaattcatatcttcaaaaa

SEQ ID NO: 42252 - DNA, 80 bp, synthetic construct; identical to SEQ ID NO: 14438
  source 1..80: mol_type = other DNA

SEQ ID NO: 42253 - DNA, 80 bp, synthetic construct
  source 1..80: mol_type = other DNA
taactgagacgaagggaaaagcagtggtagtcaacacagctcggacctgatggatctgatgtacctggcagaaagaataa

SEQ ID NO: 42254 - DNA, 80 bp, synthetic construct
  source 1..80: mol_type = other DNA
ctgaggtgaaaatttcctctcgattatagaagagctgaagaacgaatgcctcggggattttgagaggcaaaagaaaaaaa

SEQ ID NO: 42255 - DNA, 80 bp, synthetic construct
  source 1..80: mol_type = other DNA
ccttaagtcctggggagaagagcaaagttcttagaaggaaataatggtaagttgcagttccaccactaatgtgctttaga

SEQ ID NO: 42256 - DNA, 80 bp, synthetic construct; identical to SEQ ID NO: 14439
  source 1..80: mol_type = other DNA

SEQ ID NO: 42257 - DNA, 80 bp, synthetic construct
  source 1..80: mol_type = other DNA
agtattcggatgcagtcatgtttcgttttgaagagagagcacaaaacctgtggagaagcatttcctgggtcctgaatagt

SEQ ID NO: 42258 - DNA, 80 bp, synthetic construct
  source 1..80: mol_type = other DNA
ataacttatcaggctcctcttgacagtgactaggggcaatactaatggttataaagcaattagaacaacgcctggcaaac

SEQ ID NO: 42259 - DNA, 80 bp, synthetic construct
  source 1..80: mol_type = other DNA
gcaacagcaagacgtttgcaatagtggcacatgaaagcgttgagccactccaatattctgtattattcagtgcataattc

SEQ ID NO: 42260 - DNA, 80 bp, synthetic construct; identical to SEQ ID NO: 14440
  source 1..80: mol_type = other DNA

SEQ ID NO: 42261 - DNA, 80 bp, synthetic construct
  source 1..80: mol_type = other DNA
ttttcttttattcttgtctgttctgcctcactcccgagctctactgactcccaacagagcgcccaagaagaaaatggcca

SEQ ID NO: 42262 - DNA, 80 bp, synthetic construct
  source 1..80: mol_type = other DNA
gagtgaaagaatagtgtgacaggtattatgtggtctcgacagaaagtataacaaattgtggtttggtggagttcttccct

SEQ ID NO: 42263 - DNA, 80 bp, synthetic construct
  source 1..80: mol_type = other DNA
ggtgggggtgggggaggaagaatattttctggcaagcattaacaagttatatttctgggctttaattattctttctggaa

SEQ ID NO: 42264 - DNA, 80 bp, synthetic construct
  source 1..80: mol_type = other DNA
agattactagaaggaaaagtcatcaaaaagcaacaatttaccccaggaaaaggggagggaaggcatgctgatatgagttg

SEQ ID NO: 42265 - DNA, 80 bp, synthetic construct; identical to SEQ ID NO: 14441
  source 1..80: mol_type = other DNA

SEQ ID NO: 42266 - DNA, 80 bp, synthetic construct
  source 1..80: mol_type = other DNA
atcttcccttggtttgtgaagaggcagctagtatatttgtgtgtgtttgcatagatgcaaacggtaaataaattcctagg

SEQ ID NO: 42267 - DNA, 80 bp, synthetic construct
  source 1..80: mol_type = other DNA
attagctgggtatggtggcacacgcctgtagtcccagctactcgggaggctgaggcaggaggattgcttgaactcgggag

SEQ ID NO: 42268 - DNA, 80 bp, synthetic construct; identical to SEQ ID NO: 14442
  source 1..80: mol_type = other DNA

SEQ ID NO: 42269 - DNA, 80 bp, synthetic construct
  source 1..80: mol_type = other DNA
ttcagtccccaggtatattttccatagatttggcccttaaataaagagaagcttctgactctaaaatgtaaacagtgctt

SEQ ID NO: 42270 - DNA, 80 bp, synthetic construct
  source 1..80: mol_type = other DNA
caagatgtttttgatcccagagtttaaaacccaacctttcaaacagcgtttctttcttcttagagtacaatgttctgaga

SEQ ID NO: 42271 - DNA, 80 bp, synthetic construct
  source 1..80: mol_type = other DNA
atctccttcaatccaccctctttataaccagtccttcttgtttttcccctcccagctttgttcagcagcatgcccttcac

SEQ ID NO: 42272 - DNA, 80 bp, synthetic construct; identical to SEQ ID NO: 14443
  source 1..80: mol_type = other DNA

SEQ ID NO: 42273 - DNA, 80 bp, synthetic construct
  source 1..80: mol_type = other DNA
tggacatgggaatccatagtttgaaagtagttgcttcagctctttgtgttagattattgtaactgattttccctccaagg

SEQ ID NO: 42274 - DNA, 80 bp, synthetic construct
  source 1..80: mol_type = other DNA
tcttatacctcaatattggctcaatttcttggggagggggtgctgtcagagattgttatctgaggatgtgacatagattt

SEQ ID NO: 42275 - DNA, 80 bp, synthetic construct
  source 1..80: mol_type = other DNA
acaaacagccctgtggaactgagagagcccaacgtcctcatctgtttcatagacaagttcaccccaccagtggtcaatgt

SEQ ID NO: 42276 - DNA, 80 bp, synthetic construct; identical to SEQ ID NO: 14444
  source 1..80: mol_type = other DNA

SEQ ID NO: 42277 - DNA, 80 bp, synthetic construct
  source 1..80: mol_type = other DNA
tacatttgattctgagtgttacttcttcccacactcattaccatgtactctgccttatttccccccagagtttgatgctc

SEQ ID NO: 42278 - DNA, 80 bp, synthetic construct
  source 1..80: mol_type = other DNA
cagaggaagacgtatatggagatatctgagggaggaaaacagggtggggaaaggaaatgtaatgcatttaagagacaagg

SEQ ID NO: 42279 - DNA, 80 bp, synthetic construct
  source 1..80: mol_type = other DNA
gaatactgagtctagggatctagaaaatacattagaatatggagtctagggatctagaaaatactgagtctagggatcta

SEQ ID NO: 42280 - DNA, 80 bp, synthetic construct; identical to SEQ ID NO: 14445
  source 1..80: mol_type = other DNA

SEQ ID NO: 42281 - DNA, 80 bp, synthetic construct
  source 1..80: mol_type = other DNA
acttctgctttaatggctttacaaagctggcaatattacaatccttgacctcagtgaaagcagtcatcttcagcattttc

SEQ ID NO: 42282 - DNA, 80 bp, synthetic construct
  source 1..80: mol_type = other DNA
ctgctatggaatgccccatggggcatctcttgtgtacttattgtttaaggtttcctcaaactgtgatttttctgaacaca

SEQ ID NO: 42283 - DNA, 80 bp, synthetic construct
  source 1..80: mol_type = other DNA
ttccacaccacaagtctcatataaaatgagaaaatcatttcctcaacttaggaaatgaggcctatttgttgcaactctgt

SEQ ID NO: 42284 - DNA, 80 bp, synthetic construct
  source 1..80: mol_type = other DNA
taacagtcgtctctgacagtggagaaattatgctcaaatgattattaatttgaaatagacctctgaattatgtactttta

SEQ ID NO: 42285 - DNA, 80 bp, synthetic construct
  source 1..80: mol_type = other DNA
aaatattgtagacgagatgaagaaagagttctgattgacttgctggctggtttctcatctcatgtttgcccagtttgttt

SEQ ID NO: 42286 - DNA, 80 bp, synthetic construct
  source 1..80: mol_type = other DNA
catacgcattacctcacacactcatgacatatacatgaaaatcattattctattggaaaataatcttccctttttctttt

SEQ ID NO: 42287 - DNA, 80 bp, synthetic construct; identical to SEQ ID NO: 14446
  source 1..80: mol_type = other DNA

SEQ ID NO: 42288 - DNA, 80 bp, synthetic construct
  source 1..80: mol_type = other DNA
aataactgccaagcaggaaagcttttcatcctgcaaagccggggcagaaagttcttccttgaatgtggtcatctgcattt

SEQ ID NO: 42289 - DNA, 80 bp, synthetic construct
  source 1..80: mol_type = other DNA
cgcagagcacaccttttctaagtggagaggaggaattttggtgtaaattgcctgatcagaaatttggatccaaagtcttt

SEQ ID NO: 42290 - DNA, 80 bp, synthetic construct
  source 1..80: mol_type = other DNA
gcaagatttattgtgaagatcaaaagaacaaaacttccacagcagggaagaggacctgagtgggttgccactgctggttg

SEQ ID NO: 42291 - DNA, 80 bp, synthetic construct; identical to SEQ ID NO: 14447
  source 1..80: mol_type = other DNA

SEQ ID NO: 42292 - DNA, 80 bp, synthetic construct
  source 1..80: mol_type = other DNA
aaatacaaaaaattagccgggcgtagtggcgggcgcctgtagtcccagctacttgggaggctgaggcaggagaatggcgt

SEQ ID NO: 42293 - DNA, 80 bp, synthetic construct
  source 1..80: mol_type = other DNA
cagctggcttcacctctcactagggaaactgtgtctgtttctaaaagaggattaaaaggtattacctgttggctgaagtc

SEQ ID NO: 42294 - DNA, 80 bp, synthetic construct
  source 1..80: mol_type = other DNA
aggagcagaaacagaccatgtgacccatgaagcctgaagtgtctgtcacaggatccagtgtaattccattagccttagtg

SEQ ID NO: 42295 - DNA, 80 bp, synthetic construct; identical to SEQ ID NO: 14448
  source 1..80: mol_type = other DNA

SEQ ID NO: 42296 - DNA, 80 bp, synthetic construct
  source 1..80: mol_type = other DNA
tgctcctgagagaggaagccaggtttagtgatgtttattccaaattgaacctttttacttgagactctaagatttagagc

SEQ ID NO: 42297 - DNA, 80 bp, synthetic construct
  source 1..80: mol_type = other DNA
ccacagaaagcctgagactcaatgaggataagtagtttgtctagagtgacaaagctaataaaaagcagggctgagattgg

SEQ ID NO: 42298 - DNA, 80 bp, synthetic construct; identical to SEQ ID NO: 14449
  source 1..80: mol_type = other DNA

SEQ ID NO: 42299 - DNA, 80 bp, synthetic construct
  source 1..80: mol_type = other DNA
gagggcttgtcacgcttgggtgctccacttggcaggtgtaaacctctccacttcgaggaactgtttccagcatcaccagg

SEQ ID NO: 42300 - DNA, 80 bp, synthetic construct
  source 1..80: mol_type = other DNA
aaggatatacagtcaccttaggttggactaggagaaaaacaacgtagagggaatgagtcaggaagacagagtaagtctcc

SEQ ID NO: 42301 - DNA, 80 bp, synthetic construct
  source 1..80: mol_type = other DNA
cggcatgcattgtcaaactgtttacaaatcttggaaagtacagagtgtagtaattaaaactgatatttgagccaggttgc

SEQ ID NO: 42302 - DNA, 80 bp, synthetic construct; identical to SEQ ID NO: 14450
  source 1..80: mol_type = other DNA

SEQ ID NO: 42303 - DNA, 80 bp, synthetic construct
  source 1..80: mol_type = other DNA
cacaacagaaattgttctgcccctgggaaggtgggacagacagaaatgattctccaaatttttactttcctagaaaagca

SEQ ID NO: 42304 - DNA, 80 bp, synthetic construct
  source 1..80: mol_type = other DNA
tgtctgggactcgttacttggggtgcttatgcccaggaaaatccccgacactagcatactctcaataaatacaactattt

SEQ ID NO: 42305 - DNA, 80 bp, synthetic construct
  source 1..80: mol_type = other DNA
caaactggagcaaatgctggatcaaatatcaataaagtgttaataatcttatagtacaaagaacgcagaaagtcactgag

SEQ ID NO: 42306 - DNA, 80 bp, synthetic construct; identical to SEQ ID NO: 14451
  source 1..80: mol_type = other DNA

SEQ ID NO: 42307 - DNA, 80 bp, synthetic construct
  source 1..80: mol_type = other DNA
gatctaaagaagcttcagaggtgcctcagaggtctactcagttcctctagaaattaatctattgcttttacaaacaaaca

SEQ ID NO: 42308 - DNA, 80 bp, synthetic construct
  source 1..80: mol_type = other DNA
taaggaccgagataatcaaggtctcctctctctccagcccccagcacccacctcccttgtcacctccccacagaggtctc

SEQ ID NO: 42309 - DNA, 80 bp, synthetic construct
  source 1..80: mol_type = other DNA
ctctctgtctctctctgtctctctctcacacacacacacacacacacacacacacacacacacacactcagattcccagc

SEQ ID NO: 42310 - DNA, 80 bp, synthetic construct
  source 1..80: mol_type = other DNA
ccagctccgtcaccgcccggaactcccccacgtcgctgtcgaagcgcacggactcctcctggttatagaagtatctgtcc

SEQ ID NO: 42311 - DNA, 80 bp, synthetic construct; identical to SEQ ID NO: 14452
  source 1..80: mol_type = other DNA

SEQ ID NO: 42312 - DNA, 80 bp, synthetic construct
  source 1..80: mol_type = other DNA
acactctctgctcctctcatcccacacgctttaccggtaccttcaacagcacccaccgcgttcaccctgtgaacacttcc

SEQ ID NO: 42313 - DNA, 80 bp, synthetic construct
  source 1..80: mol_type = other DNA
tcagaagtgtggcgttctagagcagagaataatagaagattcccagttaaatttggatttccaataaattatggttgtgt

SEQ ID NO: 42314 - DNA, 80 bp, synthetic construct
  source 1..80: mol_type = other DNA
gaatgaaagtttctcctatacatcagaactagcagcccttgcatttctgtccccactctaagaaacagcctggtacatat

SEQ ID NO: 42315 - DNA, 80 bp, synthetic construct; identical to SEQ ID NO: 14453
  source 1..80: mol_type = other DNA

SEQ ID NO: 42316 - DNA, 80 bp, synthetic construct
  source 1..80: mol_type = other DNA
ttctgaagacatagggcagaaacactggtttatgtcaaataatgcagtatacctaaacctcacacaaaaagcatctgctg

SEQ ID NO: 42317 - DNA, 80 bp, synthetic construct
  source 1..80: mol_type = other DNA
attgaatactgaaattcataggcctgatacacagtcattgcaaaatgttacatggcatatagtgatggcgactggattca

SEQ ID NO: 42318 - DNA, 80 bp, synthetic construct
  source 1..80: mol_type = other DNA
tcgctaataatgactgagcatctctggttcacaggtcctcctccttctcttcagcttctttagccttttcctttaggttc

SEQ ID NO: 42319 - DNA, 80 bp, synthetic construct; identical to SEQ ID NO: 14454
  source 1..80: mol_type = other DNA

SEQ ID NO: 42320 - DNA, 80 bp, synthetic construct
  source 1..80: mol_type = other DNA
agccctggcctcaccatgagtctcttaaatgccattgaccttcggatttctccacataaatgtcaatcaatcatctcata

SEQ ID NO: 42321 - DNA, 80 bp, synthetic construct
  source 1..80: mol_type = other DNA
gctaagcaaaaatacatgccaagtctgtccactttatctttttcaccatctttatcactaatgcactccatgaagccaca

SEQ ID NO: 42322 - DNA, 80 bp, synthetic construct
  source 1..80: mol_type = other DNA
accatcctggctaacacggtgaaaccctatccctactaaaaatacaaaaaattagccaggtgtggtggcatgcgcctgtg

SEQ ID NO: 42323 - DNA, 80 bp, synthetic construct; identical to SEQ ID NO: 14455
  source 1..80: mol_type = other DNA

SEQ ID NO: 42324 - DNA, 80 bp, synthetic construct
  source 1..80: mol_type = other DNA
ctgaatgtcactttctcaggtggagctccctaacatatgaactaaagtaggtgaatccatgtctctctttttcacaaacc

SEQ ID NO: 42325 - DNA, 80 bp, synthetic construct
  source 1..80: mol_type = other DNA
agaatggagcccagtaaagagtagctgctgagaaaaataagtgtggtttacatgaataaaccagggtatgggaactgatc

SEQ ID NO: 42326 - DNA, 80 bp, synthetic construct
  source 1..80: mol_type = other DNA
cacagataaagaaacagtgatttaagaaaaaggaaatttttttattaagagtcatctcttttgcctgggcacagtgtctc

SEQ ID NO: 42327 - DNA, 80 bp, synthetic construct; identical to SEQ ID NO: 14456
  source 1..80: mol_type = other DNA

SEQ ID NO: 42328 - DNA, 80 bp, synthetic construct
  source 1..80: mol_type = other DNA
taaggaaagctgagggcatgatgggtgaacctaggaaatttaggacaagaccccagtaagacaatgagttcccaagactt

SEQ ID NO: 42329 - DNA, 80 bp, synthetic construct
  source 1..80: mol_type = other DNA
ctagttagagcacataggagatgcaagagaaacaagtacagaaaggttaaaaaagattcataatgaacacgaacctgggc

SEQ ID NO: 42330 - DNA, 80 bp, synthetic construct
  source 1..80: mol_type = other DNA
aacctacatacactacagggatacaggccttataaacattggagttcagcaagaaaagaaaggagataatggggaggcca

SEQ ID NO: 42331 - DNA, 80 bp, synthetic construct; identical to SEQ ID NO: 14457
  source 1..80: mol_type = other DNA

SEQ ID NO: 42332 - DNA, 80 bp, synthetic construct
  source 1..80: mol_type = other DNA
gatgggcaatctctgaagaaaacgtcacaatttcttaagggacatggcctgggcacaatgttaacaaaactccctatttt

SEQ ID NO: 42333 - DNA, 80 bp, synthetic construct
  source 1..80: mol_type = other DNA
ccaggggccagagaagcaggcaagtctcactcagggagaactatgaacccctccacccacattccaagttatagggagga

SEQ ID NO: 42334 - DNA, 80 bp, synthetic construct; identical to SEQ ID NO: 14458
  source 1..80: mol_type = other DNA

SEQ ID NO: 42335 - DNA, 80 bp, synthetic construct
  source 1..80: mol_type = other DNA
agagaatccagtatgcaatggatgtcgcacacaagagagagagacgcaggtgaccggagccatttacactaatgggtaaa

SEQ ID NO: 42336 - DNA, 80 bp, synthetic construct
  source 1..80: mol_type = other DNA
cctgcgttttccctcacgctccgattctgcttcctatcactgcctcctactgtactatcacagccaggacgagcacgggt

SEQ ID NO: 42337 - DNA, 80 bp, synthetic construct; identical to SEQ ID NO: 14459
  source 1..80: mol_type = other DNA

SEQ ID NO: 42338 - DNA, 80 bp, synthetic construct
  source 1..80: mol_type = other DNA
gggtttgggctgtgttggtggcaattctggagcttccctcggccctgggaagtggctaccggcagctcctgcggacctgg

SEQ ID NO: 42339 - DNA, 80 bp, synthetic construct
  source 1..80: mol_type = other DNA
tcgtgactgcggtcatcatcggtggacccgcggggcgtagctgcgttcatcgtccctgttcagtcagagtaggcagtgct

SEQ ID NO: 42340 - DNA, 80 bp, synthetic construct
  source 1..80: mol_type = other DNA
cccaggaactgctgttcgttagcacctttcttttaggtgacgggaaagatctctgtaaatactgctgactaacttagaac

SEQ ID NO: 42341 - DNA, 80 bp, synthetic construct
  source 1..80: mol_type = other DNA
gctgatattcttttaggaaaaatgtaccttggagatacaaatatagaacagttaatttctgcagtaggaggaggtcgatg

SEQ ID NO: 42342 - DNA, 80 bp, synthetic construct
  source 1..80: mol_type = other DNA
tcggcgtcccacaaggtagagaatgtactttttgtttacttatgaatttattttcctctccatgcagtgaaaggcatttt

SEQ ID NO: 42343 - DNA, 80 bp, synthetic construct; identical to SEQ ID NO: 14460
  source 1..80: mol_type = other DNA

SEQ ID NO: 42344 - DNA, 80 bp, synthetic construct
  source 1..80: mol_type = other DNA
tacaaaaatagcagtttcatatgattccatttaacacttatctttgtcagagaactttggagctctagcttcataagtga

SEQ ID NO: 42345 - DNA, 80 bp, synthetic construct
  source 1..80: mol_type = other DNA
ctttctggaataccagcttgagcagcagaatgctagatcttgttgggattgaaaatgactgccatataagacgcagttct

SEQ ID NO: 42346 - DNA, 80 bp, synthetic construct; identical to SEQ ID NO: 14461
  source 1..80: mol_type = other DNA

SEQ ID NO: 42347 - DNA, 80 bp, synthetic construct
  source 1..80: mol_type = other DNA
gtcaggagatcgagaccatcccggctaaaacggtgaaaccccgtctctactaaaaatacaaaaaattagccgggcgtagt

SEQ ID NO: 42348 - DNA, 80 bp, synthetic construct
  source 1..80: mol_type = other DNA
ttttattgcagcattgcataaatactgtcaacttaatttgcaggagctatcctgtagcctgcttgtgacatttgcaactg

SEQ ID NO: 42349 - DNA, 80 bp, synthetic construct
  source 1..80: mol_type = other DNA
ctctgtgtttaggggcggctgacagaatcatgtgtaatttttttccttgaatattgcaaagatgactttacacctaggaa

SEQ ID NO: 42350 - DNA, 80 bp, synthetic construct; identical to SEQ ID NO: 14462
  source 1..80: mol_type = other DNA

SEQ ID NO: 42351 - DNA, 80 bp, synthetic construct
  source 1..80: mol_type = other DNA
aataccatgatgaaaatctagccttttagtgagtgagtcttttgtttataattaagtagagttcaaatctaagatttgat

SEQ ID NO: 42352 - DNA, 80 bp, synthetic construct
  source 1..80: mol_type = other DNA
ctgacactcaaagaaaatgctcattgcagcatttggagtttggattttggattagggatgctaagctaataaatgtaatg

SEQ ID NO: 42353 - DNA, 80 bp, synthetic construct
  source 1..80: mol_type = other DNA
tgggttacatccatatctaggtgccttaaaaaaaagtcgtctttaggtctgtttcaagatgtgtcataaaatacatgcta

SEQ ID NO: 42354 - DNA, 80 bp, synthetic construct
  source 1..80: mol_type = other DNA
ccagctttttaaaactgtgacccacagtaggaaatacacgttaatttaaaagccagacacacacttatataggtatagtt

SEQ ID NO: 42355 - DNA, 80 bp, synthetic construct; identical to SEQ ID NO: 14463
  source 1..80: mol_type = other DNA

SEQ ID NO: 42356 - DNA, 80 bp, synthetic construct
  source 1..80: mol_type = other DNA
agattcatttgaattcttgctagagtggcagttaatgagctttttaaatctttttggttgatttttgcaggttactaata

SEQ ID NO: 42357 - DNA, 80 bp, synthetic construct
  source 1..80: mol_type = other DNA
ctatatgttcttttgggaatttttttgaatgctatatacagatacttcagccagtcatcctcttctagtactgttccagc

SEQ ID NO: 42358 - DNA, 80 bp, synthetic construct
  source 1..80: mol_type = other DNA
ttttctgttgacagcaatgttaggaaggtttattaaacatccttttgctagtgacattatgccatatgttctatggaatg

SEQ ID NO: 42359 - DNA, 80 bp, synthetic construct; identical to SEQ ID NO: 14464
  source 1..80: mol_type = other DNA

SEQ ID NO: 42360 - DNA, 80 bp, synthetic construct
  source 1..80: mol_type = other DNA
aacagtatcaaatagtcatatgtatgggacactgtgcatacaaagcagggtttatagcacacttttccttaaaatctttt

SEQ ID NO: 42361 - DNA, 80 bp, synthetic construct
  source 1..80: mol_type = other DNA
catctgcatgatgtccatgaacatgtttactggtaacaataagatctgtggttggaattatgaatgtccaaagtttgaag

SEQ ID NO: 42362 - DNA, 80 bp, synthetic construct; identical to SEQ ID NO: 14465
  source 1..80: mol_type = other DNA

SEQ ID NO: 42363 - DNA, 80 bp, synthetic construct
  source 1..80: mol_type = other DNA
aacctggacaacatagtaagacccagtctttaaaaaaaaattaaaggccgggcacggtggctcatgtctgtaatcccagc

SEQ ID NO: 42364 - DNA, 80 bp, synthetic construct
  source 1..80: mol_type = other DNA
aatggcgtgaacccaggaggcagagcttgcagcgagccgagatcgcgccactgcactccagcctgtgtgacagagcgaga

SEQ ID NO: 42365 - DNA, 80 bp, synthetic construct
  source 1..80: mol_type = other DNA
ttaccctgtctcaaaaaaaaaaaaattgtggtgatgtattggcttaccacagtggtttgattaaaagttggatttaattt

SEQ ID NO: 42366 - DNA, 80 bp, synthetic construct; identical to SEQ ID NO: 14466
  source 1..80: mol_type = other DNA

SEQ ID NO: 42367 - DNA, 80 bp, synthetic construct
  source 1..80: mol_type = other DNA
atttgctgtggaaataaacctgttcattcaaatcatgtatttggaaatatgtgtattgctgaaagtgtgctgcatgcatt

SEQ ID NO: 42368 - DNA, 80 bp, synthetic construct
  source 1..80: mol_type = other DNA
tgctggccttttcacaattttctcaagttttgtattcagtacagttgtcattcacttcttagacaaagaattgacaggct

SEQ ID NO: 42369 - DNA, 80 bp, synthetic construct
  source 1..80: mol_type = other DNA
tttggcatatatccttttctactgtttttatacttaaagaaaatatctgatatcatatatattgttttataatttcttta

SEQ ID NO: 42370 - DNA, 80 bp, synthetic construct
  source 1..80: mol_type = other DNA
agtagctgggattacaggcacctgccaccatgcccatttaatttgtgtatttttggtagagactgtgtttcgccatgttg

SEQ ID NO: 42371 - DNA, 80 bp, synthetic construct; identical to SEQ ID NO: 14467
  source 1..80: mol_type = other DNA

SEQ ID NO: 42372 - DNA, 80 bp, synthetic construct
  source 1..80: mol_type = other DNA
ttatccttccacaggtagtgatcaatgaaaatttttatatattccactttttttccctaatggtaatccaaggagatatt

SEQ ID NO: 42373 - DNA, 80 bp, synthetic construct
  source 1..80: mol_type = other DNA
gcagaaaggtacacatactacaggatcatacagtatggagggggaaaggttttgttctaaaaagaatttttttaaaatca

SEQ ID NO: 42374 - DNA, 80 bp, synthetic construct
  source 1..80: mol_type = other DNA
atagtattccttttttcagtttacattaataggaaggattaatagcgtttcttcatagcacaagatttaagaattgccca

SEQ ID NO: 42375 - DNA, 80 bp, synthetic construct; identical to SEQ ID NO: 14468
  source 1..80: mol_type = other DNA

SEQ ID NO: 42376 - DNA, 80 bp, synthetic construct
  source 1..80: mol_type = other DNA
atccccggctaatttttgtgttttcagtagagacggagttttgccatgttggccagactggtctttaatttctgacctca

SEQ ID NO: 42377 - DNA, 80 bp, synthetic construct
  source 1..80: mol_type = other DNA
ttttaacaatattatatcagagtatcttgagtataaaatagcacacaattctgccctgattatttgttgatgaaagtgtg

SEQ ID NO: 42378 - DNA, 80 bp, synthetic construct; identical to SEQ ID NO: 14469
  source 1..80: mol_type = other DNA

SEQ ID NO: 42379 - DNA, 80 bp, synthetic construct
  source 1..80: mol_type = other DNA
tcccagctactcgggaggctgaggcaggagaattgcttgaacccaggaggcagaggttgcagtgaaccaagatcacacca

SEQ ID NO: 42380 - DNA, 80 bp, synthetic construct
  source 1..80: mol_type = other DNA
aagccataggatgctctaacatttaaaaaagttgttctgtcccttgccttcattgatatgtttgatctgttttaggatga

SEQ ID NO: 42381 - DNA, 80 bp, synthetic construct
  source 1..80: mol_type = other DNA
agtaagggaaaatattgctcgtggaatggcaattttaggtcctacgtttaccctcgatgctcttgttgaatgtcttgtga

SEQ ID NO: 42382 - DNA, 80 bp, synthetic construct; identical to SEQ ID NO: 14470
  source 1..80: mol_type = other DNA

SEQ ID NO: 42383 - DNA, 80 bp, synthetic construct
  source 1..80: mol_type = other DNA
ggtgacttggttctttgtgttttaattatcatgtagggagaaaagagtcaggaattggacagatctgagtaagattcacc

SEQ ID NO: 42384 - DNA, 80 bp, synthetic construct
  source 1..80: mol_type = other DNA
gactggcatggaaatttgccagaaggaatatattacgctgtgtgaaggtctcctaatcattaggattatattttatggct

SEQ ID NO: 42385 - DNA, 80 bp, synthetic construct
  source 1..80: mol_type = other DNA
cattagtttaggcctcttcagtagatagtatattaaaaatgtaatattgcttctaactttctgagagcaaattattattt

SEQ ID NO: 42386 - DNA, 80 bp, synthetic construct; identical to SEQ ID NO: 14471
  source 1..80: mol_type = other DNA

SEQ ID NO: 42387 - DNA, 80 bp, synthetic construct
  source 1..80: mol_type = other DNA
agacagtgagacatttacagctatacagaaatggtataattagagatttgggttacggtaaaaaaggacagatttaacac

SEQ ID NO: 42388 - DNA, 80 bp, synthetic construct
  source 1..80: mol_type = other DNA
agtgaatattgtgcagagagaaatagtagatagtcaagtcatgaaagcattggtcaagtatggttttaatggcctcaagt

SEQ ID NO: 42389 - DNA, 80 bp, synthetic construct
  source 1..80: mol_type = other DNA
aatttaggtaataaaatacaactttgagtttttgtgagcagtttttataggacaatttaaatttatgtttcaaagcattg

SEQ ID NO: 42390 - DNA, 80 bp, synthetic construct; identical to SEQ ID NO: 14472
  source 1..80: mol_type = other DNA

SEQ ID NO: 42391 - DNA, 80 bp, synthetic construct
  source 1..80: mol_type = other DNA
aggttatattgaaattagagtttgttggtacacaaaaaatattattttgaccttatatcaggactggcataactggcagg

SEQ ID NO: 42392 - DNA, 80 bp, synthetic construct
  source 1..80: mol_type = other DNA
gaaacacatatgttttatcaattgtgtattaaacactaccattctgcctggcattgtgatatggggacatgagagaaggc

SEQ ID NO: 42393 - DNA, 80 bp, synthetic construct
  source 1..80: mol_type = other DNA
atccttgtgatatatgcagcataaaaaataacgtagactttactagttgtatctttaatttttctctaaccaggggtacg

SEQ ID NO: 42394 - DNA, 80 bp, synthetic construct; identical to SEQ ID NO: 14473
  source 1..80: mol_type = other DNA

SEQ ID NO: 42395 - DNA, 80 bp, synthetic construct
  source 1..80: mol_type = other DNA
acaattttggcccattcaatgatattgcacccccttcttcctttttttcttaatgtgttcatttctttgaggctcctggt

SEQ ID NO: 42396 - DNA, 80 bp, synthetic construct
  source 1..80: mol_type = other DNA
agctatgagagataatgtctggctgtccagttgctagggataagaaatttaagttctattgatatgcagaggatacatta

SEQ ID NO: 42397 - DNA, 80 bp, synthetic construct
  source 1..80: mol_type = other DNA
ctggcagttttatctctctaagtaagttaattgaaatctactttgtgatatattaatcataacactctatgctaatgtaa

SEQ ID NO: 42398 - DNA, 80 bp, synthetic construct
  source 1..80: mol_type = other DNA
tctcattaaaaaaccctatcacatctcctgtagtgacacaaaagaaagtcccagacaattgttgtagacgtgaacctatg

SEQ ID NO: 42399 - DNA, 80 bp, synthetic construct; identical to SEQ ID NO: 14474
  source 1..80: mol_type = other DNA

SEQ ID NO: 42400 - DNA, 80 bp, synthetic construct
  source 1..80: mol_type = other DNA
ggagctttttcaaggaagaaaaatctagtatctgctgaacactacagctaagttctgggcacggtgtaacatgactaaca

SEQ ID NO: 42401 - DNA, 80 bp, synthetic construct
  source 1..80: mol_type = other DNA
gagtcaaaactctttctagtttattactgtttatcatagagatgagtgactactgtattctcataggtgtgttgaggcct

SEQ ID NO: 42402 - DNA, 80 bp, synthetic construct; identical to SEQ ID NO: 14475
  source 1..80: mol_type = other DNA

SEQ ID NO: 42403 - DNA, 80 bp, synthetic construct
  source 1..80: mol_type = other DNA
cagtggcaccatcttggctcacagcaacctccacctcccaggttcaagcgattcttgtgtatcagcctcccgagtagctg

SEQ ID NO: 42404 - DNA, 80 bp, synthetic construct
  source 1..80: mol_type = other DNA
gcccggcctgcattcttcaatcatatgctttttagctaaacttagtcattgttctttaaatacagttcccaactctgggt

SEQ ID NO: 42405 - DNA, 80 bp, synthetic construct
  source 1..80: mol_type = other DNA
gtcgtaccttgttgcttatatcacatttacatgaatatctccattattagacatcgggctcttagatggctaagtccatg

SEQ ID NO: 42406 - DNA, 80 bp, synthetic construct; identical to SEQ ID NO: 14476
  source 1..80: mol_type = other DNA

SEQ ID NO: 42407 - DNA, 80 bp, synthetic construct
  source 1..80: mol_type = other DNA
tattgtcaggaaaaaagtacatatggctcttaaaaatgtgaaaaggtgattaacttcatcctaagagaaatgcaaattaa

SEQ ID NO: 42408 - DNA, 80 bp, synthetic construct
  source 1..80: mol_type = other DNA
aggctggagtgcaatggcatgatcttggctcaccgcaacctctgcctcctgggttcaattgattctcctgcctcagcctc

SEQ ID NO: 42409 - DNA, 80 bp, synthetic construct
  source 1..80: mol_type = other DNA
gccactgcccccaggctggaaaggtcttttcttacattggtggtgagaaggcaattggaccgtgtttattcaaattaata

SEQ ID NO: 42410 - DNA, 80 bp, synthetic construct; identical to SEQ ID NO: 14477
  source 1..80: mol_type = other DNA

SEQ ID NO: 42411 - DNA, 80 bp, synthetic construct
  source 1..80: mol_type = other DNA
agcctgtctttgtattgtaaaatctaatgatacggtatttatattatttttgtttggcattttttgcattaaatgaatta

SEQ ID NO: 42412 - DNA, 80 bp, synthetic construct
  source 1..80: mol_type = other DNA
ctccatttctttagaaaggtgcaaaattccttagtgatgctgagatcatccagttagtcaatgctaagcatatcccagcc

SEQ ID NO: 42413 - DNA, 80 bp, synthetic construct
  source 1..80: mol_type = other DNA
tatgtacatagttttataaaacattttccttttaaatcattttatcctaattttttattctgcttatgatgtaggtcata

SEQ ID NO: 42414 - DNA, 80 bp, synthetic construct; identical to SEQ ID NO: 14478
  source 1..80: mol_type = other DNA

SEQ ID NO: 42415 - DNA, 80 bp, synthetic construct
  source 1..80: mol_type = other DNA
atacatcataagtaaggcaatgagaagagttttaaggacaattagtgataccttttgggtcaagcatgagcatttttggg

SEQ ID NO: 42416 - DNA, 80 bp, synthetic construct
  source 1..80: mol_type = other DNA
cagtgataaaggaggcatttgacagcactagcaggtgtgtgagtggatttgtatgtacagttatatctatttgtttattt

SEQ ID NO: 42417 - DNA, 80 bp, synthetic construct
  source 1..80: mol_type = other DNA
tggttggggggaaaaaaagaatgttgattcaaatgaatagctccacagaggtaaattagtaagaaaaaaaaaaaagtgtg

SEQ ID NO: 42418 - DNA, 80 bp, synthetic construct; identical to SEQ ID NO: 14479
  source 1..80: mol_type = other DNA

SEQ ID NO: 42419 - DNA, 80 bp, synthetic construct
  source 1..80: mol_type = other DNA
gcgaaaccctgtctctactcaaaatacaaaaattggctgggcatggtggcccgcgcctgtaatcccagctactcgggagg

SEQ ID NO: 42420 - DNA, 80 bp, synthetic construct
  source 1..80: mol_type = other DNA
tcttttatttatagatttgcacgtctacagaaacttcatacaagtatagctggacgcaacctttatatccgtttccagtc

SEQ ID NO: 42421 - DNA, 80 bp, synthetic construct
  source 1..80: mol_type = other DNA
cattacacatatcctgagtttacttaggactgggaacaatcttagtattgacatttcaaaactttatccagtcaagagac

SEQ ID NO: 42422 - DNA, 80 bp, synthetic construct; identical to SEQ ID NO: 14480
  source 1..80: mol_type = other DNA

SEQ ID NO: 42423 - DNA, 80 bp, synthetic construct
  source 1..80: mol_type = other DNA
aaacctatcaaaagtcaaggagcatctgtataagctttaaaattgccaataaacagtatggcagttcaacaacttaaaca

SEQ ID NO: 42424 - DNA, 80 bp, synthetic construct
  source 1..80: mol_type = other DNA
acaacaaattagatgtatttgtatgtgtgtgtatgtatatgtctatataaaatggaatattattcagcattaaaaaggaa

SEQ ID NO: 42425 - DNA, 80 bp, synthetic construct
  source 1..80: mol_type = other DNA
gggtttggggaaggggaaaatgggtggttgttatttagtaagtacagagtttttgttttgtgagatgaaaagagttctgg

SEQ ID NO: 42426 - DNA, 80 bp, synthetic construct
  source 1..80: mol_type = other DNA
actaacacaggaacagaaaaccaaacaccacaccttttcacttgtaagtgggaattgaacaatgagaacacatggacaca

SEQ ID NO: 42427 - DNA, 80 bp, synthetic construct; identical to SEQ ID NO: 14481
  source 1..80: mol_type = other DNA

SEQ ID NO: 42428 - DNA, 80 bp, synthetic construct
  source 1..80: mol_type = other DNA
atgtaatataaagctcaacgacataagagtcgaatcacaagatcaactcttatgacccacttctctttacagacttcatt

SEQ ID NO: 42429 - DNA, 80 bp, synthetic construct
  source 1..80: mol_type = other DNA
ccgagaaagaaacacattaggaatttatacctgaccaagaaagtaattgtgatggttaacaaaacagctgttacttttgt

SEQ ID NO: 42430 - DNA, 80 bp, synthetic construct
  source 1..80: mol_type = other DNA
gtatttccctgaaatgcagattctagccgttagtggtaactattgtactgacaagaaacctgctgctataaattggatag

SEQ ID NO: 42431 - DNA, 80 bp, synthetic construct; identical to SEQ ID NO: 14482
  source 1..80: mol_type = other DNA

SEQ ID NO: 42432 - DNA, 80 bp, synthetic construct
  source 1..80: mol_type = other DNA
ggtattaaagactaccacagaggctatgattgaggtcaacattaacaagaatttagtgggctctgccatggctgggagca

SEQ ID NO: 42433 - DNA, 80 bp, synthetic construct
  source 1..80: mol_type = other DNA
gaatgttggtagttcaaactgtattactttaatggaagcaagtggtcccacaaatgaagatttatatatcagctgcacca

SEQ ID NO: 42434 - DNA, 80 bp, synthetic construct
  source 1..80: mol_type = other DNA
tctctttctatctgagactatgtatcactcacctctattttaattggtcttttccaaactcttttgtcatatcagcctaa

SEQ ID NO: 42435 - DNA, 80 bp, synthetic construct; identical to SEQ ID NO: 14483
  source 1..80: mol_type = other DNA

SEQ ID NO: 42436 - DNA, 80 bp, synthetic construct
  source 1..80: mol_type = other DNA
ggcagcattggcagcaggacatcttgtcaaaagtcacatgattcacaacaggtaagactcaaagatatatttaacatgtt

SEQ ID NO: 42437 - DNA, 80 bp, synthetic construct
  source 1..80: mol_type = other DNA
agaagacagcctgaatagcccgacagttctgaactggaacatgggcattgggttctaaaggactaacataaaatctgtga

SEQ ID NO: 42438 - DNA, 80 bp, synthetic construct
  source 1..80: mol_type = other DNA
attaaaaaagctcaatgcattgtcttgtggaggatgaatagatgtgatcactgagacagccacttggtttttggctcttt

SEQ ID NO: 42439 - DNA, 80 bp, synthetic construct; identical to SEQ ID NO: 14484
  source 1..80: mol_type = other DNA

SEQ ID NO: 42440 - DNA, 80 bp, synthetic construct
  source 1..80: mol_type = other DNA
aatcagcattattcttcagaaggggacctgttttcttcaagggaagaaacactcttattcccaaactacagaataatgtg

SEQ ID NO: 42441 - DNA, 80 bp, synthetic construct
  source 1..80: mol_type = other DNA
acagggttttgtattctttactaaagatatcagagctcttaatgttgcttagatgagggtgactgtcaagtacaagcaag

SEQ ID NO: 42442 - DNA, 80 bp, synthetic construct
  source 1..80: mol_type = other DNA
ctagtttattggaagtgttcaagaaataaaaatcaacttgtgtactgataaaatactctagcctgggccagagaagataa

SEQ ID NO: 42443 - DNA, 80 bp, synthetic construct; identical to SEQ ID NO: 14485
  source 1..80: mol_type = other DNA

SEQ ID NO: 42444 - DNA, 80 bp, synthetic construct
  source 1..80: mol_type = other DNA
ttgttattgtggaagatttaccttttctgttgtacgtaaagcttaaattgcttttgttgtgactttttagccagtgactt

SEQ ID NO: 42445 - DNA, 80 bp, synthetic construct
  source 1..80: mol_type = other DNA
aagttaataccaataagtgtaagcagtaaccttttttctttggattaaccctagccctgaggtctggaagcttgtaaagt

SEQ ID NO: 42446 - DNA, 80 bp, synthetic construct; identical to SEQ ID NO: 14486
  source 1..80: mol_type = other DNA

SEQ ID NO: 42447 - DNA, 80 bp, synthetic construct
  source 1..80: mol_type = other DNA
gtaaaaaggtatgtgtgagcactaagaaagaaccaaggcccagatactagagaatcagtttgagtttttctctgaaatga

SEQ ID NO: 42448 - DNA, 80 bp, synthetic construct
  source 1..80: mol_type = other DNA
aatctaaggggcacatctcacactgaagagcaaaacacatcaataccaatctcctgagcattatgttcattgtggagatt

SEQ ID NO: 42449 - DNA, 80 bp, synthetic construct
  source 1..80: mol_type = other DNA
ggcagatgatttagtttacaattatatatttaaagcttaacggattgcttttttcattttggtgtgcttggaacacagcc

SEQ ID NO: 42450 - DNA, 80 bp, synthetic construct
  source 1..80: mol_type = other DNA
aagaagagcctcacactaacagctggagttaggaggctgaatgcaaaagatggctttaatactgcggctctcaaatgagt

SEQ ID NO: 42451 - DNA, 80 bp, synthetic construct; identical to SEQ ID NO: 14487
  source 1..80: mol_type = other DNA

SEQ ID NO: 42452 - DNA, 80 bp, synthetic construct
  source 1..80: mol_type = other DNA
ttgccatcacctattccgtttaccctcctgtttgttccctgcactctgctgcaaagggccaaatagggggaaaaattgag

SEQ ID NO: 42453 - DNA, 80 bp, synthetic construct
  source 1..80: mol_type = other DNA
cagggagcataaaagtaggagggccttgtgccagctgctaagcatacaaggtgtgtatgtgtgtgcgcgccagctaacta

SEQ ID NO: 42454 - DNA, 80 bp, synthetic construct
  source 1..80: mol_type = other DNA
ttcatttttgagtctactttatttacagttatttatcctttcttgaaaacttttagcatcgccttgattaaaataagttc

SEQ ID NO: 42455 - DNA, 80 bp, synthetic construct
  source 1..80: mol_type = other DNA
agttcaatttggctacggtagcactttaaaaaattaccatgagatggcgctgtggccaagtaaatgcagtatgctttaaa

SEQ ID NO: 42456 - DNA, 80 bp, synthetic construct; identical to SEQ ID NO: 14488
  source 1..80: mol_type = other DNA

SEQ ID NO: 42457 - DNA, 80 bp, synthetic construct
  source 1..80: mol_type = other DNA
aaatattagaacatgaattcacatttaaataaacatgatacaaacatgcacacatgtgtatatactgagtgttttcattg

SEQ ID NO: 42458 - DNA, 80 bp, synthetic construct
  source 1..80: mol_type = other DNA
aagacatctatcaggcaacattaatgtacattctgatcaagattgagtatatgggggtagaatctgtaatcttttcccta

SEQ ID NO: 42459 - DNA, 80 bp, synthetic construct; identical to SEQ ID NO: 14489
  source 1..80: mol_type = other DNA

SEQ ID NO: 42460 - DNA, 80 bp, synthetic construct
  source 1..80: mol_type = other DNA
caacatgcaatttaaccttgagtgttataatatcaaggtggattaactgttgttaatctctttttctctttagtaaccat

SEQ ID NO: 42461 - DNA, 80 bp, synthetic construct
  source 1..80: mol_type = other DNA
ttgcaatgttaagcctcaagtgatattttccccctcctttatttgtttggtgtttattggtaaccaatcaggaaaactta

SEQ ID NO: 42462 - DNA, 80 bp, synthetic construct; identical to SEQ ID NO: 14490
  source 1..80: mol_type = other DNA

SEQ ID NO: 42463 - DNA, 80 bp, synthetic construct
  source 1..80: mol_type = other DNA
ttttatatttctcatatctagaaatttgcttcacacataaatgtacactcaatagatgattgtggaaccaagcagaatgg

SEQ ID NO: 42464 - DNA, 80 bp, synthetic construct
  source 1..80: mol_type = other DNA
atacatttactgctcaaaagagtgcatgcatgatgcagtcatttcacagcaagttaccaaatacctcgatagtgctgttt

SEQ ID NO: 42465 - DNA, 80 bp, synthetic construct
  source 1..80: mol_type = other DNA
ctttttcacttctgagaattaacttgaaatgcagcaaatgccagcaaccttgtgaatatttcaaaatggtatctatgaaa

SEQ ID NO: 42466 - DNA, 80 bp, synthetic construct
  source 1..80: mol_type = other DNA
ttcactatttatagctatttttatttacagcaataggtaaccaactcaatcccatgtcatcaatgaacagcatagcagca

SEQ ID NO: 42467 - DNA, 80 bp, synthetic construct; identical to SEQ ID NO: 14491
  source 1..80: mol_type = other DNA

SEQ ID NO: 42468 - DNA, 80 bp, synthetic construct
  source 1..80: mol_type = other DNA
tcctagagcaaccattgagcagtcattatctgttgtcttggcatcttgctttgaattctttttttgtcccatttgaagtt

SEQ ID NO: 42469 - DNA, 80 bp, synthetic construct
  source 1..80: mol_type = other DNA
accgatccaaacaaacacattgagcagggccccaatgacatcctcattgcaggactctttgcagatgacggccatgatgt

SEQ ID NO: 42470 - DNA, 80 bp, synthetic construct; identical to SEQ ID NO: 14492
  source 1..80: mol_type = other DNA

SEQ ID NO: 42471 - DNA, 80 bp, synthetic construct
  source 1..80: mol_type = other DNA
tggcatggatatacctggagttgaacagaaaatgaaacatgattattaaggaattaagtatatgaaggcaagagcatcat

SEQ ID NO: 42472 - DNA, 80 bp, synthetic construct
  source 1..80: mol_type = other DNA
aagtataataaatctagctttattttttatgccacatttttctgattataatattatacttattaattgaagaaacacac

SEQ ID NO: 42473 - DNA, 80 bp, synthetic construct
  source 1..80: mol_type = other DNA
ttagatacattcacacacttaccatgtgcacacattttaaaacagaattgaggttctttttcacaaatagttctgtatct

SEQ ID NO: 42474 - DNA, 80 bp, synthetic construct
  source 1..80: mol_type = other DNA
ccataatttacatttgcatcatttcttcttccacttacatgtacatataaaagcaaatgtgtatatgcagtactttacat

SEQ ID NO: 42475 - DNA, 80 bp, synthetic construct; identical to SEQ ID NO: 14493
  source 1..80: mol_type = other DNA

SEQ ID NO: 42476 - DNA, 80 bp, synthetic construct
  source 1..80: mol_type = other DNA
agccatgcactcttagacaaacctaatattttcacaataccattctcactcctaaatagaagtttaatatttccttaata

SEQ ID NO: 42477 - DNA, 80 bp, synthetic construct
  source 1..80: mol_type = other DNA
gacaaatataaaaagtaggtataggatgagataatacaggggaacatgggcctatatggttcattgctccatcacccaga

SEQ ID NO: 42478 - DNA, 80 bp, synthetic construct
  source 1..80: mol_type = other DNA
aaataggtgtatctttctctactggcctgggatggttggtccaaggcaatcatgagatggcttattctctctgccataaa

SEQ ID NO: 42479 - DNA, 80 bp, synthetic construct; identical to SEQ ID NO: 14494
  source 1..80: mol_type = other DNA

SEQ ID NO: 42480 - DNA, 80 bp, synthetic construct
  source 1..80: mol_type = other DNA
cacctcacattggccatcgtggccaggaaagaacgctgagttgatgtaatattcaacacaaatctttcttagtgacattt

SEQ ID NO: 42481 - DNA, 80 bp, synthetic construct
  source 1..80: mol_type = other DNA
ctaatgactcttcatttcctccatccctctctgttcctggcccattgtttgcaacattcaagaagagattgatgagctgt

SEQ ID NO: 42482 - DNA, 80 bp, synthetic construct; identical to SEQ ID NO: 14495
  source 1..80: mol_type = other DNA

SEQ ID NO: 42483 - DNA, 80 bp, synthetic construct
  source 1..80: mol_type = other DNA
tggatcaaatttgcagagcacctagcacagcacccagtccatagtgatgttctaccagtggtcaataaacatgagagtag

SEQ ID NO: 42484 - DNA, 80 bp, synthetic construct
  source 1..80: mol_type = other DNA
attttagcttctgccagggtgacgccgggtcttaatcaattttaattttgtgcagctagaactgttgattactttcctaa

SEQ ID NO: 42485 - DNA, 80 bp, synthetic construct
  source 1..80: mol_type = other DNA
taacctagtaatgtacataagtggcaattctcaattaaccagaatgtgggcttacctaaaatgccaaattctttaattat

SEQ ID NO: 42486 - DNA, 80 bp, synthetic construct; identical to SEQ ID NO: 14496
  source 1..80: mol_type = other DNA

SEQ ID NO: 42487 - DNA, 80 bp, synthetic construct
  source 1..80: mol_type = other DNA
gagaggaaattttatgtcaaaaaacttagaacacatagataggctttgtgggtacaatcagcagctcaaaagcatgtgcc

SEQ ID NO: 42488 - DNA, 80 bp, synthetic construct
  source 1..80: mol_type = other DNA
tgaacaaaacagacagtaacctgaattacatgactctgcattttgtttaatatattttttctgaagagtggaaaacagca

SEQ ID NO: 42489 - DNA, 80 bp, synthetic construct
  source 1..80: mol_type = other DNA
aactttgcacctctagttaacatcttaccacaggctgcatcaataattcactttgaaccgctggctgtgaaggactggct

SEQ ID NO: 42490 - DNA, 80 bp, synthetic construct
  source 1..80: mol_type = other DNA
ctcttgtgaaaaagattgaaatttgggttcataggtttctgtttccccaaactgctaccttttctttgaattttaatgca

SEQ ID NO: 42491 - DNA, 80 bp, synthetic construct; identical to SEQ ID NO: 14497
  source 1..80: mol_type = other DNA

SEQ ID NO: 42492 - DNA, 80 bp, synthetic construct
  source 1..80: mol_type = other DNA
tctcactttacagatatgaaaacttgggcctaccaagcttaagtaatttagttagaatcacacagaaagttgggggcaaa

SEQ ID NO: 42493 - DNA, 80 bp, synthetic construct
  source 1..80: mol_type = other DNA
tatatgtatatttccttggagatagatctttccttagatgggcagaaaaattctagcccctaatatgactaataagcact

SEQ ID NO: 42494 - DNA, 80 bp, synthetic construct
  source 1..80: mol_type = other DNA
tcacgagatctgatggttttatgtgtttgacagttcctccttcccacgctctctctcacctgccaccatgtaagatgcac

SEQ ID NO: 42495 - DNA, 80 bp, synthetic construct; identical to SEQ ID NO: 14498
  source 1..80: mol_type = other DNA

SEQ ID NO: 42496 - DNA, 80 bp, synthetic construct
  source 1..80: mol_type = other DNA
cattgcctgagcctcattctcgggggttctgatgttagtactttaaaaaatataaatgcccaggcactacataaacatga

SEQ ID NO: 42497 - DNA, 80 bp, synthetic construct
  source 1..80: mol_type = other DNA
tttcttttccatttcatagcctagaggttgtgcttcaatataaagatcttgcactgaaaggcgaagagattgaattctgg

SEQ ID NO: 42498 - DNA, 80 bp, synthetic construct
  source 1..80: mol_type = other DNA
taaccagagccttgttttgttgttggaatcacaagtaataaggcaacttctgctgatcactatgttagttagcttaattt

SEQ ID NO: 42499 - DNA, 80 bp, synthetic construct; identical to SEQ ID NO: 14499
  source 1..80: mol_type = other DNA

SEQ ID NO: 42500 - DNA, 80 bp, synthetic construct
  source 1..80: mol_type = other DNA
tctatcaagggggcagattttggagtgattctctctgaaagcttggagaatgagtcttacatgtgacatgtctcatttca

SEQ ID NO: 42501 - DNA, 80 bp, synthetic construct
  source 1..80: mol_type = other DNA
aagagcctatagtgtccctaacactcgagcaattaccagctactcagcccaccctacagggtctttgtaatctgatttta

SEQ ID NO: 42502 - DNA, 80 bp, synthetic construct; identical to SEQ ID NO: 14500
  source 1..80: mol_type = other DNA

SEQ ID NO: 42503 - DNA, 80 bp, synthetic construct
  source 1..80: mol_type = other DNA
ccatgctgcagatgctctgtgcccataagtcacttagtagccatttcagcagatcaactattgtgggatcacaatgcttg

SEQ ID NO: 42504 - DNA, 80 bp, synthetic construct
  source 1..80: mol_type = other DNA
tgagaggtccattctgtgtacctataataccctggagggttgactattaacctaagttcatggtgcagcagcacaaagac

SEQ ID NO: 42505 - DNA, 80 bp, synthetic construct; identical to SEQ ID NO: 14501
  source 1..80: mol_type = other DNA

SEQ ID NO: 42506 - DNA, 80 bp, synthetic construct
  source 1..80: mol_type = other DNA
ctttgggaatctgcagatggagatcatgtttccaaaccacaccctacaatttttttcaaaacgtatctcaaggcacatcc

SEQ ID NO: 42507 - DNA, 80 bp, synthetic construct
  source 1..80: mol_type = other DNA
acaatctcattaatagcagggatatctttttctttgtgtattgtaagacatcccagcatcgaatgtgcttctgcttatac

SEQ ID NO: 42508 - DNA, 80 bp, synthetic construct
  source 1..80: mol_type = other DNA
tcgtaatgcttcccttcatttttgttgggaaaacacagtaatgaggctgccaattagccacatagggtggaaaaaagaaa

SEQ ID NO: 42509 - DNA, 80 bp, synthetic construct; identical to SEQ ID NO: 14502
  source 1..80: mol_type = other DNA

SEQ ID NO: 42510 - DNA, 80 bp, synthetic construct
  source 1..80: mol_type = other DNA
ggctgcttaactttcaagcttccatctgtaaggtggagataatataaagaggcctcctctaattttcatgcaaggctttg

SEQ ID NO: 42511 - DNA, 80 bp, synthetic construct
  source 1..80: mol_type = other DNA
cttagcactatgtgagactctgggtaaagcaaaagacctttgagacatttcatgatgtctaagatcttttttttttaagc

SEQ ID NO: 42512 - DNA, 80 bp, synthetic construct
  source 1..80: mol_type = other DNA
atgagatcgagaggcaaaatagatgacatagataaattcctatgtgatgtcacagtgcgaggctcattgttggttggcat

SEQ ID NO: 42513 - DNA, 80 bp, synthetic construct; identical to SEQ ID NO: 14503
  source 1..80: mol_type = other DNA

SEQ ID NO: 42514 - DNA, 80 bp, synthetic construct
  source 1..80: mol_type = other DNA
aaagactagggaggcagaggatacagagatataagcagaaaactaggatcttacagggaaatatatctgcttctgcttca

SEQ ID NO: 42515 - DNA, 80 bp, synthetic construct
  source 1..80: mol_type = other DNA
aatatcttatcatagtcatgcacccataacaatgtttcagtcaacatcagactgcgcacacaacagtggtcccataagat

SEQ ID NO: 42516 - DNA, 80 bp, synthetic construct
  source 1..80: mol_type = other DNA
aacctgcagaatatgtttggaaagccactgatacaggagaaaaaaagccattagtttgcaatgagaaaacccaaatttgg

SEQ ID NO: 42517 - DNA, 80 bp, synthetic construct
  source 1..80: mol_type = other DNA
tattgtctaacagctggcaattatagagaagaatgttctacagccatccttaatgcccagagttcttcattaaaaatctc

SEQ ID NO: 42518 - DNA, 80 bp, synthetic construct; identical to SEQ ID NO: 14504
  source 1..80: mol_type = other DNA

SEQ ID NO: 42519 - DNA, 80 bp, synthetic construct
  source 1..80: mol_type = other DNA
ttttttcacaggtgttgtgttgacaaggaatcagttctttgcacagaggtctatgttaatacggaatcagtttctcaccc

SEQ ID NO: 42520 - DNA, 80 bp, synthetic construct
  source 1..80: mol_type = other DNA
cctcctgtttgttcattttgctcttttccaaattgcagttttgccagcatgctgctctttggtggaactgaggctataag

SEQ ID NO: 42521 - DNA, 80 bp, synthetic construct
  source 1..80: mol_type = other DNA
gcctctttcaaagatagttctgctaggatttctaccctttttcaatttcccacttttttcccctatgatcttcctctctt

SEQ ID NO: 42522 - DNA, 80 bp, synthetic construct; identical to SEQ ID NO: 14505
  source 1..80: mol_type = other DNA

SEQ ID NO: 42523 - DNA, 80 bp, synthetic construct
  source 1..80: mol_type = other DNA
tcagctgacactatttgtaccacgaggcccaaacaactttttgttttgggtcctaaatcctaagattaggcaggatcttt

SEQ ID NO: 42524 - DNA, 80 bp, synthetic construct
  source 1..80: mol_type = other DNA
acccactgtttcctagagcttctaggattctagaagcttcttcacagtttcactttttatcactcaacagtctggttggc

SEQ ID NO: 42525 - DNA, 80 bp, synthetic construct
  source 1..80: mol_type = other DNA
agggagaattttttgttcgttttgcaacattgtagagtcatttctatggtttaatttctgcttgtgaaggccctgtcttc

SEQ ID NO: 42526 - DNA, 80 bp, synthetic construct; identical to SEQ ID NO: 14506
  source 1..80: mol_type = other DNA

SEQ ID NO: 42527 - DNA, 80 bp, synthetic construct
  source 1..80: mol_type = other DNA
tgcacaagctaagactcaaatctacatctgatttgttttcttctgtacttccattttttgttagaatctggaccttatga

SEQ ID NO: 42528 - DNA, 80 bp, synthetic construct
  source 1..80: mol_type = other DNA
atacgtgggaagcaggaatagaaacaggagataggaaactgaaaataacaaaacctccaccccaagggctaagcattgtc

SEQ ID NO: 42529 - DNA, 80 bp, synthetic construct; identical to SEQ ID NO: 14507
  source 1..80: mol_type = other DNA

SEQ ID NO: 42530 - DNA, 80 bp, synthetic construct
  source 1..80: mol_type = other DNA
ccttacctgtgtacctctgagcctaagaccctcagagaccccgcactgcactgagaataccatccaaactccttactttg

SEQ ID NO: 42531 - DNA, 80 bp, synthetic construct
  source 1..80: mol_type = other DNA
tgccaggaacacgccactctctactgatattaccatggctggcttcttcttatttggtgtccatgtaaatgccctctccc

SEQ ID NO: 42532 - DNA, 80 bp, synthetic construct
  source 1..80: mol_type = other DNA
tctctctgtttacgtgaatgtgagctccataaaagcagatacttttcctaagacagtgcatggcacatagtatttaaata

SEQ ID NO: 42533 - DNA, 80 bp, synthetic construct; identical to SEQ ID NO: 14508
  source 1..80: mol_type = other DNA

SEQ ID NO: 42534 - DNA, 80 bp, synthetic construct
  source 1..80: mol_type = other DNA
aaataacacaatcaaatacttacatggtgcttactgtgctccaggcactatcctaagtgctttatacagatgagctcact

SEQ ID NO: 42535 - DNA, 80 bp, synthetic construct
  source 1..80: mol_type = other DNA
ggcaagttgccaaatgtcacacagtaagtgctgaaactagaattttgagccacagcctggctctgtagtctgtatttttc

SEQ ID NO: 42536 - DNA, 80 bp, synthetic construct
  source 1..80: mol_type = other DNA
atgaaatctttctgtggggacaggcctccttttatctgtgcttgtgttgcaggggctatacgtttctcatttagagccat

SEQ ID NO: 42537 - DNA, 80 bp, synthetic construct
  source 1..80: mol_type = other DNA
aattacaattttctctgctatttcttacaatgcttattttctttccatggttcccagctaattggtgtcccgtacctgtg

SEQ ID NO: 42538 - DNA, 80 bp, synthetic construct; identical to SEQ ID NO: 14509
  source 1..80: mol_type = other DNA

SEQ ID NO: 42539 - DNA, 80 bp, synthetic construct
  source 1..80: mol_type = other DNA
taatcagccaaatagtttataagaaaatgcaggaaaaagataaagaatgagctccttgatacattgtatattctggttca

SEQ ID NO: 42540 - DNA, 80 bp, synthetic construct
  source 1..80: mol_type = other DNA
ggaaacagggatttctgaaaaattgcttcagttttccaggtggctttacaagggcaggatggatgtagagtaactgggag

SEQ ID NO: 42541 - DNA, 80 bp, synthetic construct; identical to SEQ ID NO: 14510
  source 1..80: mol_type = other DNA

SEQ ID NO: 42542 - DNA, 80 bp, synthetic construct
  source 1..80: mol_type = other DNA
taagagcaggattcaatctgtactggctaccttggaagataacaggaaaaggaccgtgggccaaggagtgtaggtggttt

SEQ ID NO: 42543 - DNA, 80 bp, synthetic construct
  source 1..80: mol_type = other DNA
ggtgtcatttcagtttgtagtcattgctacagcagcactaaggagctggcacacattgccgggactcgctctggcgcttg

SEQ ID NO: 42544 - DNA, 80 bp, synthetic construct
  source 1..80: mol_type = other DNA
gttctttgtcaaagggacaaacgatgagctatgatgccattcagactgatgtgttaacttctaagctttcctatgattaa

SEQ ID NO: 42545 - DNA, 80 bp, synthetic construct; identical to SEQ ID NO: 14511
  source 1..80: mol_type = other DNA

SEQ ID NO: 42546 - DNA, 80 bp, synthetic construct
  source 1..80: mol_type = other DNA
tctgtcctataatagttctagggcttttttttttcctataaagttcctggtaattcttatctgatttttctttttctcct

SEQ ID NO: 42547 - DNA, 80 bp, synthetic construct
  source 1..80: mol_type = other DNA
tatgcctagaaattttttcttgtgactttatatccccttcaggggatataagatgccgtgattaatatcgtacaccagga

SEQ ID NO: 42548 - DNA, 80 bp, synthetic construct
  source 1..80: mol_type = other DNA
tctctgactcccaatcccctaacccttgggctgggaggagaaagagctcagaagccagcaggttgctctcttcccttgct

SEQ ID NO: 42549 - DNA, 80 bp, synthetic construct
  source 1..80: mol_type = other DNA
aaggttgagatccccagtcccagccctctcctgaagccaccccactggctggagaagatactgggctgacattgcttttt

SEQ ID NO: 42550 - DNA, 80 bp, synthetic construct; identical to SEQ ID NO: 14512
  source 1..80: mol_type = other DNA

SEQ ID NO: 42551 - DNA, 80 bp, synthetic construct
  source 1..80: mol_type = other DNA
agtcatcggtagcatgggtattttgctttggaatattatcaaatagcagggggaccagcacagtggacttagtgtcaagt

SEQ ID NO: 42552 - DNA, 80 bp, synthetic construct
  source 1..80: mol_type = other DNA
aactggagttgacaggaggatcagcgatgtatctaataagcagcattacaaatagcacaagcttaggtgttcctcagcta

SEQ ID NO: 42553 - DNA, 80 bp, synthetic construct; identical to SEQ ID NO: 14513
  source 1..80: mol_type = other DNA

SEQ ID NO: 42554 - DNA, 80 bp, synthetic construct
  source 1..80: mol_type = other DNA
acagatccctacccaccctgttatggtggaactgtgtcccctcaaatgatccccagtagctgtgaatgtgatcttatttg

SEQ ID NO: 42555 - DNA, 80 bp, synthetic construct
  source 1..80: mol_type = other DNA
acggaactataagtcagggaacaccaaattgactaatgtccccccagagctaagaagaggccatggaacagcctctcctt

SEQ ID NO: 42556 - DNA, 80 bp, synthetic construct
  source 1..80: mol_type = other DNA
cttccaggagaagtgatactatagattgctcaaactcaagggaactccttcagtttttcggttgaaacatgtgaaaaggc

SEQ ID NO: 42557 - DNA, 80 bp, synthetic construct
  source 1..80: mol_type = other DNA
gtgtgagacataaatcaatctcactgggtagctgtctcaatttccactttcccagttcagtgtgggtggatggggaaggt

SEQ ID NO: 42558 - DNA, 80 bp, synthetic construct; identical to SEQ ID NO: 14514
  source 1..80: mol_type = other DNA

SEQ ID NO: 42559 - DNA, 80 bp, synthetic construct
  source 1..80: mol_type = other DNA
gttggagcaaatggtctttctcctctggctactattgtcttgtacttacaccttcttcctgactgctgtgttctttgaca

SEQ ID NO: 42560 - DNA, 80 bp, synthetic construct
  source 1..80: mol_type = other DNA
tggacagtgggtggagaagattcaagtacatcttccttgctgacaatatgctctcctatcttttgtaagagtacacaatt

SEQ ID NO: 42561 - DNA, 80 bp, synthetic construct
  source 1..80: mol_type = other DNA
ttttctgaacaaagcaagtggggagaaaaatgtaaagtgtttcttcatacactgcaagtttatgaaattcaagaggtaga

SEQ ID NO: 42562 - DNA, 80 bp, synthetic construct; identical to SEQ ID NO: 14515
  source 1..80: mol_type = other DNA

SEQ ID NO: 42563 - DNA, 80 bp, synthetic construct
  source 1..80: mol_type = other DNA
acaacaaatccattcatctggcaaatacttagtgaatatctactaagtgccaggcagaatgctaaacaaacttgtccaaa

SEQ ID NO: 42564 - DNA, 80 bp, synthetic construct
  source 1..80: mol_type = other DNA
ctaggtggcttgtaaacaatagaaattcattgctggctgggcgcggtggctcacgactgtaatctcagcactttgggagg

SEQ ID NO: 42565 - DNA, 80 bp, synthetic construct
  source 1..80: mol_type = other DNA
gaggcggaggtttcagtgagctgagatcataccactgcactccagcctggtgacagagcaagactccatcttaaaaaaaa

SEQ ID NO: 42566 - DNA, 80 bp, synthetic construct; identical to SEQ ID NO: 14516
  source 1..80: mol_type = other DNA

SEQ ID NO: 42567 - DNA, 80 bp, synthetic construct
  source 1..80: mol_type = other DNA
ttcagacaaatgaaataaatgccctggaggcaagaaagcacagcatataagagctgaaagtaatttgatatgaggtaagg

SEQ ID NO: 42568 - DNA, 80 bp, synthetic construct
  source 1..80: mol_type = other DNA
tggtgggtggattagagggaaactagaccagtaaagaggctgctgcagtaagcaaggtgggaaatgagaaacattgccac

SEQ ID NO: 42569 - DNA, 80 bp, synthetic construct; identical to SEQ ID NO: 14517
  source 1..80: mol_type = other DNA

SEQ ID NO: 42570 - DNA, 80 bp, synthetic construct
  source 1..80: mol_type = other DNA
gaattgcaggtagtacagagggctgtggatggaaggcagggaataattcttgatgggttttgcctgtcatgttttatgcc

SEQ ID NO: 42571 - DNA, 80 bp, synthetic construct
  source 1..80: mol_type = other DNA
agtcctaaactaaggctgaacagagagggtgaggaagaaggaatgaattttagggataccgaggtggcagaaatgacagc

SEQ ID NO: 42572 - DNA, 80 bp, synthetic construct
  source 1..80: mol_type = other DNA
aaaccctgatctcacaattgactgaaaaatcatgagtcactaagacgttcgaattcttgatccctgcaaggaacagcaat

SEQ ID NO: 42573 - DNA, 80 bp, synthetic construct; identical to SEQ ID NO: 14518
  source 1..80: mol_type = other DNA

SEQ ID NO: 42574 - DNA, 80 bp, synthetic construct
  source 1..80: mol_type = other DNA
acgtcctgtcatccatgccatttcatcagcttaaaagtatatttttatttacatattactctcttcccactatgattata

SEQ ID NO: 42575 - DNA, 80 bp, synthetic construct
  source 1..80: mol_type = other DNA
agttctcaggagatctggttgtttgcaagtgtgtagcacctccctcaccttcctcctgctctgggccatgtaatttgtgc

SEQ ID NO: 42576 - DNA, 80 bp, synthetic construct
  source 1..80: mol_type = other DNA
acaaggtaaagattgtgcctgcttcttttacctgagtatagccagtggcagctttatgccctggcctatcatcaccatcc

SEQ ID NO: 42577 - DNA, 80 bp, synthetic construct; identical to SEQ ID NO: 14519
  source 1..80: mol_type = other DNA

SEQ ID NO: 42578 - DNA, 80 bp, synthetic construct
  source 1..80: mol_type = other DNA
gtcatacctgcctagacttctaatccaaacccagaatctactttctgttgctatataatacatagaaacttccataataa

SEQ ID NO: 42579 - DNA, 80 bp, synthetic construct
  source 1..80: mol_type = other DNA
aggattgcagaacaatcacctttatgttcttttggattgaagacaaagtttcatctctttcaaggagagagaagagcttt

SEQ ID NO: 42580 - DNA, 80 bp, synthetic construct
  source 1..80: mol_type = other DNA
cccccgatttatcaacaaagtggccattaacagccatcagtggctgaccttgacagattccattactgaaataatgaaat

SEQ ID NO: 42581 - DNA, 80 bp, synthetic construct
  source 1..80: mol_type = other DNA
tgaaaagcacagggagcttgatgaaaaatgaatggctcccaggcagaatttccacaaatgaaatgcaaattcagatatat

SEQ ID NO: 42582 - DNA, 80 bp, synthetic construct; identical to SEQ ID NO: 14520
  source 1..80: mol_type = other DNA

SEQ ID NO: 42583 - DNA, 80 bp, synthetic construct
  source 1..80: mol_type = other DNA
ttaatttccattaccttcagacatgacccagctacaagaaacaccaacccaatttcgtttgagtggaaccagctgtgggc

SEQ ID NO: 42584 - DNA, 80 bp, synthetic construct
  source 1..80: mol_type = other DNA
tccgaagaggcaataactgagaacctgttaggcttatcaactaatacctttgcctaaatagagattctgtcaggacaaaa

SEQ ID NO: 42585 - DNA, 80 bp, synthetic construct
  source 1..80: mol_type = other DNA
aaactcccaaactgaagtcagttttggtttcctcatgcctctctatatggcaaaagaaccctagataatgaggaatattg

SEQ ID NO: 42586 - DNA, 80 bp, synthetic construct; identical to SEQ ID NO: 14521
  source 1..80: mol_type = other DNA

SEQ ID NO: 42587 - DNA, 80 bp, synthetic construct
  source 1..80: mol_type = other DNA
tttttatatgcatcacatccataactaagggcctactgtgtggtaggtatcacaatccaggagtgcaaaggtaagaactg

SEQ ID NO: 42588 - DNA, 80 bp, synthetic construct
  source 1..80: mol_type = other DNA
cattttgggatagataaaaggtgactttggggaacatagagccccttgccccgcataagaaactccagaaatagaaaaga

SEQ ID NO: 42589 - DNA, 80 bp, synthetic construct
  source 1..80: mol_type = other DNA
cctctagttggtaatagatagcttgtaatatgtctggttcatataataaaaccttatttgaatgccactattgtcagaac

SEQ ID NO: 42590 - DNA, 80 bp, synthetic construct; identical to SEQ ID NO: 14522
  source 1..80: mol_type = other DNA

SEQ ID NO: 42591 - DNA, 80 bp, synthetic construct
  source 1..80: mol_type = other DNA
ataagggcaattatacatgaaaaataaaaggcttaactctcacttttaaaaataagagaatgcagtttgatagctctgat

SEQ ID NO: 42592 - DNA, 80 bp, synthetic construct
  source 1..80: mol_type = other DNA
cactctgggcaacatagcagcgcctcatctctacaaaaagtacaaaaattagctgagcgtggtggagtgtgcctgtagtc

SEQ ID NO: 42593 - DNA, 80 bp, synthetic construct
  source 1..80: mol_type = other DNA
agtcatatgaaaaaagctcaacatcactgatcatttgaaaatcaaaaccacaatgagataccatctcatgccagtcagaa

SEQ ID NO: 42594 - DNA, 80 bp, synthetic construct; identical to SEQ ID NO: 14523
  source 1..80: mol_type = other DNA

SEQ ID NO: 42595 - DNA, 80 bp, synthetic construct
  source 1..80: mol_type = other DNA
tagcaaaactaaactatacacatgttctcacatataagtgggagctaaatgatgagaacacatggacacataggggaaca

SEQ ID NO: 42596 - DNA, 80 bp, synthetic construct
  source 1..80: mol_type = other DNA
taaattctttctttggctctttgagatgaaaaatattttaaaaggccctcgcaggtcttacaagccaggagtgtcatttt

SEQ ID NO: 42597 - DNA, 80 bp, synthetic construct
  source 1..80: mol_type = other DNA
aacttccgaggatcctcctcctccaacttgcaaaactacttcttgtcattaagatatgagaagtttgtttttccctttat

SEQ ID NO: 42598 - DNA, 80 bp, synthetic construct; identical to SEQ ID NO: 14524
  source 1..80: mol_type = other DNA

SEQ ID NO: 42599 - DNA, 80 bp, synthetic construct
  source 1..80: mol_type = other DNA
ctcttaaactatgtccctaaaacccgagcagatgttaacattagctttactgcctatgggttaaccattcatgtcaacac

SEQ ID NO: 42600 - DNA, 80 bp, synthetic construct
  source 1..80: mol_type = other DNA
catgttttgccacccttcctcactcacttcctggtattatcactgataatggtctgcagctttaatttaaattagaggat

SEQ ID NO: 42601 - DNA, 80 bp, synthetic construct
  source 1..80: mol_type = other DNA
tgcctagaaaggcaggacaaaatgaagcaatgactcaaagttcatcaacagaaaagaatataagagatttcagccttcag

SEQ ID NO: 42602 - DNA, 80 bp, synthetic construct; identical to SEQ ID NO: 14525
  source 1..80: mol_type = other DNA

SEQ ID NO: 42603 - DNA, 80 bp, synthetic construct
  source 1..80: mol_type = other DNA
atcactgattggaagatgtacagatactagagttgaagtggtcctagatgttgttggcagtgatgggaacatttgggtgc

SEQ ID NO: 42604 - DNA, 80 bp, synthetic construct
  source 1..80: mol_type = other DNA
gtagattaaaattccctattaaaatgtctattactatcagcagtcctgacttggagagattagacttctgacaattcctg

SEQ ID NO: 42605 - DNA, 80 bp, synthetic construct
  source 1..80: mol_type = other DNA
cttcctgtcctagggtctgtcagccactctgcagagctatcctgtactgcctgaggggctgtgcaatcaactcaggcctc

SEQ ID NO: 42606 - DNA, 80 bp, synthetic construct; identical to SEQ ID NO: 14526
  source 1..80: mol_type = other DNA

SEQ ID NO: 42607 - DNA, 80 bp, synthetic construct
  source 1..80: mol_type = other DNA
agaccagcctggccaacctggtgaaacatattctctactaaaaatacaaagattagctgggtgtggtggtgggcgcctgt

SEQ ID NO: 42608 - DNA, 80 bp, synthetic construct
  source 1..80: mol_type = other DNA
caaaaagtgataagtgagggagatagataaagcttggtaaactggatggggaatagatgggagacaacatggtttttgtg

SEQ ID NO: 42609 - DNA, 80 bp, synthetic construct; identical to SEQ ID NO: 14527
  source 1..80: mol_type = other DNA

SEQ ID NO: 42610 - DNA, 80 bp, synthetic construct
  source 1..80: mol_type = other DNA
ctgttagccaattctgcatgggaatctgagttgctaatttctccagaacatctcttgaaggatttttgaatagtgaataa

SEQ ID NO: 42611 - DNA, 80 bp, synthetic construct
  source 1..80: mol_type = other DNA
ctgggacttgtgcaactactgcaagaaagtggcgatactctggctattgtagtgaatctctgatccaagagtctcatgtc

SEQ ID NO: 42612 - DNA, 80 bp, synthetic construct
  source 1..80: mol_type = other DNA
ctgagtgaagcacaaagtacccacattgtaaagtggaaaatagaatggttcatcaattgtcccagcaccactgcaaagag

SEQ ID NO: 42613 - DNA, 80 bp, synthetic construct; identical to SEQ ID NO: 14528
  source 1..80: mol_type = other DNA

SEQ ID NO: 42614 - DNA, 80 bp, synthetic construct
  source 1..80: mol_type = other DNA
atttgagggggtcattcatacgaccaaaagaaaactccaactcaaggaactgtgtattacttgtgtctaatatttcccca

SEQ ID NO: 42615 - DNA, 80 bp, synthetic construct
  source 1..80: mol_type = other DNA
agcatttccattatttgtccttgggcaattcccaaaggaagtctagggcagtttttcatccttgaagcatctaaatgtgc

SEQ ID NO: 42616 - DNA, 80 bp, synthetic construct
  source 1..80: mol_type = other DNA
ttaaaattcccagatatattattaaataataagcaagcaaacagtgactggacttatggtgataaagtagctttacagaa

SEQ ID NO: 42617 - DNA, 80 bp, synthetic construct
  source 1..80: mol_type = other DNA
gacaacctacagaatgagaaaaaatatttgcaagtcctatatttgataagggtttaatgtccagaacataaagaatttct

SEQ ID NO: 42618 - DNA, 80 bp, synthetic construct; identical to SEQ ID NO: 14529
  source 1..80: mol_type = other DNA

SEQ ID NO: 42619 - DNA, 80 bp, synthetic construct
  source 1..80: mol_type = other DNA
aagaattaaaaacaggttattaatatgccaatgctctgaattgtaacattattcagaatagtcaaaagcagaaatccaca

SEQ ID NO: 42620 - DNA, 80 bp, synthetic construct
  source 1..80: mol_type = other DNA
attgcacttgtataaaatatctggaacagatgaattaagagacagcagattagaggttaccagggagttgggttggaagg

SEQ ID NO: 42621 - DNA, 80 bp, synthetic construct
  source 1..80: mol_type = other DNA
tttactgcataaagtacatgcctttgtgacttttaaaaatatgaattctaaactggtcaaatatatataatggatttttt

SEQ ID NO: 42622 - DNA, 80 bp, synthetic construct; identical to SEQ ID NO: 14530
  source 1..80: mol_type = other DNA

SEQ ID NO: 42623 - DNA, 80 bp, synthetic construct
  source 1..80: mol_type = other DNA
ggcagacaaaatatgaaaacagttgtgctaggattaaaacatttctactactgttgctttattgttaattcaggttttta

SEQ ID NO: 42624 - DNA, 80 bp, synthetic construct
  source 1..80: mol_type = other DNA
gggctatgattagtgacattagagctaagccagggatttgaagaagttaaaagctaaagaaattccacaatgagttttgc

SEQ ID NO: 42625 - DNA, 80 bp, synthetic construct
  source 1..80: mol_type = other DNA
ccagacagtagccaagcttgcctgtcttaatactctgctcattccattatgccagagcaacttctcatctatcctcaaac

SEQ ID NO: 42626 - DNA, 80 bp, synthetic construct
  source 1..80: mol_type = other DNA
ctgattcagatttcttattccatccttgtgaaaaagctattccaaatccataaattcagtgggtcagttttgacctgaaa

SEQ ID NO: 42627 - DNA, 80 bp, synthetic construct; identical to SEQ ID NO: 14531
  source 1..80: mol_type = other DNA

SEQ ID NO: 42628 - DNA, 80 bp, synthetic construct
  source 1..80: mol_type = other DNA
tacaccaagaaccaacccaatttcaaataattacaaagtgttagtaaactctccaggtaggcacacagagacatgagttg

SEQ ID NO: 42629 - DNA, 80 bp, synthetic construct
  source 1..80: mol_type = other DNA
ctctgccaacagaacaaaagcatctttgttcagaggcttgctgacaattttaggtgttgaaacccaacagtagaaaatgg

SEQ ID NO: 42630 - DNA, 80 bp, synthetic construct
  source 1..80: mol_type = other DNA
gacagtgatatctttacaataccatggtgttctttcaaatatgagaaggtacttttttactctgaccaatttggaatgaa

SEQ ID NO: 42631 - DNA, 80 bp, synthetic construct; identical to SEQ ID NO: 14532
  source 1..80: mol_type = other DNA

SEQ ID NO: 42632 - DNA, 80 bp, synthetic construct
  source 1..80: mol_type = other DNA
ctattttattatatagatttgttacgtctaaattggactacaattagttatgatttgttatgtctgtttatttgaccact

SEQ ID NO: 42633 - DNA, 80 bp, synthetic construct
  source 1..80: mol_type = other DNA
atgagtagatgttaaaagtctgctccaatcctaaactgatagtgtaggcagtgcttctcagagtgtcccaatttttggac

SEQ ID NO: 42634 - DNA, 80 bp, synthetic construct; identical to SEQ ID NO: 14533
  source 1..80: mol_type = other DNA

SEQ ID NO: 42635 - DNA, 80 bp, synthetic construct
  source 1..80: mol_type = other DNA
tattccattttttgttttaactcatgtggtagtgatatttaatactttctgatcaaataggttcaaagcgaatctttaaa

SEQ ID NO: 42636 - DNA, 80 bp, synthetic construct
  source 1..80: mol_type = other DNA
ttacatatgtatacatgtgccatgttggtgtgctgcacccattaactcgtcatttacattaggtgtatctcctaatgcta

SEQ ID NO: 42637 - DNA, 80 bp, synthetic construct
  source 1..80: mol_type = other DNA
ttactttcaaacttgtctgagaatggttactctggatgttcagaaacatttcactttcacagttcagtcatattcttgtc

SEQ ID NO: 42638 - DNA, 80 bp, synthetic construct; identical to SEQ ID NO: 14534
  source 1..80: mol_type = other DNA

SEQ ID NO: 42639 - DNA, 80 bp, synthetic construct
  source 1..80: mol_type = other DNA
ttggaacgtgaaattctcatggtatgtctcttattcttagcttcggtcttgccaaaactatttccatggaaacagacatc

SEQ ID NO: 42640 - DNA, 80 bp, synthetic construct
  source 1..80: mol_type = other DNA
gggaccatgtttcttccttctatttctctatccctcttttgtttctttttccctcccttctcttctcacttattcagtca

SEQ ID NO: 42641 - DNA, 80 bp, synthetic construct
  source 1..80: mol_type = other DNA
acagatgcaaacaatggaagggcaaggttggtgtcttgccatcactggcatctaacacaaaatggctccataaacattag

SEQ ID NO: 42642 - DNA, 80 bp, synthetic construct; identical to SEQ ID NO: 14535
  source 1..80: mol_type = other DNA

SEQ ID NO: 42643 - DNA, 80 bp, synthetic construct
  source 1..80: mol_type = other DNA
tggtctattagaaaaataaagaacacccctgagtagacagacctttgatttctgtagcaactgggtcatgtccaaaagtt

SEQ ID NO: 42644 - DNA, 80 bp, synthetic construct
  source 1..80: mol_type = other DNA
aaggaatcatgaatctacccccacataaaatagggaatggtaggagaaaaatcaattcccatttttaaagaccttttaaa

SEQ ID NO: 42645 - DNA, 80 bp, synthetic construct
  source 1..80: mol_type = other DNA
aagacagtagataattgactttgaagacatcactttttaaagtgccaccatacttcatgtttctcagctcctcctggtta

SEQ ID NO: 42646 - DNA, 80 bp, synthetic construct; identical to SEQ ID NO: 14536
  source 1..80: mol_type = other DNA

SEQ ID NO: 42647 - DNA, 80 bp, synthetic construct
  source 1..80: mol_type = other DNA
tctgattttagaaaactgatcttgcttatctaatcacaaatatccctacagtggaaaatggtgattcatcaatgttatag

SEQ ID NO: 42648 - DNA, 80 bp, synthetic construct
  source 1..80: mol_type = other DNA
gttcaactcaagcatctccctcttgacacaaccatctctgatccccaatttttgccagagttctctgcattttttttata

SEQ ID NO: 42649 - DNA, 80 bp, synthetic construct
  source 1..80: mol_type = other DNA
gtggcgcaatctcagctcactgcaagctccgcctcccgggttcacgccattcttctgcctcagcctcctgagtagctggg

SEQ ID NO: 42650 - DNA, 80 bp, synthetic construct
  source 1..80: mol_type = other DNA
gtgcctgtccttgattcatatttttaacaaaagttcgtgagaatatatctgtcaaactcttttgctagatgctttatgtt

SEQ ID NO: 42651 - DNA, 80 bp, synthetic construct; identical to SEQ ID NO: 14537
  source 1..80: mol_type = other DNA

SEQ ID NO: 42652 - DNA, 80 bp, synthetic construct
  source 1..80: mol_type = other DNA
tgttatgatgagacccatgaggcctctagaagctatactgtaccctttcttatatatattttccaaaagcatccaattta

SEQ ID NO: 42653 - DNA, 80 bp, synthetic construct
  source 1..80: mol_type = other DNA
aacagctcaacagctctttttttaagcagaccttactaactaggccttcataattacaacacagtgatattaagtagaca

SEQ ID NO: 42654 - DNA, 80 bp, synthetic construct; identical to SEQ ID NO: 14538
  source 1..80: mol_type = other DNA

SEQ ID NO: 42655 - DNA, 80 bp, synthetic construct
  source 1..80: mol_type = other DNA
aaaatcataggaaagtagaaaagtagaaggcagctaggcaagaggatgagaaggcttttcaagcagaagattaaaaaatg

SEQ ID NO: 42656 - DNA, 80 bp, synthetic construct
  source 1..80: mol_type = other DNA
gcaagagagacactcaagagtttcagtcaggagagcaatttagttaaacctgtttcatatggctcacttcagtggcaagg

SEQ ID NO: 42657 - DNA, 80 bp, synthetic construct
  source 1..80: mol_type = other DNA
ggagaggaattctgtgagtctaatgggctgagtagatgttgatggcagatgctaagacagccttcaggagaaacaggtag

SEQ ID NO: 42658 - DNA, 80 bp, synthetic construct; identical to SEQ ID NO: 14539
  source 1..80: mol_type = other DNA

SEQ ID NO: 42659 - DNA, 80 bp, synthetic construct
  source 1..80: mol_type = other DNA
acatatgattctgtttttgtggatcaagatagtatctgagcacaagtttatactgcctcacccctaaaattctatttaat

SEQ ID NO: 42660 - DNA, 80 bp, synthetic construct
  source 1..80: mol_type = other DNA
ctgcagcaaatgtcagcagggttttgaggaaactgcatgaaatgcaggataaaaggatatacacatggatgggaattaag

SEQ ID NO: 42661 - DNA, 80 bp, synthetic construct
  source 1..80: mol_type = other DNA
gatccagagaggcagagagggatgaaggataacttcactttgtattctctatagtcctgagctgtttctttcatgttgag

SEQ ID NO: 42662 - DNA, 80 bp, synthetic construct
  source 1..80: mol_type = other DNA
gaaaaagcaagggtaaaatcttggggaaattaacataagttggagagagatggagagaaatcaaattcttgggaaggaca

SEQ ID NO: 42663 - DNA, 80 bp, synthetic construct; identical to SEQ ID NO: 14540
  source 1..80: mol_type = other DNA

SEQ ID NO: 42664 - DNA, 80 bp, synthetic construct
  source 1..80: mol_type = other DNA
gaggtgggaggatcgcttgagcatgggaggctgaggctgcagtgagccatgatcacacccctgcactccagcctaggtga

SEQ ID NO: 42665 - DNA, 80 bp, synthetic construct
  source 1..80: mol_type = other DNA
tgtagcaactgtaaaggctggtttgtcagagccatccaggttgggttttggttaggccaatgaaggagtaggatactagg

SEQ ID NO: 42666 - DNA, 80 bp, synthetic construct; identical to SEQ ID NO: 14541
  source 1..80: mol_type = other DNA

SEQ ID NO: 42667 - DNA, 80 bp, synthetic construct
  source 1..80: mol_type = other DNA
gtcaggagatcgagactagcctgactaacatggtgaaaccccgtctccaataaaaatagaaaaattagctgggtgtggtg

SEQ ID NO: 42668 - DNA, 80 bp, synthetic construct
  source 1..80: mol_type = other DNA
cctctttctttcttatgacctgatcgtttcttaattattctcaccagtttccagtggccatggatcatctatgctgtgct

SEQ ID NO: 42669 - DNA, 80 bp, synthetic construct
  source 1..80: mol_type = other DNA
catgggttaatgtcccgaaggacaaccgaggacatgtctttcaagagcagaggttttcgtgatattttaccgtattgtgc

SEQ ID NO: 42670 - DNA, 80 bp, synthetic construct
  source 1..80: mol_type = other DNA
atggccacttgacacttgacagctctccagcactgccatactctagagacagtagcactttctctcaacatggctatgaa

SEQ ID NO: 42671 - DNA, 80 bp, synthetic construct; identical to SEQ ID NO: 14542
  source 1..80: mol_type = other DNA

SEQ ID NO: 42672 - DNA, 80 bp, synthetic construct
  source 1..80: mol_type = other DNA
ttctgtcctggttgcctgaatagtctctgacatgtacttcttaggctgactaatagccgtataaaggagttgggcataaa

SEQ ID NO: 42673 - DNA, 80 bp, synthetic construct
  source 1..80: mol_type = other DNA
cagaagatacggtatcataggaaaatatattttgctgtcattcctcttggacctaaatgagcatgctattttttcaacct

SEQ ID NO: 42674 - DNA, 80 bp, synthetic construct; identical to SEQ ID NO: 14543
  source 1..80: mol_type = other DNA

SEQ ID NO: 42675 - DNA, 80 bp, synthetic construct
  source 1..80: mol_type = other DNA
tggggaaacaaatgatgctgggacaataggttgccatgcagaaaaagataaaattagatcacgtgttaatttctaaatgg

SEQ ID NO: 42676 - DNA, 80 bp, synthetic construct
  source 1..80: mol_type = other DNA
caagtaatgtcaagtgacaagtaacaaactgggaatatacaggtaagatgtgataacacaaagagcttaatcccctaatt

SEQ ID NO: 42677 - DNA, 80 bp, synthetic construct
  source 1..80: mol_type = other DNA
atagaatccaagagagatccaccatgcaaacagaaaccataatgtaggttctgttaccatctccattttatcaccaggaa

SEQ ID NO: 42678 - DNA, 80 bp, synthetic construct; identical to SEQ ID NO: 14544
  source 1..80: mol_type = other DNA

SEQ ID NO: 42679 - DNA, 80 bp, synthetic construct
  source 1..80: mol_type = other DNA
ccttgagggaaaaaaatctatttagactgacggtacttcaaaattaccccataaactgcaaatatatttctgaaatgaaa

SEQ ID NO: 42680 - DNA, 80 bp, synthetic construct
  source 1..80: mol_type = other DNA
aaggatacatcatgaagggtccatgagaaaagaaaccatcctgaggaaagggtttgctcattttatacgttgcggtgaag

SEQ ID NO: 42681 - DNA, 80 bp, synthetic construct
  source 1..80: mol_type = other DNA
cacaatgatttgcaattatgttccttttcctcagaattagatggaatccttcgcaagcagtgaagtgaccacactgataa

SEQ ID NO: 42682 - DNA, 80 bp, synthetic construct; identical to SEQ ID NO: 14545
  source 1..80: mol_type = other DNA

SEQ ID NO: 42683 - DNA, 80 bp, synthetic construct
  source 1..80: mol_type = other DNA
aaacaactgtagtctcaacttaatatttttaagatcttcaaaatattctgcaatttagagaaaagtgagatatctaaaca

SEQ ID NO: 42684 - DNA, 80 bp, synthetic construct
  source 1..80: mol_type = other DNA
gataaaaacagaacaaaacaaaactgtgacaaaactatacagaaatgcttaaggaaaaagatgacaatcctgccattctt

SEQ ID NO: 42685 - DNA, 80 bp, synthetic construct
  source 1..80: mol_type = other DNA
ccaaaacttgcttcttgcatttaacattatgaacattccttcacttaaatatcaaatacagtggtccccccttgtctgag

SEQ ID NO: 42686 - DNA, 80 bp, synthetic construct; identical to SEQ ID NO: 14546
  source 1..80: mol_type = other DNA

SEQ ID NO: 42687 - DNA, 80 bp, synthetic construct
  source 1..80: mol_type = other DNA
ccatttaacaatttcagactgtggttaactgggtaaataaaactatggaaagggaaactggataatggaaacaactgtag

SEQ ID NO: 42688 - DNA, 80 bp, synthetic construct
  source 1..80: mol_type = other DNA
tggaattggtaggtcaagttttaatagcttttgctagatggcccaagaacaaataattcacatttccacaagcagggttt

SEQ ID NO: 42689 - DNA, 80 bp, synthetic construct
  source 1..80: mol_type = other DNA
ttcaagttatgtttctgtgaattgcctgaaattttagtttgcttattctctctgttagattgtttccttttcctcttttt

SEQ ID NO: 42690 - DNA, 80 bp, synthetic construct; identical to SEQ ID NO: 14547
  source 1..80: mol_type = other DNA

SEQ ID NO: 42691 - DNA, 80 bp, synthetic construct
  source 1..80: mol_type = other DNA
aagatggaagggctaaaactgatgctgattgtcacaaatgtgggcaggtcaaatttcaatattaaaaaggcaaagactaa

SEQ ID NO: 42692 - DNA, 80 bp, synthetic construct
  source 1..80: mol_type = other DNA
agatagagtaatattagtaccacataaagcagaattcaaggtcccaaacctgtccttggggtcagggagagaaaaagcaa

SEQ ID NO: 42693 - DNA, 80 bp, synthetic construct; identical to SEQ ID NO: 14548
  source 1..80: mol_type = other DNA

SEQ ID NO: 42694 - DNA, 80 bp, synthetic construct
  source 1..80: mol_type = other DNA
aaggcagtatcaacaaaacacccaaacattttatttcagtgtccagtattcaattaaaaagaattaccaggcggccaggc

SEQ ID NO: 42695 - DNA, 80 bp, synthetic construct
  source 1..80: mol_type = other DNA
aaaaaaatttagccgggtgtggtggcgggcgcctgtagtcccagctacttgggaggctgaggcaggagaatggcgtgaac

SEQ ID NO: 42696 - DNA, 80 bp, synthetic construct
  source 1..80: mol_type = other DNA
aaaaacaaccccaaaactcagaaaagagaaatccctaggtaatcccacaacccagaaaagagagatccagataacttgtg

SEQ ID NO: 42697 - DNA, 80 bp, synthetic construct; identical to SEQ ID NO: 14549
  source 1..80: mol_type = other DNA

SEQ ID NO: 42698 - DNA, 80 bp, synthetic construct
  source 1..80: mol_type = other DNA
gcctgttggtggggggaggtgggagggagagcatcaggaagaataactaatggatgctgggcttaatacctgggtaatgg

SEQ ID NO: 42699 - DNA, 80 bp, synthetic construct
  source 1..80: mol_type = other DNA
tgcttgagttataaagaacttaggtaaaaggtttagcatacatgagattggagtcccagacatgaggaagagagagaatg

SEQ ID NO: 42700 - DNA, 80 bp, synthetic construct
  source 1..80: mol_type = other DNA
tctgaagcagcagggcgtggcacaaggtgatgtttctgaaggaataaaaataagactgacagctggattcttacaaacaa

SEQ ID NO: 42701 - DNA, 80 bp, synthetic construct; identical to SEQ ID NO: 14550
  source 1..80: mol_type = other DNA

SEQ ID NO: 42702 - DNA, 80 bp, synthetic construct
  source 1..80: mol_type = other DNA
gttttagactctaaggtcaataaggaatgttgtaatcattgaagtaatttaaaacaatggataacaagctcataaagggg

SEQ ID NO: 42703 - DNA, 80 bp, synthetic construct
  source 1..80: mol_type = other DNA
gacaaagatggggttaaaaacaaaactttatatgctgcttacaggctaacactttaaagtcacaaaaggtttgaaagtaa

SEQ ID NO: 42704 - DNA, 80 bp, synthetic construct
  source 1..80: mol_type = other DNA
ataacccatgaaggtatagaaaatgtaaatgcaataactatagaagttagaaatgtaacttaaaatactatttaaaaagg

SEQ ID NO: 42705 - DNA, 80 bp, synthetic construct
  source 1..80: mol_type = other DNA
tcatacaaactcaatattccaggaatgtaagacagtattacatttagaaatttaccaagagagtgaacatatcaatagct

SEQ ID NO: 42706 - DNA, 80 bp, synthetic construct; identical to SEQ ID NO: 14551
  source 1..80: mol_type = other DNA

SEQ ID NO: 42707 - DNA, 80 bp, synthetic construct
  source 1..80: mol_type = other DNA
tttgaatgcatatctttttcatcttggtctatacagtgccaaacacatagtagatgcacattacaagactggtcaaatgt

SEQ ID NO: 42708 - DNA, 80 bp, synthetic construct
  source 1..80: mol_type = other DNA
ccagctactcaggaggctgaggcaggagaatagcttgaatgcgggaggcggaggttgcggtgagccaagatagcaccatt

SEQ ID NO: 42709 - DNA, 80 bp, synthetic construct; identical to SEQ ID NO: 14552
  source 1..80: mol_type = other DNA

SEQ ID NO: 42710 - DNA, 80 bp, synthetic construct
  source 1..80: mol_type = other DNA
tcaccaatggcacagtatattggggtaaaactatggacagtgtatcagggtaaaaataaatagcttcatttgctccctct

SEQ ID NO: 42711 - DNA, 80 bp, synthetic construct
  source 1..80: mol_type = other DNA
gttcccaggggcattttatgtgtaattgggattgagtggttactggcccttcactttcttgctcttagtagaatgagtcc

SEQ ID NO: 42712 - DNA, 80 bp, synthetic construct
  source 1..80: mol_type = other DNA
ggagacatgatccagtaagccacaatacctctgtattctggtttcctcatttatcaaataagcaccatagaatcttctat

SEQ ID NO: 42713 - DNA, 80 bp, synthetic construct
  source 1..80: mol_type = other DNA
tccttgttgtgctacttactggctgtggggctttgcacagctcattttgctttttgaatcccagtttttcctcatctata

SEQ ID NO: 42714 - DNA, 80 bp, synthetic construct; identical to SEQ ID NO: 14553
  source 1..80: mol_type = other DNA

SEQ ID NO: 42715 - DNA, 80 bp, synthetic construct
  source 1..80: mol_type = other DNA
tacctgggcttttctgactattaggtgtgtgacagaagatcaatactggcgagagatgaatatatgtaatcaacctaaca

SEQ ID NO: 42716 - DNA, 80 bp, synthetic construct
  source 1..80: mol_type = other DNA
agagcccagaggctttatgttctctagcaaagtggtctgcatccttacgttgatcataagttcagtgattataaaagttg

SEQ ID NO: 42717 - DNA, 80 bp, synthetic construct; identical to SEQ ID NO: 14554
  source 1..80: mol_type = other DNA

SEQ ID NO: 42718 - DNA, 80 bp, synthetic construct
  source 1..80: mol_type = other DNA
attctggatggcgacgtagcggtccagcgagatggcgcagaggtgcatgatggaggccgtggagaagagcacgtccaggt

SEQ ID NO: 42719 - DNA, 80 bp, synthetic construct
  source 1..80: mol_type = other DNA
cacaatatatttttagtatttgaaaaaagcccactggcaactgtacttaactatgataagctagcactggctgatgaatg

SEQ ID NO: 42720 - DNA, 80 bp, synthetic construct
  source 1..80: mol_type = other DNA
agcacctctcacactgtactgtcaggatttagtcacatatttctctggattgtatttccctaaggttagtctcacctctt

SEQ ID NO: 42721 - DNA, 80 bp, synthetic construct; identical to SEQ ID NO: 14555
  source 1..80: mol_type = other DNA

SEQ ID NO: 42722 - DNA, 80 bp, synthetic construct
  source 1..80: mol_type = other DNA
gaccacgctttgtgaatagctgctttagggtagtggctctcacccctggctgcacatcagtatcagctggagagctttag

SEQ ID NO: 42723 - DNA, 80 bp, synthetic construct
  source 1..80: mol_type = other DNA
ggttagagtgtgctttatggacataaacaaagtgtcctggttttgtgttttggagggggattaagcagttatgtaaacct

SEQ ID NO: 42724 - DNA, 80 bp, synthetic construct
  source 1..80: mol_type = other DNA
aagtaaagggcgtaggtacaagcctaatttacagccattcacatgtattatttgcaaagagcttgagccgaaaggaaagc

SEQ ID NO: 42725 - DNA, 80 bp, synthetic construct
  source 1..80: mol_type = other DNA
gccccacgccccgtgggctgggggaggctggaggagcagcctagggaggggcggggctccggagggaacgggctgctctc

SEQ ID NO: 42726 - DNA, 80 bp, synthetic construct; identical to SEQ ID NO: 14556
  source 1..80: mol_type = other DNA

SEQ ID NO: 42727 - DNA, 80 bp, synthetic construct
  source 1..80: mol_type = other DNA
tctaagctctgagtgactgctgcttgtgcctgtgtcagcagtcacaatagtctctcctttaaggaggtatctggctgtat

SEQ ID NO: 42728 - DNA, 80 bp, synthetic construct
  source 1..80: mol_type = other DNA
gttgaggatataattcaaaggcacatttccaaattagcttctctgggcagggaacaattaaaactggagtaattcattta

SEQ ID NO: 42729 - DNA, 80 bp, synthetic construct
  source 1..80: mol_type = other DNA
attggttgggaatataaagaagcaaaaatcaagtagattcagaatgatgggtaagttattggtttatgactgtatggggt

SEQ ID NO: 42730 - DNA, 80 bp, synthetic construct
  source 1..80: mol_type = other DNA
aaatataagtaacatagtaggctctagtctataaacaaagacttctatttatagtttgtttgccccctgagccccatctc

SEQ ID NO: 42731 - DNA, 80 bp, synthetic construct; identical to SEQ ID NO: 14557
  source 1..80: mol_type = other DNA

SEQ ID NO: 42732 - DNA, 80 bp, synthetic construct
  source 1..80: mol_type = other DNA
gagcctggtgtcatcatttaattgcattagggagttcgtagttgagctcaaagaagtattttcttcacaaagaatatcca

SEQ ID NO: 42733 - DNA, 80 bp, synthetic construct
  source 1..80: mol_type = other DNA
agttaaagaactgaactgtggtggctgtaagttttcttcattcacaattttaggagagtccactgtttggttttattatt

SEQ ID NO: 42734 - DNA, 80 bp, synthetic construct
  source 1..80: mol_type = other DNA
cgatggtactagtttagcaacagtattattaaaatagcatgcaatcagaaacagtggggatgtacacattctacattaag

SEQ ID NO: 42735 - DNA, 80 bp, synthetic construct; identical to SEQ ID NO: 14558
  source 1..80: mol_type = other DNA

SEQ ID NO: 42736 - DNA, 80 bp, synthetic construct
  source 1..80: mol_type = other DNA
actggtgtagagtcccctcttcttgatcttccaccagcataatatgatagtaatttggtttctgttttgctgacttcaaa

SEQ ID NO: 42737 - DNA, 80 bp, synthetic construct
  source 1..80: mol_type = other DNA
atgggaaagtaggaagagctgtctgcaccaagggactcctggtttccacgggaatggagtagctctctgactgtctcgtt

SEQ ID NO: 42738 - DNA, 80 bp, synthetic construct
  source 1..80: mol_type = other DNA
acccgcgcgaggtaggcgctctggtgcttgccgaggacgcttccttcctcagatgcaccgatcttcccgatactgccttt

SEQ ID NO: 42739 - DNA, 80 bp, synthetic construct; identical to SEQ ID NO: 14559
  source 1..80: mol_type = other DNA

SEQ ID NO: 42740 - DNA, 80 bp, synthetic construct
  source 1..80: mol_type = other DNA
accgactgccgcgggctccgctgggcgattgcagccgagtccgtttctcgtctagctgccgccgcggcgaccgctgcctg

SEQ ID NO: 42741 - DNA, 80 bp, synthetic construct
  source 1..80: mol_type = other DNA
actctgaacgcgcaaatcgcgaggagactgagtctctggaagaagagaggagcttaggttccacggaaggagcatagaag

SEQ ID NO: 42742 - DNA, 80 bp, synthetic construct
  source 1..80: mol_type = other DNA
aatgtcgctgagtagagggtcgggctgcggaagatgcaactgagttgcaggaccgactacaattttaagaaatccgacag

SEQ ID NO: 42743 - DNA, 80 bp, synthetic construct
  source 1..80: mol_type = other DNA
ggtctaacagctgttagctgaatttgaacagcgctgctggtgatcacgtaagcttaagaggagaggataaaggcatccag

SEQ ID NO: 42744 - DNA, 80 bp, synthetic construct; identical to SEQ ID NO: 14560
  source 1..80: mol_type = other DNA

SEQ ID NO: 42745 - DNA, 80 bp, synthetic construct
  source 1..80: mol_type = other DNA
agtgacattcggcagttaaaagatttggtctggaatcactgccagtaccgcgcagcttcttcattaatattaccagtata

SEQ ID NO: 42746 - DNA, 80 bp, synthetic construct
  source 1..80: mol_type = other DNA
gagctccccagtttgcagacaattgcgacctcacatacacggtaatgaaaaaagatatctgggctccagagtttaaattt

SEQ ID NO: 42747 - DNA, 80 bp, synthetic construct
  source 1..80: mol_type = other DNA
gacatgccccacagaaaatgatatctaccgtgatcattgcatctcttttgcagtactgaaatcatactgaatattgtctg

SEQ ID NO: 42748 - DNA, 80 bp, synthetic construct; identical to SEQ ID NO: 14561
  source 1..80: mol_type = other DNA

SEQ ID NO: 42749 - DNA, 80 bp, synthetic construct
  source 1..80: mol_type = other DNA
tagagagggttattaaccctttctatgctttcttgaggggtttatctccatctagaggtgtcatggatgacagtgatgac

SEQ ID NO: 42750 - DNA, 80 bp, synthetic construct
  source 1..80: mol_type = other DNA
tctatgaatgacggagatattattatcctccattttatcggtgccattagatttttcccctcaatttttcaaggtattct

SEQ ID NO: 42751 - DNA, 80 bp, synthetic construct
  source 1..80: mol_type = other DNA
ataattgagtcaagcctcaataattttactgttccatgtatttccttcaaggaaacgtcatccctctccagctaagggaa

SEQ ID NO: 42752 - DNA, 80 bp, synthetic construct; identical to SEQ ID NO: 14562
  source 1..80: mol_type = other DNA

SEQ ID NO: 42753 - DNA, 80 bp, synthetic construct
  source 1..80: mol_type = other DNA
gatattttatgtcagtatcatatataaccccacctgattgttgtgaaacagatgggtattaagcactttgaaaattttaa

SEQ ID NO: 42754 - DNA, 80 bp, synthetic construct
  source 1..80: mol_type = other DNA
agacattttaagaaggctttttcatatactgagaacattgctgcaagacagtctagtcatctccattctagacaaacaac

SEQ ID NO: 42755 - DNA, 80 bp, synthetic construct; identical to SEQ ID NO: 14563
  source 1..80: mol_type = other DNA

SEQ ID NO: 42756 - DNA, 80 bp, synthetic construct
  source 1..80: mol_type = other DNA
gtccctaaattagtagccttcatggttttccatataacttgaaattctacattcaggaatttccctctttcatcttagtc

SEQ ID NO: 42757 - DNA, 80 bp, synthetic construct
  source 1..80: mol_type = other DNA
ttagcgttaatggcaaggtgtggggttgagctcaatgtaaaaataaaaagtgaaaactgaacaccactgaaaccaaagat

SEQ ID NO: 42758 - DNA, 80 bp, synthetic construct
  source 1..80: mol_type = other DNA
tctcccattttatctcagtaatcaagactcactgaatactcttcaattatagcttcctgtaatcaaagtagtaagacttg

SEQ ID NO: 42759 - DNA, 80 bp, synthetic construct
  source 1..80: mol_type = other DNA
atccagtttgcagttagggaaactgaggcatacaaagaggttaatctgttcaaactgaatgaacaaaaccaagcttgaaa

SEQ ID NO: 42760 - DNA, 80 bp, synthetic construct; identical to SEQ ID NO: 14564
  source 1..80: mol_type = other DNA

SEQ ID NO: 42761 - DNA, 80 bp, synthetic construct
  source 1..80: mol_type = other DNA
aaagacagaaatgaagtcagggaaataatgctattgtatgtagagatgactggacaggcagatgttactactgtgagttg

SEQ ID NO: 42762 - DNA, 80 bp, synthetic construct
  source 1..80: mol_type = other DNA
actgacagaaggatcagtaaaaatcgtttatctctttccgtaccgatagtgctcccgaaaacatggtgaatgttcctaaa

SEQ ID NO: 42763 - DNA, 80 bp, synthetic construct; identical to SEQ ID NO: 14565
  source 1..80: mol_type = other DNA

SEQ ID NO: 42764 - DNA, 80 bp, synthetic construct
  source 1..80: mol_type = other DNA
tcatatatcaggaaggtttcaagtcttgtctgatcccatttgccatgtatttccttttcatactagagtcaggaaaagta

SEQ ID NO: 42765 - DNA, 80 bp, synthetic construct
  source 1..80: mol_type = other DNA
gaaaaaccatatctgagtacaatacttagactaaagttatttcagggtagaaagaccatacttggaaaaattctaaatat

SEQ ID NO: 42766 - DNA, 80 bp, synthetic construct
  source 1..80: mol_type = other DNA
tttctctcccaaatgtatctatattctgtctgatcttcaaggtccgtttcaagccccacctcttgcaggaagcttttgtt

SEQ ID NO: 42767 - DNA, 80 bp, synthetic construct
  source 1..80: mol_type = other DNA
aattcaaggcatctaacagaataacagtttcccctgaaatgatttcaggtaatttctctgaacatattttagggcaataa

SEQ ID NO: 42768 - DNA, 80 bp, synthetic construct; identical to SEQ ID NO: 14566
  source 1..80: mol_type = other DNA

SEQ ID NO: 42769 - DNA, 80 bp, synthetic construct
  source 1..80: mol_type = other DNA
atgctttgtggcttgtgggtagattgttctagcatttttggttggtcaatgactcccagaggtctaataggcctgtatct

SEQ ID NO: 42770 - DNA, 80 bp, synthetic construct
  source 1..80: mol_type = other DNA
gaagatctggtgtctctccaacaaatattttttgaaacttcattttgaaaaagcagaaatgagctggtttctcaatagat

SEQ ID NO: 42771 - DNA, 80 bp, synthetic construct; identical to SEQ ID NO: 14567
  source 1..80: mol_type = other DNA

SEQ ID NO: 42772 - DNA, 80 bp, synthetic construct
  source 1..80: mol_type = other DNA
cagcaatggcttagttgaaattcagcaagagaatttcagttgagggcttaatgtacatttaacactttgttggatgctaa

SEQ ID NO: 42773 - DNA, 80 bp, synthetic construct
  source 1..80: mol_type = other DNA
tctctctttcctactctctcactcaggatgaatgaagaaaaaaatggtccagtcatttgcttaactcaggcctcagtttc

SEQ ID NO: 42774 - DNA, 80 bp, synthetic construct
  source 1..80: mol_type = other DNA
cctaaggttacaaatatagagtcacaaattgtataatatataaaatggggaagagaacatggagaaaactcccacaaatt

SEQ ID NO: 42775 - DNA, 80 bp, synthetic construct; identical to SEQ ID NO: 14568
  source 1..80: mol_type = other DNA

SEQ ID NO: 42776 - DNA, 80 bp, synthetic construct
  source 1..80: mol_type = other DNA
tgtccttcctaccttggattcattcgtggataacttttcttaattattccccatttcagtccattaatacagcttcagaa

SEQ ID NO: 42777 - DNA, 80 bp, synthetic construct
  source 1..80: mol_type = other DNA
gcacatctcccactctctttacaatggcaccaaataatgctacccaattcctgggcagagcatagataaggctaaaagtt

SEQ ID NO: 42778 - DNA, 80 bp, synthetic construct
  source 1..80: mol_type = other DNA
tgcttaattcagagaaagatgtacggtttgattggagggggtgaggaagaaggatatcatacagactataaagccaagaa

SEQ ID NO: 42779 - DNA, 80 bp, synthetic construct
  source 1..80: mol_type = other DNA
tttaaattttaagaaaatagacataattgtttgcacctcttacatggcacttagcacattgtattacattgttttttcct

SEQ ID NO: 42780 - DNA, 80 bp, synthetic construct; identical to SEQ ID NO: 14569
  source 1..80: mol_type = other DNA

SEQ ID NO: 42781 - DNA, 80 bp, synthetic construct
  source 1..80: mol_type = other DNA
aaatttggagttaactagaacctaagttctagtctgttataagcctctatgtcctcctccgccaaaagagaaaatcagac

SEQ ID NO: 42782 - DNA, 80 bp, synthetic construct
  source 1..80: mol_type = other DNA
aaatctcaagtcaatattcacttcaggtctctaacttgtcattttccattcactccagtgccctacatttgaaatgattc

SEQ ID NO: 42783 - DNA, 80 bp, synthetic construct; identical to SEQ ID NO: 14570
  source 1..80: mol_type = other DNA

SEQ ID NO: 42784 - DNA, 80 bp, synthetic construct
  source 1..80: mol_type = other DNA
taaaacagttttcaatattaaaatgtttaatacatatatagaaattgaaaaagaagtaaaggttaaatggatcaaaatgc

SEQ ID NO: 42785 - DNA, 80 bp, synthetic construct
  source 1..80: mol_type = other DNA
ctatagctctaaaggcttcagaaagagagattacaaataacatgtagacaactccaaatttcttgatcttactacagatt

SEQ ID NO: 42786 - DNA, 80 bp, synthetic construct
  source 1..80: mol_type = other DNA
ttttcagcctaagagcaattcttatattctgtttcctgttttctcctccctaattttttatcttattttctaacgaaggc

SEQ ID NO: 42787 - DNA, 80 bp, synthetic construct; identical to SEQ ID NO: 14571
  source 1..80: mol_type = other DNA

SEQ ID NO: 42788 - DNA, 80 bp, synthetic construct
  source 1..80: mol_type = other DNA
tgcgatcatagctcactgcaaccccgaactcctgggctcaagcgattctctcacctcagcctctcgagtagctggaactg

SEQ ID NO: 42789 - DNA, 80 bp, synthetic construct
  source 1..80: mol_type = other DNA
cggccctaaaatttcattctatttccagtactttcccctctcttcatgtcatggatatttagttccagagaacttcagat

SEQ ID NO: 42790 - DNA, 80 bp, synthetic construct
  source 1..80: mol_type = other DNA
ggttttctacaaagaatcagacattcatttgcatgtggtcaagatttaaataacaatagactgactaatgagcaatatga

SEQ ID NO: 42791 - DNA, 80 bp, synthetic construct; identical to SEQ ID NO: 14572
  source 1..80: mol_type = other DNA

SEQ ID NO: 42792 - DNA, 80 bp, synthetic construct
  source 1..80: mol_type = other DNA
attgcataccctggatttaaacatttaaaatatactgtgcatgtggataaggtagcaatgtttgctttaaatacaagtat

SEQ ID NO: 42793 - DNA, 80 bp, synthetic construct
  source 1..80: mol_type = other DNA
tgctgaatatcaataacgtaaatgctgagtttatggtttagcttcatgattagaaattgtcttattcctttattatattt

SEQ ID NO: 42794 - DNA, 80 bp, synthetic construct
  source 1..80: mol_type = other DNA
ttgtattcagaactcctttgagtctttggggggtgatcccaaatggcaggaagaagaaaaagaaaagttatttatagctt

SEQ ID NO: 42795 - DNA, 80 bp, synthetic construct; identical to SEQ ID NO: 14573
  source 1..80: mol_type = other DNA

SEQ ID NO: 42796 - DNA, 80 bp, synthetic construct
  source 1..80: mol_type = other DNA
cgtggttgtgtgtgcctgtaatcccagctatttgggaggctgaggcaggagaatcacttgaacccagaaggcagaggttg

SEQ ID NO: 42797 - DNA, 80 bp, synthetic construct
  source 1..80: mol_type = other DNA
tagagtcacaaaactgtcaagggaggatttagcaaacattttacggttcctaccattgagaaatttatcttctatttggg

SEQ ID NO: 42798 - DNA, 80 bp, synthetic construct
  source 1..80: mol_type = other DNA
gaaatgaattggagcttgaggacaagtagggtttgaattgacacagaaggacaatattccaaagggccataggatattca

SEQ ID NO: 42799 - DNA, 80 bp, synthetic construct
  source 1..80: mol_type = other DNA
tgaaaatgtgatactggatctctggagatagaatttcgaacaatccatgctacactagtttagctaaatttcaaaattgt

SEQ ID NO: 42800 - DNA, 80 bp, synthetic construct; identical to SEQ ID NO: 14574
  source 1..80: mol_type = other DNA

SEQ ID NO: 42801 - DNA, 80 bp, synthetic construct
  source 1..80: mol_type = other DNA
tacaaaaacctctttaccccaaagcccagagaggaagtgtaaatttggatcaacccttttgggtgccattttcactatca

SEQ ID NO: 42802 - DNA, 80 bp, synthetic construct
  source 1..80: mol_type = other DNA
cagcaaacaggagttgagtgccttttgtgtgtttagcaatgtattagattatttgaatgatgccaatagaaatatgtaag

SEQ ID NO: 42803 - DNA, 80 bp, synthetic construct
  source 1..80: mol_type = other DNA
gccaaaaagtcatccattttatgagattatttttaggaataccagcaaagtactttataattcctaaatgcatggataac

SEQ ID NO: 42804 - DNA, 80 bp, synthetic construct; identical to SEQ ID NO: 14575
  source 1..80: mol_type = other DNA

SEQ ID NO: 42805 - DNA, 80 bp, synthetic construct
  source 1..80: mol_type = other DNA
caggaagtacatttgcatttttggcttcaaaaattagaaagttaatacaagtatgtgaatactttcaaaattatgacttg

SEQ ID NO: 42806 - DNA, 80 bp, synthetic construct
  source 1..80: mol_type = other DNA
atgactgaccagttaacaggccatgtgctcttatttatgatagcctttatttcttaatttatttgagcaatcgaagtctg

SEQ ID NO: 42807 - DNA, 80 bp, synthetic construct; identical to SEQ ID NO: 14576
  source 1..80: mol_type = other DNA

SEQ ID NO: 42808 - DNA, 80 bp, synthetic construct
  source 1..80: mol_type = other DNA
atgttacaatcacattttaaatagttaactttcactgaggtgtgcacaaaggaatggtgatgagaaggaaagtacatagc

SEQ ID NO: 42809 - DNA, 80 bp, synthetic construct
  source 1..80: mol_type = other DNA
tctagtaaatatagagcagaatctcggagataggaggaagtccaagaaagaaatcacggacacttctaatgaaaaggaaa

SEQ ID NO: 42810 - DNA, 80 bp, synthetic construct
  source 1..80: mol_type = other DNA
ataaggcgttgagccaagattcaaacccatatctgtctaattacaaaggttgtgtgctctttttccatagtaccttgatt

SEQ ID NO: 42811 - DNA, 80 bp, synthetic construct; identical to SEQ ID NO: 14577
  source 1..80: mol_type = other DNA

SEQ ID NO: 42812 - DNA, 80 bp, synthetic construct
  source 1..80: mol_type = other DNA
tgggaaataaaaggcagttataataacacaggaaacattttgactgcatattccatgaaattactactgtctttatactt

SEQ ID NO: 42813 - DNA, 80 bp, synthetic construct
  source 1..80: mol_type = other DNA
atgttttcttccatcatacaacttcagatcgacaatatattttgtattgaattgttttctttaatttttacagtgaaact

SEQ ID NO: 42814 - DNA, 80 bp, synthetic construct
  source 1..80: mol_type = other DNA
actcatttctgaattcattagcttttaaactctttctttttttttaggaaaatcaccagtggtctatatgctggtacaat

SEQ ID NO: 42815 - DNA, 80 bp, synthetic construct
  source 1..80: mol_type = other DNA
gtccgaaaagagagtcagtgaagggagatgagggtggggctgttttataggatttgggtaggtaaaggaaaattacagtc

SEQ ID NO: 42816 - DNA, 80 bp, synthetic construct
  source 1..80: mol_type = other DNA
tcagttaaggtggggtagggcattttcacttcttttgtgattcttcagttacttcaggccatctggatgtatacatgcaa

SEQ ID NO: 42817 - DNA, 80 bp, synthetic construct
  source 1..80: mol_type = other DNA
ctgcttcaagcaggattaggggcggcgtgggaacctagagtgggagggattaagctgaagggaggtcttgtggtaagggg

SEQ ID NO: 42818 - DNA, 80 bp, synthetic construct
  source 1..80: mol_type = other DNA
agagtgcttaaggagatttggcatagtcctgccagcaaagattatttatttacttcaagagttaagagtggcagtttggg

SEQ ID NO: 42819 - DNA, 80 bp, synthetic construct
  source 1..80: mol_type = other DNA
tctaagttggtctggtgtctggaatgagactggggcctaataaaaaggagcgtctatacaggagcttaaatgggctgtac

SEQ ID NO: 42820 - DNA, 80 bp, synthetic construct; identical to SEQ ID NO: 14579
  source 1..80: mol_type = other DNA

SEQ ID NO: 42821 - DNA, 80 bp, synthetic construct
  source 1..80: mol_type = other DNA
ctaagaggtattttagttatctgactcagggcttgttgagtaaagctaatttgccagtcctgggtggggcaaatcctcga

SEQ ID NO: 42822 - DNA, 80 bp, synthetic construct
  source 1..80: mol_type = other DNA
cctgcctttgctggtgtgtggcgattaggcctggtggaaccgccatcaataaatcaagcgtgatcagggtgaggaacagg

SEQ ID NO: 42823 - DNA, 80 bp, synthetic construct
  source 1..80: mol_type = other DNA
tgaaggagccgggaagcagaaagtatatgcgtcaggtatgaggaagaaaatagattttggaagttatgagaactgtagag

SEQ ID NO: 42824 - DNA, 80 bp, synthetic construct; identical to SEQ ID NO: 14580
  source 1..80: mol_type = other DNA

SEQ ID NO: 42825 - DNA, 80 bp, synthetic construct
  source 1..80: mol_type = other DNA
agtctaagtgaaagtgaagagaggctgggatgaagggtgcaaaggaatagtaaagaaagcatgtttgagatccagaacag

SEQ ID NO: 42826 - DNA, 80 bp, synthetic construct
  source 1..80: mol_type = other DNA
agagtttataggctttaaaaggccatgctgtagcaggcgagtgataacaggctttaatctttttaaggcgtgctgcggga

SEQ ID NO: 42827 - DNA, 80 bp, synthetic construct
  source 1..80: mol_type = other DNA
aagggcggcaatgagatttagctgtagtccaggaatagtcagggaagcaggtaatttagttaaagtgtctcagcctaata

SEQ ID NO: 42828 - DNA, 80 bp, synthetic construct; identical to SEQ ID NO: 14581
  source 1..80: mol_type = other DNA

SEQ ID NO: 42829 - DNA, 80 bp, synthetic construct
  source 1..80: mol_type = other DNA
ggtcccacacagatgggacacggcttaggaggaatcctgggctgcgggcattccttggcctggtggtcagatttctggca

SEQ ID NO: 42830 - DNA, 80 bp, synthetic construct
  source 1..80: mol_type = other DNA
aggttaattaaatcctgttgtggggtttgagggccggaatttaatttttggagttttatttaatgtcaggagcagattgg

SEQ ID NO: 42831 - DNA, 80 bp, synthetic construct
  source 1..80: mol_type = other DNA
aggagcattaaccttgactatgcctttagctccagccacctttttaagagtaaattgctgggcaggagggggagggctag

SEQ ID NO: 42832 - DNA, 80 bp, synthetic construct; identical to SEQ ID NO: 14582
  source 1..80: mol_type = other DNA

SEQ ID NO: 42833 - DNA, 80 bp, synthetic construct
  source 1..80: mol_type = other DNA
cgagttggtattggggtgaagcggcattgcagaagaaaataaggcatttaggttttaggtcaggtgtgagttgaagaggt

SEQ ID NO: 42834 - DNA, 80 bp, synthetic construct
  source 1..80: mol_type = other DNA
ggcacagagataagaggttggggggcagaaataagggattggggcgcagagaaataagaggttggggcacggaaataagg

SEQ ID NO: 42835 - DNA, 80 bp, synthetic construct; identical to SEQ ID NO: 14583
  source 1..80: mol_type = other DNA

SEQ ID NO: 42836 - DNA, 80 bp, synthetic construct
  source 1..80: mol_type = other DNA
ggtgaaggatcaaggcaggcgtccctgcgtggtctgacacccttgaaacgtgggtgtataatcagagaggcgtccctgca

SEQ ID NO: 42837 - DNA, 80 bp, synthetic construct
  source 1..80: mol_type = other DNA
atggacagtgagagaggttggagaagagagtaagaagaggccgtttacctgatttaaaattggtgagatgttccttgggc

SEQ ID NO: 42838 - DNA, 80 bp, synthetic construct; identical to SEQ ID NO: 14578
  source 1..80: mol_type = other DNA

SEQ ID NO: 42839 - DNA, 80 bp, synthetic construct
  source 1..80: mol_type = other DNA
aaggaccggccatttacacttcttttgtggtggaatgtcatcagttaaggtggggcagggcatattcacttcttttgtga

SEQ ID NO: 42840 - DNA, 80 bp, synthetic construct; identical to SEQ ID NO: 14584
  source 1..80: mol_type = other DNA

SEQ ID NO: 42841 - DNA, 80 bp, synthetic construct
  source 1..80: mol_type = other DNA
tcatagtgcttcagttgtttggcacatttgtcatatctttaattttttttgatgtcctgctccacccttccatatcacta

SEQ ID NO: 42842 - DNA, 80 bp, synthetic construct
  source 1..80: mol_type = other DNA
cctggccaacttggtgaaaccccatttctactaaaaataaattagctgggcatggtggtgcgtgcctgtaatcccagcta

SEQ ID NO: 42843 - DNA, 80 bp, synthetic construct; identical to SEQ ID NO: 14585
  source 1..80: mol_type = other DNA

SEQ ID NO: 42844 - DNA, 80 bp, synthetic construct
  source 1..80: mol_type = other DNA
aagatctgctttttccttcgaagtaatggctttaactccgaatcacttttaacagttttattgacctgtaattcacatac

SEQ ID NO: 42845 - DNA, 80 bp, synthetic construct
  source 1..80: mol_type = other DNA
tacaatcactccacatacttcttcaacccccagcactaggcaaccagtaatcctttttatctctgtagatttgcttattc

SEQ ID NO: 42846 - DNA, 80 bp, synthetic construct
  source 1..80: mol_type = other DNA
atttatttggctaagttcttaattttttcacacttctgaaatgaaagtaataaaattttgtctctgagcttctgtcatcc

SEQ ID NO: 42847 - DNA, 80 bp, synthetic construct
  source 1..80: mol_type = other DNA
gtccaatcaagatttgtcaaacaaaactatcctttccagagaagaggcatttacctcaaaaaaacttttgtgtacgtggt

SEQ ID NO: 42848 - DNA, 80 bp, synthetic construct; identical to SEQ ID NO: 14586
  source 1..80: mol_type = other DNA

SEQ ID NO: 42849 - DNA, 80 bp, synthetic construct
  source 1..80: mol_type = other DNA
ttcccattaaacaatacatttcataatacctaataaaataagaaaatagatcctattaattacatcctcaaatacatatt

SEQ ID NO: 42850 - DNA, 80 bp, synthetic construct
  source 1..80: mol_type = other DNA
cctatggtttttttctgttgtaattactcttttggttgaccacgttcggttggacttctgaccattgttccaagcatcca

SEQ ID NO: 42851 - DNA, 80 bp, synthetic construct
  source 1..80: mol_type = other DNA
taaagaggatgaggcaaggggatatgtatgtatgctttaaatagtctataaataagactcagtgaaagatgaaaatatcg

SEQ ID NO: 42852 - DNA, 80 bp, synthetic construct; identical to SEQ ID NO: 14587
  source 1..80: mol_type = other DNA

SEQ ID NO: 42853 - DNA, 80 bp, synthetic construct
  source 1..80: mol_type = other DNA
catgaatatcgaaaagagtgcattaagctctttgtaatgactgcatttcctcatcctgctcaggactgactactggcatt

SEQ ID NO: 42854 - DNA, 80 bp, synthetic construct
  source 1..80: mol_type = other DNA
gggttcttatgacttttaaagcatcattttgaattgaagctactattttatattatcttttctcagggtgggctgaaaac

SEQ ID NO: 42855 - DNA, 80 bp, synthetic construct; identical to SEQ ID NO: 14588
  source 1..80: mol_type = other DNA

SEQ ID NO: 42856 - DNA, 80 bp, synthetic construct
  source 1..80: mol_type = other DNA
gatagatgcaaaatgttaatataaagaatgtcgtgatcaggaggaagggaagaagcaagtgagcctcaagagaaaaaaat

SEQ ID NO: 42857 - DNA, 80 bp, synthetic construct
  source 1..80: mol_type = other DNA
taatgttttagtgttaaatatctcaatcttcccctaagggggaaaaaaaacgcaaaaataaattcttcgtgaataaatgg

SEQ ID NO: 42858 - DNA, 80 bp, synthetic construct
  source 1..80: mol_type = other DNA
cataacaggtcattaatgtgtattgagatgatctcatgcgtttctgcgatgcgatgtataattcttgttgtatagaataa

SEQ ID NO: 42859 - DNA, 80 bp, synthetic construct; identical to SEQ ID NO: 14589
  source 1..80: mol_type = other DNA

SEQ ID NO: 42860 - DNA, 80 bp, synthetic construct
  source 1..80: mol_type = other DNA
cgtcattctcctgcctcagcctcccgagtagctgagactataggcgcccgccaccacgcccggctatttttttgtatttt

SEQ ID NO: 42861 - DNA, 80 bp, synthetic construct
  source 1..80: mol_type = other DNA
gaactattttttactttcataaggaatgaaaaatataatttgttggtgtagtacattgtatcttgcatgatgtaaggggt

SEQ ID NO: 42862 - DNA, 80 bp, synthetic construct
  source 1..80: mol_type = other DNA
atctttacatcactcaattttacttactaggctgagtgcaagagttagctttatatttttaaaaataatccctgcattta

SEQ ID NO: 42863 - DNA, 80 bp, synthetic construct; identical to SEQ ID NO: 14590
  source 1..80: mol_type = other DNA

SEQ ID NO: 42864 - DNA, 80 bp, synthetic construct
  source 1..80: mol_type = other DNA
ctataggaatggggtccggatccagaccccaagagagggttcttggatcttgcacaagaaataattcagggcaagtctgt

SEQ ID NO: 42865 - DNA, 80 bp, synthetic construct
  source 1..80: mol_type = other DNA
ccgatctcggctcactgcaacttccgcctcccgggttcaagcaattctccctgcctcagcctcctgagcagctggaatta

SEQ ID NO: 42866 - DNA, 80 bp, synthetic construct
  source 1..80: mol_type = other DNA
cctggttgcccatttttatggttatttactgatgatatgtaaaacaaggggtggattattcatgcttcccctttttagac

SEQ ID NO: 42867 - DNA, 80 bp, synthetic construct
  source 1..80: mol_type = other DNA
cttcatgatctgtatcttgtgctgacctcctatctcatcctgtgacttagaatgcctcaactgtctgggaatgcagccca

SEQ ID NO: 42868 - DNA, 80 bp, synthetic construct; identical to SEQ ID NO: 14591
  source 1..80: mol_type = other DNA

SEQ ID NO: 42869 - DNA, 80 bp, synthetic construct
  source 1..80: mol_type = other DNA
ttattttgctagtgtagacctacccctgaactagtaaaacatatgccattaagggcctaacatgtttgaaaaagaatatt

SEQ ID NO: 42870 - DNA, 80 bp, synthetic construct
  source 1..80: mol_type = other DNA
agaccccttaccgaactgttaaccaccaccgcagatttatagtaaataagtataaagtatgatagtataaattgggacaa

SEQ ID NO: 42871 - DNA, 80 bp, synthetic construct
  source 1..80: mol_type = other DNA
tcaagtgattctcctgcctcagcctctgggtagctaggattacaggtgcatgccaccacaccaggctaatttttgtattt

SEQ ID NO: 42872 - DNA, 80 bp, synthetic construct; identical to SEQ ID NO: 14592
  source 1..80: mol_type = other DNA

SEQ ID NO: 42873 - DNA, 80 bp, synthetic construct
  source 1..80: mol_type = other DNA
taaacaaggtgaatttaaattggattccttattttcgactccagactgcatggggaattctcaattaaatttctgattgt

SEQ ID NO: 42874 - DNA, 80 bp, synthetic construct
  source 1..80: mol_type = other DNA
tgaaaagtcgaagtctatcaaaattcgaaagaggatagggatggaataaggttgggaatgtctgctgcacatgttaataa

SEQ ID NO: 42875 - DNA, 80 bp, synthetic construct
  source 1..80: mol_type = other DNA
tcaccatttaagatgatggcaaaggtaactttctttaatacatattgaaaagagttcttgatgctatcaacagctttcca

SEQ ID NO: 42876 - DNA, 80 bp, synthetic construct; identical to SEQ ID NO: 14593
  source 1..80: mol_type = other DNA

SEQ ID NO: 42877 - DNA, 80 bp, synthetic construct
  source 1..80: mol_type = other DNA
tactgtcttcctttcaatgctattctgtccttaccatgttgtttttcgacctctatgtgccaaatattcacaactccata

SEQ ID NO: 42878 - DNA, 80 bp, synthetic construct
  source 1..80: mol_type = other DNA
catggtttaacatgtggttcctataactgaatcccttgatgagctgaaggggaaaatatgcctcaaatctcatcatgtag

SEQ ID NO: 42879 - DNA, 80 bp, synthetic construct; identical to SEQ ID NO: 14594
  source 1..80: mol_type = other DNA

SEQ ID NO: 42880 - DNA, 80 bp, synthetic construct
  source 1..80: mol_type = other DNA
tgcctcagcctcttgggtagctgggattacaggtgcccaccaccacacccacctaatttttgtatttttagtagagacag

SEQ ID NO: 42881 - DNA, 80 bp, synthetic construct
  source 1..80: mol_type = other DNA
catttgaacttagtaataccttccgtaaagccttacttatgctacctattctactgtgctatagatgtatgtatatattt

SEQ ID NO: 42882 - DNA, 80 bp, synthetic construct
  source 1..80: mol_type = other DNA
gtctcctgtgaaaataatcagttggacaactgtgctcctcctgagttgtataaggtttgtgatatcagtaagtatcaaag

SEQ ID NO: 42883 - DNA, 80 bp, synthetic construct; identical to SEQ ID NO: 14595
  source 1..80: mol_type = other DNA

SEQ ID NO: 42884 - DNA, 80 bp, synthetic construct
  source 1..80: mol_type = other DNA
tgaccagtctgggcaatatagtgagactcccatctctacaaaaaatttaaaaattagccaggcatgatggtgcaaacctg

SEQ ID NO: 42885 - DNA, 80 bp, synthetic construct
  source 1..80: mol_type = other DNA
tagaccataacaaatagcaaatgttgcttacattgatagacaattccatcatttcactttgcagtttgttgtagttatct

SEQ ID NO: 42886 - DNA, 80 bp, synthetic construct
  source 1..80: mol_type = other DNA
agtcaaacatattctgtaaatatatacacctgctatgtacccacaaaaactaaaaattaaaaaataatttatgaaaggag

SEQ ID NO: 42887 - DNA, 80 bp, synthetic construct; identical to SEQ ID NO: 14596
  source 1..80: mol_type = other DNA

SEQ ID NO: 42888 - DNA, 80 bp, synthetic construct
  source 1..80: mol_type = other DNA
gataactgttaaaactatctgccacacatatttttcactcaatagtctgtgccaaaattcaacaagactaacaacatagt

SEQ ID NO: 42889 - DNA, 80 bp, synthetic construct
  source 1..80: mol_type = other DNA
tctggttttcaacatatgtctttcaaaaatcggattgactttttaaattatacattttcaaaacattaatatcttcttaa

SEQ ID NO: 42890 - DNA, 80 bp, synthetic construct
  source 1..80: mol_type = other DNA
aaacgtaacatagttctttcaaataaaatacagacattttaattgtgtggaagcttttatatgctgtgtgaagtgactat

SEQ ID NO: 42891 - DNA, 80 bp, synthetic construct; identical to SEQ ID NO: 14597
  source 1..80: mol_type = other DNA

SEQ ID NO: 42892 - DNA, 80 bp, synthetic construct
  source 1..80: mol_type = other DNA
gtaagaaaatactctcaatgtgttgcaagtttcttagcatcacggggaattgcactgttattcagataactggattaaca

SEQ ID NO: 42893 - DNA, 80 bp, synthetic construct
  source 1..80: mol_type = other DNA
gaataaccttctaactagttctcccaattacgcatttgcactcccaaatccgttctcccaattcttattgctcctaggaa

SEQ ID NO: 42894 - DNA, 80 bp, synthetic construct
  source 1..80: mol_type = other DNA
ttgtgccttctgttgtgaatactaccttgcattccccatctctcctaatacttacatcaccagtacaccatttaactcct

SEQ ID NO: 42895 - DNA, 80 bp, synthetic construct
  source 1..80: mol_type = other DNA
tatacatttgtttttgtgattccttgaggattcctgtctcctccactagatgttaattaactccatgagatcaggaacag

SEQ ID NO: 42896 - DNA, 80 bp, synthetic construct; identical to SEQ ID NO: 14598
  source 1..80: mol_type = other DNA

SEQ ID NO: 42897 - DNA, 80 bp, synthetic construct
  source 1..80: mol_type = other DNA
agcaaaaattttgaataagtttcacttgccctgtttcatgcagcacgaggttcacattcacattttaagatagcagataa

SEQ ID NO: 42898 - DNA, 80 bp, synthetic construct
  source 1..80: mol_type = other DNA
tgaacataattgaaatatggtgttactaaatgaataccttgctaagtgatataatgcttagttcatatactttcctggct

SEQ ID NO: 42899 - DNA, 80 bp, synthetic construct; identical to SEQ ID NO: 14599
  source 1..80: mol_type = other DNA

SEQ ID NO: 42900 - DNA, 80 bp, synthetic construct
  source 1..80: mol_type = other DNA
gcctggctaatttttgtatttttagtagagacgaggtttcaccatgttggcaaggatggtctcaaactccggacctcaag

SEQ ID NO: 42901 - DNA, 80 bp, synthetic construct
  source 1..80: mol_type = other DNA
aaggtaatgaatcaggggatgagaaacttttgaaaagagctagatgataaatattttggatatgggaaccatgtaggctc

SEQ ID NO: 42902 - DNA, 80 bp, synthetic construct
  source 1..80: mol_type = other DNA
taggccatacaaaaacagtctgttgttgccaaccaccctgctatggtataagatgccgatcgataactgttgtagaggct

SEQ ID NO: 42903 - DNA, 80 bp, synthetic construct
  source 1..80: mol_type = other DNA
aagccagcaacagcattagtatgttctctgaactgaaagcaatggattgtggcctgagaagaacaagcccgtctaggttg

SEQ ID NO: 42904 - DNA, 80 bp, synthetic construct; identical to SEQ ID NO: 14600
  source 1..80: mol_type = other DNA

SEQ ID NO: 42905 - DNA, 80 bp, synthetic construct
  source 1..80: mol_type = other DNA
taagaactgaggattgaagatttgaaaaatggtctccccagatgcctcagtgtctgactgactttgctgataagctacag

SEQ ID NO: 42906 - DNA, 80 bp, synthetic construct
  source 1..80: mol_type = other DNA
aaaatccagtgcttttggaaactctcttctcccaattatttttctatttcccatctcgttctcacccatttccccacagg

SEQ ID NO: 42907 - DNA, 80 bp, synthetic construct; identical to SEQ ID NO: 14601
  source 1..80: mol_type = other DNA

SEQ ID NO: 42908 - DNA, 80 bp, synthetic construct
  source 1..80: mol_type = other DNA
ttttaaatactggctaaccatgagaggaaaggcagtaaggttttattaatagaagttagaaagggtagcaaatatagaca

SEQ ID NO: 42909 - DNA, 80 bp, synthetic construct
  source 1..80: mol_type = other DNA
tcacaacattccaatgactggttattattacctatatttaacatatgaggcctaggggcttaagcgagttatccacagtc

SEQ ID NO: 42910 - DNA, 80 bp, synthetic construct
  source 1..80: mol_type = other DNA
aacatgaaagtcaacacaaaataagtttgccagaatgattaaatgaaacagcccacttaaagtttctggcatacagaagc

SEQ ID NO: 42911 - DNA, 80 bp, synthetic construct; identical to SEQ ID NO: 14602
  source 1..80: mol_type = other DNA

SEQ ID NO: 42912 - DNA, 80 bp, synthetic construct
  source 1..80: mol_type = other DNA
tctacaagttgtctctttttttgttgttgttttttttttttttttttttgagacagagtcttgctctgttgcccaggctg

SEQ ID NO: 42913 - DNA, 80 bp, synthetic construct
  source 1..80: mol_type = other DNA
actcctggactcatgtgatccgcccgcctcagcctcccaaagtgctaggattatgggcgtgacctaccccacccagcccc

SEQ ID NO: 42914 - DNA, 80 bp, synthetic construct
  source 1..80: mol_type = other DNA
aaattggatatgtacttatctctgcaaattcattttgacaaaacacatcatattctcctagatataaaagcacaaatgaa

SEQ ID NO: 42915 - DNA, 80 bp, synthetic construct
  source 1..80: mol_type = other DNA
cctttaaagcataagataaaatttcagtttacaacctgatctttatgttattgactaacagcaacctctgattccaaaag

SEQ ID NO: 42916 - DNA, 80 bp, synthetic construct; identical to SEQ ID NO: 14603
  source 1..80: mol_type = other DNA

SEQ ID NO: 42917 - DNA, 80 bp, synthetic construct
  source 1..80: mol_type = other DNA
caatagttggtgccaccttcaccataataaatgagttcctgctctgttaatttccatgacagctggttgttcaaaagagc

SEQ ID NO: 42918 - DNA, 80 bp, synthetic construct
  source 1..80: mol_type = other DNA
acagcctgggcttttctaaaatattctctacttatagtttgggtgtttgaccctccaaatctcatgttgaaatttaatcc

SEQ ID NO: 42919 - DNA, 80 bp, synthetic construct; identical to SEQ ID NO: 14604
  source 1..80: mol_type = other DNA

SEQ ID NO: 42920 - DNA, 80 bp, synthetic construct
  source 1..80: mol_type = other DNA
aaatggattaagacagaaagtgagaagtggcttttgagctcaacattgaagacagaatagaatttagaatttgaaggggg

SEQ ID NO: 42921 - DNA, 80 bp, synthetic construct
  source 1..80: mol_type = other DNA
gtaataggagatcagctggaataggtaagtgacagcaacttccagcagctctaccttcattaaatgttatgatatcatga

SEQ ID NO: 42922 - DNA, 80 bp, synthetic construct
  source 1..80: mol_type = other DNA
gatatttacggtagctcttctaaagagaaactcctgttaagtgcttagacatatgggactggccagcctaggcaacatgt

SEQ ID NO: 42923 - DNA, 80 bp, synthetic construct; identical to SEQ ID NO: 14605
  source 1..80: mol_type = other DNA

SEQ ID NO: 42924 - DNA, 80 bp, synthetic construct
  source 1..80: mol_type = other DNA
gagaattgatttatattcctaaagggggcactaaagcaaatgaaatagaaggaattcatatgatttgttttcagtttcta

SEQ ID NO: 42925 - DNA, 80 bp, synthetic construct
  source 1..80: mol_type = other DNA
aatttgaatagtagtagttggcagaatacagattcagtgtctctgacttcattaaacgttatgatatcatggcctacaga

SEQ ID NO: 42926 - DNA, 80 bp, synthetic construct
  source 1..80: mol_type = other DNA
ctcttgtcacaaggaaagaatgttgttcattgccctaaattattcataagttttcacataatttgctgtaaaccatagac

SEQ ID NO: 42927 - DNA, 80 bp, synthetic construct; identical to SEQ ID NO: 14606
  source 1..80: mol_type = other DNA

SEQ ID NO: 42928 - DNA, 80 bp, synthetic construct
  source 1..80: mol_type = other DNA
ggatgaattgtataatcattttctgtcattatctctttcatatcattgcacagtctcctttttatgccccatgcaggccc

SEQ ID NO: 42929 - DNA, 80 bp, synthetic construct
  source 1..80: mol_type = other DNA
agatcataggatcagaaagtaaagcttataaatctgctttctaaagagtgcagtgcccagtagctcatcctcacaggctt

SEQ ID NO: 42930 - DNA, 80 bp, synthetic construct
  source 1..80: mol_type = other DNA
tttgatggaaatatttaagtaatgtgaatttgctctcttttttaaaagcagtatttaaatagtatctattttatgcctaa

SEQ ID NO: 42931 - DNA, 80 bp, synthetic construct
  source 1..80: mol_type = other DNA
gctcccgagtagctgggactacaggcgtgcaccaccatgccaggctaatttttttttttttttttttttttttgcatttt

SEQ ID NO: 42932 - DNA, 80 bp, synthetic construct; identical to SEQ ID NO: 14607
  source 1..80: mol_type = other DNA

SEQ ID NO: 42933 - DNA, 80 bp, synthetic construct
  source 1..80: mol_type = other DNA
caatataagaatttaggattaaggctgttgatatcatacttacatataaaacaattattttgggtactacaactgctttt

SEQ ID NO: 42934 - DNA, 80 bp, synthetic construct
  source 1..80: mol_type = other DNA
tgatctgtgcatttaagagagtatctatactctggttacccaacagtttagaaacgggtctccattggaaaaacagaaac

SEQ ID NO: 42935 - DNA, 80 bp, synthetic construct
  source 1..80: mol_type = other DNA
ccccgactcctaaagtgggtaatgcttacttttaaattgttttcctcctcttcattttttaaaagccgttagccaagaag

SEQ ID NO: 42936 - DNA, 80 bp, synthetic construct; identical to SEQ ID NO: 14608
  source 1..80: mol_type = other DNA

SEQ ID NO: 42937 - DNA, 80 bp, synthetic construct
  source 1..80: mol_type = other DNA
acaatggtgattcatacaccaagggttataattaatccagttctgtgcactagaggccagattattcctagaattcaagg

SEQ ID NO: 42938 - DNA, 80 bp, synthetic construct
  source 1..80: mol_type = other DNA
tgaagcaaacaatgaagaaaaaggtaacgattatttgccaatggctgcttgaggtggcagattttcagcgataaccaaga

SEQ ID NO: 42939 - DNA, 80 bp, synthetic construct
  source 1..80: mol_type = other DNA
aaatagtcattcaacatatatgccaacataaaatagttggatctaaagcaacttttcttttgtaaggggaaattataaga

SEQ ID NO: 42940 - DNA, 80 bp, synthetic construct; identical to SEQ ID NO: 14609
  source 1..80: mol_type = other DNA

SEQ ID NO: 42941 - DNA, 80 bp, synthetic construct
  source 1..80: mol_type = other DNA
accatgttgagtgaatgaagcaatgggttctgagatgtttctggtcacctacccactccctcctttaagcttgttcttct

SEQ ID NO: 42942 - DNA, 80 bp, synthetic construct
  source 1..80: mol_type = other DNA
tacatatctcctgggtcctatgacctgcctaaaaaaagtgagagagtggagagacagatccaggcagctcagtaactgct

SEQ ID NO: 42943 - DNA, 80 bp, synthetic construct
  source 1..80: mol_type = other DNA
cagctgggcatggtggcgcacacatgtagtcccagctactcgggaggctgaggccagagaatcccttgaacctgggaggt

SEQ ID NO: 42944 - DNA, 80 bp, synthetic construct; identical to SEQ ID NO: 14610
  source 1..80: mol_type = other DNA

SEQ ID NO: 42945 - DNA, 80 bp, synthetic construct
  source 1..80: mol_type = other DNA
gtgatgaaaatgagattataattatcttatagatgatggcacccatgtatttgccccacatttctactagcttcctgaca

SEQ ID NO: 42946 - DNA, 80 bp, synthetic construct
  source 1..80: mol_type = other DNA
tggccccctttttgtccatcatgacaccttcaaatactcaagtccccactaatctctctctctctaccacataatttgac

SEQ ID NO: 42947 - DNA, 80 bp, synthetic construct
  source 1..80: mol_type = other DNA
ggataaattaatgtaagttatctatgaagtcagccatcaatttttgtaaccaaaactggaggcaagctttagaagattga

SEQ ID NO: 42948 - DNA, 80 bp, synthetic construct; identical to SEQ ID NO: 14611
  source 1..80: mol_type = other DNA

SEQ ID NO: 42949 - DNA, 80 bp, synthetic construct
  source 1..80: mol_type = other DNA
tgatatgtaaaacccagtaaaaaagatgacacatctttcctgacaattggcaaggattaatataatgagttctttatgcc

SEQ ID NO: 42950 - DNA, 80 bp, synthetic construct
  source 1..80: mol_type = other DNA
atgtgaacatcaagtatgtgggtgatatggaatgggagtagaaattggcccgtgcctttatataaacctccttgtcttga

SEQ ID NO: 42951 - DNA, 80 bp, synthetic construct
  source 1..80: mol_type = other DNA
aataccttctttcttagaaacatgtcaaggtagggtgctcacgtgacctaataaccttgcaaatgaatgtctataatgat

SEQ ID NO: 42952 - DNA, 80 bp, synthetic construct; identical to SEQ ID NO: 14612
  source 1..80: mol_type = other DNA

SEQ ID NO: 42953 - DNA, 80 bp, synthetic construct
  source 1..80: mol_type = other DNA
gacacaaacatctgcctgtagttgaatgaagtattatttaggatagaatgtagtattcaacaggaaaagcaatttgtcta

SEQ ID NO: 42954 - DNA, 80 bp, synthetic construct
  source 1..80: mol_type = other DNA
caagatagcaaatttctatctggagcagatggtgtaactgccattgttcaaatgcttcaaattcattctgctgctgggta

SEQ ID NO: 42955 - DNA, 80 bp, synthetic construct
  source 1..80: mol_type = other DNA
agaaatcaatgtaaagatgtgttttattaatatgttcaaaggcatcattctctctctctatatatatatacacatatatg

SEQ ID NO: 42956 - DNA, 80 bp, synthetic construct; identical to SEQ ID NO: 14613
  source 1..80: mol_type = other DNA

SEQ ID NO: 42957 - DNA, 80 bp, synthetic construct
  source 1..80: mol_type = other DNA
agcatgcccccctcaccccatgtagaaagccatcatacttcatattttaccatcaggaaggaattagaaacaaggctaat

SEQ ID NO: 42958 - DNA, 80 bp, synthetic construct
  source 1..80: mol_type = other DNA
aattcagtaaatagaattctgcaacttatcatgatttttcagtgattattactttagaaattatttcattcactgtggtc

SEQ ID NO: 42959 - DNA, 80 bp, synthetic construct; identical to SEQ ID NO: 14614
  source 1..80: mol_type = other DNA

SEQ ID NO: 42960 - DNA, 80 bp, synthetic construct
  source 1..80: mol_type = other DNA
agaaataatttcattcagtgtaatctgtaaattgaaacaatatcccatagttggacaactgtacaatcagcaatgatcaa

SEQ ID NO: 42961 - DNA, 80 bp, synthetic construct
  source 1..80: mol_type = other DNA
tgatgcaccaaggtaaacctgcgtgttacatgctgatatatataaagaactataaacaaatgtcccttacctgaagaagc

SEQ ID NO: 42962 - DNA, 80 bp, synthetic construct
  source 1..80: mol_type = other DNA
tgctgtactaaaagacattgtgggcatgaagtcacatagttatggggatgaagacgaatatggtctacagcggatcaatc

SEQ ID NO: 42963 - DNA, 80 bp, synthetic construct; identical to SEQ ID NO: 14615
  source 1..80: mol_type = other DNA

SEQ ID NO: 42964 - DNA, 80 bp, synthetic construct
  source 1..80: mol_type = other DNA
ttgtagccagtttagaatcacgtgcttctatgtcaaagaagaatatttcttgcaggtaaatgttcccaaaccaacaaata

SEQ ID NO: 42965 - DNA, 80 bp, synthetic construct
  source 1..80: mol_type = other DNA
atagctgttatgttaacaggtaactgaggctgcagccaactcagctgggaagcatgaatgctgtgcaatggttttttttt

SEQ ID NO: 42966 - DNA, 80 bp, synthetic construct
  source 1..80: mol_type = other DNA
tcaaagaagctgagttgtcttctgtgaatccagctgattcaaggctacaggcccacttcccagtgcaggttttcctattt

SEQ ID NO: 42967 - DNA, 80 bp, synthetic construct
  source 1..80: mol_type = other DNA
tattcattctgtacttgaaaattgtggcatgataaatgtagctgtatatttatccataattaactctggagccttcttaa

SEQ ID NO: 42968 - DNA, 80 bp, synthetic construct; identical to SEQ ID NO: 14616
  source 1..80: mol_type = other DNA

SEQ ID NO: 42969 - DNA, 80 bp, synthetic construct
  source 1..80: mol_type = other DNA
ctctcacttttggtgtggttagggattggcagggaaactgaagtcctttcaggaaaatattcatagtcagtaccgtttac

SEQ ID NO: 42970 - DNA, 80 bp, synthetic construct
  source 1..80: mol_type = other DNA
atcagagatatgaacaactgaaaactaaccaataggagctggaaatagagttgtaagcaaatggttgggaatctgtcttt

SEQ ID NO: 42971 - DNA, 80 bp, synthetic construct
  source 1..80: mol_type = other DNA
ggagaagtaggaagaggaaaagaaaaaagcatatggaattgcttgacaatgtgctgaaatattaagctgcagacatctct

SEQ ID NO: 42972 - DNA, 80 bp, synthetic construct; identical to SEQ ID NO: 14617
  source 1..80: mol_type = other DNA

SEQ ID NO: 42973 - DNA, 80 bp, synthetic construct
  source 1..80: mol_type = other DNA
aaattcgctaagggagagtgagtgtaaacctaaaagaaaggaagcttaattgagacctacaagatggtgggtatgtcttt

SEQ ID NO: 42974 - DNA, 80 bp, synthetic construct
  source 1..80: mol_type = other DNA
tgatttttccaaacaaacctacttaaagaatttcagaaacagggagtttcctctcagatgagctagtgaaaacctactca

SEQ ID NO: 42975 - DNA, 80 bp, synthetic construct; identical to SEQ ID NO: 14618
  source 1..80: mol_type = other DNA

SEQ ID NO: 42976 - DNA, 80 bp, synthetic construct
  source 1..80: mol_type = other DNA
atgtgacatgctggtgcactgcacccactagctcgtcatctagcattaggtatatctcccaatgctatccctcccccctc

SEQ ID NO: 42977 - DNA, 80 bp, synthetic construct
  source 1..80: mol_type = other DNA
ctacaaaggacatgaactcatcattttttatggctgcatagtattccatggtgtatatgtgccacattttcttaatccag

SEQ ID NO: 42978 - DNA, 80 bp, synthetic construct
  source 1..80: mol_type = other DNA
acttttgcttgagcagtttcataaatgaatattttacttggcacattatttttattattaaaagaaaaagggcttctcct

SEQ ID NO: 42979 - DNA, 80 bp, synthetic construct
  source 1..80: mol_type = other DNA
aacatcatgatcaatgtatggatgtgctcattaggagactcttggcctttttcagaaggttatactctgccatagtataa

SEQ ID NO: 42980 - DNA, 80 bp, synthetic construct; identical to SEQ ID NO: 14619
  source 1..80: mol_type = other DNA

SEQ ID NO: 42981 - DNA, 80 bp, synthetic construct
  source 1..80: mol_type = other DNA
ctccattggcaaaaataaacagcggtaaagggactgagattcttgatttttaactttgtatttaaccttgtgtaatgctg

SEQ ID NO: 42982 - DNA, 80 bp, synthetic construct
  source 1..80: mol_type = other DNA
gtaagattgctttatagaactttataactttcaaaattgacatttgaagaaattgtgctatactataatagtgaaataat

SEQ ID NO: 42983 - DNA, 80 bp, synthetic construct
  source 1..80: mol_type = other DNA
gtattttcttcaattgactgatgataacgaatcctcgaaccataaaaagtagaattggatattgtcagtctctacatctc

SEQ ID NO: 42984 - DNA, 80 bp, synthetic construct; identical to SEQ ID NO: 14620
  source 1..80: mol_type = other DNA

SEQ ID NO: 42985 - DNA, 80 bp, synthetic construct
  source 1..80: mol_type = other DNA
gaagacttactaaatacagggcactatgctaagtgtaatgaagacaaaagcagattctgtgcattcaagtagcttacagt

SEQ ID NO: 42986 - DNA, 80 bp, synthetic construct
  source 1..80: mol_type = other DNA
ttctttccctccccctccctccttctttctttctttccctccctccctttttctttcttttttctttctttccttctttc

SEQ ID NO: 42987 - DNA, 80 bp, synthetic construct; identical to SEQ ID NO: 14621
  source 1..80: mol_type = other DNA

SEQ ID NO: 42988 - DNA, 80 bp, synthetic construct
  source 1..80: mol_type = other DNA
gttctgtgaaatactgaacatggatttctgactagctctcatagtgagggttttcttttatgatttgattagttttcaaa

SEQ ID NO: 42989 - DNA, 80 bp, synthetic construct
  source 1..80: mol_type = other DNA
actacatttcccaacagataataatgaaaaatatcatcgagaaaagatgttatgccattttattttattttaagttccag

SEQ ID NO: 42990 - DNA, 80 bp, synthetic construct
  source 1..80: mol_type = other DNA
ccagtgtgtgttgttcccctccctgtgtccacgttttctcactgttcagctcccacttacaagcgagaacatgtggtgtt

SEQ ID NO: 42991 - DNA, 80 bp, synthetic construct
  source 1..80: mol_type = other DNA
gggttgattccatgtctttgctattgtgaataatgctacagtgaacatacgtaagcatgtatcttgataacagaatgatt

SEQ ID NO: 42992 - DNA, 80 bp, synthetic construct; identical to SEQ ID NO: 14622
  source 1..80: mol_type = other DNA

SEQ ID NO: 42993 - DNA, 80 bp, synthetic construct
  source 1..80: mol_type = other DNA
tttttgatgtatttacttaggctttaggtgttgttgcttggcttttgttttgtttgtagggctgctgtacctgaatgata

SEQ ID NO: 42994 - DNA, 80 bp, synthetic construct
  source 1..80: mol_type = other DNA
cttggactgattatgaattttcagtttacaactgacacacataattgttttcttgttaacaataagctttagcccccaat

SEQ ID NO: 42995 - DNA, 80 bp, synthetic construct
  source 1..80: mol_type = other DNA
ttagtgaattaaatgtgaactttgtgatatcagattatttttgctgttttgggggttcacactttcattctatgtaagtg

SEQ ID NO: 42996 - DNA, 80 bp, synthetic construct; identical to SEQ ID NO: 14623
  source 1..80: mol_type = other DNA

SEQ ID NO: 42997 - DNA, 80 bp, synthetic construct
  source 1..80: mol_type = other DNA
tgaaaatatgaaccacagttaaattggatgatttaacctgggcagtatggggatagtaacagggtgggaaagagtctttg

SEQ ID NO: 42998 - DNA, 80 bp, synthetic construct
  source 1..80: mol_type = other DNA
gggctggcttaatttcaggcaatttactgctgaaagtagtagaaacaaaaagtttctcttagtttttagtcttgtagaga

SEQ ID NO: 42999 - DNA, 80 bp, synthetic construct; identical to SEQ ID NO: 14624
  source 1..80: mol_type = other DNA

SEQ ID NO: 43000 - DNA, 80 bp, synthetic construct
  source 1..80: mol_type = other DNA
tagtctggcatggtggcgcacacctgtaatcctagctactcaggaggctgaggcaggagaatcgcttgagctggggaggt

SEQ ID NO: 43001 - DNA, 80 bp, synthetic construct
  source 1..80: mol_type = other DNA
ttttagtcatattgtaagtgcatgggaaattatttaatgagctttatgagcctcggaggttcacatcatgggattactag

SEQ ID NO: 43002 - DNA, 80 bp, synthetic construct
  source 1..80: mol_type = other DNA
cttatgggatctgaacgttttggtgcttgagcctctgttgagtattacatgcctctgctaataaactaagtactgctaga

SEQ ID NO: 43003 - DNA, 80 bp, synthetic construct; identical to SEQ ID NO: 14625
  source 1..80: mol_type = other DNA

SEQ ID NO: 43004 - DNA, 80 bp, synthetic construct
  source 1..80: mol_type = other DNA
aatttctgagctgatggcagtaatccctattctactgagtactataaagccacttagctacaaaagagagagaatgaagt

SEQ ID NO: 43005 - DNA, 80 bp, synthetic construct
  source 1..80: mol_type = other DNA
gaattaaggaatatgagaaaatgtagtggacatgcctgaaacacagacatcagtttccctgggtagaggagggagtgatt

SEQ ID NO: 43006 - DNA, 80 bp, synthetic construct
  source 1..80: mol_type = other DNA
gggaatcttggataattaattaaaatcaggcaactatgagcaacataattgaaagtaggtacatgcactgtgtgtttagt

SEQ ID NO: 43007 - DNA, 80 bp, synthetic construct; identical to SEQ ID NO: 14626
  source 1..80: mol_type = other DNA

SEQ ID NO: 43008 - DNA, 80 bp, synthetic construct
  source 1..80: mol_type = other DNA
atttatgttttcagattagctacagtatatcttaaaaccattatgggagtaaatattgagtagattaattaaagttttat

SEQ ID NO: 43009 - DNA, 80 bp, synthetic construct
  source 1..80: mol_type = other DNA
gagacatctgtgatttgaccatatggctgatcattctatttttagtgcataccacagatctgttaataaaggctaaattg

SEQ ID NO: 43010 - DNA, 80 bp, synthetic construct
  source 1..80: mol_type = other DNA
tatatatgttgctaacagttgtgaggtaatatttcactctgcttttaattgcatttccttgatgattcgtgaggaacatt

SEQ ID NO: 43011 - DNA, 80 bp, synthetic construct
  source 1..80: mol_type = other DNA
ttttggggtcatatctaaaaaatcattgctgagacttttcccatatgttttcttccagtagttttacagtttcaagtctt

SEQ ID NO: 43012 - DNA, 80 bp, synthetic construct; identical to SEQ ID NO: 14627
  source 1..80: mol_type = other DNA

SEQ ID NO: 43013 - DNA, 80 bp, synthetic construct
  source 1..80: mol_type = other DNA
atgtatatttcaaaatagctaaaagaatggattttaaatgttctccctacaaaaaaatgataagtatttgaggttctggc

SEQ ID NO: 43014 - DNA, 80 bp, synthetic construct
  source 1..80: mol_type = other DNA
tggtctttacatccaattttaaaatcacccttttaattttcctcaacttcaaatatgtataggtagtttgcttagcactg

SEQ ID NO: 43015 - DNA, 80 bp, synthetic construct
  source 1..80: mol_type = other DNA
aatgttagaaataagcatgaggtatacaagtaagctagaggaagaaatggttggcactatcagtgcaggcttcacagaga

SEQ ID NO: 43016 - DNA, 80 bp, synthetic construct; identical to SEQ ID NO: 14628
  source 1..80: mol_type = other DNA

SEQ ID NO: 43017 - DNA, 80 bp, synthetic construct
  source 1..80: mol_type = other DNA
atgattggataaaaaagtatgatctaatgtaataaaacttgagggaacttaacaaggcctatttgttcagattcccctct

SEQ ID NO: 43018 - DNA, 80 bp, synthetic construct
  source 1..80: mol_type = other DNA
tgttttggaataacacgtcctggtctccatcattattgtactactacggtcttctagaaacttcctttttccattaaaag

SEQ ID NO: 43019 - DNA, 80 bp, synthetic construct
  source 1..80: mol_type = other DNA
tgtccctttaatcccagctactcaggaagctgaggtaggaggactgcttgagcccaacaggttgaggccgcagtgagcca

SEQ ID NO: 43020 - DNA, 80 bp, synthetic construct; identical to SEQ ID NO: 14629
  source 1..80: mol_type = other DNA

SEQ ID NO: 43021 - DNA, 80 bp, synthetic construct
  source 1..80: mol_type = other DNA
caacagatcttggctccaagagaacagcagtacataaatttagattcaggctttattttctcccttttgcccccaattat

SEQ ID NO: 43022 - DNA, 80 bp, synthetic construct
  source 1..80: mol_type = other DNA
gttgggagcagattttgttacatttgcctcttggctgttaatacaaacagtagtttttatttttgtgcttttttcttgat

SEQ ID NO: 43023 - DNA, 80 bp, synthetic construct; identical to SEQ ID NO: 14630
  source 1..80: mol_type = other DNA

SEQ ID NO: 43024 - DNA, 80 bp, synthetic construct
  source 1..80: mol_type = other DNA
caattctcctggctcagactcctgagtagctgggattacaggcacgcatcaccacgactggctaattttgtatttttagt

SEQ ID NO: 43025 - DNA, 80 bp, synthetic construct
  source 1..80: mol_type = other DNA
atttctaactgaacaacaggtgaggagtaggaaacatagtttcatccgtatacagaattttgcctgacttcctatgaaac

SEQ ID NO: 43026 - DNA, 80 bp, synthetic construct
  source 1..80: mol_type = other DNA
gaaaggaaaattcccaagtccaatttgcagatcatatagatggtaaaagaggccccagtttaatgtattaagaggattca

SEQ ID NO: 43027 - DNA, 80 bp, synthetic construct
  source 1..80: mol_type = other DNA
ttgtcacagtggttcacactcaccttaaagtcatttgtacttggtgttctctctggaacactagttttccatttcttcaa

SEQ ID NO: 43028 - DNA, 80 bp, synthetic construct; identical to SEQ ID NO: 14631
  source 1..80: mol_type = other DNA

SEQ ID NO: 43029 - DNA, 80 bp, synthetic construct
  source 1..80: mol_type = other DNA
agggctgtcgaattgaacagtgaggtagaggctcttggaaagatttcaaagacacagtaagatgatgaaaagattagaaa

SEQ ID NO: 43030 - DNA, 80 bp, synthetic construct
  source 1..80: mol_type = other DNA
cctgttttacaggcatagaaacggaggctaggggaatttaactgacttgttcaaagacagatagttataagttattattt

SEQ ID NO: 43031 - DNA, 80 bp, synthetic construct; identical to SEQ ID NO: 14632
  source 1..80: mol_type = other DNA

SEQ ID NO: 43032 - DNA, 80 bp, synthetic construct
  source 1..80: mol_type = other DNA
cattgcatgggctgtgtatagtattattcaatacccagagcatgcagtgtgaacataatagagattgaaagacagccaga

SEQ ID NO: 43033 - DNA, 80 bp, synthetic construct
  source 1..80: mol_type = other DNA
ttttttattcctcttttatttacattaaaaatttactgaaatttcacatgaatagtcaaagttagctttcagtagcagtt

SEQ ID NO: 43034 - DNA, 80 bp, synthetic construct
  source 1..80: mol_type = other DNA
tctccatagtataattttacctcatgatgatatcagtgaacatatcatcttgtgatcagctaactggatgtttctttaac

SEQ ID NO: 43035 - DNA, 80 bp, synthetic construct; identical to SEQ ID NO: 14633
  source 1..80: mol_type = other DNA

SEQ ID NO: 43036 - DNA, 80 bp, synthetic construct
  source 1..80: mol_type = other DNA
tggaagaaaaataacagaagttcacttaagtgagaatataaatggaatagaggtgggaaatggatttatatagaaagaaa

SEQ ID NO: 43037 - DNA, 80 bp, synthetic construct
  source 1..80: mol_type = other DNA
aaagaataaataaaccaacaagtcttatttgagcacctgttatgtggaggatacaatcctacgacccagacagaccttat

SEQ ID NO: 43038 - DNA, 80 bp, synthetic construct
  source 1..80: mol_type = other DNA
tgggaaacttttggggagaaaagaggacttgagcttgggatttagtaagaatcaagtgcacaaaagtatttattgtagaa

SEQ ID NO: 43039 - DNA, 80 bp, synthetic construct
  source 1..80: mol_type = other DNA
ataatttataggcagcgtatccaaaatgtttcagtaattactctgcccatcattttattctttgggttaaatttctagcc

SEQ ID NO: 43040 - DNA, 80 bp, synthetic construct; identical to SEQ ID NO: 14634
  source 1..80: mol_type = other DNA

SEQ ID NO: 43041 - DNA, 80 bp, synthetic construct
  source 1..80: mol_type = other DNA
ctcctctccctcctgtttctccttgttcatctttcttctttattaagtgtacaaggattatgcaggctttgttcaccatt

SEQ ID NO: 43042 - DNA, 80 bp, synthetic construct
  source 1..80: mol_type = other DNA
attcactcttttgcaatatttctgctactacgctgcagaaccttgtctgtctcatactccttcagcacttattaggtgtg

SEQ ID NO: 43043 - DNA, 80 bp, synthetic construct; identical to SEQ ID NO: 14635
  source 1..80: mol_type = other DNA

SEQ ID NO: 43044 - DNA, 80 bp, synthetic construct
  source 1..80: mol_type = other DNA
taatggtgattattatcatcagttagaagtgtgtaattcatgaaatttctaaaaacaaattcaaatcaaaagctttggta

SEQ ID NO: 43045 - DNA, 80 bp, synthetic construct
  source 1..80: mol_type = other DNA
aactaaagttgtaccctaatacttggttctgtactaggagctgcagatacagcaatgaataagacacaatccctcccttc

SEQ ID NO: 43046 - DNA, 80 bp, synthetic construct
  source 1..80: mol_type = other DNA
tagaggaggtgatgtcagtattgtatttctcctgcctatacatgtccttcccaaggaggttgaaatgcaaattatttaaa

SEQ ID NO: 43047 - DNA, 80 bp, synthetic construct; identical to SEQ ID NO: 14636
  source 1..80: mol_type = other DNA

SEQ ID NO: 43048 - DNA, 80 bp, synthetic construct
  source 1..80: mol_type = other DNA
ttagtcaaaatgtgctgatatgttgtagtgattaccttattatctattcctaataatactcctacaatgtgttttcagcc

SEQ ID NO: 43049 - DNA, 80 bp, synthetic construct
  source 1..80: mol_type = other DNA
cagctacctcatgtatcagcccaaaatgttagtaaatgacttgtcttcctacaactctggatgagatatatctatatctg

SEQ ID NO: 43050 - DNA, 80 bp, synthetic construct
  source 1..80: mol_type = other DNA
cttgctgaatcatggcacatttattttgattattcccatcctggctttcttcatatttccattatcatttcaaatatgca

SEQ ID NO: 43051 - DNA, 80 bp, synthetic construct; identical to SEQ ID NO: 14637
  source 1..80: mol_type = other DNA

SEQ ID NO: 43052 - DNA, 80 bp, synthetic construct
  source 1..80: mol_type = other DNA
ttcaacatgaagaaaaagaatgctcatttaatcacccatccatccaatttttaatttattttttaactctcagtacaata

SEQ ID NO: 43053 - DNA, 80 bp, synthetic construct
  source 1..80: mol_type = other DNA
tttttaatccagagagacagagagtctttttaaatgcagtattgcttagaaagagcttactaaggtaaactcaagtctca

SEQ ID NO: 43054 - DNA, 80 bp, synthetic construct
  source 1..80: mol_type = other DNA
atttgtatcagatcctataacatgaatgttaacactgaagatttcatttcacttcaatcttagccaaaagacatattgac

SEQ ID NO: 43055 - DNA, 80 bp, synthetic construct; identical to SEQ ID NO: 14638
  source 1..80: mol_type = other DNA

SEQ ID NO: 43056 - DNA, 80 bp, synthetic construct
  source 1..80: mol_type = other DNA
tttagggtatttatcttaactacttaatatttttaattgcttgaattgccttcagaaggtgactacttttctatttggtt

SEQ ID NO: 43057 - DNA, 80 bp, synthetic construct
  source 1..80: mol_type = other DNA
gaagaaatctgttttaatgtggtaagtctacctcccttaagatacagtttgtctagggcagctgtgaatttgttcctata

SEQ ID NO: 43058 - DNA, 80 bp, synthetic construct
  source 1..80: mol_type = other DNA
cttccatgatggaaatagattattagtaactataactcctgaagaacaagccaatattttgttgttgttgtttttctgtg

SEQ ID NO: 43059 - DNA, 80 bp, synthetic construct
  source 1..80: mol_type = other DNA
tgttacaatataatagcatttctgtaaatagtaattttatttttagaggaagagtaaaacaatttttttttgtttgtttg

SEQ ID NO: 43060 - DNA, 80 bp, synthetic construct; identical to SEQ ID NO: 14639
  source 1..80: mol_type = other DNA

SEQ ID NO: 43061 - DNA, 80 bp, synthetic construct
  source 1..80: mol_type = other DNA
tgagttctgtctctatcaccagatagccaaagtagaattttagtatgtgctcatggaatggtgggtggatcgatgaagat

SEQ ID NO: 43062 - DNA, 80 bp, synthetic construct
  source 1..80: mol_type = other DNA
tcttgaagtggaaatatccacaactctacagaaatataaataattgaatcagcagataaaggggggagaggagggataac

SEQ ID NO: 43063 - DNA, 80 bp, synthetic construct
  source 1..80: mol_type = other DNA
aaaataaggggggcaaaagttttaggataaacagggtattaacatagtttcaaaatatctccctcaagttatctatttgg

SEQ ID NO: 43064 - DNA, 80 bp, synthetic construct; identical to SEQ ID NO: 14640
  source 1..80: mol_type = other DNA

SEQ ID NO: 43065 - DNA, 80 bp, synthetic construct
  source 1..80: mol_type = other DNA
catcatagaagaataatcagcagacttcactttaaccaagtaatcaaggttataacagtgacagtttttatgctcatccc

SEQ ID NO: 43066 - DNA, 80 bp, synthetic construct
  source 1..80: mol_type = other DNA
atgaaatacaaggtaaggctgccaaactgtcaaacgttggaagagattaaggagaaacaacaactaactacaatatagga

SEQ ID NO: 43067 - DNA, 80 bp, synthetic construct
  source 1..80: mol_type = other DNA
atttgtttatgattatataagatacttggggaactgagtgaagagtgtacaggtactctccaccatttttacaatttttc

SEQ ID NO: 43068 - DNA, 80 bp, synthetic construct; identical to SEQ ID NO: 14641
  source 1..80: mol_type = other DNA

SEQ ID NO: 43069 - DNA, 80 bp, synthetic construct
  source 1..80: mol_type = other DNA
atttccctgtcaattcattattaggagaaacaagaatcttgaaaaagtctttcctatgcatccagcaataaatgtattct

SEQ ID NO: 43070 - DNA, 80 bp, synthetic construct
  source 1..80: mol_type = other DNA
gtatttctttgtgactttccaatccatattttactaattcattttgtgcataaaattgcacatgatttttaaattactat

SEQ ID NO: 43071 - DNA, 80 bp, synthetic construct
  source 1..80: mol_type = other DNA
gtcattaatgttaccaaattatagtgaatggtgctatattatattttgaacgtttgtggcctctaaaccggtagcaagtc

SEQ ID NO: 43072 - DNA, 80 bp, synthetic construct; identical to SEQ ID NO: 14642
  source 1..80: mol_type = other DNA

SEQ ID NO: 43073 - DNA, 80 bp, synthetic construct
  source 1..80: mol_type = other DNA
taatcccagcactttgggaggccgagaagggtggatcacaaggtcaggagatcgagaccatcctggctaacacagtgaaa

SEQ ID NO: 43074 - DNA, 80 bp, synthetic construct
  source 1..80: mol_type = other DNA
tccaaaaaggaacacgttttaagggaaatgattgtatatatgttatgaggtaaaatttatttttactccagaatgtcagc

SEQ ID NO: 43075 - DNA, 80 bp, synthetic construct
  source 1..80: mol_type = other DNA
ctataaataattattttggcacctatccatctgcattctgacctccttttggcgtccagagatctcaaatccttgagcat

SEQ ID NO: 43076 - DNA, 80 bp, synthetic construct; identical to SEQ ID NO: 14643
  source 1..80: mol_type = other DNA

SEQ ID NO: 43077 - DNA, 80 bp, synthetic construct
  source 1..80: mol_type = other DNA
aaccaatcgcttaagtacttcatgtaatacttcttaatttcacacttataagagaatgtttatacaggtatagggttact

SEQ ID NO: 43078 - DNA, 80 bp, synthetic construct
  source 1..80: mol_type = other DNA
tttagttctacagtatgttgtgtttctctgtttacctaccaacacacacacaccaagatgcagatcacaaacacagaaaa

SEQ ID NO: 43079 - DNA, 80 bp, synthetic construct
  source 1..80: mol_type = other DNA
cagaatccattatgcattaaagggaccaataacttctcctttcactgataataattcatgtagtgttataaacaatgcta

SEQ ID NO: 43080 - DNA, 80 bp, synthetic construct; identical to SEQ ID NO: 14644
  source 1..80: mol_type = other DNA

SEQ ID NO: 43081 - DNA, 80 bp, synthetic construct
  source 1..80: mol_type = other DNA
ttttttgtttgtttgtatctcccatagtacctagaactgtactgattcttaatcagtagtcaacaattgcctatagaacc

SEQ ID NO: 43082 - DNA, 80 bp, synthetic construct
  source 1..80: mol_type = other DNA
atctctatataggattatagtcacatgacttatgaagctttgagcaaaaatatgccaagaaggaaatcataactaactgg

SEQ ID NO: 43083 - DNA, 80 bp, synthetic construct
  source 1..80: mol_type = other DNA
ggctgttttccaaatttagcccccactaagtgagggaaatgcatttccaactctatgtttgcttttaattatttatttac

SEQ ID NO: 43084 - DNA, 80 bp, synthetic construct
  source 1..80: mol_type = other DNA
gtaaccagcaggaataattctgactagatcatttccactaaatagtttagtttgtgaagaagactgacaggatcatttcc

SEQ ID NO: 43085 - DNA, 80 bp, synthetic construct; identical to SEQ ID NO: 14645
  source 1..80: mol_type = other DNA

SEQ ID NO: 43086 - DNA, 80 bp, synthetic construct
  source 1..80: mol_type = other DNA
gatgctttccctcctccttccccacctccagactccagtgtgtgttgtttccacccatgtgtccatgtgttctcatcttt

SEQ ID NO: 43087 - DNA, 80 bp, synthetic construct
  source 1..80: mol_type = other DNA
atttgctttatctagtctatcattgacgggcatttatgttgattccatgtctttgctattatggatagtgctacagcaga

SEQ ID NO: 43088 - DNA, 80 bp, synthetic construct
  source 1..80: mol_type = other DNA
cagaatcactttatccaagtgcttcaagctgttctgtaacttaaggtggaattttcgacaatgtcaaaattactcagttt

SEQ ID NO: 43089 - DNA, 80 bp, synthetic construct; identical to SEQ ID NO: 14646
  source 1..80: mol_type = other DNA

SEQ ID NO: 43090 - DNA, 80 bp, synthetic construct
  source 1..80: mol_type = other DNA
tagagtttcaatttgattatttggcctttggcatgattgcctccatttttgttcgatctgctctttagggccaactgtag

SEQ ID NO: 43091 - DNA, 80 bp, synthetic construct
  source 1..80: mol_type = other DNA
tgcatataacttttgacatcacaaaaccttaactactaatagcctattgtgaagagttactgatattataaacagttgat

SEQ ID NO: 43092 - DNA, 80 bp, synthetic construct
  source 1..80: mol_type = other DNA
aagtggaagtggatcgtcataaaggtcttcattctcatcatcttttcattgagtgggctgaggaggaggaggaagagaag

SEQ ID NO: 43093 - DNA, 80 bp, synthetic construct; identical to SEQ ID NO: 14647
  source 1..80: mol_type = other DNA

SEQ ID NO: 43094 - DNA, 80 bp, synthetic construct
  source 1..80: mol_type = other DNA
gtgccttctcacttcgtgctgctgaagaaagatccacagtgatagtagagaaagcaacatattagctgctaaaaagattg

SEQ ID NO: 43095 - DNA, 80 bp, synthetic construct
  source 1..80: mol_type = other DNA
aataattttctagaaaaactgaattgaaaatcaacctgagtatttaagatacagttttaaaaaactatgagaacaacctt

SEQ ID NO: 43096 - DNA, 80 bp, synthetic construct
  source 1..80: mol_type = other DNA
atgagctttgtgtttggttatttatgtaagtagttgaacactcacttttttttctttcttgacttgatttttaaggccat

SEQ ID NO: 43097 - DNA, 80 bp, synthetic construct; identical to SEQ ID NO: 14648
  source 1..80: mol_type = other DNA

SEQ ID NO: 43098 - DNA, 80 bp, synthetic construct
  source 1..80: mol_type = other DNA
tttgcttcttgaattttaagggaactctgggcactatcaaaatgagggaaacataatatcacattctaaggaccttacta

SEQ ID NO: 43099 - DNA, 80 bp, synthetic construct
  source 1..80: mol_type = other DNA
gatgcttggtttctgtcttattgtttccctgagacatcaaaaacaggacttaaataaattttcgaaaagagggtttctat

SEQ ID NO: 43100 - DNA, 80 bp, synthetic construct
  source 1..80: mol_type = other DNA
tgtactgactatattttgagaagcctaaaataaatgacaaaagtactaatttgctgaactttggaagtgtatgagaatgt

SEQ ID NO: 43101 - DNA, 80 bp, synthetic construct; identical to SEQ ID NO: 14649
  source 1..80: mol_type = other DNA

SEQ ID NO: 43102 - DNA, 80 bp, synthetic construct
  source 1..80: mol_type = other DNA
tcacctgtatctgcccatgtcttggaagagaaagtacatacaaaaaaatctgtttcattgatattgaaggacaatatatg

SEQ ID NO: 43103 - DNA, 80 bp, synthetic construct
  source 1..80: mol_type = other DNA
agtttatcctcctagcatagatgcctgatctgttctccttttagcttgaaactatttcagtaagagctttacacaatagg

SEQ ID NO: 43104 - DNA, 80 bp, synthetic construct
  source 1..80: mol_type = other DNA
tcctccaaagctccaaaattctataattatttttaaaattgtatttatggctaggtataaattcaagataagtgggtgta

SEQ ID NO: 43105 - DNA, 80 bp, synthetic construct; identical to SEQ ID NO: 14650
  source 1..80: mol_type = other DNA

SEQ ID NO: 43106 - DNA, 80 bp, synthetic construct
  source 1..80: mol_type = other DNA
tttgtagggtggtggcactgttgacataccaaggcaggaatagatactttctttcaaatgatttacagaggtcaaaagta

SEQ ID NO: 43107 - DNA, 80 bp, synthetic construct
  source 1..80: mol_type = other DNA
aactgaaaaaaggatagcaatcataggctggcttttatcttaccaattaatctaagaaccatatacacacaataattcgc

SEQ ID NO: 43108 - DNA, 80 bp, synthetic construct
  source 1..80: mol_type = other DNA
tctattacttagaattgtgatgatcatatgaattgggaatcatttaattgagcataataatcatcaggcaagccagtgaa

SEQ ID NO: 43109 - DNA, 80 bp, synthetic construct; identical to SEQ ID NO: 14651
  source 1..80: mol_type = other DNA

SEQ ID NO: 43110 - DNA, 80 bp, synthetic construct
  source 1..80: mol_type = other DNA
catttaaaagatgagaaaacaatcatagagaagttaaataattggcctcagatcacacagcttaaaagtagcaatgctgc

SEQ ID NO: 43111 - DNA, 80 bp, synthetic construct
  source 1..80: mol_type = other DNA
ctcagtggctcacgcctgtaatcccagcactttgggaggccgaggcaggtggatcatccaaagtcaggagttcaaaatca

SEQ ID NO: 43112 - DNA, 80 bp, synthetic construct
  source 1..80: mol_type = other DNA
gtactacagcttgagcaacagagtgatactctgtctcaaaaaaaaaaaaaaaaaaaaagcaattctgaggcaactccttt

SEQ ID NO: 43113 - DNA, 80 bp, synthetic construct; identical to SEQ ID NO: 14652
  source 1..80: mol_type = other DNA

SEQ ID NO: 43114 - DNA, 80 bp, synthetic construct
  source 1..80: mol_type = other DNA
cctctatatgcaaacccatagactattatcacgagttagccatgtgtttgcctttaggcagtttgcccgaataaaaaata

SEQ ID NO: 43115 - DNA, 80 bp, synthetic construct
  source 1..80: mol_type = other DNA
tggctattgtcactgaattatctattcttggttttatgaataggcatggaaatcatgaactggactcatcatcacactta

SEQ ID NO: 43116 - DNA, 80 bp, synthetic construct
  source 1..80: mol_type = other DNA
aacagattaacattcaaattttcatgtatgaccattggtaaacacagaacagaaggaaaacatcccaaaatgttttttct

SEQ ID NO: 43117 - DNA, 80 bp, synthetic construct
  source 1..80: mol_type = other DNA
agatcccagatgcctgatctccagattacgtgaaaattattattaatctcaatgacaaatattgaaatgagcattttgct

SEQ ID NO: 43118 - DNA, 80 bp, synthetic construct; identical to SEQ ID NO: 14653
  source 1..80: mol_type = other DNA

SEQ ID NO: 43119 - DNA, 80 bp, synthetic construct
  source 1..80: mol_type = other DNA
gcattattcatagtcagaagttcattggaaagtaaaattaaatattcaaataccttataatattttctttaaaaatagca

SEQ ID NO: 43120 - DNA, 80 bp, synthetic construct
  source 1..80: mol_type = other DNA
tgtatcagaaaccgttgggcttctgctagatacaagcaaataaatataaacaagaagaatagcagatcctgagcatttgc

SEQ ID NO: 43121 - DNA, 80 bp, synthetic construct
  source 1..80: mol_type = other DNA
gtgactctggaggctgaggtagaagagtcgcttgagcccaggagttaaaagtggcagtgagctatgatcgcacccctgca

SEQ ID NO: 43122 - DNA, 80 bp, synthetic construct; identical to SEQ ID NO: 14654
  source 1..80: mol_type = other DNA

SEQ ID NO: 43123 - DNA, 80 bp, synthetic construct
  source 1..80: mol_type = other DNA
acttgtacacatgcacacaaccaattaagacttcaaattaaggcatgtatacattctgtagagtttcaaatataactttg

SEQ ID NO: 43124 - DNA, 80 bp, synthetic construct
  source 1..80: mol_type = other DNA
gctataactaagactaatgtggatctggaggctcatctaattgcaccctcaagatcaacaggatttagttaaatctcatc

SEQ ID NO: 43125 - DNA, 80 bp, synthetic construct
  source 1..80: mol_type = other DNA
atacactctgtctcacttttgggacctgaattatctaaaagttaactttagtttggaatgaactttaattaattccagga

SEQ ID NO: 43126 - DNA, 80 bp, synthetic construct; identical to SEQ ID NO: 14655
  source 1..80: mol_type = other DNA

SEQ ID NO: 43127 - DNA, 80 bp, synthetic construct
  source 1..80: mol_type = other DNA
tactgttcttattacagtagatctggcatcatatggtaatgaggttttattttaaatgaaaatcctcaagactaagtaga

SEQ ID NO: 43128 - DNA, 80 bp, synthetic construct
  source 1..80: mol_type = other DNA
gcaatgcaattaagtgatattttaaaacattgtggaaactttttttgctatagactgaaactcaaaattctacttctata

SEQ ID NO: 43129 - DNA, 80 bp, synthetic construct; identical to SEQ ID NO: 14656
  source 1..80: mol_type = other DNA

SEQ ID NO: 43130 - DNA, 80 bp, synthetic construct
  source 1..80: mol_type = other DNA
aaaaaaagtgaatgacatatggttcattctatgtagtgtctgaaggtctgtttctatagcaacaattaacaggctaaatg

SEQ ID NO: 43131 - DNA, 80 bp, synthetic construct
  source 1..80: mol_type = other DNA
cttctggcgccccttttcctatctgcttctctacttcagatgtttatttttgtatttctgctcatatcctcccaaattgt

SEQ ID NO: 43132 - DNA, 80 bp, synthetic construct
  source 1..80: mol_type = other DNA
agtacataagacaggtattatagtcactcaatagatgggtatgtaagttatggttgagtgtcttccctaagatgtattaa

SEQ ID NO: 43133 - DNA, 80 bp, synthetic construct; identical to SEQ ID NO: 14657
  source 1..80: mol_type = other DNA

SEQ ID NO: 43134 - DNA, 80 bp, synthetic construct
  source 1..80: mol_type = other DNA
catcttcaatgagccaggtcagagggtggtatgcatatggtagaagtgcaaaaatattccttcttataaaaatagacaat

SEQ ID NO: 43135 - DNA, 80 bp, synthetic construct
  source 1..80: mol_type = other DNA
ttcatctatggaagaattccaggggataccaaagaagttactaatctatatccacagggtagaaagggactttggaatgg

SEQ ID NO: 43136 - DNA, 80 bp, synthetic construct
  source 1..80: mol_type = other DNA
actcatcatacaatatgtgatgacctaaaatagttgctgtagcttcccaatgtgccagaaagaaatagctgaagccctga

SEQ ID NO: 43137 - DNA, 80 bp, synthetic construct
  source 1..80: mol_type = other DNA
ggagtgagatggcacgatgtcggctcactgcaacctccgcctcctgggttcaagtgattctcctgcctcggccccccaag

SEQ ID NO: 43138 - DNA, 80 bp, synthetic construct; identical to SEQ ID NO: 14658
  source 1..80: mol_type = other DNA

SEQ ID NO: 43139 - DNA, 80 bp, synthetic construct
  source 1..80: mol_type = other DNA
cattattccatgctgaaaacagaaatgtgttccacttcagctttctgaggtaaaaaaaaaaggactaacttttgaagagg

SEQ ID NO: 43140 - DNA, 80 bp, synthetic construct
  source 1..80: mol_type = other DNA
gtactcatgagagtgtttaagttggaatgtgggatatcatgtgtcaaaaaaaggctcacataatttgttattattgctct

SEQ ID NO: 43141 - DNA, 80 bp, synthetic construct
  source 1..80: mol_type = other DNA
aaaactattcggataacaggtggcctgagtgggtgtgtgtgaaattcaagggatagaaggaaagcaagatttgcttactt

SEQ ID NO: 43142 - DNA, 80 bp, synthetic construct; identical to SEQ ID NO: 14659
  source 1..80: mol_type = other DNA

SEQ ID NO: 43143 - DNA, 80 bp, synthetic construct
  source 1..80: mol_type = other DNA
tctggaagcaaggaaaaatatggcgagactattggaataatctagatgaaagttgatgagggcctagataaaaggaagag

SEQ ID NO: 43144 - DNA, 80 bp, synthetic construct
  source 1..80: mol_type = other DNA
taaccacggtacaatgaaacagtatactaaacaaaaataaaaatgccattttttgtcaccagtttcttaatgacaaaata

SEQ ID NO: 43145 - DNA, 80 bp, synthetic construct; identical to SEQ ID NO: 14660
  source 1..80: mol_type = other DNA

SEQ ID NO: 43146 - DNA, 80 bp, synthetic construct
  source 1..80: mol_type = other DNA
tcccttctatggcttaccagatcatcaaaatgatcctctaatgccgtggctaaaagaatagatgtcctaaagcactcttt

SEQ ID NO: 43147 - DNA, 80 bp, synthetic construct
  source 1..80: mol_type = other DNA
tctttcctgtgctttgaattatttttggaccccagcataattcaaggtaaatagatcctgtgtgaataaagtatgggcag

SEQ ID NO: 43148 - DNA, 80 bp, synthetic construct
  source 1..80: mol_type = other DNA
gatgtgaaacagacctaaattaaaaaggtcaaactaacccccttcaaatcctgtcaaccttcccacctatattcttactt

SEQ ID NO: 43149 - DNA, 80 bp, synthetic construct
  source 1..80: mol_type = other DNA
gattggcgattagtaggcagaccattctggggaatgaatagagcctcatgagtaattatttaacatgaaagatagtgttt

SEQ ID NO: 43150 - DNA, 80 bp, synthetic construct; identical to SEQ ID NO: 14661
  source 1..80: mol_type = other DNA

SEQ ID NO: 43151 - DNA, 80 bp, synthetic construct
  source 1..80: mol_type = other DNA
cccacaaacaagacatcctcctgggcttcctcaagagtttcctcaagaaaaaagttaaaaataaataaagtaaaaataca

SEQ ID NO: 43152 - DNA, 80 bp, synthetic construct
  source 1..80: mol_type = other DNA
ttaagcccctcctgtgggcaggggcctgattattttcctatttttcttattccatacttaatagggggttgttatatact

SEQ ID NO: 43153 - DNA, 80 bp, synthetic construct
  source 1..80: mol_type = other DNA
aacctccacctcccaggttcaagtgattctctcgcctcagcctcctaagtagctgggctcacaggcacgctctaccatgc

SEQ ID NO: 43154 - DNA, 80 bp, synthetic construct; identical to SEQ ID NO: 14662
  source 1..80: mol_type = other DNA

SEQ ID NO: 43155 - DNA, 80 bp, synthetic construct
  source 1..80: mol_type = other DNA
cactgagcctcctgaaggatatgatgtcttctccaaatcagtataatttaagttctagaataatgttttcttggttacta

SEQ ID NO: 43156 - DNA, 80 bp, synthetic construct
  source 1..80: mol_type = other DNA
agatgaccaaaataacagaaaggaaattgtttcatctttgaatagacaatagttaattaccaggtcctaaagccacttct

SEQ ID NO: 43157 - DNA, 80 bp, synthetic construct
  source 1..80: mol_type = other DNA
tataccatagagaaggaaaaacttagcctctacacttctagggtgtttttccggcggagcctgataattaaattgacata

SEQ ID NO: 43158 - DNA, 80 bp, synthetic construct; identical to SEQ ID NO: 14663
  source 1..80: mol_type = other DNA

SEQ ID NO: 43159 - DNA, 80 bp, synthetic construct
  source 1..80: mol_type = other DNA
ggatgatcttcttgtatctgcttttcttcaagtgtctttaactcagaatagtcaatattccagaatggcatattttaggg

SEQ ID NO: 43160 - DNA, 80 bp, synthetic construct
  source 1..80: mol_type = other DNA
attgccttctagggataaaatactgccatgcagaacatggtgcacatattagacatttaagtaatttagatgctggaagg

SEQ ID NO: 43161 - DNA, 80 bp, synthetic construct
  source 1..80: mol_type = other DNA
ttttatcctcttccatattccattcccttagtggaaattgaggacagttggtcattttattctgggtaagattactattt

SEQ ID NO: 43162 - DNA, 80 bp, synthetic construct; identical to SEQ ID NO: 14664
  source 1..80: mol_type = other DNA

SEQ ID NO: 43163 - DNA, 80 bp, synthetic construct
  source 1..80: mol_type = other DNA
aaaatgtcaggtattctggtaatctaatctctagattaccaaatcttggtagtcagtcctcttctttctacgatgtgaac

SEQ ID NO: 43164 - DNA, 80 bp, synthetic construct
  source 1..80: mol_type = other DNA
tccataaacatgagccttcagatacacagttgtatggccagcagtgtcacagaagaagaaacaaataaaatgcattcaat

SEQ ID NO: 43165 - DNA, 80 bp, synthetic construct
  source 1..80: mol_type = other DNA
aattaccttgcattcagagaaaaggatttaaacattaggaaatttctttaacaggctgacaattttcttttttaataaat

SEQ ID NO: 43166 - DNA, 80 bp, synthetic construct
  source 1..80: mol_type = other DNA
gagtaatactattttcattagaaactgaatcttctaaaactggactacttattatctataattggtgggcggcaacacat

SEQ ID NO: 43167 - DNA, 80 bp, synthetic construct; identical to SEQ ID NO: 14665
  source 1..80: mol_type = other DNA

SEQ ID NO: 43168 - DNA, 80 bp, synthetic construct
  source 1..80: mol_type = other DNA
ctcaccctccgcctttccttccctccatccctaataccttttcttggtgattctgaaactctataaaatactggtatata

SEQ ID NO: 43169 - DNA, 80 bp, synthetic construct
  source 1..80: mol_type = other DNA
tgccaaattggaaaataggtacccatattgataataccaggcaagcatatcttactgatcagataccaaaatatgaggtt

SEQ ID NO: 43170 - DNA, 80 bp, synthetic construct
  source 1..80: mol_type = other DNA
atccatcagtggttgttacatacccaaaagataaatgattgctctttgaggttctttacaacactcgttgaaaaataaat

SEQ ID NO: 43171 - DNA, 80 bp, synthetic construct; identical to SEQ ID NO: 14666
  source 1..80: mol_type = other DNA

SEQ ID NO: 43172 - DNA, 80 bp, synthetic construct
  source 1..80: mol_type = other DNA
aacatggtgaaaccctgtctctactaaaaacataaaaattagccaggtgtggtggcctgtgatcccagctactcaggacc

SEQ ID NO: 43173 - DNA, 80 bp, synthetic construct
  source 1..80: mol_type = other DNA
ggaatttcagacaatgcgacctagtaaaagaatgactctctgttcaaaatgcttgacttctgagaattatcttttttaca

SEQ ID NO: 43174 - DNA, 80 bp, synthetic construct; identical to SEQ ID NO: 14667
  source 1..80: mol_type = other DNA

SEQ ID NO: 43175 - DNA, 80 bp, synthetic construct
  source 1..80: mol_type = other DNA
accgagactaaagaattcaatagaaattattaactaatctcaagtaaagatattgctcttagaacttttggccaagagtt

SEQ ID NO: 43176 - DNA, 80 bp, synthetic construct
  source 1..80: mol_type = other DNA
ttcacagccttaaattttttaggttacttttatttagtagttaccctggttctcttgactatttcttgaaagggggagat

SEQ ID NO: 43177 - DNA, 80 bp, synthetic construct
  source 1..80: mol_type = other DNA
atttctcctcattatagtacattaaaaataggtctttacaggaaaaggactaaaacaagatacttaaaaaataaccatga

SEQ ID NO: 43178 - DNA, 80 bp, synthetic construct; identical to SEQ ID NO: 14668
  source 1..80: mol_type = other DNA

SEQ ID NO: 43179 - DNA, 80 bp, synthetic construct
  source 1..80: mol_type = other DNA
agacttttattaatagtttctaaatgtcccagactaattaaatcttctcattccacaagaacaatgcttaattatcttga

SEQ ID NO: 43180 - DNA, 80 bp, synthetic construct
  source 1..80: mol_type = other DNA
actggaactggcatagtgtgttttattactgtgtatgtttacatgtgctgatacacctttcagaaagttgaatctttgac

SEQ ID NO: 43181 - DNA, 80 bp, synthetic construct
  source 1..80: mol_type = other DNA
catagcactttagaacaaaaaagagtctaatccaattgttctattttgcagaggcaaaaaatgaggattggattaactat

SEQ ID NO: 43182 - DNA, 80 bp, synthetic construct
  source 1..80: mol_type = other DNA
gcctgatcatcttatgatcataattacaacctcatactctgaagggcagttgatatagaacaaatccttttcaaagcaac

SEQ ID NO: 43183 - DNA, 80 bp, synthetic construct; identical to SEQ ID NO: 14669
  source 1..80: mol_type = other DNA

SEQ ID NO: 43184 - DNA, 80 bp, synthetic construct
  source 1..80: mol_type = other DNA
ctttagtgaggctgaaggtccaatgttagaatgttttagagacttatttctgagagggccttaggtctatcaaggtgggc

SEQ ID NO: 43185 - DNA, 80 bp, synthetic construct
  source 1..80: mol_type = other DNA
tatattttatttaaaaaatttttttaaataacatttaaaaacaggttacaaaatacttatggcacacatcaatggatata

SEQ ID NO: 43186 - DNA, 80 bp, synthetic construct
  source 1..80: mol_type = other DNA
gagaaaaattttaaattattttaatattcaatgtagcttctttagccagtgctttccttaggttaaataaaatttgtgtg

SEQ ID NO: 43187 - DNA, 80 bp, synthetic construct; identical to SEQ ID NO: 14670
  source 1..80: mol_type = other DNA

SEQ ID NO: 43188 - DNA, 80 bp, synthetic construct
  source 1..80: mol_type = other DNA
aggtatcctgtactccatcgtttactggtacattgcttaaaatttcacgtgtgtcatatctagtctttaaaaatatttgt

SEQ ID NO: 43189 - DNA, 80 bp, synthetic construct
  source 1..80: mol_type = other DNA
tactgttttttaatcaaataaataatgagataggtaattcatagataaatgtaaagtgcagttgagactcttaaccaacg

SEQ ID NO: 43190 - DNA, 80 bp, synthetic construct; identical to SEQ ID NO: 14671
  source 1..80: mol_type = other DNA

SEQ ID NO: 43191 - DNA, 80 bp, synthetic construct
  source 1..80: mol_type = other DNA
taaaaatacaaaaattagccgagtgtggtggcacctgcctgtaatcccagctactagcgaggctgaggcaatagaatcgc

SEQ ID NO: 43192 - DNA, 80 bp, synthetic construct
  source 1..80: mol_type = other DNA
acatgcatctgggaacaagtgctactccaatgctgtagcaattgtcctacagcgcacaccactatgtagaaaaatgaatt

SEQ ID NO: 43193 - DNA, 80 bp, synthetic construct
  source 1..80: mol_type = other DNA
ggttgataaggtgaattctaattttaacagatttttattcctagtcatagaaatgtagatgcgaattgagtctgtacatc

SEQ ID NO: 43194 - DNA, 80 bp, synthetic construct; identical to SEQ ID NO: 14672
  source 1..80: mol_type = other DNA

SEQ ID NO: 43195 - DNA, 80 bp, synthetic construct
  source 1..80: mol_type = other DNA
atgtgtagacttttattcctcgtgcccctgtaacccttcccctcgagtccccagagtccattatatcatccttatgactt

SEQ ID NO: 43196 - DNA, 80 bp, synthetic construct
  source 1..80: mol_type = other DNA
gtatgtatgcgtatatatatatatatatatatatcacattttctttatccactcattgcttgatgggcatttaggctgct

SEQ ID NO: 43197 - DNA, 80 bp, synthetic construct
  source 1..80: mol_type = other DNA
gtagttctactttcagttctttaaggaatctccgtactgttttccatagtggtcgtactagtttacacttccactgacag

SEQ ID NO: 43198 - DNA, 80 bp, synthetic construct; identical to SEQ ID NO: 14673
  source 1..80: mol_type = other DNA

SEQ ID NO: 43199 - DNA, 80 bp, synthetic construct
  source 1..80: mol_type = other DNA
tggtagattaaatttggtttgtgatgcagtactttttaaagtgaaattaagtttgcagttattgctgggatcattggctg

SEQ ID NO: 43200 - DNA, 80 bp, synthetic construct
  source 1..80: mol_type = other DNA
gaaactttcagcagcatctccaactaaagcatctgtcacgtctatcactaatttgaaaagtctgtttcctgagtgaggaa

SEQ ID NO: 43201 - DNA, 80 bp, synthetic construct
  source 1..80: mol_type = other DNA
gggggcaagaattaaatatgctaacatgcagaagttcttcctagcacagtacctttcatttaatatgtgatagttttcct

SEQ ID NO: 43202 - DNA, 80 bp, synthetic construct
  source 1..80: mol_type = other DNA
tttcatctgcctctatacccttcaagatgtttctttttcagtatcattttcttctctcatttttcattcaactctaacaa

SEQ ID NO: 43203 - DNA, 80 bp, synthetic construct; identical to SEQ ID NO: 14674
  source 1..80: mol_type = other DNA

SEQ ID NO: 43204 - DNA, 80 bp, synthetic construct
  source 1..80: mol_type = other DNA
tccttttttgacactgcatcgcatcctatttatggatgagaaagagttgggtcattaaacatatattccttccatggata

SEQ ID NO: 43205 - DNA, 80 bp, synthetic construct
  source 1..80: mol_type = other DNA
atacagtgagaaagacaggacttttctttaaaatgaatactagattacttgcttctttggttcccttgagaatttttctt

SEQ ID NO: 43206 - DNA, 80 bp, synthetic construct; identical to SEQ ID NO: 14675
  source 1..80: mol_type = other DNA

SEQ ID NO: 43207 - DNA, 80 bp, synthetic construct
  source 1..80: mol_type = other DNA
atagtttcttcattcaatagatatttactgaactcctactttttgccaggtcctgtcttagggaatttactgacaaatat

SEQ ID NO: 43208 - DNA, 80 bp, synthetic construct
  source 1..80: mol_type = other DNA
acgtctatatatcttcttgatacaattactactagcttggaatttttgaaaccttaggagagaaaataccacagccaaac

SEQ ID NO: 43209 - DNA, 80 bp, synthetic construct
  source 1..80: mol_type = other DNA
tcagaagtatttagtttgactattagacaatcccagaaaaagcattttgctcatctctaaaatgtgatgtttcaggttat

SEQ ID NO: 43210 - DNA, 80 bp, synthetic construct; identical to SEQ ID NO: 14676
  source 1..80: mol_type = other DNA

SEQ ID NO: 43211 - DNA, 80 bp, synthetic construct
  source 1..80: mol_type = other DNA
aggcatgtgacttcagcatcatgaaccaagtcagtatctgaatatatatattctttacatttttttttgccactactttt

SEQ ID NO: 43212 - DNA, 80 bp, synthetic construct
  source 1..80: mol_type = other DNA
tgactaaagaagataatcagcagaaatgctgcctacaagataaatttgaaaaaatgaattaacataccaaacgttagccc

SEQ ID NO: 43213 - DNA, 80 bp, synthetic construct
  source 1..80: mol_type = other DNA
gaagcttgggaatgaaaccacgtgaaacagctgaaaggagttcagagataggagagatgacttctttctgtcaaggatag

SEQ ID NO: 43214 - DNA, 80 bp, synthetic construct; identical to SEQ ID NO: 14677
  source 1..80: mol_type = other DNA

SEQ ID NO: 43215 - DNA, 80 bp, synthetic construct
  source 1..80: mol_type = other DNA
tatagacacctcagtaaagagttatgataaataaaaagagattaagtcatggacaaggtatagctagaccagggtttctc

SEQ ID NO: 43216 - DNA, 80 bp, synthetic construct
  source 1..80: mol_type = other DNA
ttttccaattatgaacggcattaatgactccagacatcttcaaatatctcctcagggataaaatcacccctggttgagaa

SEQ ID NO: 43217 - DNA, 80 bp, synthetic construct
  source 1..80: mol_type = other DNA
gagaagagagaaaacataatggaagcacattgttcttttgggtagtttgcaatgccttatggctgaagtctctctaccta

SEQ ID NO: 43218 - DNA, 80 bp, synthetic construct
  source 1..80: mol_type = other DNA
gccccacttagcttttccctgggaaaataatattgctcatctaaaggaaaaaagtaagataattaatgaaactgtttatt

SEQ ID NO: 43219 - DNA, 80 bp, synthetic construct; identical to SEQ ID NO: 14678
  source 1..80: mol_type = other DNA

SEQ ID NO: 43220 - DNA, 80 bp, synthetic construct
  source 1..80: mol_type = other DNA
ctgcctcagcctcctgagtagagtagctgggattacaggctcccgccaccatgatgggctaatttttgtatttttagtag

SEQ ID NO: 43221 - DNA, 80 bp, synthetic construct
  source 1..80: mol_type = other DNA
caatctatttcaaacctcactagtagcacaatgtcctctgtatttctaaccaataatctaaaaatcactgctatattttg

SEQ ID NO: 43222 - DNA, 80 bp, synthetic construct; identical to SEQ ID NO: 14679
  source 1..80: mol_type = other DNA

SEQ ID NO: 43223 - DNA, 80 bp, synthetic construct
  source 1..80: mol_type = other DNA
ctttcattttgttagagaccctaaaatgaacctcgaaacagaagatatcccaatgattgtatgatatgggaacaaaaaca

SEQ ID NO: 43224 - DNA, 80 bp, synthetic construct
  source 1..80: mol_type = other DNA
cttttactaaataatcgaccctctgttataaggctctgtttcaaatttatcttcaatgtcatcatgattgtcttccttta

SEQ ID NO: 43225 - DNA, 80 bp, synthetic construct
  source 1..80: mol_type = other DNA
agtagtaaacactagctgggaaccaccaacactgtgcaaatagtagctacagtgagcaaataattcctatgaggttttgt

SEQ ID NO: 43226 - DNA, 80 bp, synthetic construct
  source 1..80: mol_type = other DNA
aaatgcacaattataataatgatgatgagttgcagtgaggcttaatgtcattgtccctatttaagtataatttaagattg

SEQ ID NO: 43227 - DNA, 80 bp, synthetic construct; identical to SEQ ID NO: 14680
  source 1..80: mol_type = other DNA

SEQ ID NO: 43228 - DNA, 80 bp, synthetic construct
  source 1..80: mol_type = other DNA
tgttttaccttcttccttccacctctacttgcaaacaaaatctgtatataatcaatagcatgtactgagatgatgcttca

SEQ ID NO: 43229 - DNA, 80 bp, synthetic construct
  source 1..80: mol_type = other DNA
ctccacaaagatggacagtaatagaagtaggagcaaagctgaattaaagtacacagataacaggtttttttttttctttt

SEQ ID NO: 43230 - DNA, 80 bp, synthetic construct
  source 1..80: mol_type = other DNA
ttaattctctgtgggcctagcatttacctctttatcgcataaatcttaaagcaaagaaaataatgctcatagtagttgct

SEQ ID NO: 43231 - DNA, 80 bp, synthetic construct; identical to SEQ ID NO: 14681
  source 1..80: mol_type = other DNA

SEQ ID NO: 43232 - DNA, 80 bp, synthetic construct
  source 1..80: mol_type = other DNA
ttgattgtgtatattatgcaagcagagctttccaatgtttcctttttctcttgtgccaccaatctagcaatgcattgatt

SEQ ID NO: 43233 - DNA, 80 bp, synthetic construct
  source 1..80: mol_type = other DNA
tggattgtggtgaagtgcaacttctgattctttcccaaacttctttgtccttcagaacataactttagaaaattctaagc

SEQ ID NO: 43234 - DNA, 80 bp, synthetic construct
  source 1..80: mol_type = other DNA
ctgttctctacgaatcatttggctgagactgtactttttgcttaagctatcatcctcattacttcttcttgtacctctta

SEQ ID NO: 43235 - DNA, 80 bp, synthetic construct; identical to SEQ ID NO: 14682
  source 1..80: mol_type = other DNA

SEQ ID NO: 43236 - DNA, 80 bp, synthetic construct
  source 1..80: mol_type = other DNA
cttcacttggacacccctttcacttataagccagagaacattatctgcttttaaaatgttaataggatgagaataactcc

SEQ ID NO: 43237 - DNA, 80 bp, synthetic construct
  source 1..80: mol_type = other DNA
cttccagtacccttcaatttttttgactgctatccatagcattgaaatgcgttgttctgtgcaatccagaacacaggcac

SEQ ID NO: 43238 - DNA, 80 bp, synthetic construct
  source 1..80: mol_type = other DNA
tatgaccaaacctactaatgcattttgttttgttttaaccagattggaaaaggcagtcacttttgtttcactttttggaa

SEQ ID NO: 43239 - DNA, 80 bp, synthetic construct; identical to SEQ ID NO: 14683
  source 1..80: mol_type = other DNA

SEQ ID NO: 43240 - DNA, 80 bp, synthetic construct
  source 1..80: mol_type = other DNA
ttgcctgaaattaaaagtggccacagaggggagtctctatatatagtattagaattctgccccagtcacaattcttgtga

SEQ ID NO: 43241 - DNA, 80 bp, synthetic construct
  source 1..80: mol_type = other DNA
acacaactatagctttgcatctaccaaacttgagactgaaacacagctcttttttccaataacgctgtagcctaatgaaa

SEQ ID NO: 43242 - DNA, 80 bp, synthetic construct
  source 1..80: mol_type = other DNA
ttctataaggcctttatgcttcatacaaaaaggattgtgtcaattttgcctaataccatgtcaccagcacctagcacaat

SEQ ID NO: 43243 - DNA, 80 bp, synthetic construct; identical to SEQ ID NO: 14684
  source 1..80: mol_type = other DNA

SEQ ID NO: 43244 - DNA, 80 bp, synthetic construct
  source 1..80: mol_type = other DNA
ttgctaccacagatattagcctattgcatttcttttgattaagttataaatttttggcaaggatggcattagtgtataga

SEQ ID NO: 43245 - DNA, 80 bp, synthetic construct
  source 1..80: mol_type = other DNA
tgcctaactgtaaatagggctcacataccactcaaaatcattatgaatagatgtgaaggcacataattccacctatctta

SEQ ID NO: 43246 - DNA, 80 bp, synthetic construct; identical to SEQ ID NO: 14685
  source 1..80: mol_type = other DNA

SEQ ID NO: 43247 - DNA, 80 bp, synthetic construct
  source 1..80: mol_type = other DNA
cccaggtatttgattattttatgttcatttcaagacttaagaatgaaaaaaggtctggcaaccaagatggccaaatagga

SEQ ID NO: 43248 - DNA, 80 bp, synthetic construct
  source 1..80: mol_type = other DNA
ttgcctcactcgggaagcccaaggggtcagggagttccttttcctagtcaaagaaaggggtgacagacggcacctggaaa

SEQ ID NO: 43249 - DNA, 80 bp, synthetic construct
  source 1..80: mol_type = other DNA
ggctgggggaggggcgaccgccattgcccaggcttgcttaggtaaacaaagcagccgggaagctcgaactgggtggaacc

SEQ ID NO: 43250 - DNA, 80 bp, synthetic construct; identical to SEQ ID NO: 14686
  source 1..80: mol_type = other DNA

SEQ ID NO: 43251 - DNA, 80 bp, synthetic construct
  source 1..80: mol_type = other DNA
ccaacagacctgcagctgagggtcctgtctgttagaaggaaaactaacagacagaaaggacatccacaccaaaaacccat

SEQ ID NO: 43252 - DNA, 80 bp, synthetic construct
  source 1..80: mol_type = other DNA
cttgacgagttgagagaagaaggcttcagacgatcaaactactccgagctacaggaggaaattcaaaccaaagcaaagaa

SEQ ID NO: 43253 - DNA, 80 bp, synthetic construct
  source 1..80: mol_type = other DNA
cagtgatggaagatgaaatgaatgaaatgaagtgagaagggaagtttagagaaaaaagaataaagagaaacgaacaaagc

SEQ ID NO: 43254 - DNA, 80 bp, synthetic construct; identical to SEQ ID NO: 14687
  source 1..80: mol_type = other DNA

SEQ ID NO: 43255 - DNA, 80 bp, synthetic construct
  source 1..80: mol_type = other DNA
gaatttcctatccagccaaactaagcttcataagtgaaggagaaataaaatcttttacagacaagcaaatgctgagagat

SEQ ID NO: 43256 - DNA, 80 bp, synthetic construct
  source 1..80: mol_type = other DNA
tcataatgatgggatcaaattcacacataacaatattaactttaaatgtaaatggactaaatgctccaattaaaagacac

SEQ ID NO: 43257 - DNA, 80 bp, synthetic construct
  source 1..80: mol_type = other DNA
tgataaaacagactttaaaccaacaaagataaaaagagacaaagaaggccattacataacggtaaagggatcagttcaac

SEQ ID NO: 43258 - DNA, 80 bp, synthetic construct; identical to SEQ ID NO: 14688
  source 1..80: mol_type = other DNA

SEQ ID NO: 43259 - DNA, 80 bp, synthetic construct
  source 1..80: mol_type = other DNA
taagaaactcactcaaaaccactcaactacatggaaactgaacaacctgctcctgaatgactactgggtacataaggaaa

SEQ ID NO: 43260 - DNA, 80 bp, synthetic construct
  source 1..80: mol_type = other DNA
acaattaaaagaactagaaaagcaagagcaaacacattcaaaagctagcagaaggcaagaaataacttaaatcagagcag

SEQ ID NO: 43261 - DNA, 80 bp, synthetic construct
  source 1..80: mol_type = other DNA
tcaccactgatcccacagaaatacaaactaccatcagagaatactacaaacacctctacgcaaataaactagaaaatcta

SEQ ID NO: 43262 - DNA, 80 bp, synthetic construct; identical to SEQ ID NO: 14689
  source 1..80: mol_type = other DNA

SEQ ID NO: 43263 - DNA, 80 bp, synthetic construct
  source 1..80: mol_type = other DNA
accatgatcaagtgggcttcatccctgggatgcaaggctggttcaatatacacaaatcaataaatgtaatccagcatata

SEQ ID NO: 43264 - DNA, 80 bp, synthetic construct
  source 1..80: mol_type = other DNA
atcatactgaatgggcaaaaactggaagcattccctttgaaaactggcacaagacagggatgccctctctctccactcct

SEQ ID NO: 43265 - DNA, 80 bp, synthetic construct
  source 1..80: mol_type = other DNA
tgataagcaacttcagcaaagtctcaggatacaaaatcaatgtgcaaaaatcacaagcattcttatacaccaataacaga

SEQ ID NO: 43266 - DNA, 80 bp, synthetic construct
  source 1..80: mol_type = other DNA
acattccatgctcatgggtaggaagaatcaatatcgtgaaaatggccatactgcccaaggtaatttacagattcaatgcc

SEQ ID NO: 43267 - DNA, 80 bp, synthetic construct; identical to SEQ ID NO: 14690
  source 1..80: mol_type = other DNA

SEQ ID NO: 43268 - DNA, 80 bp, synthetic construct
  source 1..80: mol_type = other DNA
caagatggattaaagacttaaaggttagacctaaaaccataaaaaccctagaagaaaacctaggcattaccattcagcac

SEQ ID NO: 43269 - DNA, 80 bp, synthetic construct
  source 1..80: mol_type = other DNA
caacctactcatctgacaaagggctaatatccagaatctacaatgaactcaaacaaatttacaagaaaaaacaaacaacc

SEQ ID NO: 43270 - DNA, 80 bp, synthetic construct
  source 1..80: mol_type = other DNA
cattaaaaagtcaggaaacaacaggtgctggagaggatgtggagaaataggaacacttttacactgttggtgggactgta

SEQ ID NO: 43271 - DNA, 80 bp, synthetic construct
  source 1..80: mol_type = other DNA
attcacaatagcaaagacttggaaccaacccaaatgtccaacaatgatagactggattaagaaaatgtggcacatataca

SEQ ID NO: 43272 - DNA, 80 bp, synthetic construct
  source 1..80: mol_type = other DNA
catggacacaggaaggggaacatcacactctggggactgtggtggggtggggggaggggggagggatagcattagtagat

SEQ ID NO: 43273 - DNA, 80 bp, synthetic construct
  source 1..80: mol_type = other DNA
taaaaatagatttgcataaatacaatctgcagctggcttcattctctttttataatgggttggatcatagcaccatgttg

SEQ ID NO: 43274 - DNA, 80 bp, synthetic construct; identical to SEQ ID NO: 14692
  source 1..80: mol_type = other DNA

SEQ ID NO: 43275 - DNA, 80 bp, synthetic construct
  source 1..80: mol_type = other DNA
gggcatggtgacacatgcctgtagtcccagctacttgagagaaagaggtgagaggatggcttgagcccaggagatcaaga

SEQ ID NO: 43276 - DNA, 80 bp, synthetic construct
  source 1..80: mol_type = other DNA
ttaaaagccttcctacttttttcttgactgatttgccaaaagctgcagattttagctgaggatggtgctacaattcagct

SEQ ID NO: 43277 - DNA, 80 bp, synthetic construct
  source 1..80: mol_type = other DNA
cagagtgattgtcagtctttctcatttgaatatcatggaaactctaccatttcagttttagtccagtgcaaatacagtct

SEQ ID NO: 43278 - DNA, 80 bp, synthetic construct; identical to SEQ ID NO: 14693
  source 1..80: mol_type = other DNA

SEQ ID NO: 43279 - DNA, 80 bp, synthetic construct
  source 1..80: mol_type = other DNA
acatacccctttattttatcatttgctaatcatttagatttttaagagcaatttcacatactatcaaatttttggccaca

SEQ ID NO: 43280 - DNA, 80 bp, synthetic construct
  source 1..80: mol_type = other DNA
ttctgtctttggaacccaaagttctatgctccttcaaatgcagcatacatgtgtcttccattaatgacaattaaagtcaa

SEQ ID NO: 43281 - DNA, 80 bp, synthetic construct
  source 1..80: mol_type = other DNA
gttcaagaccagcctaggcaacataacaagactctgtagctaaaaaaaattttttttaaatcaaccaggaatagtgattc

SEQ ID NO: 43282 - DNA, 80 bp, synthetic construct; identical to SEQ ID NO: 14694
  source 1..80: mol_type = other DNA

SEQ ID NO: 43283 - DNA, 80 bp, synthetic construct
  source 1..80: mol_type = other DNA
cccataaatgtattcttccaccttttttagattttcctttataaaagtcatttctgttattggatgcagagatactctta

SEQ ID NO: 43284 - DNA, 80 bp, synthetic construct
  source 1..80: mol_type = other DNA
attatgtgaaattcacaaactatagtaaaataatgatctaggaatattggttgatgggattatctctgtactacttgttt

SEQ ID NO: 43285 - DNA, 80 bp, synthetic construct
  source 1..80: mol_type = other DNA
gttttgcataaacaacttatgtttgagagtagtcctgccagcatattcctgccagaatttgtccttgtaacagcagacat

SEQ ID NO: 43286 - DNA, 80 bp, synthetic construct; identical to SEQ ID NO: 14695
  source 1..80: mol_type = other DNA

SEQ ID NO: 43287 - DNA, 80 bp, synthetic construct
  source 1..80: mol_type = other DNA
cagtaaggctcagaatcaaaggactggaaaagaagcaggagactggcttcttatcttggcactgacaaaaattaacatta

SEQ ID NO: 43288 - DNA, 80 bp, synthetic construct
  source 1..80: mol_type = other DNA
aacatagtgcaaccccgtctctaaacaacaaaactacacaaagcaacagaaacttggatggtcttcaagtaccctctttc

SEQ ID NO: 43289 - DNA, 80 bp, synthetic construct
  source 1..80: mol_type = other DNA
agtgaaaaaatgtagatattggagtgcaacacatctaaaattaaatcttgctctgtaacttattagttctatgtggtaat

SEQ ID NO: 43290 - DNA, 80 bp, synthetic construct
  source 1..80: mol_type = other DNA
gccatttccacaggaatgactcaactgagaggagttttttattcccttttctatttatcttagggcaacagatggtggct

SEQ ID NO: 43291 - DNA, 80 bp, synthetic construct; identical to SEQ ID NO: 14696
  source 1..80: mol_type = other DNA

SEQ ID NO: 43292 - DNA, 80 bp, synthetic construct
  source 1..80: mol_type = other DNA
ctagattatctatggaggcattatattgccaattcttctatctttggctttcattttcttagttgcttgcctatacagat

SEQ ID NO: 43293 - DNA, 80 bp, synthetic construct
  source 1..80: mol_type = other DNA
cacaaatatgttaggcagtaaccttaaagattgagatagtttgccaaaagcagctcgcatatctttcattcttttactta

SEQ ID NO: 43294 - DNA, 80 bp, synthetic construct; identical to SEQ ID NO: 14697
  source 1..80: mol_type = other DNA

SEQ ID NO: 43295 - DNA, 80 bp, synthetic construct
  source 1..80: mol_type = other DNA
ctttttctgtaatatgcatttctgttaacatgaggtaaaactaacttttatcactgtgcctggaacaaagtaggtggaca

SEQ ID NO: 43296 - DNA, 80 bp, synthetic construct
  source 1..80: mol_type = other DNA
aatggctctttgtgacagtttttaaaatgtagcaatagaagaagcaacgctgcctatgatttactacttaagaacaaatg

SEQ ID NO: 43297 - DNA, 80 bp, synthetic construct
  source 1..80: mol_type = other DNA
ttacctgaaaggcaaaggtgtcacaccatacctcagtggtgatttgcaccaaatacactgtctttcataaatttcctgag

SEQ ID NO: 43298 - DNA, 80 bp, synthetic construct; identical to SEQ ID NO: 14698
  source 1..80: mol_type = other DNA

SEQ ID NO: 43299 - DNA, 80 bp, synthetic construct
  source 1..80: mol_type = other DNA
gaaatgtggtttacccaaagaccattgttctcaaaatgtattatcataacatccactggagagaaagtcatcaaagacga

SEQ ID NO: 43300 - DNA, 80 bp, synthetic construct
  source 1..80: mol_type = other DNA
gagtataaaataatgaagtcttctatctttgacaaaactttatatttttcatgctatgtaatctaaaagcatatctcatt

SEQ ID NO: 43301 - DNA, 80 bp, synthetic construct
  source 1..80: mol_type = other DNA
aaatcatttcacattgcttcagtatctatttctaaaattgtggctatattactgcaaaaccatgatgcaattaccacccc

SEQ ID NO: 43302 - DNA, 80 bp, synthetic construct; identical to SEQ ID NO: 14699
  source 1..80: mol_type = other DNA

SEQ ID NO: 43303 - DNA, 80 bp, synthetic construct
  source 1..80: mol_type = other DNA
ttaggtaagttacttctccctcttgaaaaacgtgaaggaaaatattcaaacattcaaagggctttgaattattatgaaat

SEQ ID NO: 43304 - DNA, 80 bp, synthetic construct
  source 1..80: mol_type = other DNA
gttagttcgaattttctgacaggttttattttataaattgagttgtacaggaggtactctgagagggtaagttgaagaat

SEQ ID NO: 43305 - DNA, 80 bp, synthetic construct
  source 1..80: mol_type = other DNA
acactgaggggagttataaaataggcatatcagtttcgctaaatattgacaccatctgatataacgtttgtagaactggg

SEQ ID NO: 43306 - DNA, 80 bp, synthetic construct
  source 1..80: mol_type = other DNA
agtagaagccaagctttagatagctacaaaactggccattacttcttatacttcacttttctgtaaaatattctaggcag

SEQ ID NO: 43307 - DNA, 80 bp, synthetic construct; identical to SEQ ID NO: 14700
  source 1..80: mol_type = other DNA

SEQ ID NO: 43308 - DNA, 80 bp, synthetic construct
  source 1..80: mol_type = other DNA
tcctctattgcaacttctgtgtcatggatgaaaacagtgaggctcaaaaagtttgagtgacacatcaagaagtggtaaga

SEQ ID NO: 43309 - DNA, 80 bp, synthetic construct
  source 1..80: mol_type = other DNA
cattatgcaaattaatttttgttgtctcagttttctgtattcatgacatatttgaatttaacaagattcatctggtactt

SEQ ID NO: 43310 - DNA, 80 bp, synthetic construct; identical to SEQ ID NO: 14701
  source 1..80: mol_type = other DNA

SEQ ID NO: 43311 - DNA, 80 bp, synthetic construct
  source 1..80: mol_type = other DNA
acaaccagaagagcctgttataaagtgaaaagtttgtgatctcttaatctaatgaaatgggaagtaggaattgcttgtgg

SEQ ID NO: 43312 - DNA, 80 bp, synthetic construct
  source 1..80: mol_type = other DNA
cttgtcgtgtacttaactcaccggtataaaataactattttatactgtgatggagagtagctggcaaatgctggcaaata

SEQ ID NO: 43313 - DNA, 80 bp, synthetic construct
  source 1..80: mol_type = other DNA
ttaaatgtttattttctgtatctccagctagaatgtaagctccattggagcaggggcctggtttaccttgtttactacta

SEQ ID NO: 43314 - DNA, 80 bp, synthetic construct; identical to SEQ ID NO: 14702
  source 1..80: mol_type = other DNA

SEQ ID NO: 43315 - DNA, 80 bp, synthetic construct
  source 1..80: mol_type = other DNA
tgtgaaaaacataattttatatgctgtagattttgagttaactgttgtgtgaattcgcacataatttaacaataatcacg

SEQ ID NO: 43316 - DNA, 80 bp, synthetic construct
  source 1..80: mol_type = other DNA
acttaacattatcttggaggagagggaataaaagtaatgagcctagacttgcattcaaattgaataatcactggtggaag

SEQ ID NO: 43317 - DNA, 80 bp, synthetic construct
  source 1..80: mol_type = other DNA
cttcctacaatattcattagtcctaaggataatttttgaattaaatgagctcccccaaaattattgtaaatctgtgccac

SEQ ID NO: 43318 - DNA, 80 bp, synthetic construct
  source 1..80: mol_type = other DNA
tatatgtattattatttattcaatttttaaatgctttgttataaaaagtgagacagaagtgatctagttgactatattct

SEQ ID NO: 43319 - DNA, 80 bp, synthetic construct; identical to SEQ ID NO: 14703
  source 1..80: mol_type = other DNA

SEQ ID NO: 43320 - DNA, 80 bp, synthetic construct
  source 1..80: mol_type = other DNA
atcattataatgtgctaacggaatttccagaaatctagtgtaaactataccttttcatgggtgaatctagactctccaat

SEQ ID NO: 43321 - DNA, 80 bp, synthetic construct
  source 1..80: mol_type = other DNA
acacgaccaatctttcttcagtgccaaagggtggaaaaggtaatggtaaaaatgaattataaatggttagctttagaagt

SEQ ID NO: 43322 - DNA, 80 bp, synthetic construct
  source 1..80: mol_type = other DNA
acttggccaaggattgtggatgttacatggaaagtacatctatatggctcttctgctcaaaaatttgcctttagtattaa

SEQ ID NO: 43323 - DNA, 80 bp, synthetic construct
  source 1..80: mol_type = other DNA
cctcaagccatcctcccacctcagtccccaagcccaccccacagtagctgggactacaggcccgcaccatcacatggggc

SEQ ID NO: 43324 - DNA, 80 bp, synthetic construct; identical to SEQ ID NO: 14704
  source 1..80: mol_type = other DNA

SEQ ID NO: 43325 - DNA, 80 bp, synthetic construct
  source 1..80: mol_type = other DNA
ttgtcttagcaactgtagttactgttattgatgtctgaagattttacagtgctttagagaaggcatgaaaagatctgtga

SEQ ID NO: 43326 - DNA, 80 bp, synthetic construct
  source 1..80: mol_type = other DNA
atatgtatgactacacaaagtaacacagaaacacacaaatgttatataagttggttgtaattataaattatattaatttt

SEQ ID NO: 43327 - DNA, 80 bp, synthetic construct
  source 1..80: mol_type = other DNA
tattaaattatcaaacctactttcaaggcaaatattataaaatctcattaaaaattagtcaattattccgtcaattatct

SEQ ID NO: 43328 - DNA, 80 bp, synthetic construct; identical to SEQ ID NO: 14705
  source 1..80: mol_type = other DNA

SEQ ID NO: 43329 - DNA, 80 bp, synthetic construct
  source 1..80: mol_type = other DNA
atgttccgaaactcttaccaccagttcacaggtattttctatcatgtctactcagtgttcatgcaaattttaacagcatg

SEQ ID NO: 43330 - DNA, 80 bp, synthetic construct
  source 1..80: mol_type = other DNA
acatgtaaaaaagcataaggaagctggctaatttttaaaggaatataatattttgagtaacagtaatggaattcatccat

SEQ ID NO: 43331 - DNA, 80 bp, synthetic construct
  source 1..80: mol_type = other DNA
atacttttagcataaggaaaaaggaaaaagtttgatacttattgagggctaagaagcaggatgggaccttttggtttccc

SEQ ID NO: 43332 - DNA, 80 bp, synthetic construct; identical to SEQ ID NO: 14706
  source 1..80: mol_type = other DNA

SEQ ID NO: 43333 - DNA, 80 bp, synthetic construct
  source 1..80: mol_type = other DNA
ttccaaatttctagaaggagctagaagcacactaaagaaagcttatcaagacagattttcaggatcatatttctttttct

SEQ ID NO: 43334 - DNA, 80 bp, synthetic construct
  source 1..80: mol_type = other DNA
caccacagtccccagagtgtgatattccccttcctgtgtccatgtgatctcattgttcaattcccacctatgagtgagaa

SEQ ID NO: 43335 - DNA, 80 bp, synthetic construct
  source 1..80: mol_type = other DNA
gttggacatttgggttggttccaagtctttgctattgtgaataatgccgcaataaacatacgtgtgcgtgtgtctttata

SEQ ID NO: 43336 - DNA, 80 bp, synthetic construct
  source 1..80: mol_type = other DNA
ccacatcctctccagcacctgttgtttcctgactttttaatgattgccattctaactggtgtgagatggtatctcattgt

SEQ ID NO: 43337 - DNA, 80 bp, synthetic construct
  source 1..80: mol_type = other DNA
ttgtagattctggatattagccctttgtcagatgagtaggttgcgaaaattttctcccattttgtaggttgcctgttcac

SEQ ID NO: 43338 - DNA, 80 bp, synthetic construct
  source 1..80: mol_type = other DNA
tttatggttttaggtctaatgtttaaatctttaatccatcttgaattgatttttgtataaggtgtaaggaagggatccag

SEQ ID NO: 43339 - DNA, 80 bp, synthetic construct
  source 1..80: mol_type = other DNA
tctctgttttggtaccagtaccatgctgttttggttactgtagccttgtagtatagtttgaagtcaggtagtgtgatgcc

SEQ ID NO: 43340 - DNA, 80 bp, synthetic construct; identical to SEQ ID NO: 14708
  source 1..80: mol_type = other DNA

SEQ ID NO: 43341 - DNA, 80 bp, synthetic construct
  source 1..80: mol_type = other DNA
tgattttgtatcctgagactttgctgaagttgcttatcagcttaaggagatttggggctgagacaatggggttttctaaa

SEQ ID NO: 43342 - DNA, 80 bp, synthetic construct
  source 1..80: mol_type = other DNA
tcaaagggaatgcttccagtttttgcccattcagtatgatattggctgtgggtttgtcatagatagctcttattattttg

SEQ ID NO: 43343 - DNA, 80 bp, synthetic construct
  source 1..80: mol_type = other DNA
accagccttgcatcccagggatgaagcccacttgatcatggtggataagctttttgatgtgctgctggatttggtttgcc

SEQ ID NO: 43344 - DNA, 80 bp, synthetic construct
  source 1..80: mol_type = other DNA
tcagaaggaatggtaccagttcctccttgtacctctggtagaatttggctgtgaatccatctggtcctggactctttttg

SEQ ID NO: 43345 - DNA, 80 bp, synthetic construct; identical to SEQ ID NO: 14709
  source 1..80: mol_type = other DNA

SEQ ID NO: 43346 - DNA, 80 bp, synthetic construct
  source 1..80: mol_type = other DNA
cttttgaatgtgtttgctcttgcttttctagttcttttaattgtgatgttagggtgtcaattttggatctttcctgcttt

SEQ ID NO: 43347 - DNA, 80 bp, synthetic construct
  source 1..80: mol_type = other DNA
tgttcagtttccatgtagttgagcggttttgagtgagattcttaatcctgagttctagtttgattgcactgtggtctgag

SEQ ID NO: 43348 - DNA, 80 bp, synthetic construct
  source 1..80: mol_type = other DNA
ggtgcagagctgagttcaattcctgggtatccttgttgactttctgtctcgttgatatgtctaatgttgacagtggggtg

SEQ ID NO: 43349 - DNA, 80 bp, synthetic construct; identical to SEQ ID NO: 14710
  source 1..80: mol_type = other DNA

SEQ ID NO: 43350 - DNA, 80 bp, synthetic construct
  source 1..80: mol_type = other DNA
taaagttaatattgttatgtgtgaatttgatcccatcattatgatgttagctggttattttgctcattagttgatgcagt

SEQ ID NO: 43351 - DNA, 80 bp, synthetic construct
  source 1..80: mol_type = other DNA
ttgtccttcacttatgaagcttaatttggctggatatgaaattctgggttgaaaattcctttctttaagaatgttgaata

SEQ ID NO: 43352 - DNA, 80 bp, synthetic construct; identical to SEQ ID NO: 14711
  source 1..80: mol_type = other DNA

SEQ ID NO: 43353 - DNA, 80 bp, synthetic construct
  source 1..80: mol_type = other DNA
cttcccttctcgcttcatttcattcatttcatcttccatcactgataccctttcttccagttgatcgcatcggctcctga

SEQ ID NO: 43354 - DNA, 80 bp, synthetic construct
  source 1..80: mol_type = other DNA
agagtaatttgatcgtctggagccttcttctctcagctcgtcaaagtcattctccatccagctttcttccattgctggtg

SEQ ID NO: 43355 - DNA, 80 bp, synthetic construct
  source 1..80: mol_type = other DNA
agttttccttctaacagacaggaccctcagctgcaggtcttttggagtacccggccgtgtgaggtgtcagtctgcccctg

SEQ ID NO: 43356 - DNA, 80 bp, synthetic construct
  source 1..80: mol_type = other DNA
ctgtctttttgtttgtctgtgccctgcccccagaggtggagcctacagaggcaggcaggcctccttgagctgtggtgggt

SEQ ID NO: 43357 - DNA, 80 bp, synthetic construct; identical to SEQ ID NO: 14712
  source 1..80: mol_type = other DNA

SEQ ID NO: 43358 - DNA, 80 bp, synthetic construct
  source 1..80: mol_type = other DNA
ccggtatctcaggtggaaatgcagaaatcacccttcttctgcgtcgctcacgctgggagctgtagaccggagctgttcct

SEQ ID NO: 43359 - DNA, 80 bp, synthetic construct
  source 1..80: mol_type = other DNA
tgaaaaatctgctctctttgccatattttatcacttacacagtataacatgcttacctgtttgctgaattaataactgtt

SEQ ID NO: 43360 - DNA, 80 bp, synthetic construct; identical to SEQ ID NO: 14713
  source 1..80: mol_type = other DNA

SEQ ID NO: 43361 - DNA, 80 bp, synthetic construct
  source 1..80: mol_type = other DNA
tggactctaattaagcacttgagctcatatacttaaacaagtaatatggtgataatgccctaaattcaaataatctcaat

SEQ ID NO: 43362 - DNA, 80 bp, synthetic construct
  source 1..80: mol_type = other DNA
tggcgatgtagctggatgggaaaaaccaatgtcatcctcagaagtattgatgcagtgacccagttgcagccaataatata

SEQ ID NO: 43363 - DNA, 80 bp, synthetic construct
  source 1..80: mol_type = other DNA
tgtaaactctgattggtatagttgagaaaccccaaatctccttgctcctaggtagtctcctttatgattcttgtaaaaga

SEQ ID NO: 43364 - DNA, 80 bp, synthetic construct; identical to SEQ ID NO: 14714
  source 1..80: mol_type = other DNA

SEQ ID NO: 43365 - DNA, 80 bp, synthetic construct
  source 1..80: mol_type = other DNA
ttaaattctattgagagaaacaaggaagaattcctgtcttctaacaatgtcctaggtcatagaaaaactcagtagatttt

SEQ ID NO: 43366 - DNA, 80 bp, synthetic construct
  source 1..80: mol_type = other DNA
taaaaacaattaggataaactttaagagcaagacctaaattactcctcttttgtaaaaggactttataatttcactgagc

SEQ ID NO: 43367 - DNA, 80 bp, synthetic construct
  source 1..80: mol_type = other DNA
tgaagtaaatactttatcaagatttatcctaacaccattaccttattttgtaattcacaacagatatgtttacatctgac

SEQ ID NO: 43368 - DNA, 80 bp, synthetic construct
  source 1..80: mol_type = other DNA
tatgtttctgttatatataatttgtcctgtacccctctaccatttttagagacatatgaatgaatttcgatgttttcaca

SEQ ID NO: 43369 - DNA, 80 bp, synthetic construct; identical to SEQ ID NO: 14715
  source 1..80: mol_type = other DNA

SEQ ID NO: 43370 - DNA, 80 bp, synthetic construct
  source 1..80: mol_type = other DNA
acataaaatgcttttgtttaactacaaagcagacagaaggtacctccagcatttactgaaggcctcttatgacacaggta

SEQ ID NO: 43371 - DNA, 80 bp, synthetic construct
  source 1..80: mol_type = other DNA
tagccaggacattggccacatgccacattcaataaatacagtgacagagtaatcaaagctgagagcgaataacttgcttc

SEQ ID NO: 43372 - DNA, 80 bp, synthetic construct; identical to SEQ ID NO: 14716
  source 1..80: mol_type = other DNA

SEQ ID NO: 43373 - DNA, 80 bp, synthetic construct
  source 1..80: mol_type = other DNA
gcaaccagaggcaattttctcctctataaataatatcaaggttgaacaaccactacatataggaaatgtatcctcatgtt

SEQ ID NO: 43374 - DNA, 80 bp, synthetic construct
  source 1..80: mol_type = other DNA
taggagcttacactttgagagaatacttatgtacataactcgaataaatctcatgtcgccatagggggatattaatttag

SEQ ID NO: 43375 - DNA, 80 bp, synthetic construct
  source 1..80: mol_type = other DNA
atccataggcattaatcatcaccacaaatcattatctagcctagaacaaggcccacaaaatataagacaagacagaaatg

SEQ ID NO: 43376 - DNA, 80 bp, synthetic construct; identical to SEQ ID NO: 14717
  source 1..80: mol_type = other DNA

SEQ ID NO: 43377 - DNA, 80 bp, synthetic construct
  source 1..80: mol_type = other DNA
tgtggtttcagatcgcagtaaaagtttaaaacatagactttgaaatcagtgggacctgagtatggaccctggccccgcca

SEQ ID NO: 43378 - DNA, 80 bp, synthetic construct
  source 1..80: mol_type = other DNA
tgagattatacatatatgtttcagcaaactaagtgcctaactcataataatcactcaataaaagttggtgatttttggag

SEQ ID NO: 43379 - DNA, 80 bp, synthetic construct
  source 1..80: mol_type = other DNA
ttttcttaattttcagtgtgcacctaattggcctattggtttggcaatctgatatttctgtgagcccagtagcagctata

SEQ ID NO: 43380 - DNA, 80 bp, synthetic construct; identical to SEQ ID NO: 14718
  source 1..80: mol_type = other DNA

SEQ ID NO: 43381 - DNA, 80 bp, synthetic construct
  source 1..80: mol_type = other DNA
agcaaatcgtgtgacagaaggagttggatgtatgtatcatatttattaaacaaatcagtaacagtcttccaaaagcaaaa

SEQ ID NO: 43382 - DNA, 80 bp, synthetic construct
  source 1..80: mol_type = other DNA
tgccttacaatgtactgaatgagacattaacagaaacatctttcaacccctgtgttctgggcagtacacatacctactac

SEQ ID NO: 43383 - DNA, 80 bp, synthetic construct
  source 1..80: mol_type = other DNA
aagagacaagagatagcaaaattaattactaagtatataagtgtaagttcatatcatcactttaaaaattcaggcattga

SEQ ID NO: 43384 - DNA, 80 bp, synthetic construct; identical to SEQ ID NO: 14719
  source 1..80: mol_type = other DNA

SEQ ID NO: 43385 - DNA, 80 bp, synthetic construct
  source 1..80: mol_type = other DNA
gttctatacctatggcaacagtagattatcttaataggcattttataaagtgttctcagaatatatgcttttcatattct

SEQ ID NO: 43386 - DNA, 80 bp, synthetic construct
  source 1..80: mol_type = other DNA
atttagaaggtatactgtgttctgtggtgtctgtttcgccagcttctccctttaaaaaaatgtgagtggccaaataatga

SEQ ID NO: 43387 - DNA, 80 bp, synthetic construct
  source 1..80: mol_type = other DNA
ttgaactatctattagacttctaccccatgctgttgcgtagaagaagagtagtccaggaaagatagcatgaaataaacta

SEQ ID NO: 43388 - DNA, 80 bp, synthetic construct
  source 1..80: mol_type = other DNA
tctctgctgaaaatacaaaaaaattagccgggcgtggtggtgggcgcctgtaatcccaactactcgggaggctgaggcag

SEQ ID NO: 43389 - DNA, 80 bp, synthetic construct; identical to SEQ ID NO: 14720
  source 1..80: mol_type = other DNA

SEQ ID NO: 43390 - DNA, 80 bp, synthetic construct
  source 1..80: mol_type = other DNA
cccccaaaggccctccagtaaagaaaccatactttgatacacaaagaaaagaggatgctcttgagcttggaattttggaa

SEQ ID NO: 43391 - DNA, 80 bp, synthetic construct
  source 1..80: mol_type = other DNA
cattccctccaataaagaatgatcaagccgaagaatatgctagcaaaacacttcaaaaaaaatctgcaaacaagcatgtt

SEQ ID NO: 43392 - DNA, 80 bp, synthetic construct
  source 1..80: mol_type = other DNA
agaattgattcatatgaagcttaataaggagtatagaagaaaaacagattaccaaagagaatgaagatgagacgaagaaa

SEQ ID NO: 43393 - DNA, 80 bp, synthetic construct; identical to SEQ ID NO: 14721
  source 1..80: mol_type = other DNA

SEQ ID NO: 43394 - DNA, 80 bp, synthetic construct
  source 1..80: mol_type = other DNA
tttataggacattctttgaaagacaaatctatacagacagaaaacagatcaatagtttcaatggctgaaagtgggaagat

SEQ ID NO: 43395 - DNA, 80 bp, synthetic construct
  source 1..80: mol_type = other DNA
taaaaatatttttaaatacacaaaatggtttggaaatatgattctatgtctagacaagttgtccattaaggctataaaaa

SEQ ID NO: 43396 - DNA, 80 bp, synthetic construct; identical to SEQ ID NO: 14722
  source 1..80: mol_type = other DNA

SEQ ID NO: 43397 - DNA, 80 bp, synthetic construct
  source 1..80: mol_type = other DNA
caaaataaaatagtggatgggattcatctaacaaagggatgactgggaaagtttcatcaaaaagactgatgataaacatt

SEQ ID NO: 43398 - DNA, 80 bp, synthetic construct
  source 1..80: mol_type = other DNA
atgttttatctgttctaacaatctggaaacaatgcaaccaaaaattaggaagagaaagaggaaggggaagaggagagtag

SEQ ID NO: 43399 - DNA, 80 bp, synthetic construct
  source 1..80: mol_type = other DNA
cttaaacaccaaaggaaatgtaattagtagaagagccaaaatcagtcaaatagaggaagaaatagaagaaaataaggctg

SEQ ID NO: 43400 - DNA, 80 bp, synthetic construct
  source 1..80: mol_type = other DNA
gggaggcggagcttgcagtgagccgagatcgcgccactgcactccagcctgggcggcagagcgagactctatttcaaaaa

SEQ ID NO: 43401 - DNA, 80 bp, synthetic construct; identical to SEQ ID NO: 14723
  source 1..80: mol_type = other DNA

SEQ ID NO: 43402 - DNA, 80 bp, synthetic construct
  source 1..80: mol_type = other DNA
ctctgcatccaataacacagaaatgacttttataaaggaaaatctaaaaacggtggaagaatacatttatgggtgcattc

SEQ ID NO: 43403 - DNA, 80 bp, synthetic construct
  source 1..80: mol_type = other DNA
agactggaccaaaaacaaagaatatatatcttatgaatgtatattgaactttacactcttatcgtagaaagtatagcttc

SEQ ID NO: 43404 - DNA, 80 bp, synthetic construct
  source 1..80: mol_type = other DNA
acagctcttgggtgaaaagaagaatgcaaacagaaattaccaaatttattttaaaatatgatagcataaacactgcttta

SEQ ID NO: 43405 - DNA, 80 bp, synthetic construct; identical to SEQ ID NO: 14724
  source 1..80: mol_type = other DNA

SEQ ID NO: 43406 - DNA, 80 bp, synthetic construct
  source 1..80: mol_type = other DNA
ctgggattacacacgtgcaccgccacactcggctaattttttatgtttttggtagagacggggtttcacaatgttggcca

SEQ ID NO: 43407 - DNA, 80 bp, synthetic construct
  source 1..80: mol_type = other DNA
attgctagctagttttaacaaggaaaaaggaatagagcataaatatatcaaatataatatgagagggcatataatcatag

SEQ ID NO: 43408 - DNA, 80 bp, synthetic construct
  source 1..80: mol_type = other DNA
tatcaaggaaacttgcacaaaaatccctccggactcaaatagtttcactgggctcttctagttataatgcttcaaaaatt

SEQ ID NO: 43409 - DNA, 80 bp, synthetic construct; identical to SEQ ID NO: 14725
  source 1..80: mol_type = other DNA

SEQ ID NO: 43410 - DNA, 80 bp, synthetic construct
  source 1..80: mol_type = other DNA
ttgtattgcatgcttgaaattgttaacagtaggtcctaaatgttccagtctcaaaaaaatgtatgttaggtggtggatat

SEQ ID NO: 43411 - DNA, 80 bp, synthetic construct
  source 1..80: mol_type = other DNA
agaatccaactccacattaaaaaagaatacaccacgaccaactgggtggtcacactattattactattctagtaacattg

SEQ ID NO: 43412 - DNA, 80 bp, synthetic construct; identical to SEQ ID NO: 14726
  source 1..80: mol_type = other DNA

SEQ ID NO: 43413 - DNA, 80 bp, synthetic construct
  source 1..80: mol_type = other DNA
acattaacattattactaataagcacatattaaaaattaaagctaaaatataatgaatattgataattatattaatacat

SEQ ID NO: 43414 - DNA, 80 bp, synthetic construct
  source 1..80: mol_type = other DNA
ataaataactttgtcagacagctggcatcttagttcataggaaaacaataaaagcacttgtcctaagatcaggaaaaata

SEQ ID NO: 43415 - DNA, 80 bp, synthetic construct
  source 1..80: mol_type = other DNA
tattaaaaaataagatattcagtgagatagcaggatgtaacattagcatggaaaggtctatagaattaatatacccaaat

SEQ ID NO: 43416 - DNA, 80 bp, synthetic construct
  source 1..80: mol_type = other DNA
tgccaaacaccaaaagcaaacttcaaaaacaaactcatagaaaatagttgcaaaatatattgcaaagggctaatatctct

SEQ ID NO: 43417 - DNA, 80 bp, synthetic construct; identical to SEQ ID NO: 14727
  source 1..80: mol_type = other DNA

SEQ ID NO: 43418 - DNA, 80 bp, synthetic construct
  source 1..80: mol_type = other DNA
acttgggaggctgagatgggaggatggcttgagccctggaggctgaggctacagtaagccattttcatgccactacactc

SEQ ID NO: 43419 - DNA, 80 bp, synthetic construct
  source 1..80: mol_type = other DNA
aggaaaatgcaaaataaatgacaccatgataccattttttaacctatcagattggcaaaatatgacaagcttgaattgca

SEQ ID NO: 43420 - DNA, 80 bp, synthetic construct; identical to SEQ ID NO: 14728
  source 1..80: mol_type = other DNA

SEQ ID NO: 43421 - DNA, 80 bp, synthetic construct
  source 1..80: mol_type = other DNA
ccaaataacttaattctatttgaaactaataacataaccacactgaagtacaaaaaaatctgacccaaataactttaata

SEQ ID NO: 43422 - DNA, 80 bp, synthetic construct
  source 1..80: mol_type = other DNA
aagccagatttctcactgttgcataaggtagttaaaaattcgaaagggggaaggaaataatgaactctacatcattggac

SEQ ID NO: 43423 - DNA, 80 bp, synthetic construct
  source 1..80: mol_type = other DNA
gcgaaaacagaaacagaaactccttggggaaatagtcaatttcaggaatgggacagaaaaattacagcatgagattggga

SEQ ID NO: 43424 - DNA, 80 bp, synthetic construct
  source 1..80: mol_type = other DNA
aaaatataaaaattagccaggcgtggtgacacacgcctgtagtcccagctactcaggagactgaggcagaattgcttgaa

SEQ ID NO: 43425 - DNA, 80 bp, synthetic construct; identical to SEQ ID NO: 14729
  source 1..80: mol_type = other DNA

SEQ ID NO: 43426 - DNA, 80 bp, synthetic construct
  source 1..80: mol_type = other DNA
aatcaaaacttagagaagtaacctatatgggaatgaggttccctttttttttcctctcttttctctagtagctttgcccc

SEQ ID NO: 43427 - DNA, 80 bp, synthetic construct
  source 1..80: mol_type = other DNA
aggggaaatacagttttccctcccttttttgtctcctggctttgtctggagaagactctagtcagagagctttgatagta

SEQ ID NO: 43428 - DNA, 80 bp, synthetic construct
  source 1..80: mol_type = other DNA
cttaattctgcgtttaaacctgaaaaagtgccagtcttaatgctgagctttaagtaaacaggacagacttcaagaagcat

SEQ ID NO: 43429 - DNA, 80 bp, synthetic construct; identical to SEQ ID NO: 14730
  source 1..80: mol_type = other DNA

SEQ ID NO: 43430 - DNA, 80 bp, synthetic construct
  source 1..80: mol_type = other DNA
aaagactaacagataccaacctcaaattaccaagatgttgcaactgtcagccaaagcttctaaagcagctactgtttttt

SEQ ID NO: 43431 - DNA, 80 bp, synthetic construct
  source 1..80: mol_type = other DNA
cctcccccgaccccaccacagtccccagagtgtgatattccccttcctgtgtccatgtgatctcattgttcaattcccac

SEQ ID NO: 43432 - DNA, 80 bp, synthetic construct
  source 1..80: mol_type = other DNA
ccagtctatcattgttggacatttgggttggttccaagtctttgctattgtgaatagtgccgcaataaacatacgtgtgc

SEQ ID NO: 43433 - DNA, 80 bp, synthetic construct
  source 1..80: mol_type = other DNA
actgttacaatactctatgtagtaatgaatagaaattaatggaaatatggatgctctcaaaggaaaaataaattattaaa

SEQ ID NO: 43434 - DNA, 80 bp, synthetic construct
  source 1..80: mol_type = other DNA
caatgcctcaagaacctgtgggattcagccaaattacagaaaatttgtgccattagagtcccaaagggagaggagaaaaa

SEQ ID NO: 43435 - DNA, 80 bp, synthetic construct
  source 1..80: mol_type = other DNA
aaaccatgcccagacacattataatcaaattgccaacactggcaataaaaagtaatgaactattgatacacataatgaca

SEQ ID NO: 43436 - DNA, 80 bp, synthetic construct
  source 1..80: mol_type = other DNA
gatgaaaagggttattaaatgggaagaagagaagttgaggtgcagtggatatgttgattatctagatagtagtgataatt

SEQ ID NO: 43437 - DNA, 80 bp, synthetic construct; identical to SEQ ID NO: 14732
  source 1..80: mol_type = other DNA

SEQ ID NO: 43438 - DNA, 80 bp, synthetic construct
  source 1..80: mol_type = other DNA
tctcggctcactgcaagctctgcctcccaggttcacgccattcttctgcctcagcctcccgagtagccgggactacaggc

SEQ ID NO: 43439 - DNA, 80 bp, synthetic construct
  source 1..80: mol_type = other DNA
agctcattcttttacaaaagtaatgaaattgacaaactgccaggaagacaatcaatttaaaaagagagaaaactcaaatt

SEQ ID NO: 43440 - DNA, 80 bp, synthetic construct
  source 1..80: mol_type = other DNA
aaagattgcatatgaaaaaatggttaaactgtttaaatagcttaactctcgttaaaagccttcagtgaagagaagaccca

SEQ ID NO: 43441 - DNA, 80 bp, synthetic construct; identical to SEQ ID NO: 14733
  source 1..80: mol_type = other DNA

SEQ ID NO: 43442 - DNA, 80 bp, synthetic construct
  source 1..80: mol_type = other DNA
aatcccactgctgggaatatacacaaaagaaaggaaatcagcatgtaaagagttatctgtactcccatgtttgctgcagc

SEQ ID NO: 43443 - DNA, 80 bp, synthetic construct
  source 1..80: mol_type = other DNA
atgttaagtgaaataatccagacacaggaagacaaacgtcagatgttctcacttatttgtgaaatctaaaaatcaaaaca

SEQ ID NO: 43444 - DNA, 80 bp, synthetic construct
  source 1..80: mol_type = other DNA
caataaaaacttaattgtacattttaaaataacttaaagagtataattggattgtttgtaagtcaatgcataaatgcttg

SEQ ID NO: 43445 - DNA, 80 bp, synthetic construct; identical to SEQ ID NO: 14734
  source 1..80: mol_type = other DNA

SEQ ID NO: 43446 - DNA, 80 bp, synthetic construct
  source 1..80: mol_type = other DNA
aaagggataatacattctgatatagcgggcccaacattaaaaaatcaattaatgttgattaattgatcatctcaatagac

SEQ ID NO: 43447 - DNA, 80 bp, synthetic construct
  source 1..80: mol_type = other DNA
gagcacaggagtttgagaccagcctgggcaaccaggggaaacctcaactctaaaaaaaaaaagagaggccgggcacggtg

SEQ ID NO: 43448 - DNA, 80 bp, synthetic construct
  source 1..80: mol_type = other DNA
gggaggctgaggcaggagaatggtgtgaacccgggagggggagcttgcagtgagccgagatcgagccactgcactccagc

SEQ ID NO: 43449 - DNA, 80 bp, synthetic construct
  source 1..80: mol_type = other DNA
tgagccatgattgtgccactgcacttcagcctggatgacagaacgagaccctgtctcaaaaagaaaaaataaagattaaa

SEQ ID NO: 43450 - DNA, 80 bp, synthetic construct; identical to SEQ ID NO: 14735
  source 1..80: mol_type = other DNA

SEQ ID NO: 43451 - DNA, 80 bp, synthetic construct
  source 1..80: mol_type = other DNA
caatgatcccctcccttttggtgtgagaatagagcagaagtgattggatgctacttctgagattacgttataaaagactg

SEQ ID NO: 43452 - DNA, 80 bp, synthetic construct
  source 1..80: mol_type = other DNA
aggccttcaatccaaaagccagcaaattatatgagctgcatgagtgaacatagaagtggatttttctccagatgagcctt

SEQ ID NO: 43453 - DNA, 80 bp, synthetic construct
  source 1..80: mol_type = other DNA
atgcaaagcccatatgcacaaataaattgtgtttctatatagtagtggtggaaattggaagtcaaagtttcaaagagtac

SEQ ID NO: 43454 - DNA, 80 bp, synthetic construct; identical to SEQ ID NO: 14736
  source 1..80: mol_type = other DNA

SEQ ID NO: 43455 - DNA, 80 bp, synthetic construct
  source 1..80: mol_type = other DNA
gtgcatatatgaatggacataaatagaggatccagaaatcaacaaatataatcaattaatatttttactaaaaggcattt

SEQ ID NO: 43456 - DNA, 80 bp, synthetic construct
  source 1..80: mol_type = other DNA
aaaatctttaatgatattgggttaggccaagagctcttacctatgatgtcaaaaaccacaagccataaaaagaatgggta

SEQ ID NO: 43457 - DNA, 80 bp, synthetic construct; identical to SEQ ID NO: 14737
  source 1..80: mol_type = other DNA

SEQ ID NO: 43458 - DNA, 80 bp, synthetic construct
  source 1..80: mol_type = other DNA
gtctctataaaaaatacaaaattagctgggcatggtggtgtgtgcctgtagtcccagctacttggaggctgaggtgggag

SEQ ID NO: 43459 - DNA, 80 bp, synthetic construct
  source 1..80: mol_type = other DNA
ctcaaaagcagacagttaccctgaaatatggcaaataggatgaaagagaattgtaggatcaaaaaaggtggtcaatttag

SEQ ID NO: 43460 - DNA, 80 bp, synthetic construct
  source 1..80: mol_type = other DNA
aggatagtaatcatatatctttaaggaaaaaaataaaaaatcattgctagtctaaatctattttcattataaaccgaaag

SEQ ID NO: 43461 - DNA, 80 bp, synthetic construct; identical to SEQ ID NO: 14738
  source 1..80: mol_type = other DNA

SEQ ID NO: 43462 - DNA, 80 bp, synthetic construct
  source 1..80: mol_type = other DNA
taaattctacttgaaaacactgaacctctaactgtcattgttcaaataatttttttccggctttcttttcccatcctgtt

SEQ ID NO: 43463 - DNA, 80 bp, synthetic construct
  source 1..80: mol_type = other DNA
ttattcagctgtcaacactgtctagaggcaagtctttaagaaagttgtgtataattattcgtatgtagctttgcaggaaa

SEQ ID NO: 43464 - DNA, 80 bp, synthetic construct
  source 1..80: mol_type = other DNA
gtaattcacagaaggacacataattcgtatattgtagagtaggaattttaaactgaggctctgtggcttttgaaccaatg

SEQ ID NO: 43465 - DNA, 80 bp, synthetic construct
  source 1..80: mol_type = other DNA
tagtgagactgaagatgtatgaaattattggactagagttgggtaaagatagttcaggaagacttcacagagatggtgag

SEQ ID NO: 43466 - DNA, 80 bp, synthetic construct; identical to SEQ ID NO: 14739
  source 1..80: mol_type = other DNA

SEQ ID NO: 43467 - DNA, 80 bp, synthetic construct
  source 1..80: mol_type = other DNA
tctcatttaggcaataacttgcccagggtcacatgattagactactagacagcaaagtcagaattggaacctagatctag

SEQ ID NO: 43468 - DNA, 80 bp, synthetic construct
  source 1..80: mol_type = other DNA
gtatgctgtttaaagaaatgcttcaaaattggcagaaatgaaggtaattttgtgaattggatcagtgcctcaactgttca

SEQ ID NO: 43469 - DNA, 80 bp, synthetic construct
  source 1..80: mol_type = other DNA
cacaatgacctctgatctctagtttgaaaatattttcttgctgtaattttcttcacccttcaaattcctactcactccaa

SEQ ID NO: 43470 - DNA, 80 bp, synthetic construct; identical to SEQ ID NO: 14740
  source 1..80: mol_type = other DNA

SEQ ID NO: 43471 - DNA, 80 bp, synthetic construct
  source 1..80: mol_type = other DNA
aaatcagtaatttttggatttaataccttagacagcacatgtttattttagtacaacaaaggcatgcacaaatcagaaaa

SEQ ID NO: 43472 - DNA, 80 bp, synthetic construct
  source 1..80: mol_type = other DNA
taccttttgattctctcaaaagaaaagcgcatgccttctggtccactgtaccagaattttaaggctcatgatcaataact

SEQ ID NO: 43473 - DNA, 80 bp, synthetic construct; identical to SEQ ID NO: 14741
  source 1..80: mol_type = other DNA

SEQ ID NO: 43474 - DNA, 80 bp, synthetic construct
  source 1..80: mol_type = other DNA
tccacagtcaattttcggaacccaagaaattgtttcaaaatatttctaagttccatagtagcaattagatcttctaggct

SEQ ID NO: 43475 - DNA, 80 bp, synthetic construct
  source 1..80: mol_type = other DNA
ctgaaaatgcaaagaagatgaactggctggggaactcaatacttgaagaatgacactctagtgacttccctgtggttttt

SEQ ID NO: 43476 - DNA, 80 bp, synthetic construct
  source 1..80: mol_type = other DNA
cagggtgggcccatctcccaatagcagtggaaacagtcctgggcacaagacaatgcattccccctaagattaagaataag

SEQ ID NO: 43477 - DNA, 80 bp, synthetic construct
  source 1..80: mol_type = other DNA
ttagaaagaaagaagtaaaacagttcccatatgcacatgatgtaattgtttttgtagaacatctcaaagaacctacaaag

SEQ ID NO: 43478 - DNA, 80 bp, synthetic construct; identical to SEQ ID NO: 14742
  source 1..80: mol_type = other DNA

SEQ ID NO: 43479 - DNA, 80 bp, synthetic construct
  source 1..80: mol_type = other DNA
aggattgctttcttctaaggtctttctccttggctttgtagatggccatgttcttcttgtgacttacacatggtcttccc

SEQ ID NO: 43480 - DNA, 80 bp, synthetic construct; identical to SEQ ID NO: 14743
  source 1..80: mol_type = other DNA

SEQ ID NO: 43481 - DNA, 80 bp, synthetic construct
  source 1..80: mol_type = other DNA
tgccaaagaaaatggtcctccataggtaaaaacaaatgaactttgatctaacttgatacctatacaaaaattaaaacaga

SEQ ID NO: 43482 - DNA, 80 bp, synthetic construct
  source 1..80: mol_type = other DNA
cttttgctctgcaaaagagccctttaaaggaattggaaaaccatctacagggtgagagaaatatttgtaaatgatacatc

SEQ ID NO: 43483 - DNA, 80 bp, synthetic construct
  source 1..80: mol_type = other DNA
aaaaatacaaaaatcagccaggtgtggtggcaggcgcctgtaatcccagttacttgggaggctgaggcaggagaattgct

SEQ ID NO: 43484 - DNA, 80 bp, synthetic construct; identical to SEQ ID NO: 14744
  source 1..80: mol_type = other DNA

SEQ ID NO: 43485 - DNA, 80 bp, synthetic construct
  source 1..80: mol_type = other DNA
actcctttttattgccatatgaggtaacattcaaaggttccaggcatttggacttggctattttttggggggtcattttt

SEQ ID NO: 43486 - DNA, 80 bp, synthetic construct
  source 1..80: mol_type = other DNA
gcaaatttaaaccacaatgaagttttgtaaatcccaaaactttaagaggatagcatgagaccaggagtttgaggacagcc

SEQ ID NO: 43487 - DNA, 80 bp, synthetic construct
  source 1..80: mol_type = other DNA
gagtttaagattacagtgaagggatcaaatcactacactccaacctgggcaacagagcaagaccttatctcaaaaaacca

SEQ ID NO: 43488 - DNA, 80 bp, synthetic construct; identical to SEQ ID NO: 14745
  source 1..80: mol_type = other DNA

SEQ ID NO: 43489 - DNA, 80 bp, synthetic construct
  source 1..80: mol_type = other DNA
tgattcttgcaacaatcaagatgattctccagagaattacgctaagtgaaaagtgccaatcccaaaacatgacatgctgt

SEQ ID NO: 43490 - DNA, 80 bp, synthetic construct
  source 1..80: mol_type = other DNA
ggagcagagaaggaaagtgggtgtggttataaaaggccaacaggataaatccaaatggtgatgttaatgttctgccatct

SEQ ID NO: 43491 - DNA, 80 bp, synthetic construct
  source 1..80: mol_type = other DNA
gcaatccagactcatttcatactaagacctggaacttccatctctcaggagaccttgatctctctagtgaggaataatac

SEQ ID NO: 43492 - DNA, 80 bp, synthetic construct; identical to SEQ ID NO: 14746
  source 1..80: mol_type = other DNA

SEQ ID NO: 43493 - DNA, 80 bp, synthetic construct
  source 1..80: mol_type = other DNA
ccaactccaaatttatatttcaatcacatctcacatattttcaatagaattgtaatttttttgtcaccagtttagccaca

SEQ ID NO: 43494 - DNA, 80 bp, synthetic construct
  source 1..80: mol_type = other DNA
tagacactctgtgcctatgaactcaacttgaaattctatagtgatagtgctccaaaaagccacccaataaaaactaaaat

SEQ ID NO: 43495 - DNA, 80 bp, synthetic construct
  source 1..80: mol_type = other DNA
aaaaacaatacctagcctaaatatttctattaatgcatattaggaaaccaattgcccttgccctctctacttcttgccag

SEQ ID NO: 43496 - DNA, 80 bp, synthetic construct; identical to SEQ ID NO: 14747
  source 1..80: mol_type = other DNA

SEQ ID NO: 43497 - DNA, 80 bp, synthetic construct
  source 1..80: mol_type = other DNA
ttaaacaccaatatttaagtcttaaaaggaaataaaagtttacaataatgatgaatgtcaaacttaaaggtgtttgttat

SEQ ID NO: 43498 - DNA, 80 bp, synthetic construct
  source 1..80: mol_type = other DNA
caaaaaaaaccaaaaaaatagccaagcatagtggcatgccagtagtcccagctacttaggaggctgaggtgggaggatgg

SEQ ID NO: 43499 - DNA, 80 bp, synthetic construct
  source 1..80: mol_type = other DNA
aagacttctatgccagccaccctaaacaaaacagaagaagcacaaatattactaaacaaattaatgcttcattaacaagc

SEQ ID NO: 43500 - DNA, 80 bp, synthetic construct
  source 1..80: mol_type = other DNA
ccccccacttttgttttgcctgatacagatattttaaccttaggtgtacagaaccctattaaagaacccagattacaatt

SEQ ID NO: 43501 - DNA, 80 bp, synthetic construct; identical to SEQ ID NO: 14748
  source 1..80: mol_type = other DNA

SEQ ID NO: 43502 - DNA, 80 bp, synthetic construct
  source 1..80: mol_type = other DNA
gtttactagatcttcatttattccttctaattttgtggtcgctctgctagtaacacattgtaaggtttagactcaatcta

SEQ ID NO: 43503 - DNA, 80 bp, synthetic construct
  source 1..80: mol_type = other DNA
atccttgtcctcaattttctttaccaagtttccaaatatttacatcatctttaactttccacggggccccaattcgtcaa

SEQ ID NO: 43504 - DNA, 80 bp, synthetic construct
  source 1..80: mol_type = other DNA
attggaaattaccactttattcccactccatggctctactcaacccaccacattaccatcaactcagattcatagattag

SEQ ID NO: 43505 - DNA, 80 bp, synthetic construct; identical to SEQ ID NO: 14749
  source 1..80: mol_type = other DNA

SEQ ID NO: 43506 - DNA, 80 bp, synthetic construct
  source 1..80: mol_type = other DNA
atggttttgaaatggttgttccacaaaggaagggtcctccagaaagtttctatagccttctttttgggtaatttttgcct

SEQ ID NO: 43507 - DNA, 80 bp, synthetic construct
  source 1..80: mol_type = other DNA
atatctgctatggagcactcatgatgctttcatatgtgttatttaatttaccacaatggaaatacacaaccccacatctt

SEQ ID NO: 43508 - DNA, 80 bp, synthetic construct
  source 1..80: mol_type = other DNA
tgctaatttttttttattatttatttgtagagatagggtctcactctgttgcccaggctggtctctaagtcctgggctca

SEQ ID NO: 43509 - DNA, 80 bp, synthetic construct; identical to SEQ ID NO: 14750
  source 1..80: mol_type = other DNA

SEQ ID NO: 43510 - DNA, 80 bp, synthetic construct
  source 1..80: mol_type = other DNA
tatagttttttgcttatctttctaagttagggctagtagtaataactacctaaataatttgaatcccttgagaatgcaaa

SEQ ID NO: 43511 - DNA, 80 bp, synthetic construct
  source 1..80: mol_type = other DNA
aattggaatttggaaggatttgagaactggaagggagagaactaaaattgttgactagtaactttgtaaagccctagaca

SEQ ID NO: 43512 - DNA, 80 bp, synthetic construct
  source 1..80: mol_type = other DNA
ataaaggaaagtaatgtatagaagagataagtaatgtgtccaagaccttagaacttttcagtaacacaactgattattaa

SEQ ID NO: 43513 - DNA, 80 bp, synthetic construct; identical to SEQ ID NO: 14751
  source 1..80: mol_type = other DNA

SEQ ID NO: 43514 - DNA, 80 bp, synthetic construct
  source 1..80: mol_type = other DNA
gtgtatatatacatggttttctagatatatatgcatgacagtgaattatctttgaaatttaattattccattaaaatgga

SEQ ID NO: 43515 - DNA, 80 bp, synthetic construct
  source 1..80: mol_type = other DNA
ggaatggatctagaaagtgtagatccatcatattttccactgtcatccctggggattttcaaggattccatcaaaagtta

SEQ ID NO: 43516 - DNA, 80 bp, synthetic construct
  source 1..80: mol_type = other DNA
agaggtcattctcaaagtgaaacaattttcttgtgtgtataaaggtggtaccatatccctagatagatggcatattaagc

SEQ ID NO: 43517 - DNA, 80 bp, synthetic construct; identical to SEQ ID NO: 14752
  source 1..80: mol_type = other DNA

SEQ ID NO: 43518 - DNA, 80 bp, synthetic construct
  source 1..80: mol_type = other DNA
aaagtacactcattttcccctaagtacttctagaagtcaccagtggttctctcgtgtgatcatgagcaaatcaattttca

SEQ ID NO: 43519 - DNA, 80 bp, synthetic construct
  source 1..80: mol_type = other DNA
catttggcattcatcatctcccactgggcatccatcatctgccactgggtatccatcatcatttgctcggcatctgctga

SEQ ID NO: 43520 - DNA, 80 bp, synthetic construct
  source 1..80: mol_type = other DNA
aggtgtgctgcatttgcgtcagtattcattgtacttagctgtgttccttgcataaattaggaaaatgcccctttataact

SEQ ID NO: 43521 - DNA, 80 bp, synthetic construct; identical to SEQ ID NO: 14753
  source 1..80: mol_type = other DNA

SEQ ID NO: 43522 - DNA, 80 bp, synthetic construct
  source 1..80: mol_type = other DNA
tcccaggcccacatatcttcacctgtgaatcattactttgggtttgaaatgtcttctcccaatatcacttttccctttaa

SEQ ID NO: 43523 - DNA, 80 bp, synthetic construct
  source 1..80: mol_type = other DNA
ttcttatatctagagtcttctacctctggttatcctttgctgtttctctcttctatcctccttagaaatgtacaactttg

SEQ ID NO: 43524 - DNA, 80 bp, synthetic construct
  source 1..80: mol_type = other DNA
atcccagctactcaggaggctgaggcaggagaatctcttgaacccaggaggtggaggttgcgatgagccgagatcgcacc

SEQ ID NO: 43525 - DNA, 80 bp, synthetic construct; identical to SEQ ID NO: 14754
  source 1..80: mol_type = other DNA

SEQ ID NO: 43526 - DNA, 80 bp, synthetic construct
  source 1..80: mol_type = other DNA
tcttctcaagaaagattagaattccctctgtagtgtccagttctggtgatttgaagattctcctcattttcctttttctt

SEQ ID NO: 43527 - DNA, 80 bp, synthetic construct
  source 1..80: mol_type = other DNA
gtccttctctctctctttctttctttcttttttctttctttctttttttttctttcctttcttttgacagagtttcactg

SEQ ID NO: 43528 - DNA, 80 bp, synthetic construct; identical to SEQ ID NO: 14755
  source 1..80: mol_type = other DNA

SEQ ID NO: 43529 - DNA, 80 bp, synthetic construct
  source 1..80: mol_type = other DNA
gccacaaaaggctaatatccatcctcacatcactggtattaaaggtcccattctcccagctagccagagtgctatttctg

SEQ ID NO: 43530 - DNA, 80 bp, synthetic construct
  source 1..80: mol_type = other DNA
caagccctaccataatactaatagttaatagttattgtgtacttattagtactgtacatggtcctagctgatacacactg

SEQ ID NO: 43531 - DNA, 80 bp, synthetic construct
  source 1..80: mol_type = other DNA
tcaaagacttgaaggattttcatactcatacgcttccaaagacaaaagcaagataaatggtaaaagatacggaaagaatc

SEQ ID NO: 43532 - DNA, 80 bp, synthetic construct
  source 1..80: mol_type = other DNA
atgccactttgaacaagttactcaaaatctgaaagtatcattatgaagttagaagtttagtgcttttgtcaatgataggg

SEQ ID NO: 43533 - DNA, 80 bp, synthetic construct; identical to SEQ ID NO: 14756
  source 1..80: mol_type = other DNA

SEQ ID NO: 43534 - DNA, 80 bp, synthetic construct
  source 1..80: mol_type = other DNA
tgttcgcatttttctgtatgtactcctaacagagtgcttgaactgtgtagtaaaaggatcattgggctaatcattaaaag

SEQ ID NO: 43535 - DNA, 80 bp, synthetic construct
  source 1..80: mol_type = other DNA
tataacattaagtccccaaagtaaacttaatgaattaagttttcccatgacccaatgccattgtttcttttaaaggaaga

SEQ ID NO: 43536 - DNA, 80 bp, synthetic construct
  source 1..80: mol_type = other DNA
tgtttttattctgtagtaacatgttatgggatatataagagtttttatgggagcatgtacaattgcaaattagccaagcc

SEQ ID NO: 43537 - DNA, 80 bp, synthetic construct; identical to SEQ ID NO: 14757
  source 1..80: mol_type = other DNA

SEQ ID NO: 43538 - DNA, 80 bp, synthetic construct
  source 1..80: mol_type = other DNA
cttagcttaatatctcctttatattgatagggaggaaaaagtttctggatttactattttaagagcaagtacaaaggaca

SEQ ID NO: 43539 - DNA, 80 bp, synthetic construct
  source 1..80: mol_type = other DNA
tatataatgaaaagtaaattccctgttgtttgaagtgtttcttgtgatggaagaaaatgaagtgtctaattttgaattcc

SEQ ID NO: 43540 - DNA, 80 bp, synthetic construct
  source 1..80: mol_type = other DNA
gttactaataaaaaggaaattgctcaatagaaaattacataaaagctaaacattgataagttaatcatatacatatttaa

SEQ ID NO: 43541 - DNA, 80 bp, synthetic construct; identical to SEQ ID NO: 14758
  source 1..80: mol_type = other DNA

SEQ ID NO: 43542 - DNA, 80 bp, synthetic construct
  source 1..80: mol_type = other DNA
catataaaaatgtaaattatgtattttcacgtgtaccaaaacaaatgttctagaagtagtatattggttcaaatataatg

SEQ ID NO: 43543 - DNA, 80 bp, synthetic construct
  source 1..80: mol_type = other DNA
tcataaataaactttttagcgtgtattactatgacaagttactcaattggcttttactctgggttattcaactaaaagtt

SEQ ID NO: 43544 - DNA, 80 bp, synthetic construct
  source 1..80: mol_type = other DNA
ttacactttgaagtaaacaaaagatcttacaagagattgcaagtgccatcatatgacacttctagctttacctcatgttc

SEQ ID NO: 43545 - DNA, 80 bp, synthetic construct; identical to SEQ ID NO: 14759
  source 1..80: mol_type = other DNA

SEQ ID NO: 43546 - DNA, 80 bp, synthetic construct
  source 1..80: mol_type = other DNA
aaaaatagtattagtgtttgctctggggcttacaatatacatcttttaatttttattcctttttaaaattgagatataaa

SEQ ID NO: 43547 - DNA, 80 bp, synthetic construct
  source 1..80: mol_type = other DNA
tgttaagattaacattaaacttcaatagtatgtagacatattgctccaatatacttccatttcttcccccttctttgtga

SEQ ID NO: 43548 - DNA, 80 bp, synthetic construct
  source 1..80: mol_type = other DNA
gattcaagttaccatctaccttttcatttcagttgaaagattccctttggtagatataggttaggtatgctgactacaac

SEQ ID NO: 43549 - DNA, 80 bp, synthetic construct; identical to SEQ ID NO: 14760
  source 1..80: mol_type = other DNA

SEQ ID NO: 43550 - DNA, 80 bp, synthetic construct
  source 1..80: mol_type = other DNA
cattgttttttcaaatatcttttctgtatctttctaacctatccttctggactcccattatgcataatttgatggtgtct

SEQ ID NO: 43551 - DNA, 80 bp, synthetic construct
  source 1..80: mol_type = other DNA
gaaatgttctattaagcctatctaatgaatttaccatttcagttattgtacttttcaacttcggaatttttgttctttta

SEQ ID NO: 43552 - DNA, 80 bp, synthetic construct
  source 1..80: mol_type = other DNA
ccctctgtacactttctattgacttctttaattcctgcctttatgccatactttcctgtttcttttctcttttctttctt

SEQ ID NO: 43553 - DNA, 80 bp, synthetic construct
  source 1..80: mol_type = other DNA
cacccggctattgtttgtatttttaatagagacgaggtttcaccatgttggtcaggctggtctcgaactcctgacctcaa

SEQ ID NO: 43554 - DNA, 80 bp, synthetic construct; identical to SEQ ID NO: 14761
  source 1..80: mol_type = other DNA

SEQ ID NO: 43555 - DNA, 80 bp, synthetic construct
  source 1..80: mol_type = other DNA
cagtttttcttttaccctgttccaaggagatttttgtgggaggtcacaccttcaaatttcagagaatttacaagtcaata

SEQ ID NO: 43556 - DNA, 80 bp, synthetic construct
  source 1..80: mol_type = other DNA
tccttttgccattaccgatgtattccttttacatttttagccaacttcttgtttgttacaactgagttcacaggcttagg

SEQ ID NO: 43557 - DNA, 80 bp, synthetic construct; identical to SEQ ID NO: 14762
  source 1..80: mol_type = other DNA

SEQ ID NO: 43558 - DNA, 80 bp, synthetic construct
  source 1..80: mol_type = other DNA
tttgcaagtatttttatagcttttgtgagagaaagaattcaccaaggttgccattctgtaagttctgttctcataagtac

SEQ ID NO: 43559 - DNA, 80 bp, synthetic construct
  source 1..80: mol_type = other DNA
aaattaggtttccaacaaggttcacattttgcatttgttttttatgaaactagatttttgtgtatgtgtggtggcggggc

SEQ ID NO: 43560 - DNA, 80 bp, synthetic construct
  source 1..80: mol_type = other DNA
ttcatgtcttgtccaacaaaggctagtaattccaggttagcctagggcccaagagatgaagcaaaagctgaaactgggaa

SEQ ID NO: 43561 - DNA, 80 bp, synthetic construct; identical to SEQ ID NO: 14763
  source 1..80: mol_type = other DNA

SEQ ID NO: 43562 - DNA, 80 bp, synthetic construct
  source 1..80: mol_type = other DNA
gtaactgagcttaacatttttgctttcctcaccctgaaaatcaggtacacaagaacttctttccccctttcccattataa

SEQ ID NO: 43563 - DNA, 80 bp, synthetic construct
  source 1..80: mol_type = other DNA
ctcccactcaaatctcaaaataaagcaatattactgcaacaaggtatacttcatttttgtagtaagagccagtttcataa

SEQ ID NO: 43564 - DNA, 80 bp, synthetic construct
  source 1..80: mol_type = other DNA
caatttttcagataccatggaatcataccttttatcaagaataacagttgtttgtcagtgcactttgggatattgagcag

SEQ ID NO: 43565 - DNA, 80 bp, synthetic construct
  source 1..80: mol_type = other DNA
taaataaaccacataatttccaaaatgcctttcactttgtgcacttagctttggtttctaaaccccttctgaaacagata

SEQ ID NO: 43566 - DNA, 80 bp, synthetic construct; identical to SEQ ID NO: 14764
  source 1..80: mol_type = other DNA

SEQ ID NO: 43567 - DNA, 80 bp, synthetic construct
  source 1..80: mol_type = other DNA
atggaatgcatcaaataaataataggtggttaagaagttcagaggaggtacatgtctccctagtcaattggtaagaatag

SEQ ID NO: 43568 - DNA, 80 bp, synthetic construct
  source 1..80: mol_type = other DNA
aactttgaagggaaatagagaaacccaattttattgtagttacaccttcaggattgcattttgctactaataatttatac

SEQ ID NO: 43569 - DNA, 80 bp, synthetic construct; identical to SEQ ID NO: 14765
  source 1..80: mol_type = other DNA

SEQ ID NO: 43570 - DNA, 80 bp, synthetic construct
  source 1..80: mol_type = other DNA
gaacaatgctacatctatatttatgttggcttaatcaacctcttcagtgatgggccttgaggaagcaccactagagggag

SEQ ID NO: 43571 - DNA, 80 bp, synthetic construct
  source 1..80: mol_type = other DNA
cttccttcttagcagcctgattcttatccagccatttgataacttcattaaacttgtccagaatcttctgtttgtcctca

SEQ ID NO: 43572 - DNA, 80 bp, synthetic construct
  source 1..80: mol_type = other DNA
caaacggtgcttgtcattagtggtagtaatcgtgttctcttttcctacactcttgtccacagcagagacattgaggatgc

SEQ ID NO: 43573 - DNA, 80 bp, synthetic construct; identical to SEQ ID NO: 14766
  source 1..80: mol_type = other DNA

SEQ ID NO: 43574 - DNA, 80 bp, synthetic construct
  source 1..80: mol_type = other DNA
ttgaagatgtcttggagaagcttctgaatcttggggatatgagtataaccaccaatagagacaatatcatgaatctgtga

SEQ ID NO: 43575 - DNA, 80 bp, synthetic construct
  source 1..80: mol_type = other DNA
gagagagtatgcttagtgtgttcacaagcagtacagaggcgtcttatagctctcttcttctcactgatgtctttcttata

SEQ ID NO: 43576 - DNA, 80 bp, synthetic construct
  source 1..80: mol_type = other DNA
ctttcagctccaacctttttgtctaagccgtaagcaatatcagcagcacttggctcattgataattctaagtacattgag

SEQ ID NO: 43577 - DNA, 80 bp, synthetic construct
  source 1..80: mol_type = other DNA
attttggtctctcccttgtattctacttggaccttgggcctgtcagtatcattcaccatcatgaagggccaatgcttcat

SEQ ID NO: 43578 - DNA, 80 bp, synthetic construct; identical to SEQ ID NO: 14767
  source 1..80: mol_type = other DNA

SEQ ID NO: 43579 - DNA, 80 bp, synthetic construct
  source 1..80: mol_type = other DNA
caaaaaaatgatgtcaaaaacactatgattaaaaactcactgatatgctgacaaacatattacctcaactatcatctgct

SEQ ID NO: 43580 - DNA, 80 bp, synthetic construct
  source 1..80: mol_type = other DNA
gaagattttcctgactgcccttttctgcatttatatttcatctacttctagtccagttagttttatatttatgttctaag

SEQ ID NO: 43581 - DNA, 80 bp, synthetic construct; identical to SEQ ID NO: 14768
  source 1..80: mol_type = other DNA

SEQ ID NO: 43582 - DNA, 80 bp, synthetic construct
  source 1..80: mol_type = other DNA
cccaggctggagtgcagtgacacaatcttggctcactgcaaactccgcctcctgggttcaagcgattccccttccgcagc

SEQ ID NO: 43583 - DNA, 80 bp, synthetic construct
  source 1..80: mol_type = other DNA
tggagaggtttttaaattagtattgtccaaattcagtgactctgactaatggtagctaatggaaagctgaaatgttcagt

SEQ ID NO: 43584 - DNA, 80 bp, synthetic construct
  source 1..80: mol_type = other DNA
agtgctgtcattgtacgagttagtatctttctttctctgaagatattttttaataatgaaagtagaatgtactggaagtg

SEQ ID NO: 43585 - DNA, 80 bp, synthetic construct; identical to SEQ ID NO: 14769
  source 1..80: mol_type = other DNA

SEQ ID NO: 43586 - DNA, 80 bp, synthetic construct
  source 1..80: mol_type = other DNA
aaaacaggcaaaaactgcaatatcacataagtcagcttacaaatggaagtgccttccagaccacagtacagtattggatt

SEQ ID NO: 43587 - DNA, 80 bp, synthetic construct
  source 1..80: mol_type = other DNA
cttcaggacacagatggagggctgtgctattgggccaggaaaatttgctattccaagtcagcaatagaaaacattaagtt

SEQ ID NO: 43588 - DNA, 80 bp, synthetic construct
  source 1..80: mol_type = other DNA
gctccccaggattccattttagaagatatttggcaaaacatcaaattgccacttggtgcaacatcattttttaattttct

SEQ ID NO: 43589 - DNA, 80 bp, synthetic construct; identical to SEQ ID NO: 14770
  source 1..80: mol_type = other DNA

SEQ ID NO: 43590 - DNA, 80 bp, synthetic construct
  source 1..80: mol_type = other DNA
caaaagctgcacctccaatgcagctttttattctaagtaaaaatccttccaactcaagcagggtaactctttcacatgga

SEQ ID NO: 43591 - DNA, 80 bp, synthetic construct
  source 1..80: mol_type = other DNA
tcaacttatttgtaggaggattggagacattgggtacaagaagatactttgtaagtttatgaatgaattctgctctatgt

SEQ ID NO: 43592 - DNA, 80 bp, synthetic construct
  source 1..80: mol_type = other DNA
taaaaacaacgaaactaacaaaacaatgataaaaaataatacaaataaaaacaatacaatataacaagtattcacataag

SEQ ID NO: 43593 - DNA, 80 bp, synthetic construct
  source 1..80: mol_type = other DNA
ataccgggaaacaactgcgtgtatgtatatacactcacacacataggtatgtatgcatgtatgaaagtatcaaagagctc

SEQ ID NO: 43594 - DNA, 80 bp, synthetic construct; identical to SEQ ID NO: 14771
  source 1..80: mol_type = other DNA

SEQ ID NO: 43595 - DNA, 80 bp, synthetic construct
  source 1..80: mol_type = other DNA
ctgtccctgatcattttaaaccacaagccagaactcacagtgatttgtcatccagattcatatcaactgggttgtccaga

SEQ ID NO: 43596 - DNA, 80 bp, synthetic construct
  source 1..80: mol_type = other DNA
gcacaagttcaaagtaccactggtaagaggcagaaaaacaacaaatataataaatatacctgaaaaacttcaggcattgt

SEQ ID NO: 43597 - DNA, 80 bp, synthetic construct; identical to SEQ ID NO: 14772
  source 1..80: mol_type = other DNA

SEQ ID NO: 43598 - DNA, 80 bp, synthetic construct
  source 1..80: mol_type = other DNA
ctctacaaaaaaattaaaaaataaaaaaattagcctggtgtggtggtgtgtgcctgtagtcctacctacttgagaggctg

SEQ ID NO: 43599 - DNA, 80 bp, synthetic construct
  source 1..80: mol_type = other DNA
tggcgtgatcacagcccactgcagccttgatgtcctcggctcaagtaatcctcctgccccagcctcctgagtagctggga

SEQ ID NO: 43600 - DNA, 80 bp, synthetic construct
  source 1..80: mol_type = other DNA
agtcaaccccgccgtctaaaaaaaaaaaaaagtaacatacagtgagaagtaaccaaatgtctaattgggattgaatagga

SEQ ID NO: 43601 - DNA, 80 bp, synthetic construct; identical to SEQ ID NO: 14773
  source 1..80: mol_type = other DNA

SEQ ID NO: 43602 - DNA, 80 bp, synthetic construct
  source 1..80: mol_type = other DNA
tacagatgaaaacagaggaactttctaaccagtaattcctgtttcaggaatttgaaaaggaagtatttcagtaaaaagga

SEQ ID NO: 43603 - DNA, 80 bp, synthetic construct
  source 1..80: mol_type = other DNA
aggccaacgtgggaggaatgccttagcccaagagtttgagactagcctgggcaacataggaagaccctgtctccacaaaa

SEQ ID NO: 43604 - DNA, 80 bp, synthetic construct
  source 1..80: mol_type = other DNA
aaaaaaaaaggtgtcaaaatagtgtcgtaagtgagtacatattttaagaagataaaatacaaggcaagaataacataatt

SEQ ID NO: 43605 - DNA, 80 bp, synthetic construct; identical to SEQ ID NO: 14774
  source 1..80: mol_type = other DNA

SEQ ID NO: 43606 - DNA, 80 bp, synthetic construct
  source 1..80: mol_type = other DNA
aaataaaataaacataataacaagacaaaatgaaataagacaaaataaaaatgaaatctaaatctacaccatctattata

SEQ ID NO: 43607 - DNA, 80 bp, synthetic construct
  source 1..80: mol_type = other DNA
agttatacaaagttctattcatcaggaagatacagcaatttgaaacgtgtatttatgcaatagcatgattaccaaatata

SEQ ID NO: 43608 - DNA, 80 bp, synthetic construct
  source 1..80: mol_type = other DNA
tattttcatgcatacagggaacattgacaaaagttgactatttactaggccactgagaaagtttcaataaaattaatgaa

SEQ ID NO: 43609 - DNA, 80 bp, synthetic construct; identical to SEQ ID NO: 14775
  source 1..80: mol_type = other DNA

SEQ ID NO: 43610 - DNA, 80 bp, synthetic construct
  source 1..80: mol_type = other DNA
caaaccaaacattggttctctgaaaaaaaaaaaaagacagacaaaccactgactagattgattaatagagaaaaaaaaaa

SEQ ID NO: 43611 - DNA, 80 bp, synthetic construct
  source 1..80: mol_type = other DNA
gttagaaatatgtacaaatatctagacaaacataacttgacaatactggcagtcgtagcttgtgaggtctttccaaggaa

SEQ ID NO: 43612 - DNA, 80 bp, synthetic construct
  source 1..80: mol_type = other DNA
gatgcattacttcagtctctgcctccgtcttcacatggccttcttcttgtacatctcctgcttgcttaagttgccttcct

SEQ ID NO: 43613 - DNA, 80 bp, synthetic construct
  source 1..80: mol_type = other DNA
tttagtagagacggggtttcaccgcgttagccaggatgatctcgatctcctgaactcgtgatccgcccgcctcggcctcc

SEQ ID NO: 43614 - DNA, 80 bp, synthetic construct; identical to SEQ ID NO: 14776
  source 1..80: mol_type = other DNA

SEQ ID NO: 43615 - DNA, 80 bp, synthetic construct
  source 1..80: mol_type = other DNA
gcaattccagaagtagatggctttatgtggctggagagttccacaaaacattaaggaaccaaaaatgtccaatcttatat

SEQ ID NO: 43616 - DNA, 80 bp, synthetic construct
  source 1..80: mol_type = other DNA
attgaaggaagcgacttatgaaaagaaaaatacattattaccacattaggtttatcttaggaatgcaaagttgatttaac

SEQ ID NO: 43617 - DNA, 80 bp, synthetic construct
  source 1..80: mol_type = other DNA
tcaggccactccctcatactataccccaaataaattagagttgcattatagacctaaatataaagtacaaaactatgagg

SEQ ID NO: 43618 - DNA, 80 bp, synthetic construct; identical to SEQ ID NO: 14777
  source 1..80: mol_type = other DNA

SEQ ID NO: 43619 - DNA, 80 bp, synthetic construct
  source 1..80: mol_type = other DNA
aagatgctcaaacttagtaatcagggaaattaaaatcgcaattaaatgccagttagtagtcaccagactggcaaaaatta

SEQ ID NO: 43620 - DNA, 80 bp, synthetic construct
  source 1..80: mol_type = other DNA
agaaaagtgtgaaccccatgatccagaaattccatgcttaggtgtatagcctacagaaagggttacacatgagcaccaag

SEQ ID NO: 43621 - DNA, 80 bp, synthetic construct; identical to SEQ ID NO: 14778
  source 1..80: mol_type = other DNA

SEQ ID NO: 43622 - DNA, 80 bp, synthetic construct
  source 1..80: mol_type = other DNA
aatttgatatgactcagactaatagtttaaaagttctgagcccaattggcctgaaatcacatagtccagtgtaacagcct

SEQ ID NO: 43623 - DNA, 80 bp, synthetic construct
  source 1..80: mol_type = other DNA
gattctttctcctggttttcattttattaagtggctgtggcacaaaacacaggcgactgaagtgaaagcaattacaattt

SEQ ID NO: 43624 - DNA, 80 bp, synthetic construct
  source 1..80: mol_type = other DNA
atcctgaataagaaggagccatctgtccttgggcctggttccccagaggactatatacaacacaaatccaccaataaaat

SEQ ID NO: 43625 - DNA, 80 bp, synthetic construct
  source 1..80: mol_type = other DNA
taaggttttaagaaggcagtagaacacagaggagtatgaaaagcaggtcacgaaaaattgggttccagaaaatatttatg

SEQ ID NO: 43626 - DNA, 80 bp, synthetic construct; identical to SEQ ID NO: 14779
  source 1..80: mol_type = other DNA

SEQ ID NO: 43627 - DNA, 80 bp, synthetic construct
  source 1..80: mol_type = other DNA
cagagcttgcagtgggccaagatggtgccactgcactccagcctgggcaacagagcgagactctgtctcaaaaaaaaaaa

SEQ ID NO: 43628 - DNA, 80 bp, synthetic construct
  source 1..80: mol_type = other DNA
agagaaaactaagtaatttcctgttcctacccctgcatttcctctcttctatctccggaccaactacagatttagactaa

SEQ ID NO: 43629 - DNA, 80 bp, synthetic construct; identical to SEQ ID NO: 14780
  source 1..80: mol_type = other DNA

SEQ ID NO: 43630 - DNA, 80 bp, synthetic construct
  source 1..80: mol_type = other DNA
atgaatataatcttcccaattcagatgaaatgaggtatagatacaagcaaagtcagggacatttttttcagacagtatct

SEQ ID NO: 43631 - DNA, 80 bp, synthetic construct
  source 1..80: mol_type = other DNA
ggggttttgccatgttgctcaggctggtctcaaactcacagggtcaagcaatctgcctgtgtcagcctcccaaagtgttg

SEQ ID NO: 43632 - DNA, 80 bp, synthetic construct
  source 1..80: mol_type = other DNA
aaaaattacagttctcaagaaagctgaggcctcctccttagtgacattatctcaagaagaaaattatttgcttcacactt

SEQ ID NO: 43633 - DNA, 80 bp, synthetic construct; identical to SEQ ID NO: 14781
  source 1..80: mol_type = other DNA

SEQ ID NO: 43634 - DNA, 80 bp, synthetic construct
  source 1..80: mol_type = other DNA
agtgatcttgattgttaagatttaaaaaaatgttaacgacctctgaaaattaaaaaaaaagggctttgagcttagaacat

SEQ ID NO: 43635 - DNA, 80 bp, synthetic construct
  source 1..80: mol_type = other DNA
catctttaaaatggggatgatcatagtatgtgcctcacttgatatgcggactaaggcaccttaggtatgggatataagga

SEQ ID NO: 43636 - DNA, 80 bp, synthetic construct
  source 1..80: mol_type = other DNA
ctatcaagtttttatatttatgtgcaggtacttaaagtgtcttttgaacaatatgctgagttaggtttgcacttctaagc

SEQ ID NO: 43637 - DNA, 80 bp, synthetic construct; identical to SEQ ID NO: 14782
  source 1..80: mol_type = other DNA

SEQ ID NO: 43638 - DNA, 80 bp, synthetic construct
  source 1..80: mol_type = other DNA
gaaatgttttacaaaatcaaaaagattcctaatcccagccaattaaccacttaggttaggtaatattgaagttgacccac

SEQ ID NO: 43639 - DNA, 80 bp, synthetic construct
  source 1..80: mol_type = other DNA
ttaaaccaatgtacatgtctattagaggcatagcgtagaaaatgaataccccttttctttctctcatttagaaaatagca

SEQ ID NO: 43640 - DNA, 80 bp, synthetic construct
  source 1..80: mol_type = other DNA
agttttattatggaaaaaatataactattctttacgctcaagattatttagttcatcactggaacatttggaatttttaa

SEQ ID NO: 43641 - DNA, 80 bp, synthetic construct
  source 1..80: mol_type = other DNA
tttaaattctgaataaatatggctttctgaccatgccaattaatagcgccatgagcgcatcaaccaaacccataaatggg

SEQ ID NO: 43642 - DNA, 80 bp, synthetic construct
  source 1..80: mol_type = other DNA
tacttacataaaacatgtacaccaacacatcaaaattgacaaagcagtctatgcaaattttcttagtcggtctttaatcc

SEQ ID NO: 43643 - DNA, 80 bp, synthetic construct; identical to SEQ ID NO: 14783
  source 1..80: mol_type = other DNA

SEQ ID NO: 43644 - DNA, 80 bp, synthetic construct
  source 1..80: mol_type = other DNA
attcattcattcattcagatactgagtatatatactaggtgctgggtttacagtgataaacaaaaagcatagtacttacc

SEQ ID NO: 43645 - DNA, 80 bp, synthetic construct; identical to SEQ ID NO: 14784
  source 1..80: mol_type = other DNA

SEQ ID NO: 43646 - DNA, 80 bp, synthetic construct
  source 1..80: mol_type = other DNA
ttttttattttactttaagttctggatacatgtgcagaacgtgcaagtttgttacataggtaaatgtgtgtcatggtagt

SEQ ID NO: 43647 - DNA, 80 bp, synthetic construct
  source 1..80: mol_type = other DNA
tgaaaacgaggtgtttggttttctgttcctgtgttagtttgctgaggatgatgacttccagcttcatccatgtccctgca

SEQ ID NO: 43648 - DNA, 80 bp, synthetic construct
  source 1..80: mol_type = other DNA
tataatagaatgatttatattcccttgggtatacccagtagtggaattgctgggtcaaatggtatttctggttctagatc

SEQ ID NO: 43649 - DNA, 80 bp, synthetic construct
  source 1..80: mol_type = other DNA
cggttttgatttgcattcctctaatgatcagtgatgttgagcttttattcatatgtttgttgtctgcataaatatcttct

SEQ ID NO: 43650 - DNA, 80 bp, synthetic construct; identical to SEQ ID NO: 14785
  source 1..80: mol_type = other DNA

SEQ ID NO: 43651 - DNA, 80 bp, synthetic construct
  source 1..80: mol_type = other DNA
ttaaaaaaaattatttaagagtgaggctccttggaggacattgacgtgttactgatctaatctctatactttcagttatt

SEQ ID NO: 43652 - DNA, 80 bp, synthetic construct
  source 1..80: mol_type = other DNA
tattcccaccctcctttaatgggagattattatggattttcatacttatctttctctttcattcatagggagtacgggat

SEQ ID NO: 43653 - DNA, 80 bp, synthetic construct
  source 1..80: mol_type = other DNA
catccattaattcagccaatatatattaagcacttactactttgtattatacactcttctaatcattgcagctagagtgg

SEQ ID NO: 43654 - DNA, 80 bp, synthetic construct; identical to SEQ ID NO: 14786
  source 1..80: mol_type = other DNA

SEQ ID NO: 43655 - DNA, 80 bp, synthetic construct
  source 1..80: mol_type = other DNA
ccttatttctagatgtgttctttgttgcttgtgtaaaaggcaggcaataataaacacctattatgcttgtttttgctaat

SEQ ID NO: 43656 - DNA, 80 bp, synthetic construct
  source 1..80: mol_type = other DNA
catatgtatacatgtgccatgttgttgtgctgcacccattaactcatcatttagcattaggtatatctcctaatgctatc

SEQ ID NO: 43657 - DNA, 80 bp, synthetic construct
  source 1..80: mol_type = other DNA
catccatgtccctacgaaggacatgaactcatcattttttatggctgcatagtattccatggtgtatatgtgccacattt

SEQ ID NO: 43658 - DNA, 80 bp, synthetic construct
  source 1..80: mol_type = other DNA
tatttctagttctggatccctgaggaatcgccacactgacttccacaatggttgaactagtttacagtcccaccaacagt

SEQ ID NO: 43659 - DNA, 80 bp, synthetic construct; identical to SEQ ID NO: 14787
  source 1..80: mol_type = other DNA

SEQ ID NO: 43660 - DNA, 80 bp, synthetic construct
  source 1..80: mol_type = other DNA
gttgccattgcttttggtgttttagacatgaagtccttgcccatgcctatgtcctgaatggtattacctaggttttcttc

SEQ ID NO: 43661 - DNA, 80 bp, synthetic construct
  source 1..80: mol_type = other DNA
ttgtttttgtcaggtttatcaaagatcagatagttgtaaatatgtggcattatttctgagggctctgttctgttccattg

SEQ ID NO: 43662 - DNA, 80 bp, synthetic construct; identical to SEQ ID NO: 14788
  source 1..80: mol_type = other DNA

SEQ ID NO: 43663 - DNA, 80 bp, synthetic construct
  source 1..80: mol_type = other DNA
ttcgggaatggcctaagtagctgcaaacatctgagagatgcaatgaatgctagaggtgtgatttgctaattattgccact

SEQ ID NO: 43664 - DNA, 80 bp, synthetic construct
  source 1..80: mol_type = other DNA
tgtataatctctgtagcacataacctggcagtgtgaattccgttttggacaggtaaggctgttaaatgcagcagaggtcg

SEQ ID NO: 43665 - DNA, 80 bp, synthetic construct
  source 1..80: mol_type = other DNA
gttatgaatagcaggcaccacatgctccacaccacagggccatctaataaatttctcagatataaatacaattgttttct

SEQ ID NO: 43666 - DNA, 80 bp, synthetic construct; identical to SEQ ID NO: 14789
  source 1..80: mol_type = other DNA

SEQ ID NO: 43667 - DNA, 80 bp, synthetic construct
  source 1..80: mol_type = other DNA
tctgcagctggaaaaaggttgtgatgcagtaatttgtcttgaaagaagacattcttattaatgcataagccaaagttagt

SEQ ID NO: 43668 - DNA, 80 bp, synthetic construct
  source 1..80: mol_type = other DNA
tctatatcttgaattttgatgcctgtagagacattctttctgccaagttgtggatttctttactccaatctacctgtatt

SEQ ID NO: 43669 - DNA, 80 bp, synthetic construct; identical to SEQ ID NO: 14790
  source 1..80: mol_type = other DNA

SEQ ID NO: 43670 - DNA, 80 bp, synthetic construct
  source 1..80: mol_type = other DNA
caacaagtatttaatcaagctaaagaaaagtttgccaaggcagacagtgggtgactgaaataaccttagtcagactggaa

SEQ ID NO: 43671 - DNA, 80 bp, synthetic construct
  source 1..80: mol_type = other DNA
acaccagatgttctggcgtgcatgtggtaaaatagaggtcttcggaaatcacaaattttggtaagaacatttgcttactt

SEQ ID NO: 43672 - DNA, 80 bp, synthetic construct
  source 1..80: mol_type = other DNA
ttagaactagaagagaccttaaaattcaaagcgctctgttccttcattttgcagatctggaaaccaaggcttagtgaggt

SEQ ID NO: 43673 - DNA, 80 bp, synthetic construct
  source 1..80: mol_type = other DNA
ttagggcttctcaagaatacctggccttggttatgccaagaacttattaatctgataaattcacagtgtttggggtatta

SEQ ID NO: 43674 - DNA, 80 bp, synthetic construct; identical to SEQ ID NO: 14791
  source 1..80: mol_type = other DNA

SEQ ID NO: 43675 - DNA, 80 bp, synthetic construct
  source 1..80: mol_type = other DNA
attgcaggtcatagtaaagacaacacattatcttagcactgaataaaaagctttctcattctacacaaatctaccttata

SEQ ID NO: 43676 - DNA, 80 bp, synthetic construct
  source 1..80: mol_type = other DNA
cacacacatatatatgtacacttaggtgccccaggtacgagtgacacagaaccataacacatgattcctaaccttgatgt

SEQ ID NO: 43677 - DNA, 80 bp, synthetic construct
  source 1..80: mol_type = other DNA
ctttattgagacattatcaaactcaaatgacattttcttgaagttcaaagttaccactagtgaatttcaagggatggaaa

SEQ ID NO: 43678 - DNA, 80 bp, synthetic construct; identical to SEQ ID NO: 14792
  source 1..80: mol_type = other DNA

SEQ ID NO: 43679 - DNA, 80 bp, synthetic construct
  source 1..80: mol_type = other DNA
agtatagacttgaattcagcagtagatgtattcattcaagaagttagtactaagtaagacacttactttgaattacagaa

SEQ ID NO: 43680 - DNA, 80 bp, synthetic construct
  source 1..80: mol_type = other DNA
ctaaactagaggtatacacaaacttctaagaggaatatatcagttcagaagtctgattcattaatttgttcatttattaa

SEQ ID NO: 43681 - DNA, 80 bp, synthetic construct; identical to SEQ ID NO: 14793
  source 1..80: mol_type = other DNA

SEQ ID NO: 43682 - DNA, 80 bp, synthetic construct
  source 1..80: mol_type = other DNA
tgggaatactggattcaagtagaggaagactgaaggcatttatcttttacccacatccatcttttatacattttctcaag

SEQ ID NO: 43683 - DNA, 80 bp, synthetic construct
  source 1..80: mol_type = other DNA
tgtccttatttttctcatatattatgccaaagagcatctcagacatcagtagctggtaataagctgaaatagctccatgt

SEQ ID NO: 43684 - DNA, 80 bp, synthetic construct
  source 1..80: mol_type = other DNA
ctttagcaatttatttagctgtcttctcacagaagcaactcacatttcacaataagatatgactcaatagtctctctgcg

SEQ ID NO: 43685 - DNA, 80 bp, synthetic construct; identical to SEQ ID NO: 14794
  source 1..80: mol_type = other DNA

SEQ ID NO: 43686 - DNA, 80 bp, synthetic construct
  source 1..80: mol_type = other DNA
tgtatccaagaaaatgtaagcactaatttacctggaatctaaggatagaaagaaatgcaacatcattcattagttgctat

SEQ ID NO: 43687 - DNA, 80 bp, synthetic construct
  source 1..80: mol_type = other DNA
ggctccttaatagaatttgagcatttggggacagctgtaaccaatctgacaaattctatcaaataacttccttgtcagga

SEQ ID NO: 43688 - DNA, 80 bp, synthetic construct
  source 1..80: mol_type = other DNA
atcacaacagggtgaatggggtatccatcacctcaagcatttatgctttctttgtgatacaatctaattataatccttta

SEQ ID NO: 43689 - DNA, 80 bp, synthetic construct; identical to SEQ ID NO: 14795
  source 1..80: mol_type = other DNA

SEQ ID NO: 43690 - DNA, 80 bp, synthetic construct
  source 1..80: mol_type = other DNA
taattgcatgaagttccaaatacaagatcatgaactttcttatctatctcttttacttaacagataggggcctctggaag

SEQ ID NO: 43691 - DNA, 80 bp, synthetic construct
  source 1..80: mol_type = other DNA
acagagttttacaattttttctcagaaatatggttcagtatttccagagagctaaattaattgctagaaactcctctgac

SEQ ID NO: 43692 - DNA, 80 bp, synthetic construct
  source 1..80: mol_type = other DNA
ctttctttctttctttctttcttattattatactttaagttttagggtacatgtgcacaatgtgcaggttagttacatat

SEQ ID NO: 43693 - DNA, 80 bp, synthetic construct
  source 1..80: mol_type = other DNA
acctatgagtgagaatatgcggtgtttggttttttgttcttgtgatagtttactgagaatgatgatttccaatttcatcc

SEQ ID NO: 43694 - DNA, 80 bp, synthetic construct; identical to SEQ ID NO: 14796
  source 1..80: mol_type = other DNA

SEQ ID NO: 43695 - DNA, 80 bp, synthetic construct
  source 1..80: mol_type = other DNA
atggtatctcattgtggttttgatttgcatttctctgatggccagtgatggtgagcattttttcatgtgttttttggctg

SEQ ID NO: 43696 - DNA, 80 bp, synthetic construct
  source 1..80: mol_type = other DNA
aggttgcctgttcactctgatggtagtttcttttgctgtgcagaagctcttcagtttaattagatcccatttgtcaattt

SEQ ID NO: 43697 - DNA, 80 bp, synthetic construct
  source 1..80: mol_type = other DNA
atattgcttattcacctgccttttcaaatatttaaaggaacacctaaattgtgctgagctgtgtgttgagtgctggagat

SEQ ID NO: 43698 - DNA, 80 bp, synthetic construct; identical to SEQ ID NO: 14797
  source 1..80: mol_type = other DNA

SEQ ID NO: 43699 - DNA, 80 bp, synthetic construct
  source 1..80: mol_type = other DNA
agttctctccaagatgatgtaatgctaaaattgcatatgattactttgtttctgcaaaatgttgcaatagccaagagact

SEQ ID NO: 43700 - DNA, 80 bp, synthetic construct
  source 1..80: mol_type = other DNA
aacaattatcagtgatcttaagtggcaagtaagctagtcttttgccccatagcatcctgtgttagtggtccatttaacac

SEQ ID NO: 43701 - DNA, 80 bp, synthetic construct; identical to SEQ ID NO: 14798
  source 1..80: mol_type = other DNA

SEQ ID NO: 43702 - DNA, 80 bp, synthetic construct
  source 1..80: mol_type = other DNA
tggattaaatgaagcttttttgctattatgtttatgctggtgtttcccatggggtgccatgattgttctattttactctg

SEQ ID NO: 43703 - DNA, 80 bp, synthetic construct
  source 1..80: mol_type = other DNA
gagtgccaaagtcaatccattattacaactctgcacctgtctccacccctttttttttttttttgccatttcctgacttc

SEQ ID NO: 43704 - DNA, 80 bp, synthetic construct
  source 1..80: mol_type = other DNA
accatatatatacacatcatatatataccatatatataccatatatatacaccatatatataccatatatatacaccata

SEQ ID NO: 43705 - DNA, 80 bp, synthetic construct
  source 1..80: mol_type = other DNA
atataccatatatataccatatatataccatatatatacaccatatgtataccatatatatacatcatatatataccata

SEQ ID NO: 43706 - DNA, 80 bp, synthetic construct; identical to SEQ ID NO: 14799
  source 1..80: mol_type = other DNA

SEQ ID NO: 43707 - DNA, 80 bp, synthetic construct
  source 1..80: mol_type = other DNA
tatatacaccatatatatacaccatatatatacacaccatatatataccgtatatatacacaccatatatatatactgta

SEQ ID NO: 43708 - DNA, 80 bp, synthetic construct
  source 1..80: mol_type = other DNA
taccatatacatcatatatatcatatatatcatatatatcatatatacaccatatatacaccatatatataccatatata

SEQ ID NO: 43709 - DNA, 80 bp, synthetic construct
  source 1..80: mol_type = other DNA
atatatacaccatatatatactgtatatatatacaccacatatatacaccatatatataccgtatatataccatgtatat

SEQ ID NO: 43710 - DNA, 80 bp, synthetic construct
  source 1..80: mol_type = other DNA
catatatataccatatatacaccatatatataccatatatacaccatatatataccccatatatacaccatgtatatata

SEQ ID NO: 43711 - DNA, 80 bp, synthetic construct
  source 1..80: mol_type = other DNA
atatacaccatatatataccatgtatatacaccatatatctataccatatatatacaccatgtatctataccatatatat

SEQ ID NO: 43712 - DNA, 80 bp, synthetic construct
  source 1..80: mol_type = other DNA
tatataccatatatatatatggtacataagatattttgatacagacatacaatggctaataatcacatctaggtaaatgg

SEQ ID NO: 43713 - DNA, 80 bp, synthetic construct
  source 1..80: mol_type = other DNA
tgcctccagagttcatgcgattctcctgcctcagcctccccagtagctgggactacaggcgcataccaccacgcccagct

SEQ ID NO: 43714 - DNA, 80 bp, synthetic construct; identical to SEQ ID NO: 14800
  source 1..80: mol_type = other DNA

SEQ ID NO: 43715 - DNA, 80 bp, synthetic construct
  source 1..80: mol_type = other DNA
caaggcttattttgcgtaacacaattacccccagttccatccatgttgttgcaaatggcaggatctcttttttttatggc

SEQ ID NO: 43716 - DNA, 80 bp, synthetic construct
  source 1..80: mol_type = other DNA
tactcagcagtgggattgctggatcatatggtagctcaatttttagcttttggaggaacttccaaattgttcccatagtg

SEQ ID NO: 43717 - DNA, 80 bp, synthetic construct
  source 1..80: mol_type = other DNA
tgatagtgagcccctttttgtatgactgtttgccattcatgtgtcttctttggagaagtatctattcaaatcttttgcgc

SEQ ID NO: 43718 - DNA, 80 bp, synthetic construct
  source 1..80: mol_type = other DNA
agaaatgggtctgcccaggtcctgcaatgaccactgcctggctactgtctatgtttgctcaaggcccaagggctccacaa

SEQ ID NO: 43719 - DNA, 80 bp, synthetic construct; identical to SEQ ID NO: 14801
  source 1..80: mol_type = other DNA

SEQ ID NO: 43720 - DNA, 80 bp, synthetic construct
  source 1..80: mol_type = other DNA
cagtggcgcgatctcgggtcactgcaacctctgcctcctgggttcaagcgattctcctgcctcagcctcccgagtagccg

SEQ ID NO: 43721 - DNA, 80 bp, synthetic construct
  source 1..80: mol_type = other DNA
cactctggctcaaggaaggtccagaaatgctgtccaagaaccaaggcctggaaccggggaccccaagagcccacttggtg

SEQ ID NO: 43722 - DNA, 80 bp, synthetic construct; identical to SEQ ID NO: 14802
  source 1..80: mol_type = other DNA

SEQ ID NO: 43723 - DNA, 80 bp, synthetic construct
  source 1..80: mol_type = other DNA
aaagtcctcaatcctctccccttttctctcctcaagctgagggaaggagtctctcccagagctgtgagctatggtgtcag

SEQ ID NO: 43724 - DNA, 80 bp, synthetic construct
  source 1..80: mol_type = other DNA
acttttgcccatggtggtggggcttgccagacagaactcaggttctgaccactgggatggacaatttgcctctagctagg

SEQ ID NO: 43725 - DNA, 80 bp, synthetic construct
  source 1..80: mol_type = other DNA
cagtggtggtggtgtaggcaattcaagactgtctttcctaccctctccagtgcctctttccttaatacaatgttaaaacc

SEQ ID NO: 43726 - DNA, 80 bp, synthetic construct
  source 1..80: mol_type = other DNA
ccatcttgctccacctccctgaagcaaataaaaaagctttagaaaaatttgtacccctcacaccaaagtgattaaatgat

SEQ ID NO: 43727 - DNA, 80 bp, synthetic construct; identical to SEQ ID NO: 14803
  source 1..80: mol_type = other DNA

SEQ ID NO: 43728 - DNA, 80 bp, synthetic construct
  source 1..80: mol_type = other DNA
gggcccaaaggccagtctttttttttttttcatggtttccctcagaccccacccaatacgtttttttggaagattaacat

SEQ ID NO: 43729 - DNA, 80 bp, synthetic construct
  source 1..80: mol_type = other DNA
tcctatcagggaaacccttacatattccctctgttacctttacatggcatttcttcttctattattcctggcaatgtctg

SEQ ID NO: 43730 - DNA, 80 bp, synthetic construct; identical to SEQ ID NO: 14804
  source 1..80: mol_type = other DNA

SEQ ID NO: 43731 - DNA, 80 bp, synthetic construct
  source 1..80: mol_type = other DNA
ccataatttttgagattttttaaaatttttatttttaagttctggggtacatgtgcaggatgtgcaggtttgttacatag

SEQ ID NO: 43732 - DNA, 80 bp, synthetic construct
  source 1..80: mol_type = other DNA
tattgttcagctcccatttttaatcttgctaccttctcttctgctcccttactattctatgagtgattatctacctacct

SEQ ID NO: 43733 - DNA, 80 bp, synthetic construct
  source 1..80: mol_type = other DNA
atgaaaaccaggctatattccatgaagacaccctccagtagttcagacagagcaagaatgtttaagcagaataatgaaaa

SEQ ID NO: 43734 - DNA, 80 bp, synthetic construct; identical to SEQ ID NO: 14805
  source 1..80: mol_type = other DNA

SEQ ID NO: 43735 - DNA, 80 bp, synthetic construct
  source 1..80: mol_type = other DNA
aacctggtagtgaattgaagtagctgatagtaattttcagttttcctctgagtaataccagtttataaattgaattatta

SEQ ID NO: 43736 - DNA, 80 bp, synthetic construct
  source 1..80: mol_type = other DNA
ttttgtctaattaaattatttgcactcataaaaatagtcatgccaccccacttataaatatctacccccgcaataaaatc

SEQ ID NO: 43737 - DNA, 80 bp, synthetic construct
  source 1..80: mol_type = other DNA
taaatttcttccagagtaggataacatagttgaaccacaaatcctgttcccatcttggagtctcactcagacagttgaat

SEQ ID NO: 43738 - DNA, 80 bp, synthetic construct; identical to SEQ ID NO: 14806
  source 1..80: mol_type = other DNA

SEQ ID NO: 43739 - DNA, 80 bp, synthetic construct
  source 1..80: mol_type = other DNA
tatactactaggtcttctctcattggttgagagtctgggtggggctgattatgtcaataatcaggtgaattgtgatatca

SEQ ID NO: 43740 - DNA, 80 bp, synthetic construct
  source 1..80: mol_type = other DNA
gtaaggtactgagagaagacatagcaaggagtaattaactctgtgtgtggaggtttagaaagggcttcccagataaagta

SEQ ID NO: 43741 - DNA, 80 bp, synthetic construct
  source 1..80: mol_type = other DNA
cacagaaaaatgaaagggaaaaaatagctggagatgaggctggagtagaaagcatatctcagacctcaaagtaacctaat

SEQ ID NO: 43742 - DNA, 80 bp, synthetic construct; identical to SEQ ID NO: 14807
  source 1..80: mol_type = other DNA

SEQ ID NO: 43743 - DNA, 80 bp, synthetic construct
  source 1..80: mol_type = other DNA
cctgatccaaaatggaaccatgcattattcaaattatttactgaaagaaaacctgtgttcatctaccaagtttcacagaa

SEQ ID NO: 43744 - DNA, 80 bp, synthetic construct
  source 1..80: mol_type = other DNA
tatagaatatatattataatattatatagtatatatcatatagtatatatcatatatcatatatactatattatatatta

SEQ ID NO: 43745 - DNA, 80 bp, synthetic construct
  source 1..80: mol_type = other DNA
ggaatattgagtaaagtgccttttctgtacctctttcatttttctctgcttttacttgtcagcatctctttatttcaatc

SEQ ID NO: 43746 - DNA, 80 bp, synthetic construct; identical to SEQ ID NO: 14808
  source 1..80: mol_type = other DNA

SEQ ID NO: 43747 - DNA, 80 bp, synthetic construct
  source 1..80: mol_type = other DNA
gcctcctaagccaggatgaggacatggtaaaagaatatcttgatgacctccaaccatcgtgcctaaattattgataaatt

SEQ ID NO: 43748 - DNA, 80 bp, synthetic construct
  source 1..80: mol_type = other DNA
atggctactcttagaatttgccaaagattaagaattgcccctcctctgtgatcagttttctgcttctcaatgtaaagttc

SEQ ID NO: 43749 - DNA, 80 bp, synthetic construct
  source 1..80: mol_type = other DNA
ttaagtatatcatacacagtactcccagaacatcatgtgtactgcctctgtcatagaatttacaatgatgtactgaaatt

SEQ ID NO: 43750 - DNA, 80 bp, synthetic construct; identical to SEQ ID NO: 14809
  source 1..80: mol_type = other DNA

SEQ ID NO: 43751 - DNA, 80 bp, synthetic construct
  source 1..80: mol_type = other DNA
taaatatggtactgcagtaggttaaacaccataaactatagttcatcctggtagaagctgaaaatcatttaataaacttc

SEQ ID NO: 43752 - DNA, 80 bp, synthetic construct
  source 1..80: mol_type = other DNA
taaatgaagcatcaaaatcaatgataaaagaaaacatgttagataaattcagcttctcatctcatctcacatataaaagt

SEQ ID NO: 43753 - DNA, 80 bp, synthetic construct
  source 1..80: mol_type = other DNA
aatataaaatgtttatctatgataacttttgttaatgtgaagtggattgggattaaataattgcagcaaacataaacata

SEQ ID NO: 43754 - DNA, 80 bp, synthetic construct
  source 1..80: mol_type = other DNA
ctcatttataattcttttcaaaaccaccattgtctacattactctaaattagtaatatgctttcattgtacagaattttc

SEQ ID NO: 43755 - DNA, 80 bp, synthetic construct; identical to SEQ ID NO: 14810
  source 1..80: mol_type = other DNA

SEQ ID NO: 43756 - DNA, 80 bp, synthetic construct
  source 1..80: mol_type = other DNA
ccttcagagcctcatttccagagaattttcattatttgacttgtctggtagttccctggaagcattaacaccaatccttc

SEQ ID NO: 43757 - DNA, 80 bp, synthetic construct
  source 1..80: mol_type = other DNA
aaactgaatccagcagtatataagaaagattgaacactgtgacaatggtgttatctcagaaatgcaaggttgtttcaaca

SEQ ID NO: 43758 - DNA, 80 bp, synthetic construct; identical to SEQ ID NO: 14811
  source 1..80: mol_type = other DNA

SEQ ID NO: 43759 - DNA, 80 bp, synthetic construct
  source 1..80: mol_type = other DNA
tccttatcaatatgcttattctatgcagctaaagcagataccttttgtgtgcctggattattttttcaattgtaccctaa

SEQ ID NO: 43760 - DNA, 80 bp, synthetic construct
  source 1..80: mol_type = other DNA
gctggctgcctctttggtaaaaacaggcatactagaataaaaccacatccattattttaaagattgtctatggctgattt

SEQ ID NO: 43761 - DNA, 80 bp, synthetic construct
  source 1..80: mol_type = other DNA
atttattttgctttggctttcttctcttaattgctgcaattttttaaatgccttttctactccaatgtgcatttatttgc

SEQ ID NO: 43762 - DNA, 80 bp, synthetic construct
  source 1..80: mol_type = other DNA
gtaaaatacttcaaatttattttggaataacaaagagaataaatttattaaatactccagttctcctaaaacccatttca

SEQ ID NO: 43763 - DNA, 80 bp, synthetic construct; identical to SEQ ID NO: 14812
  source 1..80: mol_type = other DNA

SEQ ID NO: 43764 - DNA, 80 bp, synthetic construct
  source 1..80: mol_type = other DNA
caatctccgtaagccagccagaaccagttcatagtcagtggtcttatctggagaaagctaatgaaatcagtctcttgtcc

SEQ ID NO: 43765 - DNA, 80 bp, synthetic construct
  source 1..80: mol_type = other DNA
attctttaagtgcaggaatgtgtgatttaacctttgcctggcatgtccttagataatgtttataatctaatatcttattg

SEQ ID NO: 43766 - DNA, 80 bp, synthetic construct
  source 1..80: mol_type = other DNA
ccctttgccaagagagggtctgttctttcagtggggggcataggattttatttttaaattttaaaatttttaactttgtt

SEQ ID NO: 43767 - DNA, 80 bp, synthetic construct
  source 1..80: mol_type = other DNA
cccctgaaacacactgtcctttgtttaaaaaagtaaatttgaaaaacttttagggaaatcttaaaaaatggcaataattt

SEQ ID NO: 43768 - DNA, 80 bp, synthetic construct; identical to SEQ ID NO: 14813
  source 1..80: mol_type = other DNA

SEQ ID NO: 43769 - DNA, 80 bp, synthetic construct
  source 1..80: mol_type = other DNA
agtagcatgaaaacggcctaacacagctgtgaagttgtatatcaatatcactttctggttccccttagaaccctcaggag

SEQ ID NO: 43770 - DNA, 80 bp, synthetic construct
  source 1..80: mol_type = other DNA
attttcaacctatgatatgaaagaagggagatcctgggggcatccatagtcaaacacttggttgtacacttggagatgtt

SEQ ID NO: 43771 - DNA, 80 bp, synthetic construct; identical to SEQ ID NO: 14814
  source 1..80: mol_type = other DNA

SEQ ID NO: 43772 - DNA, 80 bp, synthetic construct
  source 1..80: mol_type = other DNA
tcacagcgaaagttagaaacactggcctacaacttttaatgattaattacttggccatgaataagccatacattatttag

SEQ ID NO: 43773 - DNA, 80 bp, synthetic construct
  source 1..80: mol_type = other DNA
tagtgaacattagaatgatagcatggccatgttgtttatcactgaagcacctaggagagttagcaaatgttaatcctgct

SEQ ID NO: 43774 - DNA, 80 bp, synthetic construct
  source 1..80: mol_type = other DNA
catcacccctagataatttttgtatttttagtagagatggggtttcgccatgttggccaggctggtctcgaactcctgac

SEQ ID NO: 43775 - DNA, 80 bp, synthetic construct
  source 1..80: mol_type = other DNA
gttctcttgtaaataaaataccagattaaaggtatgcttaatgtgataaagtaaagccaaaatccaaaccagaaaatcta

SEQ ID NO: 43776 - DNA, 80 bp, synthetic construct; identical to SEQ ID NO: 14815
  source 1..80: mol_type = other DNA

SEQ ID NO: 43777 - DNA, 80 bp, synthetic construct
  source 1..80: mol_type = other DNA
tcaattggaaattacataaaaaattccaggaaagatgggttgtgagactatctcagaagagaaaatctagggtttgtttg

SEQ ID NO: 43778 - DNA, 80 bp, synthetic construct
  source 1..80: mol_type = other DNA
agggctgattgaatttgtccttagctaagtttctttattttgtaatgtggtggtcacattgcagagccgcagagcctagg

SEQ ID NO: 43779 - DNA, 80 bp, synthetic construct; identical to SEQ ID NO: 14816
  source 1..80: mol_type = other DNA

SEQ ID NO: 43780 - DNA, 80 bp, synthetic construct
  source 1..80: mol_type = other DNA
ctttcatgacagcatttacacagagaagcatcaatcaatgtcaagcctttcagcagaaactggaacttcatggtgcagca

SEQ ID NO: 43781 - DNA, 80 bp, synthetic construct
  source 1..80: mol_type = other DNA
gaagaacaataaaatctgcgtgtcatggaaacacagatgctagagctgcatcactagaaaggcattctgacaaatgtatt

SEQ ID NO: 43782 - DNA, 80 bp, synthetic construct
  source 1..80: mol_type = other DNA
cagagctacaccgaattagggagattcaatagttgggcatatttatttaggctagccagagccaaatacctagaggtaga

SEQ ID NO: 43783 - DNA, 80 bp, synthetic construct
  source 1..80: mol_type = other DNA
attctaaattgagcagaaacagtctattacactttgaggcaagaatcaagttacaaggaagtaggtgtgattgcaaaggg

SEQ ID NO: 43784 - DNA, 80 bp, synthetic construct; identical to SEQ ID NO: 14817
  source 1..80: mol_type = other DNA

SEQ ID NO: 43785 - DNA, 80 bp, synthetic construct
  source 1..80: mol_type = other DNA
cttgagttgtatcctgggatgctatcgagttttccactgactttaaattagggtcaagttaaacaggccatctccaaaga

SEQ ID NO: 43786 - DNA, 80 bp, synthetic construct
  source 1..80: mol_type = other DNA
aaaacaggctgatttagggtttgggatttagagcatttatatctctttattttcctcagcagcacagactctccattgga

SEQ ID NO: 43787 - DNA, 80 bp, synthetic construct; identical to SEQ ID NO: 14818
  source 1..80: mol_type = other DNA

SEQ ID NO: 43788 - DNA, 80 bp, synthetic construct
  source 1..80: mol_type = other DNA
ctaaaataaaccattaacgttagaaaattccctttgagtactactttagcaccatcagacaaattttagtacgttttgtt

SEQ ID NO: 43789 - DNA, 80 bp, synthetic construct
  source 1..80: mol_type = other DNA
acacgttgtttgattgcaaccattttaatttcttcaggtatattttatgagccagaatatggtctttcctggtcaatttt

SEQ ID NO: 43790 - DNA, 80 bp, synthetic construct
  source 1..80: mol_type = other DNA
gtaatgctgttcagttcttttacctcagtgataattttctgtatgcttttctgtcaattaactgaggaaggggtgttgaa

SEQ ID NO: 43791 - DNA, 80 bp, synthetic construct; identical to SEQ ID NO: 14819
  source 1..80: mol_type = other DNA

SEQ ID NO: 43792 - DNA, 80 bp, synthetic construct
  source 1..80: mol_type = other DNA
gcccagtctggagggccatggcacaatcatgcagcctcaaactcctaggctcaggtgatcctcctgcctcagcctcctga

SEQ ID NO: 43793 - DNA, 80 bp, synthetic construct
  source 1..80: mol_type = other DNA
gaccagccaaaatacaaagctttttgaacatctatatggtgccacaagtagaaaatttctcagctgacctcatgtgactg

SEQ ID NO: 43794 - DNA, 80 bp, synthetic construct
  source 1..80: mol_type = other DNA
caaaatgtccaaaatctgagactcttctaatcccaggcatttcagataaaggatgctcagcttgtacaactatctatatt

SEQ ID NO: 43795 - DNA, 80 bp, synthetic construct; identical to SEQ ID NO: 14820
  source 1..80: mol_type = other DNA

SEQ ID NO: 43796 - DNA, 80 bp, synthetic construct
  source 1..80: mol_type = other DNA
aaaattcttgggaccacaatgctttggattttgaattttattagattttggaatattttcattatagttaacagttcagc

SEQ ID NO: 43797 - DNA, 80 bp, synthetic construct
  source 1..80: mol_type = other DNA
acccttaatattttatcacatcaagtgaaagataaaaccatatatgctcctttatcctcctttttttggtcttagttgta

SEQ ID NO: 43798 - DNA, 80 bp, synthetic construct
  source 1..80: mol_type = other DNA
accgtttctgttgttcttcctttgttcctgatgttttcctttagtgtaattttcctttagtgtaatttcctttagtgttt

SEQ ID NO: 43799 - DNA, 80 bp, synthetic construct; identical to SEQ ID NO: 14821
  source 1..80: mol_type = other DNA

SEQ ID NO: 43800 - DNA, 80 bp, synthetic construct
  source 1..80: mol_type = other DNA
acagaacttcttaaatctgtaaattttttccccccaaatgcggcatgttttggaccattatttcttcaaatagtatttct

SEQ ID NO: 43801 - DNA, 80 bp, synthetic construct
  source 1..80: mol_type = other DNA
tctttatctgtcatctctactcttctattgagtccattcaatgatcttttttcaaatattgtattttttgagctccaagc

SEQ ID NO: 43802 - DNA, 80 bp, synthetic construct
  source 1..80: mol_type = other DNA
ttgtctacaaattccaacatttgcgttatcgaagggttgctgtctttgattctctttttccttaagaatttttgagattt

SEQ ID NO: 43803 - DNA, 80 bp, synthetic construct
  source 1..80: mol_type = other DNA
acaatgatgtccaaccgtcatctctatccagtaccaagatattttatcactacttccaaaaaaattccatatccattaag

SEQ ID NO: 43804 - DNA, 80 bp, synthetic construct; identical to SEQ ID NO: 14822
  source 1..80: mol_type = other DNA

SEQ ID NO: 43805 - DNA, 80 bp, synthetic construct
  source 1..80: mol_type = other DNA
taggtcatatggtaattccgtgtttggcttttaaaggaactaacaagctgttttccacagtgacggcaccgtttcacttt

SEQ ID NO: 43806 - DNA, 80 bp, synthetic construct
  source 1..80: mol_type = other DNA
gctgagcatattttcatatgcttgttggccatttgtatatctcatttggagaaatgtctattcaagttccttacccattt

SEQ ID NO: 43807 - DNA, 80 bp, synthetic construct
  source 1..80: mol_type = other DNA
gtcactaagatttacccctgtgtccttttctaagtgttttgtacctttggtttttatatctggatctttggaccattttg

SEQ ID NO: 43808 - DNA, 80 bp, synthetic construct; identical to SEQ ID NO: 14823
  source 1..80: mol_type = other DNA

SEQ ID NO: 43809 - DNA, 80 bp, synthetic construct
  source 1..80: mol_type = other DNA
atcccttaagattaaatatttattttaggattagcatttccatttctgccaacaaacacattagggttttgatagggatt

SEQ ID NO: 43810 - DNA, 80 bp, synthetic construct
  source 1..80: mol_type = other DNA
tggtgttgccactatagatgggcaatttaatgatcgatgcttgcctccttttatgccaggatagaaaaagtgaagcaaag

SEQ ID NO: 43811 - DNA, 80 bp, synthetic construct
  source 1..80: mol_type = other DNA
agacagtatttttcttggaggtttctttctgcacatccactacacagtttgaagatttcgggccgtactaaaatctaagc

SEQ ID NO: 43812 - DNA, 80 bp, synthetic construct; identical to SEQ ID NO: 14824
  source 1..80: mol_type = other DNA

SEQ ID NO: 43813 - DNA, 80 bp, synthetic construct
  source 1..80: mol_type = other DNA
taagttttagtgtacatgtgcacattgtgcaggttagttacatatgtatacatgtgccatgctggtgcgctgcacccact

SEQ ID NO: 43814 - DNA, 80 bp, synthetic construct
  source 1..80: mol_type = other DNA
tgttctcgcgatagtttactgagaatgataatttccaatttcatccatgtccctacaaaggacatgaactcatcattttt

SEQ ID NO: 43815 - DNA, 80 bp, synthetic construct
  source 1..80: mol_type = other DNA
tttgggtatatacccagtaatgggatggctgggtcaaatggtatttctagttctagatccctgaggaatcgccacactga

SEQ ID NO: 43816 - DNA, 80 bp, synthetic construct
  source 1..80: mol_type = other DNA
ctgatggccagtgatgatgagcattttttcatgtgttttttggctgcataaatgtcttcttttgagaagtgtctgttcat

SEQ ID NO: 43817 - DNA, 80 bp, synthetic construct; identical to SEQ ID NO: 14825
  source 1..80: mol_type = other DNA

SEQ ID NO: 43818 - DNA, 80 bp, synthetic construct
  source 1..80: mol_type = other DNA
gctagccagttttcccagcaccatttattaaatagggaatcctttccccattgcttgtttttgtcaggtttgtcaaagat

SEQ ID NO: 43819 - DNA, 80 bp, synthetic construct
  source 1..80: mol_type = other DNA
cttaggattgacttggcgatgcgggctcttttttggttccatatgaactttaaagtagttctttccaattctgtgaagaa

SEQ ID NO: 43820 - DNA, 80 bp, synthetic construct
  source 1..80: mol_type = other DNA
ttgaagaggtccttcacatcccttgtaagttggattcctaggtattttattctctttgaagcaattgtgaatgggagttc

SEQ ID NO: 43821 - DNA, 80 bp, synthetic construct; identical to SEQ ID NO: 14826
  source 1..80: mol_type = other DNA

SEQ ID NO: 43822 - DNA, 80 bp, synthetic construct; identical to SEQ ID NO: 11284
  source 1..80: mol_type = other DNA

SEQ ID NO: 43823 - DNA, 80 bp, synthetic construct
  source 1..80: mol_type = other DNA
atttttgcatcaatgttcatcaaggatattggtctaaaattctcctttttggttgtgtctctacccggctttggtatcag

SEQ ID NO: 43824 - DNA, 80 bp, synthetic construct; identical to SEQ ID NO: 14827
  source 1..80: mol_type = other DNA

SEQ ID NO: 43825 - DNA, 80 bp, synthetic construct
  source 1..80: mol_type = other DNA
tttattagtcttgctagcagtctatcaattttgttgatcctttcaaaaaaccagctcctggattcattaattttttgaag

SEQ ID NO: 43826 - DNA, 80 bp, synthetic construct
  source 1..80: mol_type = other DNA
agtgctataagtttccctctacatactgctttgaatgcatcccagagattctggtatgttgtgtctttgttctcgttggt

SEQ ID NO: 43827 - DNA, 80 bp, synthetic construct
  source 1..80: mol_type = other DNA
atctctgttcttttacatttgctgaggagagctttacttccaagtatgtggtcaattttggaataggtgtggtgtggtgc

SEQ ID NO: 43828 - DNA, 80 bp, synthetic construct; identical to SEQ ID NO: 14828
  source 1..80: mol_type = other DNA

SEQ ID NO: 43829 - DNA, 80 bp, synthetic construct; identical to SEQ ID NO: 12255
  source 1..80: mol_type = other DNA

SEQ ID NO: 43830 - DNA, 80 bp, synthetic construct
  source 1..80: mol_type = other DNA
tctcgatggtctttacattttggcatgattttgcagcggctggtaccagttgttcctttccatgtttagcgcttccttca

SEQ ID NO: 43831 - DNA, 80 bp, synthetic construct
  source 1..80: mol_type = other DNA
ctctcttctggcttgtagggtttctgccgagagatccgctgttagtctgatgggcttccctttgaggataacccgacctt

SEQ ID NO: 43832 - DNA, 80 bp, synthetic construct
  source 1..80: mol_type = other DNA
ctggataatatcctgcagagtgttttccaacttggttccattctccccatcactttcaggtacaccaatcagacctagat

SEQ ID NO: 43833 - DNA, 80 bp, synthetic construct; identical to SEQ ID NO: 14829
  source 1..80: mol_type = other DNA

SEQ ID NO: 43834 - DNA, 80 bp, synthetic construct
  source 1..80: mol_type = other DNA
ttccttttgaggaggagaggcgctctgctttttagagtttccagtttttctgttctgttttttccccatctttgtggttt

SEQ ID NO: 43835 - DNA, 80 bp, synthetic construct
  source 1..80: mol_type = other DNA
gcctcccagttaggctgctcgggggtcaggggtcagggacccacttgaggaggcagtctgcccgttctcagatctccagc

SEQ ID NO: 43836 - DNA, 80 bp, synthetic construct; identical to SEQ ID NO: 14830
  source 1..80: mol_type = other DNA

SEQ ID NO: 43837 - DNA, 80 bp, synthetic construct
  source 1..80: mol_type = other DNA
tctgtcacccctttctttgactcagaaagggaactccctgaccccttgcgcttcccaagtgaggcaatgcctcgccctgc

SEQ ID NO: 43838 - DNA, 80 bp, synthetic construct
  source 1..80: mol_type = other DNA
cttggctcctccccctcggtaactttttaaaacatgtcattttatcattgtatgttgttttatgaaaacaaaattgattg

SEQ ID NO: 43839 - DNA, 80 bp, synthetic construct
  source 1..80: mol_type = other DNA
acatttttactttcataacacagtaataagtaactctagtacaatgcacaatggatgttgtgatggtagactttcttgtt

SEQ ID NO: 43840 - DNA, 80 bp, synthetic construct; identical to SEQ ID NO: 14831
  source 1..80: mol_type = other DNA

SEQ ID NO: 43841 - DNA, 80 bp, synthetic construct
  source 1..80: mol_type = other DNA
tttgttgttgctgtttaatctttctaattttaaattaagagagtacgtgtgcaggttttgtgattgtattttcatgtagg

SEQ ID NO: 43842 - DNA, 80 bp, synthetic construct
  source 1..80: mol_type = other DNA
attctctcagtaaatccagcatagtttttagaagagtctcagattcgctagtcctacagtcaaaaaaaaaaaatcaccga

SEQ ID NO: 43843 - DNA, 80 bp, synthetic construct
  source 1..80: mol_type = other DNA
ctatttataatatttgttgtaggttcttagtaagttatctttatcaaaattaagggcactgcctttatcccttcattatt

SEQ ID NO: 43844 - DNA, 80 bp, synthetic construct
  source 1..80: mol_type = other DNA
ataaatcgcctttgcattcctggaagaactcttgttttttctgatgtgttattcttttggtacttttttgggctttattt

SEQ ID NO: 43845 - DNA, 80 bp, synthetic construct; identical to SEQ ID NO: 14832
  source 1..80: mol_type = other DNA

SEQ ID NO: 43846 - DNA, 80 bp, synthetic construct
  source 1..80: mol_type = other DNA
agattaatgtcttgtattcagtctttgcctttttttattattggtggggatacctgtgattgctggagtcattaaaaatc

SEQ ID NO: 43847 - DNA, 80 bp, synthetic construct
  source 1..80: mol_type = other DNA
ccttttacatattaattgtataaaatattgctggctcacataattccacacattgttctatgctctatggataatggaaa

SEQ ID NO: 43848 - DNA, 80 bp, synthetic construct
  source 1..80: mol_type = other DNA
cacatgatcaacttccatggtggatacaatctgagggagttataggaaaatgatgaacaataatgaacttttggttagaa

SEQ ID NO: 43849 - DNA, 80 bp, synthetic construct; identical to SEQ ID NO: 14833
  source 1..80: mol_type = other DNA

SEQ ID NO: 43850 - DNA, 80 bp, synthetic construct
  source 1..80: mol_type = other DNA
ggagttagagacccacctgggcaacatggcaaaaccccatctctacaaaaaatacaaaaattagccaggcagggtggctg

SEQ ID NO: 43851 - DNA, 80 bp, synthetic construct
  source 1..80: mol_type = other DNA
aaaacaaaaagtcttcagtttttatggcctgaagaacctgaggaatttgcaactggaaggtgaaggagcacctaggaaaa

SEQ ID NO: 43852 - DNA, 80 bp, synthetic construct; identical to SEQ ID NO: 14834
  source 1..80: mol_type = other DNA

SEQ ID NO: 43853 - DNA, 80 bp, synthetic construct
  source 1..80: mol_type = other DNA
acacatatatacacacacacaacttttaagagacctatcctgagaatacccagatgttaaaattcaccgagaaagatttt

SEQ ID NO: 43854 - DNA, 80 bp, synthetic construct
  source 1..80: mol_type = other DNA
tttaacagtataatggagatgacagacaagaaaagccagtgcatttgaagatagatctatagaaatcgtccgaaattaag

SEQ ID NO: 43855 - DNA, 80 bp, synthetic construct
  source 1..80: mol_type = other DNA
gtgatttgagacccagagaatgagagggaaaatgggaccaaaaactatttgcaaaaaaataaggactgaaaaattttcaa

SEQ ID NO: 43856 - DNA, 80 bp, synthetic construct
  source 1..80: mol_type = other DNA
aaaatggcaattttactgcctttaatagacatctaagaacttgttatatactggtgaaggttgagcatgtcgccaaccta

SEQ ID NO: 43857 - DNA, 80 bp, synthetic construct; identical to SEQ ID NO: 14835
  source 1..80: mol_type = other DNA

SEQ ID NO: 43858 - DNA, 80 bp, synthetic construct
  source 1..80: mol_type = other DNA
caacagcagatttacaagttggttttttgcctgattcagttgctagattctagatgccaatgtcattacaaaaactttaa

SEQ ID NO: 43859 - DNA, 80 bp, synthetic construct
  source 1..80: mol_type = other DNA
gatcatgaggtcaggagatcgagaccatcctggctaacaaggtgaaaccctgtctctactaaaaatacaaaaaattcgcc

SEQ ID NO: 43860 - DNA, 80 bp, synthetic construct; identical to SEQ ID NO: 14836
  source 1..80: mol_type = other DNA

SEQ ID NO: 43861 - DNA, 80 bp, synthetic construct
  source 1..80: mol_type = other DNA
atatgaggaggaactttattgttctgtctctccaaaagagcaagaaaatgacctggaaatagttgtcagaatcaactatt

SEQ ID NO: 43862 - DNA, 80 bp, synthetic construct
  source 1..80: mol_type = other DNA
cactcctgatgcaagttgctagtgccaaagaaatacagatcttttcctcaaagaaatgtgcttgtctttttagacttctc

SEQ ID NO: 43863 - DNA, 80 bp, synthetic construct
  source 1..80: mol_type = other DNA
aacaagaaacaggctgaatggcctgggaagaaagaggttgggaatggagatacgttgggaaagaaaactttatttttaag

SEQ ID NO: 43864 - DNA, 80 bp, synthetic construct; identical to SEQ ID NO: 14837
  source 1..80: mol_type = other DNA

SEQ ID NO: 43865 - DNA, 80 bp, synthetic construct
  source 1..80: mol_type = other DNA
aatcagtccaaaacaagtagcaacaacttcaggaagggaagaaaatctgatttacagatctgccacattgtaatattaag

SEQ ID NO: 43866 - DNA, 80 bp, synthetic construct
  source 1..80: mol_type = other DNA
acaaagactttacatcaactgtctcaaatgtactcaaagagctgaaggaaaccatggagtaagaattaaagcaaaccaga

SEQ ID NO: 43867 - DNA, 80 bp, synthetic construct
  source 1..80: mol_type = other DNA
caataacagactttagcagacagaagaaagaatcagagaacatgaaaacaggtcaattgtgattatccagtccaaggagc

SEQ ID NO: 43868 - DNA, 80 bp, synthetic construct; identical to SEQ ID NO: 14838
  source 1..80: mol_type = other DNA

SEQ ID NO: 43869 - DNA, 80 bp, synthetic construct
  source 1..80: mol_type = other DNA
aagaaaaattgtcaactaaatgctctaaatctggcaaagctatccttcaaaaatagagaaattaaaacactcctggtaaa

SEQ ID NO: 43870 - DNA, 80 bp, synthetic construct
  source 1..80: mol_type = other DNA
caaatataaaatccagtggaattgtactatgggtttcttacacctgttttgactttctatttcctttaaaaggcaaatac

SEQ ID NO: 43871 - DNA, 80 bp, synthetic construct
  source 1..80: mol_type = other DNA
agaaagattataattgtaatccccaggttaaccaaagtaaacaattaaaataatacaaagagaaagagacaagaagagaa

SEQ ID NO: 43872 - DNA, 80 bp, synthetic construct; identical to SEQ ID NO: 14839
  source 1..80: mol_type = other DNA

SEQ ID NO: 43873 - DNA, 80 bp, synthetic construct
  source 1..80: mol_type = other DNA
ttgtcagacaaaatagaacttacaaagatagttgttgtgaacaacatcaactaaaagaagaacatcatctattgatttca

SEQ ID NO: 43874 - DNA, 80 bp, synthetic construct
  source 1..80: mol_type = other DNA
acaagacagaaaatcaatgaggaaaatagaggacttgaacaacactataaaacaactaattctaacagacagatacagaa

SEQ ID NO: 43875 - DNA, 80 bp, synthetic construct
  source 1..80: mol_type = other DNA
gtagaaatcagtaacagaaagaaaactaaaaaatttacaaatatgcaaaaattaaacaatattaaacaaccaataagtga

SEQ ID NO: 43876 - DNA, 80 bp, synthetic construct
  source 1..80: mol_type = other DNA
taactttataccataagaaactagaaaagtagagcaagtttaacccaaactcacaaaataactgaaatgatgaagtttag

SEQ ID NO: 43877 - DNA, 80 bp, synthetic construct; identical to SEQ ID NO: 14840
  source 1..80: mol_type = other DNA

SEQ ID NO: 43878 - DNA, 80 bp, synthetic construct
  source 1..80: mol_type = other DNA
taggaagattgcttgagcccaggaggttgagactgcagtgagccattattacaccactgcaaactagcccagacaacaga

SEQ ID NO: 43879 - DNA, 80 bp, synthetic construct
  source 1..80: mol_type = other DNA
aaagtaactacattgaatcagtgatcaaatacctctcaacaatgaaagctcaagacaagaagttttccttttgaatttca

SEQ ID NO: 43880 - DNA, 80 bp, synthetic construct
  source 1..80: mol_type = other DNA
tataaatgcaaaagtcttcaataaaatactagcaaactaaattcagcaccatattatatacccattactaaatgggattt

SEQ ID NO: 43881 - DNA, 80 bp, synthetic construct; identical to SEQ ID NO: 14841
  source 1..80: mol_type = other DNA

SEQ ID NO: 43882 - DNA, 80 bp, synthetic construct
  source 1..80: mol_type = other DNA
acatgatcttatatatggaaaatcccaaagagtcaacacaaaacatagctctaataaatgaattcagcaaagttgcagga

SEQ ID NO: 43883 - DNA, 80 bp, synthetic construct
  source 1..80: mol_type = other DNA
cattagctaggtgaaagaagccagacccaaaaagtcacaaattgtatgattctatttatatgaaatatccaaattagtta

SEQ ID NO: 43884 - DNA, 80 bp, synthetic construct
  source 1..80: mol_type = other DNA
gttctcactcataggtgggaattgaacaatgagaacacatggacacaggaaggggaacatcacactctggggactgttgt

SEQ ID NO: 43885 - DNA, 80 bp, synthetic construct; identical to SEQ ID NO: 14842
  source 1..80: mol_type = other DNA

SEQ ID NO: 43886 - DNA, 80 bp, synthetic construct
  source 1..80: mol_type = other DNA
cattatcatgatcaccatcatcatccctatagaaaataatgcttcctaaatttcactttctttaaaaggtttagattatg

SEQ ID NO: 43887 - DNA, 80 bp, synthetic construct
  source 1..80: mol_type = other DNA
gtctggatttctttagatgttttattttcaacagcgtccatcatgcacctctgcgctatatcgctggatcggtatgtagc

SEQ ID NO: 43888 - DNA, 80 bp, synthetic construct; identical to SEQ ID NO: 14843
  source 1..80: mol_type = other DNA

SEQ ID NO: 43889 - DNA, 80 bp, synthetic construct
  source 1..80: mol_type = other DNA
acataaagtctaattaaagtctaaattttaaaaatataacatttcaatcttatattgaaaagttacatgtatcccagaat

SEQ ID NO: 43890 - DNA, 80 bp, synthetic construct
  source 1..80: mol_type = other DNA
gtatacaaaaagaaaaaaaaatttgtttctttaaagatttgtagcagtttaaagggaaagaaatgatcatttattgctta

SEQ ID NO: 43891 - DNA, 80 bp, synthetic construct
  source 1..80: mol_type = other DNA
gtgcaacaagatcaagacttctatttaatcttcactaatatcatctaaatattttgactctgggtttattgatcaaatac

SEQ ID NO: 43892 - DNA, 80 bp, synthetic construct
  source 1..80: mol_type = other DNA
caaagagttcatctaaaaagatgccagcttttatggtgcttacaaaggaaatacacagacagaatattgttgcatcagct

SEQ ID NO: 43893 - DNA, 80 bp, synthetic construct; identical to SEQ ID NO: 14844
  source 1..80: mol_type = other DNA

SEQ ID NO: 43894 - DNA, 80 bp, synthetic construct
  source 1..80: mol_type = other DNA
tgagagaaatcttgggccttaaaattggattaagatgatttcgtattattcaggtttccaattttggggcataaacaaac

SEQ ID NO: 43895 - DNA, 80 bp, synthetic construct
  source 1..80: mol_type = other DNA
gataattgaattatcagacatacactttaaataatcatttggaatgtgcacatggaaattacatgctgatcttaaacact

SEQ ID NO: 43896 - DNA, 80 bp, synthetic construct
  source 1..80: mol_type = other DNA
caggagttcaagactagcctggacaacatgatgaaaccccatctctactaaaaatacaaaaattagccaggtatggtagc

SEQ ID NO: 43897 - DNA, 80 bp, synthetic construct; identical to SEQ ID NO: 14845
  source 1..80: mol_type = other DNA

SEQ ID NO: 43898 - DNA, 80 bp, synthetic construct
  source 1..80: mol_type = other DNA
agataaaatgaaataataagataaatccaaaaggagtcaataaaagatagaaaaatataaaacgtatactgaatggcaga

SEQ ID NO: 43899 - DNA, 80 bp, synthetic construct
  source 1..80: mol_type = other DNA
acactatccaagagaaagactgtatagctatattaatatttgtcaaaatagacttttcggcaaaaaacaaatactccagt

SEQ ID NO: 43900 - DNA, 80 bp, synthetic construct; identical to SEQ ID NO: 14846
  source 1..80: mol_type = other DNA

SEQ ID NO: 43901 - DNA, 80 bp, synthetic construct
  source 1..80: mol_type = other DNA
tatttggaaattaagaaattgtttcccaataaactttgacctaatggatttcaaatccattgatgattcttccctaagct

SEQ ID NO: 43902 - DNA, 80 bp, synthetic construct
  source 1..80: mol_type = other DNA
catgttggtggagactcctggattcttttgtattcagtgtaatatatatgattcattattgcccttaattattttgatgc

SEQ ID NO: 43903 - DNA, 80 bp, synthetic construct
  source 1..80: mol_type = other DNA
atgcagaagctcagtatgctcattgctaataggatatcattgctcctatatatcaatacctttaatcccaattcacgaac

SEQ ID NO: 43904 - DNA, 80 bp, synthetic construct
  source 1..80: mol_type = other DNA
aatgaaatgcaatgtttaaaatttcattgcaattttatctttagaatgttttccaccaatggcatatagtcaaagcattg

SEQ ID NO: 43905 - DNA, 80 bp, synthetic construct; identical to SEQ ID NO: 14847
  source 1..80: mol_type = other DNA

SEQ ID NO: 43906 - DNA, 80 bp, synthetic construct
  source 1..80: mol_type = other DNA
ttgttcttttacttggaaatatgtcctggaaatcactctatcaatttgtaagatgatagatatgcacccaactttatcat

SEQ ID NO: 43907 - DNA, 80 bp, synthetic construct
  source 1..80: mol_type = other DNA
aataattgtgtgtgtgtgtgtgtgtgtgtgtgtgtcctttgtgtgtgcgtgcgtgcatgtgtgtctgtcttgtgtgtttg

SEQ ID NO: 43908 - DNA, 80 bp, synthetic construct; identical to SEQ ID NO: 14848
  source 1..80: mol_type = other DNA

SEQ ID NO: 43909 - DNA, 80 bp, synthetic construct
  source 1..80: mol_type = other DNA
taaatgtatgaaaaccacttcagtgccattgctaaatcagttttaagtgtccttttgctcattttttctgattttttttc

SEQ ID NO: 43910 - DNA, 80 bp, synthetic construct
  source 1..80: mol_type = other DNA
tcctttttatgttgagagtaatggcaacaaattctttcccctaactcaggttggacaataaatcacacatatttttctca

SEQ ID NO: 43911 - DNA, 80 bp, synthetic construct
  source 1..80: mol_type = other DNA
ccatctgtcctgtgatatgagatgccatctttatagtatattaaatattcttatatgcctggacatgtttctgaagttca

SEQ ID NO: 43912 - DNA, 80 bp, synthetic construct
  source 1..80: mol_type = other DNA
cttgtgtagacattactgaaagtttaattttccatattaacgttaacattaacttgccttgttctattctaaaagcctgg

SEQ ID NO: 43913 - DNA, 80 bp, synthetic construct; identical to SEQ ID NO: 14849
  source 1..80: mol_type = other DNA

SEQ ID NO: 43914 - DNA, 80 bp, synthetic construct
  source 1..80: mol_type = other DNA
tttttggtctagtgatctctgtatactcaaacattattaaggattccagagagtttgcctttatatgagctatatccatc

SEQ ID NO: 43915 - DNA, 80 bp, synthetic construct
  source 1..80: mol_type = other DNA
gctatattttccaaaacaaaatcaacaagaagagtgacattgttttagttttttctttttttgacttttataaatttagg

SEQ ID NO: 43916 - DNA, 80 bp, synthetic construct
  source 1..80: mol_type = other DNA
tgtaatatctgaaactacaaaaacactagaagaaaacctaggaaaaaactctgctggacaatggcctaggcaaaaattcg

SEQ ID NO: 43917 - DNA, 80 bp, synthetic construct; identical to SEQ ID NO: 14850
  source 1..80: mol_type = other DNA

SEQ ID NO: 43918 - DNA, 80 bp, synthetic construct
  source 1..80: mol_type = other DNA
caatttattgcaacaatttgctgtggttcagataattgcggtcattcttatttgacagtgcactaaaactctgcaagtag

SEQ ID NO: 43919 - DNA, 80 bp, synthetic construct
  source 1..80: mol_type = other DNA
gtaacatcaggcataggtcattaagaaaatattggttcaccgagttacacatattttctcaatgttggtatatttcacta

SEQ ID NO: 43920 - DNA, 80 bp, synthetic construct
  source 1..80: mol_type = other DNA
cacttgaaacctcagattttatcattggcagcaaatagcatctattttttgcttaacttgacaggctcaagtcatccatt

SEQ ID NO: 43921 - DNA, 80 bp, synthetic construct; identical to SEQ ID NO: 14851
  source 1..80: mol_type = other DNA

SEQ ID NO: 43922 - DNA, 80 bp, synthetic construct
  source 1..80: mol_type = other DNA
taatttttttccatacaagagaaactttttcatggtacaaaggatgaaggtaaattacagtcctgtaggcagtcctgtta

SEQ ID NO: 43923 - DNA, 80 bp, synthetic construct
  source 1..80: mol_type = other DNA
gcaaagtccaggatacaaaatcaatgtacaaaaatcacaagcattcttatacaccaacaacacacaaacagagagacaaa

SEQ ID NO: 43924 - DNA, 80 bp, synthetic construct
  source 1..80: mol_type = other DNA
ggtaggaagaatcaatatcgtgaaaatggccatactgcccaaggtaatttacagattcaatgccatccccatcaagctac

SEQ ID NO: 43925 - DNA, 80 bp, synthetic construct; identical to SEQ ID NO: 14852
  source 1..80: mol_type = other DNA

SEQ ID NO: 43926 - DNA, 80 bp, synthetic construct
  source 1..80: mol_type = other DNA
gcttgattcatgccaaggcaccagcagtttcacccaccattacattggcattatcagtaaaattgtaaacacattgaaaa

SEQ ID NO: 43927 - DNA, 80 bp, synthetic construct
  source 1..80: mol_type = other DNA
ttcataattctccgattctttgctacctatgacacaattttcatttggtttccttttctcctatttctctgtctgctcca

SEQ ID NO: 43928 - DNA, 80 bp, synthetic construct
  source 1..80: mol_type = other DNA
ttatatgcagatctatagcttgtagaaaaactcttagctcatgttccatataaaatagactacagaccagatttggccga

SEQ ID NO: 43929 - DNA, 80 bp, synthetic construct
  source 1..80: mol_type = other DNA
tttaattccctactgactcataatgttgggcactttttgttatggtttttaagcatttcgacgtcctcttttgtgatgaa

SEQ ID NO: 43930 - DNA, 80 bp, synthetic construct; identical to SEQ ID NO: 14853
  source 1..80: mol_type = other DNA

SEQ ID NO: 43931 - DNA, 80 bp, synthetic construct
  source 1..80: mol_type = other DNA
aagattattcttgcctaccgaattacaatggcgtcattctcataagtcaggttaccttatatatgttgtttctcctgggc

SEQ ID NO: 43932 - DNA, 80 bp, synthetic construct
  source 1..80: mol_type = other DNA
gtcttctaatctagttgagtaagtctgtcagctgtgttcttcttcaaaattttctgggctagcctaaggccttttcattt

SEQ ID NO: 43933 - DNA, 80 bp, synthetic construct
  source 1..80: mol_type = other DNA
cttccaatccatgtacgtatgcatatgtacatgtaaataatctactatttatttaggccttctttaatactctgttatgt

SEQ ID NO: 43934 - DNA, 80 bp, synthetic construct; identical to SEQ ID NO: 14854
  source 1..80: mol_type = other DNA

SEQ ID NO: 43935 - DNA, 80 bp, synthetic construct
  source 1..80: mol_type = other DNA
taatatttgtaagttttgtaaaatgtctttcatcaaattaaattcccttttattctatattttctgtgtcttttttatca

SEQ ID NO: 43936 - DNA, 80 bp, synthetic construct
  source 1..80: mol_type = other DNA
tctatatcattggattattttttatattttagttaggatgttttaatccattccaatgagagattttgccttgtcatttt

SEQ ID NO: 43937 - DNA, 80 bp, synthetic construct; identical to SEQ ID NO: 14855
  source 1..80: mol_type = other DNA

SEQ ID NO: 43938 - DNA, 80 bp, synthetic construct
  source 1..80: mol_type = other DNA
tctaatttattggcatcaagtggtgtaattaccatccttttaatgtctatataatgtgtagtgacttcctgtttcgccca

SEQ ID NO: 43939 - DNA, 80 bp, synthetic construct
  source 1..80: mol_type = other DNA
tacttactttgggtttcattttctcttttttaacttcttaaggaagaaagttaagtcagtgactctgggccttacttgat

SEQ ID NO: 43940 - DNA, 80 bp, synthetic construct
  source 1..80: mol_type = other DNA
taatgccacagtggccagggtatatacactttatgtttccatcatttgacttttattgtcattgccttttggccagcata

SEQ ID NO: 43941 - DNA, 80 bp, synthetic construct
  source 1..80: mol_type = other DNA
gtctatctctccttttagtttttttaacatttgttctataaattttgaggttatgttatttggtttctttaataaataag

SEQ ID NO: 43942 - DNA, 80 bp, synthetic construct
  source 1..80: mol_type = other DNA
ctgtctttatatttttaaataattcacttataaagagcatatagttatttcttaatataatctgaaagtatttcattttt

SEQ ID NO: 43943 - DNA, 80 bp, synthetic construct
  source 1..80: mol_type = other DNA
acaaatattacaatgtgcataaacccatgaaaacatcaccacactcaagatcataaagatagccatccccatcaagtttc

SEQ ID NO: 43944 - DNA, 80 bp, synthetic construct
  source 1..80: mol_type = other DNA
gatacatagagatagtaaaaaggttactatagtgaagcaaatgaatatattcatcatctcatatagttacctatttttgt

SEQ ID NO: 43945 - DNA, 80 bp, synthetic construct; identical to SEQ ID NO: 14856
  source 1..80: mol_type = other DNA

SEQ ID NO: 43946 - DNA, 80 bp, synthetic construct
  source 1..80: mol_type = other DNA
tagattgtttccatatcttagctattgtgaataatgctgcaatgagcatgggagagcacatatctttacaatgtgacgat

SEQ ID NO: 43947 - DNA, 80 bp, synthetic construct
  source 1..80: mol_type = other DNA
agctatcctaactggtatctcataacggttttgacttgcatccctgatgattaattgatgttgcgcacctctacatatac

SEQ ID NO: 43948 - DNA, 80 bp, synthetic construct
  source 1..80: mol_type = other DNA
ctcaattcataggaaccatttcatcttgtggattatttccttcactgtttagaagctttttaattcgatttaatcccatt

SEQ ID NO: 43949 - DNA, 80 bp, synthetic construct
  source 1..80: mol_type = other DNA
atacaaaaattcatttccaagcctaatgtacaagagcttttcctttatgttctcttctaagagatttacagtgtctagtg

SEQ ID NO: 43950 - DNA, 80 bp, synthetic construct; identical to SEQ ID NO: 14857
  source 1..80: mol_type = other DNA

SEQ ID NO: 43951 - DNA, 80 bp, synthetic construct
  source 1..80: mol_type = other DNA
atacaaattttattattgcttttgctatttctgataaggaaggcatcgggatttttaaaagggttgtgttgaatctctat

SEQ ID NO: 43952 - DNA, 80 bp, synthetic construct
  source 1..80: mol_type = other DNA
attttgattcttgtgtagaatgtgtaatgagcaaatcagggtaactgggatatccaccacctcacatttatatttgtttt

SEQ ID NO: 43953 - DNA, 80 bp, synthetic construct; identical to SEQ ID NO: 14858
  source 1..80: mol_type = other DNA

SEQ ID NO: 43954 - DNA, 80 bp, synthetic construct
  source 1..80: mol_type = other DNA
gcagatatctcttcaatatatattaattttcttactttgagatacgtacccagcaatgggaatgctggattatgtggtag

SEQ ID NO: 43955 - DNA, 80 bp, synthetic construct
  source 1..80: mol_type = other DNA
ttgttcagaagcatgttctttgcttttcacatgtttgtgcattttctaatattcctcctaatattgatttctcgtttcgt

SEQ ID NO: 43956 - DNA, 80 bp, synthetic construct
  source 1..80: mol_type = other DNA
tttgttagatccatttggtcaaaagtgcaattgaaatccagtatttccttattatttgttatctggttgctttattcatt

SEQ ID NO: 43957 - DNA, 80 bp, synthetic construct; identical to SEQ ID NO: 14859
  source 1..80: mol_type = other DNA

SEQ ID NO: 43958 - DNA, 80 bp, synthetic construct
  source 1..80: mol_type = other DNA
gctactgccattttcttgtttgttttctggttattttgtagctattttgttcctttctttctcttttatagtttaccttt

SEQ ID NO: 43959 - DNA, 80 bp, synthetic construct
  source 1..80: mol_type = other DNA
tacaaacactctaggcttttaccttccttcctcacaatttacatttttgatgtcacaacttttgtcttgttatattgtga

SEQ ID NO: 43960 - DNA, 80 bp, synthetic construct
  source 1..80: mol_type = other DNA
atttacctctactagtgagttttgtactttctttcatatgtattcatgatggtaattactgtccctttgtttccacttga

SEQ ID NO: 43961 - DNA, 80 bp, synthetic construct
  source 1..80: mol_type = other DNA
tatttctacatttctgaaggacagcattgctgtatagagtatgcttggctgacagttttgtttgcttttttgttttgggg

SEQ ID NO: 43962 - DNA, 80 bp, synthetic construct; identical to SEQ ID NO: 14860
  source 1..80: mol_type = other DNA

SEQ ID NO: 43963 - DNA, 80 bp, synthetic construct
  source 1..80: mol_type = other DNA
gtttttattgcagcatagtattccactcatggatatacaatttgtctaaaaattctactttttatagacgtggtttattt

SEQ ID NO: 43964 - DNA, 80 bp, synthetic construct
  source 1..80: mol_type = other DNA
acatttaatattcccactagcagtatgtaagagttacagattctccacaacctccccaattcttggtatagtcaggctta

SEQ ID NO: 43965 - DNA, 80 bp, synthetic construct
  source 1..80: mol_type = other DNA
agattgtttgacttcatattattgagttttaattgttatttgtatattcttggtaaaaattttatttgatgtgtttattt

SEQ ID NO: 43966 - DNA, 80 bp, synthetic construct; identical to SEQ ID NO: 14861
  source 1..80: mol_type = other DNA

SEQ ID NO: 43967 - DNA, 80 bp, synthetic construct
  source 1..80: mol_type = other DNA
ttaattgtcatgaaattcaaattattaagaatttttctcttatgcttcatgcttttgagtcatatttaagaaatatttgc

SEQ ID NO: 43968 - DNA, 80 bp, synthetic construct
  source 1..80: mol_type = other DNA
aaataagcacataatggggactgggatatctgtcttctcaagcatttatcctttgagttagaaacaatcaaattacaccc

SEQ ID NO: 43969 - DNA, 80 bp, synthetic construct
  source 1..80: mol_type = other DNA
ccatctttctactctatgtccatgggttcaattgttttgatttttagatcccacagataagtgagaacatgtgatgtttg

SEQ ID NO: 43970 - DNA, 80 bp, synthetic construct; identical to SEQ ID NO: 14862
  source 1..80: mol_type = other DNA

SEQ ID NO: 43971 - DNA, 80 bp, synthetic construct
  source 1..80: mol_type = other DNA
cagcatttgttattgcctgacttttggatataagccattttaactggagagaaatgacatctcattgtagttttcgattt

SEQ ID NO: 43972 - DNA, 80 bp, synthetic construct
  source 1..80: mol_type = other DNA
gcttattaatgccttgtcagatgagtagtttgcaaatattttctcccattctgtgggttgtttcttcactttgttgattg

SEQ ID NO: 43973 - DNA, 80 bp, synthetic construct
  source 1..80: mol_type = other DNA
aggtcttacatttaagtctttaatcgatttgatttgatttttgaatatggtgatagacaggggtctagttctattattct

SEQ ID NO: 43974 - DNA, 80 bp, synthetic construct; identical to SEQ ID NO: 14863
  source 1..80: mol_type = other DNA

SEQ ID NO: 43975 - DNA, 80 bp, synthetic construct
  source 1..80: mol_type = other DNA
ttgatttttccaatccatgaacatggaatatttttccattttttggtgtccccttcagtttttttcttcagtgttttata

SEQ ID NO: 43976 - DNA, 80 bp, synthetic construct
  source 1..80: mol_type = other DNA
ttccagggtgactcatgtcaaaaacattgtggatgtccctttccagtttcctattgacttgtatattaccttacagcatt

SEQ ID NO: 43977 - DNA, 80 bp, synthetic construct; identical to SEQ ID NO: 14864
  source 1..80: mol_type = other DNA

SEQ ID NO: 43978 - DNA, 80 bp, synthetic construct
  source 1..80: mol_type = other DNA
tgccatgttggtttgctgcacccatcaactcatcatttacattaggtgtttctcctaatgctatccctcccccagccccc

SEQ ID NO: 43979 - DNA, 80 bp, synthetic construct
  source 1..80: mol_type = other DNA
aaaggacgtgaactcatccttttttatggctgcatagtattccatggtgtatatgtgccacattttcttaatccagtcta

SEQ ID NO: 43980 - DNA, 80 bp, synthetic construct
  source 1..80: mol_type = other DNA
atctttgaggaatcgcctatgtgtggctattttaaatgagattactttttatttctttttcacattgttcactgttggca

SEQ ID NO: 43981 - DNA, 80 bp, synthetic construct
  source 1..80: mol_type = other DNA
tttggatgtcctttatatctttctcttgtctgattgctctagcatggactttcagtactaagttgaataacagtggtgac

SEQ ID NO: 43982 - DNA, 80 bp, synthetic construct; identical to SEQ ID NO: 14865
  source 1..80: mol_type = other DNA

SEQ ID NO: 43983 - DNA, 80 bp, synthetic construct
  source 1..80: mol_type = other DNA
actcttgttgcccaggctgcaatgcaatggcatgatcttggctcattgcaacctctgcctcccaggtttaagtgattctc

SEQ ID NO: 43984 - DNA, 80 bp, synthetic construct
  source 1..80: mol_type = other DNA
aggtgtgagccaccgcgcccagccagttttattgttttgatgtgtctgtctttttttggtatcaggataatattggcctt

SEQ ID NO: 43985 - DNA, 80 bp, synthetic construct
  source 1..80: mol_type = other DNA
ctatttttatgggtttgttcaggttttggatttcttcctggttcaatcttggtaggttgcatatgtctaagaatttgtcc

SEQ ID NO: 43986 - DNA, 80 bp, synthetic construct
  source 1..80: mol_type = other DNA
gtcaattttgtctaacatttcaaaaaaactaccttttgtttcattgatcttactattttttaatttcaatttcatttatt

SEQ ID NO: 43987 - DNA, 80 bp, synthetic construct; identical to SEQ ID NO: 14866
  source 1..80: mol_type = other DNA

SEQ ID NO: 43988 - DNA, 80 bp, synthetic construct
  source 1..80: mol_type = other DNA
taagacttgttttgtaaactaaaatatgcactgtccttgagaatgagctatgtgctgaggaaaagaatgtgcattctgca

SEQ ID NO: 43989 - DNA, 80 bp, synthetic construct
  source 1..80: mol_type = other DNA
ctctcattgattatttttgtgccagtaacaataaaagtactctgtctgtggcttacgatttttgtgacatcttcatctgt

SEQ ID NO: 43990 - DNA, 80 bp, synthetic construct
  source 1..80: mol_type = other DNA
taaatttcaccaaaggtgccatctgaacttgggctttacttagtggaaagtttttttttttttttatgacaaactgaacc

SEQ ID NO: 43991 - DNA, 80 bp, synthetic construct
  source 1..80: mol_type = other DNA
ttaaaatatccccttataatacagtttatttgtcatttcccctcttttttttccttaacttttattttaggttcattggt

SEQ ID NO: 43992 - DNA, 80 bp, synthetic construct; identical to SEQ ID NO: 14867
  source 1..80: mol_type = other DNA

SEQ ID NO: 43993 - DNA, 80 bp, synthetic construct
  source 1..80: mol_type = other DNA
tgctcattttctagttttctttgaagggggagataaggttattcattaaagacctttcttctttttcaatataggcatta

SEQ ID NO: 43994 - DNA, 80 bp, synthetic construct
  source 1..80: mol_type = other DNA
ttgcaaatttcccaaatttcctgttgttgatttctactatttttccattgtggttgcagaacatgctttgtataatttca

SEQ ID NO: 43995 - DNA, 80 bp, synthetic construct; identical to SEQ ID NO: 14868
  source 1..80: mol_type = other DNA

SEQ ID NO: 43996 - DNA, 80 bp, synthetic construct
  source 1..80: mol_type = other DNA
atgatgttttactttaatctctttttgtcttcataatcaaagtgggtttcttatagagagaatataactgaatcttattc

SEQ ID NO: 43997 - DNA, 80 bp, synthetic construct
  source 1..80: mol_type = other DNA
cagtttttcaagagtccatcattcctgggcctcctttattgagtttttcatcttctgatcagcagttgttgctttagggt

SEQ ID NO: 43998 - DNA, 80 bp, synthetic construct
  source 1..80: mol_type = other DNA
atattcctcactcttaaggcactgagtttctttttttattttctgtccagctttaagatgcaagcaacaaatttaaaaac

SEQ ID NO: 43999 - DNA, 80 bp, synthetic construct; identical to SEQ ID NO: 14869
  source 1..80: mol_type = other DNA

SEQ ID NO: 44000 - DNA, 80 bp, synthetic construct
  source 1..80: mol_type = other DNA
ttaatgactgaataattctcttgtgtgtgtgtgtgtgtgtgtcatattttctttatctcttcatccattgttggacactt

SEQ ID NO: 44001 - DNA, 80 bp, synthetic construct
  source 1..80: mol_type = other DNA
aaactgttgtcaataatggttacactaatttacattcctatcaaaagcgtgcaagtgtttccttttctccacatcctcac

SEQ ID NO: 44002 - DNA, 80 bp, synthetic construct
  source 1..80: mol_type = other DNA
tccttgtttcaagcaaatcccctgccttagcctcccgagtagctgggattatagatgtgcaccaccatgcccggctaatt

SEQ ID NO: 44003 - DNA, 80 bp, synthetic construct
  source 1..80: mol_type = other DNA
atgattagaaaggtttagcactttttcatatacctgtctgccatttgtatgtcttctctggaaaaaaaatgtgagttgta

SEQ ID NO: 44004 - DNA, 80 bp, synthetic construct; identical to SEQ ID NO: 14870
  source 1..80: mol_type = other DNA

SEQ ID NO: 44005 - DNA, 80 bp, synthetic construct
  source 1..80: mol_type = other DNA
aaacatatggtttgcaaatatttttttccatgccataggttgccttttaattttgttgattgttttctttactgcacaga

SEQ ID NO: 44006 - DNA, 80 bp, synthetic construct
  source 1..80: mol_type = other DNA
ttaattcattttgagttttgttaatatgataaggatacagtttcattcttctgcatttatatagccagttttcccaccac

SEQ ID NO: 44007 - DNA, 80 bp, synthetic construct
  source 1..80: mol_type = other DNA
taatatagtttgaaataaagacatatgatgcctccatcttgattcctcttgcttcttacttttttttttcacttaattct

SEQ ID NO: 44008 - DNA, 80 bp, synthetic construct; identical to SEQ ID NO: 14871
  source 1..80: mol_type = other DNA

SEQ ID NO: 44009 - DNA, 80 bp, synthetic construct
  source 1..80: mol_type = other DNA
tttattaattttaatagctttacagtagatactttagggttttacttatataaaatcatgtcatctgcaaacaaaaacaa

SEQ ID NO: 44010 - DNA, 80 bp, synthetic construct
  source 1..80: mol_type = other DNA
atcttagaggaaaaatttcacattttgtcattgagtatgatgttagctgtgggcttgacatatatagtctttattacatt

SEQ ID NO: 44011 - DNA, 80 bp, synthetic construct
  source 1..80: mol_type = other DNA
acccatcctttcatccaagggataaataacacttggtcatggtgtatgatacttttgatgagctgttgaattcagtatgc

SEQ ID NO: 44012 - DNA, 80 bp, synthetic construct; identical to SEQ ID NO: 14872
  source 1..80: mol_type = other DNA

SEQ ID NO: 44013 - DNA, 80 bp, synthetic construct
  source 1..80: mol_type = other DNA
tatttgagttctttctctctctttctcttggttagtctaactaaaggtttgtccattttatttatcttttcaaaaatcca

SEQ ID NO: 44014 - DNA, 80 bp, synthetic construct; identical to SEQ ID NO: 14873
  source 1..80: mol_type = other DNA

SEQ ID NO: 44015 - DNA, 80 bp, synthetic construct
  source 1..80: mol_type = other DNA
taccattgtggtcagaaaatgtatttgatacaatttcaatcttcttaaattcattaagaattgtttttcaacctaacaaa

SEQ ID NO: 44016 - DNA, 80 bp, synthetic construct
  source 1..80: mol_type = other DNA
tgttgaaagtagggtgctgatgtcttctatttaatactattattgtattcctatttctcccatcagttttggtaatactt

SEQ ID NO: 44017 - DNA, 80 bp, synthetic construct
  source 1..80: mol_type = other DNA
agagtccctttatatctctcatccagcttcattaaatgttaacatattgtatacccgtagtataattatcaataatagga

SEQ ID NO: 44018 - DNA, 80 bp, synthetic construct; identical to SEQ ID NO: 14874
  source 1..80: mol_type = other DNA

SEQ ID NO: 44019 - DNA, 80 bp, synthetic construct
  source 1..80: mol_type = other DNA
ccaattgcacttgaaaatatgggggctatttccagaatcttttgttattaatttccgacataattccacagttataaggg

SEQ ID NO: 44020 - DNA, 80 bp, synthetic construct
  source 1..80: mol_type = other DNA
aatttgttcatagtactatttaggtttattatatattttttacttttctgtcttcattctattaatttcttagagtttag

SEQ ID NO: 44021 - DNA, 80 bp, synthetic construct
  source 1..80: mol_type = other DNA
tgtctttaataatattcatattattaaataaatgttgtctgaaattaatatacatactataatattttatgcatatgatt

SEQ ID NO: 44022 - DNA, 80 bp, synthetic construct
  source 1..80: mol_type = other DNA
tttttggaaacaggtggtatttggttacatgagtaagttctttagtggtaatttgtgagattttggtgcacccatcaccc

SEQ ID NO: 44023 - DNA, 80 bp, synthetic construct; identical to SEQ ID NO: 14875
  source 1..80: mol_type = other DNA

SEQ ID NO: 44024 - DNA, 80 bp, synthetic construct
  source 1..80: mol_type = other DNA
attttaggtgttcaattttgatactcattttctacttattttatatctttattgttcctctgttcttcctttcctgcctt

SEQ ID NO: 44025 - DNA, 80 bp, synthetic construct
  source 1..80: mol_type = other DNA
cattttcatgacactgaaaaatttaaaaatatatttattaggaaccattctccattttcccctctccccagctcctagca

SEQ ID NO: 44026 - DNA, 80 bp, synthetic construct
  source 1..80: mol_type = other DNA
tgtagcatttactagtattgaattcgctttttcctttttctttatttttcattgtttagtgagatacaagtcacataact

SEQ ID NO: 44027 - DNA, 80 bp, synthetic construct; identical to SEQ ID NO: 14876
  source 1..80: mol_type = other DNA

SEQ ID NO: 44028 - DNA, 80 bp, synthetic construct
  source 1..80: mol_type = other DNA
atatatcagaattttttttcattctgctgattgacctttggctcgtagccaatactttttatcacaaataatgctgctat

SEQ ID NO: 44029 - DNA, 80 bp, synthetic construct
  source 1..80: mol_type = other DNA
atgactatgttcatcgtactgtgtgtaaagtggtatctcattgtggttttggtgtgcacttccctaatagctaatgatgt

SEQ ID NO: 44030 - DNA, 80 bp, synthetic construct; identical to SEQ ID NO: 14877
  source 1..80: mol_type = other DNA

SEQ ID NO: 44031 - DNA, 80 bp, synthetic construct
  source 1..80: mol_type = other DNA
aggtctttgaactattttgagggtttttttttttctgtgaatggtgcaagataagggtatgattttattgtttagcatgt

SEQ ID NO: 44032 - DNA, 80 bp, synthetic construct
  source 1..80: mol_type = other DNA
accacctggtcttgaataccactgctttgtagttggtttgaaaatcaggtagtgcgagtcctcgtactttgctcttttat

SEQ ID NO: 44033 - DNA, 80 bp, synthetic construct
  source 1..80: mol_type = other DNA
ttttaggtaactttgggaagtattgtcatcttaagtatttcaaatctaatccatgagcatgaggatttatgtccatttac

SEQ ID NO: 44034 - DNA, 80 bp, synthetic construct
  source 1..80: mol_type = other DNA
aagtgtacagaaatataattaaattatgtatacttattttatatcatgcaaactttctgagttcatttattagttctaat

SEQ ID NO: 44035 - DNA, 80 bp, synthetic construct; identical to SEQ ID NO: 14878
  source 1..80: mol_type = other DNA

SEQ ID NO: 44036 - DNA, 80 bp, synthetic construct
  source 1..80: mol_type = other DNA
tcataaacgccctttaccaagttgatgagtttccttctatttctatgttgaggagtgacttttatcataaaagggaagta

SEQ ID NO: 44037 - DNA, 80 bp, synthetic construct
  source 1..80: mol_type = other DNA
gctggattcagtgtactagtgttctggttggtgtttttgtgtccatattcctaagaaatatttatccgtagttttcttgt

SEQ ID NO: 44038 - DNA, 80 bp, synthetic construct
  source 1..80: mol_type = other DNA
tttttatcactggtaaagtcatctttatggccataagttatgaacttttcattgtgcatagttttgggttagtggtcagt

SEQ ID NO: 44039 - DNA, 80 bp, synthetic construct
  source 1..80: mol_type = other DNA
ataatgtccctgctttcatttttgatcctaataatttaagcatctatctatctgtctgtcatctatctacctatctatcc

SEQ ID NO: 44040 - DNA, 80 bp, synthetic construct; identical to SEQ ID NO: 14879
  source 1..80: mol_type = other DNA

SEQ ID NO: 44041 - DNA, 80 bp, synthetic construct
  source 1..80: mol_type = other DNA
atattaattatgtacatcatgtttttaaaatatgtatatgttgtataattactaaatcgagctaatggaaatatgcatta

SEQ ID NO: 44042 - DNA, 80 bp, synthetic construct
  source 1..80: mol_type = other DNA
accagcatctattcaaaccatcctaacctctggcacgactattatactctctgcttctatgagttagactgtaattatag

SEQ ID NO: 44043 - DNA, 80 bp, synthetic construct; identical to SEQ ID NO: 14880
  source 1..80: mol_type = other DNA

SEQ ID NO: 44044 - DNA, 80 bp, synthetic construct
  source 1..80: mol_type = other DNA
gaactcaaacaattcaatggtaaggaaacaaataatccaaataaaaatgggcaaatgatctaaatagacatttctcaaaa

SEQ ID NO: 44045 - DNA, 80 bp, synthetic construct
  source 1..80: mol_type = other DNA
aaaggcaacccttgcacacttttggtgggaatgtaaattagtacagctactatggaaaccagtatgaaggtttgtctaaa

SEQ ID NO: 44046 - DNA, 80 bp, synthetic construct
  source 1..80: mol_type = other DNA
cctttaaagtttgtcgaggtttgttttatgatatagcatataatccagcctggagaatgtgcgaggtgcactttagaaga

SEQ ID NO: 44047 - DNA, 80 bp, synthetic construct
  source 1..80: mol_type = other DNA
tgtaccccaaacttaaaagtaaaatatgtatatacataaatataataaaaattatgtaaaataaatagtcatgaactata

SEQ ID NO: 44048 - DNA, 80 bp, synthetic construct; identical to SEQ ID NO: 14881
  source 1..80: mol_type = other DNA

SEQ ID NO: 44049 - DNA, 80 bp, synthetic construct
  source 1..80: mol_type = other DNA
aaattgtatgcttgttttaatgtatacttttataaatatattttcattttactcatttaggttattactgtcaattgaac

SEQ ID NO: 44050 - DNA, 80 bp, synthetic construct
  source 1..80: mol_type = other DNA
ttatagagttgttcaaatcatctatttcctggtcgattgtttgactacttgttctttaaaatcataaaatgtagtattga

SEQ ID NO: 44051 - DNA, 80 bp, synthetic construct
  source 1..80: mol_type = other DNA
atttttgtttggaaatctattttgttagatattaattagtatatcctctttagctctcttgtggttgctctttgcatgat

SEQ ID NO: 44052 - DNA, 80 bp, synthetic construct; identical to SEQ ID NO: 14882
  source 1..80: mol_type = other DNA

SEQ ID NO: 44053 - DNA, 80 bp, synthetic construct
  source 1..80: mol_type = other DNA
aacattactcctatgtaactctattcctttttcccctttctgaagtattatttatcatatattacatatgatacatatca

SEQ ID NO: 44054 - DNA, 80 bp, synthetic construct
  source 1..80: mol_type = other DNA
ccatgtagaatcatttatttagcccattatagctttgcccccacctacatctttttagctgtcattggcaaatgtgttta

SEQ ID NO: 44055 - DNA, 80 bp, synthetic construct
  source 1..80: mol_type = other DNA
gacaaagtcttttaaaggaaaaaatcagacggattacataattgttttgaaatagttattcttgtctacaaagattaata

SEQ ID NO: 44056 - DNA, 80 bp, synthetic construct
  source 1..80: mol_type = other DNA
ggctctatttgtcagggtttcattaatattaatgaatccattttgattatggcaactttcacaattgtacacttttttat

SEQ ID NO: 44057 - DNA, 80 bp, synthetic construct; identical to SEQ ID NO: 14883
  source 1..80: mol_type = other DNA

SEQ ID NO: 44058 - DNA, 80 bp, synthetic construct
  source 1..80: mol_type = other DNA
aatcacgatgtcaggagttcgagaccagcctggtcaacgtggtgaaaccctgggtctactaaaaaaattagctgggtgta

SEQ ID NO: 44059 - DNA, 80 bp, synthetic construct
  source 1..80: mol_type = other DNA
cagctgtttatttcattgtggttctattgtaagtgatgggccctttacccttgttgctcccaaatttttctccatgtatt

SEQ ID NO: 44060 - DNA, 80 bp, synthetic construct
  source 1..80: mol_type = other DNA
tagccataggtctttaggcttgcttctcttgacatgaacccctgtcttatcaggtgggaaaatggcaattcgggacccag

SEQ ID NO: 44061 - DNA, 80 bp, synthetic construct; identical to SEQ ID NO: 14884
  source 1..80: mol_type = other DNA

SEQ ID NO: 44062 - DNA, 80 bp, synthetic construct
  source 1..80: mol_type = other DNA
cttctataatttccactagttttcgtggaaagtaaatctgtggagttcttcacgtggtcatgccaaaagtggacctcact

SEQ ID NO: 44063 - DNA, 80 bp, synthetic construct
  source 1..80: mol_type = other DNA
tacgttttcacagagacagtttctactgattacttcttttcctatgtaagagccatacattcatatttctttgaaattct

SEQ ID NO: 44064 - DNA, 80 bp, synthetic construct
  source 1..80: mol_type = other DNA
tatcaatgaagtctcagctccattagcttagaggccagctgataattggacagagattaccttaattgcctggaacaaat

SEQ ID NO: 44065 - DNA, 80 bp, synthetic construct; identical to SEQ ID NO: 14885
  source 1..80: mol_type = other DNA

SEQ ID NO: 44066 - DNA, 80 bp, synthetic construct
  source 1..80: mol_type = other DNA
ccagtaaatgttttccagaaatgctcctcagggagaagtttttagcactggttgaactccaagtcagatgaaaggaaata

SEQ ID NO: 44067 - DNA, 80 bp, synthetic construct
  source 1..80: mol_type = other DNA
gggatgggaaaggaacggttcttagtgatattgagacaattatcttgaatgaatgtttcccatgttgctgcaagttttgg

SEQ ID NO: 44068 - DNA, 80 bp, synthetic construct; identical to SEQ ID NO: 14886
  source 1..80: mol_type = other DNA

SEQ ID NO: 44069 - DNA, 80 bp, synthetic construct
  source 1..80: mol_type = other DNA
acaagaaatataggaactttgaaaacgtatagttgcatttacctcttcccatcatttgtggattgttgtcaaatatatta

SEQ ID NO: 44070 - DNA, 80 bp, synthetic construct
  source 1..80: mol_type = other DNA
tcttgttcccttcattatttctggttttcatgagttactatctcatgtcatttcctttcagcctgaaggacttccactaa

SEQ ID NO: 44071 - DNA, 80 bp, synthetic construct
  source 1..80: mol_type = other DNA
ctgtccttcatagtttcttgagataagctgataattatataattgtttcctcatatgaaatatgtctcttcctacttctg

SEQ ID NO: 44072 - DNA, 80 bp, synthetic construct; identical to SEQ ID NO: 14887
  source 1..80: mol_type = other DNA

SEQ ID NO: 44073 - DNA, 80 bp, synthetic construct
  source 1..80: mol_type = other DNA
aggcttaattcatattttgtatcattttattccctactcactgattcttctagccttcgaaattgcaattgtcccatcaa

SEQ ID NO: 44074 - DNA, 80 bp, synthetic construct
  source 1..80: mol_type = other DNA
tttcacatttggatctttaaatcaaacatctgtgaccaagcatggtctatttatattaaattccccttttacagtttatg

SEQ ID NO: 44075 - DNA, 80 bp, synthetic construct
  source 1..80: mol_type = other DNA
ttgtgcaacagctgacatttcttttcagttttcttgacttctagttgcttctttttagtgtgttcctcccatctttccct

SEQ ID NO: 44076 - DNA, 80 bp, synthetic construct
  source 1..80: mol_type = other DNA
aaattcatgctgtatgtcctgatcataggaagagatccttcaatgtatcataatttagtctggcaatagctgtttttttt

SEQ ID NO: 44077 - DNA, 80 bp, synthetic construct; identical to SEQ ID NO: 14888
  source 1..80: mol_type = other DNA

SEQ ID NO: 44078 - DNA, 80 bp, synthetic construct
  source 1..80: mol_type = other DNA
cagcttttcgtatcagttatgctgaaatcataaaattggttagaaatatatcctccttttccattatctgacactgttca

SEQ ID NO: 44079 - DNA, 80 bp, synthetic construct
  source 1..80: mol_type = other DNA
gagggggtttcaaatgtcatttagttaccttagtagatgaagagcaatttcaattttctgtttctttccattttgtttca

SEQ ID NO: 44080 - DNA, 80 bp, synthetic construct; identical to SEQ ID NO: 14889
  source 1..80: mol_type = other DNA

SEQ ID NO: 44081 - DNA, 80 bp, synthetic construct
  source 1..80: mol_type = other DNA
aatataatatattaatatatctaaattaatctatagattcatattaatccaaaaataatcacatcaggctagtttcagaa

SEQ ID NO: 44082 - DNA, 80 bp, synthetic construct
  source 1..80: mol_type = other DNA
aagtagctgggattacaggcgcccgccaccacacccagctactttttttgtatttttagtagagacggggtttcaccatg

SEQ ID NO: 44083 - DNA, 80 bp, synthetic construct
  source 1..80: mol_type = other DNA
tctaggagcatttatctgatctcaagacatacaatatagctaaagtaatcaagagagtggttattggcacaagaataaag

SEQ ID NO: 44084 - DNA, 80 bp, synthetic construct; identical to SEQ ID NO: 14890
  source 1..80: mol_type = other DNA

SEQ ID NO: 44085 - DNA, 80 bp, synthetic construct
  source 1..80: mol_type = other DNA
actgctctttgaaagacgacaatattaaggaaataaaaaagacaagccaaagactcagagaaaatataggcaagatatat

SEQ ID NO: 44086 - DNA, 80 bp, synthetic construct
  source 1..80: mol_type = other DNA
tatatgagacattgttcagtgtcatagactgtgatgataatgcaactttaaaaccacaatgagaactggcttcacaccac

SEQ ID NO: 44087 - DNA, 80 bp, synthetic construct
  source 1..80: mol_type = other DNA
catttacccaaatgatacgaaactatatgtctacacacaaaaaaaatcttatcacgacttttaaaactactttattcata

SEQ ID NO: 44088 - DNA, 80 bp, synthetic construct; identical to SEQ ID NO: 14891
  source 1..80: mol_type = other DNA

SEQ ID NO: 44089 - DNA, 80 bp, synthetic construct
  source 1..80: mol_type = other DNA
cctcatgtaaatttatacttgaaatctgtgtgtttttatgtgcttgtaaattatatttcaataaggtatttatatttcaa

SEQ ID NO: 44090 - DNA, 80 bp, synthetic construct
  source 1..80: mol_type = other DNA
agcctcgagtacttggtattccaggcacacaccaccatgctcggctaatttttgtatttttatttgagacggggtttcac

SEQ ID NO: 44091 - DNA, 80 bp, synthetic construct
  source 1..80: mol_type = other DNA
aatatgcattgatctcagaaagggaggaaagacacactgaggacataaaatgtttgaagcatatagaaagtgtacatccc

SEQ ID NO: 44092 - DNA, 80 bp, synthetic construct
  source 1..80: mol_type = other DNA
ggtagtagatcatgcaacttatcataattgatcatagtatttctttttaaaaatatctgtaggttatgtagtgatgtact

SEQ ID NO: 44093 - DNA, 80 bp, synthetic construct; identical to SEQ ID NO: 14892
  source 1..80: mol_type = other DNA

SEQ ID NO: 44094 - DNA, 80 bp, synthetic construct
  source 1..80: mol_type = other DNA
gccaacatggtgaaaccttatctctactaaaaatacaaaaattagccaggagtggtggcgggtgcctctaatcccagcaa

SEQ ID NO: 44095 - DNA, 80 bp, synthetic construct
  source 1..80: mol_type = other DNA
tttgtatgctgtgtgttcaacaaattattctcaaacgtttttccaatttttcttgtgatttcttttttggcacatgagct

SEQ ID NO: 44096 - DNA, 80 bp, synthetic construct
  source 1..80: mol_type = other DNA
tcaacatatgacttatcttgataagcattccatgtgaacattttaaagaaggtatattcagaagcattcagtgtagtgtt

SEQ ID NO: 44097 - DNA, 80 bp, synthetic construct; identical to SEQ ID NO: 14893
  source 1..80: mol_type = other DNA

SEQ ID NO: 44098 - DNA, 80 bp, synthetic construct
  source 1..80: mol_type = other DNA
agacaactgatcatctttctcttttatcttaatctgaaaatctctgcctcgtaactaaacgatttggatcaattacattt

SEQ ID NO: 44099 - DNA, 80 bp, synthetic construct
  source 1..80: mol_type = other DNA
tctatatatttttaagtatttttatttgacctaggtggatttaaggattgccatcggatatcttatctcataagcatcct

SEQ ID NO: 44100 - DNA, 80 bp, synthetic construct; identical to SEQ ID NO: 14894
  source 1..80: mol_type = other DNA

SEQ ID NO: 44101 - DNA, 80 bp, synthetic construct
  source 1..80: mol_type = other DNA
taagctcagcatccattagctattcttcctaatgccctccgtcctcaccggctggcaggccccagtgtgtattgttcctc

SEQ ID NO: 44102 - DNA, 80 bp, synthetic construct
  source 1..80: mol_type = other DNA
agtattccgtggtttatatgtaccacattttctttatccaatctatcattgatgggcatttgggttggttccaagtcttt

SEQ ID NO: 44103 - DNA, 80 bp, synthetic construct
  source 1..80: mol_type = other DNA
gttaaactaatttacactgccaccaacagtgtaaaagtgttgctttttctccacaacctcaccaccctctgttgtttctg

SEQ ID NO: 44104 - DNA, 80 bp, synthetic construct
  source 1..80: mol_type = other DNA
actttttaatggagttgtttttttcttgtaaatttgtttaagttccttgtacactctggatattagacctttgtcaggtt

SEQ ID NO: 44105 - DNA, 80 bp, synthetic construct; identical to SEQ ID NO: 14895
  source 1..80: mol_type = other DNA

SEQ ID NO: 44106 - DNA, 80 bp, synthetic construct
  source 1..80: mol_type = other DNA
atttctgagatctctattctgttccattggtctatgtgtctgtttttgtaccagtaccatgctgttttggttactgtggc

SEQ ID NO: 44107 - DNA, 80 bp, synthetic construct
  source 1..80: mol_type = other DNA
atagaatctataactttgggcagttatgagcattttaattgcatcgattctttctatccatgagcatggaatgtttttcc

SEQ ID NO: 44108 - DNA, 80 bp, synthetic construct
  source 1..80: mol_type = other DNA
gtttctgtataggaatgcgctatctcaggcaggctccaccctgttgctggtggctggctggaattccaaaccagtgggtc

SEQ ID NO: 44109 - DNA, 80 bp, synthetic construct; identical to SEQ ID NO: 14896
  source 1..80: mol_type = other DNA

SEQ ID NO: 44110 - DNA, 80 bp, synthetic construct
  source 1..80: mol_type = other DNA
ttgttctccatcggttgagttgtttccctgatcagtcccaaagtgagtacctggatatttcagttgaagatactgtattc

SEQ ID NO: 44111 - DNA, 80 bp, synthetic construct
  source 1..80: mol_type = other DNA
agtatatgatcactgaacataaaattctgggttgacagatgtgcgtttgttgctgtagtttttactttattctttttaaa

SEQ ID NO: 44112 - DNA, 80 bp, synthetic construct
  source 1..80: mol_type = other DNA
acttaaaactgccacatgcaaaaaaaaggggatccagaaaacattctctttttcttctgaaggttttacaatgcattgtc

SEQ ID NO: 44113 - DNA, 80 bp, synthetic construct; identical to SEQ ID NO: 14897
  source 1..80: mol_type = other DNA

SEQ ID NO: 44114 - DNA, 80 bp, synthetic construct
  source 1..80: mol_type = other DNA
gttttctaggtatccttgaaaaaaaatttcctctccatgcaaaataacccatggaaacagataaccctgcaggttaacaa

SEQ ID NO: 44115 - DNA, 80 bp, synthetic construct
  source 1..80: mol_type = other DNA
caaagatagagaaaatgtttcaaattctagatctctctgtggcatttgaaactgttgcggatgtcttcttcagaacactc

SEQ ID NO: 44116 - DNA, 80 bp, synthetic construct; identical to SEQ ID NO: 14898
  source 1..80: mol_type = other DNA

SEQ ID NO: 44117 - DNA, 80 bp, synthetic construct
  source 1..80: mol_type = other DNA
tcctctgaacttacctcttttgcagtaaaataacttcatcaactaatgggcttttaagaggctgaaatgagataatgcat

SEQ ID NO: 44118 - DNA, 80 bp, synthetic construct
  source 1..80: mol_type = other DNA
gtaacatatgatattttcagtaaagctttaacttaacaatgttaatgaatttaatattctaaaatgctaagtaagactct

SEQ ID NO: 44119 - DNA, 80 bp, synthetic construct
  source 1..80: mol_type = other DNA
gaattataacttacctttgttggttctaaaattctaaggaagatgatacagagttattgaagttaatctcagaaaggtta

SEQ ID NO: 44120 - DNA, 80 bp, synthetic construct; identical to SEQ ID NO: 14899
  source 1..80: mol_type = other DNA

SEQ ID NO: 44121 - DNA, 80 bp, synthetic construct
  source 1..80: mol_type = other DNA
aacttaactctctagcacttaaataacttaatgcattaacatagaacagcagttctcaagctctttggtgtcaggacccc

SEQ ID NO: 44122 - DNA, 80 bp, synthetic construct
  source 1..80: mol_type = other DNA
cataaaaacatatttttgaaaactataatctccaaaacaaatcagagagaaaacaggcattgttttacagttttgaaaat

SEQ ID NO: 44123 - DNA, 80 bp, synthetic construct
  source 1..80: mol_type = other DNA
gtgccatcatccctggctaatttttgtatttttagtagagactgggttgcaccatgttggccaggctggtcttgaactcc

SEQ ID NO: 44124 - DNA, 80 bp, synthetic construct; identical to SEQ ID NO: 14900
  source 1..80: mol_type = other DNA

SEQ ID NO: 44125 - DNA, 80 bp, synthetic construct
  source 1..80: mol_type = other DNA
ggtttctaaaaacaaaagaaaattaatgacagtgcagatttggtaaactggttaagctactttgccaaataatacctgtc

SEQ ID NO: 44126 - DNA, 80 bp, synthetic construct
  source 1..80: mol_type = other DNA
gataaaattggcctcatctacccaataacagcttcagcttatctacagtgactttgctaccctctcttgctgtcccttga

SEQ ID NO: 44127 - DNA, 80 bp, synthetic construct
  source 1..80: mol_type = other DNA
atgaatacttagaatatatgcagcatttcctgtgggaaattgaaggtacatgcctcagtcatgatgcctccagggtgaaa

SEQ ID NO: 44128 - DNA, 80 bp, synthetic construct; identical to SEQ ID NO: 14901
  source 1..80: mol_type = other DNA

SEQ ID NO: 44129 - DNA, 80 bp, synthetic construct
  source 1..80: mol_type = other DNA
aaaataaagcccatgaactcatcatccagctccaagatttatcagcctgtggactgtcttgtttcatccatactttcatc

SEQ ID NO: 44130 - DNA, 80 bp, synthetic construct
  source 1..80: mol_type = other DNA
tcatccaaaggccagtcattgttcagatttttaattgtgtcatgaaaatttttaacatgtttttgttttcatcaagatcc

SEQ ID NO: 44131 - DNA, 80 bp, synthetic construct
  source 1..80: mol_type = other DNA
atatgttattaaggttaagccaacactgatgtctttagggcatgtttgatctgtgctgtctagagattaccttacgttta

SEQ ID NO: 44132 - DNA, 80 bp, synthetic construct
  source 1..80: mol_type = other DNA
aaaatcactttctcttttctccttctaataattgtcattccaccccatctaggtgcaaaggtctctgctttaggatctgg

SEQ ID NO: 44133 - DNA, 80 bp, synthetic construct; identical to SEQ ID NO: 14902
  source 1..80: mol_type = other DNA

SEQ ID NO: 44134 - DNA, 80 bp, synthetic construct
  source 1..80: mol_type = other DNA
atacctgactaggcatgttaaagcaactagtaaggactttctgtttcaggtttgtcacagttgcttgtgtgttctctaag

SEQ ID NO: 44135 - DNA, 80 bp, synthetic construct
  source 1..80: mol_type = other DNA
ccaggcttcgacttcctgtggacacaagacaggacagcaatctctatctgttatctatttatctctatgtattgatgcag

SEQ ID NO: 44136 - DNA, 80 bp, synthetic construct
  source 1..80: mol_type = other DNA
attcttaaaacaaaaatgctcaaaattccacacagaaactggaggactgcatatctcccaactctacattttaccctctc

SEQ ID NO: 44137 - DNA, 80 bp, synthetic construct; identical to SEQ ID NO: 14903
  source 1..80: mol_type = other DNA

SEQ ID NO: 44138 - DNA, 80 bp, synthetic construct
  source 1..80: mol_type = other DNA
gaaatccaacaaatctgacacaatccaccctttgacacaaccgtgtctctaatatagttaatatcaataagggtaattcc

SEQ ID NO: 44139 - DNA, 80 bp, synthetic construct
  source 1..80: mol_type = other DNA
atatcaggtctgaatttccttccgtaaaatgcaaattaatgtatgccgttgaatacatctgttcagtccttcaagatgct

SEQ ID NO: 44140 - DNA, 80 bp, synthetic construct
  source 1..80: mol_type = other DNA
ttcgttcttattgggtccttcgtagctttcttcataccgctgacgattatggtgattacgtattgcctgaccatctacgt

SEQ ID NO: 44141 - DNA, 80 bp, synthetic construct; identical to SEQ ID NO: 14904
  source 1..80: mol_type = other DNA

SEQ ID NO: 44142 - DNA, 80 bp, synthetic construct
  source 1..80: mol_type = other DNA
ttcaggaatcaatcctctggtgtatactctgttcaacaaaatttaccgaagggcattctccaactatttgcgttgcaatt

SEQ ID NO: 44143 - DNA, 80 bp, synthetic construct
  source 1..80: mol_type = other DNA
tttagagttaccagtaaatccctccagtgtggttagcgaaaggattagcagtgtgtgagaaagaacagcacagtcttttc

SEQ ID NO: 44144 - DNA, 80 bp, synthetic construct
  source 1..80: mol_type = other DNA
tgaaaaagtgtttttacatatagctttgcaaccttgtactttacaatcatgcctacattagtgagatttagggttctata

SEQ ID NO: 44145 - DNA, 80 bp, synthetic construct; identical to SEQ ID NO: 14905
  source 1..80: mol_type = other DNA

SEQ ID NO: 44146 - DNA, 80 bp, synthetic construct
  source 1..80: mol_type = other DNA
cagaatgttgtgttggtatttactgcaatgtctgtccctaaacatagtggtattttaacatagcagctggttaaccggga

SEQ ID NO: 44147 - DNA, 80 bp, synthetic construct
  source 1..80: mol_type = other DNA
gatcccagagttatttcccaacccaggattcaacatcaattgggttttgatctcagcatcctggaaatttgtgtgcttca

SEQ ID NO: 44148 - DNA, 80 bp, synthetic construct
  source 1..80: mol_type = other DNA
aattgggcccttagaatgtgaaaaaaaaaagtaattaaaaagacacttttaccgaactcgggattacagaaacacggagt

SEQ ID NO: 44149 - DNA, 80 bp, synthetic construct; identical to SEQ ID NO: 14906
  source 1..80: mol_type = other DNA

SEQ ID NO: 44150 - DNA, 80 bp, synthetic construct
  source 1..80: mol_type = other DNA
attttggaagaattcatgatgctagttcttacgcttgacagttacttacacacctgagaatgtgcctctcagtatcttaa

SEQ ID NO: 44151 - DNA, 80 bp, synthetic construct
  source 1..80: mol_type = other DNA
agtcaattgcttgagcatgcccaaatataacatgaaagtcaagtctacctgccttgcctgttaggtctgttgaagtgcat

SEQ ID NO: 44152 - DNA, 80 bp, synthetic construct; identical to SEQ ID NO: 14907
  source 1..80: mol_type = other DNA

SEQ ID NO: 44153 - DNA, 80 bp, synthetic construct
  source 1..80: mol_type = other DNA
attcttgtgtcatcaagtagtagtacttaatagtacccaacctggtaattatcctcaagttgtgtgctattcgtaagttc

SEQ ID NO: 44154 - DNA, 80 bp, synthetic construct
  source 1..80: mol_type = other DNA
atgtatatctgtgtaagacacgtgcaacagactgccttatattattttctgtaattcttctcctttgtcaaatggtattt

SEQ ID NO: 44155 - DNA, 80 bp, synthetic construct
  source 1..80: mol_type = other DNA
tgtcttttcctcattgtttatttcaacaaggatttcaaaaagtagaaaaataaacattttcctggaggtgagttggattt

SEQ ID NO: 44156 - DNA, 80 bp, synthetic construct; identical to SEQ ID NO: 14908
  source 1..80: mol_type = other DNA

SEQ ID NO: 44157 - DNA, 80 bp, synthetic construct
  source 1..80: mol_type = other DNA
ctcagagctcacagacctgggtgcccgggccctgacgactcacacaggcccggagctgggagaggatatggtgcagggtg

SEQ ID NO: 44158 - DNA, 80 bp, synthetic construct
  source 1..80: mol_type = other DNA
cagccagtgtggtcaggtaggagcagagggaaggggtagcaggtgtggggagaggagagagggacaatggagaaggagaa

SEQ ID NO: 44159 - DNA, 80 bp, synthetic construct; identical to SEQ ID NO: 14909
  source 1..80: mol_type = other DNA

SEQ ID NO: 44160 - DNA, 80 bp, synthetic construct
  source 1..80: mol_type = other DNA
ttgcatccgggagagccccgcggagcctggcgacaggaactgctccagtcacggtcagcactgcggccatcagcaccagc

SEQ ID NO: 44161 - DNA, 80 bp, synthetic construct
  source 1..80: mol_type = other DNA
tttcagtcccctcttctggatctcagactgtgtcctggctttgactctttctgtcagttttgagctctgtctgggatgta

SEQ ID NO: 44162 - DNA, 80 bp, synthetic construct
  source 1..80: mol_type = other DNA
aacgtgatctcaacggacactactcctccacaaggcaagtatgctaacccatcctataggtgaggaaacagaggctcaga

SEQ ID NO: 44163 - DNA, 80 bp, synthetic construct
  source 1..80: mol_type = other DNA
tggcaataaatttaaaccgggagacagaatagcaaatgcacaggaacttcacaaatacaaacacacgtaagggaatccaa

SEQ ID NO: 44164 - DNA, 80 bp, synthetic construct
  source 1..80: mol_type = other DNA
acaaggaggaactggtccctgttgcctggggtcagccacggtttccagagctcaagttttttcctgccacagcaaccgtt

SEQ ID NO: 44165 - DNA, 80 bp, synthetic construct
  source 1..80: mol_type = other DNA
cggccagcccaatggacgacaggagctgctttcggcagccaatggcgtggaggtttccgtgctgccagagggggcggggt

SEQ ID NO: 44166 - DNA, 80 bp, synthetic construct; identical to SEQ ID NO: 14910
  source 1..80: mol_type = other DNA

SEQ ID NO: 44167 - DNA, 80 bp, synthetic construct; identical to SEQ ID NO: 14911
  source 1..80: mol_type = other DNA

SEQ ID NO: 44168 - DNA, 80 bp, synthetic construct
  source 1..80: mol_type = other DNA
ctgggcgtccgcgatgccccgggccacgtggcggagccgagcgcaggactgcggggacgagagggcgttagagcgggccg

SEQ ID NO: 44169 - DNA, 80 bp, synthetic construct
  source 1..80: mol_type = other DNA
ctctgcacagtctgggattcctggacgtggatgggtactggcagcgcacggtcgtgcctgtcgtgtactgaaccagggag

SEQ ID NO: 44170 - DNA, 80 bp, synthetic construct
  source 1..80: mol_type = other DNA
ggcgctgacataggagaggcgcctgctgggcgctaggacgcaggaccccttgggacaggaacgggtgtatgggaacccgg

SEQ ID NO: 44171 - DNA, 80 bp, synthetic construct; identical to SEQ ID NO: 14912
  source 1..80: mol_type = other DNA

SEQ ID NO: 44172 - DNA, 80 bp, synthetic construct
  source 1..80: mol_type = other DNA
caccctctgtgcctcgtgctgcagcaggtgctgccgtccactgtcccctgggaggcgtccagagccgtctccacctgggc

SEQ ID NO: 44173 - DNA, 80 bp, synthetic construct
  source 1..80: mol_type = other DNA
tctcctcaggataattatttattattcatagtcatcagcatcttcattaattattcatatgatccttaattattatcctt

SEQ ID NO: 44174 - DNA, 80 bp, synthetic construct
  source 1..80: mol_type = other DNA
ggggactgcaggagaagatggtcccaagggctgggggaggagctgtgctttcgagttcctctccccttccacggtcaggg

SEQ ID NO: 44175 - DNA, 80 bp, synthetic construct
  source 1..80: mol_type = other DNA
ctgggaggtgagggcccccagctggcccggtagggagaggcgtcgtgtggggccttcttggggaagctctggggcccccg

SEQ ID NO: 44176 - DNA, 80 bp, synthetic construct
  source 1..80: mol_type = other DNA
aggatggacgggaggacaggagggccaagaggagagtcaggtgggcagagaagctggaggggacaagagccaaggcagcg

SEQ ID NO: 44177 - DNA, 80 bp, synthetic construct; identical to SEQ ID NO: 14913
  source 1..80: mol_type = other DNA

SEQ ID NO: 44178 - DNA, 80 bp, synthetic construct
  source 1..80: mol_type = other DNA
tgtctgcaaacaggagcaggcagcatatgggaggggggagcggatgccaagggaagtggggagggagcagatcccaggcc

SEQ ID NO: 44179 - DNA, 80 bp, synthetic construct
  source 1..80: mol_type = other DNA
ccctggaggcttggcctctgcaccctgggaaatgccaagcaccctcaagatgaccctgtgacagccactgccaagggcaa

SEQ ID NO: 44180 - DNA, 80 bp, synthetic construct
  source 1..80: mol_type = other DNA
gctcttcaggcgatgctccggggcctggcggtggaggctgtggacactaggggagtgaagctgcgggccacttagcctac

SEQ ID NO: 44181 - DNA, 80 bp, synthetic construct
  source 1..80: mol_type = other DNA
gcagcaaagcaggtttgggctggaatcggggaacaagcgggtcacggtacatcgaggaagcagggctggagcttacctga

SEQ ID NO: 44182 - DNA, 80 bp, synthetic construct; identical to SEQ ID NO: 14915
  source 1..80: mol_type = other DNA

SEQ ID NO: 44183 - DNA, 80 bp, synthetic construct
  source 1..80: mol_type = other DNA
gaccagactccagggcgtgcccccccaccccacctgcactccctcacctgttgagctggcgctggagggcatccagcctg

SEQ ID NO: 44184 - DNA, 80 bp, synthetic construct
  source 1..80: mol_type = other DNA
ccagagagcagagctgggtgagcggggtagacgcaccaccgctgccacgcccggtcctccctcgcccgcccgtcgcccgg

SEQ ID NO: 44185 - DNA, 80 bp, synthetic construct
  source 1..80: mol_type = other DNA
ctggaggggccactggacgggctctccccccacggcccccccggccggccccggctactcggccctgcccccgcccggcc

SEQ ID NO: 44186 - DNA, 80 bp, synthetic construct; identical to SEQ ID NO: 14916
  source 1..80: mol_type = other DNA

SEQ ID NO: 44187 - DNA, 80 bp, synthetic construct
  source 1..80: mol_type = other DNA
agagggcttcctggaggaggtgacagctgcaggggccctgaaagatgggcagcatctggacagctggggtgtggagtggg

SEQ ID NO: 44188 - DNA, 80 bp, synthetic construct
  source 1..80: mol_type = other DNA
gcgttgccgactgaagccaccctctaactccgtactgccgggggagcccgggatcatgttggtctggaaccaaaatcagt

SEQ ID NO: 44189 - DNA, 80 bp, synthetic construct
  source 1..80: mol_type = other DNA
tgattttgccccaggcaaagactgagtttgggacttttgtaggctgctctatgataccatttgacagacagggaaactga

SEQ ID NO: 44190 - DNA, 80 bp, synthetic construct; identical to SEQ ID NO: 14917
  source 1..80: mol_type = other DNA

SEQ ID NO: 44191 - DNA, 80 bp, synthetic construct
  source 1..80: mol_type = other DNA
gcatccccaccccgggcagagcatgtcccctcagctgggtcgcctgccagccggcccccaacccacacaaccggggaagc

SEQ ID NO: 44192 - DNA, 80 bp, synthetic construct
  source 1..80: mol_type = other DNA
caaacaccctcttagccaatcactgcacccttataagcaatgttcttcaaaccaaagatcagaacacagtagtgaatcaa

SEQ ID NO: 44193 - DNA, 80 bp, synthetic construct
  source 1..80: mol_type = other DNA
gtgtttgtacagagctgagaaacaaagtctaaaatgtcctaccatcaactatggtcgaaagagcttgctatatctgccct

SEQ ID NO: 44194 - DNA, 80 bp, synthetic construct; identical to SEQ ID NO: 14918
  source 1..80: mol_type = other DNA

SEQ ID NO: 44195 - DNA, 80 bp, synthetic construct
  source 1..80: mol_type = other DNA
gaggatctagatttgatcctactttaaggaagcaaaaagtgtctgtttgtggcggatcctgaagggaaggagaatgtggg

SEQ ID NO: 44196 - DNA, 80 bp, synthetic construct
  source 1..80: mol_type = other DNA
cccatacccaggatggccacgacgacgtcgccccgcaggatctcgatggagccccgggagatgaagtacagggcggtgag

SEQ ID NO: 44197 - DNA, 80 bp, synthetic construct
  source 1..80: mol_type = other DNA
tcagggaagcccttcagcacctgggggcagggtgggggcagctcagcacaccctcccttgggaccccccaacccacactc

SEQ ID NO: 44198 - DNA, 80 bp, synthetic construct; identical to SEQ ID NO: 14919
  source 1..80: mol_type = other DNA

SEQ ID NO: 44199 - DNA, 80 bp, synthetic construct
  source 1..80: mol_type = other DNA
cccagcctgccacccactggccacgctctggtggcctcaccgcgttcatgtcgatgccgttggtgtaggaccaggcgtgc

SEQ ID NO: 44200 - DNA, 80 bp, synthetic construct
  source 1..80: mol_type = other DNA
ctgggggcgtgggcacgtggggccgtcagcctctgcagggaccccacccacccacagggaccctgctcaggccccgcacc

SEQ ID NO: 44201 - DNA, 80 bp, synthetic construct
  source 1..80: mol_type = other DNA
tctggcccggctagcagcctcagtttcctccaacttgggttcctccaccgtgggctctccccgccgcccgcccctgggca

SEQ ID NO: 44202 - DNA, 80 bp, synthetic construct; identical to SEQ ID NO: 14920
  source 1..80: mol_type = other DNA

SEQ ID NO: 44203 - DNA, 80 bp, synthetic construct
  source 1..80: mol_type = other DNA
ggacagggaaggggcacattccgttgatggggcaaggggggcaagggaggaggggaggtgctgcggccctcagagcgagc

SEQ ID NO: 44204 - DNA, 80 bp, synthetic construct
  source 1..80: mol_type = other DNA
gatcaccctagggtgcctgcccactcccaccagcttctagggcactttggtgacgctacaaaataatggccccttgggat

SEQ ID NO: 44205 - DNA, 80 bp, synthetic construct
  source 1..80: mol_type = other DNA
tctctttttctctgtcctcctcgccaccccctccaccccactacctcccaccacattcctggcctctcctctccctacac

SEQ ID NO: 44206 - DNA, 80 bp, synthetic construct
  source 1..80: mol_type = other DNA
gtggtgcggaagttgatgaggatgtccacaatgaacatgatgtccacgatgaggtccaccacagccagcggctggcaggc

SEQ ID NO: 44207 - DNA, 80 bp, synthetic construct; identical to SEQ ID NO: 14921
  source 1..80: mol_type = other DNA

SEQ ID NO: 44208 - DNA, 80 bp, synthetic construct
  source 1..80: mol_type = other DNA
caaaatgccacacagcacaggactggctccaaacagttccaacatttcccggcagacgtggattcaggccactcggcagg

SEQ ID NO: 44209 - DNA, 80 bp, synthetic construct
  source 1..80: mol_type = other DNA
atagccccaatccactgactggtagtcactgcagttcttaccagcccctcttcatgccacaggcccgaggacaccaggca

SEQ ID NO: 44210 - DNA, 80 bp, synthetic construct; identical to SEQ ID NO: 14922
  source 1..80: mol_type = other DNA

SEQ ID NO: 44211 - DNA, 80 bp, synthetic construct
  source 1..80: mol_type = other DNA
gcatgcagctcaacccaaaagccccctccccaagctctccctgccatccctgggcagccagctgaacccaaggccttgcc

SEQ ID NO: 44212 - DNA, 80 bp, synthetic construct
  source 1..80: mol_type = other DNA
ggcgctgctgggagaacatctccttagaggaaataactagaagtcaagacgggtcatagtcaaagatttgaccaccctgg

SEQ ID NO: 44213 - DNA, 80 bp, synthetic construct
  source 1..80: mol_type = other DNA
gtggcccttcagtgatcaagtggggactgaaaaaaaaaaaagaaaacactggccaggcccctgctgataagggggcagaa

SEQ ID NO: 44214 - DNA, 80 bp, synthetic construct
  source 1..80: mol_type = other DNA
cacacctgacaggggccagtcccagctctgcagccaccagctcacctatggccttgggccaggtctgtccccccagcctg

SEQ ID NO: 44215 - DNA, 80 bp, synthetic construct; identical to SEQ ID NO: 14923
  source 1..80: mol_type = other DNA

SEQ ID NO: 44216 - DNA, 80 bp, synthetic construct
  source 1..80: mol_type = other DNA
cctttgcccacagggtccaaccccagcacacagagcaaaggagccccggcgcctccatgccaggcccagctgtcgcctgc

SEQ ID NO: 44217 - DNA, 80 bp, synthetic construct
  source 1..80: mol_type = other DNA
aaactctgtaagcccagcctgggagggaatgagaacaggagccaggcgcgggtgagcagggccaggccccacggctccca

SEQ ID NO: 44218 - DNA, 80 bp, synthetic construct; identical to SEQ ID NO: 14924
  source 1..80: mol_type = other DNA

SEQ ID NO: 44219 - DNA, 80 bp, synthetic construct
  source 1..80: mol_type = other DNA
tcaccctggcagtaagcgtgggcagcagcctgcctggctcgagctgcccatggccccgtggcgtgggccctgctgccagg

SEQ ID NO: 44220 - DNA, 80 bp, synthetic construct
  source 1..80: mol_type = other DNA
gcccaggctcctgcagcggcgctcccgcagcctgagcccctccccctccgccagcagccgggcctgtcaccgcagattaa

SEQ ID NO: 44221 - DNA, 80 bp, synthetic construct
  source 1..80: mol_type = other DNA
catgcagcgggcacaggagcagggcagatgccaggggctcaggtgggaaccaagagagaagcaagggaggaggaagagag

SEQ ID NO: 44222 - DNA, 80 bp, synthetic construct
  source 1..80: mol_type = other DNA
cagctgctgtggaaggggcaggagggaacagcttgggacaggagtcctccacattatcccaggcttctcactcactgcag

SEQ ID NO: 44223 - DNA, 80 bp, synthetic construct; identical to SEQ ID NO: 14925
  source 1..80: mol_type = other DNA

SEQ ID NO: 44224 - DNA, 80 bp, synthetic construct
  source 1..80: mol_type = other DNA
cccagttggcttggcccctagtacttccttcacacaccctgcagccagacctttcatgtccctcaggccgccttcccccc

SEQ ID NO: 44225 - DNA, 80 bp, synthetic construct
  source 1..80: mol_type = other DNA
cccccatcgcagctctggaatagattgccaaccccaaccctcaggtctgcctccctccaagaggccctcactggctagcc

SEQ ID NO: 44226 - DNA, 80 bp, synthetic construct; identical to SEQ ID NO: 14926
  source 1..80: mol_type = other DNA

SEQ ID NO: 44227 - DNA, 80 bp, synthetic construct
  source 1..80: mol_type = other DNA
ggagtccatggggtcagctcaagagaccaggggagtcacaagaaacaagagaggtcagacccctgtcccactctaaggaa

SEQ ID NO: 44228 - DNA, 80 bp, synthetic construct
  source 1..80: mol_type = other DNA
caccagggctctgggagtggaagaatgtaatgggatgaatggacatttaatagcgcaacaagccacttaatggaattaaa

SEQ ID NO: 44229 - DNA, 80 bp, synthetic construct
  source 1..80: mol_type = other DNA
ggacatttaatagcgcaacaagccacttaatggaattaaataagtgcttaatgggatttccatctcccaggcacccagga

SEQ ID NO: 44230 - DNA, 80 bp, synthetic construct
  source 1..80: mol_type = other DNA
gccgacgaggcgcggcgcacgctggcgcagctttctcgggagcgcgtccgggccaggctgcagctggagcccgaggcgtc

SEQ ID NO: 44231 - DNA, 80 bp, synthetic construct
  source 1..80: mol_type = other DNA
ccggggcgcccgcgccgcccgcgccgcccgaccgcaccgacgactcccgggccgtcagcgccagcagcgcgggcagcttc

SEQ ID NO: 44232 - DNA, 80 bp, synthetic construct
  source 1..80: mol_type = other DNA
tattttgacctcgagtctcaaaaatcattctagaatccagtcatcataaaccgccatatctgaagtgacacttcagggcg

SEQ ID NO: 44233 - DNA, 80 bp, synthetic construct
  source 1..80: mol_type = other DNA
cagttttactgacactgtcattttagagtgtaagaaaccaagaggtgagcacttttgtcatgatgctgagggaaagatta

SEQ ID NO: 44234 - DNA, 80 bp, synthetic construct
  source 1..80: mol_type = other DNA
aggaaacttggccagtccatgaacaaggagcagatgaaagaaactacacacagctgagtccataggacacagcttcctac

SEQ ID NO: 44235 - DNA, 80 bp, synthetic construct; identical to SEQ ID NO: 14927
  source 1..80: mol_type = other DNA

SEQ ID NO: 44236 - DNA, 80 bp, synthetic construct
  source 1..80: mol_type = other DNA
cggtggttggtgtcatgagccggggaccccaccatgtccttctccatcaccacctcgaaattgaggatgaacatgatgac

SEQ ID NO: 44237 - DNA, 80 bp, synthetic construct
  source 1..80: mol_type = other DNA
ccttggcacccactcagtgggcagagcagaaagccacgcaggatggaccctggaacccaagtgggcccgtccacttctgc

SEQ ID NO: 44238 - DNA, 80 bp, synthetic construct
  source 1..80: mol_type = other DNA
ctacccctctctctgcctatatgatttatctagctctttcccggctgcactttttctcacgctggctatgatcctttctt

SEQ ID NO: 44239 - DNA, 80 bp, synthetic construct; identical to SEQ ID NO: 14928
  source 1..80: mol_type = other DNA

SEQ ID NO: 44240 - DNA, 80 bp, synthetic construct
  source 1..80: mol_type = other DNA
aatgtatataattcttttctcatgagttataaagattaaccaagtcagcacatgctgagcgcttaggcaatgcctggcgt

SEQ ID NO: 44241 - DNA, 80 bp, synthetic construct
  source 1..80: mol_type = other DNA
actttacagcaatttggcatcaccacaaaatccacgcatgtgctcttgtatttcacagatgtaccagcctataacatatt

SEQ ID NO: 44242 - DNA, 80 bp, synthetic construct
  source 1..80: mol_type = other DNA
tgtccaccaaaggccctgtaccagatgaggtcagtcccctaagccaagcacccctggtctccctcagctccctgttgagc

SEQ ID NO: 44243 - DNA, 80 bp, synthetic construct
  source 1..80: mol_type = other DNA
gctccagctcctctatggccccccagggacccaccaggcaggctcctcatctcccactctccctagggagcctcttcctt

SEQ ID NO: 44244 - DNA, 80 bp, synthetic construct; identical to SEQ ID NO: 14929
  source 1..80: mol_type = other DNA

SEQ ID NO: 44245 - DNA, 80 bp, synthetic construct
  source 1..80: mol_type = other DNA
tagagacagggttttcactgtgttggccaggctggtctcaaactcctggcctcaagtgatctgcctgcctcggcctccca

SEQ ID NO: 44246 - DNA, 80 bp, synthetic construct
  source 1..80: mol_type = other DNA
gcaacctggaggcgacgccacccctgggacttggagctggtgcttgaagcctgacagtgaggtcaaggggctgcgtgctg

SEQ ID NO: 44247 - DNA, 80 bp, synthetic construct
  source 1..80: mol_type = other DNA
ccgccccaccccacagctcttccactcaccacatcccagaccctcacagccccgcccgagggccctgagctctggggctc

SEQ ID NO: 44248 - DNA, 80 bp, synthetic construct; identical to SEQ ID NO: 14930
  source 1..80: mol_type = other DNA

SEQ ID NO: 44249 - DNA, 80 bp, synthetic construct
  source 1..80: mol_type = other DNA
gacctcagcagcccgtcccctcttcagctcaagctgctcagcaagacagcccagaatggcattctgaagcccacccagtc

SEQ ID NO: 44250 - DNA, 80 bp, synthetic construct
  source 1..80: mol_type = other DNA
cgagattcaagaaatttttcctttcaaaataaccctgtcaaaggcctggttattcaaaaaatgtgaactggagccctgcc

SEQ ID NO: 44251 - DNA, 80 bp, synthetic construct; identical to SEQ ID NO: 14931
  source 1..80: mol_type = other DNA

SEQ ID NO: 44252 - DNA, 80 bp, synthetic construct
  source 1..80: mol_type = other DNA
acagcccacactcccgaggcagccagcactgggcgcactcagggggcagccaggacagacaaggagggcggagggggtgc

SEQ ID NO: 44253 - DNA, 80 bp, synthetic construct
  source 1..80: mol_type = other DNA
ggccgtaggggtgaaatggcctaagatatgtgaagctcagagcctggcttgaggtcaccataagcttgagacagaagaga

SEQ ID NO: 44254 - DNA, 80 bp, synthetic construct
  source 1..80: mol_type = other DNA
ccttactttgggtgagaaggttctccctgcctggcccagttctgcttcctgggccctctgaaaggggaggcacccatgga

SEQ ID NO: 44255 - DNA, 80 bp, synthetic construct; identical to SEQ ID NO: 14932
  source 1..80: mol_type = other DNA

SEQ ID NO: 44256 - DNA, 80 bp, synthetic construct
  source 1..80: mol_type = other DNA
aggccttatctcccatgtcagcaccaggtggggaggaagaggctgcagatggccctgagtgaccttaggcaccttctggg

SEQ ID NO: 44257 - DNA, 80 bp, synthetic construct
  source 1..80: mol_type = other DNA
gtgaccaacaagacacgcctggcacctgcccccagtgaaccacccatccaacaggaccccagtttgatgcatgggcaaga

SEQ ID NO: 44258 - DNA, 80 bp, synthetic construct
  source 1..80: mol_type = other DNA
agtgattcctgcactgggtgccagatgagatgacagatggctttgtggaagcatccagaattctaacaaggcggggtgct

SEQ ID NO: 44259 - DNA, 80 bp, synthetic construct
  source 1..80: mol_type = other DNA
gaggctgtctccggagcagcagcccagggctgtgcagtgtcaggttatatttagcctggtggcggcgacaggaagatgca

SEQ ID NO: 44260 - DNA, 80 bp, synthetic construct; identical to SEQ ID NO: 14933
  source 1..80: mol_type = other DNA

SEQ ID NO: 44261 - DNA, 80 bp, synthetic construct
  source 1..80: mol_type = other DNA
ccatgggatcatttatagggtcttgggggccgctgtagtcatctagacccacccaaatccactgcatgtggcatgcctga

SEQ ID NO: 44262 - DNA, 80 bp, synthetic construct
  source 1..80: mol_type = other DNA
gctgatgccaggaagcagctctccacagctccctgcacaggcgcgtgagtcccgggcagttgcgccccagcttcagccct

SEQ ID NO: 44263 - DNA, 80 bp, synthetic construct
  source 1..80: mol_type = other DNA
tgtacactggccgggcttccccgtccatccgagtcagagccctgaggccagggcaggactggcagttgcagaagaactga

SEQ ID NO: 44264 - DNA, 80 bp, synthetic construct; identical to SEQ ID NO: 14934
  source 1..80: mol_type = other DNA

SEQ ID NO: 44265 - DNA, 80 bp, synthetic construct
  source 1..80: mol_type = other DNA
ggggacactctggggtctcctctagtgagtggcctgtaggcttctaggtctgtgctctgtcttggctcctagcatacccc

SEQ ID NO: 44266 - DNA, 80 bp, synthetic construct
  source 1..80: mol_type = other DNA
agtgctaatgaaaagcccccagaaagtcaggtggaacattcgagcatcaaaacatgtgacggtgatccaaacataaacag

SEQ ID NO: 44267 - DNA, 80 bp, synthetic construct
  source 1..80: mol_type = other DNA
ttaggaaacatagtcaaaaacaatacgtcttttacaatagcaacaaaaactcttaagtgtccaggaattgaccaagaagg

SEQ ID NO: 44268 - DNA, 80 bp, synthetic construct; identical to SEQ ID NO: 14935
  source 1..80: mol_type = other DNA

SEQ ID NO: 44269 - DNA, 80 bp, synthetic construct
  source 1..80: mol_type = other DNA
cccagctactcgggaggctgagacaggagaatcgcttgaacccaagaggcagaggctgcagtgagccgagatcatgccac

SEQ ID NO: 44270 - DNA, 80 bp, synthetic construct
  source 1..80: mol_type = other DNA
cggaaggctataggtttttgttaagctatatcaatgcaagagccagtaaataaatatttggaacagaacagagagcacag

SEQ ID NO: 44271 - DNA, 80 bp, synthetic construct
  source 1..80: mol_type = other DNA
aggatagattatagacctaactgagaacagcaaaacaattaagagaacagaagaaaatggagaccctctgcagcctgaga

SEQ ID NO: 44272 - DNA, 80 bp, synthetic construct; identical to SEQ ID NO: 14936
  source 1..80: mol_type = other DNA

SEQ ID NO: 44273 - DNA, 80 bp, synthetic construct
  source 1..80: mol_type = other DNA
aatcactgtcacctattagattggcaaaatttagaaaggtagataatgtcgagagtggccaagatatgcgggtatgggaa

SEQ ID NO: 44274 - DNA, 80 bp, synthetic construct
  source 1..80: mol_type = other DNA
tctcgagctctgagaaggagggtgatgacaggcatggcagtacttagttaagtgtccacatgtcccgcgatccagcaatt

SEQ ID NO: 44275 - DNA, 80 bp, synthetic construct
  source 1..80: mol_type = other DNA
cactgaatacgcacctacagactagatgtcgaacagcaacccagctggacttaaagcacattcccaagtaagaaaagcga

SEQ ID NO: 44276 - DNA, 80 bp, synthetic construct; identical to SEQ ID NO: 14937
  source 1..80: mol_type = other DNA

SEQ ID NO: 44277 - DNA, 80 bp, synthetic construct
  source 1..80: mol_type = other DNA
catttcccacgattgcaacagcacgggctaggagctgcagccacttaggtgacgccctgcttcatggcgaggagaatgag

SEQ ID NO: 44278 - DNA, 80 bp, synthetic construct
  source 1..80: mol_type = other DNA
gcccatcatgccccagaagggctctctgggggcaagagagctggtgcagtggcattccacgctgggcagggaggggacag

SEQ ID NO: 44279 - DNA, 80 bp, synthetic construct
  source 1..80: mol_type = other DNA
tttgcaaactacaaagtgcagtcacaacaatagaagtgccttgtgctgctggtcaggtggcatcacccccacctcagctg

SEQ ID NO: 44280 - DNA, 80 bp, synthetic construct
  source 1..80: mol_type = other DNA
ggaaactcctgccaagtcacctgactcccagggaaggctcctgcaacgcagcacactgcccaccccattcattcattcat

SEQ ID NO: 44281 - DNA, 80 bp, synthetic construct; identical to SEQ ID NO: 14938
  source 1..80: mol_type = other DNA

SEQ ID NO: 44282 - DNA, 80 bp, synthetic construct
  source 1..80: mol_type = other DNA
acactaaagggctaaatactttctgtctctatactgggagggggcaatgagagagaacgtgtttttaaggaaaaaggagc

SEQ ID NO: 44283 - DNA, 80 bp, synthetic construct
  source 1..80: mol_type = other DNA
ggggcaatgagagagaacgtgtttttaaggaaaaaggagcactctaaacgcagaagttctctaagggaggagtttcagga

SEQ ID NO: 44284 - DNA, 80 bp, synthetic construct
  source 1..80: mol_type = other DNA
aaggccaccatcaaactctgctcccatctcagacagctcttcgcaaatatttacatagctcctctccgggggctgcagaa

SEQ ID NO: 44285 - DNA, 80 bp, synthetic construct; identical to SEQ ID NO: 14939
  source 1..80: mol_type = other DNA

SEQ ID NO: 44286 - DNA, 80 bp, synthetic construct
  source 1..80: mol_type = other DNA
atagcttcagtgccacaggaaaagttctcctgtgtctaagccccatcctctgggatcgctctggtctgcctcctatctca

SEQ ID NO: 44287 - DNA, 80 bp, synthetic construct
  source 1..80: mol_type = other DNA
ggagaaggtgaggcgtggtggtgacaagagcagggcgtctgatttaaaggaatgggcacaggaagaaatgaagaaggcaa

SEQ ID NO: 44288 - DNA, 80 bp, synthetic construct
  source 1..80: mol_type = other DNA
gcactggggaggctgggttccaaggccggggacagaccgaagcccactgggcgtggggccacctctgaggccctgggcac

SEQ ID NO: 44289 - DNA, 80 bp, synthetic construct
  source 1..80: mol_type = other DNA
gtggagaagctaatagactcctctccagagacaccaccgtccccacccacgcacaagctcccggggacacagggacatgg

SEQ ID NO: 44290 - DNA, 80 bp, synthetic construct; identical to SEQ ID NO: 14940
  source 1..80: mol_type = other DNA

SEQ ID NO: 44291 - DNA, 80 bp, synthetic construct
  source 1..80: mol_type = other DNA
tgtggacccagccagcacctgctgcccggggtgcctccccagggccttgcggggatgttaccgccagccagcctcacacc

SEQ ID NO: 44292 - DNA, 80 bp, synthetic construct
  source 1..80: mol_type = other DNA
ctggctccaggccctgacactgcgcagagcaaggctagaggcaccaacacagcacagctgtccacggcggcgcctgccag

SEQ ID NO: 44293 - DNA, 80 bp, synthetic construct
  source 1..80: mol_type = other DNA
cagcccaagccaggtcccggggatcacaggagggactgagtgtttcaaggcagaagaagcggaggctgaggaaatctgtc

SEQ ID NO: 44294 - DNA, 80 bp, synthetic construct; identical to SEQ ID NO: 14941
  source 1..80: mol_type = other DNA

SEQ ID NO: 44295 - DNA, 80 bp, synthetic construct
  source 1..80: mol_type = other DNA
gctccacctaagagcactccacacataccacagccaaaggaaagagccctcagccgctgctgccaagaggccaaatcccc

SEQ ID NO: 44296 - DNA, 80 bp, synthetic construct
  source 1..80: mol_type = other DNA
gtgtataatttccagcattgtcttagacacaaacccaggacttatgggttcatattcttttcagtacacctgtggttggc

SEQ ID NO: 44297 - DNA, 80 bp, synthetic construct; identical to SEQ ID NO: 14942
  source 1..80: mol_type = other DNA

SEQ ID NO: 44298 - DNA, 80 bp, synthetic construct
  source 1..80: mol_type = other DNA
cccctctagtgccgtccagtgatgccacagactgtgcacgcctgcaaaagcacagcctggaggatgcaaagctttgcagg

SEQ ID NO: 44299 - DNA, 80 bp, synthetic construct
  source 1..80: mol_type = other DNA
ggctcacaagggttgagtcaatgcttatgggacacacgctaggaagcagcaaggtttgcacgcgttccagagccgcctct

SEQ ID NO: 44300 - DNA, 80 bp, synthetic construct
  source 1..80: mol_type = other DNA
gagtaaagacacctggcgcaggagagggtggcagggcggggcgctcgacagctgagacaaagggaactgaggttgcgggg

SEQ ID NO: 44301 - DNA, 80 bp, synthetic construct; identical to SEQ ID NO: 14943
  source 1..80: mol_type = other DNA

SEQ ID NO: 44302 - DNA, 80 bp, synthetic construct
  source 1..80: mol_type = other DNA
cgcgtcacacccccacagaaccctgcccgggctcggggcgttctccagccgcccccacacccccacacccccacgcaccc

SEQ ID NO: 44303 - DNA, 80 bp, synthetic construct
  source 1..80: mol_type = other DNA
cacctcggcccgcgagtagccgcacagctcgcagaagccgtcgttgcagtagatgacggcgcagttctccacccgagcgt

SEQ ID NO: 44304 - DNA, 80 bp, synthetic construct
  source 1..80: mol_type = other DNA
agggggcgaacgcagctgtgcgtgtgccccgatacaggtgcctggccggccgggccgcgcggcgcgccccctcctccgcc

SEQ ID NO: 44305 - DNA, 80 bp, synthetic construct; identical to SEQ ID NO: 14944
  source 1..80: mol_type = other DNA

SEQ ID NO: 44306 - DNA, 80 bp, synthetic construct
  source 1..80: mol_type = other DNA
ggaagttacacgttgaacacctaaggacgctgcatctcattaggtcctctgacaaccccataaggtaggtgttattatcc

SEQ ID NO: 44307 - DNA, 80 bp, synthetic construct
  source 1..80: mol_type = other DNA
agagagggacctgcagctccaaaccctggacacacctggagcctgggcggggcctgagactttggccccacttgtaggaa

SEQ ID NO: 44308 - DNA, 80 bp, synthetic construct
  source 1..80: mol_type = other DNA
agctttttataaacagaagtttccggccactttggcctgtaatgctggggctttcagtagcagttggaattctccccctc

SEQ ID NO: 44309 - DNA, 80 bp, synthetic construct; identical to SEQ ID NO: 14945
  source 1..80: mol_type = other DNA

SEQ ID NO: 44310 - DNA, 80 bp, synthetic construct
  source 1..80: mol_type = other DNA
tcgaaggcatgccccaccccaccacacacccttcactgagatcctggaatacagggatgggacagaaagcctgcccctcc

SEQ ID NO: 44311 - DNA, 80 bp, synthetic construct
  source 1..80: mol_type = other DNA
ctcagggaggccctcaaccagtgtcattgtctccaccccctcaggatcatcttgttcctccgcttcacacaatactgacc

SEQ ID NO: 44312 - DNA, 80 bp, synthetic construct
  source 1..80: mol_type = other DNA
ctgcccacccccaggacatttgcctaatctgggacccttctagaagcctccctaccaggcaggcattaggggtgctgtac

SEQ ID NO: 44313 - DNA, 80 bp, synthetic construct; identical to SEQ ID NO: 14946
  source 1..80: mol_type = other DNA

SEQ ID NO: 44314 - DNA, 80 bp, synthetic construct
  source 1..80: mol_type = other DNA
agagttggggacacctgcacactccatcccacatcccttccctgcacactcagcgtgtcacacacactccgatcccaaaa

SEQ ID NO: 44315 - DNA, 80 bp, synthetic construct
  source 1..80: mol_type = other DNA
cgcccccccatccacactcggaagagctcggcccgcccccagagccccctccccgctcagccccctcccccactcactct

SEQ ID NO: 44316 - DNA, 80 bp, synthetic construct
  source 1..80: mol_type = other DNA
gtggtccccgcaccccgcggccaagccgagcacgggcgcggccaagactggactgcgggcgccgggtcctcgctcggctc

SEQ ID NO: 44317 - DNA, 80 bp, synthetic construct
  source 1..80: mol_type = other DNA
ccgcctgccaccgcgccgacagccgctccagcgcccgcggctcgggcagcgcctgcggctcggcccggccgcggaagggt

SEQ ID NO: 44318 - DNA, 80 bp, synthetic construct
  source 1..80: mol_type = other DNA
ttttattatgcggccttatgttaatttggctaggagctgggttgtgtttaatgcttattgtagctataggtgccagagac

SEQ ID NO: 44319 - DNA, 80 bp, synthetic construct
  source 1..80: mol_type = other DNA
tgtttatacttttatgattaaatcttattcttttagtggcctgagcctctggactgtggccttcagaagtgtttcttagc

SEQ ID NO: 44320 - DNA, 80 bp, synthetic construct
  source 1..80: mol_type = other DNA
ctaggtatattttaaaatgattacttctttccatcccccagaaagaggaggagatttttcttggctctttactgtgagaa

SEQ ID NO: 44321 - DNA, 80 bp, synthetic construct; identical to SEQ ID NO: 14947
  source 1..80: mol_type = other DNA

SEQ ID NO: 44322 - DNA, 80 bp, synthetic construct
  source 1..80: mol_type = other DNA
ctggaagtcaatagtggctttggaaatggcagtttatttttctttcacactaatgtagccagcccagggcagatatggca

SEQ ID NO: 44323 - DNA, 80 bp, synthetic construct
  source 1..80: mol_type = other DNA
agacagtcttttaagacatccttttagtttaaggatacttcctagaagttgctcttgccacttttgcataaatccaggcc

SEQ ID NO: 44324 - DNA, 80 bp, synthetic construct
  source 1..80: mol_type = other DNA
attatgaaaggtgtctgtttcacaacacagcttaagaaaactctgctttacaaaattgctgtgagagttgtggtcacagc

SEQ ID NO: 44325 - DNA, 80 bp, synthetic construct
  source 1..80: mol_type = other DNA
tattgtaaatctccagctcattgctggacatggttgcagcatttttaaagagtaggcatcctgtgttttttgtcttatct

SEQ ID NO: 44326 - DNA, 80 bp, synthetic construct; identical to SEQ ID NO: 14948
  source 1..80: mol_type = other DNA

SEQ ID NO: 44327 - DNA, 80 bp, synthetic construct
  source 1..80: mol_type = other DNA
tacccagaggctattaatataacatgggagaagcagacccagaagtttccccatcccatagagatttctgaggatgtcat

SEQ ID NO: 44328 - DNA, 80 bp, synthetic construct
  source 1..80: mol_type = other DNA
cggcacagtctttctggtaagggtctttctggacatttcttctcttccttgccttgagggactataacataagacttatt

SEQ ID NO: 44329 - DNA, 80 bp, synthetic construct
  source 1..80: mol_type = other DNA
tgactgtagtcatcaggtggagcagggctatttgtcagctcatggcagcttcagggttttggatggtccatatggcttga

SEQ ID NO: 44330 - DNA, 80 bp, synthetic construct; identical to SEQ ID NO: 14949
  source 1..80: mol_type = other DNA

SEQ ID NO: 44331 - DNA, 80 bp, synthetic construct
  source 1..80: mol_type = other DNA
ttctctatgttggtcagactggtctcgaactcctgacctcaggtgatccgcccgcctcagcctcccaaagtgctgggatt

SEQ ID NO: 44332 - DNA, 80 bp, synthetic construct
  source 1..80: mol_type = other DNA
ggctggggctttttgagctcatatgccttggtcatagctctggtcttgggtgtgggtggctctgctggtaaaatgcatct

SEQ ID NO: 44333 - DNA, 80 bp, synthetic construct
  source 1..80: mol_type = other DNA
gggagggtatgtgtgtccatggggagtatgaaatggaaatataccttgcatgtatggtacgaggggttgtctatgtggta

SEQ ID NO: 44334 - DNA, 80 bp, synthetic construct
  source 1..80: mol_type = other DNA
atgtatggaggtgtatgtgataggaatggagatgctgagacatgtggcagagggctggtggttaaatctctgacaaggag

SEQ ID NO: 44335 - DNA, 80 bp, synthetic construct; identical to SEQ ID NO: 14950
  source 1..80: mol_type = other DNA

SEQ ID NO: 44336 - DNA, 80 bp, synthetic construct
  source 1..80: mol_type = other DNA
acctctgtatggtggtttgtgactctggggtgatgtgttgtaaagcctccctctctttctccatactaaacaagtattat

SEQ ID NO: 44337 - DNA, 80 bp, synthetic construct
  source 1..80: mol_type = other DNA
agaaactatggcttagagaggggaattcctcatattttatctgatcaataactgaccaccagatctcactagtttgacta

SEQ ID NO: 44338 - DNA, 80 bp, synthetic construct; identical to SEQ ID NO: 14951
  source 1..80: mol_type = other DNA

SEQ ID NO: 44339 - DNA, 80 bp, synthetic construct
  source 1..80: mol_type = other DNA
tgtttcttgtggtatttgtgactgttgtcatatttcttgcctttctctggttctgatattcaggtgctattgagagagga

SEQ ID NO: 44340 - DNA, 80 bp, synthetic construct
  source 1..80: mol_type = other DNA
taaaacatgcccacagccacatacattaaaacaaggctacacaggagacttgcctagacatgctcacaatagaaaattcc

SEQ ID NO: 44341 - DNA, 80 bp, synthetic construct
  source 1..80: mol_type = other DNA
tctgcagtggagtgctttcttcttttgcttattaaactttcacttcaacttcatctttggggtccgcgctccttaatttt

SEQ ID NO: 44342 - DNA, 80 bp, synthetic construct; identical to SEQ ID NO: 14952
  source 1..80: mol_type = other DNA

SEQ ID NO: 44343 - DNA, 80 bp, synthetic construct
  source 1..80: mol_type = other DNA
aactccagcccccgacagcccgtcagaatgttggcaccaggacttccagacttttctattgcattttcttccttgctttt

SEQ ID NO: 44344 - DNA, 80 bp, synthetic construct
  source 1..80: mol_type = other DNA
cttcaagatttcagcctaaattttcacttagggcctttttgtcccccagtgatagacattcatggcactctataggggga

SEQ ID NO: 44345 - DNA, 80 bp, synthetic construct
  source 1..80: mol_type = other DNA
ctccctttctgacctctgcttggaaagaatttgtagtcagagttttttcctaacatttcaaaccctatagtgctacctag

SEQ ID NO: 44346 - DNA, 80 bp, synthetic construct; identical to SEQ ID NO: 14953
  source 1..80: mol_type = other DNA

SEQ ID NO: 44347 - DNA, 80 bp, synthetic construct
  source 1..80: mol_type = other DNA
cccaatccaactactgcacaatctctcccatggttctagggaatctcaggagccttatgggccaagtaggtctaggaaac

SEQ ID NO: 44348 - DNA, 80 bp, synthetic construct
  source 1..80: mol_type = other DNA
ttttctctctgctgtcgatcactccagaaggacaaaggagactaagggatgccttttctctcctctttttctagatatgt

SEQ ID NO: 44349 - DNA, 80 bp, synthetic construct
  source 1..80: mol_type = other DNA
gtgttaatattaatactattcaacaactagatgttttctgcagacaggagggcaaatggtccgaggttccttatgtgcaa

SEQ ID NO: 44350 - DNA, 80 bp, synthetic construct; identical to SEQ ID NO: 14954
  source 1..80: mol_type = other DNA

SEQ ID NO: 44351 - DNA, 80 bp, synthetic construct
  source 1..80: mol_type = other DNA
ccactagggtccaagttcccttttcattacaggaccttgggcaaataagaggggacctgggcaagttctctgatgacctg

SEQ ID NO: 44352 - DNA, 80 bp, synthetic construct
  source 1..80: mol_type = other DNA
ataaggaaagaaggtgagaaacaaccagcattcacatacccaataggaagcgaggcagtgccccttgaacaacataattc

SEQ ID NO: 44353 - DNA, 80 bp, synthetic construct
  source 1..80: mol_type = other DNA
agagaggctgtagtgaaacacacttccttgtctcctgttaggtatgtttatacctcacataaataattcaattgagggac

SEQ ID NO: 44354 - DNA, 80 bp, synthetic construct; identical to SEQ ID NO: 14955
  source 1..80: mol_type = other DNA

SEQ ID NO: 44355 - DNA, 80 bp, synthetic construct
  source 1..80: mol_type = other DNA
gcaggactgatgggtcctggggctcaactccctggctccagtggctcagactgctgttactacccgggagcaccaggtga

SEQ ID NO: 44356 - DNA, 80 bp, synthetic construct
  source 1..80: mol_type = other DNA
aaagactttaacttgatatttttctcaacctattagttgcagtcagagggacctactgtttacacaggcctttttagtca

SEQ ID NO: 44357 - DNA, 80 bp, synthetic construct
  source 1..80: mol_type = other DNA
ctataccagtctggatccacctcaaggatcccactttttttcctaaccagagacaataccctctgaagccagaaagtaga

SEQ ID NO: 44358 - DNA, 80 bp, synthetic construct; identical to SEQ ID NO: 14956
  source 1..80: mol_type = other DNA

SEQ ID NO: 44359 - DNA, 80 bp, synthetic construct
  source 1..80: mol_type = other DNA
ccccacctatttgggcaagtattgtcaagagatctcttcgaattcttccattctcaggttaaagttttacaatatgtaga

SEQ ID NO: 44360 - DNA, 80 bp, synthetic construct
  source 1..80: mol_type = other DNA
gatataaggcttcaaaatctaaggctcagctctatcagactttggtaaagtacctaggtctggtcttgtcagaagggaac

SEQ ID NO: 44361 - DNA, 80 bp, synthetic construct
  source 1..80: mol_type = other DNA
ttcaagtggctaaaactcacttcctgacctgggaacctgaaggtcaaaaggccattaatcagttaaaacaagccttgctt

SEQ ID NO: 44362 - DNA, 80 bp, synthetic construct
  source 1..80: mol_type = other DNA
atctttatgtatcataaaggaaaggaatgaccctgggagttttaattcaagttcaaggcccagctcaacagccagtaggt

SEQ ID NO: 44363 - DNA, 80 bp, synthetic construct
  source 1..80: mol_type = other DNA
aagcgagtctctggctaacagacagctgcctcctcaagtatcagactttgctgctagaggaatctgcagtccagttaaaa

SEQ ID NO: 44364 - DNA, 80 bp, synthetic construct; identical to SEQ ID NO: 14957
  source 1..80: mol_type = other DNA

SEQ ID NO: 44365 - DNA, 80 bp, synthetic construct
  source 1..80: mol_type = other DNA
gtcttgcattaaataccatcaagacatcaacaggctattatcctcagtgttcctcccatgagaattagtggtcagacatt

SEQ ID NO: 44366 - DNA, 80 bp, synthetic construct
  source 1..80: mol_type = other DNA
tacagagatagaatgggccacctctcgaggtatacttttcaaccctcaggatggttacaatcagaagattgcaaagtacg

SEQ ID NO: 44367 - DNA, 80 bp, synthetic construct
  source 1..80: mol_type = other DNA
aatccctttaacagatgacttcttccccaccacaatcaaaggatgggaagttactcaggggaggactggcagatagactt

SEQ ID NO: 44368 - DNA, 80 bp, synthetic construct; identical to SEQ ID NO: 14958
  source 1..80: mol_type = other DNA

SEQ ID NO: 44369 - DNA, 80 bp, synthetic construct
  source 1..80: mol_type = other DNA
tacctttagccattaaagacttgtcaggcataaatggaacatggtatgggaacactttcaactgagtaactaactcctcc

SEQ ID NO: 44370 - DNA, 80 bp, synthetic construct
  source 1..80: mol_type = other DNA
ccatacttgtaattgctgaaagctcggaagtttggagaaaaagacataagaaggatgatctaagaaaattggaagccata

SEQ ID NO: 44371 - DNA, 80 bp, synthetic construct
  source 1..80: mol_type = other DNA
atgatgcttagtagtagtggcctacaaatctgtgggtgaacagaacaggagacttctggactgacagcccctgtcacaag

SEQ ID NO: 44372 - DNA, 80 bp, synthetic construct
  source 1..80: mol_type = other DNA
tatggtgaaaccccgtctgtactaataatacaaaaaaaaaaaaaaaaaaagccaggcgtggtggtgcatgcctgtagtcc

SEQ ID NO: 44373 - DNA, 80 bp, synthetic construct; identical to SEQ ID NO: 14959
  source 1..80: mol_type = other DNA

SEQ ID NO: 44374 - DNA, 80 bp, synthetic construct
  source 1..80: mol_type = other DNA
ggctacacttaatcctccctaggcactggaagggaacctgcactatcgtggcagtggttcctgacctgttatctttaaat

SEQ ID NO: 44375 - DNA, 80 bp, synthetic construct
  source 1..80: mol_type = other DNA
ttaactgaaagagaagattgggtaggacctgcacatgacaatcctatctcagaaaaaccatggataggggattctatagt

SEQ ID NO: 44376 - DNA, 80 bp, synthetic construct; identical to SEQ ID NO: 14960
  source 1..80: mol_type = other DNA

SEQ ID NO: 44377 - DNA, 80 bp, synthetic construct
  source 1..80: mol_type = other DNA
ttctttgtggaactggttagctcctttattaggcccccttttgctcgtgtgttttgtactaatgtttggactttgtatat

SEQ ID NO: 44378 - DNA, 80 bp, synthetic construct
  source 1..80: mol_type = other DNA
agcaggaagcagccaggagtggtcatcgtccactttccccaacagcagttggggtctccactcctgaagcagggaatgag

SEQ ID NO: 44379 - DNA, 80 bp, synthetic construct
  source 1..80: mol_type = other DNA
gggaggcttgccttagacatgtccacagctgcctaggtaagaaagactacacaggagacttgcccagagatgcccacaat

SEQ ID NO: 44380 - DNA, 80 bp, synthetic construct; identical to SEQ ID NO: 14961
  source 1..80: mol_type = other DNA

SEQ ID NO: 44381 - DNA, 80 bp, synthetic construct
  source 1..80: mol_type = other DNA
catcagcaatgatgcttatggaaaaagaaaacaaaccctttatgatcagctggatcctttagttgtttgcaaagatgact

SEQ ID NO: 44382 - DNA, 80 bp, synthetic construct
  source 1..80: mol_type = other DNA
tcgtgtgcttctaatggtgctgggagaagaacaggtcgagactagcctgctggaggatgagagatgctggctaccacatc

SEQ ID NO: 44383 - DNA, 80 bp, synthetic construct
  source 1..80: mol_type = other DNA
ttttttaaagccactgttttatactggctttgttacacagcataagctaagtgctacaactcctcaggaagctgagcttt

SEQ ID NO: 44384 - DNA, 80 bp, synthetic construct; identical to SEQ ID NO: 14962
  source 1..80: mol_type = other DNA

SEQ ID NO: 44385 - DNA, 80 bp, synthetic construct
  source 1..80: mol_type = other DNA
tgagcacttccagtaaattggggtgtctagatggtgccacagtgagtgagggtgtgggtgtgagcatgccctacagccag

SEQ ID NO: 44386 - DNA, 80 bp, synthetic construct
  source 1..80: mol_type = other DNA
ccagagtgcagtggcacaatcttggcttactgcaacctccacctcctgggctcaagcgatactcccacctcagtttcctg

SEQ ID NO: 44387 - DNA, 80 bp, synthetic construct
  source 1..80: mol_type = other DNA
gagccactgtgcctggcctagtattggtcattagtattagtaatcattcctaaatgtatatgtaaacatttatttcagtg

SEQ ID NO: 44388 - DNA, 80 bp, synthetic construct; identical to SEQ ID NO: 14963
  source 1..80: mol_type = other DNA

SEQ ID NO: 44389 - DNA, 80 bp, synthetic construct
  source 1..80: mol_type = other DNA
tgagggaagtaacccatgcactgcttatttgagatggggaaccgaaggactttggcagttcctacacagagacagatggc

SEQ ID NO: 44390 - DNA, 80 bp, synthetic construct
  source 1..80: mol_type = other DNA
ggacacagtcagcatttaacaaaaaggaatctgcatctcagtcagaactgtattgcatttgcttctctctggattacctt

SEQ ID NO: 44391 - DNA, 80 bp, synthetic construct
  source 1..80: mol_type = other DNA
gcaaggaacaatattgtttcatgcaggggaggtgcatgactaacaaaagggttaactggatcctataagctatagacagc

SEQ ID NO: 44392 - DNA, 80 bp, synthetic construct
  source 1..80: mol_type = other DNA
actcctggacccagtttggccagtccaggcagcctgctcttcacatcactccagagttggacctgcccagagtggaacta

SEQ ID NO: 44393 - DNA, 80 bp, synthetic construct; identical to SEQ ID NO: 14964
  source 1..80: mol_type = other DNA

SEQ ID NO: 44394 - DNA, 80 bp, synthetic construct
  source 1..80: mol_type = other DNA
ggaggagctcaggtgaaggacagagcctcctgcccgtggagagaaagtgggccctggagaagctgcatgagtcctctcca

SEQ ID NO: 44395 - DNA, 80 bp, synthetic construct
  source 1..80: mol_type = other DNA
ccttccctctgaagctcaggactgaggcccaggacatgtctcacaccattgatatgagttggggacagatgggtggcaga

SEQ ID NO: 44396 - DNA, 80 bp, synthetic construct
  source 1..80: mol_type = other DNA
gacataatctaggctgtcacaaaacagccaagcctgctgccagtttccaatctgggatctcagggaggcccaggggcttg

SEQ ID NO: 44397 - DNA, 80 bp, synthetic construct; identical to SEQ ID NO: 14965
  source 1..80: mol_type = other DNA

SEQ ID NO: 44398 - DNA, 80 bp, synthetic construct
  source 1..80: mol_type = other DNA
cttatgtaacaaggccccagagagctccctcacaccttccaccatgtaagattacaggggaaagacaggcccttcagcag

SEQ ID NO: 44399 - DNA, 80 bp, synthetic construct
  source 1..80: mol_type = other DNA
taagacaccaccctttctgaccctgtgtcctcatctacaaactcaaagaagaacagtgcttctctcatagtcctgctggg

SEQ ID NO: 44400 - DNA, 80 bp, synthetic construct; identical to SEQ ID NO: 14966
  source 1..80: mol_type = other DNA

SEQ ID NO: 44401 - DNA, 80 bp, synthetic construct
  source 1..80: mol_type = other DNA
ggggtctccctcagagttggtggaaaacctaggaccagtggtcctgatttttctctgccgaagtaagtcttctctgtggc

SEQ ID NO: 44402 - DNA, 80 bp, synthetic construct
  source 1..80: mol_type = other DNA
ccaagctgagtcgcaagagccagcctcctaggatcctgggctgactctgagtagctttcaccccttcaccctcaaaacca

SEQ ID NO: 44403 - DNA, 80 bp, synthetic construct
  source 1..80: mol_type = other DNA
ggcctcacactgtagcaataaccctggctttttgtcctgtacgccatccatccgttattcattcattcatttgttcattc

SEQ ID NO: 44404 - DNA, 80 bp, synthetic construct; identical to SEQ ID NO: 14967
  source 1..80: mol_type = other DNA

SEQ ID NO: 44405 - DNA, 80 bp, synthetic construct
  source 1..80: mol_type = other DNA
tgaaatggctgctaagaagctagccttgacccagaggtgatggggaactaccgaaggtatttcatgatgagggtgggggg

SEQ ID NO: 44406 - DNA, 80 bp, synthetic construct
  source 1..80: mol_type = other DNA
aacatgaccaagggcaaaataaaagcaccgtctctctttaacacttgtttggccgtttcctcagcatgtagctgattcag

SEQ ID NO: 44407 - DNA, 80 bp, synthetic construct
  source 1..80: mol_type = other DNA
aggcagttggctcgagagttagtgctccaattactacactaatgcctatgacacctctatacctctccctgggcactcca

SEQ ID NO: 44408 - DNA, 80 bp, synthetic construct; identical to SEQ ID NO: 14968
  source 1..80: mol_type = other DNA

SEQ ID NO: 44409 - DNA, 80 bp, synthetic construct
  source 1..80: mol_type = other DNA
tcccacaccttttccagcaacccaaagatatccacccccaagccaccttctggacaaagtgagtggcagccactgttgtg

SEQ ID NO: 44410 - DNA, 80 bp, synthetic construct
  source 1..80: mol_type = other DNA
tggcatctcctcctccctgtgcctgagcggggctctacaaagccgagcctcctcaggtcaccttcccctgcttcctcccc

SEQ ID NO: 44411 - DNA, 80 bp, synthetic construct
  source 1..80: mol_type = other DNA
ggaccaagtagagctggggcctgaccacaggcacttcttggagccacagacgcaaagcagcagccctcggggattgttct

SEQ ID NO: 44412 - DNA, 80 bp, synthetic construct; identical to SEQ ID NO: 14969
  source 1..80: mol_type = other DNA

SEQ ID NO: 44413 - DNA, 80 bp, synthetic construct
  source 1..80: mol_type = other DNA
gcacgctgcgcttgcgcaggggcccgcgggctgaggcgagggtcagagcttccagtaggctgtggtcctcatcaagctgg

SEQ ID NO: 44414 - DNA, 80 bp, synthetic construct
  source 1..80: mol_type = other DNA
tggtttccaccacgccttccaggatgacgatgatctcgaggtcctggtggtggtgcaggtcgctgggtgccaggtcgtag

SEQ ID NO: 44415 - DNA, 80 bp, synthetic construct
  source 1..80: mol_type = other DNA
tggcgctgatgatcatgctcttgcggaggtcacccacacgtagcatgaagcagaggcggccgtggcgcagggcgatcacc

SEQ ID NO: 44416 - DNA, 80 bp, synthetic construct; identical to SEQ ID NO: 14970
  source 1..80: mol_type = other DNA

SEQ ID NO: 44417 - DNA, 80 bp, synthetic construct
  source 1..80: mol_type = other DNA
ggccctgctcccggatgttcttgtgggccacgttgcagttgcctttcttggacacaaagcgggccctccgctggcgggca

SEQ ID NO: 44418 - DNA, 80 bp, synthetic construct
  source 1..80: mol_type = other DNA
tgtgctggcctcacttctgagataactccccaccagactcttccttacctccacctgggtcccacttcacttcttaatac

SEQ ID NO: 44419 - DNA, 80 bp, synthetic construct
  source 1..80: mol_type = other DNA
cacctgtaatcccagctactcaggaagctgaggcaggagaatcgcttgaacccgagaggcggaggttgcagtgagccaag

SEQ ID NO: 44420 - DNA, 80 bp, synthetic construct; identical to SEQ ID NO: 14971
  source 1..80: mol_type = other DNA

SEQ ID NO: 44421 - DNA, 80 bp, synthetic construct
  source 1..80: mol_type = other DNA
acccctcccggagcgcccccgccgctttccggatccccctccagctctcgtcctctctgtctccttgggatcctgcgttc

SEQ ID NO: 44422 - DNA, 80 bp, synthetic construct
  source 1..80: mol_type = other DNA
acctgctcctgctcctcacgccacggccgtcgcctccccgccccctcccgccgcccgggcgctcgcggctggccgtcctc

SEQ ID NO: 44423 - DNA, 80 bp, synthetic construct; identical to SEQ ID NO: 14972
  source 1..80: mol_type = other DNA

SEQ ID NO: 44424 - DNA, 80 bp, synthetic construct
  source 1..80: mol_type = other DNA
ccagcctcctcccgcccgaacgtgctcgaggggcgggcagtcgacctttattgtctggggagcacctggcaggtggcggg

SEQ ID NO: 44425 - DNA, 80 bp, synthetic construct
  source 1..80: mol_type = other DNA
cgccctcctcctcccggcgggcacggccccccggcattaacacgtcgaaagagcaggggccagacgccgccgggaagaag

SEQ ID NO: 44426 - DNA, 80 bp, synthetic construct
  source 1..80: mol_type = other DNA
gagctcggatcccatcgcagctaccgcgatgagaggcgctcgcggcgcctgggattttctctgcgttctgctcctactgc

SEQ ID NO: 44427 - DNA, 80 bp, synthetic construct
  source 1..80: mol_type = other DNA
ggccctcggactctccggcgccctgcctcgctcacctgcgcgaggagaccccagctgctggtggtgggggacgcgaatcc

SEQ ID NO: 44428 - DNA, 80 bp, synthetic construct; identical to SEQ ID NO: 14973
  source 1..80: mol_type = other DNA

SEQ ID NO: 44429 - DNA, 80 bp, synthetic construct
  source 1..80: mol_type = other DNA
ggttaggcttttgcgctgggagtgcgcggcgtggggctgttgtggggccggactcccgcgagcctggaggtggtggcgac

SEQ ID NO: 44430 - DNA, 80 bp, synthetic construct
  source 1..80: mol_type = other DNA
caagggacagcgtgctgggactctgcgttccctgactccaaccgcctagcacgccggccagagtgcccggcctgcctggc

SEQ ID NO: 44431 - DNA, 80 bp, synthetic construct
  source 1..80: mol_type = other DNA
ctgcaaatcctactcagttcttaaagctataacagaaatccaggtatatccgcgcgggaactgggtcttaggtgaaggat

SEQ ID NO: 44432 - DNA, 80 bp, synthetic construct; identical to SEQ ID NO: 14974
  source 1..80: mol_type = other DNA

SEQ ID NO: 44433 - DNA, 80 bp, synthetic construct
  source 1..80: mol_type = other DNA
ctggaggatttgatcacctagcttaaaacaacacatctggtctttatgtttttgtgccttgacctttttaatatcagtta

SEQ ID NO: 44434 - DNA, 80 bp, synthetic construct
  source 1..80: mol_type = other DNA
aagccttgctctgtcccctgggttctcggtttctctgccatttcttggctgcgtgcccttggccaggttgcttagggcag

SEQ ID NO: 44435 - DNA, 80 bp, synthetic construct
  source 1..80: mol_type = other DNA
ctctgcctctcctgctcacagggaagtcatagagtatgggtgcatctgaccggtctgcccctgactgaagcaaggagctg

SEQ ID NO: 44436 - DNA, 80 bp, synthetic construct
  source 1..80: mol_type = other DNA
gagtcattctcagcagctggacacaaggcactctaaattattatcctgctggaaataagagaccccagataattcattta

SEQ ID NO: 44437 - DNA, 80 bp, synthetic construct; identical to SEQ ID NO: 14975
  source 1..80: mol_type = other DNA

SEQ ID NO: 44438 - DNA, 80 bp, synthetic construct
  source 1..80: mol_type = other DNA
ccagggattgttggaagttctgggaatacaggatggccaatgtcactaccttcccaattttggtgaaaaatatttagaat

SEQ ID NO: 44439 - DNA, 80 bp, synthetic construct
  source 1..80: mol_type = other DNA
aaggatgatgcaagccagttaaaaatccatctcccactccaaaacataaaaatggtcttgtgcataggtgtgaaagagaa

SEQ ID NO: 44440 - DNA, 80 bp, synthetic construct; identical to SEQ ID NO: 14976
  source 1..80: mol_type = other DNA

SEQ ID NO: 44441 - DNA, 80 bp, synthetic construct
  source 1..80: mol_type = other DNA
ggctaggatgtgggaaatgctttcttttgctgcattaatgtgcggtaacttttaaaagttgagattgaatgacatttgca

SEQ ID NO: 44442 - DNA, 80 bp, synthetic construct
  source 1..80: mol_type = other DNA
aattgagttgagtcatagagaggaattgagttgagtcggcttggcccagcagctctgatttctgacattttttggatgtg

SEQ ID NO: 44443 - DNA, 80 bp, synthetic construct
  source 1..80: mol_type = other DNA
tatttctgtctcctctttaagaattgaaggtcatggcccctgtagatgaggcctgtgctcttcaggttgcattaggctct

SEQ ID NO: 44444 - DNA, 80 bp, synthetic construct; identical to SEQ ID NO: 14977
  source 1..80: mol_type = other DNA

SEQ ID NO: 44445 - DNA, 80 bp, synthetic construct
  source 1..80: mol_type = other DNA
tattgtccctaaaatgggaataatgcctactcttttaagatgattgccctaaagattagaaaggcattttttttgtttgt

SEQ ID NO: 44446 - DNA, 80 bp, synthetic construct
  source 1..80: mol_type = other DNA
acttttagtagagatggggtttcaccatgttggcctggctggtctcgaacccctgacctcaggtgatctacctgcctcgg

SEQ ID NO: 44447 - DNA, 80 bp, synthetic construct
  source 1..80: mol_type = other DNA
caggggggaaaaaaaaaaactacacatcttgtaagattctccaacataacatttgtgtctggtacttttcccattcatct

SEQ ID NO: 44448 - DNA, 80 bp, synthetic construct; identical to SEQ ID NO: 14978
  source 1..80: mol_type = other DNA

SEQ ID NO: 44449 - DNA, 80 bp, synthetic construct
  source 1..80: mol_type = other DNA
tggactccactatcaggctgattttcttatgttcccctttcagctttgcctcttagaaaaaaattgaaaacgtgtaaaca

SEQ ID NO: 44450 - DNA, 80 bp, synthetic construct
  source 1..80: mol_type = other DNA
ctgcaaatggccattttctgtaggtgaataagtacatgtagttcacctagggtccatgaaagcagtcaaggagcttttcc

SEQ ID NO: 44451 - DNA, 80 bp, synthetic construct
  source 1..80: mol_type = other DNA
cactaagctttgaacataaatggtcagtaaacattttggattcagtttaacaaaggcttatcaatccccatgccttggtc

SEQ ID NO: 44452 - DNA, 80 bp, synthetic construct
  source 1..80: mol_type = other DNA
gagcatccacataggagataatatttgagattaatttctgaaccttaaaggaagagggcagtgtagttgtggcttcagct

SEQ ID NO: 44453 - DNA, 80 bp, synthetic construct; identical to SEQ ID NO: 14979
  source 1..80: mol_type = other DNA

SEQ ID NO: 44454 - DNA, 80 bp, synthetic construct
  source 1..80: mol_type = other DNA
agaggccaagccctgccttaaaacttggacactcccttgctgtgggcaaccaagactaagggagagtctgtttttattat

SEQ ID NO: 44455 - DNA, 80 bp, synthetic construct
  source 1..80: mol_type = other DNA
ccaggcgtgtgccaccacaccggctaatttttttatttctatttttgtagagaatagtctcgaacttatgagctcaagcg

SEQ ID NO: 44456 - DNA, 80 bp, synthetic construct; identical to SEQ ID NO: 14980
  source 1..80: mol_type = other DNA

SEQ ID NO: 44457 - DNA, 80 bp, synthetic construct
  source 1..80: mol_type = other DNA
agggagatttttcgtggagactatttaggagggttaaactcatggctgcgagctacatgttggggagctgggcagaagat

SEQ ID NO: 44458 - DNA, 80 bp, synthetic construct
  source 1..80: mol_type = other DNA
gagattgaggggaaggagaactggaattatcatgggtgtaggtaactgggagtattgttgatactatggaattagtggaa

SEQ ID NO: 44459 - DNA, 80 bp, synthetic construct
  source 1..80: mol_type = other DNA
agggaagacgtcaatgaaatcttagggtcaggtccctgtaagaaataaaactaaaccccaaagtcacaaaacatggctct

SEQ ID NO: 44460 - DNA, 80 bp, synthetic construct; identical to SEQ ID NO: 14981
  source 1..80: mol_type = other DNA

SEQ ID NO: 44461 - DNA, 80 bp, synthetic construct
  source 1..80: mol_type = other DNA
tgttttttgttttttttgttttgttttgttttgagacagagtctcactctgtcgccaggctggagtgcagtggtgtgatc

SEQ ID NO: 44462 - DNA, 80 bp, synthetic construct
  source 1..80: mol_type = other DNA
tttaagggaaaattctttcattagaagggttggcagagactttattcagttatagggcctttgctggagctgtgaagaaa

SEQ ID NO: 44463 - DNA, 80 bp, synthetic construct
  source 1..80: mol_type = other DNA
ccgtttttctttcctcactgccttggctgtggggcagagtttctcataaatgctgaatagactctaacataatccactac

SEQ ID NO: 44464 - DNA, 80 bp, synthetic construct; identical to SEQ ID NO: 14982
  source 1..80: mol_type = other DNA

SEQ ID NO: 44465 - DNA, 80 bp, synthetic construct
  source 1..80: mol_type = other DNA
ggggaaggtggtagaaatgacattgcaattcagcagctactgcttgataacattttattaatacctgtcactttgaaatt

SEQ ID NO: 44466 - DNA, 80 bp, synthetic construct
  source 1..80: mol_type = other DNA
attcattaccattggtttggaggacataggcatcacttcttgaatggccaattgaaaggaagataggggcctgaattaaa

SEQ ID NO: 44467 - DNA, 80 bp, synthetic construct
  source 1..80: mol_type = other DNA
cgccgacagaacgtctgtagagagtagcggaagatgagatgggataatttttagggcacctggatttttattcttcaata

SEQ ID NO: 44468 - DNA, 80 bp, synthetic construct
  source 1..80: mol_type = other DNA
atgtattacctgtgttgtatgttcgatgcacatccagtatggatatgtattttgagttgtttttaagtccaaggctaatt

SEQ ID NO: 44469 - DNA, 80 bp, synthetic construct; identical to SEQ ID NO: 14983
  source 1..80: mol_type = other DNA

SEQ ID NO: 44470 - DNA, 80 bp, synthetic construct
  source 1..80: mol_type = other DNA
cacttaaggaagaggcgtgtctgatagcacttgccagtagtgaatgcctcattcttgaccaagtagaaaaaagataagag

SEQ ID NO: 44471 - DNA, 80 bp, synthetic construct
  source 1..80: mol_type = other DNA
atttcagagggtgttagaaaattccaaacaatggccgggactcccagtaatttaaatataatggcctatgcgggttctta

SEQ ID NO: 44472 - DNA, 80 bp, synthetic construct; identical to SEQ ID NO: 14984
  source 1..80: mol_type = other DNA

SEQ ID NO: 44473 - DNA, 80 bp, synthetic construct
  source 1..80: mol_type = other DNA
tattttaaatgcaattccatcccaactttcacaatgcagacttcctttttagtggctgatgttgaaagaaggtaccttag

SEQ ID NO: 44474 - DNA, 80 bp, synthetic construct
  source 1..80: mol_type = other DNA
ttaaatgtttctctacttattttagtatagtctgtatatgtgcagctgggaaatagtatatacgtttttagccgcaccaa

SEQ ID NO: 44475 - DNA, 80 bp, synthetic construct
  source 1..80: mol_type = other DNA
agcattttcaagggatattatttaacatgatcatcttggtttcagaaccactgcctttcaaagagtctggcccagagcat

SEQ ID NO: 44476 - DNA, 80 bp, synthetic construct
  source 1..80: mol_type = other DNA
ataccagaaatccatagatttattcacaaataattattgaagcatcggaggtgtagtagtgaacataccaggcaaaagtc

SEQ ID NO: 44477 - DNA, 80 bp, synthetic construct; identical to SEQ ID NO: 14985
  source 1..80: mol_type = other DNA

SEQ ID NO: 44478 - DNA, 80 bp, synthetic construct
  source 1..80: mol_type = other DNA
gtttctgtaacttcagagcagcaggcctcttgattcaacaggtgtttttgatggaggatttacccaagaggattgactag

SEQ ID NO: 44479 - DNA, 80 bp, synthetic construct
  source 1..80: mol_type = other DNA
gggtccaggctagatgctctttggtatctctccaaggactggagattctgcccctctttttaaaattcattcatgttttt

SEQ ID NO: 44480 - DNA, 80 bp, synthetic construct; identical to SEQ ID NO: 14986
  source 1..80: mol_type = other DNA

SEQ ID NO: 44481 - DNA, 80 bp, synthetic construct
  source 1..80: mol_type = other DNA
ctcctctctcccaaagccagtcataaaacctagcaagttcactctcccttcttcctggaagaccctcattcccgaggggt

SEQ ID NO: 44482 - DNA, 80 bp, synthetic construct
  source 1..80: mol_type = other DNA
gaaaaaaatatgacagacttcagttttaataataactgttgtaataactgtcggtctgtttgacacggtaccatttagcc

SEQ ID NO: 44483 - DNA, 80 bp, synthetic construct
  source 1..80: mol_type = other DNA
ttcaaatgaaggacgcctcaaattgagaactgacaccattgcattcctcaggatgggaaagttccttctccatcaattct

SEQ ID NO: 44484 - DNA, 80 bp, synthetic construct; identical to SEQ ID NO: 14987
  source 1..80: mol_type = other DNA

SEQ ID NO: 44485 - DNA, 80 bp, synthetic construct
  source 1..80: mol_type = other DNA
ttaaaaaagcagtaaggagtctatgccttctagagtattccctggcttgtttgaaaatgtgttagcagccatttttcaat

SEQ ID NO: 44486 - DNA, 80 bp, synthetic construct
  source 1..80: mol_type = other DNA
ccactttatcttcccattattgggaagcatgtctcaagcatcatagaatttcatctataaatattttcagtatgtagtcc

SEQ ID NO: 44487 - DNA, 80 bp, synthetic construct
  source 1..80: mol_type = other DNA
caagatctacacattgtaattggttgatatgtcctttaagtcatttcttctctgtaggtgttagccccgttttggttaag

SEQ ID NO: 44488 - DNA, 80 bp, synthetic construct
  source 1..80: mol_type = other DNA
tttttttttaatgagggtactgtgtaagtggtgtgttctcttgttctgctttctctttttggtgtacctttgggtatttg

SEQ ID NO: 44489 - DNA, 80 bp, synthetic construct; identical to SEQ ID NO: 14988
  source 1..80: mol_type = other DNA

SEQ ID NO: 44490 - DNA, 80 bp, synthetic construct
  source 1..80: mol_type = other DNA
atcatggctttcctggcattttggttttctgaaacgcaccctctaatagatgccttatgggaagtagttcctgaattata

SEQ ID NO: 44491 - DNA, 80 bp, synthetic construct
  source 1..80: mol_type = other DNA
tccctcaaatttaacttggtatgtttgcctagatacccaaaggaatgtttttccacctttattctttaaagcccactagt

SEQ ID NO: 44492 - DNA, 80 bp, synthetic construct; identical to SEQ ID NO: 14989
  source 1..80: mol_type = other DNA

SEQ ID NO: 44493 - DNA, 80 bp, synthetic construct
  source 1..80: mol_type = other DNA
ttcttcaatcaactcatttctgagttttaaaaattctgatttatgctgttcttcatagcttctttcatttagttaatttc

SEQ ID NO: 44494 - DNA, 80 bp, synthetic construct
  source 1..80: mol_type = other DNA
ctatacttttaggagggccagtgtagatttcctagcatcagagatttaggagactctgttagttgttttcattttatttt

SEQ ID NO: 44495 - DNA, 80 bp, synthetic construct; identical to SEQ ID NO: 14990
  source 1..80: mol_type = other DNA

SEQ ID NO: 44496 - DNA, 80 bp, synthetic construct
  source 1..80: mol_type = other DNA
aaactggaacttttttctctgtctactctcaggatgaccctctgagctttccagtgagtgcctgatagtggttcctgtag

SEQ ID NO: 44497 - DNA, 80 bp, synthetic construct
  source 1..80: mol_type = other DNA
tgggtcaatgaaatctggataaagtcctgtcttgaaatctcaactcagaggtagctgcttttcaaaatgatttgcttcca

SEQ ID NO: 44498 - DNA, 80 bp, synthetic construct
  source 1..80: mol_type = other DNA
ttctgagaaaaatttataagaactgacatgcttttgtcattatttgtttggtgtgagattccttgagttctgaaggagag

SEQ ID NO: 44499 - DNA, 80 bp, synthetic construct
  source 1..80: mol_type = other DNA
gctagggattgacatgatattaatttagatttccagaaatactaaatttccttcctccaacctgagttttcctccaattg

SEQ ID NO: 44500 - DNA, 80 bp, synthetic construct; identical to SEQ ID NO: 14991
  source 1..80: mol_type = other DNA

SEQ ID NO: 44501 - DNA, 80 bp, synthetic construct
  source 1..80: mol_type = other DNA
tgctctaagtgaatgtcacccaagaaaaattaagggaaaagtgaatactcattaagcaaattgaccagcaagcgttctga

SEQ ID NO: 44502 - DNA, 80 bp, synthetic construct
  source 1..80: mol_type = other DNA
attggtgaatggtatctgactactcaccaagaaatatctggtattttacagggctgtgtggaagaacacagactgtccag

SEQ ID NO: 44503 - DNA, 80 bp, synthetic construct
  source 1..80: mol_type = other DNA
atgtgctgcagaagttgtatttgccacccggtgtcactattctggagtcccgtagctgtgactggagaattctgcaacat

SEQ ID NO: 44504 - DNA, 80 bp, synthetic construct; identical to SEQ ID NO: 14992
  source 1..80: mol_type = other DNA

SEQ ID NO: 44505 - DNA, 80 bp, synthetic construct
  source 1..80: mol_type = other DNA
caggtgattctgctgcaggcgaaagtttgagaaccactggccttgagtgtaaaaattactgggctttgtcacagctgtca

SEQ ID NO: 44506 - DNA, 80 bp, synthetic construct
  source 1..80: mol_type = other DNA
ctcagttctccttgtgtcagactaagaaagatagatatgagtttcggttagtccagacaggaaaacagacaactggagta

SEQ ID NO: 44507 - DNA, 80 bp, synthetic construct
  source 1..80: mol_type = other DNA
atccctttcaagcctccagtatctccttttgatctccattttgcacacagcacttgcctcattgttggctgtggagtgca

SEQ ID NO: 44508 - DNA, 80 bp, synthetic construct; identical to SEQ ID NO: 14993
  source 1..80: mol_type = other DNA

SEQ ID NO: 44509 - DNA, 80 bp, synthetic construct
  source 1..80: mol_type = other DNA
tggtggagcagtcctcatctttgttgttaggacacatgggctggttaatatattacattttgattgaggtgtcacctgag

SEQ ID NO: 44510 - DNA, 80 bp, synthetic construct
  source 1..80: mol_type = other DNA
tgtgggacactagagagaagttcttgagtatcagtatttcagggatatggggaaggaagaactcctttgcttttgcagac

SEQ ID NO: 44511 - DNA, 80 bp, synthetic construct
  source 1..80: mol_type = other DNA
gtttcttcccacccacttccaaatctatttgttagaagatacgcactcctttgccttttagtcaatttactttggcctgg

SEQ ID NO: 44512 - DNA, 80 bp, synthetic construct; identical to SEQ ID NO: 14994
  source 1..80: mol_type = other DNA

SEQ ID NO: 44513 - DNA, 80 bp, synthetic construct
  source 1..80: mol_type = other DNA
ataccgtagctaccatctgccaggagtgttgatagcaggaagaactataattttgtgctttgataacctatgttgtctgt

SEQ ID NO: 44514 - DNA, 80 bp, synthetic construct
  source 1..80: mol_type = other DNA
tgtgaggctgtctccctgctccttcacgttgccttacccccttctcttctcttcttgctgtcaagtgcagtaattatagt

SEQ ID NO: 44515 - DNA, 80 bp, synthetic construct; identical to SEQ ID NO: 14995
  source 1..80: mol_type = other DNA

SEQ ID NO: 44516 - DNA, 80 bp, synthetic construct
  source 1..80: mol_type = other DNA
ttgccacatgtattttgttttatatacatatttttttctgaaccatttgagagtaagttgctaacatgaccccctccccc

SEQ ID NO: 44517 - DNA, 80 bp, synthetic construct
  source 1..80: mol_type = other DNA
tgtgagctgctcacttgtgagccctttaaattaaactcatattctgaaacacatgcactgccttcctggaaattggctct

SEQ ID NO: 44518 - DNA, 80 bp, synthetic construct
  source 1..80: mol_type = other DNA
attgaagtctatctgcagaacagttatcaagggcagtaaccttttttctagcaatggcctcagataaaacttgtttttct

SEQ ID NO: 44519 - DNA, 80 bp, synthetic construct; identical to SEQ ID NO: 14996
  source 1..80: mol_type = other DNA

SEQ ID NO: 44520 - DNA, 80 bp, synthetic construct
  source 1..80: mol_type = other DNA
cttagggaaataatattaataaaatgtcaagacgaatggataaacaaaaatatagcatatacacagtggactattattca

SEQ ID NO: 44521 - DNA, 80 bp, synthetic construct
  source 1..80: mol_type = other DNA
ggtacctagaataatgaaattcatccagacagaaagtagaatcatgttgatcaggggttggagggagcagagaatggtga

SEQ ID NO: 44522 - DNA, 80 bp, synthetic construct
  source 1..80: mol_type = other DNA
atacacatgcacacagataggcatatgtgtatgtataaatgttaatcagcctctcacttatctgtgtttcatttgatatc

SEQ ID NO: 44523 - DNA, 80 bp, synthetic construct
  source 1..80: mol_type = other DNA
ctgcaacctccgcctccccagttcaagcgattctcctgcctcagcctgccgagtagctgggactacaggcgcccgccacc

SEQ ID NO: 44524 - DNA, 80 bp, synthetic construct; identical to SEQ ID NO: 14997
  source 1..80: mol_type = other DNA

SEQ ID NO: 44525 - DNA, 80 bp, synthetic construct
  source 1..80: mol_type = other DNA
aggatctgctcggaggtgagactgcaccagggctcccttttgtatgtcctaggtcttgggggggtgaagtctttgactag

SEQ ID NO: 44526 - DNA, 80 bp, synthetic construct
  source 1..80: mol_type = other DNA
ttcacagatggtgagggccttgttctggtgtttattggattccaatccttagtgcttttctggttcatgtttcaatatgt

SEQ ID NO: 44527 - DNA, 80 bp, synthetic construct; identical to SEQ ID NO: 14998
  source 1..80: mol_type = other DNA

SEQ ID NO: 44528 - DNA, 80 bp, synthetic construct
  source 1..80: mol_type = other DNA
gtccgtctttgagtgtcgaatgatacttgcatcttcatagttaattataagatgtcagagccgtaagtcaaatttcatgt

SEQ ID NO: 44529 - DNA, 80 bp, synthetic construct
  source 1..80: mol_type = other DNA
ctgactctactaaaaatacaaaaattagctgggcatggtggcggaggttgcagtgagccgagatcgtgccacttcattcc

SEQ ID NO: 44530 - DNA, 80 bp, synthetic construct
  source 1..80: mol_type = other DNA
tgagactggatctctctttgtctcccaggctggagtgtagtggcacgatcacagctcactgcagcctcaacttcctgggc

SEQ ID NO: 44531 - DNA, 80 bp, synthetic construct; identical to SEQ ID NO: 14999
  source 1..80: mol_type = other DNA

SEQ ID NO: 44532 - DNA, 80 bp, synthetic construct
  source 1..80: mol_type = other DNA
ggctaatttttttggtatttttagtagagacagggtttcagcatattggccaagactggtcttgaactcctaacctcaag

SEQ ID NO: 44533 - DNA, 80 bp, synthetic construct
  source 1..80: mol_type = other DNA
ctgcaacctctgcctccctggttcaaacgattcttgtgcctcagcctcctgagtagctgggattacaggcatgctacacc

SEQ ID NO: 44534 - DNA, 80 bp, synthetic construct
  source 1..80: mol_type = other DNA
atggggcctatgtgtttaattccaaacatacaatgtaggatgattaaatcaggataattggggttatcccatcacctcag

SEQ ID NO: 44535 - DNA, 80 bp, synthetic construct
  source 1..80: mol_type = other DNA
agaatccagaactgctatgtctctaccagtatatattttccccttcacatccttcactaattgcttaagagcaaaagtat

SEQ ID NO: 44536 - DNA, 80 bp, synthetic construct; identical to SEQ ID NO: 15000
  source 1..80: mol_type = other DNA

SEQ ID NO: 44537 - DNA, 80 bp, synthetic construct
  source 1..80: mol_type = other DNA
aagtttccttagaagcacacagaacatttaacatgttctctatcttgggagtgctgttcaaaaagcagaagcagcccaag

SEQ ID NO: 44538 - DNA, 80 bp, synthetic construct
  source 1..80: mol_type = other DNA
ttgcccagagatcacaaaaataaaagacagaaaagcagaacatgaaaatgctacaggaaaggtgggatcggcacaaatga

SEQ ID NO: 44539 - DNA, 80 bp, synthetic construct
  source 1..80: mol_type = other DNA
atgtgcctttgtgtgcagtgtgacatccctctctagccttggcgaacctgggaaacacttcgtctcacatgtccttggaa

SEQ ID NO: 44540 - DNA, 80 bp, synthetic construct; identical to SEQ ID NO: 15001
  source 1..80: mol_type = other DNA

SEQ ID NO: 44541 - DNA, 80 bp, synthetic construct
  source 1..80: mol_type = other DNA
tctagagatcctggtttgactactgtgggcaaagctctggtggttccgacatgcagctgggattgctaatgagtgtatga

SEQ ID NO: 44542 - DNA, 80 bp, synthetic construct; identical to SEQ ID NO: 15002
  source 1..80: mol_type = other DNA

SEQ ID NO: 44543 - DNA, 80 bp, synthetic construct
  source 1..80: mol_type = other DNA
ctgtgtgccagtaagactccagagtatatctgtggatataccccacctcctgcctccagtttccagaacctttttgctgc

SEQ ID NO: 44544 - DNA, 80 bp, synthetic construct
  source 1..80: mol_type = other DNA
cacccctccccttcatcccaccacctctggttgatgccctcatcagctcttttctgggtcgctgactggttgtctcctgg

SEQ ID NO: 44545 - DNA, 80 bp, synthetic construct
  source 1..80: mol_type = other DNA
tgaatgattttgtgactcctaggcactgactccactagttctgtgatatttggtcttgaatgtctctcccttctcccctg

SEQ ID NO: 44546 - DNA, 80 bp, synthetic construct; identical to SEQ ID NO: 15003
  source 1..80: mol_type = other DNA

SEQ ID NO: 44547 - DNA, 80 bp, synthetic construct
  source 1..80: mol_type = other DNA
tacacaagtgcttgctttgttactgatccagccttgtttgccattaattactgacactctagctttagctttatttctct

SEQ ID NO: 44548 - DNA, 80 bp, synthetic construct
  source 1..80: mol_type = other DNA
gcttgaaaccttaaactgtccaaattctgtaaaatcactaaatatcatgtacataatacagtactgagacctggcatgca

SEQ ID NO: 44549 - DNA, 80 bp, synthetic construct
  source 1..80: mol_type = other DNA
tcagttacctatcattcacctcatgactaaacctgagtaggttttttctttttcttgaaatggggccttactccactcct

SEQ ID NO: 44550 - DNA, 80 bp, synthetic construct
  source 1..80: mol_type = other DNA
actgcctaggctggtctgtaactcctggactcaagtgatctgcctgcctcggcctcccaaagtgctaagattacaggtgt

SEQ ID NO: 44551 - DNA, 80 bp, synthetic construct; identical to SEQ ID NO: 15004
  source 1..80: mol_type = other DNA

SEQ ID NO: 44552 - DNA, 80 bp, synthetic construct
  source 1..80: mol_type = other DNA
caaaagttcgagaccagactggccaacatagtgaaactgcatcgctactaaaaatgcagaaattagccgggtatggttat

SEQ ID NO: 44553 - DNA, 80 bp, synthetic construct
  source 1..80: mol_type = other DNA
caatcaaacatcctcaatgaaaaagcattgctctgtagggtgatgccacaaattatttaaccattctttcctttctgccc

SEQ ID NO: 44554 - DNA, 80 bp, synthetic construct
  source 1..80: mol_type = other DNA
ttcatgctttgagaactttgtcttcgccttccttttccttgaatacacatagaaacacatacacgtgcaaacacatatac

SEQ ID NO: 44555 - DNA, 80 bp, synthetic construct; identical to SEQ ID NO: 15005
  source 1..80: mol_type = other DNA

SEQ ID NO: 44556 - DNA, 80 bp, synthetic construct
  source 1..80: mol_type = other DNA
ttgtttgtaaagcctcatgggtgttgtgggcgattactgggatccttccatcatggttttcatccagtttattcctatgg

SEQ ID NO: 44557 - DNA, 80 bp, synthetic construct
  source 1..80: mol_type = other DNA
taggcctaatgtggtgggttttcttccccgccattattttgtctagttccttatatttgtgtccaaaagaggacaggttt

SEQ ID NO: 44558 - DNA, 80 bp, synthetic construct; identical to SEQ ID NO: 15006
  source 1..80: mol_type = other DNA

SEQ ID NO: 44559 - DNA, 80 bp, synthetic construct
  source 1..80: mol_type = other DNA
tatcttttgatggagggccaaagcctcttctttgagttttggttgagtgatgggctttctcaggaaagttctgagctgcc

SEQ ID NO: 44560 - DNA, 80 bp, synthetic construct
  source 1..80: mol_type = other DNA
aggccctcctccgatctgctaatgtttgcccacatttaattcaatagtagactttctttagttgagcgacccatataaag

SEQ ID NO: 44561 - DNA, 80 bp, synthetic construct
  source 1..80: mol_type = other DNA
tggtgtgagcagaagagcaaagatacactagagaagaacttaatagtattggacattaaaaatgccttgggcagggtcag

SEQ ID NO: 44562 - DNA, 80 bp, synthetic construct; identical to SEQ ID NO: 15007
  source 1..80: mol_type = other DNA

SEQ ID NO: 44563 - DNA, 80 bp, synthetic construct
  source 1..80: mol_type = other DNA
atcccaaacagaaactctacttattaaataataactgtccatcccccactgtactccctccccacaccttaataacctgt

SEQ ID NO: 44564 - DNA, 80 bp, synthetic construct
  source 1..80: mol_type = other DNA
gtggcatgtatagaatgttactttttttttgtggggggggggggctgtgtaatgttccattgtatgtatataccacattt

SEQ ID NO: 44565 - DNA, 80 bp, synthetic construct
  source 1..80: mol_type = other DNA
tagtgatgagggagacatagcaagtacctgaagaggttataagccagaggcatttcttttattttgagctatcactgaaa

SEQ ID NO: 44566 - DNA, 80 bp, synthetic construct; identical to SEQ ID NO: 15008
  source 1..80: mol_type = other DNA

SEQ ID NO: 44567 - DNA, 80 bp, synthetic construct
  source 1..80: mol_type = other DNA
caaagctaagttggaatacctttttgaaaggcgttctcttaatacgaacctctactcttttaaaaaaaactttgtttttc

SEQ ID NO: 44568 - DNA, 80 bp, synthetic construct
  source 1..80: mol_type = other DNA
tttaattattttttaaaactctagaagtgaagcatgaactcatgatcttgaatttagagggcccttatttggagggatgc

SEQ ID NO: 44569 - DNA, 80 bp, synthetic construct
  source 1..80: mol_type = other DNA
aagaaaatgtttttattactgtgctagagggaaaagtacgatttaggatccttacctgcaggatctaagaccttggagtg

SEQ ID NO: 44570 - DNA, 80 bp, synthetic construct; identical to SEQ ID NO: 15009
  source 1..80: mol_type = other DNA

SEQ ID NO: 44571 - DNA, 80 bp, synthetic construct
  source 1..80: mol_type = other DNA
tgatggacctcagagttttgagggaggatgagttggggtggggtgggtggcggctggcggggagtcttttaggagaggat

SEQ ID NO: 44572 - DNA, 80 bp, synthetic construct
  source 1..80: mol_type = other DNA
ccatacataggaagtgggtgagtccggactgatttggaaggccaataagaagttccatttctggaataagtgtgcctaac

SEQ ID NO: 44573 - DNA, 80 bp, synthetic construct
  source 1..80: mol_type = other DNA
aagatgcaagtctagacagtcctaactcaagagccaggctctcacttggtatgctaaaaggctttcctgcttttctatga

SEQ ID NO: 44574 - DNA, 80 bp, synthetic construct; identical to SEQ ID NO: 15010
  source 1..80: mol_type = other DNA

SEQ ID NO: 44575 - DNA, 80 bp, synthetic construct
  source 1..80: mol_type = other DNA
ctgcctctgtttttattatttagtgctctgtacaactctgaaaataatcctggccactgcgtgcccatattcttgctgcc

SEQ ID NO: 44576 - DNA, 80 bp, synthetic construct
  source 1..80: mol_type = other DNA
ggcaatatttggctaataaacaggaattgagactggtcatctatacacacacctgcaggaaacaatttccaccctcctgt

SEQ ID NO: 44577 - DNA, 80 bp, synthetic construct
  source 1..80: mol_type = other DNA
cttgtagccctggagcaaacaacacttcccactcaattgaaattgtactttagaatttccagcagtctctttgtaaccag

SEQ ID NO: 44578 - DNA, 80 bp, synthetic construct; identical to SEQ ID NO: 15011
  source 1..80: mol_type = other DNA

SEQ ID NO: 44579 - DNA, 80 bp, synthetic construct
  source 1..80: mol_type = other DNA
tatcctcacccatcctgaacttgtgtggctcactcagatcagtcctcatctgcaaccttgcatatggtggcaggggacat

SEQ ID NO: 44580 - DNA, 80 bp, synthetic construct
  source 1..80: mol_type = other DNA
tcccgctgatatggccttcctctgacaatctatagtgtcttttcctgtttattctgaattccttactgtaggttctcatt

SEQ ID NO: 44581 - DNA, 80 bp, synthetic construct
  source 1..80: mol_type = other DNA
ggtacgttcccagaatttacacccagaagttcaggacccttgatggatctggtttcactccacgtagtttcacctgtcat

SEQ ID NO: 44582 - DNA, 80 bp, synthetic construct; identical to SEQ ID NO: 15012
  source 1..80: mol_type = other DNA

SEQ ID NO: 44583 - DNA, 80 bp, synthetic construct
  source 1..80: mol_type = other DNA
gttcccactaccatgcccagctaatgttttttctagtttttgtagatgtgttgggcggtgggggcgtctcactgcgttgc

SEQ ID NO: 44584 - DNA, 80 bp, synthetic construct
  source 1..80: mol_type = other DNA
gtatgtgaggaccatgtgtcacactagcatggacttttccccagcatctagcatggtgcttttgtagatgataattaatg

SEQ ID NO: 44585 - DNA, 80 bp, synthetic construct
  source 1..80: mol_type = other DNA
cctatctaggaaacctatttaggcattagggtgttaaaacaggtgtatcattttctgccttagtgtttagagatttgtga

SEQ ID NO: 44586 - DNA, 80 bp, synthetic construct; identical to SEQ ID NO: 15013
  source 1..80: mol_type = other DNA

SEQ ID NO: 44587 - DNA, 80 bp, synthetic construct
  source 1..80: mol_type = other DNA
agcagggcagctttgtcctatttttattgtagagtacacagaagatggaactcagtattggaagaagtgctttatttcgc

SEQ ID NO: 44588 - DNA, 80 bp, synthetic construct
  source 1..80: mol_type = other DNA
gggctttgtcaaatggacttttgagatcctggatgaaacgaatgagaataagcagaatgaatggatcacggaaaaggcag

SEQ ID NO: 44589 - DNA, 80 bp, synthetic construct
  source 1..80: mol_type = other DNA
tgcttggctttctgcagtgctgtgctttcaagaatttaatatcctgctcttaattttggatgacatatggatgactgagc

SEQ ID NO: 44590 - DNA, 80 bp, synthetic construct; identical to SEQ ID NO: 15014
  source 1..80: mol_type = other DNA

SEQ ID NO: 44591 - DNA, 80 bp, synthetic construct
  source 1..80: mol_type = other DNA
agatgtggcccactcttaaggagtaaatttcagaaaaataatttggtcagctaaacatcccatgtctgtcatgggttctt

SEQ ID NO: 44592 - DNA, 80 bp, synthetic construct
  source 1..80: mol_type = other DNA
ttgtagttgatgtaaaaactgatccactggcagcttaagggacatatccaagtgacgggaggagaaatagagttctattt

SEQ ID NO: 44593 - DNA, 80 bp, synthetic construct
  source 1..80: mol_type = other DNA
ctgttctgtcttccttacgtaattgttagggagccaggatggtacaaattctaacatgctccatcaggagcgaataaagc

SEQ ID NO: 44594 - DNA, 80 bp, synthetic construct
  source 1..80: mol_type = other DNA
attttgcaatttccaggtggcaatgaagtatcatgacaattgaataaatgaggaaaactgttgaattggttaaatcactc

SEQ ID NO: 44595 - DNA, 80 bp, synthetic construct; identical to SEQ ID NO: 15015
  source 1..80: mol_type = other DNA

SEQ ID NO: 44596 - DNA, 80 bp, synthetic construct
  source 1..80: mol_type = other DNA
atgtaatctgtgggcctaaacatgtatctgtattatgacactgtagagagtggcagcatattgtgtatacgaaattaggt

SEQ ID NO: 44597 - DNA, 80 bp, synthetic construct
  source 1..80: mol_type = other DNA
ttgccacagaattcctgaaactcacaagctccccttgtgcatttgaaattatttgatttccagaagctacatttacatgt

SEQ ID NO: 44598 - DNA, 80 bp, synthetic construct
  source 1..80: mol_type = other DNA
aggaatcatcacactggcttattggcagatgatccctggagttgtaataaagttttcccaaagttttaagagctcaaata

SEQ ID NO: 44599 - DNA, 80 bp, synthetic construct; identical to SEQ ID NO: 15016
  source 1..80: mol_type = other DNA

SEQ ID NO: 44600 - DNA, 80 bp, synthetic construct
  source 1..80: mol_type = other DNA
gttttcagtgtctgtgaccagccattccaactactgattttggatatgcttctatagatcctgccaagcttttccttgtt

SEQ ID NO: 44601 - DNA, 80 bp, synthetic construct
  source 1..80: mol_type = other DNA
gtgtgaaacgcgcctaccatcggctctgtctgcattgttctgtggaccaggagggcaagtcagtgctgtcggaaaaattc

SEQ ID NO: 44602 - DNA, 80 bp, synthetic construct
  source 1..80: mol_type = other DNA
gcttttgaatttgtttatttcatggtcctgaccccgtgtggcagttccatgactgcctctcatagaggtgaatgtatctg

SEQ ID NO: 44603 - DNA, 80 bp, synthetic construct; identical to SEQ ID NO: 15017
  source 1..80: mol_type = other DNA

SEQ ID NO: 44604 - DNA, 80 bp, synthetic construct
  source 1..80: mol_type = other DNA
ttagggaaaatttgattatttaaaacctgggatttccagaggtgagcagggtaggatttgcatgagaaagacgcctgttt

SEQ ID NO: 44605 - DNA, 80 bp, synthetic construct
  source 1..80: mol_type = other DNA
tttcactcaatttacttgaaggatgcttgatttaattgctggtaccttcagatatgcaagtagtacagataggttagcac

SEQ ID NO: 44606 - DNA, 80 bp, synthetic construct; identical to SEQ ID NO: 15018
  source 1..80: mol_type = other DNA

SEQ ID NO: 44607 - DNA, 80 bp, synthetic construct
  source 1..80: mol_type = other DNA
tctgtcagaggtggattgtctgggagagtgttgggattgcatatttccccctttcatacctccacatggagatatataca

SEQ ID NO: 44608 - DNA, 80 bp, synthetic construct
  source 1..80: mol_type = other DNA
ttgataccgtttaggccagactatttaaaatattgaaaagagttgccacttccatacttaaaaagaatagagagtctcaa

SEQ ID NO: 44609 - DNA, 80 bp, synthetic construct
  source 1..80: mol_type = other DNA
atccttaatctgaaacatctgggcatgcttacgttcccattcatttaacaaatgcatattcaatgccattatacctcaga

SEQ ID NO: 44610 - DNA, 80 bp, synthetic construct
  source 1..80: mol_type = other DNA
accaagttttcagtaatttttgtttgaataatcttggccatctagttaattagctatcacagtggtttttattcattacc

SEQ ID NO: 44611 - DNA, 80 bp, synthetic construct; identical to SEQ ID NO: 15019
  source 1..80: mol_type = other DNA

SEQ ID NO: 44612 - DNA, 80 bp, synthetic construct
  source 1..80: mol_type = other DNA
tttagaccgggtgtgcatttgagcctctgtataacttgaacattatccttttttgagatgagaaattaaattgccccagg

SEQ ID NO: 44613 - DNA, 80 bp, synthetic construct
  source 1..80: mol_type = other DNA
taatgtgtgacttgcagatggggctcatggctgtctgccaaggttcatccatgaatcttttattgatatcttttggctta

SEQ ID NO: 44614 - DNA, 80 bp, synthetic construct
  source 1..80: mol_type = other DNA
actgttaatcttagttggttagctttcttaatgcctctaaaccctcacatttttacttgcttgtaatcagaatctttgac

SEQ ID NO: 44615 - DNA, 80 bp, synthetic construct; identical to SEQ ID NO: 15020
  source 1..80: mol_type = other DNA

SEQ ID NO: 44616 - DNA, 80 bp, synthetic construct
  source 1..80: mol_type = other DNA
ccacatacccttttagaaactaaaagttaagactagtgatgctcttgacttacctaagatctcacgattagttaacagca

SEQ ID NO: 44617 - DNA, 80 bp, synthetic construct
  source 1..80: mol_type = other DNA
tgaaccttatatgtaattttaaattttctagtaggtacattacaaaaaataaaaaaggtaaaattgattttaataatata

SEQ ID NO: 44618 - DNA, 80 bp, synthetic construct
  source 1..80: mol_type = other DNA
cttagtagtcccaagtgtctagtccttataaatgctatatagtctgcattttttcatattttttctcttttcccctatgc

SEQ ID NO: 44619 - DNA, 80 bp, synthetic construct; identical to SEQ ID NO: 15021
  source 1..80: mol_type = other DNA

SEQ ID NO: 44620 - DNA, 80 bp, synthetic construct
  source 1..80: mol_type = other DNA
gtttaccaaagcctcgccaaggaatcacccttgatctcattccatgtcactattagctccttttactttaattggttgtt

SEQ ID NO: 44621 - DNA, 80 bp, synthetic construct
  source 1..80: mol_type = other DNA
tgcagacaaaaaatgagtgagatggtgatatcacaagggtaaattcacaaccttttcttttcagctcatgcttaaataat

SEQ ID NO: 44622 - DNA, 80 bp, synthetic construct; identical to SEQ ID NO: 15022
  source 1..80: mol_type = other DNA

SEQ ID NO: 44623 - DNA, 80 bp, synthetic construct
  source 1..80: mol_type = other DNA
tgaagtgttccaatgacagacttgtcatgatgctttattattcttacttaagtagtgtataatgaaagttaatatggaga

SEQ ID NO: 44624 - DNA, 80 bp, synthetic construct
  source 1..80: mol_type = other DNA
acgttgactatcagttcagcgagagttaatgattctggagtgttcatgtgttatgccaataatacttttggatcagcaaa

SEQ ID NO: 44625 - DNA, 80 bp, synthetic construct
  source 1..80: mol_type = other DNA
tccttgtagcctcttgcaatgaaagcacaaaaccaaattctaccagtttagtggaggaaagtggaaagctgttactaaaa

SEQ ID NO: 44626 - DNA, 80 bp, synthetic construct; identical to SEQ ID NO: 15023
  source 1..80: mol_type = other DNA

SEQ ID NO: 44627 - DNA, 80 bp, synthetic construct
  source 1..80: mol_type = other DNA
tctacggagcataaactacaacatggtaatctgtccccggaccccatcatatctggtatgcacaattggttcagccttat

SEQ ID NO: 44628 - DNA, 80 bp, synthetic construct
  source 1..80: mol_type = other DNA
gaatttaatccatttttctgtctttttagtacaaccatattcctagtgttagactttcattaaatacttctaaggtggca

SEQ ID NO: 44629 - DNA, 80 bp, synthetic construct
  source 1..80: mol_type = other DNA
ataatctcgtaaaattttggcgtttctgcccatgttataatggaaagtttctccccagactgaacatggaaaagatactt

SEQ ID NO: 44630 - DNA, 80 bp, synthetic construct
  source 1..80: mol_type = other DNA
aatttgctaagttgattagggagcatgttgatatatcagcttcagctccagaaagcaattagtaaggatgttttgagaac

SEQ ID NO: 44631 - DNA, 80 bp, synthetic construct; identical to SEQ ID NO: 15024
  source 1..80: mol_type = other DNA

SEQ ID NO: 44632 - DNA, 80 bp, synthetic construct
  source 1..80: mol_type = other DNA
agttaccctttctttgttttttgttttgtgataagagctgttaacattttacctggttttgaattggaggctctgcctgt

SEQ ID NO: 44633 - DNA, 80 bp, synthetic construct
  source 1..80: mol_type = other DNA
caggaggattgcttgagcccaggaagtcgaggctttagtgagctgtgatcgtgccactgtgctccagcctgggcaacaga

SEQ ID NO: 44634 - DNA, 80 bp, synthetic construct
  source 1..80: mol_type = other DNA
aagatcttttttatattattatatcaccttttctaaggactccattatttatttaaccggttttctattttgccatttta

SEQ ID NO: 44635 - DNA, 80 bp, synthetic construct; identical to SEQ ID NO: 15025
  source 1..80: mol_type = other DNA

SEQ ID NO: 44636 - DNA, 80 bp, synthetic construct
  source 1..80: mol_type = other DNA
ttcttctgttgcttctaaaaagcctagaaacttcccctctgtagaaatttcataggagtcaattgttatttagttaaaaa

SEQ ID NO: 44637 - DNA, 80 bp, synthetic construct
  source 1..80: mol_type = other DNA
cttgttttcccttaatttatgacaccttatcacatatataattatatattgggtctgtgtatgaactcactatttattcc

SEQ ID NO: 44638 - DNA, 80 bp, synthetic construct
  source 1..80: mol_type = other DNA
tgtcctttctcacttgtgacagtgattctacaagagcaaaataaaatgaaaaacagctagttaaaattctcttattgcca

SEQ ID NO: 44639 - DNA, 80 bp, synthetic construct
  source 1..80: mol_type = other DNA
aaacgatggagaaaatgtagatttgattgttgaatatgaagcattccccaaacctgaacaccagcagtggatctatatga

SEQ ID NO: 44640 - DNA, 80 bp, synthetic construct; identical to SEQ ID NO: 15026
  source 1..80: mol_type = other DNA

SEQ ID NO: 44641 - DNA, 80 bp, synthetic construct
  source 1..80: mol_type = other DNA
tctgagcttagctcaaagcagtaactttcatgtactcgggatacagcaagtctcttcagagaaaaagggaagttagtacc

SEQ ID NO: 44642 - DNA, 80 bp, synthetic construct
  source 1..80: mol_type = other DNA
ttttctgaagcatggttctaagtactttacgtgtattcacccactgacctgaagcctcacagactttgtgagtagacatt

SEQ ID NO: 44643 - DNA, 80 bp, synthetic construct
  source 1..80: mol_type = other DNA
agtcaggactgttgactgttggaaaaatacgggtgagagatgatagcgtcctgggccaaggactaaaggttggagggaag

SEQ ID NO: 44644 - DNA, 80 bp, synthetic construct; identical to SEQ ID NO: 15027
  source 1..80: mol_type = other DNA

SEQ ID NO: 44645 - DNA, 80 bp, synthetic construct
  source 1..80: mol_type = other DNA
cacctctccagctatcagtcacttactggctgcagacctggctgcacggtcaacgtcttccaaggattgcgcaagggcaa

SEQ ID NO: 44646 - DNA, 80 bp, synthetic construct
  source 1..80: mol_type = other DNA
tagtgtgagagttggcacaccgcctatggcaagttggtgttgtggcccatgtggatcgtgtgggtcgtggactgcccagg

SEQ ID NO: 44647 - DNA, 80 bp, synthetic construct; identical to SEQ ID NO: 15028
  source 1..80: mol_type = other DNA

SEQ ID NO: 44648 - DNA, 80 bp, synthetic construct
  source 1..80: mol_type = other DNA
aacaggcgttggtcccagatggaatatgtgtgtgcgtgtttatgtatttgttaatgtggattttgctaatacttactgaa

SEQ ID NO: 44649 - DNA, 80 bp, synthetic construct
  source 1..80: mol_type = other DNA
ggaggcacttacacattcctagtgtccaattctgacgtcaatgctgccatagcatttaatgtttatgtgaatagtaagta

SEQ ID NO: 44650 - DNA, 80 bp, synthetic construct
  source 1..80: mol_type = other DNA
agagacttcgtggtttggtggttagagtgtgtcaaaaaaccagttccttgtcctacatttcactgatcacatgaccttgt

SEQ ID NO: 44651 - DNA, 80 bp, synthetic construct; identical to SEQ ID NO: 15029
  source 1..80: mol_type = other DNA

SEQ ID NO: 44652 - DNA, 80 bp, synthetic construct
  source 1..80: mol_type = other DNA
agcccaccatgtcttagagaaatgtctgctctgaagttgaggccaagggagcccgatcatgagctggaccttttgccaag

SEQ ID NO: 44653 - DNA, 80 bp, synthetic construct
  source 1..80: mol_type = other DNA
ggaggatgaggagacaactggaatatttcatagaaaagagcttaggcgttatgctgggcactttatgtgtgttgggttat

SEQ ID NO: 44654 - DNA, 80 bp, synthetic construct
  source 1..80: mol_type = other DNA
tccacctcccaggttcaagtgattctcctgccacagcctcttgagtatctgggactataggcatcccaccacacccagct

SEQ ID NO: 44655 - DNA, 80 bp, synthetic construct; identical to SEQ ID NO: 15030
  source 1..80: mol_type = other DNA

SEQ ID NO: 44656 - DNA, 80 bp, synthetic construct
  source 1..80: mol_type = other DNA
ctggactaaagcgatccttctgccttgtcctcccaaagcactgggattacaggagtgagccacaacactcaacctgtgtg

SEQ ID NO: 44657 - DNA, 80 bp, synthetic construct
  source 1..80: mol_type = other DNA
acattcatatgagtttagatgaagaaggtcacattcgtgtaattaaacacatatctttattactggccttcccagaatcc

SEQ ID NO: 44658 - DNA, 80 bp, synthetic construct
  source 1..80: mol_type = other DNA
caaacagttttgattacatagcatttctctggtcctcaattcaagtatctctagattaatttcaatgtgaatcagaaagt

SEQ ID NO: 44659 - DNA, 80 bp, synthetic construct
  source 1..80: mol_type = other DNA
atgatgagtgcgtgtaatcccagctagttgggaggctgaggcaggagaatcacttgaacctcaacctgggagacagaggt

SEQ ID NO: 44660 - DNA, 80 bp, synthetic construct; identical to SEQ ID NO: 15031
  source 1..80: mol_type = other DNA

SEQ ID NO: 44661 - DNA, 80 bp, synthetic construct
  source 1..80: mol_type = other DNA
attttttagattcaatagatataacaattactctttgtcaaattgctcctcctcagtgcttcttctcagtttctgtattt

SEQ ID NO: 44662 - DNA, 80 bp, synthetic construct
  source 1..80: mol_type = other DNA
ggctttaagtccaaaggggtgtttaaatgtgtctcttttcttcttttttcatgcttccatttgccagtgtgtggtctgcc

SEQ ID NO: 44663 - DNA, 80 bp, synthetic construct; identical to SEQ ID NO: 15032
  source 1..80: mol_type = other DNA

SEQ ID NO: 44664 - DNA, 80 bp, synthetic construct
  source 1..80: mol_type = other DNA
atttattgatttgcaaacgtttggacagaggtagtagcatttatgtttgagctttaaactgtctatgaggtacgtcccag

SEQ ID NO: 44665 - DNA, 80 bp, synthetic construct
  source 1..80: mol_type = other DNA
ttctgagattttggtgcacctgtcacccaagcagtgtacactatacccgtgtatagtctttatccctcacccccctccca

SEQ ID NO: 44666 - DNA, 80 bp, synthetic construct
  source 1..80: mol_type = other DNA
atcattttagctgagccagttacatatgtaggtgtactgtatggtttattttgtaaataagctgagcctcaaggacaaaa

SEQ ID NO: 44667 - DNA, 80 bp, synthetic construct
  source 1..80: mol_type = other DNA
gcatggttaaatatttggcggttgaaaaatctatttgttttgaaaattccacatgtaaatttcagtatagtgaatgtggg

SEQ ID NO: 44668 - DNA, 80 bp, synthetic construct; identical to SEQ ID NO: 15033
  source 1..80: mol_type = other DNA

SEQ ID NO: 44669 - DNA, 80 bp, synthetic construct
  source 1..80: mol_type = other DNA
tcagcgaaaatggtgatttgtttttcttggaaatgaaaatcaggaaaaaagtagagttttgaaaccttacctcaaagtgc

SEQ ID NO: 44670 - DNA, 80 bp, synthetic construct
  source 1..80: mol_type = other DNA
gacaaataaaaggccaaatatgcactttaatcctaatatatccatttggcttttttccccactccatctagtatttcttg

SEQ ID NO: 44671 - DNA, 80 bp, synthetic construct
  source 1..80: mol_type = other DNA
caaacctttggaataattttaagaagatcctgtaaccttaaagtggatagttcaaaacatgatctggtagcatttccagg

SEQ ID NO: 44672 - DNA, 80 bp, synthetic construct; identical to SEQ ID NO: 15034
  source 1..80: mol_type = other DNA

SEQ ID NO: 44673 - DNA, 80 bp, synthetic construct
  source 1..80: mol_type = other DNA
ataggtcatacagtataccaaaatcagccaaagcaataaatcacccagaataaggcttctcgatgagaaagatccccttt

SEQ ID NO: 44674 - DNA, 80 bp, synthetic construct
  source 1..80: mol_type = other DNA
gcttttggccagccaaccagaaatgatcccaggtagactatcagtgcatttgtgttgctgttaaaaaaaaaaaaaaaaaa

SEQ ID NO: 44675 - DNA, 80 bp, synthetic construct; identical to SEQ ID NO: 15035
  source 1..80: mol_type = other DNA

SEQ ID NO: 44676 - DNA, 80 bp, synthetic construct
  source 1..80: mol_type = other DNA
agatggcttcacctgtttgccagctctctgggtcacccacctggctggaatctccaactacctttatccagagtaaaata

SEQ ID NO: 44677 - DNA, 80 bp, synthetic construct
  source 1..80: mol_type = other DNA
ccattttttaaaaaaatagtaggacctttcaaacacatgcgcgtccaaaccatacttgtgttagaggccacaaatttgaa

SEQ ID NO: 44678 - DNA, 80 bp, synthetic construct
  source 1..80: mol_type = other DNA
tgagagtttgctctaaggctgcaacagtaactggaacatagcttcgtttgtgtgaacatttgtatgctgcatgtttttaa

SEQ ID NO: 44679 - DNA, 80 bp, synthetic construct; identical to SEQ ID NO: 15036
  source 1..80: mol_type = other DNA

SEQ ID NO: 44680 - DNA, 80 bp, synthetic construct
  source 1..80: mol_type = other DNA
ccttgcttaagtggctggaagttaataaggttatcatctgttgttatctttcatgctctgtgtcttcaacatacgatatg

SEQ ID NO: 44681 - DNA, 80 bp, synthetic construct
  source 1..80: mol_type = other DNA
gaactctgtttgtattttctgttcctgaacttgaaatgagtttttgttctcaaattgcttgggaattatgaatgttgttt

SEQ ID NO: 44682 - DNA, 80 bp, synthetic construct
  source 1..80: mol_type = other DNA
agctctgaactaagctaaacatctttccctcctcaaaggctggcatcattactcttcctccctatctcataagaaagttg

SEQ ID NO: 44683 - DNA, 80 bp, synthetic construct; identical to SEQ ID NO: 15037
  source 1..80: mol_type = other DNA

SEQ ID NO: 44684 - DNA, 80 bp, synthetic construct
  source 1..80: mol_type = other DNA
gggcattctgtcaatacccttctcctccacttctgaattatgttgcaaaatgaattagctacttttccagagtaggaaaa

SEQ ID NO: 44685 - DNA, 80 bp, synthetic construct
  source 1..80: mol_type = other DNA
tcatttttcaacgtaatctcgtgattgggatatctttttgattgctgtttagaacaggggttggtagaactatagcctgc

SEQ ID NO: 44686 - DNA, 80 bp, synthetic construct
  source 1..80: mol_type = other DNA
agtagctggtattacaggcacctgccaccatgcctggcttatttttgtatttttagtagagatgggatttcaccatgttg

SEQ ID NO: 44687 - DNA, 80 bp, synthetic construct; identical to SEQ ID NO: 15038
  source 1..80: mol_type = other DNA

SEQ ID NO: 44688 - DNA, 80 bp, synthetic construct
  source 1..80: mol_type = other DNA
tacaggagattatagttgaagttttattttgtttgttaaataaacttctgttagtgtccatatgccaatttctggatatc

SEQ ID NO: 44689 - DNA, 80 bp, synthetic construct
  source 1..80: mol_type = other DNA
tacacagaccaaaaccgggatagtgaaaaattccggaaaagcattgcttcattgcctttaaacaccagcaaacctcgaat

SEQ ID NO: 44690 - DNA, 80 bp, synthetic construct
  source 1..80: mol_type = other DNA
gcggaagttggttaaagtggctgggtgagagaactctaatcaaaaaatgcctccctgcatttagatgaagaaaggaagac

SEQ ID NO: 44691 - DNA, 80 bp, synthetic construct
  source 1..80: mol_type = other DNA
ctggatgtgtaggatttttaattgcatgagcaataaattctcagcagagttacaagcatctgaaatctgcctacaagctg

SEQ ID NO: 44692 - DNA, 80 bp, synthetic construct; identical to SEQ ID NO: 15039
  source 1..80: mol_type = other DNA

SEQ ID NO: 44693 - DNA, 80 bp, synthetic construct
  source 1..80: mol_type = other DNA
attagatttccacctggctcattctttatgcattaaacattttcataatgcaacttgccaggtacagctcatgctgtact

SEQ ID NO: 44694 - DNA, 80 bp, synthetic construct
  source 1..80: mol_type = other DNA
ttatgccctgggtgcttctcttgccttactcttgtcctggctttgataagggttccttaaaggccctttaaaaaggtaca

SEQ ID NO: 44695 - DNA, 80 bp, synthetic construct; identical to SEQ ID NO: 15040
  source 1..80: mol_type = other DNA

SEQ ID NO: 44696 - DNA, 80 bp, synthetic construct
  source 1..80: mol_type = other DNA
cactttcagctacccattcattgcaaaataaaattagaaataaaagaataaaatagaaacttttcatcaccttactaccc

SEQ ID NO: 44697 - DNA, 80 bp, synthetic construct
  source 1..80: mol_type = other DNA
aacttagctcctatttgagtcctattcagttatctctaccatctttgtgtagactggtcccactcatcattcatctcagt

SEQ ID NO: 44698 - DNA, 80 bp, synthetic construct
  source 1..80: mol_type = other DNA
cttcttgtgactctataattgaatgcctttggaatcttagagacttgttcctttgggtgggatcttcatcatacaacagt

SEQ ID NO: 44699 - DNA, 80 bp, synthetic construct
  source 1..80: mol_type = other DNA
aggaaaggagagagaccagcttggcatcagagagtttaggcttgcttagaaaaggaggtgacacttaaactgagtccaga

SEQ ID NO: 44700 - DNA, 80 bp, synthetic construct; identical to SEQ ID NO: 15041
  source 1..80: mol_type = other DNA

SEQ ID NO: 44701 - DNA, 80 bp, synthetic construct
  source 1..80: mol_type = other DNA
ggaggtgaggtgctgagaggttattctacaaagatgtcatttatcagtgttaccttcctttggggaaataaacttcctaa

SEQ ID NO: 44702 - DNA, 80 bp, synthetic construct
  source 1..80: mol_type = other DNA
agaaggaatttttagattattgaggagaatatttagagtggcaaatacagttcacttcatttgtagtgaaattggttatc

SEQ ID NO: 44703 - DNA, 80 bp, synthetic construct
  source 1..80: mol_type = other DNA
taccgagtagctgggactacaggcgcatgtcactgtgcccagctaatttttgtgtttttagtagagatgcggtttcactg

SEQ ID NO: 44704 - DNA, 80 bp, synthetic construct; identical to SEQ ID NO: 15042
  source 1..80: mol_type = other DNA

SEQ ID NO: 44705 - DNA, 80 bp, synthetic construct
  source 1..80: mol_type = other DNA
aatgctattcttcagagtacagggtgagcatatcagcatccctgccatcctgttgcttctgttgagcttatttattctta

SEQ ID NO: 44706 - DNA, 80 bp, synthetic construct
  source 1..80: mol_type = other DNA
gtgaatatattcagatttatatatatatttatatatatatatgtatttatatatatttatatatatttttatatatatgt

SEQ ID NO: 44707 - DNA, 80 bp, synthetic construct; identical to SEQ ID NO: 15043
  source 1..80: mol_type = other DNA

SEQ ID NO: 44708 - DNA, 80 bp, synthetic construct
  source 1..80: mol_type = other DNA
aatcctttaaagtagatttttacctgtggaacactttggagtcctagagtttgattagaagcagtcttcagatccctact

SEQ ID NO: 44709 - DNA, 80 bp, synthetic construct
  source 1..80: mol_type = other DNA
taccttccactccttggttcagattctgccctttgaacttgctccctcaggctactcagcagcctcaggaaggttgtagg

SEQ ID NO: 44710 - DNA, 80 bp, synthetic construct
  source 1..80: mol_type = other DNA
gattggtatttttgtccaggaactgagcagaggtgagatgattatttttggcactgcttataatgcagaggggaaggact

SEQ ID NO: 44711 - DNA, 80 bp, synthetic construct
  source 1..80: mol_type = other DNA
acttctctattttggtgttatctttctggatttatcatgcaatttctagcctgcaggtagataaagcaattttgcaggac

SEQ ID NO: 44712 - DNA, 80 bp, synthetic construct; identical to SEQ ID NO: 15044
  source 1..80: mol_type = other DNA

SEQ ID NO: 44713 - DNA, 80 bp, synthetic construct
  source 1..80: mol_type = other DNA
cacaattgaatagttagtatggtcgcagaaattttatttttcatggaataagcctctttatcacaacaagttggaagggg

SEQ ID NO: 44714 - DNA, 80 bp, synthetic construct
  source 1..80: mol_type = other DNA
accagacactattctaatggacagaacacacccaagtctttttgcctttatgagtttatgttctagtgcaggggtgttca

SEQ ID NO: 44715 - DNA, 80 bp, synthetic construct
  source 1..80: mol_type = other DNA
gcttgttctagtgggtagaaacacataatagatggaataaacaatgaatgtatgtaggtgttaagaaaggaaacagggaa

SEQ ID NO: 44716 - DNA, 80 bp, synthetic construct; identical to SEQ ID NO: 15045
  source 1..80: mol_type = other DNA

SEQ ID NO: 44717 - DNA, 80 bp, synthetic construct
  source 1..80: mol_type = other DNA
cccgagtagctgggattacaggcgcctgccaccacgcccagctaatttttgtatttttagtagagacgaggtttcaccat

SEQ ID NO: 44718 - DNA, 80 bp, synthetic construct
  source 1..80: mol_type = other DNA
cctcctctatgctatttcttttcaaccattcgtgtacccttttgaagcttgtttattttagggatctactgtgtaccagc

SEQ ID NO: 44719 - DNA, 80 bp, synthetic construct; identical to SEQ ID NO: 15046
  source 1..80: mol_type = other DNA

SEQ ID NO: 44720 - DNA, 80 bp, synthetic construct
  source 1..80: mol_type = other DNA
ggccaccgtttggaaagctagtggttcagagttctatagattctagtgcattcaagcacaatggcacggttgaatgtaag

SEQ ID NO: 44721 - DNA, 80 bp, synthetic construct
  source 1..80: mol_type = other DNA
gtcatgattttaagttcattccaacattgaccatgtcatttctggtaatacatgcatcacaccatactgtcatcaaactc

SEQ ID NO: 44722 - DNA, 80 bp, synthetic construct
  source 1..80: mol_type = other DNA
ctccattaaaaagagctagagaaagcaaatgggggaatatatttaccttacacccaaacagaattagaacaatctaaaat

SEQ ID NO: 44723 - DNA, 80 bp, synthetic construct; identical to SEQ ID NO: 15047
  source 1..80: mol_type = other DNA

SEQ ID NO: 44724 - DNA, 80 bp, synthetic construct
  source 1..80: mol_type = other DNA
tcaggttttgagtagtgaggggaagaatcttccatgtttttcagacagggcaacgaaaagaataccttaaaaatgttttt

SEQ ID NO: 44725 - DNA, 80 bp, synthetic construct
  source 1..80: mol_type = other DNA
ttgcttttcattgaaaaacagcataaattattccttttctacagaaatctcaacttctattctgcagtattgtggtttca

SEQ ID NO: 44726 - DNA, 80 bp, synthetic construct
  source 1..80: mol_type = other DNA
tttgtgattccacatttctcttccattgtagagcaaatccatccccacaccctgttcactcctttgctgattggtttcgt

SEQ ID NO: 44727 - DNA, 80 bp, synthetic construct; identical to SEQ ID NO: 15048
  source 1..80: mol_type = other DNA

SEQ ID NO: 44728 - DNA, 80 bp, synthetic construct
  source 1..80: mol_type = other DNA
tttgttccacctgaaacaatgagttttctgtgaaattgcgccccttttgataggtttgccatagagaacatcgtaggaaa

SEQ ID NO: 44729 - DNA, 80 bp, synthetic construct
  source 1..80: mol_type = other DNA
actgcttatggcttaattaagtcagatgcggccatgactgtcgctgtaaagatgctcaagcgtaagttcctgtatggtac

SEQ ID NO: 44730 - DNA, 80 bp, synthetic construct
  source 1..80: mol_type = other DNA
cctgcaccattggaggtaaagccgtgtccaagctgccttttattgtctgtcaggttatcaaaacatgacattttaatatg

SEQ ID NO: 44731 - DNA, 80 bp, synthetic construct; identical to SEQ ID NO: 15049
  source 1..80: mol_type = other DNA

SEQ ID NO: 44732 - DNA, 80 bp, synthetic construct
  source 1..80: mol_type = other DNA
tcccatcaaggatgtctgtgatgtttgcagaaagtatttcagttgaaagaaacaaagatgtgtaaaatgagctgtttctg

SEQ ID NO: 44733 - DNA, 80 bp, synthetic construct
  source 1..80: mol_type = other DNA
aaatttttcaactagtagcgctcagaacacaggtcattttaggttttcactcactttccagtcttgtcccagctggctgc

SEQ ID NO: 44734 - DNA, 80 bp, synthetic construct
  source 1..80: mol_type = other DNA
ctctgtaaaaccagcagtcatgcttggctccaaatactaatgtcacttagaaattcaggttaaaagaggcttgcttgttt

SEQ ID NO: 44735 - DNA, 80 bp, synthetic construct
  source 1..80: mol_type = other DNA
tttttatgggaggcagaattaatctatatatctcaccttctttctaaccttttcttatgtgcttttagggcccaccctgg

SEQ ID NO: 44736 - DNA, 80 bp, synthetic construct; identical to SEQ ID NO: 15050
  source 1..80: mol_type = other DNA

SEQ ID NO: 44737 - DNA, 80 bp, synthetic construct
  source 1..80: mol_type = other DNA
agttttcttctacactttagttccatgcaactgaatgcattctatatctgtttctcttacggttctgtcctgcatgtatt

SEQ ID NO: 44738 - DNA, 80 bp, synthetic construct
  source 1..80: mol_type = other DNA
tgccatcgacctctggattattcctgtataccttgcctcttgccctttttatttcatcatgctattaaaagacataacta

SEQ ID NO: 44739 - DNA, 80 bp, synthetic construct; identical to SEQ ID NO: 15051
  source 1..80: mol_type = other DNA

SEQ ID NO: 44740 - DNA, 80 bp, synthetic construct
  source 1..80: mol_type = other DNA
ctcagtaaatattattgatgggcaattaccccttaaagccattttctgtacctctggctaaagtttaaaaccccaggtga

SEQ ID NO: 44741 - DNA, 80 bp, synthetic construct
  source 1..80: mol_type = other DNA
tttaactttctgatataatggcctaaattgttcaatcctgtgtgatgttctttgtgctttgggatcccatatgggattgg

SEQ ID NO: 44742 - DNA, 80 bp, synthetic construct
  source 1..80: mol_type = other DNA
ccaacttgatttttttttaaaccttcctccatcagtcactatatgttaacgatctctgcctcctgcataacacgtcttgg

SEQ ID NO: 44743 - DNA, 80 bp, synthetic construct
  source 1..80: mol_type = other DNA
aaggacacctagtttctgggcatggaccccaatatcgattattaaaaactcatttcttacagaacaggattttcaaactc

SEQ ID NO: 44744 - DNA, 80 bp, synthetic construct; identical to SEQ ID NO: 15052
  source 1..80: mol_type = other DNA

SEQ ID NO: 44745 - DNA, 80 bp, synthetic construct
  source 1..80: mol_type = other DNA
ggtcagagcatatgtttttgtgcctgagtatctttctatagatatgggatctttgctttaattcgccatccctctcctct

SEQ ID NO: 44746 - DNA, 80 bp, synthetic construct
  source 1..80: mol_type = other DNA
ctttatggttgtaattgctaagaaaaatcctctcttcctcacaggctcatacatagaaagagatgtgactcccgccatca

SEQ ID NO: 44747 - DNA, 80 bp, synthetic construct
  source 1..80: mol_type = other DNA
ttttgagaacagagcattttagagccatagttaaaatgcagaatgtcattttgaagtgtggtaaccaaaagcagaggaaa

SEQ ID NO: 44748 - DNA, 80 bp, synthetic construct; identical to SEQ ID NO: 15053
  source 1..80: mol_type = other DNA

SEQ ID NO: 44749 - DNA, 80 bp, synthetic construct
  source 1..80: mol_type = other DNA
cttaggaagtaagattaaccgaacagaatgagttaccagtcctacccttaaatgtcatgggtgacatttcccaacaatta

SEQ ID NO: 44750 - DNA, 80 bp, synthetic construct
  source 1..80: mol_type = other DNA
gactatttcttatgtatttccctatgaatgaaagcagtcctgagaagaaaacagcatttattagaattgcttttaaaaga

SEQ ID NO: 44751 - DNA, 80 bp, synthetic construct; identical to SEQ ID NO: 15054
  source 1..80: mol_type = other DNA

SEQ ID NO: 44752 - DNA, 80 bp, synthetic construct
  source 1..80: mol_type = other DNA
tgattttcataatgtaaatcctgtctagggatatcacacattttagcagtcaaattaagtatacttcagcaaaatttgca

SEQ ID NO: 44753 - DNA, 80 bp, synthetic construct
  source 1..80: mol_type = other DNA
tcattgaaggtcacagcaggagaaattttggggggattggcatgccgtgtgaaaaatattaaaatctaagatcatattca

SEQ ID NO: 44754 - DNA, 80 bp, synthetic construct
  source 1..80: mol_type = other DNA
ttgcagcaccttcctattttaaaagttggagaaactaaggcatggcatattttagtgctttttatctgaggtgacacagg

SEQ ID NO: 44755 - DNA, 80 bp, synthetic construct; identical to SEQ ID NO: 15055
  source 1..80: mol_type = other DNA

SEQ ID NO: 44756 - DNA, 80 bp, synthetic construct
  source 1..80: mol_type = other DNA
acttctcttcatcctggtgcaattttggaaggaagaatgataagtcgttaattatccagtcctctgaatattgaccaaag

SEQ ID NO: 44757 - DNA, 80 bp, synthetic construct
  source 1..80: mol_type = other DNA
attttgtcaagagttgtccaatacctctgaatctttgtttttctccccttgggaataatagtgattcctgactcagaaag

SEQ ID NO: 44758 - DNA, 80 bp, synthetic construct
  source 1..80: mol_type = other DNA
tctatcaggcttccagattgtagactccagttcaagtcagttgaactaaccaatcacagatctcgctttcaccaggctag

SEQ ID NO: 44759 - DNA, 80 bp, synthetic construct; identical to SEQ ID NO: 15056
  source 1..80: mol_type = other DNA

SEQ ID NO: 44760 - DNA, 80 bp, synthetic construct
  source 1..80: mol_type = other DNA
tggtgattaatgtaaatatgattttgagatacctataaagacttaataggatatgaagatatttatgattactgttcatg

SEQ ID NO: 44761 - DNA, 80 bp, synthetic construct
  source 1..80: mol_type = other DNA
ggagcccttataggaactttagcacaacatctaggaagggaagggatattggaagttttttgttttgtttttgtaagctg

SEQ ID NO: 44762 - DNA, 80 bp, synthetic construct
  source 1..80: mol_type = other DNA
agctcaactttaatggagagagttctccaaagagtcaggatcacaagccactactgtttatcaagtacttgcctttcttc

SEQ ID NO: 44763 - DNA, 80 bp, synthetic construct
  source 1..80: mol_type = other DNA
agtgtattagagaaagttttgggttttgacagaaaacccaaaataaaagaagtctaggagtagactttataccaggattg

SEQ ID NO: 44764 - DNA, 80 bp, synthetic construct; identical to SEQ ID NO: 15057
  source 1..80: mol_type = other DNA

SEQ ID NO: 44765 - DNA, 80 bp, synthetic construct
  source 1..80: mol_type = other DNA
aaatgtagtcctaattgtgagaggccgtgtttctgtttttaaggaaggagagggacatattcagtggaaactaacaaatc

SEQ ID NO: 44766 - DNA, 80 bp, synthetic construct
  source 1..80: mol_type = other DNA
gcacttgtgagccatgtatttcagaggtgattgggatcatctgagttcatataggtaaaaggtttttgtgagatggtact

SEQ ID NO: 44767 - DNA, 80 bp, synthetic construct
  source 1..80: mol_type = other DNA
tatacacgtttgaaagtgacgtctggtcctatgggatttttctttgggagctgttctctttaggtaaaatgatccttgcc

SEQ ID NO: 44768 - DNA, 80 bp, synthetic construct; identical to SEQ ID NO: 15058
  source 1..80: mol_type = other DNA

SEQ ID NO: 44769 - DNA, 80 bp, synthetic construct
  source 1..80: mol_type = other DNA
tacatgcagtgttttatgttatctatatgtcagtccatatgtccagttgcatagccctggaattattactgaagttgctg

SEQ ID NO: 44770 - DNA, 80 bp, synthetic construct
  source 1..80: mol_type = other DNA
ttcaagcaaattgttcagctaattgagaagcagatttcagagagcaccaatcatgtgagtataccctggccaggcataga

SEQ ID NO: 44771 - DNA, 80 bp, synthetic construct
  source 1..80: mol_type = other DNA
ctgagccaaagaaggatgtgagattgagggggaagggtggagagttttgtactcactggaagtagaagtttccataagga

SEQ ID NO: 44772 - DNA, 80 bp, synthetic construct; identical to SEQ ID NO: 15059
  source 1..80: mol_type = other DNA

SEQ ID NO: 44773 - DNA, 80 bp, synthetic construct
  source 1..80: mol_type = other DNA
tcctgggctgtgtgcttggagctatcttttctttcctaatagcacaccactgataatttttgggttaaagcttgttcttc

SEQ ID NO: 44774 - DNA, 80 bp, synthetic construct
  source 1..80: mol_type = other DNA
agttgctggagagatttacaagccttttaaataggtaagatagtgcttggtgcctggtgtgcccttttagaagagctaag

SEQ ID NO: 44775 - DNA, 80 bp, synthetic construct; identical to SEQ ID NO: 15060
  source 1..80: mol_type = other DNA

SEQ ID NO: 44776 - DNA, 80 bp, synthetic construct
  source 1..80: mol_type = other DNA
ggaatgatctcttcttttggcttccatgatggttattttcttttctttcaacttgcatccaactccaggatagtgggcac

SEQ ID NO: 44777 - DNA, 80 bp, synthetic construct
  source 1..80: mol_type = other DNA
ccaactgtatatattcccaatagcaacgtagcttctaccatgaacagaaaacattctgatttggaaaaagagagggaggt

SEQ ID NO: 44778 - DNA, 80 bp, synthetic construct
  source 1..80: mol_type = other DNA
atgtggaaaacagaacatcattagaacaaaggacagagtatgaacacctgggcttaagaaatctagtatttcatgctggg

SEQ ID NO: 44779 - DNA, 80 bp, synthetic construct; identical to SEQ ID NO: 15061
  source 1..80: mol_type = other DNA

SEQ ID NO: 44780 - DNA, 80 bp, synthetic construct
  source 1..80: mol_type = other DNA
ttttagctgatgaacttattctgtagattctgtggaacaagcctatcagcttcagaatggcattgtactcaatggatttg

SEQ ID NO: 44781 - DNA, 80 bp, synthetic construct
  source 1..80: mol_type = other DNA
tgtacgtttgtatgtgtgtagacaaatatttggaggggtatttttgccctgagtccaagagggtcctttagtacctgaaa

SEQ ID NO: 44782 - DNA, 80 bp, synthetic construct
  source 1..80: mol_type = other DNA
ttgcagttcacctgcacttaaggcactctgttatttagactcatcttactgtacctgttccttagaccttccataatgct

SEQ ID NO: 44783 - DNA, 80 bp, synthetic construct; identical to SEQ ID NO: 15062
  source 1..80: mol_type = other DNA

SEQ ID NO: 44784 - DNA, 80 bp, synthetic construct
  source 1..80: mol_type = other DNA
agtggttgttagttatagatgtctaggtacttcaggggcacttcattgagagttttgtcttggatattcttgaaagttta

SEQ ID NO: 44785 - DNA, 80 bp, synthetic construct
  source 1..80: mol_type = other DNA
actttatgtgtaaatacataagcggcgtaagtttaaaggatgttggtgttccacgtgttttattcctgtatgttgtccaa

SEQ ID NO: 44786 - DNA, 80 bp, synthetic construct
  source 1..80: mol_type = other DNA
gtcactgtaactatttttattacattacaataattaggagtagtacagttcatgacaaaaatattacaaattttagatca

SEQ ID NO: 44787 - DNA, 80 bp, synthetic construct
  source 1..80: mol_type = other DNA
tggatcacactgcatatgtcccacaaaagaaagcacaatgtacaaaatgtgcatgtttcagtttacactatacaaaaata

SEQ ID NO: 44788 - DNA, 80 bp, synthetic construct; identical to SEQ ID NO: 15063
  source 1..80: mol_type = other DNA

SEQ ID NO: 44789 - DNA, 80 bp, synthetic construct
  source 1..80: mol_type = other DNA
taacacagaagttactaaatataaattcagctttaaggtaactgctgggttctaaaaaacattactacacaattatcaag

SEQ ID NO: 44790 - DNA, 80 bp, synthetic construct
  source 1..80: mol_type = other DNA
acatgccccacaaagtttctatgtatatattaggacaaaattgtgcaatggtgacaacagttttgataacctataaaagt

SEQ ID NO: 44791 - DNA, 80 bp, synthetic construct
  source 1..80: mol_type = other DNA
acaaggatttttgtctttaaggctgtaataattaggtaacatttatttctagaattctccccctttaaaatctctacaaa

SEQ ID NO: 44792 - DNA, 80 bp, synthetic construct; identical to SEQ ID NO: 15064
  source 1..80: mol_type = other DNA

SEQ ID NO: 44793 - DNA, 80 bp, synthetic construct
  source 1..80: mol_type = other DNA
attacacatttgggtcaatatgaatatctgacatacaccttaatgtgtacagtaattgtcctaaaagaatcacagttatg

SEQ ID NO: 44794 - DNA, 80 bp, synthetic construct
  source 1..80: mol_type = other DNA
tgttatctctgggtcgtataccaaaggccttagtaagatattacagaccacactagcactacctaaggaccgggattatg

SEQ ID NO: 44795 - DNA, 80 bp, synthetic construct
  source 1..80: mol_type = other DNA
caacagggtgaaaccccgtctctcctaaaaatacaaaaattagttgagtgtagtggcacacgcctgtaatcccagctact

SEQ ID NO: 44796 - DNA, 80 bp, synthetic construct
  source 1..80: mol_type = other DNA
atttctggttactaaaacaatggaatgtattactgttaccaggagtagtcctagttatagattacctaaggaattctttc

SEQ ID NO: 44797 - DNA, 80 bp, synthetic construct; identical to SEQ ID NO: 15065
  source 1..80: mol_type = other DNA

SEQ ID NO: 44798 - DNA, 80 bp, synthetic construct
  source 1..80: mol_type = other DNA
ggtagggaggcaagatgacactaatatggaagaagagtcctaaaacgagaatggatattcaaatataaacttcacctctt

SEQ ID NO: 44799 - DNA, 80 bp, synthetic construct
  source 1..80: mol_type = other DNA
acatgaagaaatggatagtaagtgatgtcctcaaaatcagagtcctaaaagacacctatctagaacctaagtcaccttct

SEQ ID NO: 44800 - DNA, 80 bp, synthetic construct
  source 1..80: mol_type = other DNA
atggatcagacttgaaaagtgtttatgcaatgttaatttaaccagtgttaagagaactagccaaacctagagattgtaaa

SEQ ID NO: 44801 - DNA, 80 bp, synthetic construct; identical to SEQ ID NO: 15066
  source 1..80: mol_type = other DNA

SEQ ID NO: 44802 - DNA, 80 bp, synthetic construct
  source 1..80: mol_type = other DNA
cttggtctcttcaacacctaataagctataactggcccaaataatcttttaatgtcacaagcagaattaaaactatcttc

SEQ ID NO: 44803 - DNA, 80 bp, synthetic construct
  source 1..80: mol_type = other DNA
gctataataatccccatttcatactgggtctgccttaacaggaaaagctattaggagtctttatagtaatttatctaatg

SEQ ID NO: 44804 - DNA, 80 bp, synthetic construct
  source 1..80: mol_type = other DNA
agggatgacaaactataggacatgatgcctagaagaatcatcatcaggaagcccataaatttgtgttccctcaatgtttc

SEQ ID NO: 44805 - DNA, 80 bp, synthetic construct; identical to SEQ ID NO: 15067
  source 1..80: mol_type = other DNA

SEQ ID NO: 44806 - DNA, 80 bp, synthetic construct
  source 1..80: mol_type = other DNA
ttaaaataagcatttaaggtaaaagctaacagtctgcatggagcaggaaaaaaattaggtaatgctaaaacaaatgctaa

SEQ ID NO: 44807 - DNA, 80 bp, synthetic construct
  source 1..80: mol_type = other DNA
aatgtatagaaggcatcatcaacaccctgaaatacataaaaagtattaaaatgtgaatatatacgatggcttcatgtgta

SEQ ID NO: 44808 - DNA, 80 bp, synthetic construct; identical to SEQ ID NO: 15068
  source 1..80: mol_type = other DNA

SEQ ID NO: 44809 - DNA, 80 bp, synthetic construct
  source 1..80: mol_type = other DNA
tctatacttacgtaaaatccattggatttaaaaatttaccaagaagtaaacagtattcgaacatcctattccaataattt

SEQ ID NO: 44810 - DNA, 80 bp, synthetic construct
  source 1..80: mol_type = other DNA
gtggagaaattagctaaatcatttgaaaggtcttatagtttaccaatttggaggagattctttctatcccataaagtttt

SEQ ID NO: 44811 - DNA, 80 bp, synthetic construct
  source 1..80: mol_type = other DNA
aataatctacagtgtgaaaaatggcactctcaaactggtagtagattttaaacctgcagtacttaaattatgcaagatcc

SEQ ID NO: 44812 - DNA, 80 bp, synthetic construct; identical to SEQ ID NO: 15069
  source 1..80: mol_type = other DNA

SEQ ID NO: 44813 - DNA, 80 bp, synthetic construct
  source 1..80: mol_type = other DNA
ggagtttcagaccagcctggccaacatggtgaaaccctgtctctactaaaaatacaaaaattagctgggtgtggtagcag

SEQ ID NO: 44814 - DNA, 80 bp, synthetic construct
  source 1..80: mol_type = other DNA
ggtatttctcctttactgtactactaagattaacgatatttcaaaataaatctggagcatgaacaatgaaaattagctac

SEQ ID NO: 44815 - DNA, 80 bp, synthetic construct
  source 1..80: mol_type = other DNA
aagtccccaaactgcactcactgatgtttcccactctctaatatcattactgatactacacaaacatatgcttttgtttc

SEQ ID NO: 44816 - DNA, 80 bp, synthetic construct; identical to SEQ ID NO: 15070
  source 1..80: mol_type = other DNA

SEQ ID NO: 44817 - DNA, 80 bp, synthetic construct
  source 1..80: mol_type = other DNA
gattctgacaaagattctaggcttatgttgcaatgaactctcctctctacatcatcttgttaaaattaagtaattttggc

SEQ ID NO: 44818 - DNA, 80 bp, synthetic construct
  source 1..80: mol_type = other DNA
cgtgaaggaaatgtcacaacctacacagagcaatgaattctttttttctcatatgagaactaatcattctcacacataca

SEQ ID NO: 44819 - DNA, 80 bp, synthetic construct
  source 1..80: mol_type = other DNA
gccaaaatttttttatttttactttttttaagagatggagtctctttctgttgcctaggctacagtgccatggcaccatc

SEQ ID NO: 44820 - DNA, 80 bp, synthetic construct; identical to SEQ ID NO: 15071
  source 1..80: mol_type = other DNA

SEQ ID NO: 44821 - DNA, 80 bp, synthetic construct
  source 1..80: mol_type = other DNA
atcatctaatggtgagacaataggaggagaaaataaaaaattaaaaccaccacctaaatctggtcatggtactgttattt

SEQ ID NO: 44822 - DNA, 80 bp, synthetic construct
  source 1..80: mol_type = other DNA
tcatgctttgtttctgagtttagtagattagtacaccacgtagtatcttttgggattgagtctactattcaaatgtatat

SEQ ID NO: 44823 - DNA, 80 bp, synthetic construct
  source 1..80: mol_type = other DNA
tgaactttatgatacctagtgaagtattttctgagcaagacagagtttaatacgggtttagaaacgaaaatgagaattcc

SEQ ID NO: 44824 - DNA, 80 bp, synthetic construct
  source 1..80: mol_type = other DNA
atataatagttaagaatagtattctgggaatacacaggaagggctccatgcctagtctaagggtttaaagaaaggttttt

SEQ ID NO: 44825 - DNA, 80 bp, synthetic construct; identical to SEQ ID NO: 15072
  source 1..80: mol_type = other DNA

SEQ ID NO: 44826 - DNA, 80 bp, synthetic construct
  source 1..80: mol_type = other DNA
tacaggcacgtgccaccacgcccggctaattttttgtatttttagtagaaatagggtttcaccatgttagccaggctggt

SEQ ID NO: 44827 - DNA, 80 bp, synthetic construct
  source 1..80: mol_type = other DNA
ttctaacagtccaacaagaaatgataggggcctgaactaatgatgacataaaagacacagaatgtaacgtcacaggaatt

SEQ ID NO: 44828 - DNA, 80 bp, synthetic construct; identical to SEQ ID NO: 15073
  source 1..80: mol_type = other DNA

SEQ ID NO: 44829 - DNA, 80 bp, synthetic construct
  source 1..80: mol_type = other DNA
atacttcaagttagaatactacacctaagtagttctaaagtggttgccaccttgttacctttaaaagacatctgctttct

SEQ ID NO: 44830 - DNA, 80 bp, synthetic construct
  source 1..80: mol_type = other DNA
ttgtaaaacacaacttctttaaagtctgttgcattggtaagagtaatttactgggaaagccatgtgcaagaagtttgaga

SEQ ID NO: 44831 - DNA, 80 bp, synthetic construct; identical to SEQ ID NO: 15074
  source 1..80: mol_type = other DNA

SEQ ID NO: 44832 - DNA, 80 bp, synthetic construct
  source 1..80: mol_type = other DNA
gttttatcttaaattttaacacctttcagtctatttccagggtatacaagtgaagctgagactgggtcttctgtacatgt

SEQ ID NO: 44833 - DNA, 80 bp, synthetic construct
  source 1..80: mol_type = other DNA
atggagtgcaatggcacgatcatgactgcagcctcgacctcccaggctaggtgatccccctgcctcagcctctcaaatag

SEQ ID NO: 44834 - DNA, 80 bp, synthetic construct
  source 1..80: mol_type = other DNA
acctggccttactacaagtcttaaaaataatttttagaacagtgttcaatcatactggctgtgtgccttccattctaatt

SEQ ID NO: 44835 - DNA, 80 bp, synthetic construct; identical to SEQ ID NO: 15075
  source 1..80: mol_type = other DNA

SEQ ID NO: 44836 - DNA, 80 bp, synthetic construct
  source 1..80: mol_type = other DNA
tttctgagattggtaacatcaatgtttctactgaaccaaatgtaacaaagtggacctagcacctaaaaagttaatgtatc

SEQ ID NO: 44837 - DNA, 80 bp, synthetic construct
  source 1..80: mol_type = other DNA
gggcacactaatttttagaaatctcagaattatattaagaactgctttagtaaagtacagaaatttacctctaaagtcaa

SEQ ID NO: 44838 - DNA, 80 bp, synthetic construct
  source 1..80: mol_type = other DNA
cttatcttatttttaatggaatcaatttagttaactagttagctaagccaactacaaactttcaactacattcgttggca

SEQ ID NO: 44839 - DNA, 80 bp, synthetic construct; identical to SEQ ID NO: 15076
  source 1..80: mol_type = other DNA

SEQ ID NO: 44840 - DNA, 80 bp, synthetic construct
  source 1..80: mol_type = other DNA
ttaataagcaacataaataatttaaggcactaaaataactttgtagcatgtaaaatgtaaagcatgagctctgttaagat

SEQ ID NO: 44841 - DNA, 80 bp, synthetic construct
  source 1..80: mol_type = other DNA
aatgtcaatgtagaagtaccaaaacatactatgaaggagaaaaacagtattggtcctctactaatttagcagaagcaaat

SEQ ID NO: 44842 - DNA, 80 bp, synthetic construct
  source 1..80: mol_type = other DNA
gccaataattaaaaagaagagattattatccaccaccaagaattcagtgtcaggacctcagtggctcatataattaacag

SEQ ID NO: 44843 - DNA, 80 bp, synthetic construct; identical to SEQ ID NO: 15077
  source 1..80: mol_type = other DNA

SEQ ID NO: 44844 - DNA, 80 bp, synthetic construct
  source 1..80: mol_type = other DNA
ttgccacatatactcattttgtgggggttttttgtttttttttaactttttctttttttgttttttttttttgagatgga

SEQ ID NO: 44845 - DNA, 80 bp, synthetic construct
  source 1..80: mol_type = other DNA
gggggtttcaccatattgcccaggctggtctcaaactcctgaccttgtgatccgcctgcctcagcctcccaaagtgctag

SEQ ID NO: 44846 - DNA, 80 bp, synthetic construct
  source 1..80: mol_type = other DNA
aacattttcaactcaactattatctgaaaacatacttgtgaggctatggaaacaaagcactccatatagagaaagtactg

SEQ ID NO: 44847 - DNA, 80 bp, synthetic construct; identical to SEQ ID NO: 15078
  source 1..80: mol_type = other DNA

SEQ ID NO: 44848 - DNA, 80 bp, synthetic construct
  source 1..80: mol_type = other DNA
gaaaaaccactacttgggagactaccatggtgcacagcaagtgcacagtaactgttccgtcaatttttaactcataaaaa

SEQ ID NO: 44849 - DNA, 80 bp, synthetic construct
  source 1..80: mol_type = other DNA
actcaacatttttaggttcgtaaaactaattttcacattatatttaaattgagacccccagagagcagaaaagccgaatg

SEQ ID NO: 44850 - DNA, 80 bp, synthetic construct
  source 1..80: mol_type = other DNA
aggaaaatctgtcaacaacccagataaatgtgaactaggtaacagtccttatacactaggaacatagggactacacaatg

SEQ ID NO: 44851 - DNA, 80 bp, synthetic construct
  source 1..80: mol_type = other DNA
cagctgggcacagtggctcacgcctgtaatcccagcactttgggaggccgagacgggcagatcacgaggtcaagagattg

SEQ ID NO: 44852 - DNA, 80 bp, synthetic construct; identical to SEQ ID NO: 15079
  source 1..80: mol_type = other DNA

SEQ ID NO: 44853 - DNA, 80 bp, synthetic construct
  source 1..80: mol_type = other DNA
gaggcacaagaattgcttgaacccaggaggaggaggttgcaatcagccaagatcccaccactgcactccagcctgggtga

SEQ ID NO: 44854 - DNA, 80 bp, synthetic construct
  source 1..80: mol_type = other DNA
aacactaaagttacccagagaattaggaatcagcatattacagccaatggaccaaatgcagccacagccttttttttttt

SEQ ID NO: 44855 - DNA, 80 bp, synthetic construct
  source 1..80: mol_type = other DNA
aggataacaggcacccgccaccacgcctggctaagttttgtatttttagtagagacggggtttcaaccacgttggccagg

SEQ ID NO: 44856 - DNA, 80 bp, synthetic construct; identical to SEQ ID NO: 15080
  source 1..80: mol_type = other DNA

SEQ ID NO: 44857 - DNA, 80 bp, synthetic construct
  source 1..80: mol_type = other DNA
ttttaggctcatgatcaagaccccaaaagttagggcataaaacaacttgccgataaaatacaacaaggatatgcacacta

SEQ ID NO: 44858 - DNA, 80 bp, synthetic construct
  source 1..80: mol_type = other DNA
cagtgaaacccgtctctactaaaaatacaaaaatttagcaaggcatggtggcgggtgcctgtagtcccagctacttggga

SEQ ID NO: 44859 - DNA, 80 bp, synthetic construct; identical to SEQ ID NO: 15081
  source 1..80: mol_type = other DNA

SEQ ID NO: 44860 - DNA, 80 bp, synthetic construct
  source 1..80: mol_type = other DNA
taataataaaaggaaatcaaagaacagaaattaaatatctaatttatagtttagcaacataaattacataataacatcag

SEQ ID NO: 44861 - DNA, 80 bp, synthetic construct
  source 1..80: mol_type = other DNA
caaacaaaaaaacccaaggccacaaaactgtataaaacctaaaaatctcttataaaaggaagccagatagttttctgatc

SEQ ID NO: 44862 - DNA, 80 bp, synthetic construct
  source 1..80: mol_type = other DNA
aaatgagaagtggacagcaacaaagtgggactaacaagactctttttatgtcctctactgcttttctactcaaagtatgg

SEQ ID NO: 44863 - DNA, 80 bp, synthetic construct
  source 1..80: mol_type = other DNA
ttatgcaaagtctcttaaattttttcttttctttgtgaaatgtaagctaaaatgttcagtggtataaaaagcatctttta

SEQ ID NO: 44864 - DNA, 80 bp, synthetic construct; identical to SEQ ID NO: 15082
  source 1..80: mol_type = other DNA

SEQ ID NO: 44865 - DNA, 80 bp, synthetic construct
  source 1..80: mol_type = other DNA
ttgaagtagaatttactgtttctttactatatatcaaatttgtataactaggaagaggtacatatgctctcctactaggg

SEQ ID NO: 44866 - DNA, 80 bp, synthetic construct
  source 1..80: mol_type = other DNA
acaaaactggttttctgggctcacaggtaaatgtaaccagaaaaagccctaaacaaattgatggaatatagatggatcaa

SEQ ID NO: 44867 - DNA, 80 bp, synthetic construct; identical to SEQ ID NO: 15083
  source 1..80: mol_type = other DNA

SEQ ID NO: 44868 - DNA, 80 bp, synthetic construct
  source 1..80: mol_type = other DNA
ggtattccaaaagaaggcaatgttattataggagatgacagctccacgtgtgttactgcccctgaagatcttccagtggg

SEQ ID NO: 44869 - DNA, 80 bp, synthetic construct
  source 1..80: mol_type = other DNA
aggaaagaaaaatttgtatagctgtataatgtgtgttttaagctgtattacaaaagtcaaaatgttaggaaaaattaaaa

SEQ ID NO: 44870 - DNA, 80 bp, synthetic construct
  source 1..80: mol_type = other DNA
ggtttgtatccctggggcaagagactatactacatatcccaggtgtatagtaggttatactaccaaggtttgtgtaagta

SEQ ID NO: 44871 - DNA, 80 bp, synthetic construct
  source 1..80: mol_type = other DNA
ataatagcaactgaaattattttattttacctgaagaaaaagtcatttttaaaacaaagatgatttttgaaacaaaattc

SEQ ID NO: 44872 - DNA, 80 bp, synthetic construct; identical to SEQ ID NO: 15084
  source 1..80: mol_type = other DNA

SEQ ID NO: 44873 - DNA, 80 bp, synthetic construct
  source 1..80: mol_type = other DNA
aattttcaatgtagaaagaaaccaaagccaaaagcagtaccatggacactggattaagaagcaatgccctctcaagagac

SEQ ID NO: 44874 - DNA, 80 bp, synthetic construct
  source 1..80: mol_type = other DNA
gaattccataacttcttgctaagtcctgagcctgttttgtgtctactgttctagaaggcaaatcacatttatttcctact

SEQ ID NO: 44875 - DNA, 80 bp, synthetic construct
  source 1..80: mol_type = other DNA
tgtcataaaatttggctgaaagaaaacaatgtaattcctagtttccactacaccaaattttccttccttcttctactagt

SEQ ID NO: 44876 - DNA, 80 bp, synthetic construct
  source 1..80: mol_type = other DNA
taacagactataattttagaaacgtatgttaaatgtgtaaagataaaaaatattttacaaaaacctgaattaaagcatta

SEQ ID NO: 44877 - DNA, 80 bp, synthetic construct; identical to SEQ ID NO: 15085
  source 1..80: mol_type = other DNA

SEQ ID NO: 44878 - DNA, 80 bp, synthetic construct
  source 1..80: mol_type = other DNA
aatgttcttaaataaaatgttaaacttcttataactaggctaactcgttattatatgacatagccactgagtgattcatt

SEQ ID NO: 44879 - DNA, 80 bp, synthetic construct
  source 1..80: mol_type = other DNA
tataatgccactgtttatccaatccaagcaattctatgctatacacacgattgcttttaagactgttaaagtgacaccat

SEQ ID NO: 44880 - DNA, 80 bp, synthetic construct
  source 1..80: mol_type = other DNA
tggagcaagttactccactgctctaatcccccaagaacttcatttataaaacagggatattacctacctcataaacatta

SEQ ID NO: 44881 - DNA, 80 bp, synthetic construct
  source 1..80: mol_type = other DNA
atatcttcaaatgatttagtattatttatggcaaatacacaaagaaagccctccccagtcctcatgtactggtccctcat

SEQ ID NO: 44882 - DNA, 80 bp, synthetic construct; identical to SEQ ID NO: 15086
  source 1..80: mol_type = other DNA

SEQ ID NO: 44883 - DNA, 80 bp, synthetic construct
  source 1..80: mol_type = other DNA
ccattaggattggctattattaaaaaaacaaaacaaaaaaactcaaaaaatggaaaataagtgttagcaaggatacagac

SEQ ID NO: 44884 - DNA, 80 bp, synthetic construct
  source 1..80: mol_type = other DNA
atacatgtacaccaatgttcgcagcagcactatttataatacccaaaatgtggaaataacttaagtgtctgttaacagat

SEQ ID NO: 44885 - DNA, 80 bp, synthetic construct
  source 1..80: mol_type = other DNA
taaaaggaaatgctcactggagcatttgattttggatttttttttctttcatctttttttttttttttttttttttggag

SEQ ID NO: 44886 - DNA, 80 bp, synthetic construct; identical to SEQ ID NO: 15087
  source 1..80: mol_type = other DNA

SEQ ID NO: 44887 - DNA, 80 bp, synthetic construct
  source 1..80: mol_type = other DNA
ggggagggaggattactggggactatttgacaggtacagaattctaatttgggatgataaaaaaaagttctcaaaacaga

SEQ ID NO: 44888 - DNA, 80 bp, synthetic construct
  source 1..80: mol_type = other DNA
gtcaggagatcaagaacatcctggccaacatggtgaaaccccatctctattaaaatacaaaatattagccgggcgtggtg

SEQ ID NO: 44889 - DNA, 80 bp, synthetic construct
  source 1..80: mol_type = other DNA
aaaactaccatggtaaactttatgttatgcatattttaccacaaaaaaaaattttttaaaggtattatatggagagtcaa

SEQ ID NO: 44890 - DNA, 80 bp, synthetic construct; identical to SEQ ID NO: 15088
  source 1..80: mol_type = other DNA

SEQ ID NO: 44891 - DNA, 80 bp, synthetic construct
  source 1..80: mol_type = other DNA
ttcttctgacttttgggtaatacttctgctcaagatttcacacattctgccaaaacagtcctcaaaaaatatggtaaagg

SEQ ID NO: 44892 - DNA, 80 bp, synthetic construct
  source 1..80: mol_type = other DNA
tcgcccaggctggagtgctgtggtgcaatctcggctcactacaacctctgcctcctgggctcgagtgattctcctgcctc

SEQ ID NO: 44893 - DNA, 80 bp, synthetic construct
  source 1..80: mol_type = other DNA
acaggcatgagccactgcgcccagcctctaaagtatgtttagtttatgaattactctgtagaccattctatcagagggag

SEQ ID NO: 44894 - DNA, 80 bp, synthetic construct; identical to SEQ ID NO: 15089
  source 1..80: mol_type = other DNA

SEQ ID NO: 44895 - DNA, 80 bp, synthetic construct
  source 1..80: mol_type = other DNA
ggcctggtggtgcatgactgtaatcccagctactcgggaggctgaggcaggagaatcacttgaacccgggaggtggaggt

SEQ ID NO: 44896 - DNA, 80 bp, synthetic construct
  source 1..80: mol_type = other DNA
tgtttttctttggttttcaattttttaaagtatgaaaacctacatattagactataattttgtgcttatcttttaaagca

SEQ ID NO: 44897 - DNA, 80 bp, synthetic construct
  source 1..80: mol_type = other DNA
agaactcctatagatcacaaattaaaaaccattctaaagagtaatgaaaaagcaggaggtgggagcaaagcacagagtct

SEQ ID NO: 44898 - DNA, 80 bp, synthetic construct
  source 1..80: mol_type = other DNA
atctcgagtcactgcaacctccgcctcccaggttcaagcgattctcctacctcagcctcctgagtagctgggactactgg

SEQ ID NO: 44899 - DNA, 80 bp, synthetic construct; identical to SEQ ID NO: 15090
  source 1..80: mol_type = other DNA

SEQ ID NO: 44900 - DNA, 80 bp, synthetic construct
  source 1..80: mol_type = other DNA
ccgagaaactgggaaagcagtcccctattcactgataaatctcattcctattatcttttccctaccagaccttaaaaata

SEQ ID NO: 44901 - DNA, 80 bp, synthetic construct
  source 1..80: mol_type = other DNA
gagctattttcagtgcaacttggtaaaaactaaagaagaaaaagtgttaaatgaaatacgatctaaaaagaatggataaa

SEQ ID NO: 44902 - DNA, 80 bp, synthetic construct; identical to SEQ ID NO: 15091
  source 1..80: mol_type = other DNA

SEQ ID NO: 44903 - DNA, 80 bp, synthetic construct
  source 1..80: mol_type = other DNA
agactttgtgacaaagacccatatggccctttatagaaaagtttgccaactcctgctgtaagttaataactcttcacatt

SEQ ID NO: 44904 - DNA, 80 bp, synthetic construct
  source 1..80: mol_type = other DNA
ttacgtttttaattagtatttccagcctttcaaaaaagtaaacttttaaattaggtacataagttaccaaggttactaat

SEQ ID NO: 44905 - DNA, 80 bp, synthetic construct
  source 1..80: mol_type = other DNA
tactggcaagactgaattgtagacagaattcaaacatttctggtgacataataagcacaatatttttggaaagcaattac

SEQ ID NO: 44906 - DNA, 80 bp, synthetic construct; identical to SEQ ID NO: 15092
  source 1..80: mol_type = other DNA

SEQ ID NO: 44907 - DNA, 80 bp, synthetic construct
  source 1..80: mol_type = other DNA
ggcacctataatcccaacaccttgggaggccgagacaggtggatcacctgaggtcaagagttcaagaccagcctggccaa

SEQ ID NO: 44908 - DNA, 80 bp, synthetic construct
  source 1..80: mol_type = other DNA
atcatgtcattcacttgctcaaagtcctccaatagcactcttcggtcttaaaaataaaaatgcaaagcactcttccttct

SEQ ID NO: 44909 - DNA, 80 bp, synthetic construct
  source 1..80: mol_type = other DNA
cgcctgttgtactcaccactacacaccctctacctaacagtcttgaacgctataggtaattagtactgcctcttaaataa

SEQ ID NO: 44910 - DNA, 80 bp, synthetic construct; identical to SEQ ID NO: 15093
  source 1..80: mol_type = other DNA

SEQ ID NO: 44911 - DNA, 80 bp, synthetic construct
  source 1..80: mol_type = other DNA
atgtaaaaatacaaccaaaacaatacacacagagattttaacacatttatgggagggaagaaaataagactagggaaaag

SEQ ID NO: 44912 - DNA, 80 bp, synthetic construct
  source 1..80: mol_type = other DNA
atatgaaagagctggttggtacacacatgaggttcattatactactattctataaagcactaagagtgcacccattttat

SEQ ID NO: 44913 - DNA, 80 bp, synthetic construct
  source 1..80: mol_type = other DNA
tctgcatatttatcgccaacgtgtgtcctttgcccatgtggaattttaatcttcttttacactgacttgcataatttttt

SEQ ID NO: 44914 - DNA, 80 bp, synthetic construct; identical to SEQ ID NO: 15094
  source 1..80: mol_type = other DNA

SEQ ID NO: 44915 - DNA, 80 bp, synthetic construct
  source 1..80: mol_type = other DNA
caaacatcatctcatttaatctccatcttcattctgccaattccatgagatgctcttctcaatataactagaactgctga

SEQ ID NO: 44916 - DNA, 80 bp, synthetic construct
  source 1..80: mol_type = other DNA
tccgaaaggttatttaaattcactgtagaatgatgtgttccgcactttccgtttataagccatcaaagacggttgtagac

SEQ ID NO: 44917 - DNA, 80 bp, synthetic construct
  source 1..80: mol_type = other DNA
taggtgtcacattccgtgtcacacattatatagtttctgacctcaagcaactaaggtgagtggaagagacatgaacgtaa

SEQ ID NO: 44918 - DNA, 80 bp, synthetic construct; identical to SEQ ID NO: 15095
  source 1..80: mol_type = other DNA

SEQ ID NO: 44919 - DNA, 80 bp, synthetic construct
  source 1..80: mol_type = other DNA
ttgcatgggcagttcacaacacggttcacgctcctattagaatctaatgctgccgatctgacaggagctaaggcaagtaa

SEQ ID NO: 44920 - DNA, 80 bp, synthetic construct
  source 1..80: mol_type = other DNA
gggccagcttacggagggtcatgtgtatattaagtaaggagttttaaacttcatcctatacaaaatcactaaaaggtttt

SEQ ID NO: 44921 - DNA, 80 bp, synthetic construct
  source 1..80: mol_type = other DNA
aaatcttcccagcattccctgaatcttaggagtagtgcccattcttgatgttactgtgttacttcagtgtttttttgcct

SEQ ID NO: 44922 - DNA, 80 bp, synthetic construct; identical to SEQ ID NO: 15096
  source 1..80: mol_type = other DNA

SEQ ID NO: 44923 - DNA, 80 bp, synthetic construct
  source 1..80: mol_type = other DNA
cacaaaaacgtgtacataaatgtttatagtggcattattcaaaattgccaaaaagaggaaatcactcaaatgcccatcaa

SEQ ID NO: 44924 - DNA, 80 bp, synthetic construct
  source 1..80: mol_type = other DNA
tctttatatgaaataatcagagtggacaaatccacagagatggaaaaattagcagtttttagaggctggtgggagaaggg

SEQ ID NO: 44925 - DNA, 80 bp, synthetic construct
  source 1..80: mol_type = other DNA
taaattgtatgctatgtgaatacatttcaattttttaaaataacagagcttaccgacaggggatgagtacaaaggggagg

SEQ ID NO: 44926 - DNA, 80 bp, synthetic construct; identical to SEQ ID NO: 15097
  source 1..80: mol_type = other DNA

SEQ ID NO: 44927 - DNA, 80 bp, synthetic construct
  source 1..80: mol_type = other DNA
ctgagaactgttcagaaacagtatcttctccttacaaaatcactgggcacctacagttgaaataattttgcaaaactggt

SEQ ID NO: 44928 - DNA, 80 bp, synthetic construct
  source 1..80: mol_type = other DNA
aaagtaaggataaagaaaacaaagacttctttactaaatgctggatacttaaaattataagaatggtgaacattagctta

SEQ ID NO: 44929 - DNA, 80 bp, synthetic construct
  source 1..80: mol_type = other DNA
atcacttgaagtccaggtaagaatgagaggctggaatgaccgtggatccaatcttaatgccaatataatgttcatatttt

SEQ ID NO: 44930 - DNA, 80 bp, synthetic construct; identical to SEQ ID NO: 15098
  source 1..80: mol_type = other DNA

SEQ ID NO: 44931 - DNA, 80 bp, synthetic construct
  source 1..80: mol_type = other DNA
tctaaatctacctaatatttccaacaactatgtaatttgtatatatggacataccataatttattcacccattctctatt

SEQ ID NO: 44932 - DNA, 80 bp, synthetic construct
  source 1..80: mol_type = other DNA
aattacctggtcaaaggacatgtagtttacattttgaaacatatttccagactgacctccataaagtctgagggtctata

SEQ ID NO: 44933 - DNA, 80 bp, synthetic construct
  source 1..80: mol_type = other DNA
tttcttttttggtagacaagctatttatatctttagtaccccccatccctttttttctatttgtgtgtttgcttttctct

SEQ ID NO: 44934 - DNA, 80 bp, synthetic construct
  source 1..80: mol_type = other DNA
cccaaatgtttgccttaatggtttaaggatactctgatgatgagaaaggagtctcacttttctcaagggtgaaaaatatt

SEQ ID NO: 44935 - DNA, 80 bp, synthetic construct; identical to SEQ ID NO: 15099
  source 1..80: mol_type = other DNA

SEQ ID NO: 44936 - DNA, 80 bp, synthetic construct
  source 1..80: mol_type = other DNA
aggaggctgaggcaggagaatggctggaacccaggaggtggaggctgcagtgagccaagatcgcgccactgcactccagc

SEQ ID NO: 44937 - DNA, 80 bp, synthetic construct
  source 1..80: mol_type = other DNA
aaaatagtacagcgaatagcctcagcctcccaaagtgctaagattacaggcatgagccaccatatctggcttatttctac

SEQ ID NO: 44938 - DNA, 80 bp, synthetic construct
  source 1..80: mol_type = other DNA
catatataattagcatgattgcctagaaacactgctcttcaaaataaagtgggccatccatatccatgggtactgcatct

SEQ ID NO: 44939 - DNA, 80 bp, synthetic construct; identical to SEQ ID NO: 15100
  source 1..80: mol_type = other DNA

SEQ ID NO: 44940 - DNA, 80 bp, synthetic construct
  source 1..80: mol_type = other DNA
ccattaccaacttccatttgtatgtttttaaatctttggatttataaaaacccaaggtagaaaaaaaccatgaccagtaa

SEQ ID NO: 44941 - DNA, 80 bp, synthetic construct
  source 1..80: mol_type = other DNA
aatcaggtgctcacaactattctacagtcctataaaactctacaaaatgtgcactttcacaatttgccacttctgaatag

SEQ ID NO: 44942 - DNA, 80 bp, synthetic construct
  source 1..80: mol_type = other DNA
tatatactgcctcgtttcctttcttagttcactatactcacctacttagttaggcctaactaatacagacagtaatcttt

SEQ ID NO: 44943 - DNA, 80 bp, synthetic construct; identical to SEQ ID NO: 15101
  source 1..80: mol_type = other DNA

SEQ ID NO: 44944 - DNA, 80 bp, synthetic construct
  source 1..80: mol_type = other DNA
gttaacatatcaaggtttggatcttaacaccattgaggtttggggtcagataaccctgttgtgggggctttcccgtgcac

SEQ ID NO: 44945 - DNA, 80 bp, synthetic construct
  source 1..80: mol_type = other DNA
acccaaccatccctcattgattactaaagatatatgtataaactcagaagaatagcagcttacaaattacataaggcttt

SEQ ID NO: 44946 - DNA, 80 bp, synthetic construct; identical to SEQ ID NO: 15102
  source 1..80: mol_type = other DNA

SEQ ID NO: 44947 - DNA, 80 bp, synthetic construct
  source 1..80: mol_type = other DNA
ctgatctctgtaactacctacatttttttaaaacgagacttttcctcttccaccaaattttaccttagaaaaaaaacttc

SEQ ID NO: 44948 - DNA, 80 bp, synthetic construct
  source 1..80: mol_type = other DNA
acaatacaagtaaaggtgattatgtgcacagcctcgaatacaaacatactccatctatgtgtcatacctgaatgatttta

SEQ ID NO: 44949 - DNA, 80 bp, synthetic construct
  source 1..80: mol_type = other DNA
ctacttaacttggtctcagagaatttaaattgaaatcctaccacttattagctacgtatccttagatgagttacaacctc

SEQ ID NO: 44950 - DNA, 80 bp, synthetic construct
  source 1..80: mol_type = other DNA
atgtgcagtcatatcctttctaattttctctctgacccacacggattggtaaataccaatcaaaacctgcaatggcagtg

SEQ ID NO: 44951 - DNA, 80 bp, synthetic construct; identical to SEQ ID NO: 15103
  source 1..80: mol_type = other DNA

SEQ ID NO: 44952 - DNA, 80 bp, synthetic construct
  source 1..80: mol_type = other DNA
ttagcaaaaggtttcctaacccactttatcacattcatgacgtcatgctgtatatactcatatagcactcatgacctctg

SEQ ID NO: 44953 - DNA, 80 bp, synthetic construct
  source 1..80: mol_type = other DNA
taaccctgaatttgcaatacagattaaaatgggtgcactattcaaacctcttcaaagaaacaaaactatagtacacattg

SEQ ID NO: 44954 - DNA, 80 bp, synthetic construct; identical to SEQ ID NO: 15104
  source 1..80: mol_type = other DNA

SEQ ID NO: 44955 - DNA, 80 bp, synthetic construct
  source 1..80: mol_type = other DNA
gtattaggactgcttaacccagggtaaagaagcctaagaaacaatctaacaatatagggctatttcaaagacaaggcgat

SEQ ID NO: 44956 - DNA, 80 bp, synthetic construct
  source 1..80: mol_type = other DNA
ggatggaagttctactccatgaccttcaaggtgtcttacaggtctttacttatcattctgctgctggtctttactttggt

SEQ ID NO: 44957 - DNA, 80 bp, synthetic construct
  source 1..80: mol_type = other DNA
aaccacaccttaggcaaataattcattttgtaaaatttatccggtagttgtaggttctctaatgttgagaagaagatagg

SEQ ID NO: 44958 - DNA, 80 bp, synthetic construct; identical to SEQ ID NO: 15105
  source 1..80: mol_type = other DNA

SEQ ID NO: 44959 - DNA, 80 bp, synthetic construct
  source 1..80: mol_type = other DNA
gtcaaggcactcttgcctacgccaccagctccaactaccacaagtttatattcagtcattttcagcaggccttataataa

SEQ ID NO: 44960 - DNA, 80 bp, synthetic construct
  source 1..80: mol_type = other DNA
cgtgtatcgtaatgaactgtacttcatttacaaactcctccatcgacgcttaagaaaaatgcataaatgctacatagaca

SEQ ID NO: 44961 - DNA, 80 bp, synthetic construct; identical to SEQ ID NO: 15106
  source 1..80: mol_type = other DNA

SEQ ID NO: 44962 - DNA, 80 bp, synthetic construct
  source 1..80: mol_type = other DNA
taaacactgaggcaaagaagaacaatatttgacgacattttaatgtgtgaaatatctctggggaaaataggagtccgagg

SEQ ID NO: 44963 - DNA, 80 bp, synthetic construct
  source 1..80: mol_type = other DNA
tccgaattaactgttcagtacaatacataatcctgtatcaccgctgcacaaaaaaagataaagattagaaagccgggtgc

SEQ ID NO: 44964 - DNA, 80 bp, synthetic construct
  source 1..80: mol_type = other DNA
tactggggaggctgaggaaggagaatcacttgaacccgggaggcagaggttgcagtgagcccagatcacgccactgcact

SEQ ID NO: 44965 - DNA, 80 bp, synthetic construct
  source 1..80: mol_type = other DNA
gagggtggatcacgaggtcaggagatcaagaccatcctggctaacccggtgaaaccccgtctctactaaaaatataaaaa

SEQ ID NO: 44966 - DNA, 80 bp, synthetic construct; identical to SEQ ID NO: 15107
  source 1..80: mol_type = other DNA

SEQ ID NO: 44967 - DNA, 80 bp, synthetic construct
  source 1..80: mol_type = other DNA
aaaaatgggagtaaatgcacaactatttattataggatgagtagctccaaattaatgaatgtgcatatattgtagataaa

SEQ ID NO: 44968 - DNA, 80 bp, synthetic construct
  source 1..80: mol_type = other DNA
ctctgctctacctagacttattggctgcttgtctagggtgaagttaacaaccactacaaacatgtatcttatcccgtttg

SEQ ID NO: 44969 - DNA, 80 bp, synthetic construct; identical to SEQ ID NO: 15108
  source 1..80: mol_type = other DNA

SEQ ID NO: 44970 - DNA, 80 bp, synthetic construct
  source 1..80: mol_type = other DNA
aagccacatcattaaagagatttactgaagtgtgaaacaataccacttttctaagttttggttttgttttggaaaatagt

SEQ ID NO: 44971 - DNA, 80 bp, synthetic construct
  source 1..80: mol_type = other DNA
taacaaggtctcactatgttgagtacgctggtctccaactcctggcctcaagcgatcctcccgcctcagtctcccaaagt

SEQ ID NO: 44972 - DNA, 80 bp, synthetic construct
  source 1..80: mol_type = other DNA
tcccgtatctaaaaatacaattagcccggtggcgggagcctgtaatcccggctactcgggaagctgaggcgggagaatcg

SEQ ID NO: 44973 - DNA, 80 bp, synthetic construct
  source 1..80: mol_type = other DNA
tggattagagtttgtgtatatatatgaattcagagccacatgtatcttccggtttacttgtttatgcggtggttgtttcc

SEQ ID NO: 44974 - DNA, 80 bp, synthetic construct; identical to SEQ ID NO: 15109
  source 1..80: mol_type = other DNA

SEQ ID NO: 44975 - DNA, 80 bp, synthetic construct
  source 1..80: mol_type = other DNA
tgcagagtcagcattttggacctcagtcacttcagtgacaccagttttatggttaattctgagctgataattacaaatag

SEQ ID NO: 44976 - DNA, 80 bp, synthetic construct
  source 1..80: mol_type = other DNA
gcgggcagatcacgaggtcaggagttctagaccagcctgaccaacatggtgaaacccccgtctctactaaaaatacaaaa

SEQ ID NO: 44977 - DNA, 80 bp, synthetic construct
  source 1..80: mol_type = other DNA
catgatgaaactctgtctctactaaaaatacaaaaattagctgggcatggtggcgtgcacctactagtcccagctactcg

SEQ ID NO: 44978 - DNA, 80 bp, synthetic construct; identical to SEQ ID NO: 15110
  source 1..80: mol_type = other DNA

SEQ ID NO: 44979 - DNA, 80 bp, synthetic construct
  source 1..80: mol_type = other DNA
ctgctctgcgggttttcttcgggtttaacttgaccaagcaaaacagaccatctgggattaactttttccttttcactgta

SEQ ID NO: 44980 - DNA, 80 bp, synthetic construct
  source 1..80: mol_type = other DNA
tcaaacagtggtctctaagcactttcctatgctcttccaaaacgtgacctcccctcttactcacacatcccctacacacg

SEQ ID NO: 44981 - DNA, 80 bp, synthetic construct; identical to SEQ ID NO: 15111
  source 1..80: mol_type = other DNA

SEQ ID NO: 44982 - DNA, 80 bp, synthetic construct
  source 1..80: mol_type = other DNA
ccagcccgccccgaccccgcgcccgcgccccccacccgcccctccggggacccctaattcattcactcgccgccggcccc

SEQ ID NO: 44983 - DNA, 80 bp, synthetic construct
  source 1..80: mol_type = other DNA
gggagtactggccgagccgccgccaccttcgccgccgccactgccgccgccgctgctgcctccgccgccgcggccgccgc

SEQ ID NO: 44984 - DNA, 80 bp, synthetic construct
  source 1..80: mol_type = other DNA
gctgggactacaagtgcacgccaccacgcctggctaatttttgtatttttagtagagacggggtttcaccatattgccca

SEQ ID NO: 44985 - DNA, 80 bp, synthetic construct
  source 1..80: mol_type = other DNA
ataaagtagaaaaataccaaaatttctttcataattctctctacccaaaggcatcggtcagtccctctccagaccagaag

SEQ ID NO: 44986 - DNA, 80 bp, synthetic construct; identical to SEQ ID NO: 15112
  source 1..80: mol_type = other DNA

SEQ ID NO: 44987 - DNA, 80 bp, synthetic construct
  source 1..80: mol_type = other DNA
agccacctgagtagctgagactacaggcgtgtgccaccacacccggctaatttttttttttttttttttgtagaaatggg

SEQ ID NO: 44988 - DNA, 80 bp, synthetic construct
  source 1..80: mol_type = other DNA
gttttttaaatggaattgaaaggaactagccttggctagttgcagaattcacacatatggggctatggcaacagcagatt

SEQ ID NO: 44989 - DNA, 80 bp, synthetic construct; identical to SEQ ID NO: 15113
  source 1..80: mol_type = other DNA

SEQ ID NO: 44990 - DNA, 80 bp, synthetic construct
  source 1..80: mol_type = other DNA
agacaagtaactcagctttgaaatgttttcagtggggagagaaatagccccctcccagggctgtgctccgggaactgact

SEQ ID NO: 44991 - DNA, 80 bp, synthetic construct
  source 1..80: mol_type = other DNA
tgctcctctctggctattccttcagacccgcagctgctggacacaggccacagagctggtgcctcccgcgccatcactgc

SEQ ID NO: 44992 - DNA, 80 bp, synthetic construct
  source 1..80: mol_type = other DNA
gtcttatgtgtattgaccattctccccatccattccctcttcggaatgtttcagctgttctgagaaaacactttgcattc

SEQ ID NO: 44993 - DNA, 80 bp, synthetic construct; identical to SEQ ID NO: 15114
  source 1..80: mol_type = other DNA

SEQ ID NO: 44994 - DNA, 80 bp, synthetic construct
  source 1..80: mol_type = other DNA
ctacggtaagaggagctgtgtgtgcagtttggtgggtccgagggatgggggcaagggctgaggggcttgcctgagccatg

SEQ ID NO: 44995 - DNA, 80 bp, synthetic construct
  source 1..80: mol_type = other DNA
ggcactgcttcacgggctgcggggttcccagcaggccaggtgcctggcagtggcatggcagcactgggtggatgcccaag

SEQ ID NO: 44996 - DNA, 80 bp, synthetic construct
  source 1..80: mol_type = other DNA
aatctgcattcttaatactcctcagatgacacccccttgccatagccctttcactctggtgcagcagtgtcgggggagaa

SEQ ID NO: 44997 - DNA, 80 bp, synthetic construct; identical to SEQ ID NO: 15115
  source 1..80: mol_type = other DNA

SEQ ID NO: 44998 - DNA, 80 bp, synthetic construct
  source 1..80: mol_type = other DNA
ccggtccatcagtttgcgaagaaggtgtggcatgaggcatggctgccactcacactagcccatggagggcctgggtcctg

SEQ ID NO: 44999 - DNA, 80 bp, synthetic construct
  source 1..80: mol_type = other DNA
agcaggcacagcacagaccccggagaaagcccacaacaatagcatttcctctcctccctggttccaggcctttaagaagt

SEQ ID NO: 45000 - DNA, 80 bp, synthetic construct
  source 1..80: mol_type = other DNA
agctgcagctgtgacttgttctcatagaataaaaaacagaactgaacttagccttcccagggaaggaaccatgccccaca

SEQ ID NO: 45001 - DNA, 80 bp, synthetic construct; identical to SEQ ID NO: 15116
  source 1..80: mol_type = other DNA

SEQ ID NO: 45002 - DNA, 80 bp, synthetic construct
  source 1..80: mol_type = other DNA
aggcagatctggggcccctgtgctggcaaatctcatcttagcctctgacagggaacggggcagcatcaggcctccacagc

SEQ ID NO: 45003 - DNA, 80 bp, synthetic construct
  source 1..80: mol_type = other DNA
gctggtgccatggacggctaagtgggcaggcagggcagtggtgtgccccttcagtcacaagtaggtggggcccagctgcc

SEQ ID NO: 45004 - DNA, 80 bp, synthetic construct
  source 1..80: mol_type = other DNA
gttcgagggcttagttggcaacaaccactctcctcgccttctcaggaggtgccacccactgtggtcctctgcaggacgca

SEQ ID NO: 45005 - DNA, 80 bp, synthetic construct
  source 1..80: mol_type = other DNA
gagacacgaaggagagtggagttcccaagagaagcagcactgtggaggaggaaggcgggacaggagtggctccaacgcag

SEQ ID NO: 45006 - DNA, 80 bp, synthetic construct; identical to SEQ ID NO: 15117
  source 1..80: mol_type = other DNA

SEQ ID NO: 45007 - DNA, 80 bp, synthetic construct
  source 1..80: mol_type = other DNA
cagaaataaacaccctgcatcagcagtgacatgggtgagtcagagctgggtgtgccctgaaggctgggtccagtgtggcc

SEQ ID NO: 45008 - DNA, 80 bp, synthetic construct
  source 1..80: mol_type = other DNA
gccccaagtgacagcattcggctgcagttcaggggcattggtgatgttttcaccctgaggggatgtggggtgggggtaag

SEQ ID NO: 45009 - DNA, 80 bp, synthetic construct
  source 1..80: mol_type = other DNA
ctgcatctgtgaatgatatctctccccacacaagcctgaacctagaggcgtcctggccacttcccctctcctccttgagc

SEQ ID NO: 45010 - DNA, 80 bp, synthetic construct; identical to SEQ ID NO: 15118
  source 1..80: mol_type = other DNA

SEQ ID NO: 45011 - DNA, 80 bp, synthetic construct
  source 1..80: mol_type = other DNA
actcctctttgtcctcagtgattcccacagatgaccctctgagaagccttccctggcctcccaggtgagatatccctcct

SEQ ID NO: 45012 - DNA, 80 bp, synthetic construct
  source 1..80: mol_type = other DNA
taggtgctgggtgtttgctcaacgaagggcctggtactctgtgggaaccctggggcctggcctaccttcacattgacaag

SEQ ID NO: 45013 - DNA, 80 bp, synthetic construct
  source 1..80: mol_type = other DNA
taaggtatcaggactactggcagccatgtgggcggaataatgaactgtggcgttggcacgtccataagcaaagggtgagg

SEQ ID NO: 45014 - DNA, 80 bp, synthetic construct; identical to SEQ ID NO: 15119
  source 1..80: mol_type = other DNA

SEQ ID NO: 45015 - DNA, 80 bp, synthetic construct
  source 1..80: mol_type = other DNA
gtaaacagtagagctggtccttaaactcaggtctttctgctccagggcctgtgggccttagatcagaacataatgttaac

SEQ ID NO: 45016 - DNA, 80 bp, synthetic construct
  source 1..80: mol_type = other DNA
ttttacagacgagaaaaccaggctcagagaggtcgagtgacctgcctccataggtctgatttctatcttttttttttttt

SEQ ID NO: 45017 - DNA, 80 bp, synthetic construct
  source 1..80: mol_type = other DNA
taattgttgtatttttagtagagatggggtttcatcatgtttgtcaggctggtctcgaactcctgaccttgtgatctgcc

SEQ ID NO: 45018 - DNA, 80 bp, synthetic construct; identical to SEQ ID NO: 15120
  source 1..80: mol_type = other DNA

SEQ ID NO: 45019 - DNA, 80 bp, synthetic construct
  source 1..80: mol_type = other DNA
tctatctgacttaaagcatgagctcccatccgctccaatccatgctcattcaaaatttaagagcccaggagaggcaggct

SEQ ID NO: 45020 - DNA, 80 bp, synthetic construct
  source 1..80: mol_type = other DNA
tgtgagttgatggtgaggatgccctggcggttcacccgcagcagctcctccttcagcaggctggtctcagccgccagggg

SEQ ID NO: 45021 - DNA, 80 bp, synthetic construct
  source 1..80: mol_type = other DNA
ttctccctttgccatgtccacagcatggaggggagggcacaggatggggaagtcacagccccgcagcctggcctgcagct

SEQ ID NO: 45022 - DNA, 80 bp, synthetic construct; identical to SEQ ID NO: 15121
  source 1..80: mol_type = other DNA

SEQ ID NO: 45023 - DNA, 80 bp, synthetic construct
  source 1..80: mol_type = other DNA
tgcaaggaaggtctgcaggccctcaccagcggccgttagggaactcgtcccactcctgggtacggtagatgtaactcttt

SEQ ID NO: 45024 - DNA, 80 bp, synthetic construct
  source 1..80: mol_type = other DNA
gagttcttccatctgatgccctctgagactggagccttcgatgtgcccagctagccatggcacagacatccatctgtacc

SEQ ID NO: 45025 - DNA, 80 bp, synthetic construct
  source 1..80: mol_type = other DNA
tggaggcctggcaccaagccactggccagaagctcctggcacaggctcacggccagctcgatgccatagttgcggatggc

SEQ ID NO: 45026 - DNA, 80 bp, synthetic construct; identical to SEQ ID NO: 15122
  source 1..80: mol_type = other DNA

SEQ ID NO: 45027 - DNA, 80 bp, synthetic construct
  source 1..80: mol_type = other DNA
ctttcccactttttacagagtagagcagctgccctaagcattccagccttgggttgagccagccttttagccctagatgt

SEQ ID NO: 45028 - DNA, 80 bp, synthetic construct
  source 1..80: mol_type = other DNA
atccactttttgaaaaagcttatcaagtggttctgatgacagccacctttgggaaacactgatttaagcaggatttgtaa

SEQ ID NO: 45029 - DNA, 80 bp, synthetic construct
  source 1..80: mol_type = other DNA
acgctgtgcaagttctggacctgagaggagatctgggaagaactcagcgaactcagcactccacccagagcccccagcct

SEQ ID NO: 45030 - DNA, 80 bp, synthetic construct; identical to SEQ ID NO: 15123
  source 1..80: mol_type = other DNA

SEQ ID NO: 45031 - DNA, 80 bp, synthetic construct
  source 1..80: mol_type = other DNA
aacagcacagcacagcctgaactaaaacagtgagtggctgggctcatgactgatatgcttctgaccccagagatgactct

SEQ ID NO: 45032 - DNA, 80 bp, synthetic construct
  source 1..80: mol_type = other DNA
catctggggtagtaagcttgacttttctctaggcaccggattaaacattgtttttaatgtaacactgaaattactcaggg

SEQ ID NO: 45033 - DNA, 80 bp, synthetic construct
  source 1..80: mol_type = other DNA
gttcgagaccagcctggccaacatggtaaaaccccgtctctaccaaaaatacaaaaattagccaggtgtggtggtgtatg

SEQ ID NO: 45034 - DNA, 80 bp, synthetic construct; identical to SEQ ID NO: 15124
  source 1..80: mol_type = other DNA

SEQ ID NO: 45035 - DNA, 80 bp, synthetic construct
  source 1..80: mol_type = other DNA
aaaaaaatttttttaattaattatttattttttagagatggggtcttgctatcttgtccaggtttgtctggaacttctgg

SEQ ID NO: 45036 - DNA, 80 bp, synthetic construct
  source 1..80: mol_type = other DNA
agtactataagccactcacaaaacaatgagctcctggagtctgaaaacacaggggcagtggatgctgaagacaagattcc

SEQ ID NO: 45037 - DNA, 80 bp, synthetic construct; identical to SEQ ID NO: 15125
  source 1..80: mol_type = other DNA

SEQ ID NO: 45038 - DNA, 80 bp, synthetic construct
  source 1..80: mol_type = other DNA
accgaacaaatctagcatttgattacgtatagattttgctatttactctatttttctatcatgaacagctgagggctttc

SEQ ID NO: 45039 - DNA, 80 bp, synthetic construct
  source 1..80: mol_type = other DNA
tgttttctaatccactcatcttcattacccacttgataagcaaagtaagaaaccattcagcaactgtgagctcacagctt

SEQ ID NO: 45040 - DNA, 80 bp, synthetic construct
  source 1..80: mol_type = other DNA
cctaaacacccctgttgacagaatggacatgtccatcgggggttagggacaaggccaaagttactcacaacatgtaattt

SEQ ID NO: 45041 - DNA, 80 bp, synthetic construct
  source 1..80: mol_type = other DNA
cctaccaagtagctgggactacaggcacgcgccaccatgcccggctaatttttgtatttttagtagagacggggtttcac

SEQ ID NO: 45042 - DNA, 80 bp, synthetic construct; identical to SEQ ID NO: 15126
  source 1..80: mol_type = other DNA

SEQ ID NO: 45043 - DNA, 80 bp, synthetic construct
  source 1..80: mol_type = other DNA
gtgattctctttcctgggaatttggaacggaggcctgtccattagcctggggaactggctggaactgacactctgcacac

SEQ ID NO: 45044 - DNA, 80 bp, synthetic construct
  source 1..80: mol_type = other DNA
ccatctcctgatcttgggttccctgccctctggaatcctgttagtaaatatccctcttttgtggggtgttgttttttttt

SEQ ID NO: 45045 - DNA, 80 bp, synthetic construct
  source 1..80: mol_type = other DNA
ggctaatttttgtatttttagtagagacggggtttcgctatgttggccaggcaggtctcaaactcctgacctcaggtgat

SEQ ID NO: 45046 - DNA, 80 bp, synthetic construct; identical to SEQ ID NO: 15127
  source 1..80: mol_type = other DNA

SEQ ID NO: 45047 - DNA, 80 bp, synthetic construct
  source 1..80: mol_type = other DNA
tgccacacagatgtcaaagtagtcaccaaactcacttcggatgtgcttcaccaggtccactgcgtagttgaagcctccct

SEQ ID NO: 45048 - DNA, 80 bp, synthetic construct
  source 1..80: mol_type = other DNA
attatttaggtttggttcgtctctttctagcacttggtaagacagcaggagggaaaaaagcagcccaccagttcaatatt

SEQ ID NO: 45049 - DNA, 80 bp, synthetic construct; identical to SEQ ID NO: 15128
  source 1..80: mol_type = other DNA

SEQ ID NO: 45050 - DNA, 80 bp, synthetic construct
  source 1..80: mol_type = other DNA
gactgcattcctgacggaactcctatgtcgaggtcaagaggtggaagaggtggctgcctgtgtgtggtgcccaggatgac

SEQ ID NO: 45051 - DNA, 80 bp, synthetic construct
  source 1..80: mol_type = other DNA
atgtgcaggatggtctccaggccacagtagttcacggcggtgctggcgatcatcatggaggaggtctccttgtctgagcc

SEQ ID NO: 45052 - DNA, 80 bp, synthetic construct; identical to SEQ ID NO: 15129
  source 1..80: mol_type = other DNA

SEQ ID NO: 45053 - DNA, 80 bp, synthetic construct
  source 1..80: mol_type = other DNA
ccagaccgcctggccaacatagtgaaacctcatctctactaaaaatacaaaaattagctgggtgtggtggtgggcacctg

SEQ ID NO: 45054 - DNA, 80 bp, synthetic construct
  source 1..80: mol_type = other DNA
aacaacaacaaaaaaccataacactaggagaatatgacggcagctggttccacagaacttagaacagtgcctggtgtaca

SEQ ID NO: 45055 - DNA, 80 bp, synthetic construct
  source 1..80: mol_type = other DNA
tttattatctcaggtgagttaagacatcatgattgagagttaggggaatcctaactgtggcaagcacagcctcgctgtag

SEQ ID NO: 45056 - DNA, 80 bp, synthetic construct
  source 1..80: mol_type = other DNA
ctatcaacggtgtatttaaacatccttgtgcatttaaacttcaaaaacttgggagtgacacgtgagacgtgcatacagta

SEQ ID NO: 45057 - DNA, 80 bp, synthetic construct; identical to SEQ ID NO: 15130
  source 1..80: mol_type = other DNA

SEQ ID NO: 45058 - DNA, 80 bp, synthetic construct
  source 1..80: mol_type = other DNA
ctcccaccttaaccttgcatgagtttaccttgagatgagattgacagctccctcagcagttcgaggagggaagaattcca

SEQ ID NO: 45059 - DNA, 80 bp, synthetic construct
  source 1..80: mol_type = other DNA
tgaggctgctgtttcctctggcttcgttcaccatggctgggttcctactgcacagggtggggcagggagcatcagggggc

SEQ ID NO: 45060 - DNA, 80 bp, synthetic construct
  source 1..80: mol_type = other DNA
cactcaaagccttgccctccgctgctgccaggctccttgcatgcaaggcagcccccacccggcactgcaacatgctcctc

SEQ ID NO: 45061 - DNA, 80 bp, synthetic construct; identical to SEQ ID NO: 15131
  source 1..80: mol_type = other DNA

SEQ ID NO: 45062 - DNA, 80 bp, synthetic construct
  source 1..80: mol_type = other DNA
agaaggaacagctcactctggctggctctgcctggaacatctgttacttgaaacagttcgtgcacaggatggaaggggtg

SEQ ID NO: 45063 - DNA, 80 bp, synthetic construct
  source 1..80: mol_type = other DNA
atctgtgcttgccttgcaggctgctcttcttacacatcacagaattcaattcaaatcatcacagtgacccagctactggg

SEQ ID NO: 45064 - DNA, 80 bp, synthetic construct
  source 1..80: mol_type = other DNA
catggtgaaatcccgactctactaaaaatataaaaattagccaggtttggtggcgggcgcctgtaatcccagctactctg

SEQ ID NO: 45065 - DNA, 80 bp, synthetic construct; identical to SEQ ID NO: 15132
  source 1..80: mol_type = other DNA

SEQ ID NO: 45066 - DNA, 80 bp, synthetic construct
  source 1..80: mol_type = other DNA
aatctgattaaatgcactgctcccttcccctgaaatacacacacaggtgcacagactacacggggatacatccaaagaca

SEQ ID NO: 45067 - DNA, 80 bp, synthetic construct
  source 1..80: mol_type = other DNA
ttaattgcttgctggaacagaacctagagtaggaggaagctgaaccacctgtaaaccctctgattttcaaagacttattg

SEQ ID NO: 45068 - DNA, 80 bp, synthetic construct; identical to SEQ ID NO: 15133
  source 1..80: mol_type = other DNA

SEQ ID NO: 45069 - DNA, 80 bp, synthetic construct
  source 1..80: mol_type = other DNA
agtgccccgggcccagcgctcttctccaggtgatcgccggggaggcaggtttaaaaggcaggagccggaagccgtctcgg

SEQ ID NO: 45070 - DNA, 80 bp, synthetic construct
  source 1..80: mol_type = other DNA
agggttggcggtcgctggaagtggtagccattgggagttacactaatcccgcgaagggtgcgcaagggaggcggcagccc

SEQ ID NO: 45071 - DNA, 80 bp, synthetic construct
  source 1..80: mol_type = other DNA
gctcggccgccggccgcaccactgtggccgctgcaggggcggggaacgcagtgaaggggcgcggcgcaggtgtcaggttg

SEQ ID NO: 45072 - DNA, 80 bp, synthetic construct; identical to SEQ ID NO: 15134
  source 1..80: mol_type = other DNA

SEQ ID NO: 45073 - DNA, 80 bp, synthetic construct
  source 1..80: mol_type = other DNA
tggggagggggcggttgctaagggactgagagaggcgttgccgggggtggggccgggccaatctgggcccgcaggtggca

SEQ ID NO: 45074 - DNA, 80 bp, synthetic construct
  source 1..80: mol_type = other DNA
aataaagcctaggccaaactgcacaaatcaggtagtctctttatgtcattgcttgttctctggttataaatgtagctcac

SEQ ID NO: 45075 - DNA, 80 bp, synthetic construct
  source 1..80: mol_type = other DNA
cccattgagcccagggatctcttttctgggcctgaattgctgggtgagcctctctctgggattctaacttccacttattt

SEQ ID NO: 45076 - DNA, 80 bp, synthetic construct
  source 1..80: mol_type = other DNA
ttggattcaacagttaactagattggatccagttaaaggccttggggtaggtaattttgatcttttcggcatttgaatcc

SEQ ID NO: 45077 - DNA, 80 bp, synthetic construct
  source 1..80: mol_type = other DNA
gtggtgacatttaatttggacagaattgtttacttgtgaggcatattcagaaaaaacagagatcagaaccacccccccaa

SEQ ID NO: 45078 - DNA, 80 bp, synthetic construct; identical to SEQ ID NO: 15135
  source 1..80: mol_type = other DNA

SEQ ID NO: 45079 - DNA, 80 bp, synthetic construct
  source 1..80: mol_type = other DNA
tgattggtctgttacacaattctgcagacaaaaggacaaaccagactgcagagtttatttagaaacattgtggaacattc

SEQ ID NO: 45080 - DNA, 80 bp, synthetic construct
  source 1..80: mol_type = other DNA
aaaaatttttcttgcatgttccacatgctatggaaagcctcttgaattccattctaactcactgtctttcagcaaacaga

SEQ ID NO: 45081 - DNA, 80 bp, synthetic construct; identical to SEQ ID NO: 15136
  source 1..80: mol_type = other DNA

SEQ ID NO: 45082 - DNA, 80 bp, synthetic construct
  source 1..80: mol_type = other DNA
tgatcacactgcttcatcaaaacgcctgctgggaaagtcaccagtgaccttctgatcactagctgggttgattctttctc

SEQ ID NO: 45083 - DNA, 80 bp, synthetic construct
  source 1..80: mol_type = other DNA
tctaccaataccttggctcagctcagtggtaaactaggactcttaacactcagccttttattatcattattcggataaac

SEQ ID NO: 45084 - DNA, 80 bp, synthetic construct
  source 1..80: mol_type = other DNA
gacattgacttcaatttaattgaatttctagacggagcaaattatacccccaaagaacttgagtggatgcttcaaggtca

SEQ ID NO: 45085 - DNA, 80 bp, synthetic construct
  source 1..80: mol_type = other DNA
ttccatggtgttttattgtcaggcagagaacagtgctactgctgctgtagatttctctgactgggctctcctggctgtga

SEQ ID NO: 45086 - DNA, 80 bp, synthetic construct; identical to SEQ ID NO: 15137
  source 1..80: mol_type = other DNA

SEQ ID NO: 45087 - DNA, 80 bp, synthetic construct
  source 1..80: mol_type = other DNA
ctttctaataactgggatggcaattgcagatggccaacattataacactgaggcacagaaaatagtctcacctcttccca

SEQ ID NO: 45088 - DNA, 80 bp, synthetic construct
  source 1..80: mol_type = other DNA
caatgcctggtccctaatgggtggttccttttaacaagcaaatattctcgactaccccataacatcagagaatagccttg

SEQ ID NO: 45089 - DNA, 80 bp, synthetic construct
  source 1..80: mol_type = other DNA
agtaagaaacagagacagagcttgttgatgtgtgtgtgagtcatcctccttgtgaggttctgtgtgtgatgaatggctca

SEQ ID NO: 45090 - DNA, 80 bp, synthetic construct; identical to SEQ ID NO: 15138
  source 1..80: mol_type = other DNA

SEQ ID NO: 45091 - DNA, 80 bp, synthetic construct
  source 1..80: mol_type = other DNA
actgttttctagctaccttcataaagatattcaaggatggctggaaaattcttaagttgtcagaggaaggcaccacaggt

SEQ ID NO: 45092 - DNA, 80 bp, synthetic construct
  source 1..80: mol_type = other DNA
tatttatttgtgtagcagtggtagcaagcataagaatagcaagcatcacgtaaggagtcgggaaacccagggttttttct

SEQ ID NO: 45093 - DNA, 80 bp, synthetic construct; identical to SEQ ID NO: 15139
  source 1..80: mol_type = other DNA

SEQ ID NO: 45094 - DNA, 80 bp, synthetic construct
  source 1..80: mol_type = other DNA
ggggtacagtgtgatgttttgatctatgtatacattgtagaaagagtcaatcaaggtaattaacatatctatcaccttat

SEQ ID NO: 45095 - DNA, 80 bp, synthetic construct
  source 1..80: mol_type = other DNA
ccattccccatccctcctcctctcccctagctactggtaatccctctatactttttgtttctatgagatcacattttttc

SEQ ID NO: 45096 - DNA, 80 bp, synthetic construct
  source 1..80: mol_type = other DNA
ctttatccatactatcattgatgaccacttatgttgcttccatatcttggctattgtgaataatgctgaaatgaacatgg

SEQ ID NO: 45097 - DNA, 80 bp, synthetic construct; identical to SEQ ID NO: 15140
  source 1..80: mol_type = other DNA

SEQ ID NO: 45098 - DNA, 80 bp, synthetic construct
  source 1..80: mol_type = other DNA
gtttgagttccttatatattttgaatattagttgcttatcagatgtatggcttgtgaatattttctccccatccgtgggt

SEQ ID NO: 45099 - DNA, 80 bp, synthetic construct
  source 1..80: mol_type = other DNA
ttgcccacaccaatgtcatggagagtatcctcaatttgattttcacagtattgaacattaactgtgtagtgtcacagttt

SEQ ID NO: 45100 - DNA, 80 bp, synthetic construct
  source 1..80: mol_type = other DNA
ttctgcatatgagtgtgagataagtatatccacatgtagaagaatgccatttattaaaatgactgttttttcccaatttg

SEQ ID NO: 45101 - DNA, 80 bp, synthetic construct; identical to SEQ ID NO: 15141
  source 1..80: mol_type = other DNA

SEQ ID NO: 45102 - DNA, 80 bp, synthetic construct
  source 1..80: mol_type = other DNA
gtcatcttcaatttctttaatcaatgttttatagcttttagtgtagagatctttcacctccttggttaaatttactctta

SEQ ID NO: 45103 - DNA, 80 bp, synthetic construct
  source 1..80: mol_type = other DNA
tttagggttttgtatatgtaagattatatcaacagacagtctcatttattccttcctcatctgtctcttcccaatgaaaa

SEQ ID NO: 45104 - DNA, 80 bp, synthetic construct
  source 1..80: mol_type = other DNA
tatatagttatatgagcattagtcagacttatcctctaagtcctaaaattttgtgtttaaaaattgtaaaatttacaaac

SEQ ID NO: 45105 - DNA, 80 bp, synthetic construct
  source 1..80: mol_type = other DNA
ttagaaatgaggatatatgtgttaatgataaatgcagtgggaggaaagacattcgtatcccactgtcctaaagccaaaca

SEQ ID NO: 45106 - DNA, 80 bp, synthetic construct; identical to SEQ ID NO: 15142
  source 1..80: mol_type = other DNA

SEQ ID NO: 45107 - DNA, 80 bp, synthetic construct
  source 1..80: mol_type = other DNA
taatctaacgtagctaaaaggcattattaggtcacatgattggagtcatgggacagagggagggagatgggaaatggcaa

SEQ ID NO: 45108 - DNA, 80 bp, synthetic construct
  source 1..80: mol_type = other DNA
tttctggatttgtagctacttgacagaaaataatcagtggtgacttcttagacagcattccttctggtcaagctggtctt

SEQ ID NO: 45109 - DNA, 80 bp, synthetic construct
  source 1..80: mol_type = other DNA
gattgaggttctatttttgggtcttcactggaagttttgctactttggccaggatgtgtagacagcagagaattacagtg

SEQ ID NO: 45110 - DNA, 80 bp, synthetic construct; identical to SEQ ID NO: 15143
  source 1..80: mol_type = other DNA

SEQ ID NO: 45111 - DNA, 80 bp, synthetic construct
  source 1..80: mol_type = other DNA
aaatccttctctatagaatacctttcctcaacagtttcaacttgtccttcttgttcctgcgtgcctttaattagtcaaca

SEQ ID NO: 45112 - DNA, 80 bp, synthetic construct
  source 1..80: mol_type = other DNA
tggggattgtgtcttagtcgtttggcacatccagttccaggacactcttcatatcctcaatgtggtaatactacataatc

SEQ ID NO: 45113 - DNA, 80 bp, synthetic construct
  source 1..80: mol_type = other DNA
ccactcaaattagtagcatcctcttgagaaccttggttttgaagcaccagcctggaagtggcatgcatcaccttcacttt

SEQ ID NO: 45114 - DNA, 80 bp, synthetic construct; identical to SEQ ID NO: 15144
  source 1..80: mol_type = other DNA

SEQ ID NO: 45115 - DNA, 80 bp, synthetic construct
  source 1..80: mol_type = other DNA
acagaaacacaaggaaggcactgtttctgcctgcctctaatgatttgcagtgtagaaagattaaatcttaagcaacttta

SEQ ID NO: 45116 - DNA, 80 bp, synthetic construct
  source 1..80: mol_type = other DNA
taggggtcaggtaagatttaaagaaaagtactgaggcatgaaagacaaggtgtgtagataagcaaggaaggagaattggg

SEQ ID NO: 45117 - DNA, 80 bp, synthetic construct; identical to SEQ ID NO: 15145
  source 1..80: mol_type = other DNA

SEQ ID NO: 45118 - DNA, 80 bp, synthetic construct
  source 1..80: mol_type = other DNA
tttcttgtagtgtccttatttggctttgatactagaataatgctggcctcataaaatgagtttgagttctattgcacaat

SEQ ID NO: 45119 - DNA, 80 bp, synthetic construct
  source 1..80: mol_type = other DNA
ttatacctcataaatatatgtaattataatgtatcagtttttaaaaatgaggtggctgggaatagtggatttatttctgg

SEQ ID NO: 45120 - DNA, 80 bp, synthetic construct
  source 1..80: mol_type = other DNA
agttctatacacattttagaattttttttctatttctgtgaagtatgtcattggtattttgataggaatgcattgaatct

SEQ ID NO: 45121 - DNA, 80 bp, synthetic construct
  source 1..80: mol_type = other DNA
aaaaatttaaaaagtagctattcagtaggattcaatgggattgctttctcaatttctaagatttttttgcaattggctat

SEQ ID NO: 45122 - DNA, 80 bp, synthetic construct
  source 1..80: mol_type = other DNA
cgtttttctaaatataacaccatgtcatctgtaaacagggataatctgacttctttctttccagttgagatgccctttat

SEQ ID NO: 45123 - DNA, 80 bp, synthetic construct; identical to SEQ ID NO: 15146
  source 1..80: mol_type = other DNA

SEQ ID NO: 45124 - DNA, 80 bp, synthetic construct
  source 1..80: mol_type = other DNA
ttgcaccgtggcaggcctgactctaaattccaatacaaattcccatacccacttcccattcccttccccaagcaggaatt

SEQ ID NO: 45125 - DNA, 80 bp, synthetic construct
  source 1..80: mol_type = other DNA
tgatagctcacctgatttctttagctcttttgaaggtgtcttcttgcaaggatagttgttccatttgatgttcctgtggg

SEQ ID NO: 45126 - DNA, 80 bp, synthetic construct
  source 1..80: mol_type = other DNA
aggtcatgaagattttctgcactgatgtttattggaagctttattgttttaccttttacttttaggtctacaatccacct

SEQ ID NO: 45127 - DNA, 80 bp, synthetic construct; identical to SEQ ID NO: 15147
  source 1..80: mol_type = other DNA

SEQ ID NO: 45128 - DNA, 80 bp, synthetic construct
  source 1..80: mol_type = other DNA
gactttaaaaatgtctctaaataatgtctaatcattttctgcataaagatcttatgcacctattattagatttattacta

SEQ ID NO: 45129 - DNA, 80 bp, synthetic construct
  source 1..80: mol_type = other DNA
accaaccagaggggagaagaacgctgactcctcatgtggtggaaggtgaaaaggaccaagagagagcccactcttgaaag

SEQ ID NO: 45130 - DNA, 80 bp, synthetic construct
  source 1..80: mol_type = other DNA
gctgtggtcccccaaaactcacgtcctcgcatataaaatacattaattctttctcaatagtcccggtaagtccaaagtcc

SEQ ID NO: 45131 - DNA, 80 bp, synthetic construct; identical to SEQ ID NO: 15148
  source 1..80: mol_type = other DNA

SEQ ID NO: 45132 - DNA, 80 bp, synthetic construct
  source 1..80: mol_type = other DNA
gcaggtttcaagtcccaaagccaatagggccttacatcttaaggcttggaaaaaaatcttgactctatggcctgcctttc

SEQ ID NO: 45133 - DNA, 80 bp, synthetic construct
  source 1..80: mol_type = other DNA
gcagtgtatactagtggctctatgctttcagggtcccggggcggggtggtgggggggtccctgttcccattgcttcacta

SEQ ID NO: 45134 - DNA, 80 bp, synthetic construct
  source 1..80: mol_type = other DNA
gatgcctcgaaggtttacaatctgccttctggaagactaggtgtggccaaggagagttgcattagaatgcatggatcaga

SEQ ID NO: 45135 - DNA, 80 bp, synthetic construct; identical to SEQ ID NO: 15149
  source 1..80: mol_type = other DNA

SEQ ID NO: 45136 - DNA, 80 bp, synthetic construct
  source 1..80: mol_type = other DNA
ccttcccaaattcatgttgaaacaatctcccatccaacagtagtgggaggcagggcctaacaagaggtgtttaggtcatg

SEQ ID NO: 45137 - DNA, 80 bp, synthetic construct
  source 1..80: mol_type = other DNA
ctttctgccatatgtggatcctgcattctacttccctctagaacatttcaccagtttttgcgtgcactcatttttctaat

SEQ ID NO: 45138 - DNA, 80 bp, synthetic construct; identical to SEQ ID NO: 15150
  source 1..80: mol_type = other DNA

SEQ ID NO: 45139 - DNA, 80 bp, synthetic construct
  source 1..80: mol_type = other DNA
ccggatgttctgtttgtgtgaattttttaaatttatagattccattcctttaatagtttcaggattatttagaatttcta

SEQ ID NO: 45140 - DNA, 80 bp, synthetic construct
  source 1..80: mol_type = other DNA
gttggtctttgtgcgttccctctctgtatctgtcttttggtcagtctcatcagggtttatccatattactagtctttaaa

SEQ ID NO: 45141 - DNA, 80 bp, synthetic construct
  source 1..80: mol_type = other DNA
cttttcttacgtatgcttaaaattcatataaatgcatataaattattcctttaagtattgcttcggctatgtccccaaaa

SEQ ID NO: 45142 - DNA, 80 bp, synthetic construct; identical to SEQ ID NO: 15151
  source 1..80: mol_type = other DNA

SEQ ID NO: 45143 - DNA, 80 bp, synthetic construct
  source 1..80: mol_type = other DNA
agataggcattgaaatttcccattatgattataggtttgtctacttcttcccgtagttctttttcatttatcttgatgtt

SEQ ID NO: 45144 - DNA, 80 bp, synthetic construct
  source 1..80: mol_type = other DNA
ttttcactcttttcctttcaagcctcctgttttcttgtgtttaatatcgctacacatatgtaagtagcatatagttgttt

SEQ ID NO: 45145 - DNA, 80 bp, synthetic construct
  source 1..80: mol_type = other DNA
cttttctccattgtttggaagtttttcctgtcttatcatccttccagtgattgctttacagatcgcaacatgccccttcc

SEQ ID NO: 45146 - DNA, 80 bp, synthetic construct
  source 1..80: mol_type = other DNA
aaagtgaaagctgcagggaaggggcccctggctagaggtcaaattaagaaatctggcaaaaagtaagctgttccttgtgc

SEQ ID NO: 45147 - DNA, 80 bp, synthetic construct; identical to SEQ ID NO: 15152
  source 1..80: mol_type = other DNA

SEQ ID NO: 45148 - DNA, 80 bp, synthetic construct
  source 1..80: mol_type = other DNA
tgtatgttcattgcagcactattcacaatagcaaagacatggaattaacctaaatgcccatcaatggcggactggctttt

SEQ ID NO: 45149 - DNA, 80 bp, synthetic construct
  source 1..80: mol_type = other DNA
gcaggaacagaaaaccaaatacagctgttcccacttataagtgggaattaaatgatgagaacacatggacacgaagaagg

SEQ ID NO: 45150 - DNA, 80 bp, synthetic construct; identical to SEQ ID NO: 15153
  source 1..80: mol_type = other DNA

SEQ ID NO: 45151 - DNA, 80 bp, synthetic construct
  source 1..80: mol_type = other DNA
tacagactagatctagaaattaatatacttttactctttgtacctgagcaaaacagaacactagaaataaaggacgctaa

SEQ ID NO: 45152 - DNA, 80 bp, synthetic construct
  source 1..80: mol_type = other DNA
gacttcctccagttatctctgacactaatgacgaaatttttctttgacttttatcaaggtaaaattcattttaagaaatg

SEQ ID NO: 45153 - DNA, 80 bp, synthetic construct
  source 1..80: mol_type = other DNA
tggcatttgattatacatatctttatttttgtgtatgtttgaatttttctttaatataaagtaaaaaatagtggcttttt

SEQ ID NO: 45154 - DNA, 80 bp, synthetic construct
  source 1..80: mol_type = other DNA
ccagcctggccaacatgatgaaaccccgtctctactaaaactacaaaaattagccaggtgtggtggtgaacacctataac

SEQ ID NO: 45155 - DNA, 80 bp, synthetic construct; identical to SEQ ID NO: 15154
  source 1..80: mol_type = other DNA

SEQ ID NO: 45156 - DNA, 80 bp, synthetic construct
  source 1..80: mol_type = other DNA
tcctctcataataacgtttattgatcaggcactgtgctagctactttatgtttgtaatctgctttaatcattcctgcaag

SEQ ID NO: 45157 - DNA, 80 bp, synthetic construct
  source 1..80: mol_type = other DNA
actagtaggaatatactaaagacatatttttctaccccagacattagaatctcaaggggagtgggaagtgattatttgaa

SEQ ID NO: 45158 - DNA, 80 bp, synthetic construct; identical to SEQ ID NO: 15155
  source 1..80: mol_type = other DNA

SEQ ID NO: 45159 - DNA, 80 bp, synthetic construct
  source 1..80: mol_type = other DNA
tttttgtatttatagtagagatcggttttcaccatgttcgccaggctggtctcgaactcctgaccacaagggatctgtcc

SEQ ID NO: 45160 - DNA, 80 bp, synthetic construct
  source 1..80: mol_type = other DNA
gagatgctagaggtaacttgcccacatttactatccaggctactgttgtaagtttaattaagtgcttcagaactttttct

SEQ ID NO: 45161 - DNA, 80 bp, synthetic construct
  source 1..80: mol_type = other DNA
catctttgaactgaatgagaagagtgtttcctctttaccctacatgcattcattttcatgtttattagcccaggcgaaaa

SEQ ID NO: 45162 - DNA, 80 bp, synthetic construct; identical to SEQ ID NO: 15156
  source 1..80: mol_type = other DNA

SEQ ID NO: 45163 - DNA, 80 bp, synthetic construct
  source 1..80: mol_type = other DNA
attagctgggtgtggtggcacatgcctgtaatcccagctacacgggaggctgaggcaggagaatctcttgaaccaggagg

SEQ ID NO: 45164 - DNA, 80 bp, synthetic construct
  source 1..80: mol_type = other DNA
aagtcttccacattcatacaatatccttaattaagatcaggctcaagtgagcatttctgacctgtatgtaattaaatgct

SEQ ID NO: 45165 - DNA, 80 bp, synthetic construct
  source 1..80: mol_type = other DNA
tttttgcatttcacaagagaaaattccattcttaacattaatgccatccccatcaagctaccaatgactttcttcacaga

SEQ ID NO: 45166 - DNA, 80 bp, synthetic construct; identical to SEQ ID NO: 11285
  source 1..80: mol_type = other DNA

SEQ ID NO: 45167 - DNA, 80 bp, synthetic construct; identical to SEQ ID NO: 15157
  source 1..80: mol_type = other DNA

SEQ ID NO: 45168 - DNA, 80 bp, synthetic construct
  source 1..80: mol_type = other DNA
tacaatgaactcaaacaaatttacaagaaaaaaacaaacaaccccatcaaaaagtgggcaaaggatatgaacagacactt

SEQ ID NO: 45169 - DNA, 80 bp, synthetic construct
  source 1..80: mol_type = other DNA
tggggagaaataggaacacttttccactgttggtgggactgtcaactagttcaaccattgtggaagtcagtgtggcgatt

SEQ ID NO: 45170 - DNA, 80 bp, synthetic construct
  source 1..80: mol_type = other DNA
ccaacaatgatagactggattaagaaaatgtggcacatatacaccatggaatactatgcagccataaaaaaggatgagtt

SEQ ID NO: 45171 - DNA, 80 bp, synthetic construct; identical to SEQ ID NO: 15158
  source 1..80: mol_type = other DNA

SEQ ID NO: 45172 - DNA, 80 bp, synthetic construct
  source 1..80: mol_type = other DNA
ttttttttttttttttttgagacagggtctctcagtctgttgcccaggttggagtgcagtgatgcaatcacggctcactg

SEQ ID NO: 45173 - DNA, 80 bp, synthetic construct
  source 1..80: mol_type = other DNA
gtgatgctcacacctcgacctcctgtagctacttgggaggcaaggcaggaagactgcttgagcctgggaggcaggggttg

SEQ ID NO: 45174 - DNA, 80 bp, synthetic construct; identical to SEQ ID NO: 15159
  source 1..80: mol_type = other DNA

SEQ ID NO: 45175 - DNA, 80 bp, synthetic construct
  source 1..80: mol_type = other DNA
ttagtctcctgagtagctgggatacaggtgcctgccaccacacccagctaatttttgtatttttagtagagacagggttt

SEQ ID NO: 45176 - DNA, 80 bp, synthetic construct
  source 1..80: mol_type = other DNA
aaaaacaaaaatatacacggttgcatgcatctccatcacgtcctctttcaaacctgtggatcctgtggcttaagtagaca

SEQ ID NO: 45177 - DNA, 80 bp, synthetic construct
  source 1..80: mol_type = other DNA
gctgaggcttatcacaaaacgtgattattaaccagtagtgcacggagctgcactgggcattttctttgaagagtgactac

SEQ ID NO: 45178 - DNA, 80 bp, synthetic construct; identical to SEQ ID NO: 15160
  source 1..80: mol_type = other DNA

SEQ ID NO: 45179 - DNA, 80 bp, synthetic construct
  source 1..80: mol_type = other DNA
gggcatggtggcaggtacctgcaatcccagctacttgggaggctgaggcaggagaatcgcttgaaccctgggggtggagg

SEQ ID NO: 45180 - DNA, 80 bp, synthetic construct
  source 1..80: mol_type = other DNA
gggagtaattgtgctggtttctgttagatggatacctgcatgttctcagatggagcagagatcagaccctcttctcacta

SEQ ID NO: 45181 - DNA, 80 bp, synthetic construct
  source 1..80: mol_type = other DNA
ggacaacacatggcttcaaatcatgcttcgccatgtatgcagaatctctctaagatttctgtttcaaattcgcagatcac

SEQ ID NO: 45182 - DNA, 80 bp, synthetic construct; identical to SEQ ID NO: 15161
  source 1..80: mol_type = other DNA

SEQ ID NO: 45183 - DNA, 80 bp, synthetic construct
  source 1..80: mol_type = other DNA
ccacacgatcccactactaagagttagggtctaaaatagtgtggtctgtcctcctgagcttttttctaggtgtaaatgag

SEQ ID NO: 45184 - DNA, 80 bp, synthetic construct
  source 1..80: mol_type = other DNA
agattaaaaaaaaaaagaccctgatggcttgaagaattgacataccacaaaaatgtacgatgcacttttatggggtacac

SEQ ID NO: 45185 - DNA, 80 bp, synthetic construct
  source 1..80: mol_type = other DNA
ccaggctggtctcaaactcctgatctcaagtgatcctcctgcctcggacctccaaagtgctaggattgcaggcgtgagcc

SEQ ID NO: 45186 - DNA, 80 bp, synthetic construct; identical to SEQ ID NO: 15162
  source 1..80: mol_type = other DNA

SEQ ID NO: 45187 - DNA, 80 bp, synthetic construct
  source 1..80: mol_type = other DNA
tgaagctcttagtattttttctctcccttctgggaaggttagaaagatgacaatgataaatgcataaataaccagcaggg

SEQ ID NO: 45188 - DNA, 80 bp, synthetic construct
  source 1..80: mol_type = other DNA
ctagtatctgtatgtgatgttagagttcacaagcactatcatcaatttccatttaattcttgtattagtccgttctcaca

SEQ ID NO: 45189 - DNA, 80 bp, synthetic construct
  source 1..80: mol_type = other DNA
ggttttaaagccatcagctctcatgagaactaactcactattatgagaacagcatggggaaaccacctccaagatccatg

SEQ ID NO: 45190 - DNA, 80 bp, synthetic construct
  source 1..80: mol_type = other DNA
tactaaactcattgaagtacataaagacatcatacagccatcgggggataactcagtaggcttcttggtctaattctgtg

SEQ ID NO: 45191 - DNA, 80 bp, synthetic construct; identical to SEQ ID NO: 15163
  source 1..80: mol_type = other DNA

SEQ ID NO: 45192 - DNA, 80 bp, synthetic construct
  source 1..80: mol_type = other DNA
actagattaatcatggtaatcccatttcctgtcagcagttgattatcagggatgggcatgtgacctggttctgaccaata

SEQ ID NO: 45193 - DNA, 80 bp, synthetic construct
  source 1..80: mol_type = other DNA
gtatgatgagacaacaagggatgccaaaacaatttagaaagaatatacttactaaaattgctagcaaaggcaaaaaataa

SEQ ID NO: 45194 - DNA, 80 bp, synthetic construct
  source 1..80: mol_type = other DNA
cagagaaatcaatgaagtgaaacatgaaagattcatgtgaggtgccctctactgaaagcataaattttgatgcaatcaga

SEQ ID NO: 45195 - DNA, 80 bp, synthetic construct; identical to SEQ ID NO: 15164
  source 1..80: mol_type = other DNA

SEQ ID NO: 45196 - DNA, 80 bp, synthetic construct
  source 1..80: mol_type = other DNA
tgtgatgttttgacacatatatgcattgtgaaatgattaccataataaagctaagtagcatatccatcacctcacatggt

SEQ ID NO: 45197 - DNA, 80 bp, synthetic construct
  source 1..80: mol_type = other DNA
gaagtcagcttaattaaaaagctgatattcaggatatagtgttttctcttttttttggaaaaaaaagggccttctgcttt

SEQ ID NO: 45198 - DNA, 80 bp, synthetic construct
  source 1..80: mol_type = other DNA
cagcctgaccaacatagtaaaaccctgtctctactaaaaatacaaacattagccaggtgtggtggcgcacatctatagtc

SEQ ID NO: 45199 - DNA, 80 bp, synthetic construct; identical to SEQ ID NO: 15165
  source 1..80: mol_type = other DNA

SEQ ID NO: 45200 - DNA, 80 bp, synthetic construct
  source 1..80: mol_type = other DNA
caagaatcattggaaggtttgccttcagtctaaagttctgctctctcttgaattgagttccctgaactctttggcttttg

SEQ ID NO: 45201 - DNA, 80 bp, synthetic construct
  source 1..80: mol_type = other DNA
ttattacagctgggggctactcgtttctttgtgcatttaggtaagaaaagcatgatctgcaagcaaaaaacaaacagcca

SEQ ID NO: 45202 - DNA, 80 bp, synthetic construct; identical to SEQ ID NO: 15166
  source 1..80: mol_type = other DNA

SEQ ID NO: 45203 - DNA, 80 bp, synthetic construct
  source 1..80: mol_type = other DNA
catgcacgtgttcattgcagcactattcgcaatagcaaagatatggaatcaacctaggtgcccatcaatgatagactgga

SEQ ID NO: 45204 - DNA, 80 bp, synthetic construct
  source 1..80: mol_type = other DNA
taaacattgagtacacatggacacataaaagggaacaacagacaccgggatctacttaagggtaaagggtgggaggatgg

SEQ ID NO: 45205 - DNA, 80 bp, synthetic construct
  source 1..80: mol_type = other DNA
tacgggattgattaattaagtaatatgtaggtatcaggcatacgtgatcaatcccttcatttgtttatattggaggaagg

SEQ ID NO: 45206 - DNA, 80 bp, synthetic construct; identical to SEQ ID NO: 15167
  source 1..80: mol_type = other DNA

SEQ ID NO: 45207 - DNA, 80 bp, synthetic construct
  source 1..80: mol_type = other DNA
gtcaaaatcatttgttttggtttaaactcattaccaattcaactcattctagtccattttggattcattcatgggctaat

SEQ ID NO: 45208 - DNA, 80 bp, synthetic construct
  source 1..80: mol_type = other DNA
acttcctaatctctgctggtagcaatattaactgagtattcaagactctcagggcccctctcaaaaaaaaaagaaaaaag

SEQ ID NO: 45209 - DNA, 80 bp, synthetic construct
  source 1..80: mol_type = other DNA
aagcatcgcactggctagtcccatggtgcttccctctttttggggacctaggattcagtgtgaaaatgggattcttgatt

SEQ ID NO: 45210 - DNA, 80 bp, synthetic construct; identical to SEQ ID NO: 15168
  source 1..80: mol_type = other DNA

SEQ ID NO: 45211 - DNA, 80 bp, synthetic construct
  source 1..80: mol_type = other DNA
acttaatatttacataacaaaccttatctttgtgtaagatatttttcctggcaagcttgtcttgactgggcctttacctg

SEQ ID NO: 45212 - DNA, 80 bp, synthetic construct
  source 1..80: mol_type = other DNA
tctaaagcgcgaagggaaactatttgaaaactgtcaaatgaagacccttataaagctattgtgtccggaatttattcctt

SEQ ID NO: 45213 - DNA, 80 bp, synthetic construct
  source 1..80: mol_type = other DNA
cttcaggagtgaagctgtagaccttcgcagtgagcgttacagctattaaaggtggtgcgtccggagttgtttgtccctcc

SEQ ID NO: 45214 - DNA, 80 bp, synthetic construct
  source 1..80: mol_type = other DNA
cccttatttggtcccacacacgtcctgctgattggtccattttagaggcgctgattggtccattttatagagtactgatt

SEQ ID NO: 45215 - DNA, 80 bp, synthetic construct
  source 1..80: mol_type = other DNA
gctccagctctcactataagatctgcttctgtcatatgtctgtatgtttatacgcttgtatgtatgtacatttcactacc

SEQ ID NO: 45216 - DNA, 80 bp, synthetic construct
  source 1..80: mol_type = other DNA
gaggcattttcacctagatctactggtaagataagtttaggctatctctcctagatttttaaggtcacaaatgttgcttc

SEQ ID NO: 45217 - DNA, 80 bp, synthetic construct
  source 1..80: mol_type = other DNA
agacattatcctcacagctctgtcctccattgtgagctctataattggtgtgtacatttaagacccaaatgggccctacc

SEQ ID NO: 45218 - DNA, 80 bp, synthetic construct; identical to SEQ ID NO: 15170
  source 1..80: mol_type = other DNA

SEQ ID NO: 45219 - DNA, 80 bp, synthetic construct
  source 1..80: mol_type = other DNA
agccctttgtaaatcagacaccactttctcctgcctgcctataaaattggctgcagtccgctgcctccttgactttttgg

SEQ ID NO: 45220 - DNA, 80 bp, synthetic construct
  source 1..80: mol_type = other DNA
tacagccttcacttgggtgtacatgggtacttgggacccaggatgagtagggaagtcagtaaggagtgtgtcatagtttc

SEQ ID NO: 45221 - DNA, 80 bp, synthetic construct
  source 1..80: mol_type = other DNA
tctacgaatacagatatagacagttcaaaattacttcccatgtttttcactggaaattagtatttctaagagttaaaatg

SEQ ID NO: 45222 - DNA, 80 bp, synthetic construct; identical to SEQ ID NO: 15171
  source 1..80: mol_type = other DNA

SEQ ID NO: 45223 - DNA, 80 bp, synthetic construct
  source 1..80: mol_type = other DNA
catttcatagtgcggttacagcaagatccattcttgctcacacgtgccagcagcagtggtagtggcagcatggtaggttg

SEQ ID NO: 45224 - DNA, 80 bp, synthetic construct
  source 1..80: mol_type = other DNA
tagggtgctggcagacaacacaggtctgtgtgccttctctgtgccctgtaacaggagtggttgttcggggcaggtgagga

SEQ ID NO: 45225 - DNA, 80 bp, synthetic construct
  source 1..80: mol_type = other DNA
tggcagggcacggtgcacacatactcgcctgctggtggatcaaggaaagcaaaatctgcccattcagacacatgccagca

SEQ ID NO: 45226 - DNA, 80 bp, synthetic construct; identical to SEQ ID NO: 15172
  source 1..80: mol_type = other DNA

SEQ ID NO: 45227 - DNA, 80 bp, synthetic construct
  source 1..80: mol_type = other DNA
ctcctatttcttctctaagcagctctccctgccaacttgtgtctatggtggctgaagggtctccttctgctggagttcca

SEQ ID NO: 45228 - DNA, 80 bp, synthetic construct
  source 1..80: mol_type = other DNA
cccctctcagtccaccttctgtgtgttccctctgttcactttcagtgccttccctttgaagatcttctaggagtatacca

SEQ ID NO: 45229 - DNA, 80 bp, synthetic construct
  source 1..80: mol_type = other DNA
cttcacaaggcaaagatgcgcactcttgccatttctattgaatacaggactgtatgtatgagcaagagcaattagtcgag

SEQ ID NO: 45230 - DNA, 80 bp, synthetic construct
  source 1..80: mol_type = other DNA
gacctttgatggatagattgcaaaaattttctcccattctgtaggttatttgttcactctgatgacagtttcttttgctt

SEQ ID NO: 45231 - DNA, 80 bp, synthetic construct
  source 1..80: mol_type = other DNA
cctgaatagtgttgcctagattttcttctagggtttttatagttttgggttttatatttaagtctttaatccatcttgac

SEQ ID NO: 45232 - DNA, 80 bp, synthetic construct; identical to SEQ ID NO: 15173
  source 1..80: mol_type = other DNA

SEQ ID NO: 45233 - DNA, 80 bp, synthetic construct
  source 1..80: mol_type = other DNA
ttgatgagaatagcatagaaattataaattactttgggcagtatggccattttcacgatattgattcttcctatccatga

SEQ ID NO: 45234 - DNA, 80 bp, synthetic construct
  source 1..80: mol_type = other DNA
ttagttcaatcattgtggaagatggtgtggcaattcctcaaagtcctagaatcagaaataccatttgacccatcaatccc

SEQ ID NO: 45235 - DNA, 80 bp, synthetic construct
  source 1..80: mol_type = other DNA
atggaatactatgcagccataaaaaggaatcagatcatgtcctttgcagggacacggatgaagctgaaagccattatcct

SEQ ID NO: 45236 - DNA, 80 bp, synthetic construct; identical to SEQ ID NO: 15174
  source 1..80: mol_type = other DNA

SEQ ID NO: 45237 - DNA, 80 bp, synthetic construct
  source 1..80: mol_type = other DNA
gccgatgacgtgatcctacatagagaaaactcaaaacacgtcataaaaattgttaaatccagtaaagtagcaggatacag

SEQ ID NO: 45238 - DNA, 80 bp, synthetic construct
  source 1..80: mol_type = other DNA
gcacagtgtgaagacagagtctacctccttaggaagtaaaaggaatgttagtgtgggattttgcattggaggctagtgct

SEQ ID NO: 45239 - DNA, 80 bp, synthetic construct; identical to SEQ ID NO: 15175
  source 1..80: mol_type = other DNA

SEQ ID NO: 45240 - DNA, 80 bp, synthetic construct
  source 1..80: mol_type = other DNA
aggcagtgttatacaagcctaagggtaattccacctgaccaggtacagcacaaagatatgtggcctccaactcccaacat

SEQ ID NO: 45241 - DNA, 80 bp, synthetic construct
  source 1..80: mol_type = other DNA
acactcactggtggaatgttctcaaaacaaagaaatgataaatgtttgaagtgatagatgtgctaattatcatgatttga

SEQ ID NO: 45242 - DNA, 80 bp, synthetic construct
  source 1..80: mol_type = other DNA
cataaacaaagccatatgacatatatcaccctcataccacacacatggggctctttcagacacattgcccagtgccttca

SEQ ID NO: 45243 - DNA, 80 bp, synthetic construct; identical to SEQ ID NO: 15176
  source 1..80: mol_type = other DNA

SEQ ID NO: 45244 - DNA, 80 bp, synthetic construct
  source 1..80: mol_type = other DNA
taagatatgaataaggggtccacaggagcaacctgagtccctgcaactacatttcccaggggcccctggggtaaccctaa

SEQ ID NO: 45245 - DNA, 80 bp, synthetic construct
  source 1..80: mol_type = other DNA
aaggggctttgaaattggggtttaatcctatctcaactgtgagtacaggagagtaggttctacacgatgtctacatttca

SEQ ID NO: 45246 - DNA, 80 bp, synthetic construct
  source 1..80: mol_type = other DNA
tttccctaaaactcagtttctttttcagtaaaatggagctacgagtactgcttacttaaaggacttgttgtgaggattac

SEQ ID NO: 45247 - DNA, 80 bp, synthetic construct; identical to SEQ ID NO: 15177
  source 1..80: mol_type = other DNA

SEQ ID NO: 45248 - DNA, 80 bp, synthetic construct
  source 1..80: mol_type = other DNA
ggcacccgccaccatgcctggctaatttttctatttttagtagagatggggttaatttttgtatttttagtagcgatggg

SEQ ID NO: 45249 - DNA, 80 bp, synthetic construct
  source 1..80: mol_type = other DNA
atgaatgacaaaaaaatttaactccttcaccgtcagaccgagagcatcaccccctgaacatggacttgcagaattccaca

SEQ ID NO: 45250 - DNA, 80 bp, synthetic construct
  source 1..80: mol_type = other DNA
tactgtttgctcttgaatgcttgaaacacaaaacaggtgacaccaccttcctcctcaaaaggaactttttaactgtcaac

SEQ ID NO: 45251 - DNA, 80 bp, synthetic construct
  source 1..80: mol_type = other DNA
tctggacaagaacaactgttgaatgatggtctttgggtgcggctagtccagcaaccccttttcatccagaggcccagtga

SEQ ID NO: 45252 - DNA, 80 bp, synthetic construct; identical to SEQ ID NO: 15178
  source 1..80: mol_type = other DNA

SEQ ID NO: 45253 - DNA, 80 bp, synthetic construct
  source 1..80: mol_type = other DNA
atatttaacacacatcgattctagagacctggaattgaacaatgagttctgcatatcaacctgctctccaggggtaccaa

SEQ ID NO: 45254 - DNA, 80 bp, synthetic construct
  source 1..80: mol_type = other DNA
cattttgctcaacattcaggaccctctagaagttgcctcattctactctcctttcttacctttcttttacacagctctcc

SEQ ID NO: 45255 - DNA, 80 bp, synthetic construct
  source 1..80: mol_type = other DNA
tgcaactccaaagtgtgtccagactcaaggcaagggcactaggctttccagacctcctactaagtcattgatccagcact

SEQ ID NO: 45256 - DNA, 80 bp, synthetic construct; identical to SEQ ID NO: 15179
  source 1..80: mol_type = other DNA

SEQ ID NO: 45257 - DNA, 80 bp, synthetic construct
  source 1..80: mol_type = other DNA
tgcagtggcacgatctcagctccctgcaacctccacctcccgggttcaagtgattctcctgcattagcctctcaaatagc

SEQ ID NO: 45258 - DNA, 80 bp, synthetic construct
  source 1..80: mol_type = other DNA
ccattgcaccaagacccgataggtctaaggggtctcatttgagtcattgtatataaatttttttttcaatgttttttgtc

SEQ ID NO: 45259 - DNA, 80 bp, synthetic construct; identical to SEQ ID NO: 15180
  source 1..80: mol_type = other DNA

SEQ ID NO: 45260 - DNA, 80 bp, synthetic construct
  source 1..80: mol_type = other DNA
ttgagccacctgtagtctggtgctgcctggctcatgaattgctatctgttctaataaactttaaaaaatgttatacctaa

SEQ ID NO: 45261 - DNA, 80 bp, synthetic construct
  source 1..80: mol_type = other DNA
tatctcggctcactgcaagctccgcttcctgggttcacgccattctcctgcctcagcctcctgagtagctgggactacag

SEQ ID NO: 45262 - DNA, 80 bp, synthetic construct
  source 1..80: mol_type = other DNA
cgtcatatttctatctccatataagccaaaatggcttgttcaaaagccataactctcataacttttctactctttgttct

SEQ ID NO: 45263 - DNA, 80 bp, synthetic construct; identical to SEQ ID NO: 15181
  source 1..80: mol_type = other DNA

SEQ ID NO: 45264 - DNA, 80 bp, synthetic construct
  source 1..80: mol_type = other DNA
aaacatgttgtatcgaactttcccagaattttctcttttgttttttagcttcaatttcttcatcatttcaggaaaatatt

SEQ ID NO: 45265 - DNA, 80 bp, synthetic construct
  source 1..80: mol_type = other DNA
ccaccctccaacctgtgaaaggccccagtgtgtgctgtttgcttctttgtattaattaattctcatgatttagctcccac

SEQ ID NO: 45266 - DNA, 80 bp, synthetic construct
  source 1..80: mol_type = other DNA
catagtattccatagtgtataagtaccacattttctttatccagtctgtcactgatgggcatttaggttgattctgtgtc

SEQ ID NO: 45267 - DNA, 80 bp, synthetic construct; identical to SEQ ID NO: 15182
  source 1..80: mol_type = other DNA

SEQ ID NO: 45268 - DNA, 80 bp, synthetic construct
  source 1..80: mol_type = other DNA
gtatgaaatctttcttttcataaaactattattttatcactttatttttagctgttttttattgagtttatttcacatgg

SEQ ID NO: 45269 - DNA, 80 bp, synthetic construct
  source 1..80: mol_type = other DNA
gtatagctctgtttccaccttttatttgctgcttgaatctggtgtggctggtgagatgtccagctggggttggtgtagac

SEQ ID NO: 45270 - DNA, 80 bp, synthetic construct
  source 1..80: mol_type = other DNA
ccgttttcatgtaagagctgggtagggaaaatagtgattcatggcctttggctcagtgaatgtgcttttttttgcataag

SEQ ID NO: 45271 - DNA, 80 bp, synthetic construct; identical to SEQ ID NO: 15183
  source 1..80: mol_type = other DNA

SEQ ID NO: 45272 - DNA, 80 bp, synthetic construct
  source 1..80: mol_type = other DNA
aggactggcttcagttacctctagtaaggaaaccacagcatatcctgctctaaaatgtccattttctcatcttcaataag

SEQ ID NO: 45273 - DNA, 80 bp, synthetic construct
  source 1..80: mol_type = other DNA
ctggcaagagagtggctggattaagatgatagagcaggaaatagtaatattgggagaagataaaagcaaaatttcgtaag

SEQ ID NO: 45274 - DNA, 80 bp, synthetic construct
  source 1..80: mol_type = other DNA
agggggaactcataagaactcataattatttcttcaacagacgtgtacagaagggccatgctgttattactcttacacaa

SEQ ID NO: 45275 - DNA, 80 bp, synthetic construct; identical to SEQ ID NO: 15184
  source 1..80: mol_type = other DNA

SEQ ID NO: 45276 - DNA, 80 bp, synthetic construct
  source 1..80: mol_type = other DNA
gctaaaatttctctcacattatcagggttaatactcagtcctttgaccaagataatatgccccaaatacttaacttccgg

SEQ ID NO: 45277 - DNA, 80 bp, synthetic construct
  source 1..80: mol_type = other DNA
atcagcttttagtatttgggaaaagtaagtgggactttctgtatacccttggggcatgacagcccacatatattgccatt

SEQ ID NO: 45278 - DNA, 80 bp, synthetic construct
  source 1..80: mol_type = other DNA
ttgtttattgccctcaagtcctgcacaaatctccattttctcctgctttgtttctttacagggaacatagggctgttgca

SEQ ID NO: 45279 - DNA, 80 bp, synthetic construct
  source 1..80: mol_type = other DNA
tttatctctacctttattggagtggctgagaatattttccctatatctgtattgactgagaccgtaagtgggaggagaca

SEQ ID NO: 45280 - DNA, 80 bp, synthetic construct; identical to SEQ ID NO: 15185
  source 1..80: mol_type = other DNA

SEQ ID NO: 45281 - DNA, 80 bp, synthetic construct
  source 1..80: mol_type = other DNA
atggaattgtaaggtataggtttggacttaaaacgtgagatcattttattagacgcagccaccatgttaattctttcatt

SEQ ID NO: 45282 - DNA, 80 bp, synthetic construct
  source 1..80: mol_type = other DNA
gtgggcaaaatatgggggaggcatgtggcttttcatcttgtagccatcttattcaggaaccaaaaagggggaggcaggtt

SEQ ID NO: 45283 - DNA, 80 bp, synthetic construct; identical to SEQ ID NO: 15186
  source 1..80: mol_type = other DNA

SEQ ID NO: 45284 - DNA, 80 bp, synthetic construct
  source 1..80: mol_type = other DNA
gtctttgatgtgtttggtatatgtcatggtagtgactgggggcatggaacttggttcacccttccttgctgatctcatga

SEQ ID NO: 45285 - DNA, 80 bp, synthetic construct
  source 1..80: mol_type = other DNA
ctttactgtgcagtccattccctctgttttgtgatttttaggaaatcttcataatttacggtctacaaaactattatttt

SEQ ID NO: 45286 - DNA, 80 bp, synthetic construct
  source 1..80: mol_type = other DNA
agtgggcttcctaagcacgttcactctgcctcctttaagtcttatatttatgatcaagatgaaagggagggatgtatcac

SEQ ID NO: 45287 - DNA, 80 bp, synthetic construct; identical to SEQ ID NO: 15187
  source 1..80: mol_type = other DNA

SEQ ID NO: 45288 - DNA, 80 bp, synthetic construct
  source 1..80: mol_type = other DNA
tattctaagcaagaatcaaatatccaggtatgtataaaccgccttcgtccttttagatcggcttctctctcttctttaca

SEQ ID NO: 45289 - DNA, 80 bp, synthetic construct
  source 1..80: mol_type = other DNA
ctggtggaagttaggatgagaagaaatgcaatctaatagatttggagaaatgatgttgtagacaccaagaacagagaaag

SEQ ID NO: 45290 - DNA, 80 bp, synthetic construct
  source 1..80: mol_type = other DNA
tacaaaagagttatacctgaggtctgtacagcactgttacaatcatagtctcaaaaggttaaggctctatgatggcaggt

SEQ ID NO: 45291 - DNA, 80 bp, synthetic construct
  source 1..80: mol_type = other DNA
tgttagtgttgttcttcagtaggttctcaccaatagctttgaatgaataccccaccagcttctactcaccaatagctttg

SEQ ID NO: 45292 - DNA, 80 bp, synthetic construct; identical to SEQ ID NO: 15188
  source 1..80: mol_type = other DNA

SEQ ID NO: 45293 - DNA, 80 bp, synthetic construct
  source 1..80: mol_type = other DNA
tgcttcctgaatgttttttgaacgctcaaggcagtttccagcttaaggccttgttattttctgttttcctacttggaaca

SEQ ID NO: 45294 - DNA, 80 bp, synthetic construct
  source 1..80: mol_type = other DNA
cctctgtacttactgggtcctttctttactttagttttcccagggcacttactacaatctaacagattgcatgttttatc

SEQ ID NO: 45295 - DNA, 80 bp, synthetic construct; identical to SEQ ID NO: 15189
  source 1..80: mol_type = other DNA

SEQ ID NO: 45296 - DNA, 80 bp, synthetic construct
  source 1..80: mol_type = other DNA
gacataatacatttctcacaggattctgggactattaactgaacttatgtgtgtaaaaggaattcatacaatgaaagcac

SEQ ID NO: 45297 - DNA, 80 bp, synthetic construct; identical to SEQ ID NO: 15201
  source 1..80: mol_type = other DNA

SEQ ID NO: 45298 - DNA, 80 bp, synthetic construct
  source 1..80: mol_type = other DNA
gggctctgaccactattggttttgagaccacgatgttgggagggtatgtttacagcactccagccaaaaaatacagcact

SEQ ID NO: 45299 - DNA, 80 bp, synthetic construct
  source 1..80: mol_type = other DNA
gattctggtatctagaccaaatcagaagggaacagtacattccaaatgaagaatttcttcattctgatctcctagaagac

SEQ ID NO: 45300 - DNA, 80 bp, synthetic construct; identical to SEQ ID NO: 15190
  source 1..80: mol_type = other DNA

SEQ ID NO: 45301 - DNA, 80 bp, synthetic construct
  source 1..80: mol_type = other DNA
agctcaccagttatcaactgacgacctatcatgtatcttctgtacccttaccttattttgaagaaaatcctagacatcaa

SEQ ID NO: 45302 - DNA, 80 bp, synthetic construct
  source 1..80: mol_type = other DNA
tgtggttatcttggaaattggtgatttatgctagaaagcttttaatgttggtttattgttgaattcctagaaaagtttta

SEQ ID NO: 45303 - DNA, 80 bp, synthetic construct; identical to SEQ ID NO: 15191
  source 1..80: mol_type = other DNA

SEQ ID NO: 45304 - DNA, 80 bp, synthetic construct
  source 1..80: mol_type = other DNA
ttgttatatggatcaagtaataacgtcagtaatgtttttggtacaaagtcattatttaataaaagttattgttccatctt

SEQ ID NO: 45305 - DNA, 80 bp, synthetic construct; identical to SEQ ID NO: 15192
  source 1..80: mol_type = other DNA

SEQ ID NO: 45306 - DNA, 80 bp, synthetic construct
  source 1..80: mol_type = other DNA
tatacacactcccttttggagttcaggcacaactgaccagcattaacattgaaacagtgatcataagactgtcaaaatgg

SEQ ID NO: 45307 - DNA, 80 bp, synthetic construct
  source 1..80: mol_type = other DNA
tgctggtttctggctctgctctgattgaggagagaataaatgagagtctgacaccttaaaaatctgaaaagagatattta

SEQ ID NO: 45308 - DNA, 80 bp, synthetic construct
  source 1..80: mol_type = other DNA
tccacctttgtcctgtaagctctcctacttcaatatgtctgattttcaggcagagccaatgtataccttatgtgggggcc

SEQ ID NO: 45309 - DNA, 80 bp, synthetic construct
  source 1..80: mol_type = other DNA
atacataaaggggagtttattaaggagtagtgagtcacatgatcacaaggtgacgtcccacagtaggccgtctgcaagct

SEQ ID NO: 45310 - DNA, 80 bp, synthetic construct; identical to SEQ ID NO: 15193
  source 1..80: mol_type = other DNA

SEQ ID NO: 45311 - DNA, 80 bp, synthetic construct
  source 1..80: mol_type = other DNA
cttgggaaacttgagaatgaagacccaacttcccagtaagttacagaaactcatgtattattccgaggccacagtaaaga

SEQ ID NO: 45312 - DNA, 80 bp, synthetic construct
  source 1..80: mol_type = other DNA
tttaaaggtgtcagactctcaatcgctctggatcctgggaaaggcttagaaacaggagagggtatggctgcattaatgga

SEQ ID NO: 45313 - DNA, 80 bp, synthetic construct
  source 1..80: mol_type = other DNA
ttcacatactaaaagccaaggtaatagctttggggagatttaagttagaggtgtttagatagagacagtcatagcagtgg

SEQ ID NO: 45314 - DNA, 80 bp, synthetic construct
  source 1..80: mol_type = other DNA
actgcaaatggtttaggcctttagacgtaatgtaggcaatcagatttctagtaggaggcatttctgtagaaacagaaaaa

SEQ ID NO: 45315 - DNA, 80 bp, synthetic construct; identical to SEQ ID NO: 15194
  source 1..80: mol_type = other DNA

SEQ ID NO: 45316 - DNA, 80 bp, synthetic construct
  source 1..80: mol_type = other DNA
ctatagtttttgaaacatagtatttctgcttccagttcttcaattttatgaaagacatagtttcatgcacatccgtgtga

SEQ ID NO: 45317 - DNA, 80 bp, synthetic construct
  source 1..80: mol_type = other DNA
aggggggttgttctctggcaggcagagtgggggtcacaaggtgctcagtaggggagctattgagccaggatgagccagga

SEQ ID NO: 45318 - DNA, 80 bp, synthetic construct
  source 1..80: mol_type = other DNA
aggcctgacacacagtagaactgatttatttgcaaaataagttttgttactatacttggtctgattttttgcataaaggg

SEQ ID NO: 45319 - DNA, 80 bp, synthetic construct; identical to SEQ ID NO: 15195
  source 1..80: mol_type = other DNA

SEQ ID NO: 45320 - DNA, 80 bp, synthetic construct
  source 1..80: mol_type = other DNA
gggcattccagtcaaatccttgatttttgtctccacttgtggcctgttacaaaacaaaacagattctaactgaatttatg

SEQ ID NO: 45321 - DNA, 80 bp, synthetic construct
  source 1..80: mol_type = other DNA
actctgaaaaacaaaagtggcaatgtttcaacaaaacccataaaaagattatttcagtcttctattatttcagtccatgc

SEQ ID NO: 45322 - DNA, 80 bp, synthetic construct; identical to SEQ ID NO: 15196
  source 1..80: mol_type = other DNA

SEQ ID NO: 45323 - DNA, 80 bp, synthetic construct
  source 1..80: mol_type = other DNA
ttgacaatgtttcctatatgattttaacatgccaaatacaccgaatatgtctgtttttggcttcaggggacttaatatca

SEQ ID NO: 45324 - DNA, 80 bp, synthetic construct
  source 1..80: mol_type = other DNA
tttggagagatttgggttacgggtatttagatagagacagatattgtggtggaaaaacaaattacaatcaccaaacaggt

SEQ ID NO: 45325 - DNA, 80 bp, synthetic construct
  source 1..80: mol_type = other DNA
ccaacccatctttttttttttttttttgcagttttctcaaaaggtaagcaaaaatctttcactatctcttaatattaaaa

SEQ ID NO: 45326 - DNA, 80 bp, synthetic construct
  source 1..80: mol_type = other DNA
aaaagagcagattagtattctaataaaaccctgatattttgacataagggcctagattctggccctgaattagtatgctt

SEQ ID NO: 45327 - DNA, 80 bp, synthetic construct; identical to SEQ ID NO: 15197
  source 1..80: mol_type = other DNA

SEQ ID NO: 45328 - DNA, 80 bp, synthetic construct
  source 1..80: mol_type = other DNA
gcatgaaccaatgcacccagcctgtaattttttaaataaataagactagcttaatattcgtttcataaaaacagctaaat

SEQ ID NO: 45329 - DNA, 80 bp, synthetic construct
  source 1..80: mol_type = other DNA
gttctcaaagcaatctaggtaaactgctaacaatgaataaattgaacaaatataagtgggatggataaatgcttgttggt

SEQ ID NO: 45330 - DNA, 80 bp, synthetic construct; identical to SEQ ID NO: 15198
  source 1..80: mol_type = other DNA

SEQ ID NO: 45331 - DNA, 80 bp, synthetic construct
  source 1..80: mol_type = other DNA
gaaagttatagatataaagatgtatttgtgataagagagattaaaaagaaaagagaattattttgtatgataaataattt

SEQ ID NO: 45332 - DNA, 80 bp, synthetic construct
  source 1..80: mol_type = other DNA
tatagtcgtctttctggaaactgagctttgaccaaaaaaaccacaatacaaaaccaaaacattggttagagcaataaggg

SEQ ID NO: 45333 - DNA, 80 bp, synthetic construct
  source 1..80: mol_type = other DNA
aactctctctttcaactttttgttggctctggcaaattttttttttcttcaggtctaaatctgttgctatagcctgatgc

SEQ ID NO: 45334 - DNA, 80 bp, synthetic construct
  source 1..80: mol_type = other DNA
atgcagatttgtttggagtgtgtatgctggagtcttcagaataaagaccccaacacacaggggaaattgtcctttttatg

SEQ ID NO: 45335 - DNA, 80 bp, synthetic construct; identical to SEQ ID NO: 15199
  source 1..80: mol_type = other DNA

SEQ ID NO: 45336 - DNA, 80 bp, synthetic construct
  source 1..80: mol_type = other DNA
gacttctgaagcttttaccttggggcactgtcttctgagctacaacgtgtatttaaagtcttcgacgaaaccatgaaact

SEQ ID NO: 45337 - DNA, 80 bp, synthetic construct
  source 1..80: mol_type = other DNA
ttcagcaaaaatgcctcaatagagtttcaatgatctacttaggtcacatgccacccatcagccaagctttggtcctagag

SEQ ID NO: 45338 - DNA, 80 bp, synthetic construct
  source 1..80: mol_type = other DNA
tctcgtttagaatagaagccaaaatataagcattggctccaaggccactgttagttgtcagatatcatctcaatccattc

SEQ ID NO: 45339 - DNA, 80 bp, synthetic construct; identical to SEQ ID NO: 15200
  source 1..80: mol_type = other DNA

SEQ ID NO: 45340 - DNA, 80 bp, synthetic construct
  source 1..80: mol_type = other DNA
aattaatcaatatattttttgagtgaggagctttgtgttaggtacagctaaatgggaaatcaagtgggtcatgtaccatg

SEQ ID NO: 45341 - DNA, 80 bp, synthetic construct
  source 1..80: mol_type = other DNA
ctcctcatgcttaaaagacggaagatacaataatactttccttacagggttctgagactactaagagaacttatgcatgt

SEQ ID NO: 45342 - DNA, 80 bp, synthetic construct
  source 1..80: mol_type = other DNA
gcttaggggatcatggacattgaagcatattttgaaagaattggctataagaactctaggaacaaattggacttggaaac

SEQ ID NO: 45343 - DNA, 80 bp, synthetic construct
  source 1..80: mol_type = other DNA
acttctgtactgggctctgaccacaatcggttttcagaccacaatgttaggagggtatttttacatccctccagttaaca

SEQ ID NO: 45344 - DNA, 80 bp, synthetic construct
  source 1..80: mol_type = other DNA
tctgcttgacagaagagagaggaatctggtacctggaccaaatcaggagagagcagtatattacaaacaaagaatttctt

SEQ ID NO: 45345 - DNA, 80 bp, synthetic construct
  source 1..80: mol_type = other DNA
accccagaaggggtttactgtttggtgggcttcatcctcacctatagaaaattcaattataaagacaatacagatctggt

SEQ ID NO: 45346 - DNA, 80 bp, synthetic construct; identical to SEQ ID NO: 15202
  source 1..80: mol_type = other DNA

SEQ ID NO: 45347 - DNA, 80 bp, synthetic construct
  source 1..80: mol_type = other DNA
tcatgctagaaaacatttaatattgatttattgttgaattcatagtaaatttttactggtaaatgaataaagaatattgt

SEQ ID NO: 45348 - DNA, 80 bp, synthetic construct
  source 1..80: mol_type = other DNA
agagccttcttgctggtgaggactcccaagaatcccaaggtgttgcaagctatcacggcaagggggctgagcatgcactc

SEQ ID NO: 45349 - DNA, 80 bp, synthetic construct; identical to SEQ ID NO: 15203
  source 1..80: mol_type = other DNA

SEQ ID NO: 45350 - DNA, 80 bp, synthetic construct
  source 1..80: mol_type = other DNA
gactacaggtataccccccactacacctggctaagttttgcattttttgtagagatagagtttcaccatgttgcccaggc

SEQ ID NO: 45351 - DNA, 80 bp, synthetic construct
  source 1..80: mol_type = other DNA
tggaggggataaatatacaaatatagcattttggctttttcaaagatgtccctttgtcatcagcatcaaaacttttcctt

SEQ ID NO: 45352 - DNA, 80 bp, synthetic construct
  source 1..80: mol_type = other DNA
aaatcaggctttcatcacgccactctactgaaatggtgcttgtcaatgtcaccaacaaatgggttccacatgaccaagtc

SEQ ID NO: 45353 - DNA, 80 bp, synthetic construct
  source 1..80: mol_type = other DNA
cactgcaacctccacctcttgggttcaagcaattctcctgcttcaacctctctagtagctgggattacaagcacgcacca

SEQ ID NO: 45354 - DNA, 80 bp, synthetic construct; identical to SEQ ID NO: 15204
  source 1..80: mol_type = other DNA

SEQ ID NO: 45355 - DNA, 80 bp, synthetic construct
  source 1..80: mol_type = other DNA
cagaggtaaatcatcaaatctcttctctcaaaactcaaagagattgatcccagccaatctcattgctttaaacaccatct

SEQ ID NO: 45356 - DNA, 80 bp, synthetic construct
  source 1..80: mol_type = other DNA
agtgcagtggcacgatcttggctcactgaaacctccgcctcccgggttcaagcaattctcctgcctcagcctcctgagta

SEQ ID NO: 45357 - DNA, 80 bp, synthetic construct; identical to SEQ ID NO: 15205
  source 1..80: mol_type = other DNA

SEQ ID NO: 45358 - DNA, 80 bp, synthetic construct
  source 1..80: mol_type = other DNA
gagaaatttacacaaaattgcagtgaagatgaaggcaacaaaatattttcaaactgaaacacccagccgtcagctattgt

SEQ ID NO: 45359 - DNA, 80 bp, synthetic construct
  source 1..80: mol_type = other DNA
caatgcaccacaagagggcagtgttttatcatattctccttgaattatataataccaacagtggaatgagatgacttcca

SEQ ID NO: 45360 - DNA, 80 bp, synthetic construct
  source 1..80: mol_type = other DNA
tattttttgtggaagactatttttaagtattgaaggtactatttcctttcttgaattcatattgcagatgtacggtgtgg

SEQ ID NO: 45361 - DNA, 80 bp, synthetic construct
  source 1..80: mol_type = other DNA
aacgccgtctctactaaaaatacaaaaattagtcaggcatgatggcaggcgcctgtcatcccagctactagggaggctga

SEQ ID NO: 45362 - DNA, 80 bp, synthetic construct; identical to SEQ ID NO: 15206
  source 1..80: mol_type = other DNA

SEQ ID NO: 45363 - DNA, 80 bp, synthetic construct
  source 1..80: mol_type = other DNA
ctacagagaggtgattaatagaacattggagagttgaatgatacctagccaaactgtaccctaaaactttagccctaaaa

SEQ ID NO: 45364 - DNA, 80 bp, synthetic construct
  source 1..80: mol_type = other DNA
tcgattccctctcatttattccttgtggaaaaagaaaaacacaaatcttaaaaactaaagcaagtcagggaagcctggaa

SEQ ID NO: 45365 - DNA, 80 bp, synthetic construct; identical to SEQ ID NO: 15207
  source 1..80: mol_type = other DNA

SEQ ID NO: 45366 - DNA, 80 bp, synthetic construct
  source 1..80: mol_type = other DNA
ggtaagtcaaccaattccatgcagttgtactataaacaacagaagttggtctgggcttctcagtaagacactctgataag

SEQ ID NO: 45367 - DNA, 80 bp, synthetic construct
  source 1..80: mol_type = other DNA
gcaggtgactcaccaagacctgcgtgggtgcatttctctgcctctccatataactagatgagtcctttttttctttttct

SEQ ID NO: 45368 - DNA, 80 bp, synthetic construct
  source 1..80: mol_type = other DNA
accatgcccagataatttttgtatctttagtagagacagggtttcactgtgttgaccaggctggtctcgaactcctgacc

SEQ ID NO: 45369 - DNA, 80 bp, synthetic construct; identical to SEQ ID NO: 15208
  source 1..80: mol_type = other DNA

SEQ ID NO: 45370 - DNA, 80 bp, synthetic construct
  source 1..80: mol_type = other DNA
ccagtaaatcatttcttaaattgtcttgggctctaatagtctatgggactgtatcagcaacctggagaaggacaggaagg

SEQ ID NO: 45371 - DNA, 80 bp, synthetic construct
  source 1..80: mol_type = other DNA
ggcaggttcttaaaggaggctcccatcattctgaattatgaccatgctttcatcttcacaactcaagatctattttcaga

SEQ ID NO: 45372 - DNA, 80 bp, synthetic construct
  source 1..80: mol_type = other DNA
aggagaatcatttgaggtcaagtgtttgaaaccagcctggctaacatggcaagaccccgtctctactaaaaaatacaaaa

SEQ ID NO: 45373 - DNA, 80 bp, synthetic construct
  source 1..80: mol_type = other DNA
aaaagaaaagaaaatgaggtacctgaattggccagagaatgacattcatgtccccgtggatcccttgcagagagtacatg

SEQ ID NO: 45374 - DNA, 80 bp, synthetic construct; identical to SEQ ID NO: 15209
  source 1..80: mol_type = other DNA

SEQ ID NO: 45375 - DNA, 80 bp, synthetic construct
  source 1..80: mol_type = other DNA
gtctcgaagggttccctgtgcaggatttgggcctccaaaaaatgaagacaggccttcttttgtttttattatggaaattt

SEQ ID NO: 45376 - DNA, 80 bp, synthetic construct
  source 1..80: mol_type = other DNA
tggctctgttgcccaggctggggtgcagtagcaccatctcaaccaactgcaaactgtctcccgggttcaagtgattctcc

SEQ ID NO: 45377 - DNA, 80 bp, synthetic construct; identical to SEQ ID NO: 15210
  source 1..80: mol_type = other DNA

SEQ ID NO: 45378 - DNA, 80 bp, synthetic construct
  source 1..80: mol_type = other DNA
gtggcgcgatcttggctcactgtaacctccacctcctgggtttcaagcaattctcctggctcagcctcctgagtagctgg

SEQ ID NO: 45379 - DNA, 80 bp, synthetic construct
  source 1..80: mol_type = other DNA
cggcctctggagcattttaaaacaaatcccaaacatcatgtcattccatctgtaaaaacttgatcatgcgtctctcccga

SEQ ID NO: 45380 - DNA, 80 bp, synthetic construct
  source 1..80: mol_type = other DNA
cccgtctctactagaaatacaaaattagccgggcatggtggcatatgcctgtaatcccagctactcgggaggctgaggca

SEQ ID NO: 45381 - DNA, 80 bp, synthetic construct
  source 1..80: mol_type = other DNA
tcagaaccatccacctacccggaagggtcctttgtcatacatggcagcgtaagtgtaagcaaactctcctatgaacactc

SEQ ID NO: 45382 - DNA, 80 bp, synthetic construct; identical to SEQ ID NO: 15211
  source 1..80: mol_type = other DNA

SEQ ID NO: 45383 - DNA, 80 bp, synthetic construct
  source 1..80: mol_type = other DNA
atttggcagcaaagtctaaatagcaaggattgcaaacaaggtttgcttcatgctgttgcttcaatcagtattttcccaag

SEQ ID NO: 45384 - DNA, 80 bp, synthetic construct
  source 1..80: mol_type = other DNA
catctctactaaaaataccaaaatcaaccgggcgtggtggcgcacgcctgtagtcctagctactcgggctgttgaggcag

SEQ ID NO: 45385 - DNA, 80 bp, synthetic construct; identical to SEQ ID NO: 15212
  source 1..80: mol_type = other DNA

SEQ ID NO: 45386 - DNA, 80 bp, synthetic construct
  source 1..80: mol_type = other DNA
gctgaggcaggaggattgcttgagcccaggagttggaggctgcagggagctgtgatcaccactgtattccagcctgggtg

SEQ ID NO: 45387 - DNA, 80 bp, synthetic construct
  source 1..80: mol_type = other DNA
ccaacatggggaaaccctgtttctactaaaaatacaaaaagtcaagcgtggtggtgcatgcctgtagtcccagctacttg

SEQ ID NO: 45388 - DNA, 80 bp, synthetic construct
  source 1..80: mol_type = other DNA
ataattagggtgactaaggttcatcagggacttcccatgagaaagtcttgtctgacctcttatcctaataaaagcagagt

SEQ ID NO: 45389 - DNA, 80 bp, synthetic construct; identical to SEQ ID NO: 15213
  source 1..80: mol_type = other DNA

SEQ ID NO: 45390 - DNA, 80 bp, synthetic construct
  source 1..80: mol_type = other DNA
catgtggctttgattcttagcaacaggcctgtgggtaaaataaaggacttcaaggattggatgttttgtagctgattgaa

SEQ ID NO: 45391 - DNA, 80 bp, synthetic construct
  source 1..80: mol_type = other DNA
tcattgagtacagtcacatttataggaaagatcactgacgagatgcacgcacaatcccagcattgtctgctaaacggtaa

SEQ ID NO: 45392 - DNA, 80 bp, synthetic construct
  source 1..80: mol_type = other DNA
tgcaaattttgagagagtccaacaggaatcgctaaccgcaggattcgctaactgaaggaatcgctaactgaaggaatcgc

SEQ ID NO: 45393 - DNA, 80 bp, synthetic construct
  source 1..80: mol_type = other DNA
aatcttggttcacttcaacctccacctcccgggttcaagtgattctcctgcctcagcctccagagtagctgggactacag

SEQ ID NO: 45394 - DNA, 80 bp, synthetic construct; identical to SEQ ID NO: 15214
  source 1..80: mol_type = other DNA

SEQ ID NO: 45395 - DNA, 80 bp, synthetic construct
  source 1..80: mol_type = other DNA
cttccagcttcttttgttcagccacaatatctgggctcagatggccttctttataagccagaacagactcggcaggatac

SEQ ID NO: 45396 - DNA, 80 bp, synthetic construct
  source 1..80: mol_type = other DNA
tgtcctttctggaaatgatgggattgaagttcatggcatagaggtccgactccaccacctcccatcctttcttcttcaaa

SEQ ID NO: 45397 - DNA, 80 bp, synthetic construct
  source 1..80: mol_type = other DNA
tgcagtctgtaaaggagggggcggctttgtttgacattaggttattgcattccatctcctgtagccagaaatgtattttc

SEQ ID NO: 45398 - DNA, 80 bp, synthetic construct
  source 1..80: mol_type = other DNA
ggagtttgagaccagcctggccaacatggtgaaaccctgtctctactaaaaatacaaaaattagctgggtgtggtggcag

SEQ ID NO: 45399 - DNA, 80 bp, synthetic construct; identical to SEQ ID NO: 15215
  source 1..80: mol_type = other DNA

SEQ ID NO: 45400 - DNA, 80 bp, synthetic construct
  source 1..80: mol_type = other DNA
aattggcaccttactggtggggataagaactgcctcaacctttagggaaagtaatgaggcagaatctcttgaaactttaa

SEQ ID NO: 45401 - DNA, 80 bp, synthetic construct
  source 1..80: mol_type = other DNA
taagaaattatgggtacatccacactacaggatattttgctgttaacaagaatgagttggccaggcacggtggttcgagc

SEQ ID NO: 45402 - DNA, 80 bp, synthetic construct
  source 1..80: mol_type = other DNA
tcgcttgaacccaggaagcagaggttgcagtgagctgagatcttgccactgcactccagcctgggtgacagagtaagacc

SEQ ID NO: 45403 - DNA, 80 bp, synthetic construct; identical to SEQ ID NO: 15216
  source 1..80: mol_type = other DNA

SEQ ID NO: 45404 - DNA, 80 bp, synthetic construct
  source 1..80: mol_type = other DNA
gggcatggtggtgtatgcctgtagtcccaactactcaggaggctgagagatggaaggatcacttgaacccaggaggttga

SEQ ID NO: 45405 - DNA, 80 bp, synthetic construct
  source 1..80: mol_type = other DNA
actgataaaaaagcaagtgaatatgaacccatttttatttaaaatgaaagaagtgagaggaagggagagagggaagggaa

SEQ ID NO: 45406 - DNA, 80 bp, synthetic construct
  source 1..80: mol_type = other DNA
gctggagtgcagtggcatgaacttggctcactgcaacctccgcctctcaggttcaagcgattctcctgcctcagcatccc

SEQ ID NO: 45407 - DNA, 80 bp, synthetic construct; identical to SEQ ID NO: 15217
  source 1..80: mol_type = other DNA

SEQ ID NO: 45408 - DNA, 80 bp, synthetic construct
  source 1..80: mol_type = other DNA
ttttttttttttttgtagagacagggatttgccatgttgcccaggctggtcaaatttggagccgtgttgcccaggctggg

SEQ ID NO: 45409 - DNA, 80 bp, synthetic construct
  source 1..80: mol_type = other DNA
ggcctgtgataggtgattaggcgagggggtctccttcctcatgagtgggattaaggccctcataaaagaggcttcgccca

SEQ ID NO: 45410 - DNA, 80 bp, synthetic construct
  source 1..80: mol_type = other DNA
attaactacctagtcccaagtattatgtatggcagcacaaaatagactgagacacaccctatgaggtcaataccatgagt

SEQ ID NO: 45411 - DNA, 80 bp, synthetic construct
  source 1..80: mol_type = other DNA
agccgaggcaggcagcttgcttgagcccaggagtttgagaccagcctggctaacatggagaaaccccgtttctaccaaaa

SEQ ID NO: 45412 - DNA, 80 bp, synthetic construct; identical to SEQ ID NO: 15218
  source 1..80: mol_type = other DNA

SEQ ID NO: 45413 - DNA, 80 bp, synthetic construct
  source 1..80: mol_type = other DNA
tgcagtggcgccatctcggcttacagcaacttctgcctcccgggttcaagcgattctccttcctcagcctccgaatagct

SEQ ID NO: 45414 - DNA, 80 bp, synthetic construct
  source 1..80: mol_type = other DNA
caccgcgcccagccggcatctgcaacttttttgcaccatctgaataactagaaataactaaaataactagaaaggcacat

SEQ ID NO: 45415 - DNA, 80 bp, synthetic construct; identical to SEQ ID NO: 15219
  source 1..80: mol_type = other DNA

SEQ ID NO: 45416 - DNA, 80 bp, synthetic construct
  source 1..80: mol_type = other DNA
acaggcattttctttgtaacttaccttgccattagtcttatcaatgtttactgatcgccgctctgacagtttttgtttgt

SEQ ID NO: 45417 - DNA, 80 bp, synthetic construct
  source 1..80: mol_type = other DNA
cccggctaattgtatttttagtagagacggggtttcaccgtgttagccaggatggtctcgatttcctgacctcgtgatcc

SEQ ID NO: 45418 - DNA, 80 bp, synthetic construct
  source 1..80: mol_type = other DNA
tctcttgctctttcaaggagctcagactctaatagctataagcaggcctgtgactttacaatttttcatgtaaggcaaca

SEQ ID NO: 45419 - DNA, 80 bp, synthetic construct
  source 1..80: mol_type = other DNA
ggcgggcagatcacctcatgtcaggagttagagaccagcctggttaacatggtgaaaccccgtctctactaaaaatacaa

SEQ ID NO: 45420 - DNA, 80 bp, synthetic construct; identical to SEQ ID NO: 15220
  source 1..80: mol_type = other DNA

SEQ ID NO: 45421 - DNA, 80 bp, synthetic construct
  source 1..80: mol_type = other DNA
gggtgtggtggctcatgcctgtaatcgtagcactttgggagaccgaggcgggtggattacttgaggtcaggagctagaga

SEQ ID NO: 45422 - DNA, 80 bp, synthetic construct
  source 1..80: mol_type = other DNA
tcacgccactgcactacagcctgggcaacagagtgagtgagactccatctcaaaaagttcaacagaggaaaacttcagga

SEQ ID NO: 45423 - DNA, 80 bp, synthetic construct
  source 1..80: mol_type = other DNA
cccagccaaaattttttttttttttaattagctgggtttcaagttcttctgctctgaccaaaaaaaattagctgggtgtg

SEQ ID NO: 45424 - DNA, 80 bp, synthetic construct; identical to SEQ ID NO: 15221
  source 1..80: mol_type = other DNA

SEQ ID NO: 45425 - DNA, 80 bp, synthetic construct
  source 1..80: mol_type = other DNA
gcccttttttgtgtttaagctacacgtaaatacagaacattctgtaagattgaaaagtcaggaaatagttcctgccctag

SEQ ID NO: 45426 - DNA, 80 bp, synthetic construct
  source 1..80: mol_type = other DNA
ttagtccctttctcagagatcctgataatttcagtttgtcaactgcaagggcagtctgttcctccactcactttgaccaa

SEQ ID NO: 45427 - DNA, 80 bp, synthetic construct
  source 1..80: mol_type = other DNA
cttagtactgtccaatctcagagtgagattatttgggaaacagctctcaatccctgcagttgtctcagctggttatttat

SEQ ID NO: 45428 - DNA, 80 bp, synthetic construct
  source 1..80: mol_type = other DNA
caggcacggtggctcacgtcagtaatctcagcacttggggaggctgaggtgggtggatcacctgaggtcaggagttcaag

SEQ ID NO: 45429 - DNA, 80 bp, synthetic construct; identical to SEQ ID NO: 15222
  source 1..80: mol_type = other DNA

SEQ ID NO: 45430 - DNA, 80 bp, synthetic construct
  source 1..80: mol_type = other DNA
ttagcaacttatttcaaagtgttttagatactatagaccaaaagaggtatgggctgtgaccgtaagcctgatttggcctc

SEQ ID NO: 45431 - DNA, 80 bp, synthetic construct
  source 1..80: mol_type = other DNA
ctaatctcttccctttgtgggttttgagtcaaggaacaaaattcagggccaagcccctacaacctcctccacaggcacca

SEQ ID NO: 45432 - DNA, 80 bp, synthetic construct; identical to SEQ ID NO: 15223
  source 1..80: mol_type = other DNA

SEQ ID NO: 45433 - DNA, 80 bp, synthetic construct
  source 1..80: mol_type = other DNA
ttcttaaccctttccagctttcccaccctctttggctttagccatggccttctgatctgtgtttctcaggggacctgcag

SEQ ID NO: 45434 - DNA, 80 bp, synthetic construct; identical to SEQ ID NO: 15224
  source 1..80: mol_type = other DNA

SEQ ID NO: 45435 - DNA, 80 bp, synthetic construct
  source 1..80: mol_type = other DNA
agcctcaagtctttctcatcccttgggaagtgcaaattggatagagaagaaaccaattaaaaacaaaacaaacaaatcat

SEQ ID NO: 45436 - DNA, 80 bp, synthetic construct
  source 1..80: mol_type = other DNA
aatgtaaggaagtccaaatgttcacctgaagacaactgtggtcattttttggcaatcccaggttctcttttctacctgtt

SEQ ID NO: 45437 - DNA, 80 bp, synthetic construct
  source 1..80: mol_type = other DNA
tgccataaagcatctttataaacaaagcaagtagaagaaacacatcctggtatccaccacattcggcttttgttgattct

SEQ ID NO: 45438 - DNA, 80 bp, synthetic construct
  source 1..80: mol_type = other DNA
ccactcctggtcagccttctgttctgagatcaaagtggtggggtcacattctcgagaactgtgctcagccccctcatctc

SEQ ID NO: 45439 - DNA, 80 bp, synthetic construct; identical to SEQ ID NO: 15225
  source 1..80: mol_type = other DNA

SEQ ID NO: 45440 - DNA, 80 bp, synthetic construct
  source 1..80: mol_type = other DNA
tacatctgacttggactgaaatataggtgagagacaagattgtctcatatccggggaaatcataacctatgactaggacg

SEQ ID NO: 45441 - DNA, 80 bp, synthetic construct
  source 1..80: mol_type = other DNA
attgttcaaagtggaccccaggggagaagtcggagcaaagaacttaccaccaagcaggtatggtttttctttctttctct

SEQ ID NO: 45442 - DNA, 80 bp, synthetic construct; identical to SEQ ID NO: 15226
  source 1..80: mol_type = other DNA

SEQ ID NO: 45443 - DNA, 80 bp, synthetic construct
  source 1..80: mol_type = other DNA
cacctccaaggactgtgggagctggggactatgggaactgggatcaactcagtcctgattccttttggcctgctgggtta

SEQ ID NO: 45444 - DNA, 80 bp, synthetic construct
  source 1..80: mol_type = other DNA
ttcaaaccagtgagttttctacctctactattgaaagggcaccttgtcccacagaaccgagtcttgcctgcatgtggtca

SEQ ID NO: 45445 - DNA, 80 bp, synthetic construct
  source 1..80: mol_type = other DNA
cctctcccacatggcctctaatgatatggtcagagttgaaaggatgctaagggaggcctcagaggcttatttaatcagtt

SEQ ID NO: 45446 - DNA, 80 bp, synthetic construct; identical to SEQ ID NO: 15227
  source 1..80: mol_type = other DNA

SEQ ID NO: 45447 - DNA, 80 bp, synthetic construct
  source 1..80: mol_type = other DNA
agtttgccaactcctgatctaaaagctgtcaacttgttccaaaattattatggaataaacccaagacaaccacaaaactg

SEQ ID NO: 45448 - DNA, 80 bp, synthetic construct
  source 1..80: mol_type = other DNA
tatttactgccagaccattgtgtctgtgtgtgtgttcatctatgcatagatggactattaaacctatctgttgccatgtt

SEQ ID NO: 45449 - DNA, 80 bp, synthetic construct
  source 1..80: mol_type = other DNA
tttcagtcttaccaatgaacctcactgtgtttgtctgcttctagacatgtgcacgtattgcactagaggaactactaaga

SEQ ID NO: 45450 - DNA, 80 bp, synthetic construct; identical to SEQ ID NO: 15228
  source 1..80: mol_type = other DNA

SEQ ID NO: 45451 - DNA, 80 bp, synthetic construct
  source 1..80: mol_type = other DNA
ctttttataggacccctcttggccattgtatttctcttcttaaattacctattcatatccttagcttattttatgtcgga

SEQ ID NO: 45452 - DNA, 80 bp, synthetic construct
  source 1..80: mol_type = other DNA
tttccctctttctggattttactctttgaggctgatttttaaaagatttctcaacttccaaaattatgaagctactttgg

SEQ ID NO: 45453 - DNA, 80 bp, synthetic construct
  source 1..80: mol_type = other DNA
atcacctctatcatgtactaaattcccacttacacatgtccatttctgtgtccttttgtatttatttcctattcctgagc

SEQ ID NO: 45454 - DNA, 80 bp, synthetic construct
  source 1..80: mol_type = other DNA
agcttatcagttgattcctttggaatttctagttagacaaacatatcatctatatatagtaagagttttgctccttcctt

SEQ ID NO: 45455 - DNA, 80 bp, synthetic construct; identical to SEQ ID NO: 15229
  source 1..80: mol_type = other DNA

SEQ ID NO: 45456 - DNA, 80 bp, synthetic construct
  source 1..80: mol_type = other DNA
atagtgagaatcctgacccaaacttacttgattgcaggcctgttgttaagaatttcaaaggagacttttctttttgctct

SEQ ID NO: 45457 - DNA, 80 bp, synthetic construct
  source 1..80: mol_type = other DNA
acaggagtccagaaaactccaggatgatcatgacttccctttctcatgcctctggcttagcataatcttataaattttgg

SEQ ID NO: 45458 - DNA, 80 bp, synthetic construct
  source 1..80: mol_type = other DNA
gagattgattctaatgcttctccaataagatagctagtaaaagtgtttagtaactattccatatcaagttagtgaagctc

SEQ ID NO: 45459 - DNA, 80 bp, synthetic construct; identical to SEQ ID NO: 15230
  source 1..80: mol_type = other DNA

SEQ ID NO: 45460 - DNA, 80 bp, synthetic construct
  source 1..80: mol_type = other DNA
gggctgggaaaagttccctgcaacacctcctgaacctctttgaaacatcgatataacaaactgaatatccaactggaaat

SEQ ID NO: 45461 - DNA, 80 bp, synthetic construct
  source 1..80: mol_type = other DNA
tgataagacataggcagttaactcagaggccactgtgtcctgttaaatattggaagagggtactgtgtgtacttatgacc

SEQ ID NO: 45462 - DNA, 80 bp, synthetic construct; identical to SEQ ID NO: 15231
  source 1..80: mol_type = other DNA

SEQ ID NO: 45463 - DNA, 80 bp, synthetic construct
  source 1..80: mol_type = other DNA
ttgggaggccgaggcaggtggatcacttgaggtcaggagtttaagaccagcctggccaaaatggcgaaaacccgtctcta

SEQ ID NO: 45464 - DNA, 80 bp, synthetic construct
  source 1..80: mol_type = other DNA
tccaaaaaaaaaaaaaaagttccgtcattaattgacttcatgaactggaacacaccccagagccccagtttcctcatttg

SEQ ID NO: 45465 - DNA, 80 bp, synthetic construct
  source 1..80: mol_type = other DNA
gtctcccttcactgaacaacgtcaatggttttataggcatcacttgcctgcatcttagaaattcagtattcttatattac

SEQ ID NO: 45466 - DNA, 80 bp, synthetic construct
  source 1..80: mol_type = other DNA
tgtgtgtatatatatgtgtgtatacacacataattaaatatatgtaatcgtgtgtatgtatatgtatgtatacacacaca

SEQ ID NO: 45467 - DNA, 80 bp, synthetic construct; identical to SEQ ID NO: 15232
  source 1..80: mol_type = other DNA

SEQ ID NO: 45468 - DNA, 80 bp, synthetic construct
  source 1..80: mol_type = other DNA
gctgggactacaggtgtgtgccaccatgcccagacacttttaaaatttatttttggtagagacaaagtctcatgttgttg

SEQ ID NO: 45469 - DNA, 80 bp, synthetic construct
  source 1..80: mol_type = other DNA
ctgcagtgcagtgggacaatcatggctcactgtagccttgacctcctgggctcaagtgttcttcctgcctcagcctccca

SEQ ID NO: 45470 - DNA, 80 bp, synthetic construct
  source 1..80: mol_type = other DNA
cactgtgcccggcctgtatattgactttaaacaacaatttataatgtgagtcatttcacatatctctttgattatttatt

SEQ ID NO: 45471 - DNA, 80 bp, synthetic construct; identical to SEQ ID NO: 15233
  source 1..80: mol_type = other DNA

SEQ ID NO: 45472 - DNA, 80 bp, synthetic construct
  source 1..80: mol_type = other DNA
ggttgggatcaaatgcactttaattgacatggttatctttttcttcctgattgtagtgcttttaactactgtattagtcc

SEQ ID NO: 45473 - DNA, 80 bp, synthetic construct
  source 1..80: mol_type = other DNA
accaagcgaaaggggtttccccttataaaaccatcagatctcatgagacttattcactgccatgagaacagtattggggg

SEQ ID NO: 45474 - DNA, 80 bp, synthetic construct; identical to SEQ ID NO: 15234
  source 1..80: mol_type = other DNA

SEQ ID NO: 45475 - DNA, 80 bp, synthetic construct
  source 1..80: mol_type = other DNA
agtatgttttcatcgttgtgcagccaatctccagaggtttttcatcttttaagatggaaactctacccattaaacaactc

SEQ ID NO: 45476 - DNA, 80 bp, synthetic construct
  source 1..80: mol_type = other DNA
ttttttttaaggctgactcatattctattgtagtatgtcccatgttttgtttatccattcatcagttgatgaaatttggg

SEQ ID NO: 45477 - DNA, 80 bp, synthetic construct
  source 1..80: mol_type = other DNA
tgttatctataatggctacaccatttttacattcctaccacctgagtccaaggttcccatttgtctacagccttgccaac

SEQ ID NO: 45478 - DNA, 80 bp, synthetic construct; identical to SEQ ID NO: 15235
  source 1..80: mol_type = other DNA

SEQ ID NO: 45479 - DNA, 80 bp, synthetic construct
  source 1..80: mol_type = other DNA
gtgatgactgctttggtaggaaaggaggcaatctaaaattcacctgatttctgattcattccaataatgttttggtgtct

SEQ ID NO: 45480 - DNA, 80 bp, synthetic construct
  source 1..80: mol_type = other DNA
agaaggcctatggacctttgcttgggcaccaggagcttctctgagagcaggtttggggtgggcttggcctccagagtggc

SEQ ID NO: 45481 - DNA, 80 bp, synthetic construct
  source 1..80: mol_type = other DNA
aggaaggaagtaataccattttctatcaaaagcattctttgatcatccctgtcctaaaaaaaagttacttgatgggtctc

SEQ ID NO: 45482 - DNA, 80 bp, synthetic construct; identical to SEQ ID NO: 15236
  source 1..80: mol_type = other DNA

SEQ ID NO: 45483 - DNA, 80 bp, synthetic construct
  source 1..80: mol_type = other DNA
agaaaccaattatctttgaccaccgttctcaaccacataatgtgccagtcatcactggtagcaaagatttacagaatgtc

SEQ ID NO: 45484 - DNA, 80 bp, synthetic construct
  source 1..80: mol_type = other DNA
agcttcctcgcatcttcaccaggatcggagaagactatgatgagcgtgtgctgccatccatcactactgagatcctcaag

SEQ ID NO: 45485 - DNA, 80 bp, synthetic construct
  source 1..80: mol_type = other DNA
cagtggaagccaaacaggtggctcagcaggatgcagagagggccagaactcactggccactgcaggggacggcctgatgg

SEQ ID NO: 45486 - DNA, 80 bp, synthetic construct
  source 1..80: mol_type = other DNA
gattcttaacactgccttccttctgcctccactccagaaatcactgtgaaatttcatgattggcttaaagtgaaggaaat

SEQ ID NO: 45487 - DNA, 80 bp, synthetic construct; identical to SEQ ID NO: 15237
  source 1..80: mol_type = other DNA

SEQ ID NO: 45488 - DNA, 80 bp, synthetic construct
  source 1..80: mol_type = other DNA
tgccggctcgcacttcaccttccaccatgcttggaagcttcctgagacctcaccagaagcagatgctggtgccaagcttg

SEQ ID NO: 45489 - DNA, 80 bp, synthetic construct
  source 1..80: mol_type = other DNA
tttcccctccagagttaccacaaggaaaatgaacagcctcaatccttaccactcaggcaagattaaagagttacagtgca

SEQ ID NO: 45490 - DNA, 80 bp, synthetic construct; identical to SEQ ID NO: 15238
  source 1..80: mol_type = other DNA

SEQ ID NO: 45491 - DNA, 80 bp, synthetic construct
  source 1..80: mol_type = other DNA
acatgttctggggataagggtgcagacatctttgagggcctttattctatctaccataaggacacgatcaaaaacattat

SEQ ID NO: 45492 - DNA, 80 bp, synthetic construct
  source 1..80: mol_type = other DNA
tgcgtgttttttaaaattattttttagacagggtctcactctgtcacccaggctggaatgcagtggcacaatcctagctc

SEQ ID NO: 45493 - DNA, 80 bp, synthetic construct
  source 1..80: mol_type = other DNA
ctggagttgtgtgaacatggctcactgcagcctcgacctcctgggctcacgtaatcttttcatctcagcctcctgagtag

SEQ ID NO: 45494 - DNA, 80 bp, synthetic construct; identical to SEQ ID NO: 15239
  source 1..80: mol_type = other DNA

SEQ ID NO: 45495 - DNA, 80 bp, synthetic construct
  source 1..80: mol_type = other DNA
ggtcaggagttcaagattagcctggccaacatggtgaaaaacctgtctctactgaaaatacaaaattaatctggtgtagt

SEQ ID NO: 45496 - DNA, 80 bp, synthetic construct
  source 1..80: mol_type = other DNA
atgtaaaataaaataaaataggactgcccaaattgtgtaagcctcagaacccacgtaagctgactaaagggcacctctac

SEQ ID NO: 45497 - DNA, 80 bp, synthetic construct
  source 1..80: mol_type = other DNA
gctgtgaccctggagagtcctttagcagggcaaagtgcaacataggcagaccttaagggatgactcagtaacagataagc

SEQ ID NO: 45498 - DNA, 80 bp, synthetic construct
  source 1..80: mol_type = other DNA
tttccttgtgactcttctctagcctctgcatggccagcagccctcttcttttctcctattctcttaagaaacatgcccat

SEQ ID NO: 45499 - DNA, 80 bp, synthetic construct; identical to SEQ ID NO: 15240
  source 1..80: mol_type = other DNA

SEQ ID NO: 45500 - DNA, 80 bp, synthetic construct
  source 1..80: mol_type = other DNA
atcatttcattctttcttgcactaaagatgaccacttcccatgtctgtacccaattcctgtttggcccaaatgtatctgc

SEQ ID NO: 45501 - DNA, 80 bp, synthetic construct
  source 1..80: mol_type = other DNA
accatgttcaactttgtgatttttttctagtttgtagttgtgatctaccctgtaccactgagtcatctcaaatcacttaa

SEQ ID NO: 45502 - DNA, 80 bp, synthetic construct
  source 1..80: mol_type = other DNA
cattgttgagcctccttggaacccactgtcttccattggtcatgttccacccagcaggttctatctagttctaatcctca

SEQ ID NO: 45503 - DNA, 80 bp, synthetic construct; identical to SEQ ID NO: 15241
  source 1..80: mol_type = other DNA

SEQ ID NO: 45504 - DNA, 80 bp, synthetic construct
  source 1..80: mol_type = other DNA
atgcccaaagccatgtcagcctctctcagcagcttccattttattgtagagacactaagcatagagaagttagtgagtaa

SEQ ID NO: 45505 - DNA, 80 bp, synthetic construct
  source 1..80: mol_type = other DNA
gtcattcccatgtttatgtgtgtgtcattcatggaagacctcccttctccctttaataggggatttggggcctcttagca

SEQ ID NO: 45506 - DNA, 80 bp, synthetic construct; identical to SEQ ID NO: 15242
  source 1..80: mol_type = other DNA

SEQ ID NO: 45507 - DNA, 80 bp, synthetic construct
  source 1..80: mol_type = other DNA
aaagaggaaagggaaaactgaggaaatacagacaattatagaggagaaaatgaaaataattccaaccccaaattcatcac

SEQ ID NO: 45508 - DNA, 80 bp, synthetic construct
  source 1..80: mol_type = other DNA
ctcctgaagttccatgctccccactggcttttgccaggataactttctttggtattacttgtaatgcaagtatctgctgg

SEQ ID NO: 45509 - DNA, 80 bp, synthetic construct
  source 1..80: mol_type = other DNA
tttatttctttgtggttaattttttttttctgggtatttgtaagattagttttcttgtcatcgattcccagcaattttac

SEQ ID NO: 45510 - DNA, 80 bp, synthetic construct; identical to SEQ ID NO: 15243
  source 1..80: mol_type = other DNA

SEQ ID NO: 45511 - DNA, 80 bp, synthetic construct
  source 1..80: mol_type = other DNA
agagataccttatgtatcataaagtctaatcatttaagtgaacaattgaataactgttagtatatttagagttgtgcagc

SEQ ID NO: 45512 - DNA, 80 bp, synthetic construct
  source 1..80: mol_type = other DNA
cactccagcctgggcgacaaagagagactccgtctcaaaaaaaaaaaaaaagaaaaagaaagaaagaaaaagaaacctca

SEQ ID NO: 45513 - DNA, 80 bp, synthetic construct
  source 1..80: mol_type = other DNA
tctgtgctgtagcatctatccttcattcttttaaaccgctgaatagaatttcattgtatattagtattccaggtgcattc

SEQ ID NO: 45514 - DNA, 80 bp, synthetic construct; identical to SEQ ID NO: 15244
  source 1..80: mol_type = other DNA

SEQ ID NO: 45515 - DNA, 80 bp, synthetic construct
  source 1..80: mol_type = other DNA
atattcttgagtatattttcacatgtttattggtcattcatagcttctttggtgaaatatctattttaatcttttgttca

SEQ ID NO: 45516 - DNA, 80 bp, synthetic construct
  source 1..80: mol_type = other DNA
atttcaatgaagttcaatttatcaacttttttgtgccatattttttctgattaaaaaacaaacaaacacaaacaaaaaaa

SEQ ID NO: 45517 - DNA, 80 bp, synthetic construct
  source 1..80: mol_type = other DNA
aaggtcaggaatttgagaccagcctggccaacatggtgaaaccccgtctctactaaaaatacaaaaattagctgggcgtg

SEQ ID NO: 45518 - DNA, 80 bp, synthetic construct; identical to SEQ ID NO: 15245
  source 1..80: mol_type = other DNA

SEQ ID NO: 45519 - DNA, 80 bp, synthetic construct
  source 1..80: mol_type = other DNA
aagctggcctttcctccattgaattgccttgcatttttaccagagatcaattaatgataatagtaagggtttatttcttg

SEQ ID NO: 45520 - DNA, 80 bp, synthetic construct
  source 1..80: mol_type = other DNA
cttttccatagatcacagttctcctttgaagcttttcttgccttcatccctttgtctatattatcttccatttatttttc

SEQ ID NO: 45521 - DNA, 80 bp, synthetic construct
  source 1..80: mol_type = other DNA
cggtccattcttctatagctggaattgaaatggcaagaaaaggagtgagggtcttagggaatcacttcctgcctgggaac

SEQ ID NO: 45522 - DNA, 80 bp, synthetic construct; identical to SEQ ID NO: 15246
  source 1..80: mol_type = other DNA

SEQ ID NO: 45523 - DNA, 80 bp, synthetic construct
  source 1..80: mol_type = other DNA
tccttagctttaatacttaccctgcataccggattttacaattaattatctttgcaaagccctctctgaagaagtgttta

SEQ ID NO: 45524 - DNA, 80 bp, synthetic construct
  source 1..80: mol_type = other DNA
agtacacatctaattggtctccctaaatttgcatgaaagagagatgtagctggcacacctcagacacccagtcactgtca

SEQ ID NO: 45525 - DNA, 80 bp, synthetic construct
  source 1..80: mol_type = other DNA
caaatctcccctaaactcactggattaaacccaccactgtttcattttctgacatgattttctgtgttggctgggctcag

SEQ ID NO: 45526 - DNA, 80 bp, synthetic construct
  source 1..80: mol_type = other DNA
aggcctctccctcttcacatggcctctccgcatggtctctttgggtggtcactgagcagggtagccagactttgttgcat

SEQ ID NO: 45527 - DNA, 80 bp, synthetic construct; identical to SEQ ID NO: 15247
  source 1..80: mol_type = other DNA

SEQ ID NO: 45528 - DNA, 80 bp, synthetic construct
  source 1..80: mol_type = other DNA
ttctggtcctttggtgatatttcttttatcttcttggtccatgtcacctgtgggcttctcctgtgattcatgtagtcatg

SEQ ID NO: 45529 - DNA, 80 bp, synthetic construct
  source 1..80: mol_type = other DNA
gatgctgaaaatgtaagggaggttggtctcttctaatgtacactctgaaatactatcctgctaataacattttctctgcc

SEQ ID NO: 45530 - DNA, 80 bp, synthetic construct; identical to SEQ ID NO: 15248
  source 1..80: mol_type = other DNA

SEQ ID NO: 45531 - DNA, 80 bp, synthetic construct
  source 1..80: mol_type = other DNA
gcactttgggagtctgaggcaggtgatcacttgagcccagaagttgcagacaagcctgggcaatatggggaaaccctgcc

SEQ ID NO: 45532 - DNA, 80 bp, synthetic construct
  source 1..80: mol_type = other DNA
tctttcttttttttttctgtctcaaaagagagagagagagagagagagagatagagaggtcccagagacccaaagagcta

SEQ ID NO: 45533 - DNA, 80 bp, synthetic construct
  source 1..80: mol_type = other DNA
agtttccgatattttgttatggcaacctgaatgcactaagacaatgagtgaccttttacaaaggacctgaataatcatta

SEQ ID NO: 45534 - DNA, 80 bp, synthetic construct
  source 1..80: mol_type = other DNA
ctagagtgcagtagcgtaatcttgtctccctgcaacctctgcctcccaggttcaagcgattctcatgcctcagcctccca

SEQ ID NO: 45535 - DNA, 80 bp, synthetic construct; identical to SEQ ID NO: 15249
  source 1..80: mol_type = other DNA

SEQ ID NO: 45536 - DNA, 80 bp, synthetic construct
  source 1..80: mol_type = other DNA
agaatggcgtcaacctgggaggtggagcttgcagtgagccaagatcatgccactgcactccagcctgggtgacagagcga

SEQ ID NO: 45537 - DNA, 80 bp, synthetic construct
  source 1..80: mol_type = other DNA
agcctccgcctcctgggtttgagcgattctcctggctcagtctctcaagtagctgggattataggcacccgccaccactt

SEQ ID NO: 45538 - DNA, 80 bp, synthetic construct; identical to SEQ ID NO: 15250
  source 1..80: mol_type = other DNA

SEQ ID NO: 45539 - DNA, 80 bp, synthetic construct
  source 1..80: mol_type = other DNA
ccatattttagttgtattttgtttttcctaactcccaagatattattattattggtttatgaagtcattgtttattccga

SEQ ID NO: 45540 - DNA, 80 bp, synthetic construct
  source 1..80: mol_type = other DNA
catgctgtgccagtcttttcattcatgacttctgagtatttgctcatatttctttgaaattatatgtgattatttgtgcc

SEQ ID NO: 45541 - DNA, 80 bp, synthetic construct
  source 1..80: mol_type = other DNA
gaaaccccatctctactgaaaatacaaaaattagctgggcatggtcgtgggtgcctgtagtcccagctactcaagaggca

SEQ ID NO: 45542 - DNA, 80 bp, synthetic construct
  source 1..80: mol_type = other DNA
tgtctgggagaattaccaacccaaatgcactttaaatcttaaatcaactttttggcttgaggtttttgtgaacacctaaa

SEQ ID NO: 45543 - DNA, 80 bp, synthetic construct; identical to SEQ ID NO: 15251
  source 1..80: mol_type = other DNA

SEQ ID NO: 45544 - DNA, 80 bp, synthetic construct
  source 1..80: mol_type = other DNA
cagtgtctgttccaagtagaattcaagttatgctctcaaggtggaagttgcctggggaggacatccttgagtacagctca

SEQ ID NO: 45545 - DNA, 80 bp, synthetic construct
  source 1..80: mol_type = other DNA
ttggctgtttttttttattttttgtaaagatgagatctcactttgttgcccaggctggtctcagattcctgggctcaagc

SEQ ID NO: 45546 - DNA, 80 bp, synthetic construct
  source 1..80: mol_type = other DNA
accatgcctccactttttccccatctgcctggctacttagttgaaaactctttctgctcagcctttctagctccctgtgg

SEQ ID NO: 45547 - DNA, 80 bp, synthetic construct; identical to SEQ ID NO: 15252
  source 1..80: mol_type = other DNA

SEQ ID NO: 45548 - DNA, 80 bp, synthetic construct
  source 1..80: mol_type = other DNA
ttcctctgaggcctctacacatccctgtccagtcttttcattctctgtggttttctcatttctagtccaagaggcccaga

SEQ ID NO: 45549 - DNA, 80 bp, synthetic construct
  source 1..80: mol_type = other DNA
cacttcaatgtcatgacatgtgaaggatgcaagggctttttcaggtagagttacccatcagccttcacccacgtgccacc

SEQ ID NO: 45550 - DNA, 80 bp, synthetic construct; identical to SEQ ID NO: 15253
  source 1..80: mol_type = other DNA

SEQ ID NO: 45551 - DNA, 80 bp, synthetic construct
  source 1..80: mol_type = other DNA
caggtgcaccctccggagggcacagggtatgcaaggagcagctcccatctcgggagccacatgtgggaccctcatgcatt

SEQ ID NO: 45552 - DNA, 80 bp, synthetic construct
  source 1..80: mol_type = other DNA
tcacaggacacttgtcgccaattggtttggcaataaggaaaatgtgttacctctcctaacaggaagtctgaaggcctcca

SEQ ID NO: 45553 - DNA, 80 bp, synthetic construct
  source 1..80: mol_type = other DNA
agtaaggaaatctttcccaggagtcccctcacattggctagagccgggcccagcctatgcctgaactagtcactagcaaa

SEQ ID NO: 45554 - DNA, 80 bp, synthetic construct; identical to SEQ ID NO: 15254
  source 1..80: mol_type = other DNA

SEQ ID NO: 45555 - DNA, 80 bp, synthetic construct
  source 1..80: mol_type = other DNA
tctgatacatagcatacctttaaataatgtgagccccggtttcatcttttacccattctcagtggactttgatgtagcat

SEQ ID NO: 45556 - DNA, 80 bp, synthetic construct
  source 1..80: mol_type = other DNA
gtcactgcgggcttggctcagcttcccaggcctgccctcggggacctctgcagccctacctggctgttccatgctcctgg

SEQ ID NO: 45557 - DNA, 80 bp, synthetic construct
  source 1..80: mol_type = other DNA
gtcttttgtgggacaggcaggacttccgggctgggaggaggagatcttgtaccagagtctccaaaaggcatctgccccat

SEQ ID NO: 45558 - DNA, 80 bp, synthetic construct
  source 1..80: mol_type = other DNA
tagttcaccccttcctccctggccgcccagtctggaaggggagctggagaaggcggcggggggtggggggaaggcggggg

SEQ ID NO: 45559 - DNA, 80 bp, synthetic construct; identical to SEQ ID NO: 15255
  source 1..80: mol_type = other DNA

SEQ ID NO: 45560 - DNA, 80 bp, synthetic construct
  source 1..80: mol_type = other DNA
cggtaggggctggggagggaggtggtatggcccggagccccaggccgagggcccgggcacccgtgcatccccccttctgc

SEQ ID NO: 45561 - DNA, 80 bp, synthetic construct
  source 1..80: mol_type = other DNA
gggcgcgcgggcgggccggcgccggggtgcacggctctgagtaaggacgtgccgtgggtgtgggcatgcttgtgtggaga

SEQ ID NO: 45562 - DNA, 80 bp, synthetic construct; identical to SEQ ID NO: 15256
  source 1..80: mol_type = other DNA

SEQ ID NO: 45563 - DNA, 80 bp, synthetic construct
  source 1..80: mol_type = other DNA
atttaactttgatatatttgtgctcctaggtcactatgagattaaggctcatgcggaaaaggctaggtgtttctagtgca

SEQ ID NO: 45564 - DNA, 80 bp, synthetic construct
  source 1..80: mol_type = other DNA
ctctgggctatataagaagtctctggagttgctatttcttgctaagctgtagcccagctctctagggtcttggagaccca

SEQ ID NO: 45565 - DNA, 80 bp, synthetic construct
  source 1..80: mol_type = other DNA
aaggagaaacctggaggcaggagaggttaaggaggttgcttggggtcacaggtagtaagtggcaaagctttcatgcaaac

SEQ ID NO: 45566 - DNA, 80 bp, synthetic construct
  source 1..80: mol_type = other DNA
gaattgcttgtcaccattactttctcttttgcctaacggcttctgctgccttgagagggttacacagtggctctccaggg

SEQ ID NO: 45567 - DNA, 80 bp, synthetic construct; identical to SEQ ID NO: 15257
  source 1..80: mol_type = other DNA

SEQ ID NO: 45568 - DNA, 80 bp, synthetic construct
  source 1..80: mol_type = other DNA
catcttcattctcacatagaaactgaggttccccaaggataagaaacttatacaaggtcacagctaatcagtggtggagg

SEQ ID NO: 45569 - DNA, 80 bp, synthetic construct
  source 1..80: mol_type = other DNA
accccccggtgattctgttgcaggttcaggtttgaaaaatcactgctctctcctttaaggcaggtaggaactgggtctaa

SEQ ID NO: 45570 - DNA, 80 bp, synthetic construct
  source 1..80: mol_type = other DNA
ctttgcactgatagatatctcaagtggcccttcacagcccaaataactggattagcccagtgacctcagatctgctcttc

SEQ ID NO: 45571 - DNA, 80 bp, synthetic construct; identical to SEQ ID NO: 15258
  source 1..80: mol_type = other DNA

SEQ ID NO: 45572 - DNA, 80 bp, synthetic construct
  source 1..80: mol_type = other DNA
agctgccaggggtgcttagcagtggctgcgagttgccagagtctctgcaggccccatcgagggaagaagctgccaagtgg

SEQ ID NO: 45573 - DNA, 80 bp, synthetic construct
  source 1..80: mol_type = other DNA
gcatcatcagctttgccaaagtcatctcctacttcaggtaggacatggagactgggtggttgggtgtggaaaagaactgg

SEQ ID NO: 45574 - DNA, 80 bp, synthetic construct; identical to SEQ ID NO: 15259
  source 1..80: mol_type = other DNA

SEQ ID NO: 45575 - DNA, 80 bp, synthetic construct
  source 1..80: mol_type = other DNA
cccaagggtcaggtctccccagagctagatgtggaggcaacaaccatcgggcaactggggttagtgggagacatgggaac

SEQ ID NO: 45576 - DNA, 80 bp, synthetic construct
  source 1..80: mol_type = other DNA
gctgaaacacacctgccacaagctcctggtttcttcagcaggttgagggtaggttatactctaggagcccagaggttctt

SEQ ID NO: 45577 - DNA, 80 bp, synthetic construct
  source 1..80: mol_type = other DNA
aaatgtggacattgggagatctttggtgaaatccagtgactgacaatttaacaccagggcttcccacttgctatttctca

SEQ ID NO: 45578 - DNA, 80 bp, synthetic construct; identical to SEQ ID NO: 15260
  source 1..80: mol_type = other DNA

SEQ ID NO: 45579 - DNA, 80 bp, synthetic construct
  source 1..80: mol_type = other DNA
gagtgatccctgcaggaccggaagggtatccatgtaaccataatctcagaggcttgttaagccgcctccatggttaggcc

SEQ ID NO: 45580 - DNA, 80 bp, synthetic construct
  source 1..80: mol_type = other DNA
gactgcactctggaaagacttctgagaggggcaaagacatagcatggcctgaggggctagcaggatatactaaaggggaa

SEQ ID NO: 45581 - DNA, 80 bp, synthetic construct
  source 1..80: mol_type = other DNA
aggggaggagaggatgctgcggggcagagctgtctgctgggttgtgaggggagagatgagaggcagccagacagcagcca

SEQ ID NO: 45582 - DNA, 80 bp, synthetic construct
  source 1..80: mol_type = other DNA
tccctgctgaagggggccgctttcgagctgtgtcaactgagattcaacacagtgttcaacgcggagactggaacctggga

SEQ ID NO: 45583 - DNA, 80 bp, synthetic construct; identical to SEQ ID NO: 15261
  source 1..80: mol_type = other DNA

SEQ ID NO: 45584 - DNA, 80 bp, synthetic construct
  source 1..80: mol_type = other DNA
ctgccctccccagggaaggtcccagtctatggccttgctcctcattcactgcgcagccaggatgggggctctcgctggtt

SEQ ID NO: 45585 - DNA, 80 bp, synthetic construct
  source 1..80: mol_type = other DNA
agaccgcccaggtgtgctgcagcaccgcgtggtggaccagctgcaggagcaattcgccattactctgaagtcctacattg

SEQ ID NO: 45586 - DNA, 80 bp, synthetic construct
  source 1..80: mol_type = other DNA
acttttgagcactacctaaccacttcccaggaaaaacacaagcaaacagggggacgtggcccagaaaggggcttctatac

SEQ ID NO: 45587 - DNA, 80 bp, synthetic construct; identical to SEQ ID NO: 15262
  source 1..80: mol_type = other DNA

SEQ ID NO: 45588 - DNA, 80 bp, synthetic construct
  source 1..80: mol_type = other DNA
aacgaaggcagtgacagccccacacccccaaactggtagctgcaatatctacattttcccacggaagtctctgtgtacaa

SEQ ID NO: 45589 - DNA, 80 bp, synthetic construct
  source 1..80: mol_type = other DNA
tggtggcatgtgctctagtcctagctacccaggaggctgaggctggaggtctcttgagtccaggagtttgacactgcagt

SEQ ID NO: 45590 - DNA, 80 bp, synthetic construct; identical to SEQ ID NO: 15263
  source 1..80: mol_type = other DNA

SEQ ID NO: 45591 - DNA, 80 bp, synthetic construct
  source 1..80: mol_type = other DNA
ctttgctacgcccctcatgcaggagttgttcggcatcacaggtagctgagcggctgcccttgggtgacacctccgagagg

SEQ ID NO: 45592 - DNA, 80 bp, synthetic construct
  source 1..80: mol_type = other DNA
ttcagtctgtagggagtgaagccacagactcttacgtggagagtgcactgacctgtaggtcaggaccatcagagaggcaa

SEQ ID NO: 45593 - DNA, 80 bp, synthetic construct
  source 1..80: mol_type = other DNA
acatacccacgtttgttcgcttcctgagtcttttcattgctacctctaatagtcctgtctcccacttcccactcgttccc

SEQ ID NO: 45594 - DNA, 80 bp, synthetic construct; identical to SEQ ID NO: 15264
  source 1..80: mol_type = other DNA

SEQ ID NO: 45595 - DNA, 80 bp, synthetic construct
  source 1..80: mol_type = other DNA
acaaacgatttggatcaaaaggagaaatgataagtgacaaaagcagcacaaggaatttccctgtgtggatgctgagctgt

SEQ ID NO: 45596 - DNA, 80 bp, synthetic construct
  source 1..80: mol_type = other DNA
ggtatgctctgtgacaaggctacgctgacaatcagttaaacacaccggagaagaaccatttacatgcaccttatatttct

SEQ ID NO: 45597 - DNA, 80 bp, synthetic construct
  source 1..80: mol_type = other DNA
ctaagaactagttttgggaaatgtagccctgggtttaatgtcaaatcaaggcaaaaggaattaaataatgtacttttggc

SEQ ID NO: 45598 - DNA, 80 bp, synthetic construct
  source 1..80: mol_type = other DNA
ttatgactaagccaagaacttccagtttttattttttaaacatcatttaacaagaaaaaacattcaaccaaattaaaaag

SEQ ID NO: 45599 - DNA, 80 bp, synthetic construct
  source 1..80: mol_type = other DNA
tttttacctatatttgatggcacaaaaaaataaaagtcttacaacttccacggacatcctcccctccctccagagcagag

SEQ ID NO: 45600 - DNA, 80 bp, synthetic construct
  source 1..80: mol_type = other DNA
aattgtgtggcacattagactgctcaaagaaacagcaaagatgaaaaataatgtacaagaattatagtcccttgtttata

SEQ ID NO: 45601 - DNA, 80 bp, synthetic construct; identical to SEQ ID NO: 15265
  source 1..80: mol_type = other DNA

SEQ ID NO: 45602 - DNA, 80 bp, synthetic construct
  source 1..80: mol_type = other DNA
acaggttcatttacagatccggcatggtagccttcagacagaacatcttattttcactcttgaacatgtaacctttaaaa

SEQ ID NO: 45603 - DNA, 80 bp, synthetic construct
  source 1..80: mol_type = other DNA
tttgtcactcctttgtgccaaaattcacacctaggtgtaactttttttttggagacaagtctctcttgtcacccaggctg

SEQ ID NO: 45604 - DNA, 80 bp, synthetic construct
  source 1..80: mol_type = other DNA
attttggccccatttagaaacttctgtgcttagaacatacttggaaaactctaagtacatacatacaagggctattggca

SEQ ID NO: 45605 - DNA, 80 bp, synthetic construct; identical to SEQ ID NO: 15266
  source 1..80: mol_type = other DNA

SEQ ID NO: 45606 - DNA, 80 bp, synthetic construct
  source 1..80: mol_type = other DNA
gtggccattttggaattagtcttttatcaaaagttatccaagtctatttttcatgagaattaccagggtattatctgcaa

SEQ ID NO: 45607 - DNA, 80 bp, synthetic construct
  source 1..80: mol_type = other DNA
ttaaaacgtttctcagctgagacatcctcattctcaaatgagaatattggcttaatttagagtttctacatggctaaaag

SEQ ID NO: 45608 - DNA, 80 bp, synthetic construct
  source 1..80: mol_type = other DNA
aatttctttctctgtgatgctaactggattgttcaagttttgaaactgtgaccctggtccattagcaccatgctttactc

SEQ ID NO: 45609 - DNA, 80 bp, synthetic construct
  source 1..80: mol_type = other DNA
cactgatcacagctattaaataacaatgcaccaaagttttacaatatttgaacatctgcaaatgtagagctttctggtat

SEQ ID NO: 45610 - DNA, 80 bp, synthetic construct; identical to SEQ ID NO: 15267
  source 1..80: mol_type = other DNA

SEQ ID NO: 45611 - DNA, 80 bp, synthetic construct
  source 1..80: mol_type = other DNA
aggcacttcactgtgaaagttggatttaattacgtcaaagttgtgaagactaggatagactcaaaattcagtattcattt

SEQ ID NO: 45612 - DNA, 80 bp, synthetic construct
  source 1..80: mol_type = other DNA
aaaaaatcaccagcagttgctactttagagctcaagacactgttttcaatagaatttcacgtttgcggtttggttctctg

SEQ ID NO: 45613 - DNA, 80 bp, synthetic construct; identical to SEQ ID NO: 15268
  source 1..80: mol_type = other DNA

SEQ ID NO: 45614 - DNA, 80 bp, synthetic construct
  source 1..80: mol_type = other DNA
cctaccttgaaagtggctcttttctgacaaaactttaaaagtatctgtaaaaaaagaacagaaaccatgtccttattaac

SEQ ID NO: 45615 - DNA, 80 bp, synthetic construct
  source 1..80: mol_type = other DNA
agaaagggtgtcatatggaaaatgtgcagaagaggataggcagaaactcaaaaaacatatagacaataacaccagcactc

SEQ ID NO: 45616 - DNA, 80 bp, synthetic construct
  source 1..80: mol_type = other DNA
agtgtgtaaaaagcatcttcaacaccctataaaaggaaaaaatgaaaaaaaatgagagagctagctcaacggacacaatc

SEQ ID NO: 45617 - DNA, 80 bp, synthetic construct
  source 1..80: mol_type = other DNA
aggctgatataaaaatggcacattttgccaaataaacattcatgcaaaggaaaagggtaatgtgagaaacacggaacaaa

SEQ ID NO: 45618 - DNA, 80 bp, synthetic construct; identical to SEQ ID NO: 15269
  source 1..80: mol_type = other DNA

SEQ ID NO: 45619 - DNA, 80 bp, synthetic construct
  source 1..80: mol_type = other DNA
acaacaaagaatatgaatatggatcacatctctaccagagttaatcaactgatgcaaactcttgcacaaatgctgaaagc

SEQ ID NO: 45620 - DNA, 80 bp, synthetic construct; identical to SEQ ID NO: 15270
  source 1..80: mol_type = other DNA

SEQ ID NO: 45621 - DNA, 80 bp, synthetic construct
  source 1..80: mol_type = other DNA
gaggtgggcagatcacaaggtcaggagttgaagaccagcctggccaatatggtgaaaccccatctctactaaaaatacaa

SEQ ID NO: 45622 - DNA, 80 bp, synthetic construct
  source 1..80: mol_type = other DNA
ccccccaaaaaatatatataaaatatataaaaataaatatatattatatatattatatataaatatatatttatatataa

SEQ ID NO: 45623 - DNA, 80 bp, synthetic construct
  source 1..80: mol_type = other DNA
ccagaaaggtcaaggctgcagtgagccataattgttccactgcactccagcctgggcaacaggaaaaaagaaagaaaaga

SEQ ID NO: 45624 - DNA, 80 bp, synthetic construct; identical to SEQ ID NO: 15271
  source 1..80: mol_type = other DNA

SEQ ID NO: 45625 - DNA, 80 bp, synthetic construct
  source 1..80: mol_type = other DNA
actgctgctaaataactaggtgtgacagtatttaatggaaggcagtctatcacttttcaagatgggtggtgctcaaacat

SEQ ID NO: 45626 - DNA, 80 bp, synthetic construct
  source 1..80: mol_type = other DNA
ctgggcatggtggcacatgtgcctgtggttccagctactcaggaagctgaggtgggaggatcccttgatccctgagaggt

SEQ ID NO: 45627 - DNA, 80 bp, synthetic construct
  source 1..80: mol_type = other DNA
accagcccggccaacatggtgaaaccccaagtctactaaaaatacaaaaaaaattagtcaggcatggtggtggacgcctg

SEQ ID NO: 45628 - DNA, 80 bp, synthetic construct
  source 1..80: mol_type = other DNA
acctaaaacaaaacattgtatctggaagcccaagcgataaaatagaaaacataagaactgctcttagtaaagggaggctg

SEQ ID NO: 45629 - DNA, 80 bp, synthetic construct; identical to SEQ ID NO: 15272
  source 1..80: mol_type = other DNA

SEQ ID NO: 45630 - DNA, 80 bp, synthetic construct
  source 1..80: mol_type = other DNA
atggtaatagcctacattaagggataagacagcctaaagtacctggaccatgtcactgtcaggttactactgatttttac

SEQ ID NO: 45631 - DNA, 80 bp, synthetic construct
  source 1..80: mol_type = other DNA
ctggaacttcatgcacaatcacagaatatgctcactcctaaatttgtttattttacccttatttttttggtctcacttaa

SEQ ID NO: 45632 - DNA, 80 bp, synthetic construct
  source 1..80: mol_type = other DNA
catgccaagtgtgggcattttattaagtactgctattacttttagacaaaaaaaaaatgggaagtacaacaggttaggaa

SEQ ID NO: 45633 - DNA, 80 bp, synthetic construct; identical to SEQ ID NO: 15273
  source 1..80: mol_type = other DNA

SEQ ID NO: 45634 - DNA, 80 bp, synthetic construct
  source 1..80: mol_type = other DNA
gtcctggctctgctactaataacaatcctgactccaaaacctaacaaacgacattctgaactctgtttctgattctgcaa

SEQ ID NO: 45635 - DNA, 80 bp, synthetic construct
  source 1..80: mol_type = other DNA
cagaatcttgctctgttgattaggctggagtgcagcagtgcagtggagtgagcatgcctcgacctcctgagctcacgtga

SEQ ID NO: 45636 - DNA, 80 bp, synthetic construct; identical to SEQ ID NO: 15274
  source 1..80: mol_type = other DNA

SEQ ID NO: 45637 - DNA, 80 bp, synthetic construct
  source 1..80: mol_type = other DNA
cctaaaaccaactcttcccataattaaaaagctctatcttccctagtgtggtaacctcatttccccataaagattcagaa

SEQ ID NO: 45638 - DNA, 80 bp, synthetic construct
  source 1..80: mol_type = other DNA
gtccagctgtatccagtatgtccaacaaacaggtttcaccatctataaccacttgttttctgtaagaatcctgggggtgt

SEQ ID NO: 45639 - DNA, 80 bp, synthetic construct
  source 1..80: mol_type = other DNA
agtatccaatatcaccctacataaaagaaaacccaccaaattctatatgcctgcagaaaagaaatatggtcactgtgttc

SEQ ID NO: 45640 - DNA, 80 bp, synthetic construct
  source 1..80: mol_type = other DNA
ctccaccaattataacctggccctatatacatcatttgtgtttatgactaaatatacaaatacctttgtttcagagaagg

SEQ ID NO: 45641 - DNA, 80 bp, synthetic construct; identical to SEQ ID NO: 15275
  source 1..80: mol_type = other DNA

SEQ ID NO: 45642 - DNA, 80 bp, synthetic construct
  source 1..80: mol_type = other DNA
gattttgccaagggttagcaaccaattttttatagtggctacattagagttagttttcatcaattaaacacgagtagcca

SEQ ID NO: 45643 - DNA, 80 bp, synthetic construct
  source 1..80: mol_type = other DNA
tgtgatctcggctcactgcaccctctgcctctggttcaagcgattctcctgcctcagcctcctgagtagctgggattaca

SEQ ID NO: 45644 - DNA, 80 bp, synthetic construct
  source 1..80: mol_type = other DNA
ccggcaaaaccctttatttaaagagccttaggtgccacttactgaagacaatctgtaccatgaactctcataataacaat

SEQ ID NO: 45645 - DNA, 80 bp, synthetic construct; identical to SEQ ID NO: 15276
  source 1..80: mol_type = other DNA

SEQ ID NO: 45646 - DNA, 80 bp, synthetic construct
  source 1..80: mol_type = other DNA
tccatcctattatctcccatacaatcagacagtctcgctactatggcctgtgtttctcatgtaatagagctgttatatat

SEQ ID NO: 45647 - DNA, 80 bp, synthetic construct
  source 1..80: mol_type = other DNA
tttactttctctcctcttattcctttaatacagaatatgggtaaagatgatccgacaagtgagagacaggatcaggtcag

SEQ ID NO: 45648 - DNA, 80 bp, synthetic construct
  source 1..80: mol_type = other DNA
agcaagaacctgttggaaaccagtaatcagggttaattggcgagccacatctacagtactttaaagctttctataatcaa

SEQ ID NO: 45649 - DNA, 80 bp, synthetic construct
  source 1..80: mol_type = other DNA
aagcaatggaaatcccccttcctattactccccgaaggcttctcagctctagcaggaagcctccaggccgcaactccttc

SEQ ID NO: 45650 - DNA, 80 bp, synthetic construct; identical to SEQ ID NO: 15277
  source 1..80: mol_type = other DNA

SEQ ID NO: 45651 - DNA, 80 bp, synthetic construct
  source 1..80: mol_type = other DNA
aggcgcgtcctcccgcgcgctatgacggccagcgcacagccgcgcgggcggcggccaggagtcggagtcggagtcgtggt

SEQ ID NO: 45652 - DNA, 80 bp, synthetic construct
  source 1..80: mol_type = other DNA
ttgcttccgtgtgccgtgcgtgagaacgtccgcgctgacgctgcgtcctttcttgcgcgttccctcggttcctcccctcg

SEQ ID NO: 45653 - DNA, 80 bp, synthetic construct; identical to SEQ ID NO: 15278
  source 1..80: mol_type = other DNA

SEQ ID NO: 45654 - DNA, 80 bp, synthetic construct
  source 1..80: mol_type = other DNA
aaggctggataatatgccaagctctttgcatgtatactttcatttgatctttacataactggcatactcagtgggctaaa

SEQ ID NO: 45655 - DNA, 80 bp, synthetic construct
  source 1..80: mol_type = other DNA
tccaagcatttaaaagtccaatccaatttaaaccttcagtgtcacttccagtttctaatccctcccctgcagtgcataaa

SEQ ID NO: 45656 - DNA, 80 bp, synthetic construct; identical to SEQ ID NO: 15279
  source 1..80: mol_type = other DNA

SEQ ID NO: 45657 - DNA, 80 bp, synthetic construct
  source 1..80: mol_type = other DNA
ctctgtattcatctgcatctggaaactccgagggacacatttcagatttacccaagagctttcacccttgtagcacacct

SEQ ID NO: 45658 - DNA, 80 bp, synthetic construct
  source 1..80: mol_type = other DNA
tgtagtctggaagggaaatgctcctactaggctgaaaactccaaactttcctctgtctcaaacatctccttttttttttt

SEQ ID NO: 45659 - DNA, 80 bp, synthetic construct
  source 1..80: mol_type = other DNA
tacgcccggctaattttttgtatttttagtagagacggggtttcaccgttttagccgggatggtctcgatctcctgacct

SEQ ID NO: 45660 - DNA, 80 bp, synthetic construct
  source 1..80: mol_type = other DNA
gagcttgagctcagatgacatctgtttgcccttttgcttgagaatttagaagtgctttttacctattgtcttcagttttg

SEQ ID NO: 45661 - DNA, 80 bp, synthetic construct; identical to SEQ ID NO: 15280
  source 1..80: mol_type = other DNA

SEQ ID NO: 45662 - DNA, 80 bp, synthetic construct
  source 1..80: mol_type = other DNA
tgtccaggctggagtgcaatggcaccatcatggctcactgcagccttgacttcccaggctcaaactatcctcttgcctca

SEQ ID NO: 45663 - DNA, 80 bp, synthetic construct
  source 1..80: mol_type = other DNA
acatgagccacatgcccagctgatttgttgttttaaagcaggaaccaattacagttctttttgttttacactagaatttt

SEQ ID NO: 45664 - DNA, 80 bp, synthetic construct
  source 1..80: mol_type = other DNA
tgtgctcaaagggaaacctgggaagaagcagctcttcacctgaaaaatgttcactttgcctcagttgtgaattctttcat

SEQ ID NO: 45665 - DNA, 80 bp, synthetic construct; identical to SEQ ID NO: 15281
  source 1..80: mol_type = other DNA

SEQ ID NO: 45666 - DNA, 80 bp, synthetic construct
  source 1..80: mol_type = other DNA
attcatgcccttataaaagagacccctgaccccttccatgatgtaaagatacagagagaagatcgttgtctgtgaacctg

SEQ ID NO: 45667 - DNA, 80 bp, synthetic construct
  source 1..80: mol_type = other DNA
gaatgtagagatgtaatatagagatatagataggtaaatatatttggaccatgaggaaccagactgtgtttgtgtcctgg

SEQ ID NO: 45668 - DNA, 80 bp, synthetic construct
  source 1..80: mol_type = other DNA
ggcagtaattttaaggaaaatattttatctgttttactcagttttctcacctgcgcaggagagttaataccatccattta

SEQ ID NO: 45669 - DNA, 80 bp, synthetic construct; identical to SEQ ID NO: 15282
  source 1..80: mol_type = other DNA

SEQ ID NO: 45670 - DNA, 80 bp, synthetic construct
  source 1..80: mol_type = other DNA
gaccacttgagtcagtttctttgtgtggcttaccgatttgggtggtaccagttggtccattagaatgcaaagtctgaaaa

SEQ ID NO: 45671 - DNA, 80 bp, synthetic construct
  source 1..80: mol_type = other DNA
cctggttagagtttaactatgcctacatctttattaatagagttctggcccttaccataattttaaccttgtggcctttt

SEQ ID NO: 45672 - DNA, 80 bp, synthetic construct; identical to SEQ ID NO: 15283
  source 1..80: mol_type = other DNA

SEQ ID NO: 45673 - DNA, 80 bp, synthetic construct
  source 1..80: mol_type = other DNA
tcttctctaatagggaagaatcttttcattcaacagatacctattgagtacagtgttttgagtattgagacactgttcta

SEQ ID NO: 45674 - DNA, 80 bp, synthetic construct
  source 1..80: mol_type = other DNA
tatgagtgctgtatcagatagggtggttaggaagggtctctgacaaagggatgtacacacatatactgggcaacatagtg

SEQ ID NO: 45675 - DNA, 80 bp, synthetic construct
  source 1..80: mol_type = other DNA
ccctgtctcaaaaagaagaaatggactaaacattttcttatttttcttttttctatgggcaaataaagctgagactagaa

SEQ ID NO: 45676 - DNA, 80 bp, synthetic construct; identical to SEQ ID NO: 15284
  source 1..80: mol_type = other DNA

SEQ ID NO: 45677 - DNA, 80 bp, synthetic construct
  source 1..80: mol_type = other DNA
acattttgaactcttccctgccaaacacagtgtctgactcataatcagaattcaaaatatgttgaaggaaggaaggaccc

SEQ ID NO: 45678 - DNA, 80 bp, synthetic construct
  source 1..80: mol_type = other DNA
ttataaccatgtaactatatgtattgttttattcctcttaggatatagtagttaggagtagttttacatgctttgtggtt

SEQ ID NO: 45679 - DNA, 80 bp, synthetic construct
  source 1..80: mol_type = other DNA
ttgctctatatctgttagtaacaatacagcaggaattatgttcactttattcccagttgcagcctgataaccaactacac

SEQ ID NO: 45680 - DNA, 80 bp, synthetic construct; identical to SEQ ID NO: 15285
  source 1..80: mol_type = other DNA

SEQ ID NO: 45681 - DNA, 80 bp, synthetic construct
  source 1..80: mol_type = other DNA
acagttactgatcacagttactcttcctgtacttattccagtttcatggattttcggcccctgcattcccaaagtgaaaa

SEQ ID NO: 45682 - DNA, 80 bp, synthetic construct
  source 1..80: mol_type = other DNA
actagaacatggagtgtgtatcttaatataatatgtaggtatttgtcataagcatctgtgcgtctatgttatttacattt

SEQ ID NO: 45683 - DNA, 80 bp, synthetic construct
  source 1..80: mol_type = other DNA
tgcacagctttctacttttttaagagatggaggatatcttagaaactttgtaatctactttattttataggtgaaggaag

SEQ ID NO: 45684 - DNA, 80 bp, synthetic construct
  source 1..80: mol_type = other DNA
caccattctcttcataagaccttcattctacatgcaaattatatttgtatagccaagcaaatgcaaagcatcactatgag

SEQ ID NO: 45685 - DNA, 80 bp, synthetic construct; identical to SEQ ID NO: 15286
  source 1..80: mol_type = other DNA

SEQ ID NO: 45686 - DNA, 80 bp, synthetic construct
  source 1..80: mol_type = other DNA
aatgtatcccccactctttcagccagtacttgagaaaatttttctgaaatatgtcattgaattgtattccagacacagaa

SEQ ID NO: 45687 - DNA, 80 bp, synthetic construct
  source 1..80: mol_type = other DNA
aggttcaaacagagtatggctgttgcaaaatttaccaaatttgttgattacctcttttattaaagaaatgttggggagag

SEQ ID NO: 45688 - DNA, 80 bp, synthetic construct; identical to SEQ ID NO: 15287
  source 1..80: mol_type = other DNA

SEQ ID NO: 45689 - DNA, 80 bp, synthetic construct
  source 1..80: mol_type = other DNA
ctcagctcattgcagcctccgccacctgggttcaagcaattctcctacctcagcttcccgagtagctgggattataggca

SEQ ID NO: 45690 - DNA, 80 bp, synthetic construct
  source 1..80: mol_type = other DNA
tatctttttcactcattttttcatgagtatgcagaggagttttcaagaggctatctggtgtgatattgtaataggctgaa

SEQ ID NO: 45691 - DNA, 80 bp, synthetic construct
  source 1..80: mol_type = other DNA
agctatttgccaaaaatgtttttatgtgtttatatatacttggttcttgttacttgcaaatgattaataaaaattttaag

SEQ ID NO: 45692 - DNA, 80 bp, synthetic construct
  source 1..80: mol_type = other DNA
gtcttcctgtaaagaaaatgatgagggctaaatccatcagcaccaaagctgggaagccctccaggttcatttggaagaaa

SEQ ID NO: 45693 - DNA, 80 bp, synthetic construct
  source 1..80: mol_type = other DNA
attgtatgcctgcactaagtttgcatcctgaaaactcactggaagataggaaagcaagcatgaaaaagcagccgggtcag

SEQ ID NO: 45694 - DNA, 80 bp, synthetic construct; identical to SEQ ID NO: 15288
  source 1..80: mol_type = other DNA

SEQ ID NO: 45695 - DNA, 80 bp, synthetic construct
  source 1..80: mol_type = other DNA
tgacactcatctcttaaatgctatacattctaccttgtccctgtgatgtaagagcaggaaataaggaataccaagcacaa

SEQ ID NO: 45696 - DNA, 80 bp, synthetic construct; identical to SEQ ID NO: 15289
  source 1..80: mol_type = other DNA

SEQ ID NO: 45697 - DNA, 80 bp, synthetic construct
  source 1..80: mol_type = other DNA
agaaaaagtaaaaattattccgaccacaacaactttcaaaatgatgtcacagttttccactttatttgtgtgtagactat

SEQ ID NO: 45698 - DNA, 80 bp, synthetic construct
  source 1..80: mol_type = other DNA
acattatgaaaaaagattcattcagaaataaaaagggtgatactttgagagtcaacgtgagtctactttccaatgaattc

SEQ ID NO: 45699 - DNA, 80 bp, synthetic construct
  source 1..80: mol_type = other DNA
cagcaaaaggtttggactgaacaaaaggtttggacataactatgggctaaataatagaagtgtaacaagctacgattttt

SEQ ID NO: 45700 - DNA, 80 bp, synthetic construct
  source 1..80: mol_type = other DNA
gatcatcaacttttgttctggatcatgaatagatatatgtatttccttcctttaagatctattgggcacacttaagctga

SEQ ID NO: 45701 - DNA, 80 bp, synthetic construct
  source 1..80: mol_type = other DNA
tgctgtttctattatattttcattaattattttttctttctttgaatgtattcattttcagcaatgttcaaaagttaaaa

SEQ ID NO: 45702 - DNA, 80 bp, synthetic construct; identical to SEQ ID NO: 15290
  source 1..80: mol_type = other DNA

SEQ ID NO: 45703 - DNA, 80 bp, synthetic construct
  source 1..80: mol_type = other DNA
gaatgtggttggcagggctgggggggtacacaaatagcatatgaatgaatttgtttcataatatttattgcatcatatcc

SEQ ID NO: 45704 - DNA, 80 bp, synthetic construct
  source 1..80: mol_type = other DNA
aatgaaggatgtgatgcatagaataccaaccagttacagccaggaaactttcaaaaactaatacatgaaattcttagaag

SEQ ID NO: 45705 - DNA, 80 bp, synthetic construct
  source 1..80: mol_type = other DNA
caacaaatgtttatggggaaccaatttcattttggacaaaattttctgccttcatggagttcacatcaaagagtagaata

SEQ ID NO: 45706 - DNA, 80 bp, synthetic construct
  source 1..80: mol_type = other DNA
aatacgtatttattgctcatgtgtctgagatctgtcaactatgctgatgttggcgggggttggctgactgaaaggtgatc

SEQ ID NO: 45707 - DNA, 80 bp, synthetic construct; identical to SEQ ID NO: 15291
  source 1..80: mol_type = other DNA

SEQ ID NO: 45708 - DNA, 80 bp, synthetic construct
  source 1..80: mol_type = other DNA
aggtaaataagtgagctacagaaatatctggaagaaatatttcaagtgcagacgccataaggcagtatggaagaaatgat

SEQ ID NO: 45709 - DNA, 80 bp, synthetic construct
  source 1..80: mol_type = other DNA
aagaggtttcctacaatggacaaaaagctgagcaggctgctggttgtcattaaaaaagtgaatattaagagccatagaca

SEQ ID NO: 45710 - DNA, 80 bp, synthetic construct; identical to SEQ ID NO: 15292
  source 1..80: mol_type = other DNA

SEQ ID NO: 45711 - DNA, 80 bp, synthetic construct
  source 1..80: mol_type = other DNA
gcctgccaaaagcaatatcctatatgcacacataactaaattgaagatacaatgggaaagaagaccatatctgatatagc

SEQ ID NO: 45712 - DNA, 80 bp, synthetic construct
  source 1..80: mol_type = other DNA
cagttctccctcaggtaattttgaaatttaatacaacaccattgaaaaccaccaggtttttcttttctagagcttgagaa

SEQ ID NO: 45713 - DNA, 80 bp, synthetic construct
  source 1..80: mol_type = other DNA
acttggttacatatacatacatacatagaaaatatgggatacaataaagatggaatctcaagtctaaactgaaaagatga

SEQ ID NO: 45714 - DNA, 80 bp, synthetic construct; identical to SEQ ID NO: 15293
  source 1..80: mol_type = other DNA

SEQ ID NO: 45715 - DNA, 80 bp, synthetic construct
  source 1..80: mol_type = other DNA
taaagagatctcacaagaaagcaaatggctcttaactctgagagatggtcaacctcactgataagagaaataaaattaaa

SEQ ID NO: 45716 - DNA, 80 bp, synthetic construct
  source 1..80: mol_type = other DNA
agcaaaattacatatgcgtgtatcctttgacccagcattaactctaggaatctacctcaaagacacagtggcaaaaatcc

SEQ ID NO: 45717 - DNA, 80 bp, synthetic construct
  source 1..80: mol_type = other DNA
catatcattatgtactatcacaggaaactatattaaagtagcaggttataaaattatacacaaaaagcataagaaagtag

SEQ ID NO: 45718 - DNA, 80 bp, synthetic construct
  source 1..80: mol_type = other DNA
tacctttaagtgagggaagaaggggaaaaggcagtgagtaaagagtagctaaacttctttagaatgtactttactttgta

SEQ ID NO: 45719 - DNA, 80 bp, synthetic construct; identical to SEQ ID NO: 15294
  source 1..80: mol_type = other DNA

SEQ ID NO: 45720 - DNA, 80 bp, synthetic construct
  source 1..80: mol_type = other DNA
acagcagaaagagacggagtctggtggagagtttctcaattggaaatcaggtcactagccaaataaacagaaaaaatttc

SEQ ID NO: 45721 - DNA, 80 bp, synthetic construct
  source 1..80: mol_type = other DNA
tttgacacaaaattgacttatctccctagcacttatcaccatctgacattacatgaaactaatttctctcctctctccct

SEQ ID NO: 45722 - DNA, 80 bp, synthetic construct
  source 1..80: mol_type = other DNA
atgggcgagtattgattttttgtcacagccaaaaatctaactgagatttgatatggtcacagtgcgttttgccatgcgta

SEQ ID NO: 45723 - DNA, 80 bp, synthetic construct; identical to SEQ ID NO: 15295
  source 1..80: mol_type = other DNA

SEQ ID NO: 45724 - DNA, 80 bp, synthetic construct
  source 1..80: mol_type = other DNA
aacttcctcgatttcccattctgctatttttcatacaggtgaccatggttaactttttggaatgatttgagcatcagctt

SEQ ID NO: 45725 - DNA, 80 bp, synthetic construct
  source 1..80: mol_type = other DNA
acagtacgtattcatgatcacacaccaagtgagaggcactgaactcttcaccatgtagaataatgtaggtatttacagca

SEQ ID NO: 45726 - DNA, 80 bp, synthetic construct; identical to SEQ ID NO: 15296
  source 1..80: mol_type = other DNA

SEQ ID NO: 45727 - DNA, 80 bp, synthetic construct
  source 1..80: mol_type = other DNA
ggccactgaactccagcctgtgtgacagagtgagactctgtctcaaaaacaaacaaacaaacaaaaagaagaaaatatac

SEQ ID NO: 45728 - DNA, 80 bp, synthetic construct
  source 1..80: mol_type = other DNA
caagagaaaacatttgatactcttttcaaatcacaatgtcattctcctatccaaactacaggttcgggaatgaagactca

SEQ ID NO: 45729 - DNA, 80 bp, synthetic construct
  source 1..80: mol_type = other DNA
tccttatatccagcattagactattttccaggaacctcacttgcacctgtattaatatcttctctttctgaacacataat

SEQ ID NO: 45730 - DNA, 80 bp, synthetic construct; identical to SEQ ID NO: 15297
  source 1..80: mol_type = other DNA

SEQ ID NO: 45731 - DNA, 80 bp, synthetic construct
  source 1..80: mol_type = other DNA
tatgaccattgctccctcacacacacacacacacacagcctccccacaattaacacctcttgcctttgttacaatcaacg

SEQ ID NO: 45732 - DNA, 80 bp, synthetic construct
  source 1..80: mol_type = other DNA
tacactcttcccattttttcctccctccctccaatctctcacaaccattgacttttctactgtctccagagttttgtctt

SEQ ID NO: 45733 - DNA, 80 bp, synthetic construct
  source 1..80: mol_type = other DNA
cccaggtagctgggactacagacacatgccaccgtgcttggctaatttttgtattttttgtagagatgggttttcaccat

SEQ ID NO: 45734 - DNA, 80 bp, synthetic construct; identical to SEQ ID NO: 15298
  source 1..80: mol_type = other DNA

SEQ ID NO: 45735 - DNA, 80 bp, synthetic construct
  source 1..80: mol_type = other DNA
ctacagtggctggggtttgggccatactcctgaaagataccattctaaatgttgtaatatcaaatgttgaaatcccaaaa

SEQ ID NO: 45736 - DNA, 80 bp, synthetic construct
  source 1..80: mol_type = other DNA
ttataggcatttgagattatggcatttgggattttgtctttcggattatgatcggcactgtgaacagctctaccatcacg

SEQ ID NO: 45737 - DNA, 80 bp, synthetic construct; identical to SEQ ID NO: 15299
  source 1..80: mol_type = other DNA

SEQ ID NO: 45738 - DNA, 80 bp, synthetic construct
  source 1..80: mol_type = other DNA
tgtgaacatcccattgttcagcaccatttgttgaaaacttacttttctccgctgtattccctttgctcctttatcaaaaa

SEQ ID NO: 45739 - DNA, 80 bp, synthetic construct
  source 1..80: mol_type = other DNA
cttcaatattatgtttgctatactgggtctttttcctgtccctataaacttaaaaatcagtttgttgatattcaggaaat

SEQ ID NO: 45740 - DNA, 80 bp, synthetic construct; identical to SEQ ID NO: 15300
  source 1..80: mol_type = other DNA

SEQ ID NO: 45741 - DNA, 80 bp, synthetic construct
  source 1..80: mol_type = other DNA
tctgcaaacaaaggcagttctatttttttcttcttcttcccaatctgtatactttttacttccttttcttgtcttattgc

SEQ ID NO: 45742 - DNA, 80 bp, synthetic construct
  source 1..80: mol_type = other DNA
ttgagtaagttcccctctaacactagtttgctgagagttctgatcatgaatgagagctggttctgttagatgctttttct

SEQ ID NO: 45743 - DNA, 80 bp, synthetic construct
  source 1..80: mol_type = other DNA
gtataaaatcctctgatgaatctcctgtgatgattcaaatcctggagtaatttcctgaagaagagaagagcctctgctcc

SEQ ID NO: 45744 - DNA, 80 bp, synthetic construct
  source 1..80: mol_type = other DNA
tgtgaggaaccttttaaagttgacatgatatcatttgtccatttttgctttggtttcttgtgcttgtggggtattactca

SEQ ID NO: 45745 - DNA, 80 bp, synthetic construct; identical to SEQ ID NO: 15301
  source 1..80: mol_type = other DNA

SEQ ID NO: 45746 - DNA, 80 bp, synthetic construct
  source 1..80: mol_type = other DNA
gagctttggctattctgggtcttctgtggtttcacataaatcttaggacgattttgtctctttctgtgaagaatgtcatt

SEQ ID NO: 45747 - DNA, 80 bp, synthetic construct
  source 1..80: mol_type = other DNA
acatctgtcacttctttggttaatttaactcctaggtatttaattttacttgtggctattgtaaatggaattactttctt

SEQ ID NO: 45748 - DNA, 80 bp, synthetic construct; identical to SEQ ID NO: 15302
  source 1..80: mol_type = other DNA

SEQ ID NO: 45749 - DNA, 80 bp, synthetic construct
  source 1..80: mol_type = other DNA
ttttgagggtttttattatgaaggaatattgaattttatcaaatgcttttttcagtatcaattgatatgatcatatggtt

SEQ ID NO: 45750 - DNA, 80 bp, synthetic construct
  source 1..80: mol_type = other DNA
atcagaggtcttggcctatagttttctttttgtgctgtgtctttgtcctgttttggtatcagggtaatattggcctcata

SEQ ID NO: 45751 - DNA, 80 bp, synthetic construct
  source 1..80: mol_type = other DNA
tacctgttactggtttgttaaggttttggatttcttcatggttcaatcttggtaggttgtatgtgtccaagaattgtcaa

SEQ ID NO: 45752 - DNA, 80 bp, synthetic construct
  source 1..80: mol_type = other DNA
tttgtcaattttgtttagcttttcaaaaacctcattttttgttttgttcatctttttgtattgttttttacatttcagtt

SEQ ID NO: 45753 - DNA, 80 bp, synthetic construct; identical to SEQ ID NO: 15303
  source 1..80: mol_type = other DNA

SEQ ID NO: 45754 - DNA, 80 bp, synthetic construct
  source 1..80: mol_type = other DNA
gacattaatgtttatggtccatccttgagaatgcttcatgtgcttaggagaagaatgtgtattctgtagctgtttcgtga

SEQ ID NO: 45755 - DNA, 80 bp, synthetic construct
  source 1..80: mol_type = other DNA
acttgctttatatatcggggtgcccaatgttgggtgcaaatgtatttgaaattgttatatctgcttgctgaagtgacccc

SEQ ID NO: 45756 - DNA, 80 bp, synthetic construct
  source 1..80: mol_type = other DNA
ttataggtaaagtgtgtttattttaggcaacagatcaatgggtctttatttttcatccattcagctactctttatgtttt

SEQ ID NO: 45757 - DNA, 80 bp, synthetic construct; identical to SEQ ID NO: 15304
  source 1..80: mol_type = other DNA

SEQ ID NO: 45758 - DNA, 80 bp, synthetic construct
  source 1..80: mol_type = other DNA
tcttgaaaagttgctgtagttattattttttattggtttgttatttattccttctacttaaggtaagtttagattacata

SEQ ID NO: 45759 - DNA, 80 bp, synthetic construct
  source 1..80: mol_type = other DNA
gaaatactcagcttttgtttgtctgggaaagtctttatttctccttcatgtttaaagtatatctgatgcagaaatagggt

SEQ ID NO: 45760 - DNA, 80 bp, synthetic construct
  source 1..80: mol_type = other DNA
gacatttgggagtttgattattaaatgccttgaagtagtcttctttagattaaatttgcttagtgttctataaccctctt

SEQ ID NO: 45761 - DNA, 80 bp, synthetic construct
  source 1..80: mol_type = other DNA
cttctttgtttcattgttttttattctttattcttttgtctccactgactgtattttcaaatagcctgtcttcaagctca

SEQ ID NO: 45762 - DNA, 80 bp, synthetic construct; identical to SEQ ID NO: 15305
  source 1..80: mol_type = other DNA

SEQ ID NO: 45763 - DNA, 80 bp, synthetic construct
  source 1..80: mol_type = other DNA
catcttgggaagtctttccagatattcaaaataacttgggtgttctaatctaagatgtatctgctttagggagcacctca

SEQ ID NO: 45764 - DNA, 80 bp, synthetic construct
  source 1..80: mol_type = other DNA
ctctctctgttctgagcgatgtggagctggtggtggtgtgacacaagcacccttgagaccaccactactaggactctgct

SEQ ID NO: 45765 - DNA, 80 bp, synthetic construct; identical to SEQ ID NO: 15306
  source 1..80: mol_type = other DNA

SEQ ID NO: 45766 - DNA, 80 bp, synthetic construct
  source 1..80: mol_type = other DNA
aaaggctcttcagtcagcttgtcatgagtgctaccttgcctgggactcactcttcagagtagtgggctatcctctagccc

SEQ ID NO: 45767 - DNA, 80 bp, synthetic construct
  source 1..80: mol_type = other DNA
accccatagtcaccatggctgggaacctgctgagtctcacttgaagccatcaagtttccagtcttactcaaggccctcga

SEQ ID NO: 45768 - DNA, 80 bp, synthetic construct
  source 1..80: mol_type = other DNA
gagagcctcataagtctgactggggccatatcctgctgtggctgagattcaagatgcaacacgaagtcctccccactctt

SEQ ID NO: 45769 - DNA, 80 bp, synthetic construct; identical to SEQ ID NO: 15307
  source 1..80: mol_type = other DNA

SEQ ID NO: 45770 - DNA, 80 bp, synthetic construct
  source 1..80: mol_type = other DNA
ccctctacctagcacacagaagcactctccatacactgcccacccactgctggggaatggaggaggaatggtgttggtga

SEQ ID NO: 45771 - DNA, 80 bp, synthetic construct
  source 1..80: mol_type = other DNA
aatattattatcttatttggtctagcttatcagtagcccttctcttgtaggggtctctatgtctcttccatggggctttg

SEQ ID NO: 45772 - DNA, 80 bp, synthetic construct
  source 1..80: mol_type = other DNA
tagaatatgaataaatgaaagcaatctttttaaatggtcattttgtaagattatctgtttctagaaaaacttgctggttc

SEQ ID NO: 45773 - DNA, 80 bp, synthetic construct; identical to SEQ ID NO: 15308
  source 1..80: mol_type = other DNA

SEQ ID NO: 45774 - DNA, 80 bp, synthetic construct
  source 1..80: mol_type = other DNA
tagtgaatgagttatcatgagatctgatggttttataggagggtttttccccctttgctctccacttctccttgccgctg

SEQ ID NO: 45775 - DNA, 80 bp, synthetic construct
  source 1..80: mol_type = other DNA
cccaagccgtattgaactgtgagtcctctttcctttaaaaattacccagtctcagatatgttttattagcagcctgagaa

SEQ ID NO: 45776 - DNA, 80 bp, synthetic construct
  source 1..80: mol_type = other DNA
tcctggtttttgctcttgaggttctaaaacttgattaaggaaataaaaagacaggcattgtggggacactggggatttta

SEQ ID NO: 45777 - DNA, 80 bp, synthetic construct
  source 1..80: mol_type = other DNA
caagggaaatgaggagaaaacaagtaaaattataagctaaaaaaaaacagagtaatagaaaatattcaccaaatacatgc

SEQ ID NO: 45778 - DNA, 80 bp, synthetic construct; identical to SEQ ID NO: 15309
  source 1..80: mol_type = other DNA

SEQ ID NO: 45779 - DNA, 80 bp, synthetic construct
  source 1..80: mol_type = other DNA
cactgctctctgaacctgcaaatggatgcaaatgaagcctagactatataatccaagataagaagcagaaatttcagcca

SEQ ID NO: 45780 - DNA, 80 bp, synthetic construct
  source 1..80: mol_type = other DNA
ttcacatttctataaatctcatttcaaaaatgcaatatcttactgttaatataaaatattggtatttggacaattttaaa

SEQ ID NO: 45781 - DNA, 80 bp, synthetic construct; identical to SEQ ID NO: 15310
  source 1..80: mol_type = other DNA

SEQ ID NO: 45782 - DNA, 80 bp, synthetic construct
  source 1..80: mol_type = other DNA
ctgtaattccacgtactagcgaggctgaggcaagagaatcgcttgaacttgggaggcggagattgcagtgagccgagatc

SEQ ID NO: 45783 - DNA, 80 bp, synthetic construct
  source 1..80: mol_type = other DNA
tgttgaggattcatggtgagctaggagcaaacggtgagtatccagaaatgcagctagaagggtttgtcctcaaggacctt

SEQ ID NO: 45784 - DNA, 80 bp, synthetic construct
  source 1..80: mol_type = other DNA
tctgtatgagccatgaaagtctgaacaacaaaaatgataccaaaaggtagagtcaacaatcgtggtagttgaatgtggga

SEQ ID NO: 45785 - DNA, 80 bp, synthetic construct
  source 1..80: mol_type = other DNA
tcaggccatcaaccagctgattaagttgttcattgtcacaccaattgcctgtgatttaaacaagattttagcaataaatg

SEQ ID NO: 45786 - DNA, 80 bp, synthetic construct; identical to SEQ ID NO: 15311
  source 1..80: mol_type = other DNA

SEQ ID NO: 45787 - DNA, 80 bp, synthetic construct
  source 1..80: mol_type = other DNA
aggagatggtgatgccattaagagaactatgattggataggaaggtgaaaatgctttgggcatgttgtatttccagtgct

SEQ ID NO: 45788 - DNA, 80 bp, synthetic construct
  source 1..80: mol_type = other DNA
ttaatagagagaatgctggaaaacatcaacatttaaaatgcaagcaaaggaagaagaaagcattaagataaaccaaaata

SEQ ID NO: 45789 - DNA, 80 bp, synthetic construct; identical to SEQ ID NO: 15312
  source 1..80: mol_type = other DNA

SEQ ID NO: 45790 - DNA, 80 bp, synthetic construct
  source 1..80: mol_type = other DNA
aggatgagagaaagaatcaagtgaaaggaagcacagagagttgtacagagataagaatgcaggttaatacactttttttg

SEQ ID NO: 45791 - DNA, 80 bp, synthetic construct
  source 1..80: mol_type = other DNA
acatttttatgatgacctaaatcagtgcttctgaaagtgtggtctgtggatttgtggggtctctaagactctttccatgg

SEQ ID NO: 45792 - DNA, 80 bp, synthetic construct
  source 1..80: mol_type = other DNA
ctgtactcttcacagacgtgcactcacagaagaaaaacacgaaagaagttccacttttaaaaatataattaatggatcag

SEQ ID NO: 45793 - DNA, 80 bp, synthetic construct; identical to SEQ ID NO: 15313
  source 1..80: mol_type = other DNA

SEQ ID NO: 45794 - DNA, 80 bp, synthetic construct
  source 1..80: mol_type = other DNA
cgggcgcctgtagtcccagctactcaggagtctgaggcgggagaaaggcgtgaactcgggaggtggagcttgcagcgagc

SEQ ID NO: 45795 - DNA, 80 bp, synthetic construct
  source 1..80: mol_type = other DNA
gaaaagctttttggatcctcaataatttaaaaatgtgtaaagagtcctgagactgaaacatctgacaactgtttatctat

SEQ ID NO: 45796 - DNA, 80 bp, synthetic construct
  source 1..80: mol_type = other DNA
tttagttggaccctagatactaccttcaggcccttaaaagaatcaggtcctttaaggacgattctgtacagttaaatata

SEQ ID NO: 45797 - DNA, 80 bp, synthetic construct
  source 1..80: mol_type = other DNA
aatatcaggaagtataagtaatttagtaagtcacaaggaagtaaatagttgagactggattttgaactgcttttttttta

SEQ ID NO: 45798 - DNA, 80 bp, synthetic construct; identical to SEQ ID NO: 15314
  source 1..80: mol_type = other DNA

SEQ ID NO: 45799 - DNA, 80 bp, synthetic construct
  source 1..80: mol_type = other DNA
ctctcaacagaatcaggactaagctattaaagtaagtgtaggatgaaggcaattctatgaataactaagccaatagatgt

SEQ ID NO: 45800 - DNA, 80 bp, synthetic construct
  source 1..80: mol_type = other DNA
tagcaatgttcaatctaaatgtatagataataaattattcttgcttcgaatagaaagcctgggctaagcaagaagcatca

SEQ ID NO: 45801 - DNA, 80 bp, synthetic construct; identical to SEQ ID NO: 15315
  source 1..80: mol_type = other DNA

SEQ ID NO: 45802 - DNA, 80 bp, synthetic construct
  source 1..80: mol_type = other DNA
ttgttctgcagcttcctgaattgtatattaaatgggtggaagataccaagatataaatgttaaacaacttaaggaaggac

SEQ ID NO: 45803 - DNA, 80 bp, synthetic construct
  source 1..80: mol_type = other DNA
ataaaacagaataaaaaaacaactgtttctagaaaagggcaatgggaatggggttgctctttgcctgtaattctagaaga

SEQ ID NO: 45804 - DNA, 80 bp, synthetic construct
  source 1..80: mol_type = other DNA
ctggttggttgacagactatattgagtcaaaaaggacaaaacgtcttcattaaggttttcccataaagatgttttatttt

SEQ ID NO: 45805 - DNA, 80 bp, synthetic construct; identical to SEQ ID NO: 15316
  source 1..80: mol_type = other DNA

SEQ ID NO: 45806 - DNA, 80 bp, synthetic construct
  source 1..80: mol_type = other DNA
aatctatagtgttgtactgagctccctccaaagcaactataaatttataggagatgaaacatatgattcaccaggcataa

SEQ ID NO: 45807 - DNA, 80 bp, synthetic construct
  source 1..80: mol_type = other DNA
gatctttagtatttgtggaactggcttggattgtgtttaggaaattttgtcattggtaaacctaaggagagtcaagagaa

SEQ ID NO: 45808 - DNA, 80 bp, synthetic construct
  source 1..80: mol_type = other DNA
ttcagagcagatagacaaactataatgagaatagatgaacagcaaggccactgaaaggactcagaactacatcttataag

SEQ ID NO: 45809 - DNA, 80 bp, synthetic construct; identical to SEQ ID NO: 15317
  source 1..80: mol_type = other DNA

SEQ ID NO: 45810 - DNA, 80 bp, synthetic construct
  source 1..80: mol_type = other DNA
ctcaatataagagaattgttacattagttcatggaagaatatgttttaaggtatttttgttagtctctaggaaatctctg

SEQ ID NO: 45811 - DNA, 80 bp, synthetic construct
  source 1..80: mol_type = other DNA
tcttccctccctgctccctgaaattgcagtgaatttttcaagaccaactgaggacatgtattttcaatgtttatggttaa

SEQ ID NO: 45812 - DNA, 80 bp, synthetic construct
  source 1..80: mol_type = other DNA
tcaaaaacgtatccatgtttctcaaggatcttgttgtaggccactctaattccatatattatgtggcttttcctagaatt

SEQ ID NO: 45813 - DNA, 80 bp, synthetic construct; identical to SEQ ID NO: 15318
  source 1..80: mol_type = other DNA

SEQ ID NO: 45814 - DNA, 80 bp, synthetic construct
  source 1..80: mol_type = other DNA
agggaagaaaattggagaaacattattaccttttcttagatgttggcaacggaggcaacaaggactgcaaaagaaaattg

SEQ ID NO: 45815 - DNA, 80 bp, synthetic construct
  source 1..80: mol_type = other DNA
gcgctggaaaattgagtgatgttagccccctttcttatttttcactgctaccaaagactaactctatctctctccccaac

SEQ ID NO: 45816 - DNA, 80 bp, synthetic construct
  source 1..80: mol_type = other DNA
tgcggggcaggtgatgagcctctgtgaactactaaggtgggagggggctatacgcagaggagaatgtcagatgctcagct

SEQ ID NO: 45817 - DNA, 80 bp, synthetic construct
  source 1..80: mol_type = other DNA
gtcagtaccatggacagcagcgctgcccccacgaacgccagcaattgcactgatgccttggcgtactcaagttgctcccc

SEQ ID NO: 45818 - DNA, 80 bp, synthetic construct; identical to SEQ ID NO: 15319
  source 1..80: mol_type = other DNA

SEQ ID NO: 45819 - DNA, 80 bp, synthetic construct
  source 1..80: mol_type = other DNA
gaggggaggtaaactggggggactctggaggagaccacggacagtgattgttatttctatgagaaaacctacttttctgt

SEQ ID NO: 45820 - DNA, 80 bp, synthetic construct
  source 1..80: mol_type = other DNA
acactcagtccctctgcaggagctatggaaagagtaagttgtgaataatgggagagaaattctagttagctttcccaaat

SEQ ID NO: 45821 - DNA, 80 bp, synthetic construct; identical to SEQ ID NO: 15320
  source 1..80: mol_type = other DNA

SEQ ID NO: 45822 - DNA, 80 bp, synthetic construct
  source 1..80: mol_type = other DNA
gtatttcattgccttcacaagttggagctaattaggagtgaccaaaagcatcataattccacattagaaactgcagaaac

SEQ ID NO: 45823 - DNA, 80 bp, synthetic construct
  source 1..80: mol_type = other DNA
tgtggaagctctcagtattgactgagattgatattgattgtgttggtgttgatgtgtatattcaaatactacatgtgaat

SEQ ID NO: 45824 - DNA, 80 bp, synthetic construct
  source 1..80: mol_type = other DNA
agtattgcaggtttcagcggagctcttaaatcatttaagaattgctctctccagtatgctttcattacccaggtgctgca

SEQ ID NO: 45825 - DNA, 80 bp, synthetic construct; identical to SEQ ID NO: 15321
  source 1..80: mol_type = other DNA

SEQ ID NO: 45826 - DNA, 80 bp, synthetic construct
  source 1..80: mol_type = other DNA
actaatcaagctagaagggactctagagattatctatgctaagtaaataaactgaggcacagaaaatgtaaattattttc

SEQ ID NO: 45827 - DNA, 80 bp, synthetic construct
  source 1..80: mol_type = other DNA
tccccaaattctatgtgaaatcctgaaggaaaaaagcatgaaacaaaaataccaaagcatctaggaatcctgccatctga

SEQ ID NO: 45828 - DNA, 80 bp, synthetic construct
  source 1..80: mol_type = other DNA
ttgacttggagaaacatggtgacggtgcatcttactgagaacatgttattatgctttattctcggtactgaaagttctta

SEQ ID NO: 45829 - DNA, 80 bp, synthetic construct; identical to SEQ ID NO: 15322
  source 1..80: mol_type = other DNA

SEQ ID NO: 45830 - DNA, 80 bp, synthetic construct
  source 1..80: mol_type = other DNA
tgttttagtacattgagtgaatcatgaggctcagatgactatggcaacaacaacaacaaaaataactgctaacatggacg

SEQ ID NO: 45831 - DNA, 80 bp, synthetic construct
  source 1..80: mol_type = other DNA
ggaggaaaggagaaactgtaatatgttctaaagattttaagtccagatgttaagtgataaaaatgttatcagtaaccatc

SEQ ID NO: 45832 - DNA, 80 bp, synthetic construct
  source 1..80: mol_type = other DNA
tgggatgatagtatttcattgtcaagaactgtaaagaaaaaaaatcaaaacaaaaagtaacagccaccagagatgtttca

SEQ ID NO: 45833 - DNA, 80 bp, synthetic construct; identical to SEQ ID NO: 15323
  source 1..80: mol_type = other DNA

SEQ ID NO: 45834 - DNA, 80 bp, synthetic construct
  source 1..80: mol_type = other DNA
tgatcagttatacttgattgaaacagaagtataagcttttaaacttaatctagattcaggtagctacaaattagtgaaca

SEQ ID NO: 45835 - DNA, 80 bp, synthetic construct
  source 1..80: mol_type = other DNA
ctcaaatattaataaaattcacttttctaaaacccacaaaatatcctaattagaggatggatttaaagtgaaaaacacta

SEQ ID NO: 45836 - DNA, 80 bp, synthetic construct
  source 1..80: mol_type = other DNA
ctgtgtcttctaaacacactaaattgcttttcctttccttggttgtaagctgtgtctttgtcatttgcatgacattacca

SEQ ID NO: 45837 - DNA, 80 bp, synthetic construct; identical to SEQ ID NO: 15324
  source 1..80: mol_type = other DNA

SEQ ID NO: 45838 - DNA, 80 bp, synthetic construct
  source 1..80: mol_type = other DNA
cacataatttccctaattactccaagttgttatagttccagtaggccaatgctagaaaatagatgtcaaataaaaccaac

SEQ ID NO: 45839 - DNA, 80 bp, synthetic construct
  source 1..80: mol_type = other DNA
cagaaaaaaacctcagctactgctgcaaaaaaaataaatcggttaataaatttaaataaagcataatttctctactgcta

SEQ ID NO: 45840 - DNA, 80 bp, synthetic construct
  source 1..80: mol_type = other DNA
tatttctcctaggattccgtttaaggcagtagttgaaacagatattttaaggtcagatgcaagaaaaaataagctcattt

SEQ ID NO: 45841 - DNA, 80 bp, synthetic construct; identical to SEQ ID NO: 15325
  source 1..80: mol_type = other DNA

SEQ ID NO: 45842 - DNA, 80 bp, synthetic construct
  source 1..80: mol_type = other DNA
aaaatacaagaattccaagtctttagtcctcactaagtttaatgtttatctgactgaaataattatctgtgacagcagtc

SEQ ID NO: 45843 - DNA, 80 bp, synthetic construct
  source 1..80: mol_type = other DNA
ccaccatagaatttctagggctccaccaggcaaaatttgaaagcaatggctttcacgttgtttcatatccttctcgtgcc

SEQ ID NO: 45844 - DNA, 80 bp, synthetic construct
  source 1..80: mol_type = other DNA
cttctctactggagtaattgccctccataggaatcagcctggcactcacaaaggcactatttggaagttcaggaaagttc

SEQ ID NO: 45845 - DNA, 80 bp, synthetic construct; identical to SEQ ID NO: 15326
  source 1..80: mol_type = other DNA

SEQ ID NO: 45846 - DNA, 80 bp, synthetic construct
  source 1..80: mol_type = other DNA
tcgtaagaaaaattctgataggcagcaccagttagaactaccaagagagttcagaagctaagcttttccttccatttttg

SEQ ID NO: 45847 - DNA, 80 bp, synthetic construct
  source 1..80: mol_type = other DNA
agaattgtgtgtgccatgtaaaggaaataaagcctcctgtgccttctggcaaattatctgagggtataagaaaacaaaca

SEQ ID NO: 45848 - DNA, 80 bp, synthetic construct
  source 1..80: mol_type = other DNA
gcttaccaagcaactcctttctttacccatcctttcttgcctcaggtaactttttttctttccccatcaatttctcagat

SEQ ID NO: 45849 - DNA, 80 bp, synthetic construct
  source 1..80: mol_type = other DNA
ctaaaatgtcctatggcaacttcaatgactattaagagcatgtttttcccagcaatacaatctggaggaaaagaggaatc

SEQ ID NO: 45850 - DNA, 80 bp, synthetic construct; identical to SEQ ID NO: 15327
  source 1..80: mol_type = other DNA

SEQ ID NO: 45851 - DNA, 80 bp, synthetic construct
  source 1..80: mol_type = other DNA
acaaggaatgaaaaacagtgagtcagagtatgtgctgcctccttaagggttaggaacgcataacctaaaagcgtgactgg

SEQ ID NO: 45852 - DNA, 80 bp, synthetic construct
  source 1..80: mol_type = other DNA
ctttcccataagatgaagtgtgtgatgggtttaaatgagagagagatcattctgttctggatatgtgtctgtccaggcaa

SEQ ID NO: 45853 - DNA, 80 bp, synthetic construct; identical to SEQ ID NO: 15328
  source 1..80: mol_type = other DNA

SEQ ID NO: 45854 - DNA, 80 bp, synthetic construct
  source 1..80: mol_type = other DNA
caacatgtgaatttgaggggaacacattcagtttacagtaggtgtcctaagtgattcaaatattaaccactcatattcac

SEQ ID NO: 45855 - DNA, 80 bp, synthetic construct
  source 1..80: mol_type = other DNA
tcaaaatgtttcttgttcttcaagtatcaacttaaatccatcctttcttacagcctctccaaagtactcctacaaccaat

SEQ ID NO: 45856 - DNA, 80 bp, synthetic construct
  source 1..80: mol_type = other DNA
tgtgtttaggtgagaaatccaacattcaaagttgaccaacagaactgaatatcttcaaaatactgtacaattctaagcta

SEQ ID NO: 45857 - DNA, 80 bp, synthetic construct
  source 1..80: mol_type = other DNA
accatagatacatattagcaaatcataaattcaaatacaaacacatacatgtctatatatgcatatattcctgagtttac

SEQ ID NO: 45858 - DNA, 80 bp, synthetic construct; identical to SEQ ID NO: 15329
  source 1..80: mol_type = other DNA

SEQ ID NO: 45859 - DNA, 80 bp, synthetic construct
  source 1..80: mol_type = other DNA
agtactttcctcataagccacatcacagtcttcttggcttagggacactaagcagaacttccacactatgtttgagacca

SEQ ID NO: 45860 - DNA, 80 bp, synthetic construct
  source 1..80: mol_type = other DNA
ctgcacagagagcaactcaaattttttgctgctctatacatgtccacacaggtcctcaaatgactgcaaaagccaagtat

SEQ ID NO: 45861 - DNA, 80 bp, synthetic construct
  source 1..80: mol_type = other DNA
tagtaaagaagaaaatcaggaagctatgttccaaattaaatatggtagcaaattcatgacatgatgacaagttgtatgtt

SEQ ID NO: 45862 - DNA, 80 bp, synthetic construct; identical to SEQ ID NO: 15330
  source 1..80: mol_type = other DNA

SEQ ID NO: 45863 - DNA, 80 bp, synthetic construct
  source 1..80: mol_type = other DNA
tatttggtagaattcagcagtgtagccatcaggtcctgggcttttctttactggaagactttttattatggcttagatct

SEQ ID NO: 45864 - DNA, 80 bp, synthetic construct
  source 1..80: mol_type = other DNA
aagcaacctaagtgtccatcaatagattaatggataaagaaaatgtggtacataaacacaatggtatactactattcagc

SEQ ID NO: 45865 - DNA, 80 bp, synthetic construct
  source 1..80: mol_type = other DNA
gtagaaggatggtgaccagaggctggaaagggtagtgggggctgatggggggctgggaggaggtggggattgctaacagg

SEQ ID NO: 45866 - DNA, 80 bp, synthetic construct; identical to SEQ ID NO: 15331
  source 1..80: mol_type = other DNA

SEQ ID NO: 45867 - DNA, 80 bp, synthetic construct
  source 1..80: mol_type = other DNA
attatccttacaatgtaggatttcatttatctgaagtcttatgcttttttcagtaaagctctaaaacatggaaaggaaac

SEQ ID NO: 45868 - DNA, 80 bp, synthetic construct
  source 1..80: mol_type = other DNA
taaacaactaaaaagggctctgcctaaaattgaatggctctaggaccgtgaattagcctgctccctccaaactgagaatg

SEQ ID NO: 45869 - DNA, 80 bp, synthetic construct
  source 1..80: mol_type = other DNA
tctcattttactatagttagatgcatataagaccccttcattgcatgaagagtgatggctttgctcagtctttcctataa

SEQ ID NO: 45870 - DNA, 80 bp, synthetic construct; identical to SEQ ID NO: 15332
  source 1..80: mol_type = other DNA

SEQ ID NO: 45871 - DNA, 80 bp, synthetic construct
  source 1..80: mol_type = other DNA
tgtttacaatagcaaagacatggaaccaacccaaatgcccatcaatgataggttggataaagaaaatatgttacatatac

SEQ ID NO: 45872 - DNA, 80 bp, synthetic construct
  source 1..80: mol_type = other DNA
gtggacacagggagaggaacagcacacactgggccctgtcgggggttggggggcaaggggacaaggagcattaggacaaa

SEQ ID NO: 45873 - DNA, 80 bp, synthetic construct
  source 1..80: mol_type = other DNA
gtttttacaatcagataatctctgtcataactactcagttctgctgttgcagcctagagcaagccatagacaacacatag

SEQ ID NO: 45874 - DNA, 80 bp, synthetic construct; identical to SEQ ID NO: 15333
  source 1..80: mol_type = other DNA

SEQ ID NO: 45875 - DNA, 80 bp, synthetic construct
  source 1..80: mol_type = other DNA
cctagaccaactcacagtatttttcaacatcagaaaatagcaacacaaatatgaagttaccacaaaccagaacagttgcc

SEQ ID NO: 45876 - DNA, 80 bp, synthetic construct
  source 1..80: mol_type = other DNA
tttatttgactcagacaatcagcaaggtttattaccacccttagccagtgattaaggagtaagtgcttagaaaatagcat

SEQ ID NO: 45877 - DNA, 80 bp, synthetic construct
  source 1..80: mol_type = other DNA
ctgtcatctgcaaattcatattaacttcttggcaaatataaaatctgtcttccaagatacctatgcctgcacacctgcca

SEQ ID NO: 45878 - DNA, 80 bp, synthetic construct; identical to SEQ ID NO: 15334
  source 1..80: mol_type = other DNA

SEQ ID NO: 45879 - DNA, 80 bp, synthetic construct
  source 1..80: mol_type = other DNA
aactttctcccatgtacaggaattctttagattagccagatgaccatcaggaaaaagttcgcaagaagagttaagttaaa

SEQ ID NO: 45880 - DNA, 80 bp, synthetic construct
  source 1..80: mol_type = other DNA
attatataaatccccacaatatgcttagacatgtagaagaagagtactttcagatcgtctagtccagtgattctgaatcc

SEQ ID NO: 45881 - DNA, 80 bp, synthetic construct
  source 1..80: mol_type = other DNA
aaaattagccgggcatggcggcatgcacctgtagtcccagctactcgggaggctggggaaggagaattgcgtggacccgg

SEQ ID NO: 45882 - DNA, 80 bp, synthetic construct; identical to SEQ ID NO: 15335
  source 1..80: mol_type = other DNA

SEQ ID NO: 45883 - DNA, 80 bp, synthetic construct
  source 1..80: mol_type = other DNA
atcatctctcttcagagtaggcatagtggagtagacagagtagtaaacatgtaatgaaagacatgtttagataaatgctt

SEQ ID NO: 45884 - DNA, 80 bp, synthetic construct
  source 1..80: mol_type = other DNA
tgccccttactagtgactacactagacacctaacctacttgaatctcattagttaaaccttaataaaggaaaaatagcca

SEQ ID NO: 45885 - DNA, 80 bp, synthetic construct
  source 1..80: mol_type = other DNA
tcaggacttcaagaccggcctggccatcatggtgaaacctcatctctactaaaaatacaaaaattatccgggcaacatgg

SEQ ID NO: 45886 - DNA, 80 bp, synthetic construct; identical to SEQ ID NO: 15336
  source 1..80: mol_type = other DNA

SEQ ID NO: 45887 - DNA, 80 bp, synthetic construct
  source 1..80: mol_type = other DNA
tcaactccttctacatgcactgggtcattccaaaaccatcgtgtcaaggacatgatgatgtgaagaaaattctaaggaca

SEQ ID NO: 45888 - DNA, 80 bp, synthetic construct
  source 1..80: mol_type = other DNA
atcttggtgtgaaagaatctcaagcaggatctaagtctaaatgctaactgcatgtgacaaaactcctttgtccccagcag

SEQ ID NO: 45889 - DNA, 80 bp, synthetic construct; identical to SEQ ID NO: 15337
  source 1..80: mol_type = other DNA

SEQ ID NO: 45890 - DNA, 80 bp, synthetic construct
  source 1..80: mol_type = other DNA
tgggactacaggtgctcaccaccatgcccagctaatttttgtatttttagtagagatggggtttcaccacattggccagg

SEQ ID NO: 45891 - DNA, 80 bp, synthetic construct
  source 1..80: mol_type = other DNA
tttttccaggacttgcaatgcgatgtctgtcaacttcctaactcaggacagtaaactctataaataaagcaagcagagga

SEQ ID NO: 45892 - DNA, 80 bp, synthetic construct
  source 1..80: mol_type = other DNA
ttttttcaccgaaatgctgggttcagtgccagtgagaggttgagctttttccgggggagtattaaatgttaattgaaaaa

SEQ ID NO: 45893 - DNA, 80 bp, synthetic construct; identical to SEQ ID NO: 15338
  source 1..80: mol_type = other DNA

SEQ ID NO: 45894 - DNA, 80 bp, synthetic construct
  source 1..80: mol_type = other DNA
gcagtttgagtctcataacatttttgtgagtctaaacagggaagacattgaacagactcattttaaagaaatagactaat

SEQ ID NO: 45895 - DNA, 80 bp, synthetic construct
  source 1..80: mol_type = other DNA
ccaagaataggactataataactgactttgtgttctttccatcacagtatcagaaaaacactgttctcaaggtttattgc

SEQ ID NO: 45896 - DNA, 80 bp, synthetic construct
  source 1..80: mol_type = other DNA
aagatagtagtgagtggaaaaggcctgcgttcattttcataaaagaatgaaaaaaagtgctattgaccataatttataag

SEQ ID NO: 45897 - DNA, 80 bp, synthetic construct; identical to SEQ ID NO: 15339
  source 1..80: mol_type = other DNA

SEQ ID NO: 45898 - DNA, 80 bp, synthetic construct
  source 1..80: mol_type = other DNA
tgccacaaagcataacttaaaacatataaagcacaccagtgatcatttccacaggagtattattttctcagcaatttaga

SEQ ID NO: 45899 - DNA, 80 bp, synthetic construct
  source 1..80: mol_type = other DNA
ctctcatgtttttattcacacatttgtttgaagttaagttgatattaaaacagaatatattgggtcagcattctagttga

SEQ ID NO: 45900 - DNA, 80 bp, synthetic construct
  source 1..80: mol_type = other DNA
cagtcaaaacaaaaagtaacactttagtaaatatgaatgcttaatctgggctcatattctaaggacaaataaacatgaac

SEQ ID NO: 45901 - DNA, 80 bp, synthetic construct
  source 1..80: mol_type = other DNA
gttcagattccatactaacaatccttaaatacactacattaaaaaattttcatctttacaccaaccattaaggaaagtat

SEQ ID NO: 45902 - DNA, 80 bp, synthetic construct; identical to SEQ ID NO: 15340
  source 1..80: mol_type = other DNA

SEQ ID NO: 45903 - DNA, 80 bp, synthetic construct
  source 1..80: mol_type = other DNA
ctctaggataactcaatctaggtctgtaattgagtcagccttttaacctggtaaaatagaacccatcaattattagtgga

SEQ ID NO: 45904 - DNA, 80 bp, synthetic construct
  source 1..80: mol_type = other DNA
atctagtcaggcttcctggatgtgttattcagccaagcactgtgacatttgcatatctccacttacattcatgatccttt

SEQ ID NO: 45905 - DNA, 80 bp, synthetic construct
  source 1..80: mol_type = other DNA
ttccactacactgaatttattacaatgttatgttaatgctacatttatttcagccctttgtgtctcagtgttccatttct

SEQ ID NO: 45906 - DNA, 80 bp, synthetic construct; identical to SEQ ID NO: 15341
  source 1..80: mol_type = other DNA

SEQ ID NO: 45907 - DNA, 80 bp, synthetic construct
  source 1..80: mol_type = other DNA
gcactaatgaaattcaagaaaaggcatcctgctccatatccttgcatccctaccctagcgaccaaaacaccagatggaca

SEQ ID NO: 45908 - DNA, 80 bp, synthetic construct
  source 1..80: mol_type = other DNA
tctttgcttctcaaatggttaatggggtcacttatgaaaagtatggaaacctagtccattcaactcccatgccaaattct

SEQ ID NO: 45909 - DNA, 80 bp, synthetic construct; identical to SEQ ID NO: 15342
  source 1..80: mol_type = other DNA

SEQ ID NO: 45910 - DNA, 80 bp, synthetic construct
  source 1..80: mol_type = other DNA
ggtgacacaagaaaatttctagcctctactctgcaccaattatttcacaaatatttaaaagtacaaagtttatgtcaaga

SEQ ID NO: 45911 - DNA, 80 bp, synthetic construct
  source 1..80: mol_type = other DNA
gatacttgatttatattagtttctggaaaactttggggcccaccctaaattaatggctttctgctaccatcagagacaaa

SEQ ID NO: 45912 - DNA, 80 bp, synthetic construct
  source 1..80: mol_type = other DNA
gcgctgtaacatctaacacaccatttagaaatcgcttggttctggtttgtcaccagacttaggagagatatatctcactg

SEQ ID NO: 45913 - DNA, 80 bp, synthetic construct
  source 1..80: mol_type = other DNA
accaaataccacatgttctcacttataagtgagagctaaacattgagtacacatggacaaagaggggagcaacagacacc

SEQ ID NO: 45914 - DNA, 80 bp, synthetic construct; identical to SEQ ID NO: 15343
  source 1..80: mol_type = other DNA

SEQ ID NO: 45915 - DNA, 80 bp, synthetic construct
  source 1..80: mol_type = other DNA
acaaaatgttcccagagtttggctgtacttgttaagtttagagtgatttatattttagtttttatatagttcagtgttat

SEQ ID NO: 45916 - DNA, 80 bp, synthetic construct
  source 1..80: mol_type = other DNA
tggaattttcctattaaaagaatagttacataatttgtggctaaaaatgttgttagtgccaaatgactctattccaagtc

SEQ ID NO: 45917 - DNA, 80 bp, synthetic construct
  source 1..80: mol_type = other DNA
ggaaaataccttccaaaaaaactctctgactgaaaaaaaaatctcaataagcttctttctgtttcctagaaaaatctcaa

SEQ ID NO: 45918 - DNA, 80 bp, synthetic construct; identical to SEQ ID NO: 15344
  source 1..80: mol_type = other DNA

SEQ ID NO: 45919 - DNA, 80 bp, synthetic construct
  source 1..80: mol_type = other DNA
ttaaacattccaagtagttaaatctccagaaaacacacacacaaaactacaactgaaacaaatcttaactatccagatat

SEQ ID NO: 45920 - DNA, 80 bp, synthetic construct
  source 1..80: mol_type = other DNA
aatttttgtgaacatcagttcgcacaaacccctgtaaagagttagtaaagcttactgtactttatttattatacagatag

SEQ ID NO: 45921 - DNA, 80 bp, synthetic construct; identical to SEQ ID NO: 15345
  source 1..80: mol_type = other DNA

SEQ ID NO: 45922 - DNA, 80 bp, synthetic construct
  source 1..80: mol_type = other DNA
aagaagaatcatatattatttatcttttataaatggtttatttcatttggcataatgtcctcaaagttgatccatgttgt

SEQ ID NO: 45923 - DNA, 80 bp, synthetic construct
  source 1..80: mol_type = other DNA
ataattctgatgtgaagatgggtatataaatatcttgtggagaccgtgttttcaatttctttgggtatttggatcatatg

SEQ ID NO: 45924 - DNA, 80 bp, synthetic construct
  source 1..80: mol_type = other DNA
aatgtgaggaggtgtctcactgtggtttaatttgcattgtcctaatgaatagtgatattttgcatcttttcatatgctta

SEQ ID NO: 45925 - DNA, 80 bp, synthetic construct
  source 1..80: mol_type = other DNA
atatatttctcattctgtaggttgcctttttactacatggatagtgtcctttgattaacaaaagttttcagtttttatga

SEQ ID NO: 45926 - DNA, 80 bp, synthetic construct; identical to SEQ ID NO: 15346
  source 1..80: mol_type = other DNA

SEQ ID NO: 45927 - DNA, 80 bp, synthetic construct
  source 1..80: mol_type = other DNA
aaagtaagttttgaattcaggaagtgtgagtcctctgcctttgtccttctttttcaagattattttggccatagtgttta

SEQ ID NO: 45928 - DNA, 80 bp, synthetic construct
  source 1..80: mol_type = other DNA
ttatgtcttctttaatttttttttttttttttttagacagagtctcactctgtcaccacactggggtacagtggcacgat

SEQ ID NO: 45929 - DNA, 80 bp, synthetic construct; identical to SEQ ID NO: 15347
  source 1..80: mol_type = other DNA

SEQ ID NO: 45930 - DNA, 80 bp, synthetic construct
  source 1..80: mol_type = other DNA
tctgctacttcaccaaattcattattagttctaacagttttttttgtgtgtggaatctttagtattttctacttataaga

SEQ ID NO: 45931 - DNA, 80 bp, synthetic construct
  source 1..80: mol_type = other DNA
agaaaaagctttcagcctttcaacattgagtatgatctctgctgtggaattttcatatacagcttttaatatgttatggt

SEQ ID NO: 45932 - DNA, 80 bp, synthetic construct
  source 1..80: mol_type = other DNA
cctttcattccagaaataaatcccagttgattataatgtataatcctctcaatatgctgtagaatttagtctgacaatat

SEQ ID NO: 45933 - DNA, 80 bp, synthetic construct
  source 1..80: mol_type = other DNA
aagtgctctctcctcttcgttatattgaaaaattttgagaagtattggtatttgattttttttaagtgtttggtacaatt

SEQ ID NO: 45934 - DNA, 80 bp, synthetic construct; identical to SEQ ID NO: 15348
  source 1..80: mol_type = other DNA

SEQ ID NO: 45935 - DNA, 80 bp, synthetic construct
  source 1..80: mol_type = other DNA
ggctgcacctgcaagccaggaaaaaaatccctcaccaggaattaaatcagttagcatcttgattttcaattgaccagcct

SEQ ID NO: 45936 - DNA, 80 bp, synthetic construct
  source 1..80: mol_type = other DNA
tctcttgtaaacattttatttatgtacaaaaactagtaatatgcctacttcaacattttattgtagtgatctgattattg

SEQ ID NO: 45937 - DNA, 80 bp, synthetic construct; identical to SEQ ID NO: 15349
  source 1..80: mol_type = other DNA

SEQ ID NO: 45938 - DNA, 80 bp, synthetic construct
  source 1..80: mol_type = other DNA
taagttctcttgtgatttttctctttgaaccattgtttatttaagagtgttcttaattttcacaaacctgtgaattttcc

SEQ ID NO: 45939 - DNA, 80 bp, synthetic construct
  source 1..80: mol_type = other DNA
gaatgttttctgttgttgttgggtagagtagtctgtctatatctgttaaacctagttggtttgttgtgttttgtaagtcc

SEQ ID NO: 45940 - DNA, 80 bp, synthetic construct
  source 1..80: mol_type = other DNA
gttcagagtaagatattggcactacctccttccctcttcaattctgtccacttttgctttatatgttttttaatggtctg

SEQ ID NO: 45941 - DNA, 80 bp, synthetic construct; identical to SEQ ID NO: 15350
  source 1..80: mol_type = other DNA

SEQ ID NO: 45942 - DNA, 80 bp, synthetic construct
  source 1..80: mol_type = other DNA
acatgcattctgggatggttaaatctagctagttataacttctgtaatgaaaacacaacattcactctcagcatttttca

SEQ ID NO: 45943 - DNA, 80 bp, synthetic construct
  source 1..80: mol_type = other DNA
ctaaccaccccagcctccattctattctctacttgtgtgagatcaattttgtagatttctcatttgagtgaaataatatg

SEQ ID NO: 45944 - DNA, 80 bp, synthetic construct
  source 1..80: mol_type = other DNA
ctgagatttattccatatcttggttattgtgaatagtgctgcaataaacatgggaacgtagctatctcttcaacatattt

SEQ ID NO: 45945 - DNA, 80 bp, synthetic construct; identical to SEQ ID NO: 15351
  source 1..80: mol_type = other DNA

SEQ ID NO: 45946 - DNA, 80 bp, synthetic construct
  source 1..80: mol_type = other DNA
ctttcttgctattggtttgtaagagcttcttatgtattttggatatcagccccttatcagctgtataatttgcaaatatt

SEQ ID NO: 45947 - DNA, 80 bp, synthetic construct
  source 1..80: mol_type = other DNA
tagccagatcttggcttactgcaacctccacctcccaggttcaagtgattctcctgcctcagcctccccagtagcaggga

SEQ ID NO: 45948 - DNA, 80 bp, synthetic construct
  source 1..80: mol_type = other DNA
cctggcctgtgcttttaaggtgatagccagaaaatcattgcagaaaccagtgtcatgaagctttttcctatgttttcttt

SEQ ID NO: 45949 - DNA, 80 bp, synthetic construct; identical to SEQ ID NO: 15352
  source 1..80: mol_type = other DNA

SEQ ID NO: 45950 - DNA, 80 bp, synthetic construct
  source 1..80: mol_type = other DNA
aaatggtcctggtaatttaaattccctggaagttgcttcagctatagggaaagaaatttgtaatattcggaggtgagggg

SEQ ID NO: 45951 - DNA, 80 bp, synthetic construct
  source 1..80: mol_type = other DNA
tcccaccaggctcgtgtgggagatagaaaactgttagccaggtaagagcagaaattaaccaaaataaaccaagtttactg

SEQ ID NO: 45952 - DNA, 80 bp, synthetic construct
  source 1..80: mol_type = other DNA
tctactcatccatctgcccagaatctttgccactgttatttaagaggtgcatcttgaaaggctgtgatgaagatcaagta

SEQ ID NO: 45953 - DNA, 80 bp, synthetic construct
  source 1..80: mol_type = other DNA
ttttggtaatatcttcgccactttacatttatggaaattgggactcagcaacttgactaacatcacagacacagttctca

SEQ ID NO: 45954 - DNA, 80 bp, synthetic construct; identical to SEQ ID NO: 15353
  source 1..80: mol_type = other DNA

SEQ ID NO: 45955 - DNA, 80 bp, synthetic construct
  source 1..80: mol_type = other DNA
gattacaactgagcaagcaggtcttcactttgataacttctagacctaaagaccatggttaactgatatttgaaggtatg

SEQ ID NO: 45956 - DNA, 80 bp, synthetic construct
  source 1..80: mol_type = other DNA
tttctgcctgctacagatagatgctggataagtatatatgccaagatttcagtgaggcagcagctgatgtagctacaatg

SEQ ID NO: 45957 - DNA, 80 bp, synthetic construct
  source 1..80: mol_type = other DNA
atcttgctacagcaaggaatacaaaacacccagggatttcagtttatatttggtgatttgggaaaggattcaaagaaaca

SEQ ID NO: 45958 - DNA, 80 bp, synthetic construct; identical to SEQ ID NO: 15354
  source 1..80: mol_type = other DNA

SEQ ID NO: 45959 - DNA, 80 bp, synthetic construct
  source 1..80: mol_type = other DNA
actcaactattatatactgtcccttctccttctttggcaataggagagggataaaaatgagaatcaacgtgggaatggta

SEQ ID NO: 45960 - DNA, 80 bp, synthetic construct
  source 1..80: mol_type = other DNA
gagtgcagattgaaggtggtctctgaactccagaagcttataaaccaatagataaaacagatactactactataatcatc

SEQ ID NO: 45961 - DNA, 80 bp, synthetic construct; identical to SEQ ID NO: 15355
  source 1..80: mol_type = other DNA

SEQ ID NO: 45962 - DNA, 80 bp, synthetic construct
  source 1..80: mol_type = other DNA
ataaatatctttatgatggaaagttgtgcagtaacaatggcttcccaattctaatcccagaatgcagcatactcaaccac

SEQ ID NO: 45963 - DNA, 80 bp, synthetic construct
  source 1..80: mol_type = other DNA
atagctaagtcactcctccttttgaaaggagtgaataatggaactgagagaaatcaaagcagagaaatggtggatgactt

SEQ ID NO: 45964 - DNA, 80 bp, synthetic construct
  source 1..80: mol_type = other DNA
caggcatgttagtttactcttttatatcttccaggctagacataagcaacagtgtcctcatgcatacttagggcagagat

SEQ ID NO: 45965 - DNA, 80 bp, synthetic construct; identical to SEQ ID NO: 15356
  source 1..80: mol_type = other DNA

SEQ ID NO: 45966 - DNA, 80 bp, synthetic construct
  source 1..80: mol_type = other DNA
agaagaatttacacttgaggaaacagaataaaaaagcagtcacacaaggactttaaaataagtcatatcaggcatggtgg

SEQ ID NO: 45967 - DNA, 80 bp, synthetic construct
  source 1..80: mol_type = other DNA
gcagcagaatcatttgaacctgggaggtggaggttgcaatgagccaagattgtcccactgcactccagcctggccaacag

SEQ ID NO: 45968 - DNA, 80 bp, synthetic construct
  source 1..80: mol_type = other DNA
acctgggtttcaatcctggctctgacaacaatcactagttggatgtctccagggcaaattacttaaccaatctgtgtctt

SEQ ID NO: 45969 - DNA, 80 bp, synthetic construct; identical to SEQ ID NO: 15357
  source 1..80: mol_type = other DNA

SEQ ID NO: 45970 - DNA, 80 bp, synthetic construct
  source 1..80: mol_type = other DNA
caggcgtggtggtacactcctgtagtcccagctacttgggaggctgaggcaggagaattgcttgaacctgggaggtggga

SEQ ID NO: 45971 - DNA, 80 bp, synthetic construct
  source 1..80: mol_type = other DNA
tagaaggatagacacggaaaaactaaaatgtatctattaaaggtagagaacaaaagcaatggaagagaggcaatattgga

SEQ ID NO: 45972 - DNA, 80 bp, synthetic construct
  source 1..80: mol_type = other DNA
agagaaaatgatatttttaaagggaatagaataagagttttcatcaacacacttggcacaaagaagacaatgaatagagt

SEQ ID NO: 45973 - DNA, 80 bp, synthetic construct
  source 1..80: mol_type = other DNA
aggaatgagacaaagtaaaaagaactggcatttttcattacaaggatgaaattatgtttttgtacccttttcatagagat

SEQ ID NO: 45974 - DNA, 80 bp, synthetic construct; identical to SEQ ID NO: 15358
  source 1..80: mol_type = other DNA

SEQ ID NO: 45975 - DNA, 80 bp, synthetic construct
  source 1..80: mol_type = other DNA
tgaacacatctggggaatcccagtctgtcatttactggctttacaagttgagggaagggagctgatctctctgagcctta

SEQ ID NO: 45976 - DNA, 80 bp, synthetic construct
  source 1..80: mol_type = other DNA
tagacaacattcattatcattactcttcttctcatgtataaggagatgctcgaaaaggctatctccatgtagtaggattt

SEQ ID NO: 45977 - DNA, 80 bp, synthetic construct; identical to SEQ ID NO: 15359
  source 1..80: mol_type = other DNA

SEQ ID NO: 45978 - DNA, 80 bp, synthetic construct
  source 1..80: mol_type = other DNA
atagacgaggcagtacaattaacccagaaatagatgaaattattttcaacctctaattagtatattgttaattgaaacaa

SEQ ID NO: 45979 - DNA, 80 bp, synthetic construct
  source 1..80: mol_type = other DNA
cctgaatctgacacctcccccaaaactgagctcttcaatccatcatcctaactccttttttataaactacaaatctcaaa

SEQ ID NO: 45980 - DNA, 80 bp, synthetic construct
  source 1..80: mol_type = other DNA
ttccaatagaattcaggtccatgaatgtggattctttcttgaagttttgctgaaaagtaaaatagaaatgaaaattataa

SEQ ID NO: 45981 - DNA, 80 bp, synthetic construct; identical to SEQ ID NO: 15360
  source 1..80: mol_type = other DNA

SEQ ID NO: 45982 - DNA, 80 bp, synthetic construct
  source 1..80: mol_type = other DNA
ccaaagtgctgggattacaggcatgagccactatgcccagccttcaagtcatgttttttaaaaaacaaaataaggccgtg

SEQ ID NO: 45983 - DNA, 80 bp, synthetic construct
  source 1..80: mol_type = other DNA
agctacttgggaggctgaggcaggagaatcatttgaacctgcgaggcggaggttgcagtgacccgagctagcaccactgc

SEQ ID NO: 45984 - DNA, 80 bp, synthetic construct
  source 1..80: mol_type = other DNA
gatcctcacaccccatctacttttttttttttaactcatatctatttatcatccaaccctaccactccaaggaatttgcc

SEQ ID NO: 45985 - DNA, 80 bp, synthetic construct; identical to SEQ ID NO: 15361
  source 1..80: mol_type = other DNA

SEQ ID NO: 45986 - DNA, 80 bp, synthetic construct
  source 1..80: mol_type = other DNA
tatccattgcatatattccctttcagtaattcctttttatactgcaggtctgttacccttaacaccagactatgagagta

SEQ ID NO: 45987 - DNA, 80 bp, synthetic construct
  source 1..80: mol_type = other DNA
atgtttttaatgaattctgaaatcttggacttaattatgaaaaacacatcctaggctgcatgtggcagctcacacctata

SEQ ID NO: 45988 - DNA, 80 bp, synthetic construct
  source 1..80: mol_type = other DNA
cgacagagccagaccttatgtcaggagggggaaaaaaaatcatcctaaaagactaaaagaatatggcttatgccataggc

SEQ ID NO: 45989 - DNA, 80 bp, synthetic construct; identical to SEQ ID NO: 15362
  source 1..80: mol_type = other DNA

SEQ ID NO: 45990 - DNA, 80 bp, synthetic construct
  source 1..80: mol_type = other DNA
atcttgcaatatgcaaaggagacccaaaatggggtagaggaggtcaatggagttgggaaattttgtgccagccagaggca

SEQ ID NO: 45991 - DNA, 80 bp, synthetic construct
  source 1..80: mol_type = other DNA
tcatacacactggagtgctctgtaagaagacgatagaaaatcacaagtaaaaataagaaactaaagcagataattcaatg

SEQ ID NO: 45992 - DNA, 80 bp, synthetic construct
  source 1..80: mol_type = other DNA
gtgagcaactgcacctggtcagaaaaataataatatttttgttagttaactccctgccatacctctgtaatgctttctta

SEQ ID NO: 45993 - DNA, 80 bp, synthetic construct; identical to SEQ ID NO: 15363
  source 1..80: mol_type = other DNA

SEQ ID NO: 45994 - DNA, 80 bp, synthetic construct
  source 1..80: mol_type = other DNA
cagacgattgccatgaaaaagttatagtccatgaataattgcatgttacatgtataatcagctatagtcagacgagaatt

SEQ ID NO: 45995 - DNA, 80 bp, synthetic construct
  source 1..80: mol_type = other DNA
cgctccctcttttcctctctgtttttttctggaacttgatccttctctgccttcagcattctttccattctgcatcacag

SEQ ID NO: 45996 - DNA, 80 bp, synthetic construct
  source 1..80: mol_type = other DNA
ttttcctctctgccttctctgttagacaatgatattatcatctatccattctcccatgctggaagtgcagaagtcacatt

SEQ ID NO: 45997 - DNA, 80 bp, synthetic construct; identical to SEQ ID NO: 15364
  source 1..80: mol_type = other DNA

SEQ ID NO: 45998 - DNA, 80 bp, synthetic construct
  source 1..80: mol_type = other DNA
gattgagaccatccttgctaacacagggaaaccccgtctctactaaaaatacagaaaaaaagtagccaggcgtggtggcg

SEQ ID NO: 45999 - DNA, 80 bp, synthetic construct
  source 1..80: mol_type = other DNA
agaaagcaaaggatatggaaaaaactcagctttcctttaaacaactatgactgttacagcattcactataacgagaaaat

SEQ ID NO: 46000 - DNA, 80 bp, synthetic construct
  source 1..80: mol_type = other DNA
ccacaatacaggctagactcctctttagtttcagatggagtctagagaaatgggagaaaagcctcaaatacttgtaactc

SEQ ID NO: 46001 - DNA, 80 bp, synthetic construct; identical to SEQ ID NO: 15365
  source 1..80: mol_type = other DNA

SEQ ID NO: 46002 - DNA, 80 bp, synthetic construct
  source 1..80: mol_type = other DNA
tttatttaaattccattcaacaagcatatgctggtgcccatcttgtgctgggttctatgctgaatggattatttttttct

SEQ ID NO: 46003 - DNA, 80 bp, synthetic construct
  source 1..80: mol_type = other DNA
catattttgaagttgtcttctttgttgttccttccgtattaaagaaatacctagggctatactatgatttgaagtcgcta

SEQ ID NO: 46004 - DNA, 80 bp, synthetic construct
  source 1..80: mol_type = other DNA
aaatctctagctcctgagatggatgctctgatgctgttttcaaagtctttagtccaaaaaaataaatattctatatattt

SEQ ID NO: 46005 - DNA, 80 bp, synthetic construct; identical to SEQ ID NO: 15366
  source 1..80: mol_type = other DNA

SEQ ID NO: 46006 - DNA, 80 bp, synthetic construct
  source 1..80: mol_type = other DNA
gctttacaaaagtgcataccagaaaacaagagaaataaagaagaaggcaggccaatagaaaccaagagagaatgaaacca

SEQ ID NO: 46007 - DNA, 80 bp, synthetic construct
  source 1..80: mol_type = other DNA
tcatggttctgagaaagcaacttccccttgctctgtctgaaagatactcatggtttgtcatcgggggacccgaaggaaga

SEQ ID NO: 46008 - DNA, 80 bp, synthetic construct
  source 1..80: mol_type = other DNA
atcgagaccatcctggctacgacacggtgaaaccccgtctctactaaaaatacaaaaaattagccgggcttggtggcgga

SEQ ID NO: 46009 - DNA, 80 bp, synthetic construct; identical to SEQ ID NO: 15367
  source 1..80: mol_type = other DNA

SEQ ID NO: 46010 - DNA, 80 bp, synthetic construct
  source 1..80: mol_type = other DNA
aataaatgtaaattaaatgtttcacaacattttatagcaaagtgagaagtcctccattctccccttcactaagctagtgg

SEQ ID NO: 46011 - DNA, 80 bp, synthetic construct
  source 1..80: mol_type = other DNA
cctgggatatcagaatggaatagatggataataatggatcaattaactcaggtagatactcatttgaccatattctttgc

SEQ ID NO: 46012 - DNA, 80 bp, synthetic construct
  source 1..80: mol_type = other DNA
actctagggaggatttttttctcgactaaaaaggttaatttctatgtgagggtaagtggacataaaagtcatggcaaatg

SEQ ID NO: 46013 - DNA, 80 bp, synthetic construct; identical to SEQ ID NO: 15368
  source 1..80: mol_type = other DNA

SEQ ID NO: 46014 - DNA, 80 bp, synthetic construct
  source 1..80: mol_type = other DNA
aaacagaagtttacaaaacccatcaggtgtacagaggtaatttatttagtctggcttcacttaacacaaataggtcaaaa

SEQ ID NO: 46015 - DNA, 80 bp, synthetic construct
  source 1..80: mol_type = other DNA
tcacaatgccttttccccaacacttctggaagttccataaaaatcactctaatgggtcaaacatcgatggttctcagaag

SEQ ID NO: 46016 - DNA, 80 bp, synthetic construct
  source 1..80: mol_type = other DNA
aagatggagttcagtggctaccataggaagggtcaatatcaggatggcctgtgagtccagatgagtctctctttgcccat

SEQ ID NO: 46017 - DNA, 80 bp, synthetic construct; identical to SEQ ID NO: 15369
  source 1..80: mol_type = other DNA

SEQ ID NO: 46018 - DNA, 80 bp, synthetic construct
  source 1..80: mol_type = other DNA
ttttctaattttagtagagacagggttgaccaggctggtctccttcccctgccctcaagtgatccattcacctcagcctc

SEQ ID NO: 46019 - DNA, 80 bp, synthetic construct
  source 1..80: mol_type = other DNA
agatcgttgagcccccttttatatgttgctgtgatccaaagcatgagtaactggggtaagaatgctggctatctttagag

SEQ ID NO: 46020 - DNA, 80 bp, synthetic construct
  source 1..80: mol_type = other DNA
cattgtggaatggctagcatgctaattaactatgcataaccacgtttcctttcaccatgttgaaccctgacataattttt

SEQ ID NO: 46021 - DNA, 80 bp, synthetic construct; identical to SEQ ID NO: 15370
  source 1..80: mol_type = other DNA

SEQ ID NO: 46022 - DNA, 80 bp, synthetic construct
  source 1..80: mol_type = other DNA
aatcttaaaaccacagttttaattttgcttttttgttggtttttgtactttggagtatttgtctacattatcctttttat

SEQ ID NO: 46023 - DNA, 80 bp, synthetic construct
  source 1..80: mol_type = other DNA
atgcagcttctgcaagtattgcagaccagatcaggtatcagaattttaaagcttcagtaacaaagctgtcctattgaccc

SEQ ID NO: 46024 - DNA, 80 bp, synthetic construct
  source 1..80: mol_type = other DNA
gactcaacctcgtgtgacggaaaaacagtaaacacaagctaacatttaaaaggaattgatggcaccgtgtaaatcagaag

SEQ ID NO: 46025 - DNA, 80 bp, synthetic construct; identical to SEQ ID NO: 15371
  source 1..80: mol_type = other DNA

SEQ ID NO: 46026 - DNA, 80 bp, synthetic construct
  source 1..80: mol_type = other DNA
tggaatgttaaaaaaaaaatgatgtccaatgtttacaaggtatacttctgccatcagatataatgtattattgcaagtgt

SEQ ID NO: 46027 - DNA, 80 bp, synthetic construct
  source 1..80: mol_type = other DNA
tgttcgtaacagttcatttgtaacatccaaaagttgtatgcaactcagttcccattaataggtgaatggattaaaaaaaa

SEQ ID NO: 46028 - DNA, 80 bp, synthetic construct; identical to SEQ ID NO: 15372
  source 1..80: mol_type = other DNA

SEQ ID NO: 46029 - DNA, 80 bp, synthetic construct
  source 1..80: mol_type = other DNA
aactttgccattgtagcatcaaaacacttatgggtttttaaataggtgtatttatttataaaacaggcaacggtccaatt

SEQ ID NO: 46030 - DNA, 80 bp, synthetic construct
  source 1..80: mol_type = other DNA
gcaaacacacttgggttcctcatcatggattggatagagtctaatcttaccatggcatacaagttcttcatgtactggcc

SEQ ID NO: 46031 - DNA, 80 bp, synthetic construct
  source 1..80: mol_type = other DNA
tgtgctttgagattaaacttgcacttccaggatgccttccacatcttactcctactattccctttgccttatgctctgtg

SEQ ID NO: 46032 - DNA, 80 bp, synthetic construct
  source 1..80: mol_type = other DNA
gctgcccctactatttgactggaatctccctctttctattagacctatcacaatgactgacacattacaaaaaaaaaaat

SEQ ID NO: 46033 - DNA, 80 bp, synthetic construct; identical to SEQ ID NO: 15373
  source 1..80: mol_type = other DNA

SEQ ID NO: 46034 - DNA, 80 bp, synthetic construct
  source 1..80: mol_type = other DNA
aagcagcatcgttgctattattgcagctatttagccaataggtacatcattgacatcattgtaaatagccaagctgatac

SEQ ID NO: 46035 - DNA, 80 bp, synthetic construct
  source 1..80: mol_type = other DNA
ttacactagtgtcttttactgattctcactcttcttcctttatctcctagatacaccaagatgaagactgccaccaacat

SEQ ID NO: 46036 - DNA, 80 bp, synthetic construct
  source 1..80: mol_type = other DNA
catagattactataacatgttcaccagcatattcaccctctgcaccatgagtgttgatcgatacattgcagtctgccacc

SEQ ID NO: 46037 - DNA, 80 bp, synthetic construct; identical to SEQ ID NO: 15374
  source 1..80: mol_type = other DNA

SEQ ID NO: 46038 - DNA, 80 bp, synthetic construct
  source 1..80: mol_type = other DNA
ccaagagtaattggagcttaaacccaaagagtattacactgaggcttgtttaaaattatcaagtggctgactacatggca

SEQ ID NO: 46039 - DNA, 80 bp, synthetic construct
  source 1..80: mol_type = other DNA
atttttgttccctgaacgaaagcttaatgtgatcgaagtggactgcaaaatgggaaatttagaaaaaaacaaaaaacatt

SEQ ID NO: 46040 - DNA, 80 bp, synthetic construct
  source 1..80: mol_type = other DNA
aattcctttcttctaggttccatagattgtacactaacattctctcatccaacctggtactgggaaaacctgctgaagat

SEQ ID NO: 46041 - DNA, 80 bp, synthetic construct
  source 1..80: mol_type = other DNA
gtgttcatcgtctgctggactcccattcacatttacgtcatcattaaagccttggttacaatcccagaaactacgttcca

SEQ ID NO: 46042 - DNA, 80 bp, synthetic construct; identical to SEQ ID NO: 15375
  source 1..80: mol_type = other DNA

SEQ ID NO: 46043 - DNA, 80 bp, synthetic construct
  source 1..80: mol_type = other DNA
agggaagaggggaagcaaattgtggttctagtgttagagaagaggtttgttatataaactgtgttctttatatttgactg

SEQ ID NO: 46044 - DNA, 80 bp, synthetic construct
  source 1..80: mol_type = other DNA
atataattcatagatgttgctgcaatacccctcttatttctcaaaagccagtcttgctctggttctgtgattaaagagag

SEQ ID NO: 46045 - DNA, 80 bp, synthetic construct; identical to SEQ ID NO: 15376
  source 1..80: mol_type = other DNA

SEQ ID NO: 46046 - DNA, 80 bp, synthetic construct
  source 1..80: mol_type = other DNA
tatacacactattataatcatatgggaaatcaacaaggaggaaagagaaaaggctgtctccaagttagtattacttgatt

SEQ ID NO: 46047 - DNA, 80 bp, synthetic construct
  source 1..80: mol_type = other DNA
cttcctatgaagtaaaggctggagtcagaatcttggctaaagttcctagagtcaggcgtcaggactgtgaggacagatgg

SEQ ID NO: 46048 - DNA, 80 bp, synthetic construct
  source 1..80: mol_type = other DNA
ctttctaattgaccagaggactaatgtaatatggcccagatacatccgtcatgggcgacattaatcctcatacccctggt

SEQ ID NO: 46049 - DNA, 80 bp, synthetic construct
  source 1..80: mol_type = other DNA
tagagagcatgaggtaatgatggcagacccacttccagacaaagggaaattaacttattatgtctcagttctaattccat

SEQ ID NO: 46050 - DNA, 80 bp, synthetic construct; identical to SEQ ID NO: 15377
  source 1..80: mol_type = other DNA

SEQ ID NO: 46051 - DNA, 80 bp, synthetic construct
  source 1..80: mol_type = other DNA
tctttctcctttagtgcctacctataccttccctgtcttgctgggctctagagcaaggctgcttggttgtgtaccctgga

SEQ ID NO: 46052 - DNA, 80 bp, synthetic construct
  source 1..80: mol_type = other DNA
ttcggcattttcacatcagtatggctattgtacagccagatagaagagaaaagaagctaattggaggagttctgttccaa

SEQ ID NO: 46053 - DNA, 80 bp, synthetic construct
  source 1..80: mol_type = other DNA
aggctgccaggaaaagagggaaagatgctctgacatatttaaaaattaagataaatcaaagctccctttggctaatctcc

SEQ ID NO: 46054 - DNA, 80 bp, synthetic construct; identical to SEQ ID NO: 15378
  source 1..80: mol_type = other DNA

SEQ ID NO: 46055 - DNA, 80 bp, synthetic construct
  source 1..80: mol_type = other DNA
tttcaagcacattagtcaacttcatattctgcagatcagagatccaatatcaaaccttcccagggtgtctgtattctgac

SEQ ID NO: 46056 - DNA, 80 bp, synthetic construct
  source 1..80: mol_type = other DNA
caaatcattccaaaatgtagtggctagaagcaaccatttatttagtttacaattctgtagaacagccattggagctgggc

SEQ ID NO: 46057 - DNA, 80 bp, synthetic construct; identical to SEQ ID NO: 15379
  source 1..80: mol_type = other DNA

SEQ ID NO: 46058 - DNA, 80 bp, synthetic construct
  source 1..80: mol_type = other DNA
ttcctgagggcaggagccgtgtctgtcttgctctcccaagccagagtctagcacattaaaaagaaagtacttctggccag

SEQ ID NO: 46059 - DNA, 80 bp, synthetic construct
  source 1..80: mol_type = other DNA
agctatttgggaggctgagacaggagaatcgcttgaacctgggaggcagaggttgcagtgagcccaggtcgtgccattgc

SEQ ID NO: 46060 - DNA, 80 bp, synthetic construct
  source 1..80: mol_type = other DNA
ttcatcatgcaactgacgaacaacctaaatgactatgtaccctaaccctcttaccgtcagtaatgggaaaatattcaaaa

SEQ ID NO: 46061 - DNA, 80 bp, synthetic construct
  source 1..80: mol_type = other DNA
tgataaggagaccaagagattgattcagtgccctaaagaggtctttccctagctgagtatgaaaaaacaaaaaagatggt

SEQ ID NO: 46062 - DNA, 80 bp, synthetic construct; identical to SEQ ID NO: 15380
  source 1..80: mol_type = other DNA

SEQ ID NO: 46063 - DNA, 80 bp, synthetic construct
  source 1..80: mol_type = other DNA
cgcccaggctggagtgcagtggtgcgatctcagctcactgcaacctcttcctcctggttcaaacgattctcctgcctcag

SEQ ID NO: 46064 - DNA, 80 bp, synthetic construct
  source 1..80: mol_type = other DNA
agacgtgagcccctgtgtctggcctctaacgcattttatatcttgacacgtaggtgattattgaaaacgtttagcattat

SEQ ID NO: 46065 - DNA, 80 bp, synthetic construct
  source 1..80: mol_type = other DNA
ccttacatttatatggcaatgtacagattcaaaagtgcttttatgggcattatcacatctgcttcctataacaactctga

SEQ ID NO: 46066 - DNA, 80 bp, synthetic construct; identical to SEQ ID NO: 15381
  source 1..80: mol_type = other DNA

SEQ ID NO: 46067 - DNA, 80 bp, synthetic construct
  source 1..80: mol_type = other DNA
ctccaaagtagcacatttactgttttgtctaacctgtctagccatttcagtcaagctgattgacatgaatgttttcacca

SEQ ID NO: 46068 - DNA, 80 bp, synthetic construct
  source 1..80: mol_type = other DNA
tggcatgtcctgctaattcctttccattaatatggcaagtccagtcctaaaccctctaattactattattaaagcacttt

SEQ ID NO: 46069 - DNA, 80 bp, synthetic construct; identical to SEQ ID NO: 15382
  source 1..80: mol_type = other DNA

SEQ ID NO: 46070 - DNA, 80 bp, synthetic construct
  source 1..80: mol_type = other DNA
atataggcatgtctctttttgcatgtatggaattagagtaaatgtaggtttaaaattaatatttcatgcatagcagaaga

SEQ ID NO: 46071 - DNA, 80 bp, synthetic construct
  source 1..80: mol_type = other DNA
gatatggattgtaacctctactctatagttgaggaaactaatgtttaaggaagtaacttgcccaaggtcatagttaaaat

SEQ ID NO: 46072 - DNA, 80 bp, synthetic construct
  source 1..80: mol_type = other DNA
ttccatcttataacccaggcttttaatcaatgtgccctgatatattccagtctatttttcactcttctcagcatggtctc

SEQ ID NO: 46073 - DNA, 80 bp, synthetic construct; identical to SEQ ID NO: 15383
  source 1..80: mol_type = other DNA

SEQ ID NO: 46074 - DNA, 80 bp, synthetic construct
  source 1..80: mol_type = other DNA
ccttcacactaaaggaaaggatatttgaatgtatatgacctatcacaaaccagctgttaacttttggatgtcattctgat

SEQ ID NO: 46075 - DNA, 80 bp, synthetic construct
  source 1..80: mol_type = other DNA
tttccctggaaatcaagaatccaaagccacaatttcatcagtcctctcccttcacactcagaatttgtttctttatagag

SEQ ID NO: 46076 - DNA, 80 bp, synthetic construct
  source 1..80: mol_type = other DNA
ctgacgaaagtcgatctctgcaaaaaacaaacaaacaaaaaaagccaggcgcggtggcatgcacctgtaggtctagctac

SEQ ID NO: 46077 - DNA, 80 bp, synthetic construct
  source 1..80: mol_type = other DNA
ggaggaagagagcgagagagagagagagagagaaagaaagagaaagaaagagaaagaaagaaagtaaagaaagaaagaga

SEQ ID NO: 46078 - DNA, 80 bp, synthetic construct; identical to SEQ ID NO: 15384
  source 1..80: mol_type = other DNA

SEQ ID NO: 46079 - DNA, 80 bp, synthetic construct
  source 1..80: mol_type = other DNA
atatcaaatatatatcatatcaggatatatcataatatattatatattatcatatgatatatatcataacatattatata

SEQ ID NO: 46080 - DNA, 80 bp, synthetic construct
  source 1..80: mol_type = other DNA
gatatatatcatgatatatatcatattatatattatcatattatgatatatatattatatattatcatattatgacatat

SEQ ID NO: 46081 - DNA, 80 bp, synthetic construct; identical to SEQ ID NO: 15385
  source 1..80: mol_type = other DNA

SEQ ID NO: 46082 - DNA, 80 bp, synthetic construct
  source 1..80: mol_type = other DNA
acatgcaaagaaataaatagcctgataaattggctccatatcattatcagataccaaataaatataggctgaaaatttca

SEQ ID NO: 46083 - DNA, 80 bp, synthetic construct
  source 1..80: mol_type = other DNA
ctgttttctatacagacaccagaaatcccaagaatactagatatctacaaaatctagcaatccctacctaggttctttct

SEQ ID NO: 46084 - DNA, 80 bp, synthetic construct
  source 1..80: mol_type = other DNA
tctatacctaagtcccttgaagtgtaaaaagtaaatgatttattatgatgaaatggattcctttaagatgtaatagaaaa

SEQ ID NO: 46085 - DNA, 80 bp, synthetic construct
  source 1..80: mol_type = other DNA
accagaaaattcagtgaaaggtggatgtgggatgagatatgactactgtacatttgacaatacaatcatctatttaactc

SEQ ID NO: 46086 - DNA, 80 bp, synthetic construct; identical to SEQ ID NO: 15386
  source 1..80: mol_type = other DNA

SEQ ID NO: 46087 - DNA, 80 bp, synthetic construct
  source 1..80: mol_type = other DNA
gttcttcgaacactggaactgaaaaagaacactgcagactgtcttatccaaacatccttttcctataaatggagaaattg

SEQ ID NO: 46088 - DNA, 80 bp, synthetic construct
  source 1..80: mol_type = other DNA
ttaattttaaaattttcatcaggttaaggggaagcattacaattagataagaacagcagatgcaagataaaatcctaaaa

SEQ ID NO: 46089 - DNA, 80 bp, synthetic construct; identical to SEQ ID NO: 15387
  source 1..80: mol_type = other DNA

SEQ ID NO: 46090 - DNA, 80 bp, synthetic construct
  source 1..80: mol_type = other DNA
atgggctgaatgttcttgggcaagtttctaacaatctctgcttgcatttcctcatctgtaagaaaggtaataactgtagt

SEQ ID NO: 46091 - DNA, 80 bp, synthetic construct
  source 1..80: mol_type = other DNA
agcatttaaaaggaatgaaataatgtaccaaaagagatcataaagtggactaacccaagccttctcaaccttggcgctag

SEQ ID NO: 46092 - DNA, 80 bp, synthetic construct
  source 1..80: mol_type = other DNA
tcctggagtggaggcaggcagcagaaatcagtcaagaaccattgatctaacctgtttaattttgttcaatagctggagaa

SEQ ID NO: 46093 - DNA, 80 bp, synthetic construct
  source 1..80: mol_type = other DNA
acactccatactcatggaagacaagagaaaggcacaattcttcaacccttatattacttcaagcttcttttagaaaaaaa

SEQ ID NO: 46094 - DNA, 80 bp, synthetic construct; identical to SEQ ID NO: 15388
  source 1..80: mol_type = other DNA

SEQ ID NO: 46095 - DNA, 80 bp, synthetic construct
  source 1..80: mol_type = other DNA
tagaacattactggacccggaaattaggtaaaccctataccaattgtgtttctaacaatagatttgacaagctcttacta

SEQ ID NO: 46096 - DNA, 80 bp, synthetic construct
  source 1..80: mol_type = other DNA
ttttacagttatttcttgatgatatgctcaacaaggggtgtattattcatgcctcccctttttagaccatacagggtaac

SEQ ID NO: 46097 - DNA, 80 bp, synthetic construct; identical to SEQ ID NO: 15389
  source 1..80: mol_type = other DNA

SEQ ID NO: 46098 - DNA, 80 bp, synthetic construct
  source 1..80: mol_type = other DNA
tcctgcctagctattaggggctcttgtgtttagggtagagagaagctcagtcagaaagcatcagtatggcgagggccatt

SEQ ID NO: 46099 - DNA, 80 bp, synthetic construct
  source 1..80: mol_type = other DNA
actaaattagaatgcttttcataaactggacaactgttggaactaagctgatatggggttgttagctgattgtaatgtgc

SEQ ID NO: 46100 - DNA, 80 bp, synthetic construct
  source 1..80: mol_type = other DNA
aagtgtaccatagtttttgaaacataatatttctctctctagtttcccatttttactaaagacaaatcatggtaaggctg

SEQ ID NO: 46101 - DNA, 80 bp, synthetic construct; identical to SEQ ID NO: 15390
  source 1..80: mol_type = other DNA

SEQ ID NO: 46102 - DNA, 80 bp, synthetic construct
  source 1..80: mol_type = other DNA
aatttctccaattgtgttgtattacaaaagaaaacagattcttattatgcctatgcaaataactatactaccataagtta

SEQ ID NO: 46103 - DNA, 80 bp, synthetic construct
  source 1..80: mol_type = other DNA
atgttctaagcaaagtttaaaagattagttttctattggtttactgaatttagttaactcctgttttgcttgacattcat

SEQ ID NO: 46104 - DNA, 80 bp, synthetic construct
  source 1..80: mol_type = other DNA
tgtggatgacaaaaagttttaggacagccactattaaagccacaattgataaggaaatttgcttacttctgtggcacaca

SEQ ID NO: 46105 - DNA, 80 bp, synthetic construct
  source 1..80: mol_type = other DNA
ttatgccaaataagtcaaatttcaccttttactattaatgctaaacctaagttttaataaaaccttatagacatatttac

SEQ ID NO: 46106 - DNA, 80 bp, synthetic construct; identical to SEQ ID NO: 15391
  source 1..80: mol_type = other DNA

SEQ ID NO: 46107 - DNA, 80 bp, synthetic construct
  source 1..80: mol_type = other DNA
aacttctatttttgatgaaaaccttggtaaatttgagattttagttgtgtgctaggtgtgaagcctggcccagaacactc

SEQ ID NO: 46108 - DNA, 80 bp, synthetic construct
  source 1..80: mol_type = other DNA
ttacacaacatttcttgcataaattccttttcacaaatcctttcatcactcacacagaatatctgaggcatttttggact

SEQ ID NO: 46109 - DNA, 80 bp, synthetic construct
  source 1..80: mol_type = other DNA
agctagggggcatggtaaattccacatatccccaggccttatctagaatttaatggctttagggtaggtagattgaacaa

SEQ ID NO: 46110 - DNA, 80 bp, synthetic construct; identical to SEQ ID NO: 15392
  source 1..80: mol_type = other DNA

SEQ ID NO: 46111 - DNA, 80 bp, synthetic construct
  source 1..80: mol_type = other DNA
agaatggggacaggaaaggggtctctggtgcctcctgtttttcccaaggagtccagactgttaagagtttgaatgtccgc

SEQ ID NO: 46112 - DNA, 80 bp, synthetic construct
  source 1..80: mol_type = other DNA
agagaaaggaaaatttcagacagtccgcagaggagaagagaatagacgtcttcactcagatattaaaccagaagtgactt

SEQ ID NO: 46113 - DNA, 80 bp, synthetic construct
  source 1..80: mol_type = other DNA
gagtttgcaaaggcttgtaactatttcatatgatttttagagctgactatgacatgaaccctaaaattcctgttcccttg

SEQ ID NO: 46114 - DNA, 80 bp, synthetic construct; identical to SEQ ID NO: 15393
  source 1..80: mol_type = other DNA

SEQ ID NO: 46115 - DNA, 80 bp, synthetic construct
  source 1..80: mol_type = other DNA
cccttttgccagcatgccaggcttctgggttccctttccctgagcggccctagtgatccggcttgcggcaccatcgccta

SEQ ID NO: 46116 - DNA, 80 bp, synthetic construct
  source 1..80: mol_type = other DNA
gacttgcagtttcaacacgtgctctctgggcaaaacagttgccctgagtaacagaaaagataggaaaggaaaaggagaga

SEQ ID NO: 46117 - DNA, 80 bp, synthetic construct
  source 1..80: mol_type = other DNA
tagggaggaaaaagctccccatgtcccgcgatcctgtacatgtccaaccctgccatccacagccatcagcaaagagtgca

SEQ ID NO: 46118 - DNA, 80 bp, synthetic construct; identical to SEQ ID NO: 15394
  source 1..80: mol_type = other DNA

SEQ ID NO: 46119 - DNA, 80 bp, synthetic construct
  source 1..80: mol_type = other DNA
acctgttggaattataggtcacatcaagagaattctagtgtctagaaccaaagaaatgttagcctcactctaatagacaa

SEQ ID NO: 46120 - DNA, 80 bp, synthetic construct
  source 1..80: mol_type = other DNA
aattggactcaaccaacatagcccgacttattaaagccaatgggtagaggttacagagaaagctattccagtacaaccaa

SEQ ID NO: 46121 - DNA, 80 bp, synthetic construct
  source 1..80: mol_type = other DNA
ttgcctacatgaaaaggacactgagataattcagatgttaagatttgatgattagggaatcagagggaatgaccctttga

SEQ ID NO: 46122 - DNA, 80 bp, synthetic construct; identical to SEQ ID NO: 15395
  source 1..80: mol_type = other DNA

SEQ ID NO: 46123 - DNA, 80 bp, synthetic construct
  source 1..80: mol_type = other DNA
taaaggtttcactaagcaatgtttaaaagccactgtagatcatcagtcccagttaggcatgaatctattcaaaattcaat

SEQ ID NO: 46124 - DNA, 80 bp, synthetic construct
  source 1..80: mol_type = other DNA
ggttttcccttttgttttatttgggttttcacttttgttttactttgttttctggtgatattacaagaaaaaaatctatg

SEQ ID NO: 46125 - DNA, 80 bp, synthetic construct
  source 1..80: mol_type = other DNA
tacaatattttcccgtgaaagaatataagattggaagccagagagcctgggttctgctgctagccctaatggagaccatt

SEQ ID NO: 46126 - DNA, 80 bp, synthetic construct
  source 1..80: mol_type = other DNA
aagtgggtggatcacgaggtcaggaaatcgagatcatcctggctaacatggtgaaaccccatctctactaaaaattcaaa

SEQ ID NO: 46127 - DNA, 80 bp, synthetic construct; identical to SEQ ID NO: 15396
  source 1..80: mol_type = other DNA

SEQ ID NO: 46128 - DNA, 80 bp, synthetic construct
  source 1..80: mol_type = other DNA
ttttgaactaccagattattctacctctccttgaattcttctttgctgaagtcggagcccttgtactatagattccatat

SEQ ID NO: 46129 - DNA, 80 bp, synthetic construct
  source 1..80: mol_type = other DNA
tggctcaaactctgattggcttcaaaagtacccaagcctgttattgccttcaattgtaactttgaatggcatcacaaaga

SEQ ID NO: 46130 - DNA, 80 bp, synthetic construct; identical to SEQ ID NO: 15397
  source 1..80: mol_type = other DNA

SEQ ID NO: 46131 - DNA, 80 bp, synthetic construct
  source 1..80: mol_type = other DNA
agtgcagtggtgccatctcggctcactgcaagctccgcctcccgagttcatgccattctcctgcctcagcttcctgagta

SEQ ID NO: 46132 - DNA, 80 bp, synthetic construct
  source 1..80: mol_type = other DNA
cgcctggccaaaaactatagtttaaaaaattgttgacaaaaatagaaaaccgacagcagagagttgtgttacatctatgt

SEQ ID NO: 46133 - DNA, 80 bp, synthetic construct
  source 1..80: mol_type = other DNA
aaaggagatatcttagcaagcaagtagcttggcttttcacaattttatgggtgctagaaatagcatgactcagtggacca

SEQ ID NO: 46134 - DNA, 80 bp, synthetic construct; identical to SEQ ID NO: 15398
  source 1..80: mol_type = other DNA

SEQ ID NO: 46135 - DNA, 80 bp, synthetic construct
  source 1..80: mol_type = other DNA
agtggactgcctctcccaataattcacattcaacctagaatattcttggctgaacttaaatttttatacgattatgccac

SEQ ID NO: 46136 - DNA, 80 bp, synthetic construct
  source 1..80: mol_type = other DNA
cgacccaattaaataagtcacagagaagactaataggtcaaatttcagataagcacctagcttcctttcttatggtatgc

SEQ ID NO: 46137 - DNA, 80 bp, synthetic construct
  source 1..80: mol_type = other DNA
aatcagggagctaagactgacctgctgatcttctatggtttgttctgtctcattggctagggtagctaaacttaagaata

SEQ ID NO: 46138 - DNA, 80 bp, synthetic construct
  source 1..80: mol_type = other DNA
aacaaaggaaataaaatccaaagagtggcgccattgccaattattgcaaggactcaaagatgaaccaaatagcaacctcc

SEQ ID NO: 46139 - DNA, 80 bp, synthetic construct; identical to SEQ ID NO: 15399
  source 1..80: mol_type = other DNA

SEQ ID NO: 46140 - DNA, 80 bp, synthetic construct
  source 1..80: mol_type = other DNA
accatgtgattattttgccaagtgagaggctgggattcagagacaaaaagatcattcattattccctcctctgagcacct

SEQ ID NO: 46141 - DNA, 80 bp, synthetic construct
  source 1..80: mol_type = other DNA
acactgacccacgtgtcacctgcagcttaggtccccagtcatatatggcagactttctaatcaacttgtacataggactc

SEQ ID NO: 46142 - DNA, 80 bp, synthetic construct; identical to SEQ ID NO: 15400
  source 1..80: mol_type = other DNA

SEQ ID NO: 46143 - DNA, 80 bp, synthetic construct
  source 1..80: mol_type = other DNA
ccagtaaacatgttttggagggtcagccagggaaggggtcttaatctttgggtgcaaaagggattgagaaaaatacatgg

SEQ ID NO: 46144 - DNA, 80 bp, synthetic construct
  source 1..80: mol_type = other DNA
gcctccagattcccattagttttttttttcactgaccatacaaggctgctacattgagatattacatttttcattagtcc

SEQ ID NO: 46145 - DNA, 80 bp, synthetic construct
  source 1..80: mol_type = other DNA
tgcatccttctatccctctctacaaatggctcttccaatcaaaaaaatctctcttgtacatcatgaacatttacagaaca

SEQ ID NO: 46146 - DNA, 80 bp, synthetic construct; identical to SEQ ID NO: 15401
  source 1..80: mol_type = other DNA

SEQ ID NO: 46147 - DNA, 80 bp, synthetic construct
  source 1..80: mol_type = other DNA
ccaaaaatacaaaaattagccaggtgtggtggtgcatgtctgtggtcccagctactcgggagactgaggtgggagaattg

SEQ ID NO: 46148 - DNA, 80 bp, synthetic construct
  source 1..80: mol_type = other DNA
caggtgtaatgcctctgattcctcttgggaatgaagagagcttgtccttaaaggagtctaaatcaggatatagaagttta

SEQ ID NO: 46149 - DNA, 80 bp, synthetic construct
  source 1..80: mol_type = other DNA
atctccacaaaggaatctgtttctataaaggaacatagagtttcatctgtgtaaacaactaactgcctccctagggccca

SEQ ID NO: 46150 - DNA, 80 bp, synthetic construct
  source 1..80: mol_type = other DNA
tggtttttctcatcctgggctttgttttggattgcagagaccttacctggtttagggagtggtgtctttatcctagacat

SEQ ID NO: 46151 - DNA, 80 bp, synthetic construct; identical to SEQ ID NO: 15402
  source 1..80: mol_type = other DNA

SEQ ID NO: 46152 - DNA, 80 bp, synthetic construct
  source 1..80: mol_type = other DNA
atgcttgtaattccagctactcaggaggctgaggcataagaattgcttgaatctgggaggtggaggttgcagtcaggcaa

SEQ ID NO: 46153 - DNA, 80 bp, synthetic construct
  source 1..80: mol_type = other DNA
ctatctcaatgacataatttgcacagtgttttaaagtataaggtcccacatgagacagccttggttctgcatgctctaag

SEQ ID NO: 46154 - DNA, 80 bp, synthetic construct
  source 1..80: mol_type = other DNA
atacatttgtaacttacaacttgacaccgttgtgctttcctccctaatggaacccagaatgttctctccatcctccaccc

SEQ ID NO: 46155 - DNA, 80 bp, synthetic construct; identical to SEQ ID NO: 15403
  source 1..80: mol_type = other DNA

SEQ ID NO: 46156 - DNA, 80 bp, synthetic construct
  source 1..80: mol_type = other DNA
ctataggtgccaaaattagacaaaagacccaggcaattgactactcacagcacagcaaacagcagaagctttagcataat

SEQ ID NO: 46157 - DNA, 80 bp, synthetic construct
  source 1..80: mol_type = other DNA
catggtcagtgctgtgctcgcctgtgctttcttaattgcctgtgtgaccagctacagaaatgatcagagtcagaggacag

SEQ ID NO: 46158 - DNA, 80 bp, synthetic construct
  source 1..80: mol_type = other DNA
atggtgtgtgtgtgtgtgtgtgtgtgtgtgtgtatgagagagaaaaaaagagagaaaaagcagatggcaaagcacatgga

SEQ ID NO: 46159 - DNA, 80 bp, synthetic construct; identical to SEQ ID NO: 15404
  source 1..80: mol_type = other DNA

SEQ ID NO: 46160 - DNA, 80 bp, synthetic construct
  source 1..80: mol_type = other DNA
acatcgtttttctttcaaaattttgatcaagtcataaatgatttgaggctaaagagggaggaagagggtaaaaaaagggg

SEQ ID NO: 46161 - DNA, 80 bp, synthetic construct
  source 1..80: mol_type = other DNA
cttgacatttaagaaaaactgaggcttgcaggtgaaagtatacatgaaggtcttcaatgcagttcttacgagcagaagat

SEQ ID NO: 46162 - DNA, 80 bp, synthetic construct
  source 1..80: mol_type = other DNA
gctcaacaaatgtgtgttgcaaccgtatctgaaatgttcactgtctttgctctttctctcctttcagctagaaaatctgg

SEQ ID NO: 46163 - DNA, 80 bp, synthetic construct; identical to SEQ ID NO: 15405
  source 1..80: mol_type = other DNA

SEQ ID NO: 46164 - DNA, 80 bp, synthetic construct
  source 1..80: mol_type = other DNA
ccgtagtaacacataaagtaaatgctacctctgatcaaagcaccttgaatggaaggtccgagtctttttagtgttttgca

SEQ ID NO: 46165 - DNA, 80 bp, synthetic construct
  source 1..80: mol_type = other DNA
gaaaggtaatctgaaacacagtcatgtgtcagctgtagaaaggttgattctcatgcactgcaaatacttccaaagagtca

SEQ ID NO: 46166 - DNA, 80 bp, synthetic construct
  source 1..80: mol_type = other DNA
ctcactggtttctccatactgcaggctccccacatattattttctttttttaactcagctcagaatccttatgccttttg

SEQ ID NO: 46167 - DNA, 80 bp, synthetic construct
  source 1..80: mol_type = other DNA
gaaatattaacaatggcccaaaaatattttcctgaagattgtgtttatataatgtcatcaccaatattttggtctttttg

SEQ ID NO: 46168 - DNA, 80 bp, synthetic construct; identical to SEQ ID NO: 15406
  source 1..80: mol_type = other DNA

SEQ ID NO: 46169 - DNA, 80 bp, synthetic construct
  source 1..80: mol_type = other DNA
atggatcagaataactgaatttactctcagatctattggctatagttatgtggactcaacccacgtatccagtagatggg

SEQ ID NO: 46170 - DNA, 80 bp, synthetic construct
  source 1..80: mol_type = other DNA
taaaaagatttagaatgttaaataagtgtactagggtgtatatatttacatatatacactactagagcttccaaaagtaa

SEQ ID NO: 46171 - DNA, 80 bp, synthetic construct; identical to SEQ ID NO: 15407
  source 1..80: mol_type = other DNA

SEQ ID NO: 46172 - DNA, 80 bp, synthetic construct
  source 1..80: mol_type = other DNA
gctagaaccaccttccaattccaaggcaaggagagacattacaaccctgactcaactggatgggctaaggtttctgataa

SEQ ID NO: 46173 - DNA, 80 bp, synthetic construct
  source 1..80: mol_type = other DNA
ttctagcttattgtgttccaagtagttagtggtttttctccttcagtctccactgttattttgctccttcatccctcttt

SEQ ID NO: 46174 - DNA, 80 bp, synthetic construct
  source 1..80: mol_type = other DNA
tttaaaataacctcttctaagacacggctatgagtaggtaagagagcattcattcccttcaataatatgactgtgttgat

SEQ ID NO: 46175 - DNA, 80 bp, synthetic construct
  source 1..80: mol_type = other DNA
gatatgaaatgtaagatacaaagaaaacacctctgcaaagattccgaccacatttatcaaaaagtccccaaagcattcaa

SEQ ID NO: 46176 - DNA, 80 bp, synthetic construct; identical to SEQ ID NO: 15408
  source 1..80: mol_type = other DNA

SEQ ID NO: 46177 - DNA, 80 bp, synthetic construct
  source 1..80: mol_type = other DNA
ggaagaaatattatcctcttcatagaaatatccaccagcagaaaattggtttctcaaggaatccctactgcccttgtaga

SEQ ID NO: 46178 - DNA, 80 bp, synthetic construct
  source 1..80: mol_type = other DNA
catagaacagggcatgcagattgtatttaagaccactgcaagtaaggtctaaggcaaaagtaaattaatgagtccaactc

SEQ ID NO: 46179 - DNA, 80 bp, synthetic construct
  source 1..80: mol_type = other DNA
tgctccagaaacaaaaccaaatgtggatagctttgtgagctgcagtgtgtggcaaatgttcaaccttttgttatgcaata

SEQ ID NO: 46180 - DNA, 80 bp, synthetic construct; identical to SEQ ID NO: 15409
  source 1..80: mol_type = other DNA

SEQ ID NO: 46181 - DNA, 80 bp, synthetic construct
  source 1..80: mol_type = other DNA
tatttgagtaacttctcttatctgaaaagctgtctgtacaactgcctctatctatgcagctatggggtgtctctaggcga

SEQ ID NO: 46182 - DNA, 80 bp, synthetic construct
  source 1..80: mol_type = other DNA
ttctaacagtgcagcagttatagtctgagttttctccaggctgctccatttttgcctgtagctatgatttttcaggcagc

SEQ ID NO: 46183 - DNA, 80 bp, synthetic construct
  source 1..80: mol_type = other DNA
cttgattatatgctaaacaaggggtggattattcatgggttttctgggaaaggagtgggcaattcccagaactgagggtt

SEQ ID NO: 46184 - DNA, 80 bp, synthetic construct; identical to SEQ ID NO: 15410
  source 1..80: mol_type = other DNA

SEQ ID NO: 46185 - DNA, 80 bp, synthetic construct
  source 1..80: mol_type = other DNA
taagggaggaaaaacagattgacagtggactaaaggtacttttgtagcaaggtactttccacacaatattgaataaatgc

SEQ ID NO: 46186 - DNA, 80 bp, synthetic construct
  source 1..80: mol_type = other DNA
atgcattttatacaaatttaatatactttttcaactcactttgcatttcctgttaccttgtactgagaacttcattaaaa

SEQ ID NO: 46187 - DNA, 80 bp, synthetic construct; identical to SEQ ID NO: 15411
  source 1..80: mol_type = other DNA

SEQ ID NO: 46188 - DNA, 80 bp, synthetic construct
  source 1..80: mol_type = other DNA
ggcaaggaaaaaagatgaaagcttactcatattaaccattctaccattggaattatttgccaacacaccttgctgctact

SEQ ID NO: 46189 - DNA, 80 bp, synthetic construct
  source 1..80: mol_type = other DNA
aagcagctacattagacagttttacagctctgtatttcaggaaaacttctgtcctgtgggagcaatacaaaactatacca

SEQ ID NO: 46190 - DNA, 80 bp, synthetic construct
  source 1..80: mol_type = other DNA
cagtaatactaattatatcccatgtaaggggctactgacaattttgatggtacctgaatttgcctctatcatgcatctca

SEQ ID NO: 46191 - DNA, 80 bp, synthetic construct
  source 1..80: mol_type = other DNA
aacctctgaagcaataaacctcttccattacacaggtttagattcagagttttcttgcttaagttccaactaaaagtatt

SEQ ID NO: 46192 - DNA, 80 bp, synthetic construct; identical to SEQ ID NO: 15412
  source 1..80: mol_type = other DNA

SEQ ID NO: 46193 - DNA, 80 bp, synthetic construct
  source 1..80: mol_type = other DNA
acagtggcgggatctcggctcactgcaagctccgcctcccgggttcacgccattctcctgcctcagcctcccaagtagct

SEQ ID NO: 46194 - DNA, 80 bp, synthetic construct
  source 1..80: mol_type = other DNA
ccggcccggctagacattttttgataaattcacagggttacaaaataccaaacggaaatgagataagtggtataaaccac

SEQ ID NO: 46195 - DNA, 80 bp, synthetic construct; identical to SEQ ID NO: 15413
  source 1..80: mol_type = other DNA

SEQ ID NO: 46196 - DNA, 80 bp, synthetic construct
  source 1..80: mol_type = other DNA
aatgtctcataggctcttcttccctggttccctcaggagctgggtttctgggttgcagaagtgcttttcatattctgtat

SEQ ID NO: 46197 - DNA, 80 bp, synthetic construct
  source 1..80: mol_type = other DNA
agtaatgcctcaaaggttctccaagcagaggtaaacatgtgggtcctgctggtgacatattagacttcttactttcccca

SEQ ID NO: 46198 - DNA, 80 bp, synthetic construct
  source 1..80: mol_type = other DNA
gtgcacgcctgtaatcccagctagtcgggaggctgaggcaggagaattgcttgaactggggaggcggaagttgcagtgag

SEQ ID NO: 46199 - DNA, 80 bp, synthetic construct; identical to SEQ ID NO: 15414
  source 1..80: mol_type = other DNA

SEQ ID NO: 46200 - DNA, 80 bp, synthetic construct
  source 1..80: mol_type = other DNA
gtttgttgtgtttaagacgttttacttgtccctgaaatgtttgtcatcacacagatacacgctcaggataagaactacca

SEQ ID NO: 46201 - DNA, 80 bp, synthetic construct
  source 1..80: mol_type = other DNA
caatatcctgactagcacaagaaatccataggttgattcttgttctcctgcatctctgcaggtggcaaacctgattccta

SEQ ID NO: 46202 - DNA, 80 bp, synthetic construct
  source 1..80: mol_type = other DNA
aactcaaaactcatttgctttatggaaattcatggcccttatttctcaagggaccagagaaaaccaataggcctactccc

SEQ ID NO: 46203 - DNA, 80 bp, synthetic construct
  source 1..80: mol_type = other DNA
ggctgggggaaaataacaataagaaaaactggtgtttacctgaagatctgcccagtgatttgtgtgttttcttaataaac

SEQ ID NO: 46204 - DNA, 80 bp, synthetic construct; identical to SEQ ID NO: 15415
  source 1..80: mol_type = other DNA

SEQ ID NO: 46205 - DNA, 80 bp, synthetic construct
  source 1..80: mol_type = other DNA
ttggttactgttttatcattgatcctgaagacagttgaagcaatcatactggttgttctcgaactagctggtttcccaga

SEQ ID NO: 46206 - DNA, 80 bp, synthetic construct
  source 1..80: mol_type = other DNA
tgcatagtgcacagagatctttgtaaaaaacaggaaattaatgttaaattggatctataaacataagtcaatttggctct

SEQ ID NO: 46207 - DNA, 80 bp, synthetic construct; identical to SEQ ID NO: 15416
  source 1..80: mol_type = other DNA

SEQ ID NO: 46208 - DNA, 80 bp, synthetic construct
  source 1..80: mol_type = other DNA
cttctatacaatgtaaggaatctatgaataacatcggcttctaaatcataagttgatttttaactactgggtttaggcca

SEQ ID NO: 46209 - DNA, 80 bp, synthetic construct
  source 1..80: mol_type = other DNA
tcaatgtcaacatcatatatgattggagacttccacataattgagttttagtgcccactgttacagaaaatcataatgga

SEQ ID NO: 46210 - DNA, 80 bp, synthetic construct
  source 1..80: mol_type = other DNA
caagcttttgaagactcctgtgatttttttaaatggctggtttggttgaagtttctcttatcagtcaggcactttgcatt

SEQ ID NO: 46211 - DNA, 80 bp, synthetic construct; identical to SEQ ID NO: 15417
  source 1..80: mol_type = other DNA

SEQ ID NO: 46212 - DNA, 80 bp, synthetic construct
  source 1..80: mol_type = other DNA
tggagtgcagtggctcaatcttggctcactgcaacctctgcctcccgggttcacaccattctcctgcttcagcctcctga

SEQ ID NO: 46213 - DNA, 80 bp, synthetic construct
  source 1..80: mol_type = other DNA
ctgcgcctggccagaaatgtttaaaatttcataaatcttgaatccataaaattcaatgctaccatttataatttaatact

SEQ ID NO: 46214 - DNA, 80 bp, synthetic construct
  source 1..80: mol_type = other DNA
gtatatccatataaaagcattagtaccattatatgaaagtatatatgccattccataaaaatatatctaccaatataaat

SEQ ID NO: 46215 - DNA, 80 bp, synthetic construct; identical to SEQ ID NO: 15418
  source 1..80: mol_type = other DNA

SEQ ID NO: 46216 - DNA, 80 bp, synthetic construct
  source 1..80: mol_type = other DNA
agattaggtgctctgtcacttgtcattacatttttttataacattaatgacacattttttgctatccaaatataatttcc

SEQ ID NO: 46217 - DNA, 80 bp, synthetic construct
  source 1..80: mol_type = other DNA
ttcagacattttaaacagactcctgcccacaaactatttttcctctccaggaataagaatggcaactgaattgttccttc

SEQ ID NO: 46218 - DNA, 80 bp, synthetic construct
  source 1..80: mol_type = other DNA
ctgcacgtagattcagtttgtatgccagggtgacattttaatttacagtagtccagacacctaaacaggacatagaaatg

SEQ ID NO: 46219 - DNA, 80 bp, synthetic construct
  source 1..80: mol_type = other DNA
tccccacatctgcttttcaaaaatatttgcctggaaacctgtatttcgcctatagagacaaatacatatattgtttgttg

SEQ ID NO: 46220 - DNA, 80 bp, synthetic construct; identical to SEQ ID NO: 15419
  source 1..80: mol_type = other DNA

SEQ ID NO: 46221 - DNA, 80 bp, synthetic construct
  source 1..80: mol_type = other DNA
taccagcatacataaacatattaggctgtattgtaagtttcctgcatgtaatatgtaatgtgtaattatatgtgataaat

SEQ ID NO: 46222 - DNA, 80 bp, synthetic construct
  source 1..80: mol_type = other DNA
aaataaagaagtgaactttctctcttcatgaattatttctatttttagaaccaaaatgtctctaaaccttgacaaccata

SEQ ID NO: 46223 - DNA, 80 bp, synthetic construct; identical to SEQ ID NO: 15420
  source 1..80: mol_type = other DNA

SEQ ID NO: 46224 - DNA, 80 bp, synthetic construct
  source 1..80: mol_type = other DNA
ccgggcatggtggcaggcacctgtagccccagctactcgggaggctgaggcaggagaatggtgtgaacccgggaggcgga

SEQ ID NO: 46225 - DNA, 80 bp, synthetic construct
  source 1..80: mol_type = other DNA
aaaagaaaaagctatgtccctatatgtaaaaatttcatctctacatggtattaccagatgtaatttcctgacacacagtt

SEQ ID NO: 46226 - DNA, 80 bp, synthetic construct
  source 1..80: mol_type = other DNA
cacctccagtcttaggtgatcataatgctagtgtgtgacatcttcaggtacacatatgcatgcatttgtctggagtattt

SEQ ID NO: 46227 - DNA, 80 bp, synthetic construct
  source 1..80: mol_type = other DNA
ccaatgtgtgttggtctgtttccaactgttgaatttttccattgatctgtccattctgttttagatactgtgcgtttgca

SEQ ID NO: 46228 - DNA, 80 bp, synthetic construct; identical to SEQ ID NO: 15421
  source 1..80: mol_type = other DNA

SEQ ID NO: 46229 - DNA, 80 bp, synthetic construct
  source 1..80: mol_type = other DNA
aaagatcactaggaggcaacatccatgcctaatttctgtcacctaaattcccaggtatctactctaaatacagagttata

SEQ ID NO: 46230 - DNA, 80 bp, synthetic construct
  source 1..80: mol_type = other DNA
gatttagtttgagaggcaggagggtgccctctctgaaatggtttatgtctgcaaagaagacttctgatgtgcaagaagag

SEQ ID NO: 46231 - DNA, 80 bp, synthetic construct; identical to SEQ ID NO: 15422
  source 1..80: mol_type = other DNA

SEQ ID NO: 46232 - DNA, 80 bp, synthetic construct
  source 1..80: mol_type = other DNA
gaagggaaaatgagaatagtagttaacccagttgtcaaaaatagctgacagaaactatctatttaaattaggtttcattt

SEQ ID NO: 46233 - DNA, 80 bp, synthetic construct
  source 1..80: mol_type = other DNA
tactatggaattcactggaggtgtcagaatatgagaacagatatcttcccttattaagtctatgtacccatcctaaagaa

SEQ ID NO: 46234 - DNA, 80 bp, synthetic construct
  source 1..80: mol_type = other DNA
gcaggcacctgtaatcccagctactcgggaggctgaggcagggagaatcgcttgaatctgagaggtggaggttgcagtga

SEQ ID NO: 46235 - DNA, 80 bp, synthetic construct; identical to SEQ ID NO: 15423
  source 1..80: mol_type = other DNA

SEQ ID NO: 46236 - DNA, 80 bp, synthetic construct
  source 1..80: mol_type = other DNA
tgccaaagctgctagtttcccattgaaactagaaatgtgttttctgaaaggaaagtatacccaaaacatcaagactgaga

SEQ ID NO: 46237 - DNA, 80 bp, synthetic construct
  source 1..80: mol_type = other DNA
atatcccagagagtcctgggtgatcacagggaaatggctgaatatgaatttgttgggtcctggccatcataaaggcaaaa

SEQ ID NO: 46238 - DNA, 80 bp, synthetic construct
  source 1..80: mol_type = other DNA
tacgaagaacactctgcccaaggtagaaggagagaagaaataagagaaactcctatgagaatgtgtgtatgatattaggc

SEQ ID NO: 46239 - DNA, 80 bp, synthetic construct
  source 1..80: mol_type = other DNA
gctgaatcatctagaaagagatgtcagatatatctaagtgattctgtagactgaactcatctaaatctctcatacccacc

SEQ ID NO: 46240 - DNA, 80 bp, synthetic construct; identical to SEQ ID NO: 15424
  source 1..80: mol_type = other DNA

SEQ ID NO: 46241 - DNA, 80 bp, synthetic construct
  source 1..80: mol_type = other DNA
cacacctacttgtcaaaaaaacattcctgctgctatttggggatataaagtgtctttgaaagcagctcacattttaaacc

SEQ ID NO: 46242 - DNA, 80 bp, synthetic construct
  source 1..80: mol_type = other DNA
gtaatactagtatctcgtttcacagattaggaaaccaagcctgagagattacattacccacagtagcccagctaatatat

SEQ ID NO: 46243 - DNA, 80 bp, synthetic construct
  source 1..80: mol_type = other DNA
ggaaaagataggagtatatttattattttaaaatgtatctgttacctctgaatatacttgctttctgtggcatgcttgtg

SEQ ID NO: 46244 - DNA, 80 bp, synthetic construct; identical to SEQ ID NO: 15425
  source 1..80: mol_type = other DNA

SEQ ID NO: 46245 - DNA, 80 bp, synthetic construct
  source 1..80: mol_type = other DNA
ggtaaaatagaagtatgaaatcgaaatcaatggataggacaagagggatgttggaagaagaagaatttgcatgagccaga

SEQ ID NO: 46246 - DNA, 80 bp, synthetic construct
  source 1..80: mol_type = other DNA
agtcttccccttcaaggacttctgagcccagtagaaagcaaagaaaatcaagccagcatctacaatactaattaaaattc

SEQ ID NO: 46247 - DNA, 80 bp, synthetic construct
  source 1..80: mol_type = other DNA
aaagtcacgcagttttttaacaagtaaatattttaatgctaatattttagaataccttcatacagaggttattctaggcc

SEQ ID NO: 46248 - DNA, 80 bp, synthetic construct; identical to SEQ ID NO: 15426
  source 1..80: mol_type = other DNA

SEQ ID NO: 46249 - DNA, 80 bp, synthetic construct
  source 1..80: mol_type = other DNA
ccaaaacaaacctccttcttgcctgggtactagacgactaacattagccacaagattagaaattatagtttaggagtcac

SEQ ID NO: 46250 - DNA, 80 bp, synthetic construct
  source 1..80: mol_type = other DNA
accaatcagcactccctgactcactgcccctccactcccaccaaactgtctttaaaaactttgatccctaaatgttccag

SEQ ID NO: 46251 - DNA, 80 bp, synthetic construct; identical to SEQ ID NO: 15427
  source 1..80: mol_type = other DNA

SEQ ID NO: 46252 - DNA, 80 bp, synthetic construct
  source 1..80: mol_type = other DNA
gagcacattataaaccagaaaataagaaaaccagaataagctgaagagaaacagctaccatgccccaaggatggagcaat

SEQ ID NO: 46253 - DNA, 80 bp, synthetic construct
  source 1..80: mol_type = other DNA
gtggtcggttaatatattttcagaggagcaatcagagtgaaagacacttaaggcccctggtaagtgtaggcagccactta

SEQ ID NO: 46254 - DNA, 80 bp, synthetic construct
  source 1..80: mol_type = other DNA
tggggggaacaaaaaagaaaaatcacacttgaatcagtctaggccaaaagcaattgaggaagcaaccatcccatctccag

SEQ ID NO: 46255 - DNA, 80 bp, synthetic construct; identical to SEQ ID NO: 15428
  source 1..80: mol_type = other DNA

SEQ ID NO: 46256 - DNA, 80 bp, synthetic construct
  source 1..80: mol_type = other DNA
catctcccaggttcaagcgattctcctgcctcagcctcctgagtaggtggcattacaggcgtgtgccaccacaccagcta

SEQ ID NO: 46257 - DNA, 80 bp, synthetic construct
  source 1..80: mol_type = other DNA
ggacctcccaagaatcatatgcagctccagatagggcaaaaggaggccattatgaatcatagatatacaggtcaacccac

SEQ ID NO: 46258 - DNA, 80 bp, synthetic construct
  source 1..80: mol_type = other DNA
tgcatcctattggccacttcctaactactcagatgctgtttttaatgtgatcaagtccattcaagagttggttgtcacat

SEQ ID NO: 46259 - DNA, 80 bp, synthetic construct; identical to SEQ ID NO: 15429
  source 1..80: mol_type = other DNA

SEQ ID NO: 46260 - DNA, 80 bp, synthetic construct
  source 1..80: mol_type = other DNA
ctaacggttagcttacccctaagtctcagtgctctatcccctaggtctgtcatgccaaaactccagtcttttccattaat

SEQ ID NO: 46261 - DNA, 80 bp, synthetic construct
  source 1..80: mol_type = other DNA
tgtgcagctgtgacacagcctcaggaggtcctgacgacatgtgcccaaggtggtcagagcacagtttggttttatacatt

SEQ ID NO: 46262 - DNA, 80 bp, synthetic construct
  source 1..80: mol_type = other DNA
ggccatcagatatgcatttatctcagtgagtaaaaggatgactgaatacactgggaggcaggtttgccctaagcagttcc

SEQ ID NO: 46263 - DNA, 80 bp, synthetic construct; identical to SEQ ID NO: 15430
  source 1..80: mol_type = other DNA

SEQ ID NO: 46264 - DNA, 80 bp, synthetic construct
  source 1..80: mol_type = other DNA
agataataacacctgaaattggtcatcagcagcttccaataagatctcaggaactgggtgactgggctcgaccatgcaca

SEQ ID NO: 46265 - DNA, 80 bp, synthetic construct
  source 1..80: mol_type = other DNA
aagaatccaaggaaaggggcactagactccagtagtcgaccagaatataaaatcctagatccaaggtcaaacggggcact

SEQ ID NO: 46266 - DNA, 80 bp, synthetic construct
  source 1..80: mol_type = other DNA
caagaattgaggtagacttgcacggattcccctccactagctcggataccttccactgctcacacttggccttttagcct

SEQ ID NO: 46267 - DNA, 80 bp, synthetic construct; identical to SEQ ID NO: 15431
  source 1..80: mol_type = other DNA

SEQ ID NO: 46268 - DNA, 80 bp, synthetic construct
  source 1..80: mol_type = other DNA
tgtcccattgtatctaagactggcatacctagtccttctctcatcactcttgctccatctataccgatacctcaaaatgc

SEQ ID NO: 46269 - DNA, 80 bp, synthetic construct
  source 1..80: mol_type = other DNA
caagaccacagagtgaagtgtaagaatataaattgccttctcttgcataaactactgggaaaggagtttggagacagata

SEQ ID NO: 46270 - DNA, 80 bp, synthetic construct
  source 1..80: mol_type = other DNA
ggtcctaaaacaagactcaggaatttccacttctggaaaaatggagtagatatatttttccttacttctactacaaaata

SEQ ID NO: 46271 - DNA, 80 bp, synthetic construct; identical to SEQ ID NO: 15432
  source 1..80: mol_type = other DNA

SEQ ID NO: 46272 - DNA, 80 bp, synthetic construct
  source 1..80: mol_type = other DNA
cacttcccaatttactttcaaagctactgttatattgataccaaaccagataaagatagcaccaaaaaaatttacagacc

SEQ ID NO: 46273 - DNA, 80 bp, synthetic construct
  source 1..80: mol_type = other DNA
caggagttcgagaccagcctggccaacattgtgaaaccccgtctctactaaaagtacaaaaaattagctgggtgtggtgg

SEQ ID NO: 46274 - DNA, 80 bp, synthetic construct
  source 1..80: mol_type = other DNA
ttatacaccatgaccaagtggaatttattccaaggaagcaaggctggtttgatactcaaaataaatcaagaaactcacca

SEQ ID NO: 46275 - DNA, 80 bp, synthetic construct; identical to SEQ ID NO: 15433
  source 1..80: mol_type = other DNA

SEQ ID NO: 46276 - DNA, 80 bp, synthetic construct
  source 1..80: mol_type = other DNA
cttaaaagaaaaaaacaaaaaaccctcccagaactaataagggagttcagcaaaatcacagaattgaagatgaacagaca

SEQ ID NO: 46277 - DNA, 80 bp, synthetic construct
  source 1..80: mol_type = other DNA
caaagacatttaaataaatggagagacatacattgttcataggttggaagactcaatgaaataaagatgtcaattcttcc

SEQ ID NO: 46278 - DNA, 80 bp, synthetic construct
  source 1..80: mol_type = other DNA
tgtagctacaggaatcaaagatgtgcggtattgacagagggatagagacatggatcaaatgaacagagatagaaaaccca

SEQ ID NO: 46279 - DNA, 80 bp, synthetic construct; identical to SEQ ID NO: 15434
  source 1..80: mol_type = other DNA

SEQ ID NO: 46280 - DNA, 80 bp, synthetic construct
  source 1..80: mol_type = other DNA
gatctcttgaggtcaggagttcaagaccagcctggctaacatggtgaaaccccatctctattaaatatacaaaaatcagc

SEQ ID NO: 46281 - DNA, 80 bp, synthetic construct
  source 1..80: mol_type = other DNA
gaaagtggaagaggaaatctacaacctactttgatcaataatttctattggtggataagggtaacacttaaactccagcc

SEQ ID NO: 46282 - DNA, 80 bp, synthetic construct
  source 1..80: mol_type = other DNA
cattcttgggactgacaaactatggtgcaaggagaaacacaatatcatccttaatatgctgtgcttcccctgggtacctt

SEQ ID NO: 46283 - DNA, 80 bp, synthetic construct; identical to SEQ ID NO: 15435
  source 1..80: mol_type = other DNA

SEQ ID NO: 46284 - DNA, 80 bp, synthetic construct
  source 1..80: mol_type = other DNA
gtgaagttctggaggacaaggcaatggggagtggttagcagccaccattcactgtaatttgggtccatctgcctggataa

SEQ ID NO: 46285 - DNA, 80 bp, synthetic construct
  source 1..80: mol_type = other DNA
aattggtcctaaagccttcggtgatacattatctccctcctacacaacacattctagattttccttcacttgcgtttctg

SEQ ID NO: 46286 - DNA, 80 bp, synthetic construct
  source 1..80: mol_type = other DNA
cttcttctattaagaaacagcaaatcctacctcctcatgattatcaatcatccctgccagctggtaaatcctttcagtgc

SEQ ID NO: 46287 - DNA, 80 bp, synthetic construct
  source 1..80: mol_type = other DNA
gtgaagagctggaccagtcctattttcaccccttggttccttgacctatataattcagcctattggggtcagagtacccc

SEQ ID NO: 46288 - DNA, 80 bp, synthetic construct; identical to SEQ ID NO: 15436
  source 1..80: mol_type = other DNA

SEQ ID NO: 46289 - DNA, 80 bp, synthetic construct
  source 1..80: mol_type = other DNA
agatggaaggggtccaagctaatcaagttgccaacaagtatctggttgatgtccaaaacatgataccttattgggactct

SEQ ID NO: 46290 - DNA, 80 bp, synthetic construct
  source 1..80: mol_type = other DNA
gacattgctggctgagtcatcctgcctgtgtgcttcttctgaaagggacgctctctggtaggtattttcattcaatataa

SEQ ID NO: 46291 - DNA, 80 bp, synthetic construct; identical to SEQ ID NO: 15437
  source 1..80: mol_type = other DNA

SEQ ID NO: 46292 - DNA, 80 bp, synthetic construct
  source 1..80: mol_type = other DNA
tttcttaaaagatttatgtattccccttccccattgtacacttgcccaagtaaatggttataggttcctttgggaaggac

SEQ ID NO: 46293 - DNA, 80 bp, synthetic construct
  source 1..80: mol_type = other DNA
aaggggaagaaaacacatccttctttacatggcagcaggagagagaagtgcagagcaaaggagagtgggaaagtctctta

SEQ ID NO: 46294 - DNA, 80 bp, synthetic construct
  source 1..80: mol_type = other DNA
cccatatcacatggtgttgttaaaatcgtcttcctcatgagaaacagcctcctcttgagggttaggtctcaaaactgaac

SEQ ID NO: 46295 - DNA, 80 bp, synthetic construct
  source 1..80: mol_type = other DNA
ctattattctattagcaatctcccaagatcttccaagatccatatggttggtcccatatggtcaaggccccaggtagcca

SEQ ID NO: 46296 - DNA, 80 bp, synthetic construct; identical to SEQ ID NO: 15438
  source 1..80: mol_type = other DNA

SEQ ID NO: 46297 - DNA, 80 bp, synthetic construct
  source 1..80: mol_type = other DNA
caaggcagattatctgctagtgggtttcctggtttaataattcaattgtttgagtttttcccctacttctctgggcactt

SEQ ID NO: 46298 - DNA, 80 bp, synthetic construct
  source 1..80: mol_type = other DNA
tatattaagcctatattaataacctctcccttgtcttgcttgatgctttgttcttgcttcccttgatccaaccttcagga

SEQ ID NO: 46299 - DNA, 80 bp, synthetic construct
  source 1..80: mol_type = other DNA
attggtcctattgacaaatcaggcacccaagatagggaaattgggagtgagcctagcaaggccaggcattgtcttataag

SEQ ID NO: 46300 - DNA, 80 bp, synthetic construct
  source 1..80: mol_type = other DNA
caagtctcaaagccttgttccttctctgtcaagatcctgactttgacattgaagactggccaaggccaagtgtttaatct

SEQ ID NO: 46301 - DNA, 80 bp, synthetic construct; identical to SEQ ID NO: 15439
  source 1..80: mol_type = other DNA

SEQ ID NO: 46302 - DNA, 80 bp, synthetic construct
  source 1..80: mol_type = other DNA
gcgcccatctctctaattccatccttacgatcggtatcctgggtcctttccagtactaaccgccttaggctggaagcaaa

SEQ ID NO: 46303 - DNA, 80 bp, synthetic construct
  source 1..80: mol_type = other DNA
acacatcctaccacagaattgcttccattttgagacaagggcaaaagaggggcagggccctttgcaccacagctgtcagt

SEQ ID NO: 46304 - DNA, 80 bp, synthetic construct
  source 1..80: mol_type = other DNA
ggcagggcatcaacagcatccacagcaagagcctctggcatgaggacaataatgtgctaaatctccaggcaccctgtttg

SEQ ID NO: 46305 - DNA, 80 bp, synthetic construct; identical to SEQ ID NO: 15440
  source 1..80: mol_type = other DNA

SEQ ID NO: 46306 - DNA, 80 bp, synthetic construct
  source 1..80: mol_type = other DNA
aatcccagctattcacgaagctgaagaacaagaattgcttgaccctgggaggcagaggttgcagtgagccaagatcgcgc

SEQ ID NO: 46307 - DNA, 80 bp, synthetic construct
  source 1..80: mol_type = other DNA
gaagaaagaaagaaagaaagaaagaaagaaagaaagaaagaaagaaagaaaggaaagaaagaaagaaagaaagaaagaaa

SEQ ID NO: 46308 - DNA, 80 bp, synthetic construct; identical to SEQ ID NO: 15441
  source 1..80: mol_type = other DNA

SEQ ID NO: 46309 - DNA, 80 bp, synthetic construct
  source 1..80: mol_type = other DNA
ctgcaatgcagtaacctgattatagctcactgtagccccgaactcctgggctcaaaggatactcctgcctcagcctctca

SEQ ID NO: 46310 - DNA, 80 bp, synthetic construct
  source 1..80: mol_type = other DNA
aacatgagccacagctcccagcacttgatttcttaaaagccagaaatttcttgcttttcccctcataaagatgaattatc

SEQ ID NO: 46311 - DNA, 80 bp, synthetic construct
  source 1..80: mol_type = other DNA
caggatagtgttcagtcctaatcactggaacctgtgtagacgtaacaaaggggaatttaggctgcaaatcaactgacctt

SEQ ID NO: 46312 - DNA, 80 bp, synthetic construct; identical to SEQ ID NO: 15442
  source 1..80: mol_type = other DNA

SEQ ID NO: 46313 - DNA, 80 bp, synthetic construct
  source 1..80: mol_type = other DNA
caggtgcaagttgctgacaccgaagctggaggaagaagctcagagacaagcgaagtggggcacctgtagcccagggagtg

SEQ ID NO: 46314 - DNA, 80 bp, synthetic construct
  source 1..80: mol_type = other DNA
gcctataccttttactaatacctttggtctaaaataatttttcctgcttccatgtaggagcctagaaatatttggtggtg

SEQ ID NO: 46315 - DNA, 80 bp, synthetic construct
  source 1..80: mol_type = other DNA
gtgagacttgggagagagtcaggaacaaaatgaaaactgtgtgtgtagacagcagtcaaggagcatgaatcagttcaaat

SEQ ID NO: 46316 - DNA, 80 bp, synthetic construct
  source 1..80: mol_type = other DNA
taaacaaaatgtgggtgcctagaaataataagtaatacaatgtgcaagtcaaatttagtggtccaatggcaatttttgaa

SEQ ID NO: 46317 - DNA, 80 bp, synthetic construct; identical to SEQ ID NO: 15443
  source 1..80: mol_type = other DNA

SEQ ID NO: 46318 - DNA, 80 bp, synthetic construct
  source 1..80: mol_type = other DNA
agagaaatgagccatgcctctttttcagtttagaggggtagctgacacaggatgagagcacagtaaaacttaagctaaga

SEQ ID NO: 46319 - DNA, 80 bp, synthetic construct
  source 1..80: mol_type = other DNA
tggcgattaaaactcctggtttctattttacggcatttgctctttccacgaggcacacttcccttttgggctaaaggtta

SEQ ID NO: 46320 - DNA, 80 bp, synthetic construct; identical to SEQ ID NO: 15444
  source 1..80: mol_type = other DNA

SEQ ID NO: 46321 - DNA, 80 bp, synthetic construct
  source 1..80: mol_type = other DNA
gaagaaatgccccctaaaactatgtggatatggcagcttttctgtacttaacattactcattaaatcatgtatgtggcta

SEQ ID NO: 46322 - DNA, 80 bp, synthetic construct
  source 1..80: mol_type = other DNA
gcgtagtcccagctactcgggaggctgaggcaggagaatcacttcaaccagggaggcagaggttgcagtgagctaaaatc

SEQ ID NO: 46323 - DNA, 80 bp, synthetic construct
  source 1..80: mol_type = other DNA
atctgtttcatctctgtgacattgtttgtgactggagtgctacctgagtaaattatcatgattacatgaaaagcaattaa

SEQ ID NO: 46324 - DNA, 80 bp, synthetic construct; identical to SEQ ID NO: 15445
  source 1..80: mol_type = other DNA

SEQ ID NO: 46325 - DNA, 80 bp, synthetic construct
  source 1..80: mol_type = other DNA
ccagtcaaacttcttggtttcctagtgggctatgtgccaacagcaacttcacaaggtaacaggtgaagcgaggtgggggg

SEQ ID NO: 46326 - DNA, 80 bp, synthetic construct
  source 1..80: mol_type = other DNA
tacaaagtgctgtgtaaatgtaaggcatgggtttcacattgaaatctgactccaaacacaatctctttcttacgcttcct

SEQ ID NO: 46327 - DNA, 80 bp, synthetic construct
  source 1..80: mol_type = other DNA
atcacatcaggctccgttctggatctacaggctaacaacagagggaaaaggtcctcttcacaaccccaaagaggagtcct

SEQ ID NO: 46328 - DNA, 80 bp, synthetic construct; identical to SEQ ID NO: 15446
  source 1..80: mol_type = other DNA

SEQ ID NO: 46329 - DNA, 80 bp, synthetic construct
  source 1..80: mol_type = other DNA
ctagcacaacctggtcaaaagcaaaataatttacagggggaaaaacacgaatgagcaggcaatggggctccagaaagcca

SEQ ID NO: 46330 - DNA, 80 bp, synthetic construct
  source 1..80: mol_type = other DNA
tcaatggtactaaaggagtttacagttgaaaggctggggaaatatgtcttcacgaaaagccaaaggaaagcattcaaagc

SEQ ID NO: 46331 - DNA, 80 bp, synthetic construct
  source 1..80: mol_type = other DNA
tacattgccaatcctaaataatttcccttctggtatctgctaatcacagaaagaatcagtaatttccaggggcaaaaggt

SEQ ID NO: 46332 - DNA, 80 bp, synthetic construct
  source 1..80: mol_type = other DNA
cacatgtttgctgggccaaactgactggcctggcctcttatcttagagaagtttctagcagtacaacttgcttcttgttt

SEQ ID NO: 46333 - DNA, 80 bp, synthetic construct; identical to SEQ ID NO: 15447
  source 1..80: mol_type = other DNA

SEQ ID NO: 46334 - DNA, 80 bp, synthetic construct
  source 1..80: mol_type = other DNA
agatgacattagttgtgttgcctttggtctaaggtttgcaggcataaatggcacaaagcttaaagtttatttaatagaaa

SEQ ID NO: 46335 - DNA, 80 bp, synthetic construct
  source 1..80: mol_type = other DNA
gccccatttttttcccacaagatttcctgagcattcctcagacacagtgcaacatcataacaccagtgaatcaatagtat

SEQ ID NO: 46336 - DNA, 80 bp, synthetic construct
  source 1..80: mol_type = other DNA
aacatagctattcacatagcacacaagtgacatataaacatacaaaaataaatccctcatgtttaactcttttgttgctt

SEQ ID NO: 46337 - DNA, 80 bp, synthetic construct; identical to SEQ ID NO: 15448
  source 1..80: mol_type = other DNA

SEQ ID NO: 46338 - DNA, 80 bp, synthetic construct
  source 1..80: mol_type = other DNA
tgccactgtctatgaagcatttctcatcacatggaaaaggcaccaccattccataccaaaggcaaggaatttttgttctg

SEQ ID NO: 46339 - DNA, 80 bp, synthetic construct
  source 1..80: mol_type = other DNA
aatgtttccatgggcaattactcctggtaaaatttgattcttgtccatagcattctctggagagcaatgaacagaagaga

SEQ ID NO: 46340 - DNA, 80 bp, synthetic construct; identical to SEQ ID NO: 15449
  source 1..80: mol_type = other DNA

SEQ ID NO: 46341 - DNA, 80 bp, synthetic construct
  source 1..80: mol_type = other DNA
ctggatcagcagggtgttcatgactttccactctctgtatttcctggctgtcagcttcgggtcatccagcaactggttaa

SEQ ID NO: 46342 - DNA, 80 bp, synthetic construct
  source 1..80: mol_type = other DNA
tccagcattaagcttaagaaatacgacatttgtttgcatacgctagccgcaaagaagtgaagtatcctacccaagagtta

SEQ ID NO: 46343 - DNA, 80 bp, synthetic construct
  source 1..80: mol_type = other DNA
ttctaccttggtgtgggaatcatgcctcctaaaacttaccattgtaggtattagcattttattgacaatccaaacttcac

SEQ ID NO: 46344 - DNA, 80 bp, synthetic construct; identical to SEQ ID NO: 15450
  source 1..80: mol_type = other DNA

SEQ ID NO: 46345 - DNA, 80 bp, synthetic construct
  source 1..80: mol_type = other DNA
tcctaaggttggatatccagttcaatatatcacgtttgatctgctgccacagcctcctgagcgagaccactgcctccaat

SEQ ID NO: 46346 - DNA, 80 bp, synthetic construct
  source 1..80: mol_type = other DNA
ttttctcacccacacaacactagctcacacctccgtgttgttgtgccacatgaagaatcttccttgcctttcttcacctc

SEQ ID NO: 46347 - DNA, 80 bp, synthetic construct
  source 1..80: mol_type = other DNA
tgcctcccaggttcaagcgattctcctgcatcaacctcccaagtagctgggattacaggcatgcaccaccatgcctggct

SEQ ID NO: 46348 - DNA, 80 bp, synthetic construct; identical to SEQ ID NO: 15451
  source 1..80: mol_type = other DNA

SEQ ID NO: 46349 - DNA, 80 bp, synthetic construct
  source 1..80: mol_type = other DNA
tgtagacattcaattcatgcatgtgattgaactactctttttgactatccccaggacagcatgtgtgaaactaaaacttc

SEQ ID NO: 46350 - DNA, 80 bp, synthetic construct
  source 1..80: mol_type = other DNA
aggaaatggaagccatcagaagagcacttctcccaagttcctattgcccacgaactacatggatgcaaatctatgctgcc

SEQ ID NO: 46351 - DNA, 80 bp, synthetic construct
  source 1..80: mol_type = other DNA
actggtacacatgtttgctgttatttcttgcatgttaaaattcctctctgcccccaaatccctgtccagctaatgctcta

SEQ ID NO: 46352 - DNA, 80 bp, synthetic construct
  source 1..80: mol_type = other DNA
aacttatttatcagcagcacctaaaacaattgactactcctccttcttgaacagtttcattgttgtgctcctatgataca

SEQ ID NO: 46353 - DNA, 80 bp, synthetic construct; identical to SEQ ID NO: 15452
  source 1..80: mol_type = other DNA

SEQ ID NO: 46354 - DNA, 80 bp, synthetic construct
  source 1..80: mol_type = other DNA
ggcatctcaaaaataacatatctaaagataagttcctcttattctctacatccccaccccaccaacttccaatgcacacc

SEQ ID NO: 46355 - DNA, 80 bp, synthetic construct
  source 1..80: mol_type = other DNA
ccatccttctgttcagaaccttccagagggtcactgtcttactccgagcagaagctggtgtttgcaatggcaatgagatc

SEQ ID NO: 46356 - DNA, 80 bp, synthetic construct
  source 1..80: mol_type = other DNA
atattcggcctcagagaacctcaagcctcattccctttcctttttcagattttacacaaattatgtctttcaaagaggcc

SEQ ID NO: 46357 - DNA, 80 bp, synthetic construct; identical to SEQ ID NO: 15453
  source 1..80: mol_type = other DNA

SEQ ID NO: 46358 - DNA, 80 bp, synthetic construct
  source 1..80: mol_type = other DNA
atagaagatagacatatagatggataaagataggaatccttccttccaaaatggagaaaaaacagtgcagtaggaaagca

SEQ ID NO: 46359 - DNA, 80 bp, synthetic construct
  source 1..80: mol_type = other DNA
tcctctgatatcaccatactgctattaatgtaaagttatttaaagagttttattttgttctaaagaaatttagacatcta

SEQ ID NO: 46360 - DNA, 80 bp, synthetic construct
  source 1..80: mol_type = other DNA
acacttctcatatggcttttggctctaagtagttcaaattttttaccatttggctcaaatctgtgttagttcttctatgg

SEQ ID NO: 46361 - DNA, 80 bp, synthetic construct; identical to SEQ ID NO: 15454
  source 1..80: mol_type = other DNA

SEQ ID NO: 46362 - DNA, 80 bp, synthetic construct
  source 1..80: mol_type = other DNA
aggtcagagtaactcagagagagtttcagttggacccattaatcattccattaataacttattttaaaataaaagcagac

SEQ ID NO: 46363 - DNA, 80 bp, synthetic construct
  source 1..80: mol_type = other DNA
aagaatttccctgaagtgcattcattccagtactatcccagtgcagggatttttcttatttacggaatgcacctgcggca

SEQ ID NO: 46364 - DNA, 80 bp, synthetic construct
  source 1..80: mol_type = other DNA
aatagaaaaattgtgcttaaagaattatcacaaaataaacacttccataccactactaccagggtcacagaaggacccgc

SEQ ID NO: 46365 - DNA, 80 bp, synthetic construct; identical to SEQ ID NO: 15455
  source 1..80: mol_type = other DNA

SEQ ID NO: 46366 - DNA, 80 bp, synthetic construct
  source 1..80: mol_type = other DNA
ctccctgaaaatgagatgacccaatgacttgcttctactgaatagaatactgcaaaagtaatgtgatgtcattgctgcca

SEQ ID NO: 46367 - DNA, 80 bp, synthetic construct
  source 1..80: mol_type = other DNA
agcaacctgaaaggacctgaatcctgccaataattaacatgcaggagtttagaaactgatccctctccatggaggaatga

SEQ ID NO: 46368 - DNA, 80 bp, synthetic construct; identical to SEQ ID NO: 15456
  source 1..80: mol_type = other DNA

SEQ ID NO: 46369 - DNA, 80 bp, synthetic construct
  source 1..80: mol_type = other DNA
ttctactaatgactcaaactgcacatgctctccgcggcctctacttcctgcttctcccaacgtggaactacagcttatta

SEQ ID NO: 46370 - DNA, 80 bp, synthetic construct
  source 1..80: mol_type = other DNA
cacttcattttaatcatgtatttgttttcctctgtttctacaccggtagagtccattcaatggtcccagtcacctagaat

SEQ ID NO: 46371 - DNA, 80 bp, synthetic construct
  source 1..80: mol_type = other DNA
gaataatcaaatatattcatcagcttcgtacatactgtgaaatggcggccagtgatatcttttattatcgataaaaattt

SEQ ID NO: 46372 - DNA, 80 bp, synthetic construct
  source 1..80: mol_type = other DNA
tagccttgtcctttcaattgctgacatttcttcctggaaaatgacttaagttcttaatgccaaaggccacagacaaaaca

SEQ ID NO: 46373 - DNA, 80 bp, synthetic construct; identical to SEQ ID NO: 15457
  source 1..80: mol_type = other DNA

SEQ ID NO: 46374 - DNA, 80 bp, synthetic construct
  source 1..80: mol_type = other DNA
tttatacgactgtttattctcaccagttgatgatctctgtctctcatcaacatttattgaaccaggtactgtgctaggta

SEQ ID NO: 46375 - DNA, 80 bp, synthetic construct
  source 1..80: mol_type = other DNA
ttgccctataaaggttatatttacttttacagcccttccctgcaaccacacaaacatgctgtgattagcaagaatctctc

SEQ ID NO: 46376 - DNA, 80 bp, synthetic construct; identical to SEQ ID NO: 15458
  source 1..80: mol_type = other DNA

SEQ ID NO: 46377 - DNA, 80 bp, synthetic construct
  source 1..80: mol_type = other DNA
ttcaatactgtggtcccaaggcacggccccactggcaccctcatctcagacttctctccggaactgaaagacaataaatg

SEQ ID NO: 46378 - DNA, 80 bp, synthetic construct
  source 1..80: mol_type = other DNA
gcatgcatgtctctgtgtccaaactccccctatttatgagggtatcagtcatgttggattagaaacctgccctattaact

SEQ ID NO: 46379 - DNA, 80 bp, synthetic construct
  source 1..80: mol_type = other DNA
agtgaaatggcacaatcttggctcactgaaacctacacctcccaggttcaagtgattctcctgtctcagcctcccaagta

SEQ ID NO: 46380 - DNA, 80 bp, synthetic construct
  source 1..80: mol_type = other DNA
aacccatacatagtccaccctccggcctcctaaattcatgtgtttctcacgtgcaatatattcacctcatcccaacaact

SEQ ID NO: 46381 - DNA, 80 bp, synthetic construct; identical to SEQ ID NO: 15459
  source 1..80: mol_type = other DNA

SEQ ID NO: 46382 - DNA, 80 bp, synthetic construct
  source 1..80: mol_type = other DNA
atatcatctaaaccaggtattgctgaaactcagtgggggagtgattcatcctgagacaaaattcatctccatctttaaac

SEQ ID NO: 46383 - DNA, 80 bp, synthetic construct
  source 1..80: mol_type = other DNA
cagaactacccttggagagaagaaacctgtctgtggtctgtggttttgagtagaaagtgatcattcctcatcttgccaca

SEQ ID NO: 46384 - DNA, 80 bp, synthetic construct
  source 1..80: mol_type = other DNA
gtgcctctggtcaggccatttggggccaaggagactcagttccaagactttggagtatcagataagtaatctctcttttt

SEQ ID NO: 46385 - DNA, 80 bp, synthetic construct; identical to SEQ ID NO: 15460
  source 1..80: mol_type = other DNA

SEQ ID NO: 46386 - DNA, 80 bp, synthetic construct
  source 1..80: mol_type = other DNA
ctctatagaaagtatggcattagaggaactagaaaaacagcctctccatagggtggagaaaagcatataatggtgaccta

SEQ ID NO: 46387 - DNA, 80 bp, synthetic construct
  source 1..80: mol_type = other DNA
aaacagaaagcaaagatgatgcactcacttcatagctgacttaaaatgttcatcagcacaacctcctttttctctaccaa

SEQ ID NO: 46388 - DNA, 80 bp, synthetic construct; identical to SEQ ID NO: 15461
  source 1..80: mol_type = other DNA

SEQ ID NO: 46389 - DNA, 80 bp, synthetic construct
  source 1..80: mol_type = other DNA
gcatgccaccatgctcagctaattgagttgccactttagaaaatagtttgtccatttctcatggagtttagcatgtgccc

SEQ ID NO: 46390 - DNA, 80 bp, synthetic construct
  source 1..80: mol_type = other DNA
ttgcatgtgacagaatagtattcaataattaaaataaatactcagttgtccacaatacttcaacatgggtgaaccttgaa

SEQ ID NO: 46391 - DNA, 80 bp, synthetic construct
  source 1..80: mol_type = other DNA
gggtctgggaggggacaagcaggagtggagaatggcagctaatgtgtaaggatttctttttgtgatgctgaaatgttcca

SEQ ID NO: 46392 - DNA, 80 bp, synthetic construct; identical to SEQ ID NO: 15462
  source 1..80: mol_type = other DNA

SEQ ID NO: 46393 - DNA, 80 bp, synthetic construct
  source 1..80: mol_type = other DNA
tgactcctgaaggggggcattaggattgaagacttagagttttcagttttaagacacagtaattttacatgtccttttac

SEQ ID NO: 46394 - DNA, 80 bp, synthetic construct
  source 1..80: mol_type = other DNA
ctttacatttctctgtgttcaccaagtagctacattgtgctactaaagattgtgatagaaaacaacttaccaattgagcc

SEQ ID NO: 46395 - DNA, 80 bp, synthetic construct
  source 1..80: mol_type = other DNA
tgaagtacctggttcatctcattgggactggttggacagtgggtgcagcccatggagggtgagctgaagcagggctgggt

SEQ ID NO: 46396 - DNA, 80 bp, synthetic construct
  source 1..80: mol_type = other DNA
ctggctcggtgggtcccacacccatggagccttgcttgctgctagcacagcagtctgagattgtcctgggatgctggagc

SEQ ID NO: 46397 - DNA, 80 bp, synthetic construct; identical to SEQ ID NO: 15463
  source 1..80: mol_type = other DNA

SEQ ID NO: 46398 - DNA, 80 bp, synthetic construct
  source 1..80: mol_type = other DNA
cagcaatacttgctgttctgcagcctccgctggtgatacccaggcaaacagggtctggagtgcacctgcagcaaactcca

SEQ ID NO: 46399 - DNA, 80 bp, synthetic construct
  source 1..80: mol_type = other DNA
ccagagtggaaaggctgaaaattccaaaaaccagaacacctcttctcctccaaaggaacacaactcctcaccagcaaggg

SEQ ID NO: 46400 - DNA, 80 bp, synthetic construct; identical to SEQ ID NO: 15464
  source 1..80: mol_type = other DNA

SEQ ID NO: 46401 - DNA, 80 bp, synthetic construct
  source 1..80: mol_type = other DNA
ttggtgtaactgaaagtgacggggagaatgggaccaaattggaaaacactcttcaggatattatccaggagaacttcccc

SEQ ID NO: 46402 - DNA, 80 bp, synthetic construct
  source 1..80: mol_type = other DNA
cctacaaagggaagcccatcagactaacagtggatctctcgacagaaaccctacaagccagaagagagtgggggccaata

SEQ ID NO: 46403 - DNA, 80 bp, synthetic construct
  source 1..80: mol_type = other DNA
taaacatggaaagacacaactggtaccagccactgcaaaaacatgccaaattgtaaagaccatcaatgctaggaagaaac

SEQ ID NO: 46404 - DNA, 80 bp, synthetic construct; identical to SEQ ID NO: 15465
  source 1..80: mol_type = other DNA

SEQ ID NO: 46405 - DNA, 80 bp, synthetic construct
  source 1..80: mol_type = other DNA
acccagattcataaagcaagtccttagagacctacaaagagacttagactctcacacaataataatgggagactttaaca

SEQ ID NO: 46406 - DNA, 80 bp, synthetic construct
  source 1..80: mol_type = other DNA
ttctaaagttgaccaaataattggaagtaaaacactcctcagcaaatgtaaaagaaaagaaatcacaacaaactgtctct

SEQ ID NO: 46407 - DNA, 80 bp, synthetic construct
  source 1..80: mol_type = other DNA
cacaacgtaccagaagctctgggacacatttaaagcagtgtttagagggaaatttacagcactaaatgcccacaagagaa

SEQ ID NO: 46408 - DNA, 80 bp, synthetic construct; identical to SEQ ID NO: 15466
  source 1..80: mol_type = other DNA

SEQ ID NO: 46409 - DNA, 80 bp, synthetic construct
  source 1..80: mol_type = other DNA
aaccaggaagaagttgaatctctgaatagactaaaaatagcttctgaaattgaggcaataattaatagcctaccaaccaa

SEQ ID NO: 46410 - DNA, 80 bp, synthetic construct
  source 1..80: mol_type = other DNA
agagacacaacaaaaaaagggaattttaggccaatatccctgatgaacattgatgtaaaaatcctcaataaaatactggc

SEQ ID NO: 46411 - DNA, 80 bp, synthetic construct
  source 1..80: mol_type = other DNA
gaaaaggccttcaacaaaaatcaacagcctttcgtgctaaaaactctcaataaactaggtattgatggaatgtatctcaa

SEQ ID NO: 46412 - DNA, 80 bp, synthetic construct; identical to SEQ ID NO: 15467
  source 1..80: mol_type = other DNA

SEQ ID NO: 46413 - DNA, 80 bp, synthetic construct
  source 1..80: mol_type = other DNA
taaagagaataaaatacctaggaatccaatttacaagggatatgaaggacctcctcaaggagaactacaaaccactgctc

SEQ ID NO: 46414 - DNA, 80 bp, synthetic construct
  source 1..80: mol_type = other DNA
tttcatatgaaaccaagacaatcctgagcaaaaagaacaaagctggaggcatcatgctacctgacttcaaactataccac

SEQ ID NO: 46415 - DNA, 80 bp, synthetic construct
  source 1..80: mol_type = other DNA
aaatgttgctgggaaaactggctagccatatgcacaaagctgaaactggatcccttccttacaccttatacaaaaattaa

SEQ ID NO: 46416 - DNA, 80 bp, synthetic construct; identical to SEQ ID NO: 15468
  source 1..80: mol_type = other DNA

SEQ ID NO: 46417 - DNA, 80 bp, synthetic construct
  source 1..80: mol_type = other DNA
aaatgctgatcatcactggtcatcagagaaatgcaaatcaaaaccacaatgagataccatctcacgccagttagaatggt

SEQ ID NO: 46418 - DNA, 80 bp, synthetic construct
  source 1..80: mol_type = other DNA
atcccattactgggtatatatccaaaggattataaatcatgctactataaagacacatgcacacatatgtttattgtggc

SEQ ID NO: 46419 - DNA, 80 bp, synthetic construct
  source 1..80: mol_type = other DNA
attctcagcaaaatatcacaaggacagaaaatcaaacactacaggttctcactcataagtgggagttgaacaatgaggac

SEQ ID NO: 46420 - DNA, 80 bp, synthetic construct
  source 1..80: mol_type = other DNA
tgtgcacaagtatcctagaacttaaagtataataataaaaaaaattatattaaaattacatatctgattcaatagatatt

SEQ ID NO: 46421 - DNA, 80 bp, synthetic construct; identical to SEQ ID NO: 15469
  source 1..80: mol_type = other DNA

SEQ ID NO: 46422 - DNA, 80 bp, synthetic construct
  source 1..80: mol_type = other DNA
agtatgtatgttcacataggattaaagctgttcagaaaatgaggaaataatgaaaggcaaattatcactcagcttcctgc

SEQ ID NO: 46423 - DNA, 80 bp, synthetic construct
  source 1..80: mol_type = other DNA
tgttaggaatcaagaaaatacccttattggctgttttgtgtgtcataatctaagaggtctacaacatatcactaaatact

SEQ ID NO: 46424 - DNA, 80 bp, synthetic construct
  source 1..80: mol_type = other DNA
ggtacaagtgcaaaagaaaacacagcttgtacctgaccccaaagcaaatgtgagaatccttctcaattgctatactaaga

SEQ ID NO: 46425 - DNA, 80 bp, synthetic construct; identical to SEQ ID NO: 15470
  source 1..80: mol_type = other DNA

SEQ ID NO: 46426 - DNA, 80 bp, synthetic construct
  source 1..80: mol_type = other DNA
aggactttgattctgccacagaaggcactttaaagtctgtcttatctcacctcacaagtgttttgtcaaggaagatgaaa

SEQ ID NO: 46427 - DNA, 80 bp, synthetic construct
  source 1..80: mol_type = other DNA
catgcccttctagaccactcctctcaaacttttaacaggcactcacctaggaaccttgttaacatgtagattccatttga

SEQ ID NO: 46428 - DNA, 80 bp, synthetic construct
  source 1..80: mol_type = other DNA
aatgctagcctcaagtcattggaagagaaagcaactagagttacaactagcacactgagatttgtccataaagcagcact

SEQ ID NO: 46429 - DNA, 80 bp, synthetic construct; identical to SEQ ID NO: 15471
  source 1..80: mol_type = other DNA

SEQ ID NO: 46430 - DNA, 80 bp, synthetic construct
  source 1..80: mol_type = other DNA
tgagacaaaacaacatttttagccaacagttataagttcactcctttccaagaccctgccaaatgaatgtgctgctccct

SEQ ID NO: 46431 - DNA, 80 bp, synthetic construct
  source 1..80: mol_type = other DNA
cttgtgctttctagaatgtggctgtttattttctacttagaacctaaatgctggattcagaagacaggaggggaattcat

SEQ ID NO: 46432 - DNA, 80 bp, synthetic construct
  source 1..80: mol_type = other DNA
ctgagaaagaaaagaccgtggaaggcacttgtcaccaagagaagaaaaaactatatagtcatttgggtattttgcatacc

SEQ ID NO: 46433 - DNA, 80 bp, synthetic construct
  source 1..80: mol_type = other DNA
tttaattaagaaaaaaatctggataactcattttagtagtgaggacactactgaccaacaacattggcatagtataattt

SEQ ID NO: 46434 - DNA, 80 bp, synthetic construct; identical to SEQ ID NO: 15472
  source 1..80: mol_type = other DNA

SEQ ID NO: 46435 - DNA, 80 bp, synthetic construct
  source 1..80: mol_type = other DNA
aaagtcagtgaagactatatatttcaaattaggcaatatatagtcactgagatagcagttgactgaactggacagaccaa

SEQ ID NO: 46436 - DNA, 80 bp, synthetic construct
  source 1..80: mol_type = other DNA
cgagacctgagagcagaaaattgataagccagccagcaatctaggacacaaaccacaaaatcagattaccttcttgggga

SEQ ID NO: 46437 - DNA, 80 bp, synthetic construct
  source 1..80: mol_type = other DNA
tgagaacgtcaagttgggagaacactctagttgggaaaggtgaggcgattttaaaagatggcaggtttgtaacaaacctg

SEQ ID NO: 46438 - DNA, 80 bp, synthetic construct; identical to SEQ ID NO: 15473
  source 1..80: mol_type = other DNA

SEQ ID NO: 46439 - DNA, 80 bp, synthetic construct
  source 1..80: mol_type = other DNA
tgttgttattattgagtcttgaggcaatcgttttctgaaataatcttaagttgactccattgctcaactatctgattaag

SEQ ID NO: 46440 - DNA, 80 bp, synthetic construct
  source 1..80: mol_type = other DNA
agatatttgatcgcctttttttcttcttaaaatacgtttatgaggtatcagttgaatgagaacaaaatggtagcagtggg

SEQ ID NO: 46441 - DNA, 80 bp, synthetic construct
  source 1..80: mol_type = other DNA
gaaagggatgagactagggaacacttcaggtcaagaacagggaggcaagagaaaggaagaagttagcttatctcaatttc

SEQ ID NO: 46442 - DNA, 80 bp, synthetic construct
  source 1..80: mol_type = other DNA
cagcttccccagtagctgggattacaggtgtgtgccaccacacccggctaattttttgtatttttagtagagacggggtt

SEQ ID NO: 46443 - DNA, 80 bp, synthetic construct; identical to SEQ ID NO: 15474
  source 1..80: mol_type = other DNA

SEQ ID NO: 46444 - DNA, 80 bp, synthetic construct
  source 1..80: mol_type = other DNA
attaaattcacaagattacctgaatgatagtgccaaggagaggtgcgctctatagaataccaaaggatgctataaaggta

SEQ ID NO: 46445 - DNA, 80 bp, synthetic construct
  source 1..80: mol_type = other DNA
caaaaatacaaaaattagccaggtgtagtgcatgcctctagctacgtgggaggctgaggtgggagaatcacttgaaccca

SEQ ID NO: 46446 - DNA, 80 bp, synthetic construct; identical to SEQ ID NO: 15475
  source 1..80: mol_type = other DNA

SEQ ID NO: 46447 - DNA, 80 bp, synthetic construct
  source 1..80: mol_type = other DNA
cagctatctcaaaatgtaatagcactggcatataaagtgatacatattagaatgtttactgtaacactctgtaataataa

SEQ ID NO: 46448 - DNA, 80 bp, synthetic construct
  source 1..80: mol_type = other DNA
tacagatggatatctgtcacctaattctatttacattttttttaaaagaccaatggtatatgtgtgtacatctatgtatg

SEQ ID NO: 46449 - DNA, 80 bp, synthetic construct
  source 1..80: mol_type = other DNA
aatggtaattttagtgatgaagacatgttagcattgggaaaatgctggtaaaggaaatctttattttttcttggtatctt

SEQ ID NO: 46450 - DNA, 80 bp, synthetic construct
  source 1..80: mol_type = other DNA
tatttcttggtaataaaacaaaattatttgtaaagtactaccagggccagcctgtctgcatatagccctttttcctaaaa

SEQ ID NO: 46451 - DNA, 80 bp, synthetic construct; identical to SEQ ID NO: 15476
  source 1..80: mol_type = other DNA

SEQ ID NO: 46452 - DNA, 80 bp, synthetic construct
  source 1..80: mol_type = other DNA
taacaggtactttgtaatttttaatggcaaaaagttagagtttagattgtgactgttcataactgccatcacttgccccc

SEQ ID NO: 46453 - DNA, 80 bp, synthetic construct
  source 1..80: mol_type = other DNA
gtatcaagttctatattatgattacctcaattcctcaacagtcaacttttaatccgggggtgtccaatcttttggcttcc

SEQ ID NO: 46454 - DNA, 80 bp, synthetic construct; identical to SEQ ID NO: 15477
  source 1..80: mol_type = other DNA

SEQ ID NO: 46455 - DNA, 80 bp, synthetic construct
  source 1..80: mol_type = other DNA
ttcttcaaatacaactatatgctgaagattatccattttaaatctccaagccctctgctgaagtccagactcacatatcc

SEQ ID NO: 46456 - DNA, 80 bp, synthetic construct
  source 1..80: mol_type = other DNA
ttctgtctttctctttcaaaccgcatgtcagcaaattccattgtctcattttaaaatatacacagcatctgactgctttc

SEQ ID NO: 46457 - DNA, 80 bp, synthetic construct
  source 1..80: mol_type = other DNA
agacggagtctcgctttgtcgcccaggctggagtgcagtggtgcgatcttggctcactgcaagctccgcctcccgggttc

SEQ ID NO: 46458 - DNA, 80 bp, synthetic construct
  source 1..80: mol_type = other DNA
aaaatgctgggattacagacgtgagccaccacgcccggcccagagcagctcttttcaaatttcagtgagatggcaccgct

SEQ ID NO: 46459 - DNA, 80 bp, synthetic construct; identical to SEQ ID NO: 15478
  source 1..80: mol_type = other DNA

SEQ ID NO: 46460 - DNA, 80 bp, synthetic construct
  source 1..80: mol_type = other DNA
aaaaagcatggcttttaacaaccaccgaatctatcatacgtgctgtttcctactgtttccctaccagtctctcccctcag

SEQ ID NO: 46461 - DNA, 80 bp, synthetic construct
  source 1..80: mol_type = other DNA
ccagagatatcataatagtatttacatgctcctgtttctagcattaggtgggtgacctgtactacctcaccagtagttat

SEQ ID NO: 46462 - DNA, 80 bp, synthetic construct
  source 1..80: mol_type = other DNA
gtattaaggcgattagaatctcaggctgtggagtcaaacagaactgcatttcagatacaactttcacacttactagttac

SEQ ID NO: 46463 - DNA, 80 bp, synthetic construct; identical to SEQ ID NO: 15479
  source 1..80: mol_type = other DNA

SEQ ID NO: 46464 - DNA, 80 bp, synthetic construct
  source 1..80: mol_type = other DNA
attttaaaaactaattgcattcatgtaaaccagcaatagttataaaatgaaaaagagaaaaatcgatgttaaaaatagca

SEQ ID NO: 46465 - DNA, 80 bp, synthetic construct
  source 1..80: mol_type = other DNA
cgatttctgtttcccccagattgaatctaaaaatgtaacgcaattcatgccaaagtcccacagactgtgtgtatgcacgc

SEQ ID NO: 46466 - DNA, 80 bp, synthetic construct; identical to SEQ ID NO: 15480
  source 1..80: mol_type = other DNA

SEQ ID NO: 46467 - DNA, 80 bp, synthetic construct
  source 1..80: mol_type = other DNA
atctttaagataccagtgtagggagaaatttcttgataccaaaaaaaagcatttaaccataaaggaaaggatagataatt

SEQ ID NO: 46468 - DNA, 80 bp, synthetic construct
  source 1..80: mol_type = other DNA
acctataaaggtatgggtaaaagagtgaaataaacactcttagatgtgctaatccataatcaagattaccacctgccaat

SEQ ID NO: 46469 - DNA, 80 bp, synthetic construct
  source 1..80: mol_type = other DNA
caggtgtatacccgtagagaaatgcaggcatatgtggaccaaaatacatatgtaagaattttcattaagagcatttaaag

SEQ ID NO: 46470 - DNA, 80 bp, synthetic construct; identical to SEQ ID NO: 15481
  source 1..80: mol_type = other DNA

SEQ ID NO: 46471 - DNA, 80 bp, synthetic construct
  source 1..80: mol_type = other DNA
caggagaatcactggaacctggaggttgcagtgagccgagaatgcaccactacactccagcctgggcgacagagtaagac

SEQ ID NO: 46472 - DNA, 80 bp, synthetic construct
  source 1..80: mol_type = other DNA
atacttatattgactcagtttgaatctggtcccaaaaactcacaaaatataagactgtcaccaacatcacataagcaaaa

SEQ ID NO: 46473 - DNA, 80 bp, synthetic construct
  source 1..80: mol_type = other DNA
attaataaattctgagcagccatcttatgttaaagaaaagaaggcatataaatagcaaaaaagcgtatgaaaagatgctc

SEQ ID NO: 46474 - DNA, 80 bp, synthetic construct; identical to SEQ ID NO: 15482
  source 1..80: mol_type = other DNA

SEQ ID NO: 46475 - DNA, 80 bp, synthetic construct
  source 1..80: mol_type = other DNA
aacacaaaaaattagctgggcgtggtggcaggtacctatagtcccagctactcaggaggctgaggcaggagaatggcatg

SEQ ID NO: 46476 - DNA, 80 bp, synthetic construct
  source 1..80: mol_type = other DNA
attctggaaaaggtaaaattaaagaggtagtaaaaaagatgagaggttgtcaggttcctgggagaagggtagaaggatga

SEQ ID NO: 46477 - DNA, 80 bp, synthetic construct
  source 1..80: mol_type = other DNA
gtaatcccagcactttgggaggccgaggcaggtggatcacctgaggtcaggggtttgagaccaacctggacaacatagtg

SEQ ID NO: 46478 - DNA, 80 bp, synthetic construct; identical to SEQ ID NO: 15483
  source 1..80: mol_type = other DNA

SEQ ID NO: 46479 - DNA, 80 bp, synthetic construct
  source 1..80: mol_type = other DNA
ctctacaaagttaagcctattaatttcaaaataagaatctccacagcagcattttacataagagcccacaactgaaaaaa

SEQ ID NO: 46480 - DNA, 80 bp, synthetic construct
  source 1..80: mol_type = other DNA
aactgctggccatgatgtatgcctatcttcaactttactagatgatgacaaattgctttctaaattggttccaccaaaat

SEQ ID NO: 46481 - DNA, 80 bp, synthetic construct
  source 1..80: mol_type = other DNA
agtattttagatagagagagaacactcttctatgtatatgatacttttcagtataattaacaatttccatgaaacagaag

SEQ ID NO: 46482 - DNA, 80 bp, synthetic construct
  source 1..80: mol_type = other DNA
cccagagagtgggagaaaatcttcataatctgtacatctgacaaaggaccaatatccagaatctacaaggaacacaaaca

SEQ ID NO: 46483 - DNA, 80 bp, synthetic construct; identical to SEQ ID NO: 15484
  source 1..80: mol_type = other DNA

SEQ ID NO: 46484 - DNA, 80 bp, synthetic construct
  source 1..80: mol_type = other DNA
ggatacttgcatgcatgtttacagcagcacaattcgcaattgctaaaatatggaaccagcccagatgcccatcagtcaac

SEQ ID NO: 46485 - DNA, 80 bp, synthetic construct
  source 1..80: mol_type = other DNA
tcataagtgggagctaagctatgaggatgcaaaggcacgataaaatagactttggggactcgggggaaaggataagagtg

SEQ ID NO: 46486 - DNA, 80 bp, synthetic construct
  source 1..80: mol_type = other DNA
atctgcatatacttgtactctcctgctaaggagtaaataataaaaacttcaataacatcaaaaaagaaagaaaaccaagg

SEQ ID NO: 46487 - DNA, 80 bp, synthetic construct; identical to SEQ ID NO: 15485
  source 1..80: mol_type = other DNA

SEQ ID NO: 46488 - DNA, 80 bp, synthetic construct
  source 1..80: mol_type = other DNA
gacatacacagtttacatcataataaatgtggtattctgggcaggaatttgtgaccatgagcagtggtacacctagcgta

SEQ ID NO: 46489 - DNA, 80 bp, synthetic construct
  source 1..80: mol_type = other DNA
gatcacatgagatcaggagttcgagaccagcctgaccaacgtggtgaaaccccatctctactaaaaatacaaaattagcc

SEQ ID NO: 46490 - DNA, 80 bp, synthetic construct
  source 1..80: mol_type = other DNA
tcacctctaaatttattcctttctgagtggaagattcctcttaccttattcacattctgtctcttctgaacctactacct

SEQ ID NO: 46491 - DNA, 80 bp, synthetic construct; identical to SEQ ID NO: 15486
  source 1..80: mol_type = other DNA

SEQ ID NO: 46492 - DNA, 80 bp, synthetic construct
  source 1..80: mol_type = other DNA
cagagaaagcaggtggtgaatcacccatgcctgagatcaatgccattgatgccaatgatcatatattcaaggttttccca

SEQ ID NO: 46493 - DNA, 80 bp, synthetic construct
  source 1..80: mol_type = other DNA
ttatgcaggctccctaaaccttcttatgtcctgtctcctcttattctcttcttccctgcactctacagctaaaataattt

SEQ ID NO: 46494 - DNA, 80 bp, synthetic construct
  source 1..80: mol_type = other DNA
cgccaccacacctggctaattttttgtgtttttaatagagatggggtttcaccatgttagccaggatggtctcgatctcc

SEQ ID NO: 46495 - DNA, 80 bp, synthetic construct; identical to SEQ ID NO: 15487
  source 1..80: mol_type = other DNA

SEQ ID NO: 46496 - DNA, 80 bp, synthetic construct
  source 1..80: mol_type = other DNA
tttactctgctttcttttgttaaatgtgtctagttcctcccactcagcccattaggtgttaacattttttagaccagaat

SEQ ID NO: 46497 - DNA, 80 bp, synthetic construct
  source 1..80: mol_type = other DNA
tgtgtgccaccatacctggctaatttttgtatttttagtagagacagggttttactatgttggccaggctggtctcgaac

SEQ ID NO: 46498 - DNA, 80 bp, synthetic construct
  source 1..80: mol_type = other DNA
taataatgcaaaattgaatggagtccagttttggacttattttttattacatacttcctgaggaggcatactgcatgatt

SEQ ID NO: 46499 - DNA, 80 bp, synthetic construct; identical to SEQ ID NO: 15488
  source 1..80: mol_type = other DNA

SEQ ID NO: 46500 - DNA, 80 bp, synthetic construct
  source 1..80: mol_type = other DNA
tcagcatccagagtaaggtttcttcattcattaagtagaagtgacattgtctccacattgtcagcaggtagtgtgtgttg

SEQ ID NO: 46501 - DNA, 80 bp, synthetic construct
  source 1..80: mol_type = other DNA
tcctagagctctggaacctggaactctcagtgaagaaaggcaataggaggcaattaacaccctgattttattttttcaat

SEQ ID NO: 46502 - DNA, 80 bp, synthetic construct; identical to SEQ ID NO: 15489
  source 1..80: mol_type = other DNA

SEQ ID NO: 46503 - DNA, 80 bp, synthetic construct
  source 1..80: mol_type = other DNA
gcaacacataaacacacatgtaaaaaaaaatgcacaatatgaaatttgattactcaacagcaagtcatcacaaatgcaag

SEQ ID NO: 46504 - DNA, 80 bp, synthetic construct
  source 1..80: mol_type = other DNA
tcttttcctttttaccaagaggaatactgtcacattgagctgtttgaagaagtatacagattttgctggtcactctgcat

SEQ ID NO: 46505 - DNA, 80 bp, synthetic construct
  source 1..80: mol_type = other DNA
aaccctcaacctccagggttatctcttgggaaagaatgcaaatgggattttattctctagtatgtttttgaagctatgct

SEQ ID NO: 46506 - DNA, 80 bp, synthetic construct; identical to SEQ ID NO: 15490
  source 1..80: mol_type = other DNA

SEQ ID NO: 46507 - DNA, 80 bp, synthetic construct
  source 1..80: mol_type = other DNA
aaaaaaaagttcttatgctgagcatgaatctatctccttttgacttgcaccattgaactcaattctgtgcttccaaggag

SEQ ID NO: 46508 - DNA, 80 bp, synthetic construct
  source 1..80: mol_type = other DNA
ggttggtttgccagactttatttactccagttcttctaatctagatagttggcctaaataaaggggagaagtataagaaa

SEQ ID NO: 46509 - DNA, 80 bp, synthetic construct
  source 1..80: mol_type = other DNA
acacacacaacttgttctgcagttgtgatccttgggcaaattacgctgataccaaaaattaaattagcagggtacccatc

SEQ ID NO: 46510 - DNA, 80 bp, synthetic construct; identical to SEQ ID NO: 15491
  source 1..80: mol_type = other DNA

SEQ ID NO: 46511 - DNA, 80 bp, synthetic construct
  source 1..80: mol_type = other DNA
tatatgtaaaggttctaatgctgcacaaagtgcatgcaaattgtctgtcttcccatcaaccacacaggaacattcaggag

SEQ ID NO: 46512 - DNA, 80 bp, synthetic construct
  source 1..80: mol_type = other DNA
tttatgatcacatgtcttggagttctgaagcaattggttagtgacacttatagcaagtaattagtggcctagtagctgga

SEQ ID NO: 46513 - DNA, 80 bp, synthetic construct
  source 1..80: mol_type = other DNA
ttattggtttacctttgtccatgatctttgatccagcaggcttatctgggacagtaagatggtcatgattgctactcaat

SEQ ID NO: 46514 - DNA, 80 bp, synthetic construct; identical to SEQ ID NO: 15492
  source 1..80: mol_type = other DNA

SEQ ID NO: 46515 - DNA, 80 bp, synthetic construct
  source 1..80: mol_type = other DNA
cattctctaccttttattttcaatcacggtgtccccgtgttatttcaaaaagtgaccaataataaaagagtcaaaaggta

SEQ ID NO: 46516 - DNA, 80 bp, synthetic construct
  source 1..80: mol_type = other DNA
gaatgcttcagaatactgcattacactttgagcaaaatataatttgcaatctatcactgaattcacactgatggaacaag

SEQ ID NO: 46517 - DNA, 80 bp, synthetic construct
  source 1..80: mol_type = other DNA
cctggcttggtggcgcgcacctgtagtcccagctattcaggagactgaggcaggagaatcacttgaacctgggaggcaga

SEQ ID NO: 46518 - DNA, 80 bp, synthetic construct; identical to SEQ ID NO: 15493
  source 1..80: mol_type = other DNA

SEQ ID NO: 46519 - DNA, 80 bp, synthetic construct
  source 1..80: mol_type = other DNA
tcactcactctttctgctgccaccatgtaagatgtgccttgtttccccttcgccttcctccatgattgtaaagtttcctg

SEQ ID NO: 46520 - DNA, 80 bp, synthetic construct
  source 1..80: mol_type = other DNA
cattttgatgttgaaatacatgccttctttttaaaaaatggtgacagtacatataagcctttgtctctttgtctctttgt

SEQ ID NO: 46521 - DNA, 80 bp, synthetic construct
  source 1..80: mol_type = other DNA
gcattttatggttcagttgcattacatcatcctatgggacatgcctgtcaacatcaagcattcaaaactctaaggaaggc

SEQ ID NO: 46522 - DNA, 80 bp, synthetic construct
  source 1..80: mol_type = other DNA
tcccagctactcgggaagctgaggcaggagaatcacttgaactcaagaagcggaagttgcagtgagccaagatcacatga

SEQ ID NO: 46523 - DNA, 80 bp, synthetic construct; identical to SEQ ID NO: 15494
  source 1..80: mol_type = other DNA

SEQ ID NO: 46524 - DNA, 80 bp, synthetic construct
  source 1..80: mol_type = other DNA
aatccattcaggaatatgtcaagtaccttgtaaactggttaccttacatcacttagatctttaataaccaagagatcaaa

SEQ ID NO: 46525 - DNA, 80 bp, synthetic construct
  source 1..80: mol_type = other DNA
aaaaatatccattctggaccagtcctgacacgttcccctattgtgagctattttagtaaaattcaacttctatgtgatca

SEQ ID NO: 46526 - DNA, 80 bp, synthetic construct; identical to SEQ ID NO: 15495
  source 1..80: mol_type = other DNA

SEQ ID NO: 46527 - DNA, 80 bp, synthetic construct
  source 1..80: mol_type = other DNA
gaagaggaaaaggaaaatgagaaagtgactacatattcaggtcagggggagttttcattggaaaagagattgataaaata

SEQ ID NO: 46528 - DNA, 80 bp, synthetic construct
  source 1..80: mol_type = other DNA
tgtgaaccatctgtgcaacatactcataaagctccccactgaagatcaaatgaaagcagaaggcagtgctagtctctcct

SEQ ID NO: 46529 - DNA, 80 bp, synthetic construct
  source 1..80: mol_type = other DNA
gtgtatcaacttacacagttgtcccttgaacagtagggattcaaactgcacaggtccacttaaacacagatattttccaa

SEQ ID NO: 46530 - DNA, 80 bp, synthetic construct
  source 1..80: mol_type = other DNA
cacagataccaagggatgactggattgcaactactgattgactcttcatctttttgatgagctacctgagaacaggctgg

SEQ ID NO: 46531 - DNA, 80 bp, synthetic construct; identical to SEQ ID NO: 15496
  source 1..80: mol_type = other DNA

SEQ ID NO: 46532 - DNA, 80 bp, synthetic construct
  source 1..80: mol_type = other DNA
tacattaaagattaatactgatttttcctattttctgtataggatagttttaattcttgaagaagcatcattcaaatgtt

SEQ ID NO: 46533 - DNA, 80 bp, synthetic construct
  source 1..80: mol_type = other DNA
aacaaaacaaaaccaaaatgacaagaaaggaagaaaagtacacagcttccctttccttgtattggccatattagcaaaaa

SEQ ID NO: 46534 - DNA, 80 bp, synthetic construct
  source 1..80: mol_type = other DNA
accgaagatctactcatcactgtgatccttagtatccatgtgaccttgaagaagtcattttacctgcaagtaccattcta

SEQ ID NO: 46535 - DNA, 80 bp, synthetic construct; identical to SEQ ID NO: 15497
  source 1..80: mol_type = other DNA

SEQ ID NO: 46536 - DNA, 80 bp, synthetic construct
  source 1..80: mol_type = other DNA
ggcctccttcccattgcttggacctccactgaaatatcacttcttccacagggtcttccatgacagagcagacagagcag

SEQ ID NO: 46537 - DNA, 80 bp, synthetic construct
  source 1..80: mol_type = other DNA
agttccattcagcatccctgtatttttttttaataaaaacagctttattaaaacattggctagatgtggaggctcatgcc

SEQ ID NO: 46538 - DNA, 80 bp, synthetic construct
  source 1..80: mol_type = other DNA
gaggcaggagaatcacttgaacccaggaggcggaagttgcagtgagccgaaatcacaccactgcactctagcctgggcaa

SEQ ID NO: 46539 - DNA, 80 bp, synthetic construct; identical to SEQ ID NO: 15498
  source 1..80: mol_type = other DNA

SEQ ID NO: 46540 - DNA, 80 bp, synthetic construct
  source 1..80: mol_type = other DNA
actaatggcttacatctgaggcttttgccaaaggattaccttggctatcaagagatgccaggagactttattctcaaaag

SEQ ID NO: 46541 - DNA, 80 bp, synthetic construct
  source 1..80: mol_type = other DNA
ccgatagctatgtgtatttctctggaacctggcttcctcatttgtaaaactcatacaagatttctgtgagagtcaaatga

SEQ ID NO: 46542 - DNA, 80 bp, synthetic construct
  source 1..80: mol_type = other DNA
agtttcaaatgtgtgctaggcacagtcataaatgatgtgggtaaatgaaaagatattgggcactggctctgactttaaga

SEQ ID NO: 46543 - DNA, 80 bp, synthetic construct; identical to SEQ ID NO: 15499
  source 1..80: mol_type = other DNA

SEQ ID NO: 46544 - DNA, 80 bp, synthetic construct
  source 1..80: mol_type = other DNA
caagccaaagactcaggagttaatttaagaagcaatgagaattcactggaagcttttgtgcaggtgaatcaatgtgatca

SEQ ID NO: 46545 - DNA, 80 bp, synthetic construct
  source 1..80: mol_type = other DNA
gcaggctgtgaatgaagatgagctgttaaagccagaggcaaaaatataaacacgaattttagcaaagtcttaaaatcagt

SEQ ID NO: 46546 - DNA, 80 bp, synthetic construct
  source 1..80: mol_type = other DNA
cttgcagttctgttctttcatttagtacagatattgaataatcaaatgactttggtagacaactgttcaagatatgtctt

SEQ ID NO: 46547 - DNA, 80 bp, synthetic construct; identical to SEQ ID NO: 15500
  source 1..80: mol_type = other DNA

SEQ ID NO: 46548 - DNA, 80 bp, synthetic construct
  source 1..80: mol_type = other DNA
atctgcctatttgatggtctaccttccaaacggattcaaaatctaaccattccatttctctgccaccccactgctatccc

SEQ ID NO: 46549 - DNA, 80 bp, synthetic construct
  source 1..80: mol_type = other DNA
gaaatggaagttgattatatccctcctctgctcaaacctttcaaaggctccctaaagtccttaactggcccatatgccct

SEQ ID NO: 46550 - DNA, 80 bp, synthetic construct
  source 1..80: mol_type = other DNA
ctgttccctttgcttggaaaacttttcccccaaatatccacttggctgactctcacaccacctttcaaggtttcgctcag

SEQ ID NO: 46551 - DNA, 80 bp, synthetic construct; identical to SEQ ID NO: 15501
  source 1..80: mol_type = other DNA

SEQ ID NO: 46552 - DNA, 80 bp, synthetic construct
  source 1..80: mol_type = other DNA
tagaaagttggttctttttgctcttttgtgaaactaaaggaatcacagataatgatttctacaaattgtcttccagagtg

SEQ ID NO: 46553 - DNA, 80 bp, synthetic construct
  source 1..80: mol_type = other DNA
aaggaagatttcctgacatgttctttattatctcgtgaaatgtcattcagcccattagaagcagaagtccaaactggttt

SEQ ID NO: 46554 - DNA, 80 bp, synthetic construct; identical to SEQ ID NO: 15502
  source 1..80: mol_type = other DNA

SEQ ID NO: 46555 - DNA, 80 bp, synthetic construct
  source 1..80: mol_type = other DNA
aattcaccaggtatggtggtgcacacctgtagtcccagctactcggggggccgaggtgggaggatgacctgagccaaggg

SEQ ID NO: 46556 - DNA, 80 bp, synthetic construct
  source 1..80: mol_type = other DNA
gtctgtttttcagaaagagaagaaaacaaaaacaaaatctgtctgggaaatatgtgatcaggaggaacacattctgtttc

SEQ ID NO: 46557 - DNA, 80 bp, synthetic construct
  source 1..80: mol_type = other DNA
gagttcagtgacctaacttactggcttcatgagtatcccttcatttatttattttaaatcaagtattccctgaacttcta

SEQ ID NO: 46558 - DNA, 80 bp, synthetic construct; identical to SEQ ID NO: 15503
  source 1..80: mol_type = other DNA

SEQ ID NO: 46559 - DNA, 80 bp, synthetic construct
  source 1..80: mol_type = other DNA
ataatcataaaaagaggtatattggtgggcacagtgtgagggagaatgaacttgaggaaaaaatggagggagaacaacta

SEQ ID NO: 46560 - DNA, 80 bp, synthetic construct
  source 1..80: mol_type = other DNA
tctttagaggcattaaagggtaaactaatcagaaagttgtcaaaagctgagaaacattgtaaggtctgaagatatcatta

SEQ ID NO: 46561 - DNA, 80 bp, synthetic construct
  source 1..80: mol_type = other DNA
tatgtcttttcttggctgctagccaaataaattagaaaatgaccacaattctccactgacagtgtgaaaaaacagtagag

SEQ ID NO: 46562 - DNA, 80 bp, synthetic construct; identical to SEQ ID NO: 15504
  source 1..80: mol_type = other DNA

SEQ ID NO: 46563 - DNA, 80 bp, synthetic construct
  source 1..80: mol_type = other DNA
ctactcgggaggctgaggcaggagaatggtgtgaacctgggaggcagagcttgcagtgagccaagattgtgccactgcac

SEQ ID NO: 46564 - DNA, 80 bp, synthetic construct
  source 1..80: mol_type = other DNA
aaccatgaaatgaagacaggaatatctacttcctcatgacctagaataggaaacaatttttgaaaccagtgggaaaaaaa

SEQ ID NO: 46565 - DNA, 80 bp, synthetic construct
  source 1..80: mol_type = other DNA
tttcatagcaaaaagcagaactacttttgcaccaaactatagctgtagagctgacaaaggactaacacatagaataataa

SEQ ID NO: 46566 - DNA, 80 bp, synthetic construct; identical to SEQ ID NO: 15505
  source 1..80: mol_type = other DNA

SEQ ID NO: 46567 - DNA, 80 bp, synthetic construct
  source 1..80: mol_type = other DNA
gaatcaaatttgaattcctctctagtgaatacacaaatcgctccatgtgcacttttaatgcactaaccccactcctgact

SEQ ID NO: 46568 - DNA, 80 bp, synthetic construct
  source 1..80: mol_type = other DNA
gaacataaataaacactgtcaaagaagtctttgcaagcactggcctgtcacctagaagcctttgcatcctcatgaattct

SEQ ID NO: 46569 - DNA, 80 bp, synthetic construct; identical to SEQ ID NO: 15506
  source 1..80: mol_type = other DNA

SEQ ID NO: 46570 - DNA, 80 bp, synthetic construct
  source 1..80: mol_type = other DNA
tctggctattgcaatttcaatccaattcagaaagttcatatctaatgaactacctggtaactacctggtgcaaaggaatt

SEQ ID NO: 46571 - DNA, 80 bp, synthetic construct
  source 1..80: mol_type = other DNA
ttttgattgtaggaatcctaatgaattgaaactggcaggatcactaaactatcagtggtgcacaacttgtgaaggggagt

SEQ ID NO: 46572 - DNA, 80 bp, synthetic construct
  source 1..80: mol_type = other DNA
aatagacaatgggtacttattttatggaaaagaggaccaagaagatggctaggacaccaccgatttcatggtattgcacg

SEQ ID NO: 46573 - DNA, 80 bp, synthetic construct; identical to SEQ ID NO: 15507
  source 1..80: mol_type = other DNA

SEQ ID NO: 46574 - DNA, 80 bp, synthetic construct
  source 1..80: mol_type = other DNA
ggaaatagtgggatgaaagttaactgaccagatcatgacgagatcatgtctatcagtaagaattccacaagtggagcaat

SEQ ID NO: 46575 - DNA, 80 bp, synthetic construct
  source 1..80: mol_type = other DNA
gtgtgaatatgtctgtctccacatattttcagatcatcttaaatgccaaagcatgtttcctcaggatcagactatacata

SEQ ID NO: 46576 - DNA, 80 bp, synthetic construct
  source 1..80: mol_type = other DNA
gatccaagtttatttaaccacctaaaattcaaatagaaagcaaatgttgaccaaagagattagccccccacccattcacc

SEQ ID NO: 46577 - DNA, 80 bp, synthetic construct; identical to SEQ ID NO: 15508
  source 1..80: mol_type = other DNA

SEQ ID NO: 46578 - DNA, 80 bp, synthetic construct
  source 1..80: mol_type = other DNA
cgaaaagatcatccatttaatccaggaatatttttatgtcaatcagtaaaaaaaatctggctagaatttaacaggtattt

SEQ ID NO: 46579 - DNA, 80 bp, synthetic construct
  source 1..80: mol_type = other DNA
gtagttccttctcaagggtttacttaggaacatatcttgaaacacaaatttttaaaagctgggacacaaagtgtgtctat

SEQ ID NO: 46580 - DNA, 80 bp, synthetic construct
  source 1..80: mol_type = other DNA
attcagcatactacacttgcactaagccataaatattgcaccttcccacctgtataactgtcagataattaggaatcctt

SEQ ID NO: 46581 - DNA, 80 bp, synthetic construct
  source 1..80: mol_type = other DNA
caacagggagaaaccccgtcactacttaaaaaaatacaaaattagccgggtgtggtggcggaagcctgtaatcccagcta

SEQ ID NO: 46582 - DNA, 80 bp, synthetic construct; identical to SEQ ID NO: 15509
  source 1..80: mol_type = other DNA

SEQ ID NO: 46583 - DNA, 80 bp, synthetic construct
  source 1..80: mol_type = other DNA
agacaatatgcgaaaaaaatttctcagcctcaatagtattttgagaaatgcacactcaaacacaggaaaatattttcacc

SEQ ID NO: 46584 - DNA, 80 bp, synthetic construct
  source 1..80: mol_type = other DNA
cccttcacccaacaattccaatcataaatatcaatcctatagaaacacactttcatatacacaaatgtggcagaatgttc

SEQ ID NO: 46585 - DNA, 80 bp, synthetic construct; identical to SEQ ID NO: 15510
  source 1..80: mol_type = other DNA

SEQ ID NO: 46586 - DNA, 80 bp, synthetic construct
  source 1..80: mol_type = other DNA
agaagatcaagcatagaatagtatgtttagcctgatccactgtacttcaaaaacgatatgtttttgtatgtgcatgaatt

SEQ ID NO: 46587 - DNA, 80 bp, synthetic construct
  source 1..80: mol_type = other DNA
tgtctttaccaaaaatacaaaaattagccaggcgtggtggcacacgcctataatcccagctacttgggaggctgaggcag

SEQ ID NO: 46588 - DNA, 80 bp, synthetic construct
  source 1..80: mol_type = other DNA
ttgctattcacctgacccaaaaaaccccataaaaccatgcaaaccaagaggttcaaatctttgtgttcactttaagaaca

SEQ ID NO: 46589 - DNA, 80 bp, synthetic construct; identical to SEQ ID NO: 15511
  source 1..80: mol_type = other DNA

SEQ ID NO: 46590 - DNA, 80 bp, synthetic construct
  source 1..80: mol_type = other DNA
agaggtggctgcatggagaaaaaaaaaaaaaagtgtcccataagaaactgaagaaacaaaagctcatggcacgagcatcg

SEQ ID NO: 46591 - DNA, 80 bp, synthetic construct
  source 1..80: mol_type = other DNA
tttaaaagttcattttttaaaattgaccaggcaaaacataacaatttcatggttcactttttaaaataccacaataacaa

SEQ ID NO: 46592 - DNA, 80 bp, synthetic construct
  source 1..80: mol_type = other DNA
tctgaaacaagaaaaggcatttctaagctcctctcccaaacatggaaatagagcaaaatagaagactgttgacaataaag

SEQ ID NO: 46593 - DNA, 80 bp, synthetic construct
  source 1..80: mol_type = other DNA
actggcttagagtaccttctttgctaagaactttttttaaaacatcatggcagcaggaaaacatctatctgtggctaagt

SEQ ID NO: 46594 - DNA, 80 bp, synthetic construct; identical to SEQ ID NO: 15512
  source 1..80: mol_type = other DNA

SEQ ID NO: 46595 - DNA, 80 bp, synthetic construct
  source 1..80: mol_type = other DNA
tctcatcttaccaagtaatacccagatacattatttcctggcttaaaccggctgcatcagtaagaagggaagttcttcat

SEQ ID NO: 46596 - DNA, 80 bp, synthetic construct
  source 1..80: mol_type = other DNA
acatgagaagttattataaatttcaggcccagacaaaatggaccatttagccggatggacaattttcaagtctaaaggtc

SEQ ID NO: 46597 - DNA, 80 bp, synthetic construct
  source 1..80: mol_type = other DNA
tagcatagataggcggtaagatcttgacgttgataactgtgaaagactttgatttcacagccaacaggatgaagtattta

SEQ ID NO: 46598 - DNA, 80 bp, synthetic construct; identical to SEQ ID NO: 15513
  source 1..80: mol_type = other DNA

SEQ ID NO: 46599 - DNA, 80 bp, synthetic construct
  source 1..80: mol_type = other DNA
ttgcaaggaatcagccacagaatgagtgggaaggacgggccaaggatggaagctggagctacaaggcacttttaaagaaa

SEQ ID NO: 46600 - DNA, 80 bp, synthetic construct
  source 1..80: mol_type = other DNA
tccacatcccacttacacagcaagggctttgctaaccaacaggatttagcaactgatgcaaataaaaaaaaaataagtaa

SEQ ID NO: 46601 - DNA, 80 bp, synthetic construct; identical to SEQ ID NO: 15514
  source 1..80: mol_type = other DNA

SEQ ID NO: 46602 - DNA, 80 bp, synthetic construct
  source 1..80: mol_type = other DNA
ttgctttttttcttcatgtttctagagcaagagagcaatgagaactacatagggcagataggtaaggaaatcattataag

SEQ ID NO: 46603 - DNA, 80 bp, synthetic construct
  source 1..80: mol_type = other DNA
atagggctaaatcaaagagaatgccctctgatatctccaatcagcacctcaaatacagcctgattcaaacagccattgtt

SEQ ID NO: 46604 - DNA, 80 bp, synthetic construct
  source 1..80: mol_type = other DNA
ggaggctgatgcaggagaatcattcgaactcaggatgcagaggttgcagtgagccgagatcgcaccactgcactccagcc

SEQ ID NO: 46605 - DNA, 80 bp, synthetic construct
  source 1..80: mol_type = other DNA
tctacaattttaagtttgatgtactccgagcaaaggcgttttgcaatatgttcaggacaatacatggagaggtgataaat

SEQ ID NO: 46606 - DNA, 80 bp, synthetic construct; identical to SEQ ID NO: 15515
  source 1..80: mol_type = other DNA

SEQ ID NO: 46607 - DNA, 80 bp, synthetic construct
  source 1..80: mol_type = other DNA
cacgttcatttcctgcacattctcagctgcaaaataaaaggtcttgatctgtggatggctgatcttaaaagcacttgaag

SEQ ID NO: 46608 - DNA, 80 bp, synthetic construct
  source 1..80: mol_type = other DNA
atatagagaactaagagtcaattttttatgtcagaacgtccagaacagggctgagtcttagctggtcagtagtttccatt

SEQ ID NO: 46609 - DNA, 80 bp, synthetic construct
  source 1..80: mol_type = other DNA
gtgagccgagatcatgccactgcactccagtctgggtgacagaggaagactccgtctcaaaaaacaaataaataaataaa

SEQ ID NO: 46610 - DNA, 80 bp, synthetic construct; identical to SEQ ID NO: 15516
  source 1..80: mol_type = other DNA

SEQ ID NO: 46611 - DNA, 80 bp, synthetic construct
  source 1..80: mol_type = other DNA
acaagaatcagcactggacatgtgcaaccacaccacagaggcaaagacttaaagctaacaccagtttactaaccttgtta

SEQ ID NO: 46612 - DNA, 80 bp, synthetic construct
  source 1..80: mol_type = other DNA
acatacgcaaaatatagcagactgctatcatgggaggagcacttgaatgagagtctatagatacctgggtttacagccag

SEQ ID NO: 46613 - DNA, 80 bp, synthetic construct; identical to SEQ ID NO: 15517
  source 1..80: mol_type = other DNA

SEQ ID NO: 46614 - DNA, 80 bp, synthetic construct
  source 1..80: mol_type = other DNA
catgccaagacttcgtgggggttttaaaatccatctgctccacaaaacgaaattccagaaaatgagaggttaaatgcttc

SEQ ID NO: 46615 - DNA, 80 bp, synthetic construct
  source 1..80: mol_type = other DNA
ctcagagttttgtggaagatgagagacaacttactgctttttcttgcattcagatgctctttccacagtgaaatcaggca

SEQ ID NO: 46616 - DNA, 80 bp, synthetic construct
  source 1..80: mol_type = other DNA
tcaccatggaggtgtcccagatacacagctcatgagaaagattaatgttctcctgataagtcacccagaatctttccaag

SEQ ID NO: 46617 - DNA, 80 bp, synthetic construct; identical to SEQ ID NO: 15518
  source 1..80: mol_type = other DNA

SEQ ID NO: 46618 - DNA, 80 bp, synthetic construct
  source 1..80: mol_type = other DNA
ttggggattaaatcacagagctgcatctttcagaacctcagtcccatcattgatttctgggaattctttctacaaagaaa

SEQ ID NO: 46619 - DNA, 80 bp, synthetic construct
  source 1..80: mol_type = other DNA
tgttcgtcacccatagaactcaaatcttctttcatctacactggtgtctctgagtagagaaatagaatctacaagattaa

SEQ ID NO: 46620 - DNA, 80 bp, synthetic construct
  source 1..80: mol_type = other DNA
gcattcttttcttcagaaaaattaaactgtgaggcatccaaccctatgcccatcttctctctcttatgtgactcaactta

SEQ ID NO: 46621 - DNA, 80 bp, synthetic construct; identical to SEQ ID NO: 15519
  source 1..80: mol_type = other DNA

SEQ ID NO: 46622 - DNA, 80 bp, synthetic construct
  source 1..80: mol_type = other DNA
tgtactcattcatatgtatattatatatatgcagcttctctcttgacagccttcttaattactggatgctgattctcgaa

SEQ ID NO: 46623 - DNA, 80 bp, synthetic construct
  source 1..80: mol_type = other DNA
ttatttgaaatgcttggggactggaagtgccttatatttcagaatttttctgatttggggatatttgcatatacaaacaa

SEQ ID NO: 46624 - DNA, 80 bp, synthetic construct
  source 1..80: mol_type = other DNA
ctcagaggaattgaaaaagggtactcaaatacatgtgcagccctgttcacaaagcactcacaacagccaaaaggtagaaa

SEQ ID NO: 46625 - DNA, 80 bp, synthetic construct; identical to SEQ ID NO: 15520
  source 1..80: mol_type = other DNA

SEQ ID NO: 46626 - DNA, 80 bp, synthetic construct
  source 1..80: mol_type = other DNA
aacatcacttagactcagcatttgtttctacttcctcctcccattcatttctatatgttccagagaaactgtagagacca

SEQ ID NO: 46627 - DNA, 80 bp, synthetic construct
  source 1..80: mol_type = other DNA
cttcttctctttcaggggtcttgttctcctgtctgtttcttaaatgtcagagttcactagagttctgtccacagacttat

SEQ ID NO: 46628 - DNA, 80 bp, synthetic construct
  source 1..80: mol_type = other DNA
tgtcccagatttccaactgcctagtaagcctattcccatgggccccgcaagagtaacaaattcaaaatcaaactcattat

SEQ ID NO: 46629 - DNA, 80 bp, synthetic construct; identical to SEQ ID NO: 15521
  source 1..80: mol_type = other DNA

SEQ ID NO: 46630 - DNA, 80 bp, synthetic construct
  source 1..80: mol_type = other DNA
caagtctaaatgcctcagcagaggatgaaagaccctttataatcaagccctgattagttccacaatttcatctctccccc

SEQ ID NO: 46631 - DNA, 80 bp, synthetic construct
  source 1..80: mol_type = other DNA
gtgaaactctatctctactaaaaattacaaaaattagccaggtgtggtggcggacgcctgtaatcccagctacttgggag

SEQ ID NO: 46632 - DNA, 80 bp, synthetic construct
  source 1..80: mol_type = other DNA
aatagttccatggagctgaattagaatcagcacccaatttatggcatgattagtttctagacaactcattttcagtacaa

SEQ ID NO: 46633 - DNA, 80 bp, synthetic construct; identical to SEQ ID NO: 15522
  source 1..80: mol_type = other DNA

SEQ ID NO: 46634 - DNA, 80 bp, synthetic construct
  source 1..80: mol_type = other DNA
catttgggtggattccttttctgcataagtgaaacagctgagattcccttaaacaggagcctaaataagtttgggtgaaa

SEQ ID NO: 46635 - DNA, 80 bp, synthetic construct
  source 1..80: mol_type = other DNA
tatttgacttgcaaaaaaaaaatgcctcaaaaatgacaatcacagagggcaaatcttgagagaatgacagtgttcttctc

SEQ ID NO: 46636 - DNA, 80 bp, synthetic construct
  source 1..80: mol_type = other DNA
agcgctttgggaggccgaggcagaaagatcacttgagctcaggagttcaagaccagcccagacaacataggcagaccttg

SEQ ID NO: 46637 - DNA, 80 bp, synthetic construct
  source 1..80: mol_type = other DNA
aaattcagaagaaacacgttccttttcactttgttttatgatgttctatgatctcaaacctttctcctcacaattcagcc

SEQ ID NO: 46638 - DNA, 80 bp, synthetic construct; identical to SEQ ID NO: 15523
  source 1..80: mol_type = other DNA

SEQ ID NO: 46639 - DNA, 80 bp, synthetic construct
  source 1..80: mol_type = other DNA
acaaacaaaaaacagagtaaagggttccaaggtgtgagcaaggcaggttgcctcctgctccctggccctataatgccctt

SEQ ID NO: 46640 - DNA, 80 bp, synthetic construct
  source 1..80: mol_type = other DNA
ggcggccctcccttacaggacctctcttactgtatttaattatctggttgtttgtctgcttctccaatggattgtgagta

SEQ ID NO: 46641 - DNA, 80 bp, synthetic construct; identical to SEQ ID NO: 15524
  source 1..80: mol_type = other DNA

SEQ ID NO: 46642 - DNA, 80 bp, synthetic construct
  source 1..80: mol_type = other DNA
tcgatctcctgacctcatgatctgcctgccttggcctcccaatgtgctgggattacaggcgtgagccaccgtgcccagca

SEQ ID NO: 46643 - DNA, 80 bp, synthetic construct
  source 1..80: mol_type = other DNA
aacctaaatgtccatcagctactaaatagaatatgacacagccatacgacgaaatgctatttaatcatgaaaaggagcaa

SEQ ID NO: 46644 - DNA, 80 bp, synthetic construct
  source 1..80: mol_type = other DNA
ttgggggtgggaactgactgtaaatggggatgggggatcttattggtacaataccaattatttaaaactgatttattatg

SEQ ID NO: 46645 - DNA, 80 bp, synthetic construct; identical to SEQ ID NO: 15525
  source 1..80: mol_type = other DNA

SEQ ID NO: 46646 - DNA, 80 bp, synthetic construct
  source 1..80: mol_type = other DNA
agtattttggaaaatatacaaaattacttcttaggtacctacacatgtcagaaaagcagaagggctgaccaggagaaatg

SEQ ID NO: 46647 - DNA, 80 bp, synthetic construct
  source 1..80: mol_type = other DNA
cctgatttctttacacttcaataattctgaaatcagaagacaccttagaatctatgtatattttcattgcaacatcttct

SEQ ID NO: 46648 - DNA, 80 bp, synthetic construct
  source 1..80: mol_type = other DNA
tacccaatgactatctgaatcagccgaaactgcaaaagtctccatttctccatataaatctattgttttctcagttactc

SEQ ID NO: 46649 - DNA, 80 bp, synthetic construct
  source 1..80: mol_type = other DNA
aaagtaaaaggagattgaagaaaagttaggataaaattcactgtaaaagttctagttctatggagaaacagtcattctca

SEQ ID NO: 46650 - DNA, 80 bp, synthetic construct; identical to SEQ ID NO: 15526
  source 1..80: mol_type = other DNA

SEQ ID NO: 46651 - DNA, 80 bp, synthetic construct
  source 1..80: mol_type = other DNA
aaacatgggaaaataaaccaaaaacaaatagaaaagggggaagaaagaggatagagaacagagatgcgaaggagactgac

SEQ ID NO: 46652 - DNA, 80 bp, synthetic construct
  source 1..80: mol_type = other DNA
atcattgctctgaaagacttaagaactttgactatacgtatttcatggcaaataggctaagtaaggactcttcgtagtga

SEQ ID NO: 46653 - DNA, 80 bp, synthetic construct; identical to SEQ ID NO: 15527
  source 1..80: mol_type = other DNA

SEQ ID NO: 46654 - DNA, 80 bp, synthetic construct
  source 1..80: mol_type = other DNA
acctagcatttattgagcgctaagcatatgccagtgaggtagtactatgatcacagccttaagaggaaaattaatcccat

SEQ ID NO: 46655 - DNA, 80 bp, synthetic construct
  source 1..80: mol_type = other DNA
aggaactgaaatgggaggaggagagaatctgcagtcaacacatggcacagaaaaaaacaaccctggatttggaattaatg

SEQ ID NO: 46656 - DNA, 80 bp, synthetic construct
  source 1..80: mol_type = other DNA
aaatccaagaatttattattattagttcctaggaaagcaggaaaaggggtgaaaagaaaacaaaagagaaggaatgaccc

SEQ ID NO: 46657 - DNA, 80 bp, synthetic construct
  source 1..80: mol_type = other DNA
cctcccgggttcaagtgattcttctgcctcagacccccaagtagctggggttacaggcatgtgccgccacgcccagctaa

SEQ ID NO: 46658 - DNA, 80 bp, synthetic construct; identical to SEQ ID NO: 15528
  source 1..80: mol_type = other DNA

SEQ ID NO: 46659 - DNA, 80 bp, synthetic construct
  source 1..80: mol_type = other DNA
tcttacaaacacctagaaatagatattctacatagacaacatttggtaaatgtttttggctagaaaaaaggcccaatttc

SEQ ID NO: 46660 - DNA, 80 bp, synthetic construct
  source 1..80: mol_type = other DNA
ccctgtccttaccacccagggcacactggcaagacttcctgccaccagcacctgcatctcactgtgggaaagcttctctg

SEQ ID NO: 46661 - DNA, 80 bp, synthetic construct
  source 1..80: mol_type = other DNA
aagcagaaggatctcttgaggctaggagttcaagaccagcctgggcaacacagtgagacatctgtcttaaaaacatacaa

SEQ ID NO: 46662 - DNA, 80 bp, synthetic construct; identical to SEQ ID NO: 15529
  source 1..80: mol_type = other DNA

SEQ ID NO: 46663 - DNA, 80 bp, synthetic construct
  source 1..80: mol_type = other DNA
tctcaagtaaactgctagcacccaaatcctcttctcaagaatctgcttctgggaaacctaaaccaggatgctattcccct

SEQ ID NO: 46664 - DNA, 80 bp, synthetic construct
  source 1..80: mol_type = other DNA
tttgtaagtcacctcttctagctagccactcacaatctttcattctctccttatggagaaagagggaaagggctctgaag

SEQ ID NO: 46665 - DNA, 80 bp, synthetic construct; identical to SEQ ID NO: 15530
  source 1..80: mol_type = other DNA

SEQ ID NO: 46666 - DNA, 80 bp, synthetic construct
  source 1..80: mol_type = other DNA
ccattacagactaaatttcatctcttgctatctaattaatctaccatccatggttattacacgagttgggagaagaatag

SEQ ID NO: 46667 - DNA, 80 bp, synthetic construct
  source 1..80: mol_type = other DNA
gcctggcccacatggcgaaaacccgtctctactaaaaatacaaaaaattagctgggtgtggtggcgggtgcctgtagtcc

SEQ ID NO: 46668 - DNA, 80 bp, synthetic construct
  source 1..80: mol_type = other DNA
ttaaaatcacagtcagtacaacacataatcttgccttcctgcaatgtgaagttatcaaatacttcaggaactttcaaatc

SEQ ID NO: 46669 - DNA, 80 bp, synthetic construct; identical to SEQ ID NO: 15531
  source 1..80: mol_type = other DNA

SEQ ID NO: 46670 - DNA, 80 bp, synthetic construct
  source 1..80: mol_type = other DNA
gtgttccagttctatggttgggaatgtaaaacagtgtagctgctatgcaaaatagcatggtagcgcctcaaaaacaatta

SEQ ID NO: 46671 - DNA, 80 bp, synthetic construct
  source 1..80: mol_type = other DNA
aaatgtggtacacacatcaaggggataagattcagcttaaaaaggaagacaattctgagacctgctaccacatggatgaa

SEQ ID NO: 46672 - DNA, 80 bp, synthetic construct
  source 1..80: mol_type = other DNA
ttaataggtacagagtctcagttttgcaagacgaaaagagttctggagatggatgatgctgacggttgcacagtaataag

SEQ ID NO: 46673 - DNA, 80 bp, synthetic construct; identical to SEQ ID NO: 15532
  source 1..80: mol_type = other DNA

SEQ ID NO: 46674 - DNA, 80 bp, synthetic construct
  source 1..80: mol_type = other DNA
agcgtgccttttccttgcatcttttttaaagacatcgtttcaaacatgtttccctaaattctgactccttacagaaatat

SEQ ID NO: 46675 - DNA, 80 bp, synthetic construct
  source 1..80: mol_type = other DNA
tccagacagatgataaatcttcaaataaagacttctcaggaaaatcctcaaacctaatgaaaagttcagctcatcccatg

SEQ ID NO: 46676 - DNA, 80 bp, synthetic construct
  source 1..80: mol_type = other DNA
ggggtcggtaggtgtatttttggactttcttacacaggacagatcatagtcactgagaaaaaccattcctggtatctgaa

SEQ ID NO: 46677 - DNA, 80 bp, synthetic construct; identical to SEQ ID NO: 15533
  source 1..80: mol_type = other DNA

SEQ ID NO: 46678 - DNA, 80 bp, synthetic construct
  source 1..80: mol_type = other DNA
atctatatatgtgtcaatacttatacatttatgcactataaatatcaattcaatatatatcaatttatttttaagttagt

SEQ ID NO: 46679 - DNA, 80 bp, synthetic construct
  source 1..80: mol_type = other DNA
tcaacatggaaatatgtttctatgtattacttagtgagacaatcaagtgacaacagcatcatgtatgatattattttatt

SEQ ID NO: 46680 - DNA, 80 bp, synthetic construct
  source 1..80: mol_type = other DNA
acctctgcctcccaggttcaagcgattctcctgcctcactctcccaagtagctggaattacaggcatgcaccaccatact

SEQ ID NO: 46681 - DNA, 80 bp, synthetic construct
  source 1..80: mol_type = other DNA
gatcttaattcatttatttctctctgtgtgtttgcttccatgtctgtcttctttttttatttcgcttacttctattttca

SEQ ID NO: 46682 - DNA, 80 bp, synthetic construct; identical to SEQ ID NO: 15534
  source 1..80: mol_type = other DNA

SEQ ID NO: 46683 - DNA, 80 bp, synthetic construct
  source 1..80: mol_type = other DNA
aatacctcagccatggcattcactctggcaatgcccaagcatatcactgccttctgagaacaagacaaaagaaaccaaca

SEQ ID NO: 46684 - DNA, 80 bp, synthetic construct
  source 1..80: mol_type = other DNA
cccatcccaactacagataatgtggccataaagctatgacaggggaaccattattttagaaatacattcaaggatctgca

SEQ ID NO: 46685 - DNA, 80 bp, synthetic construct; identical to SEQ ID NO: 15535
  source 1..80: mol_type = other DNA

SEQ ID NO: 46686 - DNA, 80 bp, synthetic construct
  source 1..80: mol_type = other DNA
taactgcaacctccgcctcccatgttcaagcaattctcttgcctcagtctcccaagtaggtgggactacaggcatatcca

SEQ ID NO: 46687 - DNA, 80 bp, synthetic construct
  source 1..80: mol_type = other DNA
caaaacattggaattttgtttgggatacgctcagaggctggttcttggctaagacaataaatatagagttcaaataaatt

SEQ ID NO: 46688 - DNA, 80 bp, synthetic construct
  source 1..80: mol_type = other DNA
caattccttcaaaaaatactggtacatgctctgtacctgccaacttctaggatacagaaacacagtttaaatcagacaag

SEQ ID NO: 46689 - DNA, 80 bp, synthetic construct; identical to SEQ ID NO: 15536
  source 1..80: mol_type = other DNA

SEQ ID NO: 46690 - DNA, 80 bp, synthetic construct
  source 1..80: mol_type = other DNA
ctatagagattctcataaaactgatttcaagaaatatgccttccaaagataagagcctctgaaattcacatgaagtgtgc

SEQ ID NO: 46691 - DNA, 80 bp, synthetic construct
  source 1..80: mol_type = other DNA
ttcaatccccaaacatgcaaaactttcacaattcagaaagcaaaggagaaacacaatcacaattgtacagacatattggg

SEQ ID NO: 46692 - DNA, 80 bp, synthetic construct
  source 1..80: mol_type = other DNA
tcatgaggtcaagagatcgagaccatcctggccaacatggtgaaaccccgtctctactaaaaatacaaaacttagctggg

SEQ ID NO: 46693 - DNA, 80 bp, synthetic construct; identical to SEQ ID NO: 15537
  source 1..80: mol_type = other DNA

SEQ ID NO: 46694 - DNA, 80 bp, synthetic construct
  source 1..80: mol_type = other DNA
aaatgaaattccacccttcttactcacaaactctttgtccctcaattttcatattattttcccagtctccccaggctcta

SEQ ID NO: 46695 - DNA, 80 bp, synthetic construct
  source 1..80: mol_type = other DNA
tctcctaactggccttctggcagctccctcactctccaaaacatccaatctattgctgctaggttcatatttttcgcatg

SEQ ID NO: 46696 - DNA, 80 bp, synthetic construct
  source 1..80: mol_type = other DNA
gagcctggctttgtcgttgggaaacctttgttttaaatcccagttctgctatttactccttatgagactttgagcaagtt

SEQ ID NO: 46697 - DNA, 80 bp, synthetic construct; identical to SEQ ID NO: 15538
  source 1..80: mol_type = other DNA

SEQ ID NO: 46698 - DNA, 80 bp, synthetic construct
  source 1..80: mol_type = other DNA
aaaactattttctgtcaaaatcagtccttacacatgactccatttcttgaaattcccatgggcaacgtaaatgccgaaga

SEQ ID NO: 46699 - DNA, 80 bp, synthetic construct
  source 1..80: mol_type = other DNA
atggaaaacagcaagtctgacaagcaagtactcaaaaaagaggacaagcatgatagtaagaaaagtataggccaagtgcg

SEQ ID NO: 46700 - DNA, 80 bp, synthetic construct
  source 1..80: mol_type = other DNA
aattagcggggcatggtggcgcacacctgtaatcccagctactcaaggaggctgaggcatgagaatcgcttgatcctggg

SEQ ID NO: 46701 - DNA, 80 bp, synthetic construct
  source 1..80: mol_type = other DNA
agccaaatttaggtcaaaggagaaggtacgtgcctctagaagaaggctatttaagctaaaatttgacctataaggaggga

SEQ ID NO: 46702 - DNA, 80 bp, synthetic construct; identical to SEQ ID NO: 15539
  source 1..80: mol_type = other DNA

SEQ ID NO: 46703 - DNA, 80 bp, synthetic construct
  source 1..80: mol_type = other DNA
gtgaaaaatggcagatgagcctctggacttgacctttctcaatgaattctaggtagtatagtttgaagtagcaacgtgtg

SEQ ID NO: 46704 - DNA, 80 bp, synthetic construct
  source 1..80: mol_type = other DNA
gttgccctaaatttcatttccagagctgttctctcagaacccgttgaaggcagaaaacagggtggtcttaattgtgtcat

SEQ ID NO: 46705 - DNA, 80 bp, synthetic construct; identical to SEQ ID NO: 15540
  source 1..80: mol_type = other DNA

SEQ ID NO: 46706 - DNA, 80 bp, synthetic construct
  source 1..80: mol_type = other DNA
ttgagagcgactttgttgaatctgaattcttttaagtggcaggaagtaaataaagcttcttggcttgacaggacatgctt

SEQ ID NO: 46707 - DNA, 80 bp, synthetic construct
  source 1..80: mol_type = other DNA
gagaggaagagagagggagaattcccctacataccattagttttataaccattagtttgcataccattagtttaatccta

SEQ ID NO: 46708 - DNA, 80 bp, synthetic construct
  source 1..80: mol_type = other DNA
cctctttctagcctagtctgtcaacactgctgctccttgtggaagcatgaagttcctaatgcctaaaataggtaactcat

SEQ ID NO: 46709 - DNA, 80 bp, synthetic construct
  source 1..80: mol_type = other DNA
gacttcctttaaattctatgaagacagggacagcagccagaacatatttgctaaataatttgattcccggagaagatgaa

SEQ ID NO: 46710 - DNA, 80 bp, synthetic construct; identical to SEQ ID NO: 15541
  source 1..80: mol_type = other DNA

SEQ ID NO: 46711 - DNA, 80 bp, synthetic construct
  source 1..80: mol_type = other DNA
gagaagaaaagagagaaaaaggatgccagtggaaaactgcacactctgccagtgactttttgtgaatcccttaaaacttt

SEQ ID NO: 46712 - DNA, 80 bp, synthetic construct
  source 1..80: mol_type = other DNA
ttggatttgggtctggtttaaccaaatctttaatgaacaggtgcccagggctatgtgagcaacgaaaattgattagtggc

SEQ ID NO: 46713 - DNA, 80 bp, synthetic construct; identical to SEQ ID NO: 15542
  source 1..80: mol_type = other DNA

SEQ ID NO: 46714 - DNA, 80 bp, synthetic construct
  source 1..80: mol_type = other DNA
acgaaagatcagcacactttctaagaataactttatttccagccattttcaaaagaaaactagcctgggatgcagaccac

SEQ ID NO: 46715 - DNA, 80 bp, synthetic construct
  source 1..80: mol_type = other DNA
atttgataaagaaggtcgggggaaagaaggggaagaagaaagtaaaggaggagaaattgaaaaagcttctctgaattgaa

SEQ ID NO: 46716 - DNA, 80 bp, synthetic construct
  source 1..80: mol_type = other DNA
tggaatagtaacattaataacagaacttaaaagtctcctttagcaaggatgtaaatgtcgacactcccttcctccccagc

SEQ ID NO: 46717 - DNA, 80 bp, synthetic construct; identical to SEQ ID NO: 15543
  source 1..80: mol_type = other DNA

SEQ ID NO: 46718 - DNA, 80 bp, synthetic construct
  source 1..80: mol_type = other DNA
gaagaggtagataatgtattaccctgatttggtaggtaaagtattatcctgatttatgtgacagagtgaaaggcaacttt

SEQ ID NO: 46719 - DNA, 80 bp, synthetic construct
  source 1..80: mol_type = other DNA
actccggacagagctgggcctggggaaggggttcctgaactacgcggacgccgaacgggacgcgctgcagaagcgcacga

SEQ ID NO: 46720 - DNA, 80 bp, synthetic construct
  source 1..80: mol_type = other DNA
gcctccccaagctagagccctgcagagcgagtttcccttgacctcgctgcgcctctggcgcgctctgcagcgcggacccg

SEQ ID NO: 46721 - DNA, 80 bp, synthetic construct
  source 1..80: mol_type = other DNA
gctggcgtgggcgagcccctgcgcgccccctcccgcggggatccagttcgcctgctcccttccgctcgctggcttttccg

SEQ ID NO: 46722 - DNA, 80 bp, synthetic construct
  source 1..80: mol_type = other DNA
aacagcacggtcgcctccactgccgccgtctcctcgtcgttcaaatgcgccttgaccaagacgggcttccagttttacta

SEQ ID NO: 46723 - DNA, 80 bp, synthetic construct; identical to SEQ ID NO: 15595
  source 1..80: mol_type = other DNA

SEQ ID NO: 46724 - DNA, 80 bp, synthetic construct
  source 1..80: mol_type = other DNA
ggtccgcaaaaacaaaaccatcacctgttacgacaccacctcagacgagtacctgcgaagttatttcatctacagcatgt

SEQ ID NO: 46725 - DNA, 80 bp, synthetic construct
  source 1..80: mol_type = other DNA
acctggtaatcattgtactgactgtttttgctgtgtcttacatccctttccatgtgatgaaaacgatgaacttgagggcc

SEQ ID NO: 46726 - DNA, 80 bp, synthetic construct
  source 1..80: mol_type = other DNA
ggaaagcttctagaagaagtgaggcaaatttgcaatccaagagtgaagacatgaccctcaatattttacctgagttcaag

SEQ ID NO: 46727 - DNA, 80 bp, synthetic construct; identical to SEQ ID NO: 15596
  source 1..80: mol_type = other DNA

SEQ ID NO: 46728 - DNA, 80 bp, synthetic construct
  source 1..80: mol_type = other DNA
ttctctaagaaaactagccccctgcaacttgagtttgtggtttatctagcctttattgtttttttaaaatccacagtagg

SEQ ID NO: 46729 - DNA, 80 bp, synthetic construct
  source 1..80: mol_type = other DNA
ttagggcattgaatagacaagtaaagctaatgaatttaaaagcctgaaaagtgattgttttccagttatttctggaaaag

SEQ ID NO: 46730 - DNA, 80 bp, synthetic construct
  source 1..80: mol_type = other DNA
ctgctgtgcaatgccttaggactttgtttgtgttccaggacaagtgttcactcacatctgtaaaaacaattttaagaatt

SEQ ID NO: 46731 - DNA, 80 bp, synthetic construct; identical to SEQ ID NO: 15597
  source 1..80: mol_type = other DNA

SEQ ID NO: 46732 - DNA, 80 bp, synthetic construct
  source 1..80: mol_type = other DNA
cctagatgccatagcactgaaaagtaaagtactactcaaactactaatagaagactattggtcagtgttttctattatat

SEQ ID NO: 46733 - DNA, 80 bp, synthetic construct
  source 1..80: mol_type = other DNA
atccagtgtcaaaggaatttttagttttggaagctatccctcataaagtcaacatcagagtttgcaactgatggtggcat

SEQ ID NO: 46734 - DNA, 80 bp, synthetic construct; identical to SEQ ID NO: 15598
  source 1..80: mol_type = other DNA

SEQ ID NO: 46735 - DNA, 80 bp, synthetic construct
  source 1..80: mol_type = other DNA
atgtcattactttattgaccttgttaaacaagatcaatatcattaaactgaccaagatggaaattacaggacttgtacca

SEQ ID NO: 46736 - DNA, 80 bp, synthetic construct
  source 1..80: mol_type = other DNA
gagtgtggatccagtgaggaggtgaacagtaactagaaatgcttgtttactacttggcatgttttttccaaagtgtttct

SEQ ID NO: 46737 - DNA, 80 bp, synthetic construct
  source 1..80: mol_type = other DNA
ctattggctgaaaaactgatcaggtcatatgatgattgaagtatgtttattgtaagggcagaaatgtgttggcatttgga

SEQ ID NO: 46738 - DNA, 80 bp, synthetic construct; identical to SEQ ID NO: 15599
  source 1..80: mol_type = other DNA

SEQ ID NO: 46739 - DNA, 80 bp, synthetic construct
  source 1..80: mol_type = other DNA
tggacctgtcacctgtaaattgtctcaatctactcagacaagacactaaactgtctttggatactatagatgtcagtgct

SEQ ID NO: 46740 - DNA, 80 bp, synthetic construct
  source 1..80: mol_type = other DNA
atactaatgtaaattatatttattacaatgtatgatattaatgtgtcaaactggtgtattttacaaaatatataatgcat

SEQ ID NO: 46741 - DNA, 80 bp, synthetic construct
  source 1..80: mol_type = other DNA
tagacacaatttggtgtcagactatcataagatcgatagtgaatataaaatatcttagccaaatggggtctgtattgtct

SEQ ID NO: 46742 - DNA, 80 bp, synthetic construct; identical to SEQ ID NO: 15600
  source 1..80: mol_type = other DNA

SEQ ID NO: 46743 - DNA, 80 bp, synthetic construct
  source 1..80: mol_type = other DNA
agtttcatagtgataattgtatattatttggctgctgaattctgttagagttttttattctgttgtacattgtattatac

SEQ ID NO: 46744 - DNA, 80 bp, synthetic construct
  source 1..80: mol_type = other DNA
tgagcagtatggaaacagtgttacttgatattttgagctttctcaggtttatctaaatcagtggtagcttaacaaaaccc

SEQ ID NO: 46745 - DNA, 80 bp, synthetic construct
  source 1..80: mol_type = other DNA
gtatctgctatttttagtacgagcagagcttcataattgtggtcactagaactgtacttaccatggacagttaaaactga

SEQ ID NO: 46746 - DNA, 80 bp, synthetic construct
  source 1..80: mol_type = other DNA
aatgatttagagtttaatgtaaattttgtattttatacacaccaatacaaacaagtaattacaaacagatcaatcacttt

SEQ ID NO: 46747 - DNA, 80 bp, synthetic construct
  source 1..80: mol_type = other DNA
aactagtttctctagaattaaggaaatatttctatattttttagtattagaatgtcataaaagtaagtctccttatttta

SEQ ID NO: 46748 - DNA, 80 bp, synthetic construct
  source 1..80: mol_type = other DNA
tatcccacttacttaaatttttataagtatcccaataggtcaggatttggttaggggactaggatatatatacattttaa

SEQ ID NO: 46749 - DNA, 80 bp, synthetic construct
  source 1..80: mol_type = other DNA
tttgcatgcagcatgacaattggatgtcgtttgttttgctgctaatacagctacagtttagattagttttctatatttta

SEQ ID NO: 46750 - DNA, 80 bp, synthetic construct; identical to SEQ ID NO: 15544
  source 1..80: mol_type = other DNA

SEQ ID NO: 46751 - DNA, 80 bp, synthetic construct
  source 1..80: mol_type = other DNA
aagacatcccgggtttggctcagggtgtaaggaattcgggcaaaatggaaaggaacaaaacaaataaagaatacagcaat

SEQ ID NO: 46752 - DNA, 80 bp, synthetic construct
  source 1..80: mol_type = other DNA
attaatccagaaaatgacttgacagatgtaatttactatttcatgccagactagaccgaactctgatttaaggaaagagc

SEQ ID NO: 46753 - DNA, 80 bp, synthetic construct; identical to SEQ ID NO: 15545
  source 1..80: mol_type = other DNA

SEQ ID NO: 46754 - DNA, 80 bp, synthetic construct
  source 1..80: mol_type = other DNA
tccggatttgaaagaaaatcctcatcgccaggccatttgtgataagtccaacaaaaaacaggacagtgtagagcagtggg

SEQ ID NO: 46755 - DNA, 80 bp, synthetic construct
  source 1..80: mol_type = other DNA
gtgtgtaacttttttggacacagcctcctctaaaagttgaggtttctcatcttcattgtagtagttagtatgaacacaga

SEQ ID NO: 46756 - DNA, 80 bp, synthetic construct
  source 1..80: mol_type = other DNA
atatgcaaaagctggaagagaaataatggggctgtgctttactcttctctagcttcccctccatgccttttagctttttg

SEQ ID NO: 46757 - DNA, 80 bp, synthetic construct; identical to SEQ ID NO: 15546
  source 1..80: mol_type = other DNA

SEQ ID NO: 46758 - DNA, 80 bp, synthetic construct
  source 1..80: mol_type = other DNA
ggtcatgagttggcattcctcaaaacagggcatactttccagatttatggagtgtgtaatggtagctaaaataaaatata

SEQ ID NO: 46759 - DNA, 80 bp, synthetic construct
  source 1..80: mol_type = other DNA
agatatattgaaagtacaaataacaaattttaaaaaataactttcgtgtaaaagatatttagataaatgaatgtagcact

SEQ ID NO: 46760 - DNA, 80 bp, synthetic construct
  source 1..80: mol_type = other DNA
aagatcactgattttaacctttcctgctactgctgtgtggtcttagttcatccctgaccgttttggaaattcgacttagt

SEQ ID NO: 46761 - DNA, 80 bp, synthetic construct
  source 1..80: mol_type = other DNA
aaagaggctaattaacaattgtctctgacatcactaattagacttctattttaattataatttttattccaaatacatgc

SEQ ID NO: 46762 - DNA, 80 bp, synthetic construct; identical to SEQ ID NO: 15547
  source 1..80: mol_type = other DNA

SEQ ID NO: 46763 - DNA, 80 bp, synthetic construct
  source 1..80: mol_type = other DNA
agagattgtcttcaaacactggactcaaagctatgcagacactgaatttctatctgtcctcttttaggacttctgctttt

SEQ ID NO: 46764 - DNA, 80 bp, synthetic construct
  source 1..80: mol_type = other DNA
ggttattttctatgcaaatgataaatccaagttgagatcaagccttcgaagtctgcttcctggagaagattttaagcttg

SEQ ID NO: 46765 - DNA, 80 bp, synthetic construct
  source 1..80: mol_type = other DNA
aacctgtgtttgattaactcctttgtaggtgaaacagcttccttctattataaattagcagattccaaaattacattaga

SEQ ID NO: 46766 - DNA, 80 bp, synthetic construct; identical to SEQ ID NO: 15548
  source 1..80: mol_type = other DNA

SEQ ID NO: 46767 - DNA, 80 bp, synthetic construct
  source 1..80: mol_type = other DNA
tttcccttcctgtgtccatgtgttctcattgttcagttcccacctatgagtgagaatatgtggtgtttggttttttgttc

SEQ ID NO: 46768 - DNA, 80 bp, synthetic construct
  source 1..80: mol_type = other DNA
gtctttgctattatgaatagtgccgcaataaacatacgtgtgcatgtgtctttatagcagcatgacttataatcctttgg

SEQ ID NO: 46769 - DNA, 80 bp, synthetic construct; identical to SEQ ID NO: 15549
  source 1..80: mol_type = other DNA

SEQ ID NO: 46770 - DNA, 80 bp, synthetic construct
  source 1..80: mol_type = other DNA
atttttgggcaccaatctagctgagtgaataaaaaactctggggtgccccaccctgcatctgtattttagtgagccttcc

SEQ ID NO: 46771 - DNA, 80 bp, synthetic construct
  source 1..80: mol_type = other DNA
tattaatatcagtcacttcagacacataataatccccaaatgttggtcatcttaaagggattagtttgatattaaactct

SEQ ID NO: 46772 - DNA, 80 bp, synthetic construct
  source 1..80: mol_type = other DNA
tcactttattaataatctcaactattctctgaagtacgcgtatcatcctcattctctggatgaggggaactgaagagcag

SEQ ID NO: 46773 - DNA, 80 bp, synthetic construct; identical to SEQ ID NO: 15550
  source 1..80: mol_type = other DNA

SEQ ID NO: 46774 - DNA, 80 bp, synthetic construct
  source 1..80: mol_type = other DNA
tttgagggataaaagaagggcttcagttcttgatctaaattaactttatttttcctctgatttttaactcacaaccacat

SEQ ID NO: 46775 - DNA, 80 bp, synthetic construct
  source 1..80: mol_type = other DNA
taatctctcattagtaaataacatcaacacatacagtttgtagttatttgtgttagtgttgggaacagagctaactttgg

SEQ ID NO: 46776 - DNA, 80 bp, synthetic construct
  source 1..80: mol_type = other DNA
tcttttggaactgggcaggaggatagagatataattatgacatttgatagctcttaggctgttttagttccagtggtctc

SEQ ID NO: 46777 - DNA, 80 bp, synthetic construct; identical to SEQ ID NO: 15551
  source 1..80: mol_type = other DNA

SEQ ID NO: 46778 - DNA, 80 bp, synthetic construct
  source 1..80: mol_type = other DNA
tttcttcattcctgtaacagtttcctcatccatgtgcacacccattcttcctcccaggctcgaagcttattcctgatgga

SEQ ID NO: 46779 - DNA, 80 bp, synthetic construct
  source 1..80: mol_type = other DNA
ttttcttagagacgtgataggttgctatgtgcagtttacttccggatatatactggatttgcatttgaagtagagcatgc

SEQ ID NO: 46780 - DNA, 80 bp, synthetic construct
  source 1..80: mol_type = other DNA
attctatgataattgaatcattgttgaaatatcagaaaatgtgagtaaggtgaaaggataatacacagctctgatcatct

SEQ ID NO: 46781 - DNA, 80 bp, synthetic construct; identical to SEQ ID NO: 15552
  source 1..80: mol_type = other DNA

SEQ ID NO: 46782 - DNA, 80 bp, synthetic construct
  source 1..80: mol_type = other DNA
tttttagaacttagtttacatgggagatgacacattcaattcaatagcagcaggtggactaggataaaagaggtagcctg

SEQ ID NO: 46783 - DNA, 80 bp, synthetic construct
  source 1..80: mol_type = other DNA
tgtgcaacttgagggcgtttaaacaccaagttgaaagagcagaaatcgttgatacttttgaaaatatttggtatattttc

SEQ ID NO: 46784 - DNA, 80 bp, synthetic construct
  source 1..80: mol_type = other DNA
tgcctcccaggttcaagcaattttcctgcctcagcctcccgagtagctgaaattataggcacctgccaccacgcctggct

SEQ ID NO: 46785 - DNA, 80 bp, synthetic construct
  source 1..80: mol_type = other DNA
gatgtaaacaaatcttgtaggctcttgaaaaatagtagcttctaaaatgcctctgcctgtcctatttgaagactactgta

SEQ ID NO: 46786 - DNA, 80 bp, synthetic construct; identical to SEQ ID NO: 15553
  source 1..80: mol_type = other DNA

SEQ ID NO: 46787 - DNA, 80 bp, synthetic construct
  source 1..80: mol_type = other DNA
gaaagataggtctgaaacaagagtcttttgatgatcttcataacgctctttcctctcaagctgttgttcttcatgcccaa

SEQ ID NO: 46788 - DNA, 80 bp, synthetic construct
  source 1..80: mol_type = other DNA
tgacttcttaacctcactggacgttgtcagtgacactctttcttatgtatcccctcccctgacttgtgtgaccctgaatt

SEQ ID NO: 46789 - DNA, 80 bp, synthetic construct; identical to SEQ ID NO: 15554
  source 1..80: mol_type = other DNA

SEQ ID NO: 46790 - DNA, 80 bp, synthetic construct
  source 1..80: mol_type = other DNA
atttactccttgggttcaaaagcctgatcctttcctaacttcttagatacctcttcattttgcttcttagtcttcattcc

SEQ ID NO: 46791 - DNA, 80 bp, synthetic construct
  source 1..80: mol_type = other DNA
ttgttcattagtctgcttattttgtatttagtatgttcaacaaatattagatgctaattcattgcctattaaggagatta

SEQ ID NO: 46792 - DNA, 80 bp, synthetic construct
  source 1..80: mol_type = other DNA
agtgacagagtgagggaactgacactgtatttgtacatagcatttcagcaagtgaaatcgtggctatgagagtattttag

SEQ ID NO: 46793 - DNA, 80 bp, synthetic construct
  source 1..80: mol_type = other DNA
ttttacacgctttatcccaggttttctcacaaaaaccttacaaggaagcgatgttaccccatttttcagaggaagaatta

SEQ ID NO: 46794 - DNA, 80 bp, synthetic construct; identical to SEQ ID NO: 15555
  source 1..80: mol_type = other DNA

SEQ ID NO: 46795 - DNA, 80 bp, synthetic construct
  source 1..80: mol_type = other DNA
tacattaggaccatctgatatgccttaactgaaaacaattgccaaagcatgtgactggcactgccttcatttttcataat

SEQ ID NO: 46796 - DNA, 80 bp, synthetic construct
  source 1..80: mol_type = other DNA
cgcagccagctctagggatcactgcttatgtcatttgtatcctatgattaggaatatcttttgaaaatttgggagaggta

SEQ ID NO: 46797 - DNA, 80 bp, synthetic construct
  source 1..80: mol_type = other DNA
ataataaaaaaggaaccagtgcaatgggaagcagtggcaagtgtgtccctgagaaagacagaccgacacaaagactgaga

SEQ ID NO: 46798 - DNA, 80 bp, synthetic construct; identical to SEQ ID NO: 15556
  source 1..80: mol_type = other DNA

SEQ ID NO: 46799 - DNA, 80 bp, synthetic construct
  source 1..80: mol_type = other DNA
tctaagaaaatggaagattataagatccaagagagaaattgctatagaaagattcagagccaggcacaagagagggcaca

SEQ ID NO: 46800 - DNA, 80 bp, synthetic construct
  source 1..80: mol_type = other DNA
ggtgatgtcagaacatgtttgcattttcagctgtttgcctcacacctaatgacacctacacgctttattgttttgtcttt

SEQ ID NO: 46801 - DNA, 80 bp, synthetic construct
  source 1..80: mol_type = other DNA
caggagccactgcaccctgtccaggaatattttttataaaggtgtttgaggatcctagcaagatatttttccctaaatgt

SEQ ID NO: 46802 - DNA, 80 bp, synthetic construct
  source 1..80: mol_type = other DNA
gggtacgcccacatcaagtgcttctattaagacttcaggtcagttgacacttttttttttttttttataatgttagcaag

SEQ ID NO: 46803 - DNA, 80 bp, synthetic construct; identical to SEQ ID NO: 15557
  source 1..80: mol_type = other DNA

SEQ ID NO: 46804 - DNA, 80 bp, synthetic construct
  source 1..80: mol_type = other DNA
tctatgtcactgtcaacagagcgtttcccctcctgaatgactctcacattgaaatgtgaacaagcacatttaaattttaa

SEQ ID NO: 46805 - DNA, 80 bp, synthetic construct
  source 1..80: mol_type = other DNA
aagtactgaagaatgagttgaaaacctttagtctggaagagatccatttctctgtttctttaccataattttccaagctt

SEQ ID NO: 46806 - DNA, 80 bp, synthetic construct; identical to SEQ ID NO: 15558
  source 1..80: mol_type = other DNA

SEQ ID NO: 46807 - DNA, 80 bp, synthetic construct
  source 1..80: mol_type = other DNA
taggtatcctgctaccaccactggtgtttatttctctaatacttaaatcatagaaggaaaaagaaagtttgtgtttactc

SEQ ID NO: 46808 - DNA, 80 bp, synthetic construct
  source 1..80: mol_type = other DNA
agaaaaatacagatcttaataatgaagataggttctctttcttcccggtcaatcatggtgcacatgcagaaacatggtac

SEQ ID NO: 46809 - DNA, 80 bp, synthetic construct
  source 1..80: mol_type = other DNA
tctgaggaagcaaccaagagttgtggaagggaaatgaaaccttcttgttgatgtgtcattattgagtttgaaaaaagaaa

SEQ ID NO: 46810 - DNA, 80 bp, synthetic construct
  source 1..80: mol_type = other DNA
gggggagtcagtatttccttcaggaggttcgtaatacatattttatctaaattatttttagagggtctttccagagccta

SEQ ID NO: 46811 - DNA, 80 bp, synthetic construct; identical to SEQ ID NO: 15559
  source 1..80: mol_type = other DNA

SEQ ID NO: 46812 - DNA, 80 bp, synthetic construct
  source 1..80: mol_type = other DNA
gggatgcttaataaactgtgttgtgtgtctacattttgactgtgacctgttatgtgagatcaagtgtggaattttctact

SEQ ID NO: 46813 - DNA, 80 bp, synthetic construct
  source 1..80: mol_type = other DNA
ttgggaggggatttttgactttctttcattttagataaagttccttaaccagaaagctgttaatttgggatgtagtgagc

SEQ ID NO: 46814 - DNA, 80 bp, synthetic construct; identical to SEQ ID NO: 15560
  source 1..80: mol_type = other DNA

SEQ ID NO: 46815 - DNA, 80 bp, synthetic construct
  source 1..80: mol_type = other DNA
aggacttaaagatttttaaaaaagaaaatcaaaattaagcaacaaaagagcaataatatgttataaaagcaaattaacat

SEQ ID NO: 46816 - DNA, 80 bp, synthetic construct
  source 1..80: mol_type = other DNA
aagaagttagtgatacatagataaatggagtccattaacacaaacaaataaaaaggtgcacttgggagtttttagtagga

SEQ ID NO: 46817 - DNA, 80 bp, synthetic construct
  source 1..80: mol_type = other DNA
ggatcaaagatgttagtaaatgaaaaattcaaaacttggttattttaaacatgctcatgacatgtgagcagctacagtga

SEQ ID NO: 46818 - DNA, 80 bp, synthetic construct
  source 1..80: mol_type = other DNA
ctgatgtactctagcatcaaggtttctttgttagggaattagaaaagaaccagccttgtggtgttttgttttattttgtt

SEQ ID NO: 46819 - DNA, 80 bp, synthetic construct; identical to SEQ ID NO: 15561
  source 1..80: mol_type = other DNA

SEQ ID NO: 46820 - DNA, 80 bp, synthetic construct
  source 1..80: mol_type = other DNA
tagtggcgggcgcctgtagtcccagctacttgggaggctgaggcaggagaatggcgtgaacccgggaggcggagcttgca

SEQ ID NO: 46821 - DNA, 80 bp, synthetic construct
  source 1..80: mol_type = other DNA
ataaaatattaaagtatttaaaagcaggattgaagctagctttggattttattgttagaacagttaagaagagtacccct

SEQ ID NO: 46822 - DNA, 80 bp, synthetic construct; identical to SEQ ID NO: 15562
  source 1..80: mol_type = other DNA

SEQ ID NO: 46823 - DNA, 80 bp, synthetic construct
  source 1..80: mol_type = other DNA
atggtggtacagtaacacattggaatactgtaaataagtgagaattattagtttttagaacacattaaaattacctcagc

SEQ ID NO: 46824 - DNA, 80 bp, synthetic construct
  source 1..80: mol_type = other DNA
tagagaggcctgagggagtttctgagattccattctgttactttgcattcaagtcttattgtgtatttattttattgaaa

SEQ ID NO: 46825 - DNA, 80 bp, synthetic construct
  source 1..80: mol_type = other DNA
catttccaacactggagactgtgttcactaaactccagctcctttcatattttgatcaacatcaagtgacatctcaggta

SEQ ID NO: 46826 - DNA, 80 bp, synthetic construct; identical to SEQ ID NO: 15563
  source 1..80: mol_type = other DNA

SEQ ID NO: 46827 - DNA, 80 bp, synthetic construct
  source 1..80: mol_type = other DNA
tgtagttgttctaccattagaatacttaagatttaggtctgaatgacaactttttgtattttttaaaattgtagttatga

SEQ ID NO: 46828 - DNA, 80 bp, synthetic construct
  source 1..80: mol_type = other DNA
tttatttgcacagatttctaacaatgtgctagaacaaatcacaagctttgcgtcaggaacatcctatcatctccctttgg

SEQ ID NO: 46829 - DNA, 80 bp, synthetic construct
  source 1..80: mol_type = other DNA
tcaaagagaccatgtttctcttacttttaggaaagcaaatccaccaggcattgtgcaatttaaagtgagccaattagctg

SEQ ID NO: 46830 - DNA, 80 bp, synthetic construct; identical to SEQ ID NO: 15564
  source 1..80: mol_type = other DNA

SEQ ID NO: 46831 - DNA, 80 bp, synthetic construct
  source 1..80: mol_type = other DNA
gaataatttagacattgtgaattaacagtcttaaactaacattttatttaaagttgtgttcatagttttcaattaaataa

SEQ ID NO: 46832 - DNA, 80 bp, synthetic construct
  source 1..80: mol_type = other DNA
gttaagagccagaacaaaccttatgatttgatttgccccactgtgttatttcttatgcacatttgagttcattatttcct

SEQ ID NO: 46833 - DNA, 80 bp, synthetic construct
  source 1..80: mol_type = other DNA
ggaccttgcactgccctgaagtttcagtaccttatttcagcactgggtacttcctaattgtatacatcctgatgtctaga

SEQ ID NO: 46834 - DNA, 80 bp, synthetic construct; identical to SEQ ID NO: 15565
  source 1..80: mol_type = other DNA

SEQ ID NO: 46835 - DNA, 80 bp, synthetic construct
  source 1..80: mol_type = other DNA
tagtggctttaaaagaaaaatagtactgatacctgttttagttaaaacatggttaaagaacactcttgccagaaaacatc

SEQ ID NO: 46836 - DNA, 80 bp, synthetic construct
  source 1..80: mol_type = other DNA
gcactctacggttaatgttggccagcatcctggcatattatgaatagtgaatgctgtaacttctttattcatgtaatttc

SEQ ID NO: 46837 - DNA, 80 bp, synthetic construct
  source 1..80: mol_type = other DNA
ctaatgaagttgagctacagaattagctaataccacccccattaaagactgaggctaaggcaccaaattagtgtaaatga

SEQ ID NO: 46838 - DNA, 80 bp, synthetic construct
  source 1..80: mol_type = other DNA
ctagcacatgtaatcaatttatatgctatcctagaatgatatcaatttaacagtagctattctgggaaagaggaaatgct

SEQ ID NO: 46839 - DNA, 80 bp, synthetic construct; identical to SEQ ID NO: 15566
  source 1..80: mol_type = other DNA

SEQ ID NO: 46840 - DNA, 80 bp, synthetic construct
  source 1..80: mol_type = other DNA
aaattgatttcagtatcatttagtttggccttgaaaatttttatcctgttaaatattcataaaatcatatttgacattaa

SEQ ID NO: 46841 - DNA, 80 bp, synthetic construct
  source 1..80: mol_type = other DNA
acgatggatacctaaacctaacagactctgaataaatgtttatttactttagtcacaaaataatttttcgctttatagat

SEQ ID NO: 46842 - DNA, 80 bp, synthetic construct
  source 1..80: mol_type = other DNA
tgtctccccacttcagtagtccccagtgtctgttgttctcatccttatgtccacgtgtacctcatgcttagctcccactt

SEQ ID NO: 46843 - DNA, 80 bp, synthetic construct; identical to SEQ ID NO: 15567
  source 1..80: mol_type = other DNA

SEQ ID NO: 46844 - DNA, 80 bp, synthetic construct
  source 1..80: mol_type = other DNA
gagtctggaaacctaagctgttgtcttgcttctgctagaactagctctttgcctttgagcaagtcaccccacctttctgc

SEQ ID NO: 46845 - DNA, 80 bp, synthetic construct
  source 1..80: mol_type = other DNA
gtgaatggaccacaagtgtttacagctgtggtgtatggacttctgtgttgtatggactgtggacaaagaggcctataact

SEQ ID NO: 46846 - DNA, 80 bp, synthetic construct; identical to SEQ ID NO: 15568
  source 1..80: mol_type = other DNA

SEQ ID NO: 46847 - DNA, 80 bp, synthetic construct
  source 1..80: mol_type = other DNA
taaaatctatttcagtgtcataatagaaaaattatattgtactgagttatttactattctatttattagtttcaacaatc

SEQ ID NO: 46848 - DNA, 80 bp, synthetic construct
  source 1..80: mol_type = other DNA
cctgaaagatgcattttagcctacctctatgatctctatgtgtcatgtagccacctcagaagtaaatttggagacctctt

SEQ ID NO: 46849 - DNA, 80 bp, synthetic construct
  source 1..80: mol_type = other DNA
ttaaaatagacagggacaatacacgatagtctattacacaatgtaaatgtgtgatcataggttttttttcccccaatatt

SEQ ID NO: 46850 - DNA, 80 bp, synthetic construct
  source 1..80: mol_type = other DNA
attataaatctaatagaaagatcaatgaggcagctctttgtattttgctttatttgtatccctcttgattttgatatcta

SEQ ID NO: 46851 - DNA, 80 bp, synthetic construct; identical to SEQ ID NO: 15569
  source 1..80: mol_type = other DNA

SEQ ID NO: 46852 - DNA, 80 bp, synthetic construct
  source 1..80: mol_type = other DNA
acctacttgctatcttagacttaaaattcatgacctgataatgatagtagtatttgattcctgtcaatacatcttattgc

SEQ ID NO: 46853 - DNA, 80 bp, synthetic construct
  source 1..80: mol_type = other DNA
ctttgctcttgaaatcaccccactcagaacattctttcagagctatttgcatgctgacttcttcactccgtttgtctttc

SEQ ID NO: 46854 - DNA, 80 bp, synthetic construct
  source 1..80: mol_type = other DNA
gagtggtagaaggtaatagctaagaaaacaaatttggaatccagaaggaggtagggaaaggatgttcaactaccattttt

SEQ ID NO: 46855 - DNA, 80 bp, synthetic construct; identical to SEQ ID NO: 15570
  source 1..80: mol_type = other DNA

SEQ ID NO: 46856 - DNA, 80 bp, synthetic construct
  source 1..80: mol_type = other DNA
acactctaagaacaacccacagtagggcttttgcactttatcttacgttgcttgtgatacttgtcctcagttacttgtgt

SEQ ID NO: 46857 - DNA, 80 bp, synthetic construct
  source 1..80: mol_type = other DNA
cagaagctttttctatttttttcactgctacatcccagtgtcttgaagagtatgtggctcttagtaggcactgaaaaaaa

SEQ ID NO: 46858 - DNA, 80 bp, synthetic construct
  source 1..80: mol_type = other DNA
catttcagcttacatttttcaaagagctttctcttacatgatttagttcttacagcagccgtttttttaatagtgaactt

SEQ ID NO: 46859 - DNA, 80 bp, synthetic construct; identical to SEQ ID NO: 15571
  source 1..80: mol_type = other DNA

SEQ ID NO: 46860 - DNA, 80 bp, synthetic construct
  source 1..80: mol_type = other DNA
tctgaaacaccattcacacagttgtgtgagaggagtatttgggggagatacaacactggtcacctctaccactgattgag

SEQ ID NO: 46861 - DNA, 80 bp, synthetic construct
  source 1..80: mol_type = other DNA
aagagagtgtagaagattgtaattgctgccatttagtagatgactttagtcctctttgttagagtagtgcttcccaagca

SEQ ID NO: 46862 - DNA, 80 bp, synthetic construct; identical to SEQ ID NO: 15572
  source 1..80: mol_type = other DNA

SEQ ID NO: 46863 - DNA, 80 bp, synthetic construct
  source 1..80: mol_type = other DNA
atgcataaaagagcttttgagtagagagagtgaatgttgtttatggatatgctacctacagaaggtaagcacaaatggct

SEQ ID NO: 46864 - DNA, 80 bp, synthetic construct
  source 1..80: mol_type = other DNA
gacgtaactcactgaaacatgagctgtttttatatgatagagcaggctctttaaaaatctcttaatgcctctgagaaata

SEQ ID NO: 46865 - DNA, 80 bp, synthetic construct
  source 1..80: mol_type = other DNA
cgaacttctactgcgtacactataccagagaaatagttttgtaagatatgtaattaagagtactcttatgtgtaattgaa

SEQ ID NO: 46866 - DNA, 80 bp, synthetic construct
  source 1..80: mol_type = other DNA
tccacctatttagaaattatttattgaggaatttctacattccaaagtactttgattagcgccaattagtaagaagttct

SEQ ID NO: 46867 - DNA, 80 bp, synthetic construct; identical to SEQ ID NO: 15573
  source 1..80: mol_type = other DNA

SEQ ID NO: 46868 - DNA, 80 bp, synthetic construct
  source 1..80: mol_type = other DNA
agagttgttgccttggtgcttctttgaaattgatgtcgttagtaagtgtctggactcacatttggctatcatttgctttt

SEQ ID NO: 46869 - DNA, 80 bp, synthetic construct
  source 1..80: mol_type = other DNA
taagaatgcctgtattttgaaaaaaaccgtatttgggtccacctaaattacatgatgtctataaattttttgatgccctt

SEQ ID NO: 46870 - DNA, 80 bp, synthetic construct
  source 1..80: mol_type = other DNA
ttcttctcaaggttctactaagttatttgacaaatgagtattttatctgtgaatctaagaaaatgacttgtttgatgtta

SEQ ID NO: 46871 - DNA, 80 bp, synthetic construct; identical to SEQ ID NO: 15574
  source 1..80: mol_type = other DNA

SEQ ID NO: 46872 - DNA, 80 bp, synthetic construct
  source 1..80: mol_type = other DNA
tctgtagcagaggggccaagaatttctttgtttcctgaaatttccatttagttgagatttcttccatatggatggtctct

SEQ ID NO: 46873 - DNA, 80 bp, synthetic construct
  source 1..80: mol_type = other DNA
caggtctagattccgaggatgtccggtgttttttggcaattaatgcctggaagatgatgaaaagataccccttgtatata

SEQ ID NO: 46874 - DNA, 80 bp, synthetic construct; identical to SEQ ID NO: 15575
  source 1..80: mol_type = other DNA

SEQ ID NO: 46875 - DNA, 80 bp, synthetic construct
  source 1..80: mol_type = other DNA
aatagtgtgaaccttatggtggtgtgctaataaataaggtgatttttgcaagttaaccatagtccttggcatatggtgcg

SEQ ID NO: 46876 - DNA, 80 bp, synthetic construct
  source 1..80: mol_type = other DNA
ttgtttttaaaacgagtttaatcattaaagaatccttagtagttaccactgaaaggaactccaaaaccttagtgaggctt

SEQ ID NO: 46877 - DNA, 80 bp, synthetic construct
  source 1..80: mol_type = other DNA
tgtatgcaagtcaaagctcagtattttcttacagcattggaatgtgggtaaacctcattcattgttttataaaatagaaa

SEQ ID NO: 46878 - DNA, 80 bp, synthetic construct; identical to SEQ ID NO: 15576
  source 1..80: mol_type = other DNA

SEQ ID NO: 46879 - DNA, 80 bp, synthetic construct
  source 1..80: mol_type = other DNA
ggaaaggagtatttgagggtatgtatattgggaagtggtgtagtatcaaggtagatatggtagaattttaatagttattt

SEQ ID NO: 46880 - DNA, 80 bp, synthetic construct
  source 1..80: mol_type = other DNA
taggaaacctgaaggacttgttcccaagtgtgttagaaaacttgcttttccaatccccctttcctagcttgtggggatgc

SEQ ID NO: 46881 - DNA, 80 bp, synthetic construct
  source 1..80: mol_type = other DNA
tgtccctttctgtaattgccttcttaattttttgggcatgccctgggggtgatgaagggtgagatgatactattcattga

SEQ ID NO: 46882 - DNA, 80 bp, synthetic construct; identical to SEQ ID NO: 15577
  source 1..80: mol_type = other DNA

SEQ ID NO: 46883 - DNA, 80 bp, synthetic construct
  source 1..80: mol_type = other DNA
tttttttttttttttccaagacaaagtcttactgtgtcacccaggctggagtacagtggtgtgatctcggctcactgcaa

SEQ ID NO: 46884 - DNA, 80 bp, synthetic construct
  source 1..80: mol_type = other DNA
gagccaccgcacccatccctcatttattcttgtactaagtaaaaggaataaagtaagaattttaggggcgttggtgaagt

SEQ ID NO: 46885 - DNA, 80 bp, synthetic construct
  source 1..80: mol_type = other DNA
tgtttcttagtgaatccatgaagcatcaattaaagcaagctaatggcaattaagcacccacagtctaacaatgaaaggct

SEQ ID NO: 46886 - DNA, 80 bp, synthetic construct; identical to SEQ ID NO: 15578
  source 1..80: mol_type = other DNA

SEQ ID NO: 46887 - DNA, 80 bp, synthetic construct
  source 1..80: mol_type = other DNA
atcctgtcccttatctagtgtctctgggggaacttacatgtaatattttttatggtattttagttgcataatgtctcatt

SEQ ID NO: 46888 - DNA, 80 bp, synthetic construct
  source 1..80: mol_type = other DNA
taatcttagtatttttgctcctatcatgaccctgaacgagtatatttccttctacctttgttttttgatgacccaggcaa

SEQ ID NO: 46889 - DNA, 80 bp, synthetic construct
  source 1..80: mol_type = other DNA
attaaaacattattctgtaaatcttaaaggctttgaatgattaggaagtcttcaagtcagactgcctaattccaactttg

SEQ ID NO: 46890 - DNA, 80 bp, synthetic construct
  source 1..80: mol_type = other DNA
gaaggataacagaattttcataaaacaagctattaaaacttcaccttaagaaaggatacacacacgggcctgtgaatttt

SEQ ID NO: 46891 - DNA, 80 bp, synthetic construct; identical to SEQ ID NO: 15579
  source 1..80: mol_type = other DNA

SEQ ID NO: 46892 - DNA, 80 bp, synthetic construct
  source 1..80: mol_type = other DNA
taatttggaggattccctgggtctaagaagtcaggatcaggtcagtttaacgtcagcagagctttgagccaggtgggcac

SEQ ID NO: 46893 - DNA, 80 bp, synthetic construct
  source 1..80: mol_type = other DNA
ttttcttatttgcagaagctctaatttatccaccctaccatgccctaaccaactctcaattcctatccaccaggatatat

SEQ ID NO: 46894 - DNA, 80 bp, synthetic construct
  source 1..80: mol_type = other DNA
gtacttgcagaatttagtcttttctttcagctcctgaagtgatctattaaatgaaatcctgtgggtaaagtgaagctggt

SEQ ID NO: 46895 - DNA, 80 bp, synthetic construct; identical to SEQ ID NO: 15580
  source 1..80: mol_type = other DNA

SEQ ID NO: 46896 - DNA, 80 bp, synthetic construct
  source 1..80: mol_type = other DNA
ttatttctagctattcagacattctgtttagtttctttcccagaactttgttatgaagaaaacactttccttagcttcat

SEQ ID NO: 46897 - DNA, 80 bp, synthetic construct
  source 1..80: mol_type = other DNA
gtcaagaagttgatagtaaggtgggctaaggcaaaacttttctcttgacctatggatagaaaataagtcattgtaagaga

SEQ ID NO: 46898 - DNA, 80 bp, synthetic construct
  source 1..80: mol_type = other DNA
ataattatacaaacaaaataaggaccgagtcttgaacttgctttttctccatttctgttagaaacttctctgggttcatg

SEQ ID NO: 46899 - DNA, 80 bp, synthetic construct; identical to SEQ ID NO: 15581
  source 1..80: mol_type = other DNA

SEQ ID NO: 46900 - DNA, 80 bp, synthetic construct
  source 1..80: mol_type = other DNA
taactcttcttttggagagagctacttacacttataggaaacttgtgcataggtgggcctttttttcttgctcactttat

SEQ ID NO: 46901 - DNA, 80 bp, synthetic construct
  source 1..80: mol_type = other DNA
gtggagatgtgggtgcatatacctattttttctgaatcatttaagagtagattgtatattttattcttttgaatattgca

SEQ ID NO: 46902 - DNA, 80 bp, synthetic construct; identical to SEQ ID NO: 15582
  source 1..80: mol_type = other DNA

SEQ ID NO: 46903 - DNA, 80 bp, synthetic construct
  source 1..80: mol_type = other DNA
gtagttactaattttccccttgcagtaagcaatctttgaggagatacttcgagacagtgcaaattttcttctccttgttt

SEQ ID NO: 46904 - DNA, 80 bp, synthetic construct
  source 1..80: mol_type = other DNA
gtttgtgtcctattttaaggaagagcctgccctcctctcccctgtttatttattatccatatgggttataatatactgta

SEQ ID NO: 46905 - DNA, 80 bp, synthetic construct
  source 1..80: mol_type = other DNA
gagcccttggttctatttagcagagaacgttactgagaaaccaagatctgggtattatgtatgctcatggttatggagta

SEQ ID NO: 46906 - DNA, 80 bp, synthetic construct; identical to SEQ ID NO: 15583
  source 1..80: mol_type = other DNA

SEQ ID NO: 46907 - DNA, 80 bp, synthetic construct
  source 1..80: mol_type = other DNA
ggatcacttgaggccaggagtttgagaccagcctggccaacatggtgaaaccccatctctactaaaaatacaaaaattag

SEQ ID NO: 46908 - DNA, 80 bp, synthetic construct
  source 1..80: mol_type = other DNA
gaaagaaagaaatgttacacacataccactaggaagaacaaacctacctaaaaggctttgaagatttgtttgcaattcca

SEQ ID NO: 46909 - DNA, 80 bp, synthetic construct
  source 1..80: mol_type = other DNA
aaaagtgaaactatacaaaaaagtatactcagagatgtgtctccctcccatatccctcttaccagatgatccagttttat

SEQ ID NO: 46910 - DNA, 80 bp, synthetic construct
  source 1..80: mol_type = other DNA
gatagctacatagtcatataagtattgagaggcaattgtgtgttggttcccaactgtgagtgcatattggaatcagctgg

SEQ ID NO: 46911 - DNA, 80 bp, synthetic construct; identical to SEQ ID NO: 15584
  source 1..80: mol_type = other DNA

SEQ ID NO: 46912 - DNA, 80 bp, synthetic construct
  source 1..80: mol_type = other DNA
aaccccatgcatctatagccccccactcacactggacccagcaattgcacttctatgaaattaccctaagaaaattattg

SEQ ID NO: 46913 - DNA, 80 bp, synthetic construct
  source 1..80: mol_type = other DNA
tgatagaatcattatatagcaagttagaaaaaactgacacaaaatagtgcctagagcaagaccttactttccagttaaaa

SEQ ID NO: 46914 - DNA, 80 bp, synthetic construct
  source 1..80: mol_type = other DNA
ctatcagttttctattcaattatgcactgtggatttagtacatattgcatatatatataccgaaagccagtgcctgtcaa

SEQ ID NO: 46915 - DNA, 80 bp, synthetic construct; identical to SEQ ID NO: 15585
  source 1..80: mol_type = other DNA

SEQ ID NO: 46916 - DNA, 80 bp, synthetic construct
  source 1..80: mol_type = other DNA
gatttttattcccacacattttctgtggaattgacatactttatttttgggtggatgtacatgctgcaaattgtatatga

SEQ ID NO: 46917 - DNA, 80 bp, synthetic construct
  source 1..80: mol_type = other DNA
cagtgcatagctgagtcaggcacagtattaactaattaataattaatgtttctgtttattggtttgtatcgctactgaat

SEQ ID NO: 46918 - DNA, 80 bp, synthetic construct
  source 1..80: mol_type = other DNA
atacccataatgttttaattctttccatttttcccagaatcttgagcagtggacactgaggcaatcctggttagaactcc

SEQ ID NO: 46919 - DNA, 80 bp, synthetic construct; identical to SEQ ID NO: 15586
  source 1..80: mol_type = other DNA

SEQ ID NO: 46920 - DNA, 80 bp, synthetic construct
  source 1..80: mol_type = other DNA
aactgtcatgaatttttcacaagtaacggtaaattttgtgtagcacagtgatttttctttaagtcataggaatgtgaaga

SEQ ID NO: 46921 - DNA, 80 bp, synthetic construct
  source 1..80: mol_type = other DNA
aggtttggttcatgctttcagtgtcccttagtctactgtgttacgtagtattcattatatgggaaacgctttttccacca

SEQ ID NO: 46922 - DNA, 80 bp, synthetic construct
  source 1..80: mol_type = other DNA
attgtaactgtgacagaaaagtatattgtttgttggacaaagtgattgtttttaattagagagagggggtcatcggaaaa

SEQ ID NO: 46923 - DNA, 80 bp, synthetic construct; identical to SEQ ID NO: 15587
  source 1..80: mol_type = other DNA

SEQ ID NO: 46924 - DNA, 80 bp, synthetic construct
  source 1..80: mol_type = other DNA
aaacagaaaaggtgtggctggaagatgggcgtctgtgtgagagtttaaagaataattgagaaagtctcacttcctgtaaa

SEQ ID NO: 46925 - DNA, 80 bp, synthetic construct
  source 1..80: mol_type = other DNA
tagttctcaattctgcctttatatccaaatcactgctgaactgttaaaaacagtgatttccgagacccgctttagaccaa

SEQ ID NO: 46926 - DNA, 80 bp, synthetic construct; identical to SEQ ID NO: 15588
  source 1..80: mol_type = other DNA

SEQ ID NO: 46927 - DNA, 80 bp, synthetic construct
  source 1..80: mol_type = other DNA
ttttaagcacatagatttcttgtccactaatgaataatactatagtagccaccatttattgactgcttacagaatggcaa

SEQ ID NO: 46928 - DNA, 80 bp, synthetic construct
  source 1..80: mol_type = other DNA
ttatatcatgttgaaacagacacttaaaggttacatgagttgctccaggacacacagtgaaggacataaagcctgggttt

SEQ ID NO: 46929 - DNA, 80 bp, synthetic construct
  source 1..80: mol_type = other DNA
catatttgctgataggtgagtgtatgtgcattgcctaacttcccataggcaggacagatggtattgaagagacttgaaag

SEQ ID NO: 46930 - DNA, 80 bp, synthetic construct; identical to SEQ ID NO: 15589
  source 1..80: mol_type = other DNA

SEQ ID NO: 46931 - DNA, 80 bp, synthetic construct
  source 1..80: mol_type = other DNA
atgtgctgaaaaacaaaatcaaaccccaaaacaagctcaacagacatatatataggcctgttttcccagactctaaaaca

SEQ ID NO: 46932 - DNA, 80 bp, synthetic construct
  source 1..80: mol_type = other DNA
tgctagtttgagaatggcttcgagggcaattagagcatacgaagtgatttagaagcattacagtggcttttaattttata

SEQ ID NO: 46933 - DNA, 80 bp, synthetic construct
  source 1..80: mol_type = other DNA
ttaagggacaagatgaacaaagggaaggcctcctaacatctctccagaatcaagttaaccaggtaaagtatagtataata

SEQ ID NO: 46934 - DNA, 80 bp, synthetic construct
  source 1..80: mol_type = other DNA
cctggccaacatggtgaaaccccgtctgtactaaaaatacaaaaattagccgggcatgatggtgtgcgcctatgatccca

SEQ ID NO: 46935 - DNA, 80 bp, synthetic construct; identical to SEQ ID NO: 15590
  source 1..80: mol_type = other DNA

SEQ ID NO: 46936 - DNA, 80 bp, synthetic construct
  source 1..80: mol_type = other DNA
ttggatgccacattatcaggcacgctttcagcttgaaatctgtaggttcagaaactcagttgtattgatgccaaccaagt

SEQ ID NO: 46937 - DNA, 80 bp, synthetic construct
  source 1..80: mol_type = other DNA
aagcaaagtggatagattggtcttatgaggtgttttatcctgatacacagcctaattgaccccttcttgtggcactgtgt

SEQ ID NO: 46938 - DNA, 80 bp, synthetic construct; identical to SEQ ID NO: 15591
  source 1..80: mol_type = other DNA

SEQ ID NO: 46939 - DNA, 80 bp, synthetic construct
  source 1..80: mol_type = other DNA
gttctctgttaagatgttacctccttcgggaggcctttgatcacctctaaaaataggaccacagccattctgtatgccat

SEQ ID NO: 46940 - DNA, 80 bp, synthetic construct
  source 1..80: mol_type = other DNA
tcaccttgcagggtacttacaggtcatctgttgggatggagtacttctgcatgtgactcatttgaactcttttaagatga

SEQ ID NO: 46941 - DNA, 80 bp, synthetic construct
  source 1..80: mol_type = other DNA
ttttgctcatctcatctgattttagggtgttgcccacttgtggctccctttcctaagcaaatttttccttttccagcatt

SEQ ID NO: 46942 - DNA, 80 bp, synthetic construct
  source 1..80: mol_type = other DNA
aaaataatacatttgctagggttcagcaagtccctagaaatataacaggactgaggcaaaatgtaattctctctctccag

SEQ ID NO: 46943 - DNA, 80 bp, synthetic construct; identical to SEQ ID NO: 15592
  source 1..80: mol_type = other DNA

SEQ ID NO: 46944 - DNA, 80 bp, synthetic construct
  source 1..80: mol_type = other DNA
taccaagatgacataaaagcgcggcagatgatgcacgaagcattgcaactccgcctaaatttggtaagtgacatttctag

SEQ ID NO: 46945 - DNA, 80 bp, synthetic construct
  source 1..80: mol_type = other DNA
cctgtctggtcagacatctagacagtgctaggtattttaagcatagatttgccttctctacctctaccccagtgaatctc

SEQ ID NO: 46946 - DNA, 80 bp, synthetic construct
  source 1..80: mol_type = other DNA
tatagaaatttaaaatgtctcacatattgtgcattccttgagttttcttttcccatcaggcaggcccaagtgcaggcccc

SEQ ID NO: 46947 - DNA, 80 bp, synthetic construct; identical to SEQ ID NO: 15593
  source 1..80: mol_type = other DNA

SEQ ID NO: 46948 - DNA, 80 bp, synthetic construct
  source 1..80: mol_type = other DNA
taagtttattggtgcccacattcagatactcacgtcccttcttcattttagttaatgtttgaatgactgaactgtgctga

SEQ ID NO: 46949 - DNA, 80 bp, synthetic construct
  source 1..80: mol_type = other DNA
ggggtgttctttctgttttacagaatgcaaatatcttactgtattttgtctgctaggtaggaggaatgtttgacacggtg

SEQ ID NO: 46950 - DNA, 80 bp, synthetic construct
  source 1..80: mol_type = other DNA
atgtatgcatggtataagctttgatatactgatggcgatttctgccacatcttatttacttggatgctattaaaaattct

SEQ ID NO: 46951 - DNA, 80 bp, synthetic construct; identical to SEQ ID NO: 15594
  source 1..80: mol_type = other DNA

SEQ ID NO: 46952 - DNA, 80 bp, synthetic construct
  source 1..80: mol_type = other DNA
ttttttattgaaaacaattacattataaaacatgtttaattttttaaagaactttagaaatccactgttaaatatataac

SEQ ID NO: 46953 - DNA, 80 bp, synthetic construct
  source 1..80: mol_type = other DNA
gaaaccaaataaatctgatgcattaccaatcaaataaatcaatggttaccttgtaatctgaccctggacatgagaaagtg

SEQ ID NO: 46954 - DNA, 80 bp, synthetic construct
  source 1..80: mol_type = other DNA
ccacttgacaatgttatacgaaaatagaatctttattaaaatagcaaggcataacaatcactgctactcaggaaacactg

SEQ ID NO: 46955 - DNA, 80 bp, synthetic construct
  source 1..80: mol_type = other DNA
gagaaacttactcctgcttctgtccctggagaaggtcagggagatgccagtgtggccttaaggcaattctaacacttgct

SEQ ID NO: 46956 - DNA, 80 bp, synthetic construct
  source 1..80: mol_type = other DNA
ttttcatggtcactttctatttttggcagtgagtgatacatgttatccactattggcagcaattggggggaaaaaaagtt

SEQ ID NO: 46957 - DNA, 80 bp, synthetic construct
  source 1..80: mol_type = other DNA
cgtggtggtgtgcgcctgtaatctcagctacttgggaagctgaggcagaagcattgcttaaacccaggaggtggaggttg

SEQ ID NO: 46958 - DNA, 80 bp, synthetic construct; identical to SEQ ID NO: 15601
  source 1..80: mol_type = other DNA

SEQ ID NO: 46959 - DNA, 80 bp, synthetic construct
  source 1..80: mol_type = other DNA
aatggtgtgaacacgggaggcagagcttgcagtgagccgagatcacgccactgcactctagcctgggcagcagagcgaga

SEQ ID NO: 46960 - DNA, 80 bp, synthetic construct; identical to SEQ ID NO: 15602
  source 1..80: mol_type = other DNA

SEQ ID NO: 46961 - DNA, 80 bp, synthetic construct
  source 1..80: mol_type = other DNA
tctttgaaggcaggtgagaatctagtctcagtgacaacccagcctgatttggaaggggggagtcataagggttttcgccc

SEQ ID NO: 46962 - DNA, 80 bp, synthetic construct
  source 1..80: mol_type = other DNA
aaggaggcggcagtgggggtcacccaggcgtgaagatgggtttccctggggatatcctgcctcctgccaatcacagcgtc

SEQ ID NO: 46963 - DNA, 80 bp, synthetic construct
  source 1..80: mol_type = other DNA
agatgtacccaagtttaggtgcctctggctctgtcagctcctgaagtcgagaagaattgtcccatcaccagtccccttga

SEQ ID NO: 46964 - DNA, 80 bp, synthetic construct; identical to SEQ ID NO: 15603
  source 1..80: mol_type = other DNA

SEQ ID NO: 46965 - DNA, 80 bp, synthetic construct
  source 1..80: mol_type = other DNA
ttcaagcaattctggtgcctcagcctcctgaatagctgggattacaggcacgcaccgccacacctgactaatttttttat

SEQ ID NO: 46966 - DNA, 80 bp, synthetic construct
  source 1..80: mol_type = other DNA
aaattttcatcactgatacatttgttcaaagggtggtgcactcaggctgggttggaccaattagctggtccccaccacct

SEQ ID NO: 46967 - DNA, 80 bp, synthetic construct
  source 1..80: mol_type = other DNA
agagttacccttgggaatgtgagcccagtgtggccagatataccaagttttcaagagaagctggacattttgaatgaact

SEQ ID NO: 46968 - DNA, 80 bp, synthetic construct
  source 1..80: mol_type = other DNA
ccttccagccatcttgtctgggctgtgtcttccttagctccctacctgagtgctgacactgagaaagcccatcccatctg

SEQ ID NO: 46969 - DNA, 80 bp, synthetic construct; identical to SEQ ID NO: 15604
  source 1..80: mol_type = other DNA

SEQ ID NO: 46970 - DNA, 80 bp, synthetic construct
  source 1..80: mol_type = other DNA
gcagacaaagcctgattttggaaagaaaactttgcagtggataatccatagagctttcaatgtcttttctttgttcaccc

SEQ ID NO: 46971 - DNA, 80 bp, synthetic construct
  source 1..80: mol_type = other DNA
cctgtgtcatgggcggatgcggtagcggacgggcacgtcgtgttccggctgcatcagaccgaagccgtacctgctgaggt

SEQ ID NO: 46972 - DNA, 80 bp, synthetic construct; identical to SEQ ID NO: 15605
  source 1..80: mol_type = other DNA

SEQ ID NO: 46973 - DNA, 80 bp, synthetic construct
  source 1..80: mol_type = other DNA
ggtggagccgaaagagggaaagagcctggcccgagtctgtgcacagagtggggaagccctccaatcccacagctgatacc

SEQ ID NO: 46974 - DNA, 80 bp, synthetic construct
  source 1..80: mol_type = other DNA
caggactgctgctaacccttaggtgtctttgtgagattagaaacaggcatcgctctcaagacattttactgccatctctg

SEQ ID NO: 46975 - DNA, 80 bp, synthetic construct
  source 1..80: mol_type = other DNA
ctgcctccctgcctcatcttaccaatgcccatgttcgtaagggtcaggagaatatcttatgactcttttcccaccactat

SEQ ID NO: 46976 - DNA, 80 bp, synthetic construct
  source 1..80: mol_type = other DNA
gttcttacccactctgggtctcagttctcccatctggtcaaagaggggaaaggcatgttgagtctcttccagctctgagg

SEQ ID NO: 46977 - DNA, 80 bp, synthetic construct; identical to SEQ ID NO: 15606
  source 1..80: mol_type = other DNA

SEQ ID NO: 46978 - DNA, 80 bp, synthetic construct
  source 1..80: mol_type = other DNA
taatgcaagtttcacatttgctcacgtgcaatttcacttgtgagaaacatgaggtgaagacgaaagactgcacccagctg

SEQ ID NO: 46979 - DNA, 80 bp, synthetic construct
  source 1..80: mol_type = other DNA
tttttattatgtcactgatgaggtttttgagtgttggccccagtcccccttttccctcaatccctgcagttttttctttc

SEQ ID NO: 46980 - DNA, 80 bp, synthetic construct
  source 1..80: mol_type = other DNA
ttctcctgcctcagcctcctgagtagttgggattacaggcacgctccaccacacccggccaatttttgtatttttagtag

SEQ ID NO: 46981 - DNA, 80 bp, synthetic construct; identical to SEQ ID NO: 15607
  source 1..80: mol_type = other DNA

SEQ ID NO: 46982 - DNA, 80 bp, synthetic construct
  source 1..80: mol_type = other DNA
gggttaagaacttagaaagatccaattcatttatcctgacactcctggggtatagttataatcagaaccctcattttaca

SEQ ID NO: 46983 - DNA, 80 bp, synthetic construct
  source 1..80: mol_type = other DNA
acaggtattaaaataaccaagtgggaacagtgaagttcggccagttcctaacatgaagttctgaacatgcggcagcagct

SEQ ID NO: 46984 - DNA, 80 bp, synthetic construct
  source 1..80: mol_type = other DNA
ttttttacacgagctcttctgatttataaaagcacacagttgtaaaaccacaaataagagatggctcacgggctgtccat

SEQ ID NO: 46985 - DNA, 80 bp, synthetic construct; identical to SEQ ID NO: 15608
  source 1..80: mol_type = other DNA

SEQ ID NO: 46986 - DNA, 80 bp, synthetic construct
  source 1..80: mol_type = other DNA
ggggattggttaaaaaattatggcaaaaggtttgtgtgtactgacatggaaagaatttctacaattggttgttgagtgaa

SEQ ID NO: 46987 - DNA, 80 bp, synthetic construct
  source 1..80: mol_type = other DNA
tccaaaccttggtcagagaactctgtagaactggagaagaagggaaatacatattttttacatttaagtatatatttctc

SEQ ID NO: 46988 - DNA, 80 bp, synthetic construct; identical to SEQ ID NO: 15609
  source 1..80: mol_type = other DNA

SEQ ID NO: 46989 - DNA, 80 bp, synthetic construct
  source 1..80: mol_type = other DNA
tgggtggataagtagaagaatgggtggatggacatatgagtgagtgggtagataaatgagtgggtggatggatggataaa

SEQ ID NO: 46990 - DNA, 80 bp, synthetic construct
  source 1..80: mol_type = other DNA
tgcatggatgcatgggtggatggatagattaatggatggatgggtgaatttgtgaatggatgaatggacagatggatgca

SEQ ID NO: 46991 - DNA, 80 bp, synthetic construct; identical to SEQ ID NO: 15610
  source 1..80: mol_type = other DNA

SEQ ID NO: 46992 - DNA, 80 bp, synthetic construct
  source 1..80: mol_type = other DNA
aaaaggtaggagccaaagagatatcagaaggctggggagagagtggggccatcaatatctgcttatgcatgatcccattt

SEQ ID NO: 46993 - DNA, 80 bp, synthetic construct
  source 1..80: mol_type = other DNA
ttgttctcccacagaccccatatgaccaggcgcccctgccatttacctctgggtctgtgtagatttctgggtctctctgg

SEQ ID NO: 46994 - DNA, 80 bp, synthetic construct
  source 1..80: mol_type = other DNA
ggtgcaaggaagagtcagcgggctatcccttcacctgctcatatgccaaccccagctcttattttacagaggaagatgaa

SEQ ID NO: 46995 - DNA, 80 bp, synthetic construct; identical to SEQ ID NO: 15611
  source 1..80: mol_type = other DNA

SEQ ID NO: 46996 - DNA, 80 bp, synthetic construct
  source 1..80: mol_type = other DNA
cctgtgattggttcaggatggacacatgacccaaagaaagccaatgagacacagtcttgggactcttggtgggaacactg

SEQ ID NO: 46997 - DNA, 80 bp, synthetic construct
  source 1..80: mol_type = other DNA
tgtgcctgaagccaatcctctgggctttttagtgacatgtctcaaagtaccttttcaccttagtcaattgaagttaggtt

SEQ ID NO: 46998 - DNA, 80 bp, synthetic construct
  source 1..80: mol_type = other DNA
taggggctatcttggagggtctgacgatctcaccaagcacaggtgtgctgtctagaaccttctgtgggagagtggtcgtc

SEQ ID NO: 46999 - DNA, 80 bp, synthetic construct
  source 1..80: mol_type = other DNA
cagagctgactcgtctctgccagggacacagctcgggccaagacagaggggccagtaggcctgggttcccactgctgcca

SEQ ID NO: 47000 - DNA, 80 bp, synthetic construct; identical to SEQ ID NO: 15612
  source 1..80: mol_type = other DNA

SEQ ID NO: 47001 - DNA, 80 bp, synthetic construct
  source 1..80: mol_type = other DNA
aatagattgaggtggaattgaaggaacagccactctacgcctaagccgcgagagactttgtgtttccacttgctcggcaa

SEQ ID NO: 47002 - DNA, 80 bp, synthetic construct
  source 1..80: mol_type = other DNA
atatctaaagatttgcttccaaatataatcattcttgatgtagtttgggaagcaaaaagttccctatatgctttgtatct

SEQ ID NO: 47003 - DNA, 80 bp, synthetic construct; identical to SEQ ID NO: 15613
  source 1..80: mol_type = other DNA

SEQ ID NO: 47004 - DNA, 80 bp, synthetic construct
  source 1..80: mol_type = other DNA
ggcaaaaggacatatgcacaaagataattattgcagtgctcatgtaatagaaaaatgctggaaacaatctcatgtctatc

SEQ ID NO: 47005 - DNA, 80 bp, synthetic construct
  source 1..80: mol_type = other DNA
catgcaaacgcaaggtgcagggtggtggctcagcatgctgccatttgtgtgtttgtttaaagagaaatatacatgaagaa

SEQ ID NO: 47006 - DNA, 80 bp, synthetic construct
  source 1..80: mol_type = other DNA
cccagctaggttttttttttttttttggtagagatggaggtctccctatgtttcccaggctgatctcaaactcctggcct

SEQ ID NO: 47007 - DNA, 80 bp, synthetic construct
  source 1..80: mol_type = other DNA
ggaggctgactttccttgcaaataccttttaaactgttcaaaattttttaatggacacactaattttaagtgaaacagaa

SEQ ID NO: 47008 - DNA, 80 bp, synthetic construct; identical to SEQ ID NO: 15614
  source 1..80: mol_type = other DNA

SEQ ID NO: 47009 - DNA, 80 bp, synthetic construct
  source 1..80: mol_type = other DNA
gctcaatacttccatcacgcaggtgccattattaggccttttactgaaaaggaaaacgaagtactccccggtcactaccc

SEQ ID NO: 47010 - DNA, 80 bp, synthetic construct
  source 1..80: mol_type = other DNA
tgtgactgtggacaagtcacgtccccctttgggtctcaacactgggggtaacattgccacctcctgggtggacgcaaggg

SEQ ID NO: 47011 - DNA, 80 bp, synthetic construct; identical to SEQ ID NO: 15615
  source 1..80: mol_type = other DNA

SEQ ID NO: 47012 - DNA, 80 bp, synthetic construct
  source 1..80: mol_type = other DNA
ctgcacagatgtgagtgtgagtgtgtgtgtgtgtgtgtgtgtgtgcacacacaaccataagagatcctgaatttgccacc

SEQ ID NO: 47013 - DNA, 80 bp, synthetic construct
  source 1..80: mol_type = other DNA
gaggcactgactgcgggccagaccacacccttggtgattcacatgctccttcttgttgcctcctgacaacatggcccatc

SEQ ID NO: 47014 - DNA, 80 bp, synthetic construct
  source 1..80: mol_type = other DNA
atccaggactgacccatccttccagacttcaagtgtgggcatgggacccaggcggaggcactgagtgatccacgcagagt

SEQ ID NO: 47015 - DNA, 80 bp, synthetic construct; identical to SEQ ID NO: 15616
  source 1..80: mol_type = other DNA

SEQ ID NO: 47016 - DNA, 80 bp, synthetic construct
  source 1..80: mol_type = other DNA
ctaaatctgctgtaaaaatagagtctatttaaaacaaacaaacaaaagccctaagtgcaatgtgggattgtggattggct

SEQ ID NO: 47017 - DNA, 80 bp, synthetic construct
  source 1..80: mol_type = other DNA
gtaacattagggaaagctgggtgaagggtatttgggaactcctgtactatctttgcaactcttttataatctaaaattat

SEQ ID NO: 47018 - DNA, 80 bp, synthetic construct
  source 1..80: mol_type = other DNA
actgtggttttgctttctactccgttgtcagatgcctcaaggattcttctcgatgatcactatctcagcggagctatgtg

SEQ ID NO: 47019 - DNA, 80 bp, synthetic construct
  source 1..80: mol_type = other DNA
acatcatgtcaatcaatggtttcagtcctggcattaccagcatcagtgggctcagagctggcagggaagcctgacctgtg

SEQ ID NO: 47020 - DNA, 80 bp, synthetic construct; identical to SEQ ID NO: 15617
  source 1..80: mol_type = other DNA

SEQ ID NO: 47021 - DNA, 80 bp, synthetic construct
  source 1..80: mol_type = other DNA
accctcgcctgcagtatctcctccagtcctgaggatttaaactcctctatgctgacaactcccaagcctggacctcaaac

SEQ ID NO: 47022 - DNA, 80 bp, synthetic construct
  source 1..80: mol_type = other DNA
aaacctggattcatccttgatggcctcccccaaggtcccatccaacagcggatcctgttggctttactttgatatatgtt

SEQ ID NO: 47023 - DNA, 80 bp, synthetic construct
  source 1..80: mol_type = other DNA
agccagaatgatccctctaaagcgaaagacaggccaggttcttcctctgctcagagccctacagcaggcacctgtctcac

SEQ ID NO: 47024 - DNA, 80 bp, synthetic construct; identical to SEQ ID NO: 15618
  source 1..80: mol_type = other DNA

SEQ ID NO: 47025 - DNA, 80 bp, synthetic construct
  source 1..80: mol_type = other DNA
agtgattctcatgtctcagcctcctgagtagctgggattacgggcctgtgcgaccatgcctggctaatttttgtattttt

SEQ ID NO: 47026 - DNA, 80 bp, synthetic construct
  source 1..80: mol_type = other DNA
tatttatttttgagacagggtctcactatgtcacccaagctggagtgcagtggcacaatcatggctcattgcagccttga

SEQ ID NO: 47027 - DNA, 80 bp, synthetic construct
  source 1..80: mol_type = other DNA
aatgatgttcctctctaacttcccaaagcactgtgatgacagcttatgtgtttattaattgtctatcttctcccaccaga

SEQ ID NO: 47028 - DNA, 80 bp, synthetic construct; identical to SEQ ID NO: 15619
  source 1..80: mol_type = other DNA

SEQ ID NO: 47029 - DNA, 80 bp, synthetic construct
  source 1..80: mol_type = other DNA
ctcccaaaaggcccttgaaaagttttcccacctgcctgaattctggacgctgtcaacgactcaacctcagaggacatctt

SEQ ID NO: 47030 - DNA, 80 bp, synthetic construct
  source 1..80: mol_type = other DNA
tggagacactttggagctccaagtcatctctgcacataaatatgttattaggcactgatgtgggggacaactgccaattg

SEQ ID NO: 47031 - DNA, 80 bp, synthetic construct
  source 1..80: mol_type = other DNA
cagttaatggctctgaggaaactaaaaataagctgcaagtcgatgggagaggaattacccagaaatgtcagcttgtgcaa

SEQ ID NO: 47032 - DNA, 80 bp, synthetic construct; identical to SEQ ID NO: 15620
  source 1..80: mol_type = other DNA

SEQ ID NO: 47033 - DNA, 80 bp, synthetic construct
  source 1..80: mol_type = other DNA
gggcctttgcacttgctgtttcccttatttggaatcttctatccccatatcttctccaagtctctgaatctagctttctt

SEQ ID NO: 47034 - DNA, 80 bp, synthetic construct
  source 1..80: mol_type = other DNA
tcctgaccccccaaatggtaatcgacacaacacagaatctttgaggtctacggtaagtactcaaaggattttttttaaga

SEQ ID NO: 47035 - DNA, 80 bp, synthetic construct
  source 1..80: mol_type = other DNA
acttcaaaaaatgtaaatgtaatgagaaacaatgaaacgcacagaaaccgtgccagattaaagaaaatgggtcgggtgca

SEQ ID NO: 47036 - DNA, 80 bp, synthetic construct
  source 1..80: mol_type = other DNA
attagctggacgtggtggcatgcgcctgtagtcccagctattcaggaggctgaggcaggagaatcgcttgaactcagcag

SEQ ID NO: 47037 - DNA, 80 bp, synthetic construct; identical to SEQ ID NO: 15621
  source 1..80: mol_type = other DNA

SEQ ID NO: 47038 - DNA, 80 bp, synthetic construct
  source 1..80: mol_type = other DNA
gacagagagagagaaagcaaaggtggtaaaatgtttaaaactggggaatcaaggtgaggcatatataggagttcattaaa

SEQ ID NO: 47039 - DNA, 80 bp, synthetic construct
  source 1..80: mol_type = other DNA
agaggccgaggcaggcagatcacttgaggtcaagtttgagaccagcctggccccatttctactaaaaatacaaaaattag

SEQ ID NO: 47040 - DNA, 80 bp, synthetic construct; identical to SEQ ID NO: 15622
  source 1..80: mol_type = other DNA

SEQ ID NO: 47041 - DNA, 80 bp, synthetic construct
  source 1..80: mol_type = other DNA
catgcgttcatatcgcaaccacacatgcacacctgcacacacccacttgcacattcacacccacctgtgtggcccacagc

SEQ ID NO: 47042 - DNA, 80 bp, synthetic construct
  source 1..80: mol_type = other DNA
agcttccacaggcgacttttgacactgcacatgtggtccttgtcccctgcagggacagagcacagagagtaggggttaca

SEQ ID NO: 47043 - DNA, 80 bp, synthetic construct
  source 1..80: mol_type = other DNA
gtcttacccccagtaaaaagaagcaaggggtcttgtctcctgcaggtgggagcctgatctatttcaatcacctctatgtc

SEQ ID NO: 47044 - DNA, 80 bp, synthetic construct; identical to SEQ ID NO: 15623
  source 1..80: mol_type = other DNA

SEQ ID NO: 47045 - DNA, 80 bp, synthetic construct
  source 1..80: mol_type = other DNA
acagcaaaactatatcatgcattaaataaatggtagttctttccagagcaggagaaggaacactaaacactgagcagcat

SEQ ID NO: 47046 - DNA, 80 bp, synthetic construct
  source 1..80: mol_type = other DNA
agcagcaatcacagaaagacatcagcaacaacctaactggcagattgggctggagtctcaaactcaactcactccagaga

SEQ ID NO: 47047 - DNA, 80 bp, synthetic construct
  source 1..80: mol_type = other DNA
tttttaaggttagcatccaagtaaaaagtttttaatcactgtgcagaccacagaagcatctctgaaggtcaactttggcc

SEQ ID NO: 47048 - DNA, 80 bp, synthetic construct
  source 1..80: mol_type = other DNA
agactggtaaggggataaagccgggcactgaagaatgacactatttagatattgttttcttttctacttctttttttttt

SEQ ID NO: 47049 - DNA, 80 bp, synthetic construct; identical to SEQ ID NO: 15624
  source 1..80: mol_type = other DNA

SEQ ID NO: 47050 - DNA, 80 bp, synthetic construct
  source 1..80: mol_type = other DNA
cattgaaatgaatgtcaccatttcgggtgacatttcaatgtaaagcaataagcttaagtgttcaactgaaatacattatc

SEQ ID NO: 47051 - DNA, 80 bp, synthetic construct
  source 1..80: mol_type = other DNA
aaccacctcagttgatgccaactctggatacttctaagcatcatctgatgggatggctaaaaaaagaggcaaagaaattt

SEQ ID NO: 47052 - DNA, 80 bp, synthetic construct; identical to SEQ ID NO: 15625
  source 1..80: mol_type = other DNA

SEQ ID NO: 47053 - DNA, 80 bp, synthetic construct
  source 1..80: mol_type = other DNA
aatgcatgtaaaaaccacagtgtgataccattcacaaccatgaggatggctactatttaaaacataggaaataagtgatg

SEQ ID NO: 47054 - DNA, 80 bp, synthetic construct
  source 1..80: mol_type = other DNA
cagagactcaaacagatactcgtgcaccaatgttcatagcagcattattcacagtagccaaaaggcagaaacaacccaaa

SEQ ID NO: 47055 - DNA, 80 bp, synthetic construct
  source 1..80: mol_type = other DNA
aggagttagagaaccagcatgggcaacatggtgaaaccctgtctctactaaaatacaaaaaaaaaaaaaaaaaattagcc

SEQ ID NO: 47056 - DNA, 80 bp, synthetic construct; identical to SEQ ID NO: 15626
  source 1..80: mol_type = other DNA

SEQ ID NO: 47057 - DNA, 80 bp, synthetic construct
  source 1..80: mol_type = other DNA
gtatactattcgacagaaagtagaatagaaagtagaatagaagagacagaaagtagaatagaagatatgtcgggctggga

SEQ ID NO: 47058 - DNA, 80 bp, synthetic construct
  source 1..80: mol_type = other DNA
gaaggtcatttggcaaaaatgagtcaaagatagtgttgtataacaaagaatttgcattctgggcgggtgcagtggctcac

SEQ ID NO: 47059 - DNA, 80 bp, synthetic construct
  source 1..80: mol_type = other DNA
gctgggggtggtggcaggcacctgtaatcccagttacttgggaggctgaggcagcagaatcacttgaacccgggaggtgg

SEQ ID NO: 47060 - DNA, 80 bp, synthetic construct; identical to SEQ ID NO: 15627
  source 1..80: mol_type = other DNA

SEQ ID NO: 47061 - DNA, 80 bp, synthetic construct
  source 1..80: mol_type = other DNA
gccaagcatggtggtgggcgcctgtagtcccagctactcaggaggctggggcaggagaatcgcttgaacccaggaggcag

SEQ ID NO: 47062 - DNA, 80 bp, synthetic construct
  source 1..80: mol_type = other DNA
cactaaaccttacccaagagttatctattgctgtgatatattgttagcacaaagcaaagtgccagcaaccacgtgtttag

SEQ ID NO: 47063 - DNA, 80 bp, synthetic construct
  source 1..80: mol_type = other DNA
attggtggaaggggatgtgacaagaaaaggaaggagacttaccactgttattacttaatttttttccagccttgctgagg

SEQ ID NO: 47064 - DNA, 80 bp, synthetic construct; identical to SEQ ID NO: 15628
  source 1..80: mol_type = other DNA

SEQ ID NO: 47065 - DNA, 80 bp, synthetic construct
  source 1..80: mol_type = other DNA
gatttacatacacagcagtcctgtcttatccagtttcactttccaaggtttccatcacccatagtcaaccatggtccaag

SEQ ID NO: 47066 - DNA, 80 bp, synthetic construct
  source 1..80: mol_type = other DNA
tccacactgtagaccacacctgcccattagtcacttgggagccactgtctcagttatcacgtcaactgtcatggtatggt

SEQ ID NO: 47067 - DNA, 80 bp, synthetic construct
  source 1..80: mol_type = other DNA
gaaggccgacgtgggcggatcacctgaggtcgggagttcgagtccagtatgaccaacacagagaaaccctgtctctacta

SEQ ID NO: 47068 - DNA, 80 bp, synthetic construct
  source 1..80: mol_type = other DNA
caaaaaaaaaaaaaaaaaattaaactctgtcatagttatgtatgtataagacaaaacagtatatacagggttcagtacca

SEQ ID NO: 47069 - DNA, 80 bp, synthetic construct; identical to SEQ ID NO: 15629
  source 1..80: mol_type = other DNA

SEQ ID NO: 47070 - DNA, 80 bp, synthetic construct
  source 1..80: mol_type = other DNA
gattttgatttgcatttccccaatgagtagtgatgttgaacaccttttcatacctgttgccatttgtatgtcttctttgg

SEQ ID NO: 47071 - DNA, 80 bp, synthetic construct
  source 1..80: mol_type = other DNA
ctcagcctcccgagtagctgagactacaggcgtgcaccaccacgcccagctaatttttgtattttttagtagagacaggg

SEQ ID NO: 47072 - DNA, 80 bp, synthetic construct
  source 1..80: mol_type = other DNA
taaccccatatcgggtatgtggtttgtaatctactttacatttttaatgtttaaaccacgcgaaataatttttaaaataa

SEQ ID NO: 47073 - DNA, 80 bp, synthetic construct; identical to SEQ ID NO: 15630
  source 1..80: mol_type = other DNA

SEQ ID NO: 47074 - DNA, 80 bp, synthetic construct
  source 1..80: mol_type = other DNA
aaattttaaaaatcttcccactgggaaaacagaggcttgctgtctacttgggattccagtacaatttgctattttgttgt

SEQ ID NO: 47075 - DNA, 80 bp, synthetic construct
  source 1..80: mol_type = other DNA
ttattattattatattttgtagagacaaggtctgtctatattgcccaggctggcctcaaactcctgaacaaaagtgattc

SEQ ID NO: 47076 - DNA, 80 bp, synthetic construct
  source 1..80: mol_type = other DNA
gaatgcagccacatttaatatagggtaggggagacactggattccagagtcagcatgagaaacaaaatgtaaaatatctt

SEQ ID NO: 47077 - DNA, 80 bp, synthetic construct; identical to SEQ ID NO: 15631
  source 1..80: mol_type = other DNA

SEQ ID NO: 47078 - DNA, 80 bp, synthetic construct
  source 1..80: mol_type = other DNA
aagtacccaccacagagggttatatacagatcaaatgcgttattaacatctaaagcacagagatgactgacacagtccta

SEQ ID NO: 47079 - DNA, 80 bp, synthetic construct
  source 1..80: mol_type = other DNA
agcacaaagtttgaagacagagagcattgaaatcccagctcttccctttctaacgagatgaccttggccaagtcactttg

SEQ ID NO: 47080 - DNA, 80 bp, synthetic construct; identical to SEQ ID NO: 15632
  source 1..80: mol_type = other DNA

SEQ ID NO: 47081 - DNA, 80 bp, synthetic construct
  source 1..80: mol_type = other DNA
tcctcatccaaaaaatgaggacccagacttgaatacctctcaagttttttctgggaaagccctctaggccctctagattt

SEQ ID NO: 47082 - DNA, 80 bp, synthetic construct
  source 1..80: mol_type = other DNA
ttccccaaaacaatgttcaaataaacagccccccaaaataatccagtaaaataaatgttccagacagaagcactatgctt

SEQ ID NO: 47083 - DNA, 80 bp, synthetic construct
  source 1..80: mol_type = other DNA
agaagaaaaataaagaatctaagagttcaagtccacatcttgtaaaaaatgattttctctccaccccttctcggccttcc

SEQ ID NO: 47084 - DNA, 80 bp, synthetic construct
  source 1..80: mol_type = other DNA
taaaaaagtacaaacacattatccgggggtggtggtacgtgcctgtaatcccagctactcggggggctgaggcaggagaa

SEQ ID NO: 47085 - DNA, 80 bp, synthetic construct; identical to SEQ ID NO: 15633
  source 1..80: mol_type = other DNA

SEQ ID NO: 47086 - DNA, 80 bp, synthetic construct
  source 1..80: mol_type = other DNA
aggaatgtgcattttattttatgtttcagcaggttctgccaaaagaggctgcaatgcttcaagcaccccacagcaatgtt

SEQ ID NO: 47087 - DNA, 80 bp, synthetic construct
  source 1..80: mol_type = other DNA
tcctctggagcatctgtgtggaggaaatggtaatggagaaacccaatttttcctggggaagcaatcagtgctaggatgtg

SEQ ID NO: 47088 - DNA, 80 bp, synthetic construct; identical to SEQ ID NO: 15634
  source 1..80: mol_type = other DNA

SEQ ID NO: 47089 - DNA, 80 bp, synthetic construct
  source 1..80: mol_type = other DNA
gagatgtttcatcacagtagtcagtgatatgccacatagagccagatgtccttttttccatcagattggcaattatttaa

SEQ ID NO: 47090 - DNA, 80 bp, synthetic construct
  source 1..80: mol_type = other DNA
atttcttccctttaggtaggcggatgaattgctctgtggttttggaaatgatgtggcagaagcagataaaaattttaatg

SEQ ID NO: 47091 - DNA, 80 bp, synthetic construct
  source 1..80: mol_type = other DNA
tagaatattgacatctgtcagagggaaatggctaactactgaaacagccatgtgagggctaaaaaaatgtattggttttt

SEQ ID NO: 47092 - DNA, 80 bp, synthetic construct
  source 1..80: mol_type = other DNA
ccggctaattttttgtatttttggtagagatggggtttcgccatgttggccaggctggtcgcaaactcctgacctcaagt

SEQ ID NO: 47093 - DNA, 80 bp, synthetic construct; identical to SEQ ID NO: 15635
  source 1..80: mol_type = other DNA

SEQ ID NO: 47094 - DNA, 80 bp, synthetic construct
  source 1..80: mol_type = other DNA
cagagacactgtagatgtgcatatttgtctctagttgtgagaacatacaaaataccatgaagggataataccaccatgct

SEQ ID NO: 47095 - DNA, 80 bp, synthetic construct
  source 1..80: mol_type = other DNA
tgcattaaagtttggctttttaaaaatatataagcaaaaggaaatgggtgatgaagtgtttgagcactgactatgacaat

SEQ ID NO: 47096 - DNA, 80 bp, synthetic construct
  source 1..80: mol_type = other DNA
cagtgcaacctccacccgcagggttctagcaattctcctacctcagcttcccgggtagctgagattacaggcgcccacca

SEQ ID NO: 47097 - DNA, 80 bp, synthetic construct; identical to SEQ ID NO: 15636
  source 1..80: mol_type = other DNA

SEQ ID NO: 47098 - DNA, 80 bp, synthetic construct
  source 1..80: mol_type = other DNA
ctctgagcccagcacacacagcacttcccagccttctcaggacacttgtcagacatgcagttttccaagctctcccctgg

SEQ ID NO: 47099 - DNA, 80 bp, synthetic construct
  source 1..80: mol_type = other DNA
ctctaccaacactaagtacgctctgcagccacaaaaacagatgaggtagatttttacaaatcgatgtggaaatgctgtag

SEQ ID NO: 47100 - DNA, 80 bp, synthetic construct; identical to SEQ ID NO: 15637
  source 1..80: mol_type = other DNA

SEQ ID NO: 47101 - DNA, 80 bp, synthetic construct
  source 1..80: mol_type = other DNA
aaaatacaaaaaataaccaggcgtggtggtgcgtgcctgtaatcccagctactcaggaggctgaggcaggagaattgctt

SEQ ID NO: 47102 - DNA, 80 bp, synthetic construct
  source 1..80: mol_type = other DNA
aagaatgttcacaacaacctcttcctaacagctccaaatgggggactactcaaatgtctatcaaccaggaatggataaac

SEQ ID NO: 47103 - DNA, 80 bp, synthetic construct
  source 1..80: mol_type = other DNA
tgaaacctcatctctacaaaaaaatttaaaaattagccaagcctagtggcatatgcctgtagtcccagctactcaagaag

SEQ ID NO: 47104 - DNA, 80 bp, synthetic construct; identical to SEQ ID NO: 15638
  source 1..80: mol_type = other DNA

SEQ ID NO: 47105 - DNA, 80 bp, synthetic construct
  source 1..80: mol_type = other DNA
gtggctacctcgcaggggtgaatactggctgggaaagagcataaaatgtttagatccacttctcagtgcatttatttatt

SEQ ID NO: 47106 - DNA, 80 bp, synthetic construct
  source 1..80: mol_type = other DNA
accatgcctggctaatttttgtatttttagtagagatggggtttcaccatgttgaccaggctgatctcaaacgcctgact

SEQ ID NO: 47107 - DNA, 80 bp, synthetic construct
  source 1..80: mol_type = other DNA
taaaaataacacacatctgtgtgtctgtttagagaaagtgctcccaggatgtactccaagctagtgatggtggttgcctc

SEQ ID NO: 47108 - DNA, 80 bp, synthetic construct; identical to SEQ ID NO: 15639
  source 1..80: mol_type = other DNA

SEQ ID NO: 47109 - DNA, 80 bp, synthetic construct
  source 1..80: mol_type = other DNA
cccctctgggtctttccatcctcccccccacccactggggcccccatggtgcttacccactgacagggagccacgggcca

SEQ ID NO: 47110 - DNA, 80 bp, synthetic construct
  source 1..80: mol_type = other DNA
cctgggacactcatgtgtggccacagctactcacaagagcttcattcatacacccagtgagcaactactaatcctactgt

SEQ ID NO: 47111 - DNA, 80 bp, synthetic construct
  source 1..80: mol_type = other DNA
aaaaaacaaaaatccctgtcctcaaggagctgacctctcagcacagggagacagacaacagacgagaggatgagtaaaat

SEQ ID NO: 47112 - DNA, 80 bp, synthetic construct
  source 1..80: mol_type = other DNA
ggaggggtaggaagcagagcaagcaccaggtgtgatgtcctggggcaggagggagcccggtgctggggagcagcaaggag

SEQ ID NO: 47113 - DNA, 80 bp, synthetic construct; identical to SEQ ID NO: 15640
  source 1..80: mol_type = other DNA

SEQ ID NO: 47114 - DNA, 80 bp, synthetic construct
  source 1..80: mol_type = other DNA
tcaagtgtgaaaaagggtaagacatgggagctagcatgagctctcatgtgctctcactgaggcacacttacgcacacgca

SEQ ID NO: 47115 - DNA, 80 bp, synthetic construct
  source 1..80: mol_type = other DNA
caaagagacgcaaccaaagccccggggcctcaccctctcaccctccccttgagctcctggatccctgtgcagacaaagac

SEQ ID NO: 47116 - DNA, 80 bp, synthetic construct
  source 1..80: mol_type = other DNA
gattcagtccacaaatgtgttttatcaagggagttcctaaaaacaaactaaagcttccttcaaacatttggggaaactca

SEQ ID NO: 47117 - DNA, 80 bp, synthetic construct; identical to SEQ ID NO: 15641
  source 1..80: mol_type = other DNA

SEQ ID NO: 47118 - DNA, 80 bp, synthetic construct
  source 1..80: mol_type = other DNA
aaaccccctctctactaaaaatacaaaaattagctgggcatggtggcggcacctgtagtcccagctactcaggaggctga

SEQ ID NO: 47119 - DNA, 80 bp, synthetic construct
  source 1..80: mol_type = other DNA
accacaaggttttgctctgtggaagcgaagccggcagctccatatcaaaagagcacggctgaagacaggataatcccata

SEQ ID NO: 47120 - DNA, 80 bp, synthetic construct
  source 1..80: mol_type = other DNA
gagccacgcagacctgtggggaacagcattcccaggcaagggaacagaaatagcaaaggccacaaagagagagcgtgcct

SEQ ID NO: 47121 - DNA, 80 bp, synthetic construct; identical to SEQ ID NO: 15642
  source 1..80: mol_type = other DNA

SEQ ID NO: 47122 - DNA, 80 bp, synthetic construct
  source 1..80: mol_type = other DNA
gacccagctgcccctgagcctgcctctccccagcctatctctctctgacttctttgtctgcacagggacccaggagccag

SEQ ID NO: 47123 - DNA, 80 bp, synthetic construct
  source 1..80: mol_type = other DNA
agaatggggactgttcgtgtgctgagagctgtggctgagagtgcagactctgggaccagccctgtcctgaccccaacaca

SEQ ID NO: 47124 - DNA, 80 bp, synthetic construct; identical to SEQ ID NO: 15643
  source 1..80: mol_type = other DNA

SEQ ID NO: 47125 - DNA, 80 bp, synthetic construct
  source 1..80: mol_type = other DNA
ctatctccaaaagctacccaaattctcaccacctccctgggccaccaccattctctcaccttggtgacacctggcagcct

SEQ ID NO: 47126 - DNA, 80 bp, synthetic construct
  source 1..80: mol_type = other DNA
ttccctgacctcccgactgcctgaggcctgcttctgcccacttctctgacctcctgtccaccttccctccttggctcttt

SEQ ID NO: 47127 - DNA, 80 bp, synthetic construct
  source 1..80: mol_type = other DNA
gcctaagaaagccccccagatgctgtcaccccacccgtggatctctgtcatcgtgtttatcactctctgacataactcaa

SEQ ID NO: 47128 - DNA, 80 bp, synthetic construct; identical to SEQ ID NO: 15644
  source 1..80: mol_type = other DNA

SEQ ID NO: 47129 - DNA, 80 bp, synthetic construct
  source 1..80: mol_type = other DNA
aattgcttcccccacccacagagtcctcacggttcccttggccactgctcatggctgacacaggtcaaagtgccgggccc

SEQ ID NO: 47130 - DNA, 80 bp, synthetic construct
  source 1..80: mol_type = other DNA
ctgtggagaagagtcctgaggcaggaaacaaaagcatgaaaatttggcttccaaagggaaatacacacctacaggcacct

SEQ ID NO: 47131 - DNA, 80 bp, synthetic construct
  source 1..80: mol_type = other DNA
tgttatactgagcctaatctcatttcgtcttcagacaaacctgggaataagagttactattatgacacccattttacaga

SEQ ID NO: 47132 - DNA, 80 bp, synthetic construct; identical to SEQ ID NO: 15645
  source 1..80: mol_type = other DNA

SEQ ID NO: 47133 - DNA, 80 bp, synthetic construct
  source 1..80: mol_type = other DNA
ataaaatattagccaggggtggtggctcacacctgtagtctcagctactcgagaagctgaggtgggaggatcgcctgagt

SEQ ID NO: 47134 - DNA, 80 bp, synthetic construct
  source 1..80: mol_type = other DNA
aagctgcagtgagctatgatcacaccactgcactccagcctaggcaacagagtgagactctgtgtcttaaaaaaagaaaa

SEQ ID NO: 47135 - DNA, 80 bp, synthetic construct
  source 1..80: mol_type = other DNA
gatatggagtctacactgagccatgactgaggatatgattagaagccaagaaaggggtatcttgcatctaagtctaaggc

SEQ ID NO: 47136 - DNA, 80 bp, synthetic construct
  source 1..80: mol_type = other DNA
ctgctgtttgggaagtaggatggactgctgtttgggaagtaggatggacacctttagactgagtaagccagaagtgcctg

SEQ ID NO: 47137 - DNA, 80 bp, synthetic construct; identical to SEQ ID NO: 15646
  source 1..80: mol_type = other DNA

SEQ ID NO: 47138 - DNA, 80 bp, synthetic construct
  source 1..80: mol_type = other DNA
tgcccagaagacatcacgccagcttgtaagaaattccagaaaattcctgaggcaaacactgaaggaaactgggatcctcc

SEQ ID NO: 47139 - DNA, 80 bp, synthetic construct
  source 1..80: mol_type = other DNA
tcatgctggccttgcttcagccttaactatcttgcaaaacagtttcctagatgctcttcctaacctccagagggtattcc

SEQ ID NO: 47140 - DNA, 80 bp, synthetic construct; identical to SEQ ID NO: 15647
  source 1..80: mol_type = other DNA

SEQ ID NO: 47141 - DNA, 80 bp, synthetic construct
  source 1..80: mol_type = other DNA
tcctcagatgtctgctgaatgaatgcagagcaaacatgttcatctgttctcttattgatatgatgactccatatgtggct

SEQ ID NO: 47142 - DNA, 80 bp, synthetic construct
  source 1..80: mol_type = other DNA
cccagctacctgggaggctgaggcaggagaatcgcctgaacccgggaggcggaggttacagtgagccaagattatgccac

SEQ ID NO: 47143 - DNA, 80 bp, synthetic construct
  source 1..80: mol_type = other DNA
ctgtaagttacttagcctccagcattgttgtgaagactaatgagataatgcatgctgcctggcagagtatggactcagaa

SEQ ID NO: 47144 - DNA, 80 bp, synthetic construct
  source 1..80: mol_type = other DNA
tgagataatgcatgctgcctggcagagtatggactcagaaatattcatcattccacctctctccttcattttacagagga

SEQ ID NO: 47145 - DNA, 80 bp, synthetic construct; identical to SEQ ID NO: 15648
  source 1..80: mol_type = other DNA

SEQ ID NO: 47146 - DNA, 80 bp, synthetic construct
  source 1..80: mol_type = other DNA
taatgtggaagctgcacatcaaaaatcctctccatgaggaagatggcataggcatggaagtcgagcctggtgcgaggctc

SEQ ID NO: 47147 - DNA, 80 bp, synthetic construct
  source 1..80: mol_type = other DNA
cactggacagtaacacactatgttctcttatctatgcctcactaccacctaccaccctgtgaggtagggaccatcactca

SEQ ID NO: 47148 - DNA, 80 bp, synthetic construct
  source 1..80: mol_type = other DNA
tgattatcttggttattgccatatctccagtagccaggagagaaggcggcagatggatcctgtgcacatcatggatggat

SEQ ID NO: 47149 - DNA, 80 bp, synthetic construct; identical to SEQ ID NO: 15649
  source 1..80: mol_type = other DNA

SEQ ID NO: 47150 - DNA, 80 bp, synthetic construct
  source 1..80: mol_type = other DNA
tggaaaccaaatgtaccaataaatgttgggtacatggatgagagaatgctaggtagatactgggtaaagtgaaggatgaa

SEQ ID NO: 47151 - DNA, 80 bp, synthetic construct
  source 1..80: mol_type = other DNA
gatgaacagaaagatgcgtagataaacagaaaaatgaaagttggtggaaactgaccagttatccctcagtatccatggag

SEQ ID NO: 47152 - DNA, 80 bp, synthetic construct
  source 1..80: mol_type = other DNA
aaatagttgttaaactatatttttagggaagaattacaacaaaaaagtctaaaaaagtttagtaccaacacattttcccc

SEQ ID NO: 47153 - DNA, 80 bp, synthetic construct; identical to SEQ ID NO: 15650
  source 1..80: mol_type = other DNA

SEQ ID NO: 47154 - DNA, 80 bp, synthetic construct
  source 1..80: mol_type = other DNA
tgaacggatggaaatggaatggatagatggaggtcagctgcatggatatacaagtattggatagatattgagtgactgca

SEQ ID NO: 47155 - DNA, 80 bp, synthetic construct
  source 1..80: mol_type = other DNA
atggtggggtgggggggttggcatagggacatatgttgaaggaatcaacagaaaccagatatgaggcccagctgctcatc

SEQ ID NO: 47156 - DNA, 80 bp, synthetic construct
  source 1..80: mol_type = other DNA
agaagccatggcacttgtcaccatttgataaggcaaggaagggcataaagagtgtaggttgcagagtgtgattttgaatg

SEQ ID NO: 47157 - DNA, 80 bp, synthetic construct; identical to SEQ ID NO: 15651
  source 1..80: mol_type = other DNA

SEQ ID NO: 47158 - DNA, 80 bp, synthetic construct
  source 1..80: mol_type = other DNA
ctccctgctgcagagaatcccgaatctctgaaaatttgagatctaagagagctacaatttgagagctaagttttattttg

SEQ ID NO: 47159 - DNA, 80 bp, synthetic construct
  source 1..80: mol_type = other DNA
aaagtgcaggccaggcacagtggctgatgcctgtaatcccagcactttgggaggccaaggcaggtggatcacttgaggcc

SEQ ID NO: 47160 - DNA, 80 bp, synthetic construct
  source 1..80: mol_type = other DNA
ctgagattgctccattgcactccagccagggcgacaaagcaagactccgtctcaaaaaaaataaaataaaatttaacctg

SEQ ID NO: 47161 - DNA, 80 bp, synthetic construct; identical to SEQ ID NO: 15652
  source 1..80: mol_type = other DNA

SEQ ID NO: 47162 - DNA, 80 bp, synthetic construct
  source 1..80: mol_type = other DNA
caggatctcctgaggctgtgttgtaggccatggtcactcatatttggctcagaataaatctcctcaaatattttacagag

SEQ ID NO: 47163 - DNA, 80 bp, synthetic construct
  source 1..80: mol_type = other DNA
gtgtgtgtgtgtatgcctttatgctttcttttttctctcctaggttcttgttttttgagaaaaagattttttcttcccag

SEQ ID NO: 47164 - DNA, 80 bp, synthetic construct
  source 1..80: mol_type = other DNA
ccttatgaaaccctaagagtgtaaaaagacaagttcctctcagatcttaaactgattgtttttgtattgcgttatctgat

SEQ ID NO: 47165 - DNA, 80 bp, synthetic construct
  source 1..80: mol_type = other DNA
gacccaggattcagtgtggactctgcccagagctcagaggtccagttaaaagacagagactaaatttaaatctacctatc

SEQ ID NO: 47166 - DNA, 80 bp, synthetic construct; identical to SEQ ID NO: 15653
  source 1..80: mol_type = other DNA

SEQ ID NO: 47167 - DNA, 80 bp, synthetic construct
  source 1..80: mol_type = other DNA
taggcaaataaaaacataaaacaacttagacatattaagaaaagccaggagctttataacaggagaaaaaaaggggtctt

SEQ ID NO: 47168 - DNA, 80 bp, synthetic construct
  source 1..80: mol_type = other DNA
aatactttatcagaaaaatagaaactttaagcccaaatggtttttcaagctcacatgacttaagtaaatctttaacaaat

SEQ ID NO: 47169 - DNA, 80 bp, synthetic construct; identical to SEQ ID NO: 15654
  source 1..80: mol_type = other DNA

SEQ ID NO: 47170 - DNA, 80 bp, synthetic construct
  source 1..80: mol_type = other DNA
tagtgactatcacagttttcataagtaatctaggtaaactattttaaaaaattaattaggtaaatgtaatgaaataaatg

SEQ ID NO: 47171 - DNA, 80 bp, synthetic construct
  source 1..80: mol_type = other DNA
aattcaaaggttgtttattaaacaacgtaaaaagaataagtaaataagaagcatgtaaagaaaattataaaggggtatct

SEQ ID NO: 47172 - DNA, 80 bp, synthetic construct
  source 1..80: mol_type = other DNA
taaaaagagaatttatgaaaaacattttatgtgaacaagttgactataattaaaaggaaattatttataatagtctttct

SEQ ID NO: 47173 - DNA, 80 bp, synthetic construct; identical to SEQ ID NO: 15655
  source 1..80: mol_type = other DNA

SEQ ID NO: 47174 - DNA, 80 bp, synthetic construct
  source 1..80: mol_type = other DNA
tgtgctcctggcatttcttaatatgtctaaattgttctgtgttttgatttgcctaggaaagctgatataaaaaaattttt

SEQ ID NO: 47175 - DNA, 80 bp, synthetic construct
  source 1..80: mol_type = other DNA
gatgacattcaaaataagctgcatttgtgagacatggagccagaaatgaaaactattcaacctctctaggcccagggact

SEQ ID NO: 47176 - DNA, 80 bp, synthetic construct
  source 1..80: mol_type = other DNA
tatcccaccctttaaaaaattataaaagtttagaaaatggtttatggaaattacatcttagggtcaagatgattaaaatt

SEQ ID NO: 47177 - DNA, 80 bp, synthetic construct; identical to SEQ ID NO: 15656
  source 1..80: mol_type = other DNA

SEQ ID NO: 47178 - DNA, 80 bp, synthetic construct
  source 1..80: mol_type = other DNA
aataacctgtgattctattttgtgatgtcaagtgttttaaactttctatatttgacaaactttccaaaataaaatagtca

SEQ ID NO: 47179 - DNA, 80 bp, synthetic construct
  source 1..80: mol_type = other DNA
cttatataaatgagtatgtgttccaaaattgtatgagattcctgtgattctgatatgacttagtatacatcatcagtagt

SEQ ID NO: 47180 - DNA, 80 bp, synthetic construct
  source 1..80: mol_type = other DNA
gagtactcttaaacatgggcttctgacaaccttagagattgtgccattggaatagggagaaaaacttccaggactgtcat

SEQ ID NO: 47181 - DNA, 80 bp, synthetic construct
  source 1..80: mol_type = other DNA
tttctcttcttttaagctatttatagcttttaacaattcagtaaagtatactctcatgagaaaaatttaaaacagaattt

SEQ ID NO: 47182 - DNA, 80 bp, synthetic construct; identical to SEQ ID NO: 15657
  source 1..80: mol_type = other DNA

SEQ ID NO: 47183 - DNA, 80 bp, synthetic construct
  source 1..80: mol_type = other DNA
ctagactcagattccttatggaaaagcttccagcaaagccaattttaaaaagaagagagagctcatatggcaaatgatca

SEQ ID NO: 47184 - DNA, 80 bp, synthetic construct
  source 1..80: mol_type = other DNA
tccacaatttggactgaattctaaaaattctcctggctccaagtctccaaaagaatgttttcaatgttttcccttctttt

SEQ ID NO: 47185 - DNA, 80 bp, synthetic construct
  source 1..80: mol_type = other DNA
agagtaatatggcctctatcagttttccaggttcgttctttcttttttgtttatctgcttacttcctccttttttcctgt

SEQ ID NO: 47186 - DNA, 80 bp, synthetic construct; identical to SEQ ID NO: 15658
  source 1..80: mol_type = other DNA

SEQ ID NO: 47187 - DNA, 80 bp, synthetic construct
  source 1..80: mol_type = other DNA
tctggaaggttgaggctgcagagcaaaaaacgtgcaggaagaaagaaaagaaaaaaaaaaagaagaaaagaaaagaaaac

SEQ ID NO: 47188 - DNA, 80 bp, synthetic construct
  source 1..80: mol_type = other DNA
gctgatttactgtgcatgagagaaatacatcattgactatcgccctacccgttccttttctcttgtgacatggggattac

SEQ ID NO: 47189 - DNA, 80 bp, synthetic construct; identical to SEQ ID NO: 15659
  source 1..80: mol_type = other DNA

SEQ ID NO: 47190 - DNA, 80 bp, synthetic construct
  source 1..80: mol_type = other DNA
gggaggtggaagctataatgagctgtgactgtgccactggactacaacctaagcaagagaacgagaccctgttcccacca

SEQ ID NO: 47191 - DNA, 80 bp, synthetic construct
  source 1..80: mol_type = other DNA
cctaaagaattgaaaacgttggatcttatacaaatgtatacactattattcgtaagcagtgtcagaggtgttcaaaccag

SEQ ID NO: 47192 - DNA, 80 bp, synthetic construct
  source 1..80: mol_type = other DNA
acctccgcctcccaggttcaagtgattctcctgcctcagcctcccaagtagctgggattacaggaatgaacaaccatgcc

SEQ ID NO: 47193 - DNA, 80 bp, synthetic construct; identical to SEQ ID NO: 15660
  source 1..80: mol_type = other DNA

SEQ ID NO: 47194 - DNA, 80 bp, synthetic construct
  source 1..80: mol_type = other DNA
cccatgatttttatcttctatataaacaagaagaattgtaactaaggcagacacattcctcctcttgccttcggaaacgc

SEQ ID NO: 47195 - DNA, 80 bp, synthetic construct
  source 1..80: mol_type = other DNA
cgttgagtgacgaacggataaacagaatgtggtgtatcaatgccacgaaacgttactcagccacaaaaaggaatgaagta

SEQ ID NO: 47196 - DNA, 80 bp, synthetic construct; identical to SEQ ID NO: 15661
  source 1..80: mol_type = other DNA

SEQ ID NO: 47197 - DNA, 80 bp, synthetic construct
  source 1..80: mol_type = other DNA
ctgcctcagcctgccgagtagctgggattacaggcacccgccaccacgcccggccaattttttgtatttttagtagagat

SEQ ID NO: 47198 - DNA, 80 bp, synthetic construct
  source 1..80: mol_type = other DNA
actataacctcaaacgtttggactcacgcaatcctccagcctcagcctcccgagtagctggcactatatataggcacatg

SEQ ID NO: 47199 - DNA, 80 bp, synthetic construct
  source 1..80: mol_type = other DNA
actaaatgggatatgaattatattccattaaagaaaaaagaaaacagggtggtgtgagacagtgaggggggctggtttac

SEQ ID NO: 47200 - DNA, 80 bp, synthetic construct
  source 1..80: mol_type = other DNA
tgcaaaggtactggggtgggagcatgctcggtgaggttttcgagacagcaggagccagcgtggctggagtggagaatgtg

SEQ ID NO: 47201 - DNA, 80 bp, synthetic construct; identical to SEQ ID NO: 15662
  source 1..80: mol_type = other DNA

SEQ ID NO: 47202 - DNA, 80 bp, synthetic construct
  source 1..80: mol_type = other DNA
ccctctctacctccctctgcccctgtctcctgctccctttttccctctacctggctgcccccagtataacccaaagggtg

SEQ ID NO: 47203 - DNA, 80 bp, synthetic construct
  source 1..80: mol_type = other DNA
ttgcaaatttgagctctgtgagtctaaggaggtgcagggccttgccttgtgcctcatctttttgtgagcccctgggctaa

SEQ ID NO: 47204 - DNA, 80 bp, synthetic construct
  source 1..80: mol_type = other DNA
caaactttagcaccatacttcctggcttcaaatcccagccacgcttcttgctggctgtgtgacttagcttctccatgcct

SEQ ID NO: 47205 - DNA, 80 bp, synthetic construct
  source 1..80: mol_type = other DNA
acacatcaggagctatacttggcattttccaaacgtttccttgtttggaaataatggctaacatttaatgaacgctgatg

SEQ ID NO: 47206 - DNA, 80 bp, synthetic construct; identical to SEQ ID NO: 15663
  source 1..80: mol_type = other DNA

SEQ ID NO: 47207 - DNA, 80 bp, synthetic construct
  source 1..80: mol_type = other DNA
cattttcacctccattttgcagagatattccagagacctactcaaatgcaggccctgaaattttctcctaaaacatcttt

SEQ ID NO: 47208 - DNA, 80 bp, synthetic construct
  source 1..80: mol_type = other DNA
tgatgttggctcctccagccttgggccctcaatccaactcaggccgtggtcacattccagggtgactcagcctgcagcca

SEQ ID NO: 47209 - DNA, 80 bp, synthetic construct
  source 1..80: mol_type = other DNA
cctgggtcagatcccaaggcatcttttctgatttccgactggagccccatcacatgggttcctctaaaaacggcctattc

SEQ ID NO: 47210 - DNA, 80 bp, synthetic construct; identical to SEQ ID NO: 15664
  source 1..80: mol_type = other DNA

SEQ ID NO: 47211 - DNA, 80 bp, synthetic construct
  source 1..80: mol_type = other DNA
caacctctctgttcaatcatttcaactcaatgcagggccttaagctctgggaggatttaatggggaacaaaagggggctt

SEQ ID NO: 47212 - DNA, 80 bp, synthetic construct
  source 1..80: mol_type = other DNA
taaaaagcacgtggccttgccctagtttttgttttctggtttttgaaatagacacaaattcacagaattatttctcaaca

SEQ ID NO: 47213 - DNA, 80 bp, synthetic construct; identical to SEQ ID NO: 15665
  source 1..80: mol_type = other DNA

SEQ ID NO: 47214 - DNA, 80 bp, synthetic construct
  source 1..80: mol_type = other DNA
aaaggagcctcccaaccaagagatctctctcagtgctccctgtggtggtcacacaagcccaaaggaagagatgcagtagc

SEQ ID NO: 47215 - DNA, 80 bp, synthetic construct
  source 1..80: mol_type = other DNA
accctcatgttcaccgaatggggctcgaaaattcttgctgtaattgcagaaatttgaatttgaactgggaactacatgac

SEQ ID NO: 47216 - DNA, 80 bp, synthetic construct
  source 1..80: mol_type = other DNA
caagctccgctcactgcaagctccgcctcctgggttcacgccattctcctgcctcagcctcctgagtagctgggactaca

SEQ ID NO: 47217 - DNA, 80 bp, synthetic construct
  source 1..80: mol_type = other DNA
gtctaatattttttaaataatgttaatgactgtcaaatcaaggtataggtacatggggcttcttaccgtattctttttct

SEQ ID NO: 47218 - DNA, 80 bp, synthetic construct; identical to SEQ ID NO: 15666
  source 1..80: mol_type = other DNA

SEQ ID NO: 47219 - DNA, 80 bp, synthetic construct
  source 1..80: mol_type = other DNA
gatctcagctcactgcaacctccatctcccggcttcatgccattctcctgcctcagtctcctgagtagctgagactacag

SEQ ID NO: 47220 - DNA, 80 bp, synthetic construct
  source 1..80: mol_type = other DNA
ttcttagtatctaaaagtcacatggttctaagacttttgagtgttcagattaccagtataatgtgtgggaagactgagaa

SEQ ID NO: 47221 - DNA, 80 bp, synthetic construct
  source 1..80: mol_type = other DNA
aattaactgggcatggtggcacacacctgtagtcccacctactcaggaggctaagatgagaggatcacctgagcccagga

SEQ ID NO: 47222 - DNA, 80 bp, synthetic construct; identical to SEQ ID NO: 15667
  source 1..80: mol_type = other DNA

SEQ ID NO: 47223 - DNA, 80 bp, synthetic construct
  source 1..80: mol_type = other DNA
agcctggccaacatggagaaatcctgtctctactaaaaatacaaaaattagctgggcatggtggcacatgcctgtaatcc

SEQ ID NO: 47224 - DNA, 80 bp, synthetic construct
  source 1..80: mol_type = other DNA
tgatggaagactccagagaggatcaaaagaatggattcgatctccttgtagcaaaaagatctgcttgtagcaaaaagaac

SEQ ID NO: 47225 - DNA, 80 bp, synthetic construct
  source 1..80: mol_type = other DNA
gcctgacaggaaaaataattcatttcttccctgagacatttattcactgtctttttcttttcttgttttaaggcaaatga

SEQ ID NO: 47226 - DNA, 80 bp, synthetic construct; identical to SEQ ID NO: 15668
  source 1..80: mol_type = other DNA

SEQ ID NO: 47227 - DNA, 80 bp, synthetic construct
  source 1..80: mol_type = other DNA
gggaaactggataaaatcccgtgaagtttgaagtttagttaagagtaacggaccagtgttggtttttagtggcgacaaat

SEQ ID NO: 47228 - DNA, 80 bp, synthetic construct
  source 1..80: mol_type = other DNA
ctgggggagggttaaggggcttcggtcttacctataacaggataaatatttgtgttaagtcgaatgtattcagctattcc

SEQ ID NO: 47229 - DNA, 80 bp, synthetic construct; identical to SEQ ID NO: 15669
  source 1..80: mol_type = other DNA

SEQ ID NO: 47230 - DNA, 80 bp, synthetic construct
  source 1..80: mol_type = other DNA
ggttgaggagcgaggctatccctataggactgccgaaagcaaggcagggtttgacagcgcgtaggtgggtgccaggtgca

SEQ ID NO: 47231 - DNA, 80 bp, synthetic construct
  source 1..80: mol_type = other DNA
attcgccccgggggacctaccggaccccgcaccttcccaccttgcaccttcttggcagggggagcacggcctggccccct

SEQ ID NO: 47232 - DNA, 80 bp, synthetic construct
  source 1..80: mol_type = other DNA
gacactcaccgcgtgcggcggcggctcagtagcagcagcagcaacagtgcggccaggaggccgaggagcgcggcccaagc

SEQ ID NO: 47233 - DNA, 80 bp, synthetic construct
  source 1..80: mol_type = other DNA
tatagaaacaatcaaagtttatcttcagaaaagatctgtcaatttttaaatagtacaaaaataaacagacatttatttcc

SEQ ID NO: 47234 - DNA, 80 bp, synthetic construct
  source 1..80: mol_type = other DNA
tgactatttctttcttaaccttaaacattctaaacgtaaaattgtaaagaagattctcctgagttatctttaatgatatt

SEQ ID NO: 47235 - DNA, 80 bp, synthetic construct
  source 1..80: mol_type = other DNA
ccacagatccctcaaaacattttaaaaggtcagtcttatggcacattcaggctaatgagacaatattctttgtgggctag

SEQ ID NO: 47236 - DNA, 80 bp, synthetic construct
  source 1..80: mol_type = other DNA
ataacaaaaaaaaatcaatgattgtaggcttaaacacagtttataaccatagtgtcctaataagacataaataataatct

SEQ ID NO: 47237 - DNA, 80 bp, synthetic construct; identical to SEQ ID NO: 15670
  source 1..80: mol_type = other DNA

SEQ ID NO: 47238 - DNA, 80 bp, synthetic construct
  source 1..80: mol_type = other DNA
ggcagagtccaaagaaagtgaactctgatcttaaaactagtaaaacaaaataggagaaacgaagtgatgagaagactgtg

SEQ ID NO: 47239 - DNA, 80 bp, synthetic construct; identical to SEQ ID NO: 15671
  source 1..80: mol_type = other DNA

SEQ ID NO: 47240 - DNA, 80 bp, synthetic construct
  source 1..80: mol_type = other DNA
catgttaccagccatataaacaaattctggaatatctcaacaaaatattcttattttaagataacactgcagtggctcca

SEQ ID NO: 47241 - DNA, 80 bp, synthetic construct
  source 1..80: mol_type = other DNA
tccaagacagcttctttttggtatatgtacaagtttaataactttaagaaatcaaacaagcttttacaggtgattctacc

SEQ ID NO: 47242 - DNA, 80 bp, synthetic construct
  source 1..80: mol_type = other DNA
cttctaatgcatcatggaagatgcattggaaacatcgacagtgtaaaaactttcagcattttgccatcttgtgacagtgt

SEQ ID NO: 47243 - DNA, 80 bp, synthetic construct
  source 1..80: mol_type = other DNA
cttcacaagtatgactcctttctccgcaacaggagtactgacttctgttacagaagatgttaagtaacataaggagttta

SEQ ID NO: 47244 - DNA, 80 bp, synthetic construct; identical to SEQ ID NO: 15672
  source 1..80: mol_type = other DNA

SEQ ID NO: 47245 - DNA, 80 bp, synthetic construct
  source 1..80: mol_type = other DNA
ttgcagatgagagactgaattgaggcagtgttgatgatttgaaaacccacttctccaccaaaagtgcttggcttccagta

SEQ ID NO: 47246 - DNA, 80 bp, synthetic construct
  source 1..80: mol_type = other DNA
tctgcagacatttccttttctcctgtgaaggcgatgaagacagagatacaaccaatgtcaaacttcacaaaataaaaaac

SEQ ID NO: 47247 - DNA, 80 bp, synthetic construct
  source 1..80: mol_type = other DNA
agcctggctaacacggtgaaaccccgtctatactgaaaatacaaaaaattatccatgcgtgcgacgtgagcctgtagtcc

SEQ ID NO: 47248 - DNA, 80 bp, synthetic construct; identical to SEQ ID NO: 15673
  source 1..80: mol_type = other DNA

SEQ ID NO: 47249 - DNA, 80 bp, synthetic construct
  source 1..80: mol_type = other DNA
gtattcagcttgccttaggtacaaatcaggtaaaactgaaactcccagcggagacaatttttatttgctggaaagatgct

SEQ ID NO: 47250 - DNA, 80 bp, synthetic construct
  source 1..80: mol_type = other DNA
aaggtaggggtacaatttgctatttgtctgacaactgtagactagactaaaagtttagacttttcaaacaaagttaggct

SEQ ID NO: 47251 - DNA, 80 bp, synthetic construct
  source 1..80: mol_type = other DNA
tcaataataatgcttaccctgccagcaatttgcctggtgaatgattcaacaaactgggtaattccatgttccagcaatat

SEQ ID NO: 47252 - DNA, 80 bp, synthetic construct
  source 1..80: mol_type = other DNA
agtttgaagtgatagccactcaagtgttgcacataatcttcaatcacaatcttaatagtctctcctatttgcacaaaata

SEQ ID NO: 47253 - DNA, 80 bp, synthetic construct; identical to SEQ ID NO: 15674
  source 1..80: mol_type = other DNA

SEQ ID NO: 47254 - DNA, 80 bp, synthetic construct
  source 1..80: mol_type = other DNA
ggacttgaggagggtagatcatctctgcctgagtatctttgactgtgggaggatacatctctccatcaattatctaaaaa

SEQ ID NO: 47255 - DNA, 80 bp, synthetic construct
  source 1..80: mol_type = other DNA
aggcgcagtttacgctgtctagccagagtttcaccgtaaatatgatttaagtccacctagaaaatgatgaaaaaatttta

SEQ ID NO: 47256 - DNA, 80 bp, synthetic construct
  source 1..80: mol_type = other DNA
ctgatatgtctttgtgtttaacggaattaatatactatattgagcttatatcatatatattatatacttcactatgatga

SEQ ID NO: 47257 - DNA, 80 bp, synthetic construct
  source 1..80: mol_type = other DNA
tgcagtactaacattttaaactaaaaaatacaagggtcaaattacaaataacaatacctgtacatatgtatgtgtgtgaa

SEQ ID NO: 47258 - DNA, 80 bp, synthetic construct
  source 1..80: mol_type = other DNA
gcccttgactatgatttggtataattttactaactctaagatattaactctatcttaccccatggcccagcccgttggtg

SEQ ID NO: 47259 - DNA, 80 bp, synthetic construct
  source 1..80: mol_type = other DNA
ctgaaaaatgagaaagctaaggtaagaatccatctatgtattcaagaaaggagatggtgactgtcaatctaccaagaatt

SEQ ID NO: 47260 - DNA, 80 bp, synthetic construct; identical to SEQ ID NO: 15675
  source 1..80: mol_type = other DNA

SEQ ID NO: 47261 - DNA, 80 bp, synthetic construct
  source 1..80: mol_type = other DNA
tcccagcttttgtagccatagtcagcattgtaagttggtggactgtcaatcaaatgtgatctggctgaaattttcaaaga

SEQ ID NO: 47262 - DNA, 80 bp, synthetic construct
  source 1..80: mol_type = other DNA
ctgcacattataatctggcaatattgatttttcaggtagccatctgctcactatccaagaggcctatgaaaggaatggct

SEQ ID NO: 47263 - DNA, 80 bp, synthetic construct
  source 1..80: mol_type = other DNA
aggttagaagaggtatacagagttgtgagcagactgtataaactggatgggactaaatgtcaatatttttggcgattaag

SEQ ID NO: 47264 - DNA, 80 bp, synthetic construct; identical to SEQ ID NO: 15676
  source 1..80: mol_type = other DNA

SEQ ID NO: 47265 - DNA, 80 bp, synthetic construct
  source 1..80: mol_type = other DNA
cgtgttgagcagttttctccatagaatcctgtccgggtacaatcgcacttatactggtcaaatcccacactcatacatac

SEQ ID NO: 47266 - DNA, 80 bp, synthetic construct
  source 1..80: mol_type = other DNA
gaaatacaattttttaacctgccttagaatggataaaacgtagaaataccaattttctattctaaataaggataacagca

SEQ ID NO: 47267 - DNA, 80 bp, synthetic construct
  source 1..80: mol_type = other DNA
agcttacttttaagacattttgcttatcttaaaacataatccgggctttcctgggagcaggaaagaactgactagaatat

SEQ ID NO: 47268 - DNA, 80 bp, synthetic construct; identical to SEQ ID NO: 15677
  source 1..80: mol_type = other DNA

SEQ ID NO: 47269 - DNA, 80 bp, synthetic construct
  source 1..80: mol_type = other DNA
gggcgagcatcgcagcggcgggcagggcgcggcgcgggggtaggctttgctgtctgagggcgtctggctgtggagctgaa

SEQ ID NO: 47270 - DNA, 80 bp, synthetic construct
  source 1..80: mol_type = other DNA
atttttccctcctctccccttaaaaaaattgcgtaagcccggtgggggcagggttttttacccacggaaatgagaaaatc

SEQ ID NO: 47271 - DNA, 80 bp, synthetic construct
  source 1..80: mol_type = other DNA
ccagttctggactgatcgccttggatgggataccgggggagggcagaaggacacttggcttcctctccaggaatctgagc

SEQ ID NO: 47272 - DNA, 80 bp, synthetic construct
  source 1..80: mol_type = other DNA
cccgcagccccctccctctgttccccgacctcagaccctgggcttccgacctcgacatcatgggtgacgcagaaggcgaa

SEQ ID NO: 47273 - DNA, 80 bp, synthetic construct; identical to SEQ ID NO: 15678
  source 1..80: mol_type = other DNA

SEQ ID NO: 47274 - DNA, 80 bp, synthetic construct
  source 1..80: mol_type = other DNA
taattctctttttgctccagactctgacctatttaaattcttgagaagggagctggagtgagctggaggacacagctgct

SEQ ID NO: 47275 - DNA, 80 bp, synthetic construct
  source 1..80: mol_type = other DNA
ctccatgtctctgtctcttcctccatctcagtctccctgtctctgtttcttagcttaaggccctctgattttcgctgtct

SEQ ID NO: 47276 - DNA, 80 bp, synthetic construct
  source 1..80: mol_type = other DNA
catcttcccctcccagtggctccgcagggtgtggggtcgtaaatatgggaggggacgtcctctcctctgggctaggtctg

SEQ ID NO: 47277 - DNA, 80 bp, synthetic construct
  source 1..80: mol_type = other DNA
aggaacaaacagctggggctggtagtgaaggatggggacagctgggaaggggcctagcttcagccgagactctctcccca

SEQ ID NO: 47278 - DNA, 80 bp, synthetic construct; identical to SEQ ID NO: 15679
  source 1..80: mol_type = other DNA

SEQ ID NO: 47279 - DNA, 80 bp, synthetic construct
  source 1..80: mol_type = other DNA
tggaatctctccaccccagactgggtcagtttttctgattgttactgaggtcgtggtggatttctcaaaactttctggag

SEQ ID NO: 47280 - DNA, 80 bp, synthetic construct
  source 1..80: mol_type = other DNA
aaaatacaaaaaaatattagccaggcgtggtggtgcatgcctgtaatcttagctactcgggaggctgaagtgggaggatt

SEQ ID NO: 47281 - DNA, 80 bp, synthetic construct; identical to SEQ ID NO: 15680
  source 1..80: mol_type = other DNA

SEQ ID NO: 47282 - DNA, 80 bp, synthetic construct
  source 1..80: mol_type = other DNA
ggcgcgtgccaccaagccgagctaattttttgtatttttagtagagatggggtttcaccatgttggccaggctggtcttg

SEQ ID NO: 47283 - DNA, 80 bp, synthetic construct
  source 1..80: mol_type = other DNA
tccacttcccaggctccagtgatcctcccacctcagcctcctgagtagctgggactacacgtgcatagcaccatgcttgg

SEQ ID NO: 47284 - DNA, 80 bp, synthetic construct
  source 1..80: mol_type = other DNA
tatttttgacattcatccatgtagcatgtattgagtttgttgctttttgttgccgaatattattccattgtgcgactata

SEQ ID NO: 47285 - DNA, 80 bp, synthetic construct; identical to SEQ ID NO: 15681
  source 1..80: mol_type = other DNA

SEQ ID NO: 47286 - DNA, 80 bp, synthetic construct
  source 1..80: mol_type = other DNA
ctcttgatggtggtaggggactgggccagcagggaagctatatttttaaccagaaccctccgcttccttcattttttttt

SEQ ID NO: 47287 - DNA, 80 bp, synthetic construct
  source 1..80: mol_type = other DNA
cggctaatttttgtacttttaatagagatggggtttcaccatgttggccaggctggtctcgaactcctgacctcaagtga

SEQ ID NO: 47288 - DNA, 80 bp, synthetic construct
  source 1..80: mol_type = other DNA
tcgctgctttgcactctggctttgccatttgcctgcttcctaatttggggcaagtgatttttatttttctctctgagcct

SEQ ID NO: 47289 - DNA, 80 bp, synthetic construct
  source 1..80: mol_type = other DNA
caaaaaatgttaaactttagctgggcgtggcagtgtgcacctgtagtaccagctacttgggaggctgaggtgggaagatc

SEQ ID NO: 47290 - DNA, 80 bp, synthetic construct; identical to SEQ ID NO: 15682
  source 1..80: mol_type = other DNA

SEQ ID NO: 47291 - DNA, 80 bp, synthetic construct
  source 1..80: mol_type = other DNA
ccctcctcttaccccagagatgagcaggcctgattccttcttgttatttggacaaggctcaactcaaatgtcacctcctt

SEQ ID NO: 47292 - DNA, 80 bp, synthetic construct
  source 1..80: mol_type = other DNA
ctccctgagggccgtgattttttttttttccttttgagacatggtctcaatctgtctcaggggccccagggaggtggggc

SEQ ID NO: 47293 - DNA, 80 bp, synthetic construct
  source 1..80: mol_type = other DNA
ctagtcttttttttttttttttttttgagatggagtctcgctctgtcacccaggctcgagttcagtggtgcgatctcggc

SEQ ID NO: 47294 - DNA, 80 bp, synthetic construct; identical to SEQ ID NO: 15683
  source 1..80: mol_type = other DNA

SEQ ID NO: 47295 - DNA, 80 bp, synthetic construct
  source 1..80: mol_type = other DNA
atgctcaaccaaagtctgttaaatgagtgtaaggcccagagcataaggcctgggagccagtaaagtgcctaataaaaaca

SEQ ID NO: 47296 - DNA, 80 bp, synthetic construct
  source 1..80: mol_type = other DNA
ctgggataacaggcatacgccaccatgcccgggtaattttgtatttttagtagagacagggtttctccatgttgttcagg

SEQ ID NO: 47297 - DNA, 80 bp, synthetic construct
  source 1..80: mol_type = other DNA
atctcagctccctgcaacctctgcctcctgggttcaggcgattctcctggctcagactcccgagtagctggaactacagg

SEQ ID NO: 47298 - DNA, 80 bp, synthetic construct; identical to SEQ ID NO: 15684
  source 1..80: mol_type = other DNA

SEQ ID NO: 47299 - DNA, 80 bp, synthetic construct
  source 1..80: mol_type = other DNA
ggtccatctgtgtcccactttgagcttcagtttccccattttaaaatggggataagccaggcacaacagttcatgcctgt

SEQ ID NO: 47300 - DNA, 80 bp, synthetic construct
  source 1..80: mol_type = other DNA
gagttcgagagcagcctggccaacatggcgaaaccttgtctctactaaaaatataaaaattagccaggtgtggtggtgca

SEQ ID NO: 47301 - DNA, 80 bp, synthetic construct; identical to SEQ ID NO: 15685
  source 1..80: mol_type = other DNA

SEQ ID NO: 47302 - DNA, 80 bp, synthetic construct
  source 1..80: mol_type = other DNA
ctagcaacgcgcaggtctgtgcaggagggagaggggcctggggacaggggcgtctgaaggggcagagaatcttgggtcca

SEQ ID NO: 47303 - DNA, 80 bp, synthetic construct
  source 1..80: mol_type = other DNA
aagtgtggtaggccagggcgggggctgctgatccagaacgttccttggcaggtggctgagtgggcagaaagcctcgggtt

SEQ ID NO: 47304 - DNA, 80 bp, synthetic construct
  source 1..80: mol_type = other DNA
tatttttaaaagtttttcaggtaacaagactgaattattatggggtgttttagggggaaggaggccctcggcgggggcgg

SEQ ID NO: 47305 - DNA, 80 bp, synthetic construct; identical to SEQ ID NO: 15686
  source 1..80: mol_type = other DNA

SEQ ID NO: 47306 - DNA, 80 bp, synthetic construct
  source 1..80: mol_type = other DNA
gagactgaggagggagtataaggttgagcgccctcctgtgtctgtgaagcagaggtcagaggtgtttgaaggaaaaggca

SEQ ID NO: 47307 - DNA, 80 bp, synthetic construct
  source 1..80: mol_type = other DNA
tgagattaggtggaacacgggttagtggggagggttagggttagggaagtttctatggagtctgggtgggtctgaggtgt

SEQ ID NO: 47308 - DNA, 80 bp, synthetic construct
  source 1..80: mol_type = other DNA
atgttgctggggtgggggggtcttctgacccctcacttacatccccctcccaccccagaatgtgccccccgatctggcca

SEQ ID NO: 47309 - DNA, 80 bp, synthetic construct
  source 1..80: mol_type = other DNA
aaggatgggtgagaggacccgggggtcgcttaccatctgctcttcttcctctctctgccctgccccccacaggccctcaa

SEQ ID NO: 47310 - DNA, 80 bp, synthetic construct; identical to SEQ ID NO: 15687
  source 1..80: mol_type = other DNA

SEQ ID NO: 47311 - DNA, 80 bp, synthetic construct
  source 1..80: mol_type = other DNA
tgatgggaggcatggtgacatcgagcagtcagatgtctgccccaaggtccgggttggggaccttgtgctggggaggggcg

SEQ ID NO: 47312 - DNA, 80 bp, synthetic construct
  source 1..80: mol_type = other DNA
tagaagacgggttcattctcctgagtgatttccagccaaggtgaaggcagcagagaggacagagtgggctttggggaata

SEQ ID NO: 47313 - DNA, 80 bp, synthetic construct; identical to SEQ ID NO: 15688
  source 1..80: mol_type = other DNA

SEQ ID NO: 47314 - DNA, 80 bp, synthetic construct
  source 1..80: mol_type = other DNA
gaggctgacctccctctacaaccctagtatctgagctgcctcaccacctcccgctccatgactgacaagctggccttcga

SEQ ID NO: 47315 - DNA, 80 bp, synthetic construct
  source 1..80: mol_type = other DNA
tgcggtacagtccagacagggagacagacacacgttggggaccactaggcagagagtctgaagtcaggaacggggaactg

SEQ ID NO: 47316 - DNA, 80 bp, synthetic construct
  source 1..80: mol_type = other DNA
gcacccagcctccaagcagaggtctgaaggagaaaaggtccgcgttggggatgacatcatccttgtcagtgtctcctccg

SEQ ID NO: 47317 - DNA, 80 bp, synthetic construct
  source 1..80: mol_type = other DNA
gatttctgacctcccattgcccgacttgatcatttcctgatctgtgatctctgatgactctgtctcccatctgccggttt

SEQ ID NO: 47318 - DNA, 80 bp, synthetic construct
  source 1..80: mol_type = other DNA
accccatctgctcccgctgcgaagagggtgagggccccagacctccccctaaatggagatccccccaaaacagaccctta

SEQ ID NO: 47319 - DNA, 80 bp, synthetic construct; identical to SEQ ID NO: 15689
  source 1..80: mol_type = other DNA

SEQ ID NO: 47320 - DNA, 80 bp, synthetic construct
  source 1..80: mol_type = other DNA
tattaaaaatgcaaaattatctgagtgtggtggcatgtgcctgtaatcccacctactcaggagggtgaggcaggagaatt

SEQ ID NO: 47321 - DNA, 80 bp, synthetic construct
  source 1..80: mol_type = other DNA
aaccaagactccaatcttcagccctccaacctcagacttccaaacttcaatttcaaatcccaaaaaccaaaatccaccaa

SEQ ID NO: 47322 - DNA, 80 bp, synthetic construct; identical to SEQ ID NO: 15690
  source 1..80: mol_type = other DNA

SEQ ID NO: 47323 - DNA, 80 bp, synthetic construct
  source 1..80: mol_type = other DNA
ttgagatcaggagttcgagaccagcctgggccaacatggcaaaaccccatctctactaaaaatacaaaaattggctgggc

SEQ ID NO: 47324 - DNA, 80 bp, synthetic construct
  source 1..80: mol_type = other DNA
acaaaaaaaccctcaaaattcaggccctaactccagaacccagcctcagacccaaccatcacccttctaaacccagaggc

SEQ ID NO: 47325 - DNA, 80 bp, synthetic construct
  source 1..80: mol_type = other DNA
cattagacctccacctttcaccacacacacactctgaccccaacctcaaaagtccaaactcagaaccttaaatgacagac

SEQ ID NO: 47326 - DNA, 80 bp, synthetic construct
  source 1..80: mol_type = other DNA
ggttcccccaggggaggagcagggcccctgacttcatcttggctcctggtcttcctggggctccagcctcccattgacca

SEQ ID NO: 47327 - DNA, 80 bp, synthetic construct; identical to SEQ ID NO: 15691
  source 1..80: mol_type = other DNA

SEQ ID NO: 47328 - DNA, 80 bp, synthetic construct
  source 1..80: mol_type = other DNA
agatctgataaagagactgaagggtctcgagggaaaatcagagcagcctgagagagagatgaaaatctcggccaggcgtg

SEQ ID NO: 47329 - DNA, 80 bp, synthetic construct
  source 1..80: mol_type = other DNA
gtgtgcacctttagtctcagctactttgtggggctgaggtgggaggatcactcgagcccagcgggtcaaggctgcagtga

SEQ ID NO: 47330 - DNA, 80 bp, synthetic construct; identical to SEQ ID NO: 15692
  source 1..80: mol_type = other DNA

SEQ ID NO: 47331 - DNA, 80 bp, synthetic construct
  source 1..80: mol_type = other DNA
gtggctcacacctgtaatcccagcactttgggaagccgaggcaggtggatcatttgaggtcaggagttcaagaccagcct

SEQ ID NO: 47332 - DNA, 80 bp, synthetic construct
  source 1..80: mol_type = other DNA
cagcctgggcaacagagtgaggccctgccttaaaaaaaaaaaaaaaaacaagcaaaacaaaaataaaaaatgaagtctct

SEQ ID NO: 47333 - DNA, 80 bp, synthetic construct
  source 1..80: mol_type = other DNA
ttcctaagggaggactaggggtcctaattaagatggtttgaggaacactggaagagggttcggggcttgaggaggtttgg

SEQ ID NO: 47334 - DNA, 80 bp, synthetic construct; identical to SEQ ID NO: 15693
  source 1..80: mol_type = other DNA

SEQ ID NO: 47335 - DNA, 80 bp, synthetic construct
  source 1..80: mol_type = other DNA
ttctgcttccgcatctccaaggtcagtggggtttgtggcgccctccctcacctgaagcccccagtcccagcccagcctgc

SEQ ID NO: 47336 - DNA, 80 bp, synthetic construct
  source 1..80: mol_type = other DNA
tgcagcatgtggcctcaggactgtggctcacctatgctgctccagaccccaaggccctgcggctcggcgtgctcaagaag

SEQ ID NO: 47337 - DNA, 80 bp, synthetic construct
  source 1..80: mol_type = other DNA
accttgggagtttgaggatgagactgagagaaagatagagactgggagagaaactgagactgagagaaacagcaaaaaag

SEQ ID NO: 47338 - DNA, 80 bp, synthetic construct; identical to SEQ ID NO: 15694
  source 1..80: mol_type = other DNA

SEQ ID NO: 47339 - DNA, 80 bp, synthetic construct
  source 1..80: mol_type = other DNA
ctctactaaaaatacaaaaattagccaggcgtggtggcagctgcctgtaatcccagctactcaggaggctgaggcaggag

SEQ ID NO: 47340 - DNA, 80 bp, synthetic construct
  source 1..80: mol_type = other DNA
ctgagaataactttcaacaaacaattactgagtacccgcgttgttctggttgtgtgtgcagaaaatagatgagctgtagc

SEQ ID NO: 47341 - DNA, 80 bp, synthetic construct
  source 1..80: mol_type = other DNA
aaactgcctttagtgaagtacatagttttacaattaaggagtgggaaaactatttttggcagcaggaacagcatgtgcaa

SEQ ID NO: 47342 - DNA, 80 bp, synthetic construct; identical to SEQ ID NO: 15695
  source 1..80: mol_type = other DNA

SEQ ID NO: 47343 - DNA, 80 bp, synthetic construct
  source 1..80: mol_type = other DNA
ctgggaacagactacggtcaggggacagagccagagcagggagaccagagaagagactgccatgatgttacaaatgggag

SEQ ID NO: 47344 - DNA, 80 bp, synthetic construct
  source 1..80: mol_type = other DNA
aactggaaggatggaagtgctgaaacagcctcattgtctggagtatcacccaaggtttgtggtctcacagccacagagaa

SEQ ID NO: 47345 - DNA, 80 bp, synthetic construct
  source 1..80: mol_type = other DNA
ggtatctgatttacctagggtgcaaaagactggttggaccagttgtgccatttgcatagggcacaaatttctggctgcct

SEQ ID NO: 47346 - DNA, 80 bp, synthetic construct; identical to SEQ ID NO: 15696
  source 1..80: mol_type = other DNA

SEQ ID NO: 47347 - DNA, 80 bp, synthetic construct
  source 1..80: mol_type = other DNA
ctagaacagagccacttactacagccttgctgaatggacaagtaggaatccttggggaggcactcgtttgcaaaaacagg

SEQ ID NO: 47348 - DNA, 80 bp, synthetic construct
  source 1..80: mol_type = other DNA
tctcacctcgtggaaaggtggtctggcattctatctgggacaggttcaatttgggggttagagctttctggtcgggggga

SEQ ID NO: 47349 - DNA, 80 bp, synthetic construct
  source 1..80: mol_type = other DNA
agagaggagagagagaatcaaagacacagaggagacagatgacgggggacagaaaaatgaggaggaatttgcagtgagat

SEQ ID NO: 47350 - DNA, 80 bp, synthetic construct; identical to SEQ ID NO: 15697
  source 1..80: mol_type = other DNA

SEQ ID NO: 47351 - DNA, 80 bp, synthetic construct
  source 1..80: mol_type = other DNA
aagcgcagtggctcacacctgtaatcccaagactttgggagggcaaggcatgaggatcgcttgggcccaggagcttgaga

SEQ ID NO: 47352 - DNA, 80 bp, synthetic construct
  source 1..80: mol_type = other DNA
cagatcgcttgagcccaggagttcgagaccagcctgagcaatatagtgaaaccctgtctctataaaaaaaataacaaaat

SEQ ID NO: 47353 - DNA, 80 bp, synthetic construct
  source 1..80: mol_type = other DNA
cacatgacccctaacctctaaactcctgacctctgtacacttgacccctaatctgaccttgacaaccatgatcacattcc

SEQ ID NO: 47354 - DNA, 80 bp, synthetic construct; identical to SEQ ID NO: 15698
  source 1..80: mol_type = other DNA

SEQ ID NO: 47355 - DNA, 80 bp, synthetic construct
  source 1..80: mol_type = other DNA
cgttatcctgagcctgcaggacctcatcatctacttcgagcctccctccgaggacttgcagcacgaggagaagcagagca

SEQ ID NO: 47356 - DNA, 80 bp, synthetic construct
  source 1..80: mol_type = other DNA
gagaagggggcggggcaggagaaggagccggacaggaaccccagccagtgagaacacgatggggcggggccttgggaggg

SEQ ID NO: 47357 - DNA, 80 bp, synthetic construct
  source 1..80: mol_type = other DNA
gtggggccagaggtcagaggtagggctgccgactcagcgggcggggtctgctggcgcggggtctgtggggtgggcggaca

SEQ ID NO: 47358 - DNA, 80 bp, synthetic construct; identical to SEQ ID NO: 15699
  source 1..80: mol_type = other DNA

SEQ ID NO: 47359 - DNA, 80 bp, synthetic construct
  source 1..80: mol_type = other DNA
acgagggccaggccttggtgaggactttggctttgggagccacaggaggttttggtcctctacagtcacagctagttagt

SEQ ID NO: 47360 - DNA, 80 bp, synthetic construct
  source 1..80: mol_type = other DNA
cagtggtgtgatcttggctcactgcaacctccacctcccaggttcaaatgattctcctgcctcctcagcctcccaagtag

SEQ ID NO: 47361 - DNA, 80 bp, synthetic construct
  source 1..80: mol_type = other DNA
cacccagacagttttgtcctttttgttgatttcactgtttataatgtctcccaagtgtagtgctgaagtgctgtctagct

SEQ ID NO: 47362 - DNA, 80 bp, synthetic construct; identical to SEQ ID NO: 15700
  source 1..80: mol_type = other DNA

SEQ ID NO: 47363 - DNA, 80 bp, synthetic construct
  source 1..80: mol_type = other DNA
ataaagtgagaaaaatctttctgatggttggtgtggagaatgaactgggcctctccagttggtgggagtggggttccagt

SEQ ID NO: 47364 - DNA, 80 bp, synthetic construct
  source 1..80: mol_type = other DNA
cctggtgttaataaggactgaattatcatagactgaatctcatattggggatagagtcagagaggacaagaatagatatg

SEQ ID NO: 47365 - DNA, 80 bp, synthetic construct
  source 1..80: mol_type = other DNA
tgcctcttattttcctcatcctaggggatgctctccatggtcctgaattgcatagaccgcctaaatgtctacaccactgc

SEQ ID NO: 47366 - DNA, 80 bp, synthetic construct
  source 1..80: mol_type = other DNA
tccccagtcctattggatctgacacctcttcccccctcagcttctctaatccgtggcaatcgtagcaactgtgccctctt

SEQ ID NO: 47367 - DNA, 80 bp, synthetic construct; identical to SEQ ID NO: 15701
  source 1..80: mol_type = other DNA

SEQ ID NO: 47368 - DNA, 80 bp, synthetic construct
  source 1..80: mol_type = other DNA
ctccacacaggggtctcaaacaatgactcttaagttgattctgggccacagatgtgcttggttagatctctgaaatgttt

SEQ ID NO: 47369 - DNA, 80 bp, synthetic construct
  source 1..80: mol_type = other DNA
ccagctaatttttgtattttttttttagtagagacagggtttcacaatgttggccaggatggtctcgatctcttggcttc

SEQ ID NO: 47370 - DNA, 80 bp, synthetic construct
  source 1..80: mol_type = other DNA
tcccgggttcaagcaattctcctgcctcagcctcctgagtagctgggattacaggtgcccgccaccacgcccagctaatt

SEQ ID NO: 47371 - DNA, 80 bp, synthetic construct; identical to SEQ ID NO: 15702
  source 1..80: mol_type = other DNA

SEQ ID NO: 47372 - DNA, 80 bp, synthetic construct
  source 1..80: mol_type = other DNA
cctggctaatgcggtgaaaccctgtctctactaaaaatacaaaaaattagccaggcatggtggcaggcgcctgtagtccc

SEQ ID NO: 47373 - DNA, 80 bp, synthetic construct
  source 1..80: mol_type = other DNA
ttacttttgctccagcctaatacattttccacttggcccctaaagacacaagtttgcaacccctgctgatttaaaatttc

SEQ ID NO: 47374 - DNA, 80 bp, synthetic construct
  source 1..80: mol_type = other DNA
taaagacacaagtttgcaacccctgctgatttaaaatttcatcttgattcctgtgtctctcactggtcgtttcagtctgc

SEQ ID NO: 47375 - DNA, 80 bp, synthetic construct; identical to SEQ ID NO: 15703
  source 1..80: mol_type = other DNA

SEQ ID NO: 47376 - DNA, 80 bp, synthetic construct
  source 1..80: mol_type = other DNA
ctcatcaactatgtcaccaggtctggctctcaacatctgaccccagaactcagaacctctcaaccctctccctgacttag

SEQ ID NO: 47377 - DNA, 80 bp, synthetic construct
  source 1..80: mol_type = other DNA
tctccctctccctctctctctgttttctctttttatctttgcctgtttctgtcttgattcttcctccatgtctttctccc

SEQ ID NO: 47378 - DNA, 80 bp, synthetic construct
  source 1..80: mol_type = other DNA
acgcagtacagcaaatggtactttgaggtgatggtggacgaggtgactccatttctgacagctcaggccacccacttgcg

SEQ ID NO: 47379 - DNA, 80 bp, synthetic construct; identical to SEQ ID NO: 15704
  source 1..80: mol_type = other DNA

SEQ ID NO: 47380 - DNA, 80 bp, synthetic construct
  source 1..80: mol_type = other DNA
atatcccagaagaccacgcagattactgtgatctctgatctttgacttctaaccccaggagaatttatttatttatttat

SEQ ID NO: 47381 - DNA, 80 bp, synthetic construct
  source 1..80: mol_type = other DNA
tgcaccaccacgcccggctcatttttgtatttttagtagagacagggtttcaccacattggccaggctggtctcctgacc

SEQ ID NO: 47382 - DNA, 80 bp, synthetic construct
  source 1..80: mol_type = other DNA
tccaagggagcactttccattagggtttccaggatgcaatctccacaggagcctccaatatctgtcccttttctcttgtt

SEQ ID NO: 47383 - DNA, 80 bp, synthetic construct
  source 1..80: mol_type = other DNA
tcaacggctgccccgtgcagggtgtctttgagtccttcaacctggacgggctcttcttccctgttgtcagcttctcggct

SEQ ID NO: 47384 - DNA, 80 bp, synthetic construct; identical to SEQ ID NO: 15705
  source 1..80: mol_type = other DNA

SEQ ID NO: 47385 - DNA, 80 bp, synthetic construct
  source 1..80: mol_type = other DNA
cagaatctgataatgatctaatgactccagaccctccttaaccccctaatgacttcagactcttccaatgacaccatact

SEQ ID NO: 47386 - DNA, 80 bp, synthetic construct
  source 1..80: mol_type = other DNA
tcctttcccaatcaccccaagctctccgaatgtccattcagtggtgtttatgtttatttcataattgtaacagatgctca

SEQ ID NO: 47387 - DNA, 80 bp, synthetic construct; identical to SEQ ID NO: 15706
  source 1..80: mol_type = other DNA

SEQ ID NO: 47388 - DNA, 80 bp, synthetic construct
  source 1..80: mol_type = other DNA
caagttcctgcccccacctggctatgctccatgccatgaggctgtgctccctcgagagcgactccatcttgaacccatca

SEQ ID NO: 47389 - DNA, 80 bp, synthetic construct
  source 1..80: mol_type = other DNA
gggcagggtgccatcgttcatgcctgtaatcccagcactttggatggccaggcgtggtggctcacgcctgtaagcccagc

SEQ ID NO: 47390 - DNA, 80 bp, synthetic construct
  source 1..80: mol_type = other DNA
aggagaatcgcttgaacccgggaggtggaggttgcagtgagctgaggtcacgccattgtactccagcctaagcaacaaga

SEQ ID NO: 47391 - DNA, 80 bp, synthetic construct
  source 1..80: mol_type = other DNA
gcaacagagtgagacttcatctcaaaacaaacaaacaaacaaaaacaaccaacattttgggaagccgaagtgggggcctc

SEQ ID NO: 47392 - DNA, 80 bp, synthetic construct; identical to SEQ ID NO: 15707
  source 1..80: mol_type = other DNA

SEQ ID NO: 47393 - DNA, 80 bp, synthetic construct
  source 1..80: mol_type = other DNA
ttaaaagttagctgaggtgatggtccacgactgtagtcccagctacttgggaggctgagatgggagggtcacttgagccc

SEQ ID NO: 47394 - DNA, 80 bp, synthetic construct
  source 1..80: mol_type = other DNA
ttgggaggctgaggcgggcagatcacctaaagtcaggaattcaagaccagcctggccaacatggtgaaaccccatctcta

SEQ ID NO: 47395 - DNA, 80 bp, synthetic construct; identical to SEQ ID NO: 15708
  source 1..80: mol_type = other DNA

SEQ ID NO: 47396 - DNA, 80 bp, synthetic construct
  source 1..80: mol_type = other DNA
aggcaagatgcttagtccagtcctgattaaacagtaagcactcaagacagtcactcattattagtagcagtgatatcatc

SEQ ID NO: 47397 - DNA, 80 bp, synthetic construct
  source 1..80: mol_type = other DNA
ccgctactgtctactaggctcttaccctctgccaggcatcgatattaactatgtaacatttagtaatttacattaatgat

SEQ ID NO: 47398 - DNA, 80 bp, synthetic construct
  source 1..80: mol_type = other DNA
ggagaaggaaggagactcctccattcttttcattcagcaaacatttcctgagcctctcttctgggtctgagtctggttct

SEQ ID NO: 47399 - DNA, 80 bp, synthetic construct
  source 1..80: mol_type = other DNA
ctgttgcccaggctgaagtgcagtggcacaatcttggctcactgcaacctctgcctccagagttcaagcaattctcctgc

SEQ ID NO: 47400 - DNA, 80 bp, synthetic construct; identical to SEQ ID NO: 15709
  source 1..80: mol_type = other DNA

SEQ ID NO: 47401 - DNA, 80 bp, synthetic construct
  source 1..80: mol_type = other DNA
ctctgcctctagattgtcctgccgccccatctggagcgcattcgggagaagctggcggagaacatccacgagctctgggc

SEQ ID NO: 47402 - DNA, 80 bp, synthetic construct
  source 1..80: mol_type = other DNA
gcagaactagggttggaggtcaggggtcatagtctgggcatgtggggagtgggaaggaaaggggagcacatggagttgac

SEQ ID NO: 47403 - DNA, 80 bp, synthetic construct; identical to SEQ ID NO: 15710
  source 1..80: mol_type = other DNA

SEQ ID NO: 47404 - DNA, 80 bp, synthetic construct
  source 1..80: mol_type = other DNA
gccgggcgtggtggtgcacctctgtaatcccagctcctcaggaggctgaggcaggagaatcatttgaacctgggaggcag

SEQ ID NO: 47405 - DNA, 80 bp, synthetic construct
  source 1..80: mol_type = other DNA
tggaaagagagagagatgcagaaagagacagggagacaggagaaagtggcagacaggaaaagacagacatagttagttat

SEQ ID NO: 47406 - DNA, 80 bp, synthetic construct
  source 1..80: mol_type = other DNA
cctgtcgcctccactcccccacccccaggactctgctggctctgggctgccacgtgggcatggcggatgagaaggcggag

SEQ ID NO: 47407 - DNA, 80 bp, synthetic construct
  source 1..80: mol_type = other DNA
tgaaggtcatagggtcagggctctggggtcagaggtgaatgtccaggattgaggagttaggagtttcagagagagagaga

SEQ ID NO: 47408 - DNA, 80 bp, synthetic construct; identical to SEQ ID NO: 15711
  source 1..80: mol_type = other DNA

SEQ ID NO: 47409 - DNA, 80 bp, synthetic construct
  source 1..80: mol_type = other DNA
gacccctctacaaaaaatttaaaaattagcaggacatggtggtgggacatgcctgtagttccagcaacttgggaggttga

SEQ ID NO: 47410 - DNA, 80 bp, synthetic construct
  source 1..80: mol_type = other DNA
gaggcgggcggatcacctgaggtcgggaattcgagaccagcctgaccaacacggtgaaacccaccctctaccaaaaatac

SEQ ID NO: 47411 - DNA, 80 bp, synthetic construct; identical to SEQ ID NO: 15712
  source 1..80: mol_type = other DNA

SEQ ID NO: 47412 - DNA, 80 bp, synthetic construct
  source 1..80: mol_type = other DNA
gcagtcagggatcccatatagtgcagagcccggaagtggaggtgagggccttgtcccatggagccctaccatgcccgcag

SEQ ID NO: 47413 - DNA, 80 bp, synthetic construct
  source 1..80: mol_type = other DNA
gacatcccagcgcgccgaaaccctcggctggtgccctaccgcctgctggatgaagccaccaagcgcagcaaccgggacag

SEQ ID NO: 47414 - DNA, 80 bp, synthetic construct
  source 1..80: mol_type = other DNA
tgggctatatctttttttttttttttttttttgagacggagtctcgctgtccccaggctggagtgcaatggcgcgatctc

SEQ ID NO: 47415 - DNA, 80 bp, synthetic construct
  source 1..80: mol_type = other DNA
gacctcgtgatccgcctgcctcggactcccaaagtgctgggattacaggcgtgagccactgcacctggcccaaatgggct

SEQ ID NO: 47416 - DNA, 80 bp, synthetic construct; identical to SEQ ID NO: 15713
  source 1..80: mol_type = other DNA

SEQ ID NO: 47417 - DNA, 80 bp, synthetic construct
  source 1..80: mol_type = other DNA
cccaacctgaatttccatcccttccataatcctggctctgaccctccaatcctggtctcagcccttcattctaatcaacc

SEQ ID NO: 47418 - DNA, 80 bp, synthetic construct
  source 1..80: mol_type = other DNA
gtctctctcaacaggtccctgcctctctctgacttttctgaggttccccaattctcctctaactccaagaaattgaccct

SEQ ID NO: 47419 - DNA, 80 bp, synthetic construct
  source 1..80: mol_type = other DNA
ttccgggcagagaaatcctatacagtgcagagcggccgctggtacttcgagtttgaagcagtcaccacaggcgagatgcg

SEQ ID NO: 47420 - DNA, 80 bp, synthetic construct; identical to SEQ ID NO: 15714
  source 1..80: mol_type = other DNA

SEQ ID NO: 47421 - DNA, 80 bp, synthetic construct
  source 1..80: mol_type = other DNA
gccaacatagggagaccccatctctacaaaaaataaaaaaattagctaggcaaggtagcatgcacatatagtcccatcat

SEQ ID NO: 47422 - DNA, 80 bp, synthetic construct
  source 1..80: mol_type = other DNA
tccaataaccatctgcccatccaacaaccatttatacaaccatccttcccttcttccctctatctgtcatccatttattt

SEQ ID NO: 47423 - DNA, 80 bp, synthetic construct
  source 1..80: mol_type = other DNA
gatctgtatggggacactgataggttcatttttcctttccatccctctacttactgctgcttccagccccccactaccac

SEQ ID NO: 47424 - DNA, 80 bp, synthetic construct; identical to SEQ ID NO: 15715
  source 1..80: mol_type = other DNA

SEQ ID NO: 47425 - DNA, 80 bp, synthetic construct
  source 1..80: mol_type = other DNA
gtctgactcaggctccgaaacagccttccgggagattgagattggggacggtgagggctgagaccccttcacatgccctt

SEQ ID NO: 47426 - DNA, 80 bp, synthetic construct
  source 1..80: mol_type = other DNA
cctggccaggtgggtcatctgaacctgggccaggacgtgagctctctgaggttctttgccatctgtggcctccaggaagg

SEQ ID NO: 47427 - DNA, 80 bp, synthetic construct; identical to SEQ ID NO: 15716
  source 1..80: mol_type = other DNA

SEQ ID NO: 47428 - DNA, 80 bp, synthetic construct
  source 1..80: mol_type = other DNA
tatcccagcacttagggaggctgaggcaggaggatcccttgagcccaggagttcaagaccagccttggcaacatagggag

SEQ ID NO: 47429 - DNA, 80 bp, synthetic construct
  source 1..80: mol_type = other DNA
agctacttagggggctgaggcaggagactcgcttgaacacgggagatggaggttgcagtgagccaagattgcgcccttgc

SEQ ID NO: 47430 - DNA, 80 bp, synthetic construct
  source 1..80: mol_type = other DNA
agctgggtgctgtggcacatgcctggtgtcccagccactcggcaaactgaggcaggaggatcctctgagctcaggaggtc

SEQ ID NO: 47431 - DNA, 80 bp, synthetic construct
  source 1..80: mol_type = other DNA
gaagttcaagatgagcctggccaatatggcaaaaacccatctctactaaaaatactcccccaaaattaatggcgtggtgg

SEQ ID NO: 47432 - DNA, 80 bp, synthetic construct; identical to SEQ ID NO: 15717
  source 1..80: mol_type = other DNA

SEQ ID NO: 47433 - DNA, 80 bp, synthetic construct
  source 1..80: mol_type = other DNA
atgctacacggaagtgagaatgaatacctggaaatacacacagccatgtggacgaatctcagacataatgtcgagtagaa

SEQ ID NO: 47434 - DNA, 80 bp, synthetic construct
  source 1..80: mol_type = other DNA
agacattgttagttactttgaatgcaaatcacaggagggagctcagtcagtagactattgccaaagaacaaaggctggtt

SEQ ID NO: 47435 - DNA, 80 bp, synthetic construct
  source 1..80: mol_type = other DNA
ccagcctgggcaacatagcaaaaccctgtctctacacagaataaacaaaattatctgggcatggtggtatgtgcctgtgg

SEQ ID NO: 47436 - DNA, 80 bp, synthetic construct; identical to SEQ ID NO: 15718
  source 1..80: mol_type = other DNA

SEQ ID NO: 47437 - DNA, 80 bp, synthetic construct
  source 1..80: mol_type = other DNA
gggcgcctgtaatcccagttactcgggaggctgaggcaggagaattgcttgaacccaggaggcaaaagttgcagtcagcc

SEQ ID NO: 47438 - DNA, 80 bp, synthetic construct
  source 1..80: mol_type = other DNA
cttggagaggtcaacgtgaggaggggcatgaaagagaacaactttcattgtttaccgagtctctaggagacttttgagag

SEQ ID NO: 47439 - DNA, 80 bp, synthetic construct
  source 1..80: mol_type = other DNA
accacgcctggctaatttttttgtatttttagtacagatgaggtttcaccatgctggccaggctggtctcaaactcctga

SEQ ID NO: 47440 - DNA, 80 bp, synthetic construct; identical to SEQ ID NO: 15719
  source 1..80: mol_type = other DNA

SEQ ID NO: 47441 - DNA, 80 bp, synthetic construct
  source 1..80: mol_type = other DNA
gcggatcacatgaactcaggagattgagaccagcctgggcaacatggtgaaaccccgtctctaccaaaaatacaaaaatt

SEQ ID NO: 47442 - DNA, 80 bp, synthetic construct
  source 1..80: mol_type = other DNA
aaaaaaagaagtctgagaacaaagaatcttgtacgcacagtttttggggcaaattttcaggagactgagacacaagaatc

SEQ ID NO: 47443 - DNA, 80 bp, synthetic construct; identical to SEQ ID NO: 15720
  source 1..80: mol_type = other DNA

SEQ ID NO: 47444 - DNA, 80 bp, synthetic construct
  source 1..80: mol_type = other DNA
cccttgactaattcccatgcaggtgcactatggcctaatggtggctccgtgtgtgaccaggtgtaggaccaacggcctgg

SEQ ID NO: 47445 - DNA, 80 bp, synthetic construct
  source 1..80: mol_type = other DNA
gtccagttccaccagcacttccgctgcactgcaggggccaccccgctggcacctcctggcctgcagccccccgccgagga

SEQ ID NO: 47446 - DNA, 80 bp, synthetic construct
  source 1..80: mol_type = other DNA
aatgagaaggatgccaccaccgagaagaacaagaagagagggtgagtcgaggggggcccagagtggggattgggggctgc

SEQ ID NO: 47447 - DNA, 80 bp, synthetic construct
  source 1..80: mol_type = other DNA
ccccattattttcctgggatgccctaatgtccccaagaatatataattgggtaccctagtatctatatggagaactctat

SEQ ID NO: 47448 - DNA, 80 bp, synthetic construct; identical to SEQ ID NO: 15721
  source 1..80: mol_type = other DNA

SEQ ID NO: 47449 - DNA, 80 bp, synthetic construct
  source 1..80: mol_type = other DNA
cgccaccatgcccagctaatttttgtatttttagtagagacggggttttgccatgttggccaggctggtctcaaactcct

SEQ ID NO: 47450 - DNA, 80 bp, synthetic construct
  source 1..80: mol_type = other DNA
tgcaatctccgcctcctgggttcaagcaattctcctgcctcagcctcttgagtatctgggactacaggtgtgtgccacca

SEQ ID NO: 47451 - DNA, 80 bp, synthetic construct
  source 1..80: mol_type = other DNA
acccattgtgtctcttggtggatgtttggaaatgatggagtctttgtggtcattacagtttgggaggggctgctgctgct

SEQ ID NO: 47452 - DNA, 80 bp, synthetic construct; identical to SEQ ID NO: 15722
  source 1..80: mol_type = other DNA

SEQ ID NO: 47453 - DNA, 80 bp, synthetic construct
  source 1..80: mol_type = other DNA
gccaagaaggtcgccatgatgacccagccaccggccacccccacgctgccccgactccctcacgacgtggtgcctgcaga

SEQ ID NO: 47454 - DNA, 80 bp, synthetic construct
  source 1..80: mol_type = other DNA
tacactagaaactcataaaatatggcacacacagatttaatcctttgaacccctaaatccatatagctatggcccacaaa

SEQ ID NO: 47455 - DNA, 80 bp, synthetic construct; identical to SEQ ID NO: 15723
  source 1..80: mol_type = other DNA

SEQ ID NO: 47456 - DNA, 80 bp, synthetic construct
  source 1..80: mol_type = other DNA
cttgctctgttgcccagtctggagtgcagtggtgtgatcttggctcactgaaacctctgcctcctgggttcaaacgattc

SEQ ID NO: 47457 - DNA, 80 bp, synthetic construct
  source 1..80: mol_type = other DNA
cgggttcaagtgattcttctgcctcagcctcccaagtagctgggactatgggcacacgccaccatgcccggctaattttt

SEQ ID NO: 47458 - DNA, 80 bp, synthetic construct
  source 1..80: mol_type = other DNA
ccatgttggccaggttggtctcaaatccccgacctcaaatgatcctactgcctcagactcccaaagtactgggattacag

SEQ ID NO: 47459 - DNA, 80 bp, synthetic construct; identical to SEQ ID NO: 15724
  source 1..80: mol_type = other DNA

SEQ ID NO: 47460 - DNA, 80 bp, synthetic construct
  source 1..80: mol_type = other DNA
ctgcaggctacgatggtgcctctgcactccagcctggatgacagagggagactgcaactcaaaaaaaataaaaataaaaa

SEQ ID NO: 47461 - DNA, 80 bp, synthetic construct
  source 1..80: mol_type = other DNA
cggctcactgcaacctctgcctcccaggttcaagcgattctcctgcctcagcctcccgagtacctgggactacaggcgcc

SEQ ID NO: 47462 - DNA, 80 bp, synthetic construct
  source 1..80: mol_type = other DNA
tttatttgtcagtctactgtaacctgggaggaacccaaatatggcactgtcacacaatattcccaagggactcctaaatc

SEQ ID NO: 47463 - DNA, 80 bp, synthetic construct; identical to SEQ ID NO: 15725
  source 1..80: mol_type = other DNA

SEQ ID NO: 47464 - DNA, 80 bp, synthetic construct
  source 1..80: mol_type = other DNA
tgggaggtgcagggtggggagggcaggaggcagtcagagctcccgacaccagctctgtggctgcctggttgtgggaccta

SEQ ID NO: 47465 - DNA, 80 bp, synthetic construct
  source 1..80: mol_type = other DNA
ttatgcatttctcctattccattttctccttttccttctcatcctgtttcatctcacccttctccttctctgtcatctca

SEQ ID NO: 47466 - DNA, 80 bp, synthetic construct
  source 1..80: mol_type = other DNA
atgggactctgaggttgtgtgtttccgggagcttggggaagggggtgtccagggtccagagctactcacatgaggagtgc

SEQ ID NO: 47467 - DNA, 80 bp, synthetic construct; identical to SEQ ID NO: 15726
  source 1..80: mol_type = other DNA

SEQ ID NO: 47468 - DNA, 80 bp, synthetic construct
  source 1..80: mol_type = other DNA
agactggagtgcaatgggacgatcttggctcactgcaaccttcgcctcctgggttagagggattctcctgcctcagcctc

SEQ ID NO: 47469 - DNA, 80 bp, synthetic construct
  source 1..80: mol_type = other DNA
agccaccacacccagccagagtccagccttgaccttggaaagaggtttctgttccctcttgagctgggtgacaccagtca

SEQ ID NO: 47470 - DNA, 80 bp, synthetic construct
  source 1..80: mol_type = other DNA
tgttgtagatattggctttatcacatattcacctacctgtccattaatctaaggtgggtttgtacaactttattttaatt

SEQ ID NO: 47471 - DNA, 80 bp, synthetic construct; identical to SEQ ID NO: 15727
  source 1..80: mol_type = other DNA

SEQ ID NO: 47472 - DNA, 80 bp, synthetic construct
  source 1..80: mol_type = other DNA
catggtgagatcacagctcactgcagccacaaccttcctggactcaagcgatcctcccacttcagcctcttgaatagttg

SEQ ID NO: 47473 - DNA, 80 bp, synthetic construct
  source 1..80: mol_type = other DNA
ctcctggctaaagctttatgttaaatggagaattaaaaacgtatacaagaatggaatagtataatgaactgccatgcccc

SEQ ID NO: 47474 - DNA, 80 bp, synthetic construct
  source 1..80: mol_type = other DNA
tcccacctcagcctcctgagtagctgggactacaggtatgcaccaccatgcctggctaattttttttagttttagtggag

SEQ ID NO: 47475 - DNA, 80 bp, synthetic construct; identical to SEQ ID NO: 15728
  source 1..80: mol_type = other DNA

SEQ ID NO: 47476 - DNA, 80 bp, synthetic construct
  source 1..80: mol_type = other DNA
tttatttattatttatttttattttattttttgagacaatgtctcactctgtcacccagtctggagtgcagtggcatggt

SEQ ID NO: 47477 - DNA, 80 bp, synthetic construct
  source 1..80: mol_type = other DNA
tcctgccttggcctcccaaagtgctgggattacagtgtgaggcagcatgctcaaccttatttatttaattatttatttta

SEQ ID NO: 47478 - DNA, 80 bp, synthetic construct
  source 1..80: mol_type = other DNA
caacctcctgggatcaaacgatcctcccacctcagcctcccaagtggctgggaccacagacacgcactaccacacctggc

SEQ ID NO: 47479 - DNA, 80 bp, synthetic construct; identical to SEQ ID NO: 15729
  source 1..80: mol_type = other DNA

SEQ ID NO: 47480 - DNA, 80 bp, synthetic construct
  source 1..80: mol_type = other DNA
caggaggatcacctgagtctgggaggcagaggttgtagtgagctatgatagcgccactgcactccagcctgggtggcaga

SEQ ID NO: 47481 - DNA, 80 bp, synthetic construct
  source 1..80: mol_type = other DNA
cagcctgaccaacatggtgaaaccccatctctactaaaaatacaaaaattagcctggcgtggtgacgggcgcctgtaatc

SEQ ID NO: 47482 - DNA, 80 bp, synthetic construct
  source 1..80: mol_type = other DNA
gaccccttcccatgcctgccaaatcagaatctgtattttgacaggatcccaggggcttcctgtgtatattaaatctggag

SEQ ID NO: 47483 - DNA, 80 bp, synthetic construct
  source 1..80: mol_type = other DNA
tgttgtttgtggaggcagaggctggctggatgggctccactgggaagacgggagaggggcaagacagtctgaggacactt

SEQ ID NO: 47484 - DNA, 80 bp, synthetic construct; identical to SEQ ID NO: 15730
  source 1..80: mol_type = other DNA

SEQ ID NO: 47485 - DNA, 80 bp, synthetic construct
  source 1..80: mol_type = other DNA
aggaggttggcctggctggatcagaggtgggacagtctaagggtgacctctgagccattttggagcctctaacgcccaga

SEQ ID NO: 47486 - DNA, 80 bp, synthetic construct
  source 1..80: mol_type = other DNA
agtttgagctggggaagcagaaggtacaagtgcagtgatgggggcactaatggggccaggctgaggcaggagatgtgggg

SEQ ID NO: 47487 - DNA, 80 bp, synthetic construct
  source 1..80: mol_type = other DNA
caagaacccggccccgcagtgcccaccgcggctggagatgcagatgctgatgccagtgtcctggagccgcatgcccaacc

SEQ ID NO: 47488 - DNA, 80 bp, synthetic construct; identical to SEQ ID NO: 15731
  source 1..80: mol_type = other DNA

SEQ ID NO: 47489 - DNA, 80 bp, synthetic construct
  source 1..80: mol_type = other DNA
atctcagggagccagacccacatcaacaccccagggggccccaagtacaccccaggatccctggacatgattcagggagg

SEQ ID NO: 47490 - DNA, 80 bp, synthetic construct
  source 1..80: mol_type = other DNA
gcacagtgcctcacacctgtaatcccagcacgttgggaggctgaggcaggcaggtcacctgaggtcaggagtctctacta

SEQ ID NO: 47491 - DNA, 80 bp, synthetic construct; identical to SEQ ID NO: 15732
  source 1..80: mol_type = other DNA

SEQ ID NO: 47492 - DNA, 80 bp, synthetic construct
  source 1..80: mol_type = other DNA
agtattccaggctggagacaccaagcccctgtgaagtgacattctagtaatgcttgtacataactcaggatgctcggaca

SEQ ID NO: 47493 - DNA, 80 bp, synthetic construct
  source 1..80: mol_type = other DNA
accaccaggaagcacagtgagaacccgtctccacattttttttttctttttaattagcttggcttggtggcacacacatg

SEQ ID NO: 47494 - DNA, 80 bp, synthetic construct
  source 1..80: mol_type = other DNA
gctaggtgtggttttaggtgctgggaatataacaaacaaaagcagaaacaaaacaggcagaaatgtcctgcccttggaat

SEQ ID NO: 47495 - DNA, 80 bp, synthetic construct
  source 1..80: mol_type = other DNA
caggggcccccagatcccttagggacttccagaaccattgaaagactcctagacccagctccactgccctcacagaaccc

SEQ ID NO: 47496 - DNA, 80 bp, synthetic construct; identical to SEQ ID NO: 15733
  source 1..80: mol_type = other DNA

SEQ ID NO: 47497 - DNA, 80 bp, synthetic construct
  source 1..80: mol_type = other DNA
gctgctgcacgccctggaggacgcgcacctgccaggcccactgcgcgcaggctactatgacctcctcatcagcatccacc

SEQ ID NO: 47498 - DNA, 80 bp, synthetic construct
  source 1..80: mol_type = other DNA
gcccccgcatcatttctcgcccccctgtttcgtggccgctctgccagctgctggggcagcagaggccccggcccgcctca

SEQ ID NO: 47499 - DNA, 80 bp, synthetic construct; identical to SEQ ID NO: 15734
  source 1..80: mol_type = other DNA

SEQ ID NO: 47500 - DNA, 80 bp, synthetic construct
  source 1..80: mol_type = other DNA
ctcctgcctcagccccccgagtagcggggactacaggcatgtgccaccacgccccgctaatatttgtattttcagtagag

SEQ ID NO: 47501 - DNA, 80 bp, synthetic construct
  source 1..80: mol_type = other DNA
tttctatgtatcctcccaccatctccctatctttcattcacctttccctccatctgctcacctgtcatctctttatgttt

SEQ ID NO: 47502 - DNA, 80 bp, synthetic construct
  source 1..80: mol_type = other DNA
agatcatctttccatcaacaagatctttccatcaacatctttccatctgcctttctatccttttgttctccacccactcc

SEQ ID NO: 47503 - DNA, 80 bp, synthetic construct; identical to SEQ ID NO: 15735
  source 1..80: mol_type = other DNA

SEQ ID NO: 47504 - DNA, 80 bp, synthetic construct
  source 1..80: mol_type = other DNA
tacccgttccctatccttctctccatcccttgtatcatgtacccttttattcgtagacccatctaactattcatttatat

SEQ ID NO: 47505 - DNA, 80 bp, synthetic construct
  source 1..80: mol_type = other DNA
ttacaggtgcccgccaccatgcccggctaatttttgtatttttaatagagatggggtttcaccatgttgaccaggctggt

SEQ ID NO: 47506 - DNA, 80 bp, synthetic construct
  source 1..80: mol_type = other DNA
ttcagcaatccttctgcctcagcctcctgaatagctgggactacaggtgtgcactaccatgcccaggtaagttttaaatt

SEQ ID NO: 47507 - DNA, 80 bp, synthetic construct
  source 1..80: mol_type = other DNA
tttgtaagagacagggtaatgcccaggctagaatgcagtggtatgattgtagcccactgcagtcttaaactcctgggttc

SEQ ID NO: 47508 - DNA, 80 bp, synthetic construct; identical to SEQ ID NO: 15736
  source 1..80: mol_type = other DNA

SEQ ID NO: 47509 - DNA, 80 bp, synthetic construct
  source 1..80: mol_type = other DNA
cctccattcatccatctctctctctcccctgcactcttcttccctttcgtctactccctctttacttccatatgttagca

SEQ ID NO: 47510 - DNA, 80 bp, synthetic construct
  source 1..80: mol_type = other DNA
accaccacacccagctaatttttttttgtatttttgtagagacggggtttcaccatgttggccaggctggtctcgaactc

SEQ ID NO: 47511 - DNA, 80 bp, synthetic construct
  source 1..80: mol_type = other DNA
catgcttaggcttgggagaaaggacactcgcctgtgatgggagaggcactcatatttgggtctgtggtctgggctgtgtg

SEQ ID NO: 47512 - DNA, 80 bp, synthetic construct; identical to SEQ ID NO: 15737
  source 1..80: mol_type = other DNA

SEQ ID NO: 47513 - DNA, 80 bp, synthetic construct
  source 1..80: mol_type = other DNA
agaaggggagaaagaagaaggcttggaggaagggctgctccagatgaagttgccagagtctgtgaagttacaggtgggct

SEQ ID NO: 47514 - DNA, 80 bp, synthetic construct
  source 1..80: mol_type = other DNA
aatgccaacttggaaagatctctgttttccatggagatgagaccatggagaaggcagtcttttttgtttgttttttgcga

SEQ ID NO: 47515 - DNA, 80 bp, synthetic construct
  source 1..80: mol_type = other DNA
gtagagatggggtttcgccatgttggccaggctggtcttgaactcctgacttcaggtgatccacccacctcggcctccca

SEQ ID NO: 47516 - DNA, 80 bp, synthetic construct; identical to SEQ ID NO: 15738
  source 1..80: mol_type = other DNA

SEQ ID NO: 47517 - DNA, 80 bp, synthetic construct
  source 1..80: mol_type = other DNA
gacgctggccacttttactgtctaaaccccaacctcaacatctcctgactctgatcactgaggaccctcaacctctaaac

SEQ ID NO: 47518 - DNA, 80 bp, synthetic construct
  source 1..80: mol_type = other DNA
atggactaacaattgcatcttctatctctgatctcagagttcctgctttgggatctcagaccctcattctaatctttgac

SEQ ID NO: 47519 - DNA, 80 bp, synthetic construct; identical to SEQ ID NO: 15739
  source 1..80: mol_type = other DNA

SEQ ID NO: 47520 - DNA, 80 bp, synthetic construct
  source 1..80: mol_type = other DNA
gatagaagaagtgggtaaaaaatggctggctggatagatggaaggatgaagagaaggatggatggatggttgagaactgg

SEQ ID NO: 47521 - DNA, 80 bp, synthetic construct
  source 1..80: mol_type = other DNA
ttagtatgacgtgtctaggtgtagagctctttgaatttatcctgttgaaagtttgttgagtttcttggatatatacttac

SEQ ID NO: 47522 - DNA, 80 bp, synthetic construct
  source 1..80: mol_type = other DNA
caatcttagctcactgcatcctctgcctcctgggctcaagccatcctcctacctcagcctccaaagtagctgggagaaca

SEQ ID NO: 47523 - DNA, 80 bp, synthetic construct; identical to SEQ ID NO: 15740
  source 1..80: mol_type = other DNA

SEQ ID NO: 47524 - DNA, 80 bp, synthetic construct
  source 1..80: mol_type = other DNA
gataagtcactattatgatatttccttttaattcttcagacatggtttcctttagttctttgaacatatttgcaaaattg

SEQ ID NO: 47525 - DNA, 80 bp, synthetic construct
  source 1..80: mol_type = other DNA
gggcaacatggcaagacccccatctctacagaaaaagatacaaaattaacagggcatggtggcatacacctgtagtccca

SEQ ID NO: 47526 - DNA, 80 bp, synthetic construct
  source 1..80: mol_type = other DNA
tgcacaaataaatgagtgtgtaagcaggtgaataagcaaactaatgaatgacatttcccgccttcttgaccacttccagg

SEQ ID NO: 47527 - DNA, 80 bp, synthetic construct; identical to SEQ ID NO: 15741
  source 1..80: mol_type = other DNA

SEQ ID NO: 47528 - DNA, 80 bp, synthetic construct
  source 1..80: mol_type = other DNA
aaacccccttctccactaaaaatacaaaaattagctgggtgtggcggtgcatgcctgtaatcccagctacttggagactg

SEQ ID NO: 47529 - DNA, 80 bp, synthetic construct
  source 1..80: mol_type = other DNA
acgtgtgtgttggaccagggtgacacagcctaccagcttagtggcaaacctctaactaagggatggcggtaaccctgaac

SEQ ID NO: 47530 - DNA, 80 bp, synthetic construct
  source 1..80: mol_type = other DNA
tatattagccacatctaacaaggacagatttcctgacgttggtacaggttttatcccacaacattcaggaaacttttatg

SEQ ID NO: 47531 - DNA, 80 bp, synthetic construct
  source 1..80: mol_type = other DNA
gtgcagtggcgcgatcttggctcactgcaacctccgcctcctgggttcaagcgattctcctgcttcagcctccagagtag

SEQ ID NO: 47532 - DNA, 80 bp, synthetic construct; identical to SEQ ID NO: 15742
  source 1..80: mol_type = other DNA

SEQ ID NO: 47533 - DNA, 80 bp, synthetic construct
  source 1..80: mol_type = other DNA
tcctattgaaatttttaggaagcccttgtgggctggatattagggtgaacagaacagagagattcttgggcgaatagaaa

SEQ ID NO: 47534 - DNA, 80 bp, synthetic construct
  source 1..80: mol_type = other DNA
aaagaaaaaaaggaaaacaatctgctagaatctgcctgctcccagcaggtggagggcgcaggtggtagtaactgggaaaa

SEQ ID NO: 47535 - DNA, 80 bp, synthetic construct
  source 1..80: mol_type = other DNA
cagagccccgagctggtgcgggccatgttcagcctcctgcaccggcagtacgacgggctgggtgagctgctgcgtgccct

SEQ ID NO: 47536 - DNA, 80 bp, synthetic construct; identical to SEQ ID NO: 15743
  source 1..80: mol_type = other DNA

SEQ ID NO: 47537 - DNA, 80 bp, synthetic construct
  source 1..80: mol_type = other DNA
cacccaggctggagtgcaatggcgcaatctcagctcactgcaacctccgcctcccaggttcaagcaattctcctgtctca

SEQ ID NO: 47538 - DNA, 80 bp, synthetic construct
  source 1..80: mol_type = other DNA
cgtgagccaccacacccagctgaggtttaccctttttgagcttcagtttcctcatctgtaaaaccggggagagccaagcc

SEQ ID NO: 47539 - DNA, 80 bp, synthetic construct
  source 1..80: mol_type = other DNA
ggcctcactctgttgcccaggctagagtgcagtggcccaatcacagctcactgcagcctcaacttcctgggctcaagcga

SEQ ID NO: 47540 - DNA, 80 bp, synthetic construct; identical to SEQ ID NO: 15744
  source 1..80: mol_type = other DNA

SEQ ID NO: 47541 - DNA, 80 bp, synthetic construct
  source 1..80: mol_type = other DNA
ataccgggttcaagcgattctcccacctcagcctcctgcgtagctgggattacgggtatgcgccaccacgcctggctaat

SEQ ID NO: 47542 - DNA, 80 bp, synthetic construct
  source 1..80: mol_type = other DNA
tgtaaaggcggtggtgctaggcacagagtgagagggtcaagaatgccaacgctgtcacagtggtggctatggccctctcc

SEQ ID NO: 47543 - DNA, 80 bp, synthetic construct
  source 1..80: mol_type = other DNA
tgagggcccaggcaggtgctggggagctcaggggaggcagccacagagggcaggccctgaccaccctgcctgtcccagga

SEQ ID NO: 47544 - DNA, 80 bp, synthetic construct; identical to SEQ ID NO: 15745
  source 1..80: mol_type = other DNA

SEQ ID NO: 47545 - DNA, 80 bp, synthetic construct
  source 1..80: mol_type = other DNA
ggcgagacaagcaggagtgagatgttctccccacctctcgcccctgcaggcatgcagggctccacgcccctggacgtggc

SEQ ID NO: 47546 - DNA, 80 bp, synthetic construct
  source 1..80: mol_type = other DNA
ggcaattctggatggtccagtgcccaaccagaaggagactaatttgcagggagagaacggcacccagttgttcattcatg

SEQ ID NO: 47547 - DNA, 80 bp, synthetic construct
  source 1..80: mol_type = other DNA
tacgcttccgggttgggggccgatccacagtctaggcttccagccaggtggccttggcacatttcttcgctctccgagct

SEQ ID NO: 47548 - DNA, 80 bp, synthetic construct; identical to SEQ ID NO: 15746
  source 1..80: mol_type = other DNA

SEQ ID NO: 47549 - DNA, 80 bp, synthetic construct
  source 1..80: mol_type = other DNA
taagaccagcctggacaatatagggacaccttgtctctacaaaaaatacaaaaagtaggtgggtgtagtggcacgtaact

SEQ ID NO: 47550 - DNA, 80 bp, synthetic construct
  source 1..80: mol_type = other DNA
aaaaaaaaaagtggccagagaaagcctcattgagaaagtgacatttgtgtaaagctctgaaggaaggtgacaggtcaggt

SEQ ID NO: 47551 - DNA, 80 bp, synthetic construct; identical to SEQ ID NO: 15747
  source 1..80: mol_type = other DNA

SEQ ID NO: 47552 - DNA, 80 bp, synthetic construct
  source 1..80: mol_type = other DNA
caaagagaaggttcttggatctcatgtaagaaagaattcagggcaactccatagagtaaagtgaaagcaagtttattagg

SEQ ID NO: 47553 - DNA, 80 bp, synthetic construct
  source 1..80: mol_type = other DNA
atattgccatgacatttgtaaactgtcgtggcgctggtgggagtgcagcagtgaggatgaccagaggtcactctcgttgc

SEQ ID NO: 47554 - DNA, 80 bp, synthetic construct
  source 1..80: mol_type = other DNA
tcaagatggagttgctgtagtttacaggcctctgacaggaccagggctaatgggccgagggatcagagctgaaccggact

SEQ ID NO: 47555 - DNA, 80 bp, synthetic construct; identical to SEQ ID NO: 15748
  source 1..80: mol_type = other DNA

SEQ ID NO: 47556 - DNA, 80 bp, synthetic construct
  source 1..80: mol_type = other DNA
cctgtggctggcagtgttggatcctggggctggcgggagcctggtgttacccctagaggtgttgggtcctggggctggca

SEQ ID NO: 47557 - DNA, 80 bp, synthetic construct
  source 1..80: mol_type = other DNA
gaacgccaatgtggtggtgcggctgctcatccggaagcctgagtgcttcggacccgccctgcggggtgagggtggctcag

SEQ ID NO: 47558 - DNA, 80 bp, synthetic construct
  source 1..80: mol_type = other DNA
acccaccttccctgcagctttggtgaggaaccgcctgaagaaaaccgggtgcacctgggacacgccatcatgtccttcta

SEQ ID NO: 47559 - DNA, 80 bp, synthetic construct; identical to SEQ ID NO: 15749
  source 1..80: mol_type = other DNA

SEQ ID NO: 47560 - DNA, 80 bp, synthetic construct
  source 1..80: mol_type = other DNA
gccaggatgaggggtcgcagggagaggggtcaggatgaggttggggggaacaaggagagaggtcgggactggggtggggg

SEQ ID NO: 47561 - DNA, 80 bp, synthetic construct
  source 1..80: mol_type = other DNA
ccaagccggcaagggtgaggccctgcggatccgcgccatcctccgctcccttgtgcccttggaggaccttgtgggcatca

SEQ ID NO: 47562 - DNA, 80 bp, synthetic construct
  source 1..80: mol_type = other DNA
catccttcgtgccggaccacaaggcgtccatggtgctcttcctggaccgtgtgtatggcatcgagaaccaggacttcttg

SEQ ID NO: 47563 - DNA, 80 bp, synthetic construct; identical to SEQ ID NO: 15750
  source 1..80: mol_type = other DNA

SEQ ID NO: 47564 - DNA, 80 bp, synthetic construct
  source 1..80: mol_type = other DNA
agttcgagaccagcctgaccaacatggtgaaaccgcatctctactaaaagtacaaaaattagccagacgtggtggcgcac

SEQ ID NO: 47565 - DNA, 80 bp, synthetic construct
  source 1..80: mol_type = other DNA
catctcaaaaaaaatattttgttcgcagtattggtttggtactgtgggcacacagaactctgtacaggaacagcaataac

SEQ ID NO: 47566 - DNA, 80 bp, synthetic construct
  source 1..80: mol_type = other DNA
gtaataactttgggaggccgaggcgggtgggttgcttgaagccaggattttgagaccagcctgggcaacatggagagatc

SEQ ID NO: 47567 - DNA, 80 bp, synthetic construct
  source 1..80: mol_type = other DNA
aaccatgattacatctctgcattccagcctgggcgacagagcgagaccttatctcagaaaaaaaaaagaaaaataaatta

SEQ ID NO: 47568 - DNA, 80 bp, synthetic construct; identical to SEQ ID NO: 15751
  source 1..80: mol_type = other DNA

SEQ ID NO: 47569 - DNA, 80 bp, synthetic construct
  source 1..80: mol_type = other DNA
gtggtagagattgggaggagcaggttttgggggagtcatcagaagcttggatcctttggccacagtcgctcaagacaggt

SEQ ID NO: 47570 - DNA, 80 bp, synthetic construct
  source 1..80: mol_type = other DNA
acaccgcgccatcatggtggactctatgctgcataccgtgtaccgcctgtctcggggtcgttcgctcaccaaggcgcagc

SEQ ID NO: 47571 - DNA, 80 bp, synthetic construct
  source 1..80: mol_type = other DNA
gattctacatcttgtgcattgtcccgcaggtacatccgcccgtcgatgctgcagcacctgttgcgccgcctggtgttcga

SEQ ID NO: 47572 - DNA, 80 bp, synthetic construct; identical to SEQ ID NO: 15752
  source 1..80: mol_type = other DNA

SEQ ID NO: 47573 - DNA, 80 bp, synthetic construct
  source 1..80: mol_type = other DNA
ctggaccaccagacttccactattcaaatgagtgcatttatttgaataaacattatcacagctattctgaatatttgcac

SEQ ID NO: 47574 - DNA, 80 bp, synthetic construct
  source 1..80: mol_type = other DNA
gggaggccgaggtgggcagatcacttgaggtcaggagttcgagaccagcctggccaacatggcgaaaccccatctctact

SEQ ID NO: 47575 - DNA, 80 bp, synthetic construct; identical to SEQ ID NO: 15753
  source 1..80: mol_type = other DNA

SEQ ID NO: 47576 - DNA, 80 bp, synthetic construct
  source 1..80: mol_type = other DNA
acacaaccagctctagtttaatgcccattttaactctaaattaagaatgctaaatttgcatactaagctgtctaggacca

SEQ ID NO: 47577 - DNA, 80 bp, synthetic construct
  source 1..80: mol_type = other DNA
cccacccagctcctcaccaaccactatgagcgctgttggaagtactactgcctacccacgggctgggccaacttcggggt

SEQ ID NO: 47578 - DNA, 80 bp, synthetic construct
  source 1..80: mol_type = other DNA
ggttcaaggaggagaaggttctgcaagtttggatctaggaggatctatgggttgaggcttcgatttggaggttatgaaag

SEQ ID NO: 47579 - DNA, 80 bp, synthetic construct; identical to SEQ ID NO: 15754
  source 1..80: mol_type = other DNA

SEQ ID NO: 47580 - DNA, 80 bp, synthetic construct
  source 1..80: mol_type = other DNA
ccccccgactatgtggatgcctcatactcatctaaggcagagaaaaaggccacagtggatgctgaaggcaactttgatcc

SEQ ID NO: 47581 - DNA, 80 bp, synthetic construct
  source 1..80: mol_type = other DNA
gtacacacacgagaagtgggccttcgacaaggttggcctcagggtcctcctatccaagaaaccctcaagaccccagcttt

SEQ ID NO: 47582 - DNA, 80 bp, synthetic construct
  source 1..80: mol_type = other DNA
cctcccctccatctctagatccagaacaactggtcctatggagagaacatagacgaggagctgaagacccaccccatgct

SEQ ID NO: 47583 - DNA, 80 bp, synthetic construct; identical to SEQ ID NO: 15755
  source 1..80: mol_type = other DNA

SEQ ID NO: 47584 - DNA, 80 bp, synthetic construct
  source 1..80: mol_type = other DNA
attccaccaactccccaccctcctgtccaccccaggacaaagagatttaccgctggcccatcaaggagtccctgaaggcc

SEQ ID NO: 47585 - DNA, 80 bp, synthetic construct
  source 1..80: mol_type = other DNA
ggccagacagggaagggatggagaggagaggggcccagggaggtaggtggggcaagaggggtgcagaaacctgagatctg

SEQ ID NO: 47586 - DNA, 80 bp, synthetic construct
  source 1..80: mol_type = other DNA
ggcttcctgctagcccatcagcccacctcccatcttccccttgtcctctcagacctatgatcctcgagaaggctacaacc

SEQ ID NO: 47587 - DNA, 80 bp, synthetic construct
  source 1..80: mol_type = other DNA
gactctgcatccactcccaggccatggcagaacaactggcagaaaattaccacaacacgtggggacggaagaagaagcag

SEQ ID NO: 47588 - DNA, 80 bp, synthetic construct; identical to SEQ ID NO: 15756
  source 1..80: mol_type = other DNA

SEQ ID NO: 47589 - DNA, 80 bp, synthetic construct
  source 1..80: mol_type = other DNA
gatcgagagaaggcccaggagctactgaaattcctgcagatgaatggctacgcggttacaaggcacgcgggttggggctc

SEQ ID NO: 47590 - DNA, 80 bp, synthetic construct
  source 1..80: mol_type = other DNA
gaggagttcgaaatgggcggggcttaagcacaggcgggaccagagaggagaggaggaagagaagggcggggcccagggag

SEQ ID NO: 47591 - DNA, 80 bp, synthetic construct
  source 1..80: mol_type = other DNA
cggggccagagaggggtggggaggtacagaggggcggggactggtgagtggaggcgggaccaaagaggagagaagggctg

SEQ ID NO: 47592 - DNA, 80 bp, synthetic construct; identical to SEQ ID NO: 15757
  source 1..80: mol_type = other DNA

SEQ ID NO: 47593 - DNA, 80 bp, synthetic construct
  source 1..80: mol_type = other DNA
tcctgcagcagctgctgcgctggatggacatttctcaggagttcattgcccacctgggtacggagaaataccccccgctt

SEQ ID NO: 47594 - DNA, 80 bp, synthetic construct
  source 1..80: mol_type = other DNA
tgacccctgctctcctgcaactactcctatgttggattcaggcaattagcatcataaataactaaatcgtttagtgttag

SEQ ID NO: 47595 - DNA, 80 bp, synthetic construct
  source 1..80: mol_type = other DNA
ccaggctggagtgcagtggcacggtctcggctcactgcaacctctgctttctggtttcaagcgattctcctgcctcagcc

SEQ ID NO: 47596 - DNA, 80 bp, synthetic construct; identical to SEQ ID NO: 15758
  source 1..80: mol_type = other DNA

SEQ ID NO: 47597 - DNA, 80 bp, synthetic construct
  source 1..80: mol_type = other DNA
gataaacgaggtcacagaggtgactggggcagatcatgcagggctttgcaagctgtgatgaggactttgaccttacctgg

SEQ ID NO: 47598 - DNA, 80 bp, synthetic construct
  source 1..80: mol_type = other DNA
ggggtgccccccagtgcctcttacaggccactaagaattacagctaggccctacaatcccctccagtttcccttagagac

SEQ ID NO: 47599 - DNA, 80 bp, synthetic construct; identical to SEQ ID NO: 15759
  source 1..80: mol_type = other DNA

SEQ ID NO: 47600 - DNA, 80 bp, synthetic construct
  source 1..80: mol_type = other DNA
ttttttttttttttttttttgagacggagtcttgctctgtcacccaggttggactgcagtggcgcgatctcagctcactg

SEQ ID NO: 47601 - DNA, 80 bp, synthetic construct
  source 1..80: mol_type = other DNA
gtttcaccatgttggccaggatggtctcgatctcctgacctcgtgatccacccgcctcggcttcccaaagtgctgggatt

SEQ ID NO: 47602 - DNA, 80 bp, synthetic construct
  source 1..80: mol_type = other DNA
gcagattaactcagtgccatgtattcaagtttagaatgaaaagcacttatggtgggtgaggaagggcatgttccatgacc

SEQ ID NO: 47603 - DNA, 80 bp, synthetic construct
  source 1..80: mol_type = other DNA
cgggtggatcacctgaggtcagaagtttgagaccagcctggacaacatggtgaaaccttggctgtactaaaaatacaaaa

SEQ ID NO: 47604 - DNA, 80 bp, synthetic construct; identical to SEQ ID NO: 15760
  source 1..80: mol_type = other DNA

SEQ ID NO: 47605 - DNA, 80 bp, synthetic construct
  source 1..80: mol_type = other DNA
cctacagaggctgtggtcagcagtgggcgagtggaaaagtccccacatgaacaggagattaaattctttgccaaggtgag

SEQ ID NO: 47606 - DNA, 80 bp, synthetic construct
  source 1..80: mol_type = other DNA
ccaaccactgcctctatttcttgtccactccggctaaagtgctgggcagcggtggccacgcctctaacaaggagaaggaa

SEQ ID NO: 47607 - DNA, 80 bp, synthetic construct; identical to SEQ ID NO: 15761
  source 1..80: mol_type = other DNA

SEQ ID NO: 47608 - DNA, 80 bp, synthetic construct
  source 1..80: mol_type = other DNA
ctgtagtcccagctactcaggaggctgaggcgggaggatcacttgaacccaggagttggaggctgcagggagctgggatc

SEQ ID NO: 47609 - DNA, 80 bp, synthetic construct
  source 1..80: mol_type = other DNA
cctcctgtctccatcatttggaccccctcctggttcctctctccttgtcttctctgtccctgtctcctctaattgggtca

SEQ ID NO: 47610 - DNA, 80 bp, synthetic construct
  source 1..80: mol_type = other DNA
ctcttccccaccctgaagaaatagctcccaggttctgccttaatttgaacaacctttgttgttttcttcccctggacctg

SEQ ID NO: 47611 - DNA, 80 bp, synthetic construct
  source 1..80: mol_type = other DNA
gggctggggaggagggacatttggaggcgctgtaggagtctgggggggtgggggtgcagtagcattccaacttagcccgc

SEQ ID NO: 47612 - DNA, 80 bp, synthetic construct; identical to SEQ ID NO: 15762
  source 1..80: mol_type = other DNA

SEQ ID NO: 47613 - DNA, 80 bp, synthetic construct
  source 1..80: mol_type = other DNA
tggagaacctgcggctgggcaaggtgtcgcaggcgcgcacccaggtgaaaggcgtgggccagaacctcacctacaccact

SEQ ID NO: 47614 - DNA, 80 bp, synthetic construct
  source 1..80: mol_type = other DNA
ttgaatgtgtggatttcttgctgtaagcaaagcatgcagtcagtaccttggcaggtggcaaatgagttaatgaggacgcg

SEQ ID NO: 47615 - DNA, 80 bp, synthetic construct; identical to SEQ ID NO: 15763
  source 1..80: mol_type = other DNA

SEQ ID NO: 47616 - DNA, 80 bp, synthetic construct
  source 1..80: mol_type = other DNA
ttaaaaaagagagtctattgataaaggttaggaaaagtagcacttggccgagcgcagtggctcacgcctgtaatcccagc

SEQ ID NO: 47617 - DNA, 80 bp, synthetic construct
  source 1..80: mol_type = other DNA
tgcttgaacccaggaggcgaaggttgcagtgcaccaagatcgtgccattgcacgccagcctgggcaacagagcgagactc

SEQ ID NO: 47618 - DNA, 80 bp, synthetic construct
  source 1..80: mol_type = other DNA
gaaaagaaaagtagcacctggatagggttcttctcccatccaactttgtattttgaaattttcaaaacatacaggaaggt

SEQ ID NO: 47619 - DNA, 80 bp, synthetic construct; identical to SEQ ID NO: 15764
  source 1..80: mol_type = other DNA

SEQ ID NO: 47620 - DNA, 80 bp, synthetic construct
  source 1..80: mol_type = other DNA
caaaatgtctttgatttttttaaaagaaattcagaatccagtcaagtttctcctgctgcatttggtggttgtgtctctgt

SEQ ID NO: 47621 - DNA, 80 bp, synthetic construct
  source 1..80: mol_type = other DNA
cttgagaccaggagtttgagatcagcctgggcaacatactgagaccccatctctaaaaaaatttttttttaatttttttt

SEQ ID NO: 47622 - DNA, 80 bp, synthetic construct
  source 1..80: mol_type = other DNA
gctgggattacaggcattcaccaacacactcagataatttttgtatttttagtagagatggggtttcaccatgttgccca

SEQ ID NO: 47623 - DNA, 80 bp, synthetic construct
  source 1..80: mol_type = other DNA
aagatagcctaaaattgcagcaatattgcagttctgtttgcatttttctggaggaagtacccctcactttcattatagag

SEQ ID NO: 47624 - DNA, 80 bp, synthetic construct; identical to SEQ ID NO: 15765
  source 1..80: mol_type = other DNA

SEQ ID NO: 47625 - DNA, 80 bp, synthetic construct
  source 1..80: mol_type = other DNA
ccgaacgctgtgcagtatctactccctgggaaccaccaagaacacttatgtggaaaagtaaggagagggagccatcgttt

SEQ ID NO: 47626 - DNA, 80 bp, synthetic construct
  source 1..80: mol_type = other DNA
gccgcgtgagggcgctcagggacaggtcagccacggaggtagagccgccaggtctggggctgtgaagcaggcaggcctcg

SEQ ID NO: 47627 - DNA, 80 bp, synthetic construct; identical to SEQ ID NO: 15766
  source 1..80: mol_type = other DNA

SEQ ID NO: 47628 - DNA, 80 bp, synthetic construct
  source 1..80: mol_type = other DNA
aatccacctactcctaaggctgagatggggggatcgcttgagctccagcctgagcagcatagggagactgcatctctaca

SEQ ID NO: 47629 - DNA, 80 bp, synthetic construct
  source 1..80: mol_type = other DNA
accctgtcttaaaaaacaaaacaagtggcacacatggatgaatggcagctctgtcccaaagggttctgggaggagccgtt

SEQ ID NO: 47630 - DNA, 80 bp, synthetic construct
  source 1..80: mol_type = other DNA
ccatgccggtggcgttcctggagccgcagctgaacgagtacaacgcctgctccgtgtacaccaccaagtctccgcgggag

SEQ ID NO: 47631 - DNA, 80 bp, synthetic construct
  source 1..80: mol_type = other DNA
gagtttatggttcgggggcatttcaaggccgttacatggggagaatttagagattaatttgatttttgaaaacagaatct

SEQ ID NO: 47632 - DNA, 80 bp, synthetic construct; identical to SEQ ID NO: 15767
  source 1..80: mol_type = other DNA

SEQ ID NO: 47633 - DNA, 80 bp, synthetic construct
  source 1..80: mol_type = other DNA
caaatatgtatcgagcagttactatgtatgaggcgctgtcctagtcacctgaggttcagcagtgaacagataaaacagac

SEQ ID NO: 47634 - DNA, 80 bp, synthetic construct
  source 1..80: mol_type = other DNA
aagggactgaaccgggtgtgggattcagagagacaaggcggggagacagggtggggttggaaaaggtctcttttggagta

SEQ ID NO: 47635 - DNA, 80 bp, synthetic construct; identical to SEQ ID NO: 15768
  source 1..80: mol_type = other DNA

SEQ ID NO: 47636 - DNA, 80 bp, synthetic construct
  source 1..80: mol_type = other DNA
ggtgcccgctacacagagatgccgcatgtcatcgagatcacgctgcccatgctatgcagctacctgccccgatggtggga

SEQ ID NO: 47637 - DNA, 80 bp, synthetic construct
  source 1..80: mol_type = other DNA
cagcctgggctcccttggcagatggtctgaaagggagacccatggtcccctcggagttgggaggagtcagagtgtaggtt

SEQ ID NO: 47638 - DNA, 80 bp, synthetic construct
  source 1..80: mol_type = other DNA
tagccaggtgtggtggcacatgcttatagtcccagctacttgggaggctgaggcaggaggatctcttgagcccaggagtt

SEQ ID NO: 47639 - DNA, 80 bp, synthetic construct; identical to SEQ ID NO: 15769
  source 1..80: mol_type = other DNA

SEQ ID NO: 47640 - DNA, 80 bp, synthetic construct
  source 1..80: mol_type = other DNA
aaaaaaaaaaaaagaaatatttgtgtaaggaaacaggttgtagatcagggtcaacctagaaatcaggagctgggatcaga

SEQ ID NO: 47641 - DNA, 80 bp, synthetic construct
  source 1..80: mol_type = other DNA
tcacaaccttggggtcatagccagaaatcacatagtgaggtaagactctgggtatgggccaggtcagaggttaaagattg

SEQ ID NO: 47642 - DNA, 80 bp, synthetic construct
  source 1..80: mol_type = other DNA
atacaaaagttagctgggtgtggtggcagacgcctgtaatcccagctactcggggctgaggcaggaaaatcgcttgaact

SEQ ID NO: 47643 - DNA, 80 bp, synthetic construct; identical to SEQ ID NO: 15770
  source 1..80: mol_type = other DNA

SEQ ID NO: 47644 - DNA, 80 bp, synthetic construct
  source 1..80: mol_type = other DNA
gctcctgcagtcccacttcatcccaactatcgggcggctgcgcaagagggcagggaaggtggtgtccgaggaggagcagc

SEQ ID NO: 47645 - DNA, 80 bp, synthetic construct
  source 1..80: mol_type = other DNA
cgacctcccacgtcctccagccccatctgatctccgcctcctgactggctagaaacttcttccaatgctctggccccacc

SEQ ID NO: 47646 - DNA, 80 bp, synthetic construct
  source 1..80: mol_type = other DNA
tgcagtggcgcgatctcggctcactgtaacctccacctcccgggttcaagtgattctcctgcctcagccttcccagtagc

SEQ ID NO: 47647 - DNA, 80 bp, synthetic construct
  source 1..80: mol_type = other DNA
ctggccagtgtgattttttttaaatcattctcctaatgctggacatttagattgtgtcgatttctttgtcactatgcaca

SEQ ID NO: 47648 - DNA, 80 bp, synthetic construct; identical to SEQ ID NO: 15771
  source 1..80: mol_type = other DNA

SEQ ID NO: 47649 - DNA, 80 bp, synthetic construct
  source 1..80: mol_type = other DNA
ttgagaccagcctggccaacgtggcgaaaccctgtctctattatgaatacaaaaattagccaggcgtagtgacgcaggct

SEQ ID NO: 47650 - DNA, 80 bp, synthetic construct
  source 1..80: mol_type = other DNA
tcacctcttttgtcttggtggtcgtgtgacattctctgctgttggatatagttcaatttttcaatcagtaaatatgaaca

SEQ ID NO: 47651 - DNA, 80 bp, synthetic construct; identical to SEQ ID NO: 15772
  source 1..80: mol_type = other DNA

SEQ ID NO: 47652 - DNA, 80 bp, synthetic construct
  source 1..80: mol_type = other DNA
gcctcaggctgggactgggaggctgaggtgggaggatcgtttgagcccaggaggtcaaagctgcagtgagctatgatcac

SEQ ID NO: 47653 - DNA, 80 bp, synthetic construct
  source 1..80: mol_type = other DNA
tgactgtaatcccagcactttgggtggccaaagagagtggatcactcaaactcagtctcaaactcagaagtttgagacca

SEQ ID NO: 47654 - DNA, 80 bp, synthetic construct
  source 1..80: mol_type = other DNA
cacaccactgcactccagcctgggcgacagagcgagaccctgtctcaaaaaagaaaaaaagaaaattttttttttttttt

SEQ ID NO: 47655 - DNA, 80 bp, synthetic construct
  source 1..80: mol_type = other DNA
gtagagatgaggtttcaccgtgttagccaggatggtctcgatctcctgacctcgtgatctgcccgcctcggcctcccaaa

SEQ ID NO: 47656 - DNA, 80 bp, synthetic construct; identical to SEQ ID NO: 15773
  source 1..80: mol_type = other DNA

SEQ ID NO: 47657 - DNA, 80 bp, synthetic construct
  source 1..80: mol_type = other DNA
gaaagaggatctcttgagcccaggagttcaagaccagcctggacaacctagggagaccctcttcctacaaaaaataaaat

SEQ ID NO: 47658 - DNA, 80 bp, synthetic construct
  source 1..80: mol_type = other DNA
aaagaaagaaagagagagagagagagagaatggatcgttaaaaaattttaaatgttcagctgggcacagtggcttacacc

SEQ ID NO: 47659 - DNA, 80 bp, synthetic construct; identical to SEQ ID NO: 15774
  source 1..80: mol_type = other DNA

SEQ ID NO: 47660 - DNA, 80 bp, synthetic construct
  source 1..80: mol_type = other DNA
atcccagcgcggaggagctgttcaggatggtgggcgagatcttcatctactggtccaagtcccacgtgagtgcccacccc

SEQ ID NO: 47661 - DNA, 80 bp, synthetic construct
  source 1..80: mol_type = other DNA
agaatgagatcaacaacatgtccttcctgactgctgacaacaaaagcaaaatggctaaggtcggggcttggttctgggag

SEQ ID NO: 47662 - DNA, 80 bp, synthetic construct
  source 1..80: mol_type = other DNA
tcttctccctcctcccatctccctcctcctctccatctccctcttctctcatctctgtctccttcctcctcctgtatctt

SEQ ID NO: 47663 - DNA, 80 bp, synthetic construct; identical to SEQ ID NO: 15775
  source 1..80: mol_type = other DNA

SEQ ID NO: 47664 - DNA, 80 bp, synthetic construct
  source 1..80: mol_type = other DNA
atgccctcttcccccagcctctgcacgcccccgcctcgagaaaacccctgcttctgttccccacccccgtcctcccctcc

SEQ ID NO: 47665 - DNA, 80 bp, synthetic construct
  source 1..80: mol_type = other DNA
agagcaactctcagcttttaccaaagcatcgtgggctgaggtcaagggtaatgggggtgggagaggcacacggagcatgg

SEQ ID NO: 47666 - DNA, 80 bp, synthetic construct
  source 1..80: mol_type = other DNA
gggctctgcgaggactcagggagaagctgcatgtgtggcctgcagcagtgcctggcacaggggtcatgctcaaagttgcc

SEQ ID NO: 47667 - DNA, 80 bp, synthetic construct; identical to SEQ ID NO: 15776
  source 1..80: mol_type = other DNA

SEQ ID NO: 47668 - DNA, 80 bp, synthetic construct
  source 1..80: mol_type = other DNA
ctggatgggcctgggttagaaattggagccaggcaagcatggtggtatgtgcctgtagtcccagctacttgggaggctga

SEQ ID NO: 47669 - DNA, 80 bp, synthetic construct
  source 1..80: mol_type = other DNA
tagagtcagcaagtctggggtggaaattgaggtgtcgtcggcagttggggagggagtgcctggtgtccagactggggcct

SEQ ID NO: 47670 - DNA, 80 bp, synthetic construct
  source 1..80: mol_type = other DNA
ccacactgaagaagatgctgcccatcggcctgaatatgtgtgcgcccaccgaccaagacctcatcacgctggccaagacc

SEQ ID NO: 47671 - DNA, 80 bp, synthetic construct; identical to SEQ ID NO: 15777
  source 1..80: mol_type = other DNA

SEQ ID NO: 47672 - DNA, 80 bp, synthetic construct
  source 1..80: mol_type = other DNA
ccttcaagccccttgggacctactgagaccctcatgacccctccttccctccctgccaagactgaacctctgggttcctg

SEQ ID NO: 47673 - DNA, 80 bp, synthetic construct
  source 1..80: mol_type = other DNA
aacctctgaggtctcaactgtcctggagaccaaaatacccgggctgtagaacctcttaagcttgctgggatatcaaggag

SEQ ID NO: 47674 - DNA, 80 bp, synthetic construct
  source 1..80: mol_type = other DNA
tactaaccccctggacccctaaagaccaccgacttctcccctgctaccaccaggacaccccttccctcagaacctcaggc

SEQ ID NO: 47675 - DNA, 80 bp, synthetic construct
  source 1..80: mol_type = other DNA
acctacgtgatcccccatgacctctgctgaccccttctgatcttcaaagactccctgccccactctgaccccccagtcat

SEQ ID NO: 47676 - DNA, 80 bp, synthetic construct; identical to SEQ ID NO: 15778
  source 1..80: mol_type = other DNA

SEQ ID NO: 47677 - DNA, 80 bp, synthetic construct
  source 1..80: mol_type = other DNA
gaaagtaaccacaatattagtgaaggtttgagcatttaccaaagaccaggcattgaagaaagacctcaaaggtcaggagt

SEQ ID NO: 47678 - DNA, 80 bp, synthetic construct
  source 1..80: mol_type = other DNA
acctgaggttaggagttcgagaccagcctggccaacgtggtgaaaccccgtctctactaaaagtacaaaattagctgggt

SEQ ID NO: 47679 - DNA, 80 bp, synthetic construct; identical to SEQ ID NO: 15779
  source 1..80: mol_type = other DNA

SEQ ID NO: 47680 - DNA, 80 bp, synthetic construct
  source 1..80: mol_type = other DNA
aaaatcgtgcgcagagtccaggaagtgtcagccgtgctctactacctggaccaggtgggtggggccggaggggtctttct

SEQ ID NO: 47681 - DNA, 80 bp, synthetic construct
  source 1..80: mol_type = other DNA
ttagaatggatcgggggaggggtctgctgcttaatcttgcatctgggggcgggacagggaaggggcagatctttaggtct

SEQ ID NO: 47682 - DNA, 80 bp, synthetic construct
  source 1..80: mol_type = other DNA
gagacaaggttttccttctgccgtgtgagtcttaacctgaatatggacttcgacacagctgggcagtttcatccagggct

SEQ ID NO: 47683 - DNA, 80 bp, synthetic construct
  source 1..80: mol_type = other DNA
ggcagtcgtggcctgtttccgtatgacgcccctgtacaacctgcccacgtaaggcccccagggacaagggaagcgtgaag

SEQ ID NO: 47684 - DNA, 80 bp, synthetic construct; identical to SEQ ID NO: 15780
  source 1..80: mol_type = other DNA

SEQ ID NO: 47685 - DNA, 80 bp, synthetic construct
  source 1..80: mol_type = other DNA
agctcctggcttgagtagaaccaaagtagggcgcaggatgtgggaaaagagaaaaaaaaatccagaccaacagggacatg

SEQ ID NO: 47686 - DNA, 80 bp, synthetic construct
  source 1..80: mol_type = other DNA
aaaagaggtgaagactcttgccagggccccagaaatgcccccaaggtcctggggccacccccagcccagcagcttccctg

SEQ ID NO: 47687 - DNA, 80 bp, synthetic construct; identical to SEQ ID NO: 15781
  source 1..80: mol_type = other DNA

SEQ ID NO: 47688 - DNA, 80 bp, synthetic construct
  source 1..80: mol_type = other DNA
caacatacaccgttgcatggctgaacacttcacaagggcatgtctgaggggttcgtatcacagacaatgtagattaacta

SEQ ID NO: 47689 - DNA, 80 bp, synthetic construct
  source 1..80: mol_type = other DNA
cagacagaagtagtggggaggttttctgtaattccctcaaaagcttcatgtaggctaatgacaggcttagtaataaataa

SEQ ID NO: 47690 - DNA, 80 bp, synthetic construct
  source 1..80: mol_type = other DNA
accgccacactgtgagacggattattgcatctcctttgtgtggataagggaatgaaggcacagggatttatttttcattt

SEQ ID NO: 47691 - DNA, 80 bp, synthetic construct
  source 1..80: mol_type = other DNA
tttagtagagacgggctttcaccatgttggccatgcttgtctcaaactcctgacctcaagtgatcttcccgccttggcct

SEQ ID NO: 47692 - DNA, 80 bp, synthetic construct; identical to SEQ ID NO: 15782
  source 1..80: mol_type = other DNA

SEQ ID NO: 47693 - DNA, 80 bp, synthetic construct
  source 1..80: mol_type = other DNA
gcccagggtctttctagctttctgctctgcccttcttagcttttgtctgtagtcctgggtggatgctgcacttctaggca

SEQ ID NO: 47694 - DNA, 80 bp, synthetic construct
  source 1..80: mol_type = other DNA
ctcccgggttcaagcgattctcctgcctcagccttccgagtagctgggattacaggtgcatgccaccatgcccagctatt

SEQ ID NO: 47695 - DNA, 80 bp, synthetic construct; identical to SEQ ID NO: 15783
  source 1..80: mol_type = other DNA

SEQ ID NO: 47696 - DNA, 80 bp, synthetic construct
  source 1..80: mol_type = other DNA
tattaacatacccacccaattggatgactgtgagggtcagtttgttaatatatacaaggcacctagaacaggcactgaca

SEQ ID NO: 47697 - DNA, 80 bp, synthetic construct
  source 1..80: mol_type = other DNA
tggtgttagtgtaaacactcagcaggtgttggccattgtagaggagacccaagcagaaagggattggccatacttgttat

SEQ ID NO: 47698 - DNA, 80 bp, synthetic construct
  source 1..80: mol_type = other DNA
ggccaggagtttgagaccagcctgggcaacatagcaagaccctgtctctacaaaaaaatggaaaaattagccaggtgtgt

SEQ ID NO: 47699 - DNA, 80 bp, synthetic construct; identical to SEQ ID NO: 15784
  source 1..80: mol_type = other DNA

SEQ ID NO: 47700 - DNA, 80 bp, synthetic construct
  source 1..80: mol_type = other DNA
gagtacggtggcgcaatgtcagctcactgcaacctctgcctcccgggttcaagcaattctcctgcctcagcctcccgagt

SEQ ID NO: 47701 - DNA, 80 bp, synthetic construct
  source 1..80: mol_type = other DNA
ccgcaccctgcccagaagctcttataagatgggggtcctctccaccgggtcctgaccactcccctgcttacttccccagc

SEQ ID NO: 47702 - DNA, 80 bp, synthetic construct
  source 1..80: mol_type = other DNA
aactgatgccccctccccagagctgccacctggaggagggaggggagaacggtgaagctgaagaggaggttgaggtctcc

SEQ ID NO: 47703 - DNA, 80 bp, synthetic construct
  source 1..80: mol_type = other DNA
acaccacggagtgtacaccatggtcatgggggaagctcaggcagaggggtcagggctggaattggggaggctcaggcaga

SEQ ID NO: 47704 - DNA, 80 bp, synthetic construct; identical to SEQ ID NO: 15785
  source 1..80: mol_type = other DNA

SEQ ID NO: 47705 - DNA, 80 bp, synthetic construct
  source 1..80: mol_type = other DNA
tttctgtgccagagtcccttctggcatctggtgaagactttctcaggatcatgtttttaaatgtataaaatgaattcata

SEQ ID NO: 47706 - DNA, 80 bp, synthetic construct
  source 1..80: mol_type = other DNA
cacctgaggccaggagttcaagaccagcctggccaacatggtgaaaccccatctctactaaaaatacaaaaatgagctgg

SEQ ID NO: 47707 - DNA, 80 bp, synthetic construct
  source 1..80: mol_type = other DNA
agatccaacagctactataattgagaagtagtgatgaacataactgatatttaaagacatctttgagccattgtgagtga

SEQ ID NO: 47708 - DNA, 80 bp, synthetic construct; identical to SEQ ID NO: 15786
  source 1..80: mol_type = other DNA

SEQ ID NO: 47709 - DNA, 80 bp, synthetic construct
  source 1..80: mol_type = other DNA
cctcccaagtagctaggactacaggctcatgccaccacgcctggctaattttttgtatttttagtagaggcggggtttca

SEQ ID NO: 47710 - DNA, 80 bp, synthetic construct
  source 1..80: mol_type = other DNA
ggcttcatccatataggaaggaaatgcttcatttctgttagagggcggaaaacataaaaatgtaacttttcatcatccaa

SEQ ID NO: 47711 - DNA, 80 bp, synthetic construct; identical to SEQ ID NO: 15787
  source 1..80: mol_type = other DNA

SEQ ID NO: 47712 - DNA, 80 bp, synthetic construct
  source 1..80: mol_type = other DNA
agtgcactcatcctaacctcactcctcctggctcgcccattccctgtggacccatttgccgcccctcaatgcctgtggtt

SEQ ID NO: 47713 - DNA, 80 bp, synthetic construct
  source 1..80: mol_type = other DNA
acactgccttccaactgggtggaccatcttttttctcccactccctccaggagagacaggtgccatggtgtcctccaccc

SEQ ID NO: 47714 - DNA, 80 bp, synthetic construct
  source 1..80: mol_type = other DNA
cttaaggacaagaaggaagttggcttcttccagagtatccaggcactgatgcaaacatgcaggtaggttcgagtggacct

SEQ ID NO: 47715 - DNA, 80 bp, synthetic construct
  source 1..80: mol_type = other DNA
aatgtcatagacttgaagaatgagttgcattatgaattccagacagtggaaccaaaaacttgagaatttaaggggaactt

SEQ ID NO: 47716 - DNA, 80 bp, synthetic construct; identical to SEQ ID NO: 15788
  source 1..80: mol_type = other DNA

SEQ ID NO: 47717 - DNA, 80 bp, synthetic construct
  source 1..80: mol_type = other DNA
ggtgaatgaggatggcactggtgaggccctcccttgggcttcccaccccctgagacatcttcctttgggattcctcccac

SEQ ID NO: 47718 - DNA, 80 bp, synthetic construct
  source 1..80: mol_type = other DNA
gccaccagaagtcattctgtcttgtgttctcacccatcactacatggaccccaccctccacgtgccccaaatgtcacgcc

SEQ ID NO: 47719 - DNA, 80 bp, synthetic construct; identical to SEQ ID NO: 15789
  source 1..80: mol_type = other DNA

SEQ ID NO: 47720 - DNA, 80 bp, synthetic construct
  source 1..80: mol_type = other DNA
attcccccagcccacccccgtgctgtgctgctgtcacccacccctcctaaccccgtccacccctccacctaggggctgag

SEQ ID NO: 47721 - DNA, 80 bp, synthetic construct
  source 1..80: mol_type = other DNA
tttccccatgtgtgaagcagaagctagagaacatggtaaagatctctttccagctggatattgtcggacttccagaccca

SEQ ID NO: 47722 - DNA, 80 bp, synthetic construct
  source 1..80: mol_type = other DNA
cctctgtgcctgctctggttggcccatttgcggtctagcctcctcccctaccgcccaccatgatttgcttctttcagatg

SEQ ID NO: 47723 - DNA, 80 bp, synthetic construct; identical to SEQ ID NO: 15790
  source 1..80: mol_type = other DNA

SEQ ID NO: 47724 - DNA, 80 bp, synthetic construct
  source 1..80: mol_type = other DNA
ctcacagtgtctttggagtggcagctgctcctcccagcacccccatgctttgtgcatgcgtgtgcagtgtgcatgggcct

SEQ ID NO: 47725 - DNA, 80 bp, synthetic construct
  source 1..80: mol_type = other DNA
ggggtgtggggtggaggggaagccgaggtttggggctggtacggaagggttgactgaattagtttccgcccctcctcctc

SEQ ID NO: 47726 - DNA, 80 bp, synthetic construct
  source 1..80: mol_type = other DNA
aacatggtgaaaccccgtctctactaaaaatataaaaaaaatagcagggcgtggtggcacatgcttgtagtcccagctac

SEQ ID NO: 47727 - DNA, 80 bp, synthetic construct; identical to SEQ ID NO: 15791
  source 1..80: mol_type = other DNA

SEQ ID NO: 47728 - DNA, 80 bp, synthetic construct
  source 1..80: mol_type = other DNA
ataaaatctttgcagaggaaagatctgtacaaaggcctacagattctttcctatcttaagcaagagttttgttttgttgt

SEQ ID NO: 47729 - DNA, 80 bp, synthetic construct
  source 1..80: mol_type = other DNA
acatgtacagtctcaagattgtggttataacctttagcaggtgattaggaaaccacagactacccggaaatcaactttcg

SEQ ID NO: 47730 - DNA, 80 bp, synthetic construct
  source 1..80: mol_type = other DNA
aggataaagtatgatctctttgtcttgaattttcaaaagctcttgtgtccacaacgagtttttcaaggtttattaaatac

SEQ ID NO: 47731 - DNA, 80 bp, synthetic construct; identical to SEQ ID NO: 15792
  source 1..80: mol_type = other DNA

SEQ ID NO: 47732 - DNA, 80 bp, synthetic construct
  source 1..80: mol_type = other DNA
tcaggaatatgaagttttgaaaatgagaatgttgttatgaaagggattgctgtctcccaacatatttgcaacccagtcct

SEQ ID NO: 47733 - DNA, 80 bp, synthetic construct
  source 1..80: mol_type = other DNA
ttgcacatgtctataacaggtgttgtcagttgccagaattttttttacaggagctgtgtatcttttatttttgcatatag

SEQ ID NO: 47734 - DNA, 80 bp, synthetic construct
  source 1..80: mol_type = other DNA
tgttgagccaacctgatagagcaattgtgaactgactgtaaaaaagttaaggggaaagaaaaacggggggcaaaaatact

SEQ ID NO: 47735 - DNA, 80 bp, synthetic construct; identical to SEQ ID NO: 15793
  source 1..80: mol_type = other DNA

SEQ ID NO: 47736 - DNA, 80 bp, synthetic construct
  source 1..80: mol_type = other DNA
catatactacagtgtaataaacctccaatcatatactacagtgtaataaatctccaatcatatactacagtgtaataaac

SEQ ID NO: 47737 - DNA, 80 bp, synthetic construct
  source 1..80: mol_type = other DNA
acagtgtaataaacctccaatcatatactaaagtgtaataaacctccaatcatatactacagtgtaataaacctccaatc

SEQ ID NO: 47738 - DNA, 80 bp, synthetic construct
  source 1..80: mol_type = other DNA
ttaacagtttgctttcacagaacaatgttttttaaatagtgggaaccaacccatcagacagacgttcatgaatcagtttc

SEQ ID NO: 47739 - DNA, 80 bp, synthetic construct; identical to SEQ ID NO: 15794
  source 1..80: mol_type = other DNA

SEQ ID NO: 47740 - DNA, 80 bp, synthetic construct
  source 1..80: mol_type = other DNA
ggatcacaaggtcaggagttggagaccagcctgtccaatatggtgaaaccctgtctctactaaaaatgcaaaaaaattag

SEQ ID NO: 47741 - DNA, 80 bp, synthetic construct
  source 1..80: mol_type = other DNA
tcctaccatagattgcagtcagaaaagattaaaaaattactgcacaagaatataaacttcacaagggcaggggctggaca

SEQ ID NO: 47742 - DNA, 80 bp, synthetic construct
  source 1..80: mol_type = other DNA
aggtgggaggaccacttgaacccaggaggtcaaggctgcagtgagctatgatcatgccacagtactccaacctaggcaac

SEQ ID NO: 47743 - DNA, 80 bp, synthetic construct
  source 1..80: mol_type = other DNA
cgtgaggatgtagtatacactcaataaaatatgttgaataaatgaacaagtgaccaatccatatgttccctggcctttag

SEQ ID NO: 47744 - DNA, 80 bp, synthetic construct; identical to SEQ ID NO: 15795
  source 1..80: mol_type = other DNA

SEQ ID NO: 47745 - DNA, 80 bp, synthetic construct
  source 1..80: mol_type = other DNA
tgggattacaggcacatgccaccacacctggctaattttgtattttttttagtagagacgggatttcaccatgttggcca

SEQ ID NO: 47746 - DNA, 80 bp, synthetic construct
  source 1..80: mol_type = other DNA
gactgcaatggtgagatctccactcactgcaacctctgcctccggggttgaagcgattctcctgcctcagcctcccaagt

SEQ ID NO: 47747 - DNA, 80 bp, synthetic construct
  source 1..80: mol_type = other DNA
ccggccagtatttttagacaaatgaataaatgatcatccatctttctctgtcacatagtaagtacttgatagttattaaa

SEQ ID NO: 47748 - DNA, 80 bp, synthetic construct; identical to SEQ ID NO: 15796
  source 1..80: mol_type = other DNA

SEQ ID NO: 47749 - DNA, 80 bp, synthetic construct
  source 1..80: mol_type = other DNA
ggaatccatcagcgacttctactggtactactcgggcaaggatgtcattgaagagcagggcaagaggaacttctccaaag

SEQ ID NO: 47750 - DNA, 80 bp, synthetic construct
  source 1..80: mol_type = other DNA
ggtccctgcaccgggaaccagcagagcctggcgcacagtcgcctatgggacgcagtggtgggattcctgcacgtgttcgc

SEQ ID NO: 47751 - DNA, 80 bp, synthetic construct
  source 1..80: mol_type = other DNA
aaatccatcctctttctggattggctgtctgcatgaccccgcctcctcctctgcccctccctccccaccaatcagctggt

SEQ ID NO: 47752 - DNA, 80 bp, synthetic construct; identical to SEQ ID NO: 15797
  source 1..80: mol_type = other DNA

SEQ ID NO: 47753 - DNA, 80 bp, synthetic construct
  source 1..80: mol_type = other DNA
cgatctctgagagcattcacatcctacacataatggtgtatttattacaatagtttagttttccagcagatggcagtaaa

SEQ ID NO: 47754 - DNA, 80 bp, synthetic construct
  source 1..80: mol_type = other DNA
aaaaggagttaaacttagaatgcaattcctccgtgtcacagcagctgaagttgtgctgttggtatcctaaaattctagag

SEQ ID NO: 47755 - DNA, 80 bp, synthetic construct; identical to SEQ ID NO: 15798
  source 1..80: mol_type = other DNA

SEQ ID NO: 47756 - DNA, 80 bp, synthetic construct
  source 1..80: mol_type = other DNA
tgaaccaatcatcataggcttaggaaagaaagctttgactgaccaggcccggtcatatacccacctatagaaccaggagg

SEQ ID NO: 47757 - DNA, 80 bp, synthetic construct
  source 1..80: mol_type = other DNA
gcagaatgcagagctttggaactgtggaaatacattaggattggaatcaacaactgatagaactagcatgggagcaaaag

SEQ ID NO: 47758 - DNA, 80 bp, synthetic construct
  source 1..80: mol_type = other DNA
gagaccagcctcaccaacatggagaaaccccatctctgttaaaagtaaaaaattagctgggtatggtggcgcatgcctgt

SEQ ID NO: 47759 - DNA, 80 bp, synthetic construct; identical to SEQ ID NO: 15799
  source 1..80: mol_type = other DNA

SEQ ID NO: 47760 - DNA, 80 bp, synthetic construct
  source 1..80: mol_type = other DNA
cccagagtcccactcttgccatcacacattatattcaacatacatctgtcaatcccaccgtaggccaggcacagtgctgg

SEQ ID NO: 47761 - DNA, 80 bp, synthetic construct
  source 1..80: mol_type = other DNA
caaccccacccccacaatcttgtctctctgccccttcccctgcttccgaggaacatgtctggactcgggtcccctcggag

SEQ ID NO: 47762 - DNA, 80 bp, synthetic construct
  source 1..80: mol_type = other DNA
aggacatggtggtgatgttgctgtcgctactagaaggtaaacacccaggagtgagggtgagggaacagtaaagaggttca

SEQ ID NO: 47763 - DNA, 80 bp, synthetic construct
  source 1..80: mol_type = other DNA
cacctgaagtcaggagtttgagaccagcctgggcaacatggtgagaccctgtctctactaaaaatacaaaaattagccta

SEQ ID NO: 47764 - DNA, 80 bp, synthetic construct; identical to SEQ ID NO: 15800
  source 1..80: mol_type = other DNA

SEQ ID NO: 47765 - DNA, 80 bp, synthetic construct
  source 1..80: mol_type = other DNA
tgggactacaggcgcccgccaccacacctggctaatttttttttttttttttttgtatttttagtagagacggggtttca

SEQ ID NO: 47766 - DNA, 80 bp, synthetic construct
  source 1..80: mol_type = other DNA
acaaaaataaactggagccaagcttcagctgctgcctttagagggagtgtgggatcgcagtttgccaatctctacctctc

SEQ ID NO: 47767 - DNA, 80 bp, synthetic construct; identical to SEQ ID NO: 15801
  source 1..80: mol_type = other DNA

SEQ ID NO: 47768 - DNA, 80 bp, synthetic construct
  source 1..80: mol_type = other DNA
tcaagcaattctcgtgcctcagcctcccaagtagctggaaatacaagcacatgccaccacgcccagctgattttgtattt

SEQ ID NO: 47769 - DNA, 80 bp, synthetic construct
  source 1..80: mol_type = other DNA
aggatcagccaggttggcacaggaggctgacgcaggtcaggaagggacctgtggaggggaggctgtggctggccagggac

SEQ ID NO: 47770 - DNA, 80 bp, synthetic construct
  source 1..80: mol_type = other DNA
atccaatgtggagatgatcctcaagttcttcgacatgttcctgaaactcaaggacattgtgggctctgaagccttccagg

SEQ ID NO: 47771 - DNA, 80 bp, synthetic construct; identical to SEQ ID NO: 15802
  source 1..80: mol_type = other DNA

SEQ ID NO: 47772 - DNA, 80 bp, synthetic construct
  source 1..80: mol_type = other DNA
tcatgcctggctaatttttaagtttattttttgtagagatgtggtctcactacattacccaggctcctcttgaactcttg

SEQ ID NO: 47773 - DNA, 80 bp, synthetic construct
  source 1..80: mol_type = other DNA
attgtgaataggcatcagttattccatcaataaacattggctggctttcttctctgtgtagggcctgtagtgacactatt

SEQ ID NO: 47774 - DNA, 80 bp, synthetic construct
  source 1..80: mol_type = other DNA
tgggtttatagtctaatgggggaggcagtcactaactagaccattccaagtctaaataatgagcctgctaggagggaagt

SEQ ID NO: 47775 - DNA, 80 bp, synthetic construct
  source 1..80: mol_type = other DNA
cctataatcccagcaatttgggaggccgaggtgggaggatcgcttgagcccaagagttcgagatcagcctgggcaaccta

SEQ ID NO: 47776 - DNA, 80 bp, synthetic construct; identical to SEQ ID NO: 15803
  source 1..80: mol_type = other DNA

SEQ ID NO: 47777 - DNA, 80 bp, synthetic construct
  source 1..80: mol_type = other DNA
ttctcctgcctcagcctcctgagtagctgggattacaggcacgcaccaccatgcccagctaaatttgtgtgtgtgtgtgt

SEQ ID NO: 47778 - DNA, 80 bp, synthetic construct
  source 1..80: mol_type = other DNA
tagccaatttccctttactttgaaacacttcagcgtgtatctcctgagaacaaattcattctcctacctaagcacaggac

SEQ ID NO: 47779 - DNA, 80 bp, synthetic construct; identical to SEQ ID NO: 15804
  source 1..80: mol_type = other DNA

SEQ ID NO: 47780 - DNA, 80 bp, synthetic construct
  source 1..80: mol_type = other DNA
gtgtcctcagtgtaatgtattaggaggcacatgtggtttcatcccattactgtttattttcttatttatttgtttttaga

SEQ ID NO: 47781 - DNA, 80 bp, synthetic construct
  source 1..80: mol_type = other DNA
tactgttgttaacttggatggcttggttaactcggtgttcaccaggggctccacaatgaagttactgttattccctttgg

SEQ ID NO: 47782 - DNA, 80 bp, synthetic construct
  source 1..80: mol_type = other DNA
ggtggttttctcatttcgccgtatgctttaccatcactaggcaccattttactgtaagaaagagtgtttccttcttgtcc

SEQ ID NO: 47783 - DNA, 80 bp, synthetic construct
  source 1..80: mol_type = other DNA
tccgcctcctgggttcagtgattcttctgcctcagcctcccaagtcgctgggattacaggtatgcaccaccatgcctggc

SEQ ID NO: 47784 - DNA, 80 bp, synthetic construct; identical to SEQ ID NO: 15805
  source 1..80: mol_type = other DNA

SEQ ID NO: 47785 - DNA, 80 bp, synthetic construct
  source 1..80: mol_type = other DNA
tgtcaggctcctgaaactcctctgaccaagatcatcagtgacctctttacctctgactgtcccctctgacttgtcatctt

SEQ ID NO: 47786 - DNA, 80 bp, synthetic construct
  source 1..80: mol_type = other DNA
aagagctcatagttaccatattctcactctgtgccctgcgtataaatgaatttgctcatttagtccttacagcaacccta

SEQ ID NO: 47787 - DNA, 80 bp, synthetic construct; identical to SEQ ID NO: 15806
  source 1..80: mol_type = other DNA

SEQ ID NO: 47788 - DNA, 80 bp, synthetic construct
  source 1..80: mol_type = other DNA
tgcaaactccgcttcctgggttcaagcgattcttctgccttagcttcccgagtagctggactacaggcatgcgccaccac

SEQ ID NO: 47789 - DNA, 80 bp, synthetic construct
  source 1..80: mol_type = other DNA
ttttatggatgtggaaactgaggcacagggagattaaacggacatgcttaaggtcacccatcttaataagtgacaaggtt

SEQ ID NO: 47790 - DNA, 80 bp, synthetic construct
  source 1..80: mol_type = other DNA
gggtggctacaagagaagcaaaaagcatttgcaggagctaaagtacacatgattcacaattgaaaatgagtaatgatctc

SEQ ID NO: 47791 - DNA, 80 bp, synthetic construct; identical to SEQ ID NO: 15807
  source 1..80: mol_type = other DNA

SEQ ID NO: 47792 - DNA, 80 bp, synthetic construct
  source 1..80: mol_type = other DNA
ctaaaaatacagaaattagccaagcatggtggcaggtgcctgtaatcccggctactcaggaggctaaggcaggagaatcc

SEQ ID NO: 47793 - DNA, 80 bp, synthetic construct
  source 1..80: mol_type = other DNA
aaggcaggaggattgcttgaggccaggagttcaagaccagcctggacaatatagcaagaccccattgctaaaaaaaaaaa

SEQ ID NO: 47794 - DNA, 80 bp, synthetic construct
  source 1..80: mol_type = other DNA
gtctcaaaaaaacatttatcaaaatacagcaaggcgtgaagtgagaagtcttactcctgctcttttccaatccactcttc

SEQ ID NO: 47795 - DNA, 80 bp, synthetic construct
  source 1..80: mol_type = other DNA
aggaagtgtcgtcattcttttttacaggtgtccaatattccacgctgtgtgtatattatggtttatttgctattccttgt

SEQ ID NO: 47796 - DNA, 80 bp, synthetic construct; identical to SEQ ID NO: 15808
  source 1..80: mol_type = other DNA

SEQ ID NO: 47797 - DNA, 80 bp, synthetic construct
  source 1..80: mol_type = other DNA
aaaatacgaaaaaatagcgggcatggtggcatgcacctgtaatcccagctgcttgggaggctgaggcagagaattgcttg

SEQ ID NO: 47798 - DNA, 80 bp, synthetic construct
  source 1..80: mol_type = other DNA
atcacatcttcattgatgaagtactttgtagatttcaaaacatctactatagcttggaaggccctttctggtgtttgaaa

SEQ ID NO: 47799 - DNA, 80 bp, synthetic construct; identical to SEQ ID NO: 15809
  source 1..80: mol_type = other DNA

SEQ ID NO: 47800 - DNA, 80 bp, synthetic construct
  source 1..80: mol_type = other DNA
cattttaatcatcctttgaaaacgaaccccatacccattagcagtcatttcccacttcccccaccccagcccccggtaac

SEQ ID NO: 47801 - DNA, 80 bp, synthetic construct
  source 1..80: mol_type = other DNA
gaagagcctgggcaacatggcgaaaccctgtctccactaaaaatacaaaaaattagccgagtgtggtggcacatgcctgt

SEQ ID NO: 47802 - DNA, 80 bp, synthetic construct
  source 1..80: mol_type = other DNA
gtgtatgtgtgtgtggccttaaaagacgttccttttatttaacaaaccacaatgtcatcactcctaacccaaaataaaac

SEQ ID NO: 47803 - DNA, 80 bp, synthetic construct; identical to SEQ ID NO: 15810
  source 1..80: mol_type = other DNA

SEQ ID NO: 47804 - DNA, 80 bp, synthetic construct
  source 1..80: mol_type = other DNA
ttctttttccttgcaatttatctcctggagatccagtcctgcagatctttactgtccaacagaaatacaatatgagcaat

SEQ ID NO: 47805 - DNA, 80 bp, synthetic construct
  source 1..80: mol_type = other DNA
gcgccaccacacctggctaatttttgtatttttagtagagacaaggtttcgccatgttggccagggtagtctcaaactcc

SEQ ID NO: 47806 - DNA, 80 bp, synthetic construct
  source 1..80: mol_type = other DNA
ggcgggaggatcacttgaggccaggagtttgagccagcctgcgtaacacagcaaaaccctatctctataaaaactttaaa

SEQ ID NO: 47807 - DNA, 80 bp, synthetic construct
  source 1..80: mol_type = other DNA
aaagtaaaatgaaacactacacataatctagtacactcaggatattatttcaacatggaatcaatcctgtttatttattt

SEQ ID NO: 47808 - DNA, 80 bp, synthetic construct; identical to SEQ ID NO: 15811
  source 1..80: mol_type = other DNA

SEQ ID NO: 47809 - DNA, 80 bp, synthetic construct
  source 1..80: mol_type = other DNA
ccagatgccagcagctgtttctgctcaacactcagacatattcattcattagagattgcaaaatggcgatagtctcattt

SEQ ID NO: 47810 - DNA, 80 bp, synthetic construct
  source 1..80: mol_type = other DNA
gcccagcctcttagttttcatgatgcttccttcacttgacaaatgagtatgagtacctactgtgtgtcaggcactgccct

SEQ ID NO: 47811 - DNA, 80 bp, synthetic construct; identical to SEQ ID NO: 15812
  source 1..80: mol_type = other DNA

SEQ ID NO: 47812 - DNA, 80 bp, synthetic construct
  source 1..80: mol_type = other DNA
ctacttgggaggctgaggcaagagaatcacttgaacccaggagggggaggttgctgtgagccaagatcgcgtcattgcac

SEQ ID NO: 47813 - DNA, 80 bp, synthetic construct
  source 1..80: mol_type = other DNA
gattgcaccactgcactccagcatgggcaacagagtgagactctctcaaaaataaaataaaataatacaataaaatataa

SEQ ID NO: 47814 - DNA, 80 bp, synthetic construct
  source 1..80: mol_type = other DNA
gggtatggtggtgcatgcctgtggtcccaacttggaaggctaagacgggaggatcacttgagcccaggaggtcgaggcta

SEQ ID NO: 47815 - DNA, 80 bp, synthetic construct; identical to SEQ ID NO: 15813
  source 1..80: mol_type = other DNA

SEQ ID NO: 47816 - DNA, 80 bp, synthetic construct
  source 1..80: mol_type = other DNA
tgcctgtaatctcagctactcagaagactgaggcaggagaatcgcttgaaccctggaggcagaggtttcagtgagccaag

SEQ ID NO: 47817 - DNA, 80 bp, synthetic construct
  source 1..80: mol_type = other DNA
ggccagcctggccaacatggcgaaaccctgtctctactaaaaatacagaattagccagtgtggtggcacacgcctgtagt

SEQ ID NO: 47818 - DNA, 80 bp, synthetic construct
  source 1..80: mol_type = other DNA
atgaatgatgacacagagagatcagcaaatcacaagagcaaagtctaggagtgaatggaggtgatagtgtcccaggcgcc

SEQ ID NO: 47819 - DNA, 80 bp, synthetic construct
  source 1..80: mol_type = other DNA
ttacaggcacgcaccatcatgcctaactaatttttgtatttttagtagagacggggtttcaccatgttgtccaggctggt

SEQ ID NO: 47820 - DNA, 80 bp, synthetic construct; identical to SEQ ID NO: 15814
  source 1..80: mol_type = other DNA

SEQ ID NO: 47821 - DNA, 80 bp, synthetic construct
  source 1..80: mol_type = other DNA
ggaggtaatgaaattaatttagcaatgcgtaactcgtgaccagcatctttagaaataaaatagaacactgcagagtgtgc

SEQ ID NO: 47822 - DNA, 80 bp, synthetic construct
  source 1..80: mol_type = other DNA
acctcttgcaaaaatgcatgggcaatcagcacaagaatgttcaagaaaagtgttgtctgaaagaaatctgtgggtgaact

SEQ ID NO: 47823 - DNA, 80 bp, synthetic construct; identical to SEQ ID NO: 15815
  source 1..80: mol_type = other DNA

SEQ ID NO: 47824 - DNA, 80 bp, synthetic construct
  source 1..80: mol_type = other DNA
ggccgaggcgggtggatcacctgaggacaggagttcgagaccagcctggccaacatgatgaaaccctatctcactaaaaa

SEQ ID NO: 47825 - DNA, 80 bp, synthetic construct
  source 1..80: mol_type = other DNA
tgcactccagcctgggcgacaagagcgaaactccgtctcaaaaaaaaaaaaaaaaaaaaagagaaagaaaaagaaaaaaa

SEQ ID NO: 47826 - DNA, 80 bp, synthetic construct
  source 1..80: mol_type = other DNA
acttgagcccgggggtggggatggggacgagaggggatgtcttgaggctgggttgagctgtgattgcgccactgcactcc

SEQ ID NO: 47827 - DNA, 80 bp, synthetic construct; identical to SEQ ID NO: 15816
  source 1..80: mol_type = other DNA

SEQ ID NO: 47828 - DNA, 80 bp, synthetic construct
  source 1..80: mol_type = other DNA
gagcatccttgagtacttccgcccctacctgggccgcatcgagatcatgggcgcgtcacgccgcatcgagcgcatctact

SEQ ID NO: 47829 - DNA, 80 bp, synthetic construct
  source 1..80: mol_type = other DNA
tccggcaagcccacgcccacccttttgtacacatttcgtccagctgcgcccttgcacatccctggctcgcccctggccac

SEQ ID NO: 47830 - DNA, 80 bp, synthetic construct
  source 1..80: mol_type = other DNA
tctcacctcctcgaacctgcatggcgacacaccccttgctcaccttcccagtagcccccggcgtgccgtctcttggtcct

SEQ ID NO: 47831 - DNA, 80 bp, synthetic construct; identical to SEQ ID NO: 15817
  source 1..80: mol_type = other DNA

SEQ ID NO: 47832 - DNA, 80 bp, synthetic construct
  source 1..80: mol_type = other DNA
ctcctatgcccagcccacaaatgcttgaacatccctcacacactcgcttgccccaagggtacactcacgtggtcccggca

SEQ ID NO: 47833 - DNA, 80 bp, synthetic construct
  source 1..80: mol_type = other DNA
ctcacacacatagcccgggaggtttgcgcacccgtcacctccttcatgagtgggcccttcatatgtctcctcaggggaca

SEQ ID NO: 47834 - DNA, 80 bp, synthetic construct
  source 1..80: mol_type = other DNA
acagagtcccaggcccttgcacacctgccccgtgtgcccacgtccaccgtgcacactgagcctctcgtggttgcacactt

SEQ ID NO: 47835 - DNA, 80 bp, synthetic construct
  source 1..80: mol_type = other DNA
tgcagcatcctggcacccaggatgtccacacatccctgcctctgcaggaagcccctgttcaccacggcccttcccactca

SEQ ID NO: 47836 - DNA, 80 bp, synthetic construct; identical to SEQ ID NO: 15818
  source 1..80: mol_type = other DNA

SEQ ID NO: 47837 - DNA, 80 bp, synthetic construct
  source 1..80: mol_type = other DNA
ggcggggttttgccatgttggcaaggctggtcttgaactcctgacctcaggtgatccgcccgcctcggcctcccaaagtg

SEQ ID NO: 47838 - DNA, 80 bp, synthetic construct
  source 1..80: mol_type = other DNA
aggtccagagagttaattcaaaatcacccagctactcagtggcagaatcaggatttgaacccaggcaggctggctgcaga

SEQ ID NO: 47839 - DNA, 80 bp, synthetic construct
  source 1..80: mol_type = other DNA
agaaaacccgctagccctaggcttgtttgtgaggattaaatgagttttatggaaactgcttgtatggggcctggccttat

SEQ ID NO: 47840 - DNA, 80 bp, synthetic construct; identical to SEQ ID NO: 15819
  source 1..80: mol_type = other DNA

SEQ ID NO: 47841 - DNA, 80 bp, synthetic construct
  source 1..80: mol_type = other DNA
gctactcaggaggccgaggcatggggatcatgtgaaccctggggacgaaggttacagtgagacagcgtcacttcattcca

SEQ ID NO: 47842 - DNA, 80 bp, synthetic construct
  source 1..80: mol_type = other DNA
gattacaggggtgcgccaccacaccggctaatttttgcatttttagtagagacgggggtttcaccatgttggccaggctg

SEQ ID NO: 47843 - DNA, 80 bp, synthetic construct; identical to SEQ ID NO: 15820
  source 1..80: mol_type = other DNA

SEQ ID NO: 47844 - DNA, 80 bp, synthetic construct
  source 1..80: mol_type = other DNA
gcgcggcggaggcgggcgcggaaggcgcggaggagggcgcggcggggctcgagggcacggcggccacggcggcggcgggg

SEQ ID NO: 47845 - DNA, 80 bp, synthetic construct
  source 1..80: mol_type = other DNA
ctggcgcgggggcggcggcgggcgcgctgggcctgctctggggctcgctgttcggcggcggcctggtggagggcgccaag

SEQ ID NO: 47846 - DNA, 80 bp, synthetic construct
  source 1..80: mol_type = other DNA
tgcacgaggccgggccgggcggtgccgacggggcggtggccgtgaccgatgggggccccttccggcccgaaggggctggc

SEQ ID NO: 47847 - DNA, 80 bp, synthetic construct
  source 1..80: mol_type = other DNA
acacacagaggagagaactggctagggggatgggcacacgcacccacggaggacgcacccatggaggacgcacacgggga

SEQ ID NO: 47848 - DNA, 80 bp, synthetic construct; identical to SEQ ID NO: 15821
  source 1..80: mol_type = other DNA

SEQ ID NO: 47849 - DNA, 80 bp, synthetic construct
  source 1..80: mol_type = other DNA
atataaaaattagccgggcatggtggtgtgcgcctgtaatcccagctactcgggaggctgaggcaggagaatcgcttgaa

SEQ ID NO: 47850 - DNA, 80 bp, synthetic construct
  source 1..80: mol_type = other DNA
caagactaaaaaaagtcccgagacagggtcagggccactaggaaaagaccctcggagatactcgttgtgggaatgaagta

SEQ ID NO: 47851 - DNA, 80 bp, synthetic construct; identical to SEQ ID NO: 15822
  source 1..80: mol_type = other DNA

SEQ ID NO: 47852 - DNA, 80 bp, synthetic construct
  source 1..80: mol_type = other DNA
gatgcttgccctgtccctaggtggatggagtggaggaggagctcccgccagagccagagcccgagccggaaccagagctg

SEQ ID NO: 47853 - DNA, 80 bp, synthetic construct
  source 1..80: mol_type = other DNA
tcctcggcatcacccagcccagactcaggcacggaggaggggctctgagtaaaagaatcaagaaataaatgctccaacct

SEQ ID NO: 47854 - DNA, 80 bp, synthetic construct
  source 1..80: mol_type = other DNA
agaaaaaaaaatatggagagatagaaaaatgaaaactcccatctaactgccaggccttcgcatgtgctttcccgctgcct

SEQ ID NO: 47855 - DNA, 80 bp, synthetic construct; identical to SEQ ID NO: 15823
  source 1..80: mol_type = other DNA

SEQ ID NO: 47856 - DNA, 80 bp, synthetic construct
  source 1..80: mol_type = other DNA
tccaaagaaggaggaagctggaggcgaattctggggagaactggaggtgcagagggtgaagttcctggtaaggatccagc

SEQ ID NO: 47857 - DNA, 80 bp, synthetic construct
  source 1..80: mol_type = other DNA
ttcagatggccctcacttggttccttgtcccttccctgctcactatccttattccaacctccatacctctgttcatcggg

SEQ ID NO: 47858 - DNA, 80 bp, synthetic construct
  source 1..80: mol_type = other DNA
attcctggggaagcgttcatctcatccaggccaggaagaagggtgggtgttgggaggcaggtcccagggttccctccatc

SEQ ID NO: 47859 - DNA, 80 bp, synthetic construct; identical to SEQ ID NO: 15824
  source 1..80: mol_type = other DNA

SEQ ID NO: 47860 - DNA, 80 bp, synthetic construct
  source 1..80: mol_type = other DNA
ttccgtcagaatttgtgggaagaatgagggatggagggaaaggtggagagaaagagggagagatggaagatgttcctggc

SEQ ID NO: 47861 - DNA, 80 bp, synthetic construct
  source 1..80: mol_type = other DNA
cccaggttggagtgcagtggcacaatctcggctcactgcaagctctgactcctgggttcacgccattctcctgcctcagc

SEQ ID NO: 47862 - DNA, 80 bp, synthetic construct
  source 1..80: mol_type = other DNA
gccactgcacctggccgaatatttttaatctttttttttttttaattactgctccttgcagagcagggctaccctctagg

SEQ ID NO: 47863 - DNA, 80 bp, synthetic construct
  source 1..80: mol_type = other DNA
ggtgagagtaagaccttgactcaaaaaaaaaaaaaattccctttcatcttctgtaaagcaggcagggcgacaggtggggt

SEQ ID NO: 47864 - DNA, 80 bp, synthetic construct; identical to SEQ ID NO: 15825
  source 1..80: mol_type = other DNA

SEQ ID NO: 47865 - DNA, 80 bp, synthetic construct
  source 1..80: mol_type = other DNA
aaaactaactgagtgtggtggtgcatacctgtaatcccagctacttaggaggctgagtcatgagaatttgaacccggtag

SEQ ID NO: 47866 - DNA, 80 bp, synthetic construct
  source 1..80: mol_type = other DNA
agatcagcctggccaatatggtgaaaccctgtctctactaaaaatacacaaattagctgggcgtggtggcacacgcctgt

SEQ ID NO: 47867 - DNA, 80 bp, synthetic construct; identical to SEQ ID NO: 15826
  source 1..80: mol_type = other DNA

SEQ ID NO: 47868 - DNA, 80 bp, synthetic construct
  source 1..80: mol_type = other DNA
tccatgctgtgggatgggaggctcagcccctatcagaatttcagggttcctccactgaagggataaggtattgggctttg

SEQ ID NO: 47869 - DNA, 80 bp, synthetic construct
  source 1..80: mol_type = other DNA
cacccactgattctgttaagcatctttggtttcacataagctaaacagaagtttgcagggaggaagaaatgggccactca

SEQ ID NO: 47870 - DNA, 80 bp, synthetic construct; identical to SEQ ID NO: 15827
  source 1..80: mol_type = other DNA

SEQ ID NO: 47871 - DNA, 80 bp, synthetic construct
  source 1..80: mol_type = other DNA
ggaggctgaggcagtagaatcccttgaacccaggaggcaaaggttgcagtgagccgagattgcaccactacactccagcc

SEQ ID NO: 47872 - DNA, 80 bp, synthetic construct
  source 1..80: mol_type = other DNA
tagggctccactatcaagatgaaccaactctgtcttcagttctgtgccactcagttcaataggctaattcccaggtcaga

SEQ ID NO: 47873 - DNA, 80 bp, synthetic construct
  source 1..80: mol_type = other DNA
catttcaggtctcagactctccaccaggggaggacgacatggaaggctcagctgctggggatgtgtcaggtgcaggctct

SEQ ID NO: 47874 - DNA, 80 bp, synthetic construct
  source 1..80: mol_type = other DNA
ttggctataattgtctcaaggtgggcccatggccatggttctggggcaagggcttattggctgggtgggggtgggggcag

SEQ ID NO: 47875 - DNA, 80 bp, synthetic construct; identical to SEQ ID NO: 15828
  source 1..80: mol_type = other DNA

SEQ ID NO: 47876 - DNA, 80 bp, synthetic construct
  source 1..80: mol_type = other DNA
tctcacatcctggcccgatccctctgcctgtgccccacccccattccagccctgacccctatatgcccctacatcccagc

SEQ ID NO: 47877 - DNA, 80 bp, synthetic construct
  source 1..80: mol_type = other DNA
ccatccctgccctgacccctctgcccatgttccccacatcccagccctaagccctctgcctgggcctcatttctaccctt

SEQ ID NO: 47878 - DNA, 80 bp, synthetic construct; identical to SEQ ID NO: 15829
  source 1..80: mol_type = other DNA

SEQ ID NO: 47879 - DNA, 80 bp, synthetic construct
  source 1..80: mol_type = other DNA
gcgggcggatcacgaggtcaggagtttgagaccagcctggacaacatggtgaaatcccgtctctactaaaagtacaaaaa

SEQ ID NO: 47880 - DNA, 80 bp, synthetic construct
  source 1..80: mol_type = other DNA
gacaaaaaaaaaaaaacctagggtttcagtccctgcaggccctgcctcattctccccaagtcttactctttctttccata

SEQ ID NO: 47881 - DNA, 80 bp, synthetic construct
  source 1..80: mol_type = other DNA
cgtgttttaaaccctgtctccaggtgtgattcttactcaggtgcaatgagtgcaaaataaaaaaacatggccaggcacga

SEQ ID NO: 47882 - DNA, 80 bp, synthetic construct; identical to SEQ ID NO: 15830
  source 1..80: mol_type = other DNA

SEQ ID NO: 47883 - DNA, 80 bp, synthetic construct
  source 1..80: mol_type = other DNA
actttgggaggctgaggcaggaggatcccttgtgcccaggagttcaagaccagcctggacaacatagagagacctatatc

SEQ ID NO: 47884 - DNA, 80 bp, synthetic construct
  source 1..80: mol_type = other DNA
gacagagcaagaccctatgtctgggggccaaaaaaaaaacaagtaggaattggaagtgcaatgaatcaaagcacttcaaa

SEQ ID NO: 47885 - DNA, 80 bp, synthetic construct
  source 1..80: mol_type = other DNA
aacatggtgaaaccctgtctctactaaaaatacaaaaaaattagctgggcgtggcagtgggtgcctgtagtcacagctac

SEQ ID NO: 47886 - DNA, 80 bp, synthetic construct; identical to SEQ ID NO: 15831
  source 1..80: mol_type = other DNA

SEQ ID NO: 47887 - DNA, 80 bp, synthetic construct
  source 1..80: mol_type = other DNA
gcagtggggtccccactgttcaaggttcctacaagaaaagcagtggagccaggcgcaggtggctcacgcctgtaatccca

SEQ ID NO: 47888 - DNA, 80 bp, synthetic construct
  source 1..80: mol_type = other DNA
ggtgggggcatcacctgaggtcagaagttcaagaacagcctggccaacatggcaaaacctcgtctctactaaaaatacga

SEQ ID NO: 47889 - DNA, 80 bp, synthetic construct
  source 1..80: mol_type = other DNA
aggaaaaagaaaaacagtggagtttcagccaaccctgtcgtggctgacagctctgatccctctggccctaacatcttata

SEQ ID NO: 47890 - DNA, 80 bp, synthetic construct; identical to SEQ ID NO: 15832
  source 1..80: mol_type = other DNA

SEQ ID NO: 47891 - DNA, 80 bp, synthetic construct
  source 1..80: mol_type = other DNA
caaaaatacaaaaaattagcacggtaccgcatgcctgtagtcccagctactcaggaggctgaggtgggaggatcgcttaa

SEQ ID NO: 47892 - DNA, 80 bp, synthetic construct
  source 1..80: mol_type = other DNA
ggaggccgaggtgggcagatcacttgaggtcaggagtttgagaccagcctggacaacatggcaaaactgcatctctacta

SEQ ID NO: 47893 - DNA, 80 bp, synthetic construct
  source 1..80: mol_type = other DNA
gaaatactagttgaaagagaggaagttagcaatatgtcttaagcacacacactctggaaccagattgcctgcttttcttt

SEQ ID NO: 47894 - DNA, 80 bp, synthetic construct
  source 1..80: mol_type = other DNA
gagtagctgggattacaggcacccaccaccacgtctggctaatttttgtatttttagtagagacggggtttcgccatgtg

SEQ ID NO: 47895 - DNA, 80 bp, synthetic construct; identical to SEQ ID NO: 15833
  source 1..80: mol_type = other DNA

SEQ ID NO: 47896 - DNA, 80 bp, synthetic construct
  source 1..80: mol_type = other DNA
gtgttaaacaaaacagtgattctgaccttcaagttggaaagatagatgatgaacccaagtacagtatgtcagtggtgata

SEQ ID NO: 47897 - DNA, 80 bp, synthetic construct
  source 1..80: mol_type = other DNA
ccgggcatggtggtgcatgcctgtaatcccagctactcaggtggctgaggcaggagaatcgcttgaacccgggaggcaca

SEQ ID NO: 47898 - DNA, 80 bp, synthetic construct; identical to SEQ ID NO: 15834
  source 1..80: mol_type = other DNA

SEQ ID NO: 47899 - DNA, 80 bp, synthetic construct
  source 1..80: mol_type = other DNA
gaggtgactggagtctgacactcaagcatctctccccacccccgcccccacaggctcatgtccatcgatgtcaagtacca

SEQ ID NO: 47900 - DNA, 80 bp, synthetic construct
  source 1..80: mol_type = other DNA
aatgactcctgggaccctgagtggctgtgaccctagggtatcttcttatccacacaaggctccttatccccctagacatc

SEQ ID NO: 47901 - DNA, 80 bp, synthetic construct
  source 1..80: mol_type = other DNA
aaaatttaaaaattagctggggctgggcgtgctggcttacgcctgtagtcccagcactttgggaggccgaggcaggcaga

SEQ ID NO: 47902 - DNA, 80 bp, synthetic construct; identical to SEQ ID NO: 15835
  source 1..80: mol_type = other DNA

SEQ ID NO: 47903 - DNA, 80 bp, synthetic construct
  source 1..80: mol_type = other DNA
ctcaacaagctgcggtgggaggatggcttgagcccaggaggcagaggtttcagtgagctgcatgtgcaccactgcactcc

SEQ ID NO: 47904 - DNA, 80 bp, synthetic construct
  source 1..80: mol_type = other DNA
cccatctctactaaaaatacaaaaattagctgggtgtggtgacccacgcctgtggtcccagctactttggaggctaaggc

SEQ ID NO: 47905 - DNA, 80 bp, synthetic construct
  source 1..80: mol_type = other DNA
gcttagcctccttcacttgaacctgagaggcggaggttgcagtgagctgagattgcgccatagcattccagcctgggtga

SEQ ID NO: 47906 - DNA, 80 bp, synthetic construct
  source 1..80: mol_type = other DNA
acccggcccagaacatcctttggctccctcagtgtgcccttagattgccagattatttccttctggagggggctctcatc

SEQ ID NO: 47907 - DNA, 80 bp, synthetic construct; identical to SEQ ID NO: 15836
  source 1..80: mol_type = other DNA

SEQ ID NO: 47908 - DNA, 80 bp, synthetic construct
  source 1..80: mol_type = other DNA
ctgggctgaggaggggcaaggccaggtgcgctgagccgggggtgtgtggggcagcaaggtagagccacagggactgaacc

SEQ ID NO: 47909 - DNA, 80 bp, synthetic construct
  source 1..80: mol_type = other DNA
gtacaccgtggtggccttcaacttcttccgcaagttctacaacaagagcgaggatgaggatgaacctgacatgaagtgtg

SEQ ID NO: 47910 - DNA, 80 bp, synthetic construct; identical to SEQ ID NO: 15837
  source 1..80: mol_type = other DNA

SEQ ID NO: 47911 - DNA, 80 bp, synthetic construct
  source 1..80: mol_type = other DNA
aaatgaaaatagtacctacagtttggcaagctgatgcatgccaggcacattttttttttttttttttgagatggagtctc

SEQ ID NO: 47912 - DNA, 80 bp, synthetic construct
  source 1..80: mol_type = other DNA
accacacccagatactttttgtattcttaattttctttctttcttttttttttgagacagagtctggcccaggctggagt

SEQ ID NO: 47913 - DNA, 80 bp, synthetic construct
  source 1..80: mol_type = other DNA
atggtctcgatctcctgacctggtgatccgcccgcctgggcctcccaaagtgctgggattacaggcatgagccactgcgc

SEQ ID NO: 47914 - DNA, 80 bp, synthetic construct; identical to SEQ ID NO: 15838
  source 1..80: mol_type = other DNA

SEQ ID NO: 47915 - DNA, 80 bp, synthetic construct
  source 1..80: mol_type = other DNA
gtatttttagtagagatggaggtgggggggtctcacaatgttggccaggcttgtctcgaactcctgacctcaaatgatcc

SEQ ID NO: 47916 - DNA, 80 bp, synthetic construct
  source 1..80: mol_type = other DNA
cctatgccctgggggcctcacctgtaaaatgagtgtgtaatagtagttgcttttaggactaataggtgctccctggctat

SEQ ID NO: 47917 - DNA, 80 bp, synthetic construct
  source 1..80: mol_type = other DNA
gctgggcatggtggcgcatgcctgtaatcccagctactcgggaggctgagacaggagaatcacttgaacccgggaggtgg

SEQ ID NO: 47918 - DNA, 80 bp, synthetic construct
  source 1..80: mol_type = other DNA
aaagtttcacccaggccgggcgcagtgactcacgcctgtaatcccaacactgtgggaggctgaggcaagaggattgcttg

SEQ ID NO: 47919 - DNA, 80 bp, synthetic construct; identical to SEQ ID NO: 15839
  source 1..80: mol_type = other DNA

SEQ ID NO: 47920 - DNA, 80 bp, synthetic construct
  source 1..80: mol_type = other DNA
tctcattatagtcacttatcttagtttttactctaggatgactgtgttctctcacatcctggggacacggaaagaacaag

SEQ ID NO: 47921 - DNA, 80 bp, synthetic construct
  source 1..80: mol_type = other DNA
cctataatcccagctacctgggaggctgaggcaggagaatctcttgaaccccggaggcggaggttgcagtgagccgagat

SEQ ID NO: 47922 - DNA, 80 bp, synthetic construct
  source 1..80: mol_type = other DNA
gaggtcgcagtgagccaatattgcaccacagcactccagcctgggcaacagagcaagactctgtctcaaaaaaaaaaaaa

SEQ ID NO: 47923 - DNA, 80 bp, synthetic construct; identical to SEQ ID NO: 15840
  source 1..80: mol_type = other DNA

SEQ ID NO: 47924 - DNA, 80 bp, synthetic construct
  source 1..80: mol_type = other DNA
ccctgcctcatctctccctgctctcctgcacaggagctctattttccagcctcacccaaccattttcagttcctcacagc

SEQ ID NO: 47925 - DNA, 80 bp, synthetic construct
  source 1..80: mol_type = other DNA
atgcctccagcgggctgttaaagcttccagtgcttcccctagctcatccctggtcacactgtgcctccccaccccagcct

SEQ ID NO: 47926 - DNA, 80 bp, synthetic construct; identical to SEQ ID NO: 15841
  source 1..80: mol_type = other DNA

SEQ ID NO: 47927 - DNA, 80 bp, synthetic construct
  source 1..80: mol_type = other DNA
tgccccccatcccagccctgacccctctgcctgtgccccccttatcctggccctgacccctctgcctgtgccccccatcc

SEQ ID NO: 47928 - DNA, 80 bp, synthetic construct
  source 1..80: mol_type = other DNA
taccatgtcttcagccctgcctatcccggggccttggctggtactcagtgaatgtcgaatgaatgagtgaccagtgtgct

SEQ ID NO: 47929 - DNA, 80 bp, synthetic construct
  source 1..80: mol_type = other DNA
atcaccttcttcttcttcgtcatcgtcatcctgttggccatcatccagggtcagtgctgggagtgggcgctcagggcccg

SEQ ID NO: 47930 - DNA, 80 bp, synthetic construct; identical to SEQ ID NO: 15842
  source 1..80: mol_type = other DNA

SEQ ID NO: 47931 - DNA, 80 bp, synthetic construct
  source 1..80: mol_type = other DNA
tggtgcaatcttggctcactgcaacctctacctcccaggttcaagcgattcttctgcctcagcctcctgattagctggga

SEQ ID NO: 47932 - DNA, 80 bp, synthetic construct
  source 1..80: mol_type = other DNA
ccgcacccggccaataaaggcctaatactatcttcttaggaagcgagattaggggtgagattagggaaatgggggatgga

SEQ ID NO: 47933 - DNA, 80 bp, synthetic construct
  source 1..80: mol_type = other DNA
tgtctgggggtgacccagagggattacgggattcagggggtcaagtgggcctccactctgatgtctcttgccactcacag

SEQ ID NO: 47934 - DNA, 80 bp, synthetic construct
  source 1..80: mol_type = other DNA
tggggtacttagctttggccagttaggaaagggggtgtagtgtccatgtgggcagattccctgccagccaatcagaaggt

SEQ ID NO: 47935 - DNA, 80 bp, synthetic construct; identical to SEQ ID NO: 15843
  source 1..80: mol_type = other DNA

SEQ ID NO: 47936 - DNA, 80 bp, synthetic construct
  source 1..80: mol_type = other DNA
acgtggagccctttaacataaggccagtcagtaggtggcagtaaaaagctcctatcaatatcaagggttagggctggggg

SEQ ID NO: 47937 - DNA, 80 bp, synthetic construct
  source 1..80: mol_type = other DNA
atcccagctacttggaaagctgaggtgggagaatcgcttgaacccaggaggcagaagttgcagtgagccaagatcatgcc

SEQ ID NO: 47938 - DNA, 80 bp, synthetic construct
  source 1..80: mol_type = other DNA
accctttctctattaaaaaattagccaggggtggtggtgtgcacctgtagtcccagctactctggagactgaggtggaga

SEQ ID NO: 47939 - DNA, 80 bp, synthetic construct; identical to SEQ ID NO: 15844
  source 1..80: mol_type = other DNA

SEQ ID NO: 47940 - DNA, 80 bp, synthetic construct
  source 1..80: mol_type = other DNA
attgtttcccccaagaaaaacaagatgacagcagaggctaaagtcatgtttattgggagatgaggacatgccatgaccac

SEQ ID NO: 47941 - DNA, 80 bp, synthetic construct
  source 1..80: mol_type = other DNA
tcattcatatgttcattgattcattaattcacaaagtagttaatagagactgtgccagccccatgctgaactatagcagt

SEQ ID NO: 47942 - DNA, 80 bp, synthetic construct; identical to SEQ ID NO: 15845
  source 1..80: mol_type = other DNA

SEQ ID NO: 47943 - DNA, 80 bp, synthetic construct
  source 1..80: mol_type = other DNA
aaggacacaggggctacttaaagtggttcccactggctaaatttaagaccatttgtgcctcaaaataaataatgacaagg

SEQ ID NO: 47944 - DNA, 80 bp, synthetic construct
  source 1..80: mol_type = other DNA
actacaaaaattatccaggtccatcctggctaacacggtgaaaccccatctctactaaaaatacaaaaaaaaattagcca

SEQ ID NO: 47945 - DNA, 80 bp, synthetic construct
  source 1..80: mol_type = other DNA
gacagagcgagcctctgtctcaaaaaaaaaaaaaaaaatttatccaggcatggtggtgcacgcctgtaatcccagctatt

SEQ ID NO: 47946 - DNA, 80 bp, synthetic construct
  source 1..80: mol_type = other DNA
aatccatgagaccatgctggtataaagaaagaagaatggagaagacacagctcttctttagagtagaatgccaactaaca

SEQ ID NO: 47947 - DNA, 80 bp, synthetic construct; identical to SEQ ID NO: 15846
  source 1..80: mol_type = other DNA

SEQ ID NO: 47948 - DNA, 80 bp, synthetic construct
  source 1..80: mol_type = other DNA
caataaaactagtgggtgaaaatctgatgagaaacaacgtatttacagactatttacctcgtctcagtgaatctccccaa

SEQ ID NO: 47949 - DNA, 80 bp, synthetic construct
  source 1..80: mol_type = other DNA
atgcccggctaattttgtatttttagtagagacagggtttctccacattggtcaggctggtctcaaactcccgacctcag

SEQ ID NO: 47950 - DNA, 80 bp, synthetic construct
  source 1..80: mol_type = other DNA
cttgagtccaggagttccagaccaggctaagtaacatggcgaaaccctgtctgtacaaaaaatacgaaaataagccaggt

SEQ ID NO: 47951 - DNA, 80 bp, synthetic construct; identical to SEQ ID NO: 15847
  source 1..80: mol_type = other DNA

SEQ ID NO: 47952 - DNA, 80 bp, synthetic construct
  source 1..80: mol_type = other DNA
agacaaaagaagttttaattattttttccggcttaattataaagaaacatggctcctaagtgccacctatgatcttggac

SEQ ID NO: 47953 - DNA, 80 bp, synthetic construct
  source 1..80: mol_type = other DNA
tgcagtggcgtaatctcggctcactgcaacctccacctctccgattcaagtgattctcctgcctcagcctcccagctggg

SEQ ID NO: 47954 - DNA, 80 bp, synthetic construct; identical to SEQ ID NO: 15848
  source 1..80: mol_type = other DNA

SEQ ID NO: 47955 - DNA, 80 bp, synthetic construct
  source 1..80: mol_type = other DNA
atgtgtggtgtgtgcgcataagaaagagaagaggccgggcatggtggcacatgcctgtaatcccagctactcgggaggct

SEQ ID NO: 47956 - DNA, 80 bp, synthetic construct
  source 1..80: mol_type = other DNA
aggtacagtggctcacgcctgtaatcccagcactttgggaggcagaggtgggtggatcacctgaggtcaagagttcgaga

SEQ ID NO: 47957 - DNA, 80 bp, synthetic construct
  source 1..80: mol_type = other DNA
cactccagcctgggccacacagcaagactccatctcaaaaaaaaaaaaaaaaaaagatctggttaatctggataaaaggg

SEQ ID NO: 47958 - DNA, 80 bp, synthetic construct
  source 1..80: mol_type = other DNA
gaggccgaggcgggcagatcacctgagatcaggggttcaagagcagcctggacaacatggcgaaagcctgtctctactaa

SEQ ID NO: 47959 - DNA, 80 bp, synthetic construct; identical to SEQ ID NO: 15849
  source 1..80: mol_type = other DNA

SEQ ID NO: 47960 - DNA, 80 bp, synthetic construct
  source 1..80: mol_type = other DNA
ctgcagtgagctgtgtgtgtaacactgcacttcagcctgcgcaacagaatgagaccttgtctcaaaaatgaaataaaatt

SEQ ID NO: 47961 - DNA, 80 bp, synthetic construct
  source 1..80: mol_type = other DNA
tgtaaacccagctacttgggaggctgaagcatgagaatcacttgaacctgggaggcagaggttgcagtgagctgagattg

SEQ ID NO: 47962 - DNA, 80 bp, synthetic construct
  source 1..80: mol_type = other DNA
gtggatcaccgaggtcaggagttcgagaccagcctggccaacatggtgaaatgccatctctactaaaaaatatagtatta

SEQ ID NO: 47963 - DNA, 80 bp, synthetic construct; identical to SEQ ID NO: 15850
  source 1..80: mol_type = other DNA

SEQ ID NO: 47964 - DNA, 80 bp, synthetic construct
  source 1..80: mol_type = other DNA
caggtgagacactgtccaggctagagataccttgctggggacacctcagaatgctctcttcacatcagaagccccctccc

SEQ ID NO: 47965 - DNA, 80 bp, synthetic construct
  source 1..80: mol_type = other DNA
gacagcaaggagctgggcacggtggctcacgcctgtaatcccagcactttgggaggccgaagtgggtggatcacctgagg

SEQ ID NO: 47966 - DNA, 80 bp, synthetic construct; identical to SEQ ID NO: 15851
  source 1..80: mol_type = other DNA

SEQ ID NO: 47967 - DNA, 80 bp, synthetic construct
  source 1..80: mol_type = other DNA
aaagtgtaagggcaaagtctgacacagtattctgtgagataaacaccattttccaaatgaggacagtgaggcacaggaag

SEQ ID NO: 47968 - DNA, 80 bp, synthetic construct
  source 1..80: mol_type = other DNA
ccagacagtcttgtcttaactatccatatatctctatagtggtccccattttacagttggggaacagaagcttaaagaga

SEQ ID NO: 47969 - DNA, 80 bp, synthetic construct
  source 1..80: mol_type = other DNA
tagctatggttgcaccactgcacttcagcctggacaagagagagagaccctatctccaaaacaaacaggccgggtgaagt

SEQ ID NO: 47970 - DNA, 80 bp, synthetic construct; identical to SEQ ID NO: 15852
  source 1..80: mol_type = other DNA

SEQ ID NO: 47971 - DNA, 80 bp, synthetic construct
  source 1..80: mol_type = other DNA
gagtttgagactagcctgggcaacatggtgaaaccctgtctctactaaaaatacaaaaaaattagctaagcatggcggca

SEQ ID NO: 47972 - DNA, 80 bp, synthetic construct
  source 1..80: mol_type = other DNA
atctatctatctatctatctatctataaaataggccgggtgtggtggctgacagctgtaatcccagcactttgggaggcc

SEQ ID NO: 47973 - DNA, 80 bp, synthetic construct
  source 1..80: mol_type = other DNA
cccagctacttgggaggccgaggcaggagaatcgcgtgaacccgggaggtggaggttgcagtgagccgggatcgcaccac

SEQ ID NO: 47974 - DNA, 80 bp, synthetic construct
  source 1..80: mol_type = other DNA
ccaggtcatgtaagccatttattggtttgttttaaaaatatgtattttatttatacatgaagtttggtgagaagtgctcg

SEQ ID NO: 47975 - DNA, 80 bp, synthetic construct
  source 1..80: mol_type = other DNA
ctcccacccccaaccacaccgtctgcagccagccccaggcacctgtctcaaagctcccgggctgtccacacacacaaaaa

SEQ ID NO: 47976 - DNA, 80 bp, synthetic construct
  source 1..80: mol_type = other DNA
aaagcatggagatctacaaaaataggatttccacttggagaaatgtcgctgggacagttaaaccgtgtcccacactggac

SEQ ID NO: 47977 - DNA, 80 bp, synthetic construct
  source 1..80: mol_type = other DNA
cggcgaggtaggttaggagcagccagcccagagccggcaggtgagactgaggtggcctgggaggcatgcgcccggtggag

SEQ ID NO: 47978 - DNA, 80 bp, synthetic construct; identical to SEQ ID NO: 15853
  source 1..80: mol_type = other DNA

SEQ ID NO: 47979 - DNA, 80 bp, synthetic construct
  source 1..80: mol_type = other DNA
cactcccatgtctctgtgtctggagaggagctggagaccacacagaaaactcctccgcgtatggtccagagagccctggg

SEQ ID NO: 47980 - DNA, 80 bp, synthetic construct; identical to SEQ ID NO: 15854
  source 1..80: mol_type = other DNA

SEQ ID NO: 47981 - DNA, 80 bp, synthetic construct
  source 1..80: mol_type = other DNA
gggccggcagggaaaggcctgtctcccttaggctgggagcctgggtcccacggcctgtgtctggcctccgtgtgtgagga

SEQ ID NO: 47982 - DNA, 80 bp, synthetic construct
  source 1..80: mol_type = other DNA
ctcttgttcagggttaagaagagacagcgtgaattgctgcccatgtccatggaaaaatccttagttctttgctcaagtaa

SEQ ID NO: 47983 - DNA, 80 bp, synthetic construct
  source 1..80: mol_type = other DNA
ggccaactgctccggctgtccacgcggcgccacagaactctgcctggttgatccgcggggctgaggcccatttcttactc

SEQ ID NO: 47984 - DNA, 80 bp, synthetic construct
  source 1..80: mol_type = other DNA
cactgtggctgtagtcagacccccgcacctggaggttatcgctggtggctctagtgacactgtcataggagggtgggaag

SEQ ID NO: 47985 - DNA, 80 bp, synthetic construct; identical to SEQ ID NO: 15855
  source 1..80: mol_type = other DNA

SEQ ID NO: 47986 - DNA, 80 bp, synthetic construct
  source 1..80: mol_type = other DNA
tccatgcaatggatgcggtccccactcaccatgggcaggtccatgttgatgaggcttatctggttgggcttggcgatacg

SEQ ID NO: 47987 - DNA, 80 bp, synthetic construct
  source 1..80: mol_type = other DNA
aggatgatggcaatgtacatgttgaccacgatgaggaaggagatgatgatgtaggtggtgaagaagaggatgcccacggc

SEQ ID NO: 47988 - DNA, 80 bp, synthetic construct; identical to SEQ ID NO: 15856
  source 1..80: mol_type = other DNA

SEQ ID NO: 47989 - DNA, 80 bp, synthetic construct
  source 1..80: mol_type = other DNA
atgatgtccgagagcacagtgcctgtgggaaacaacagagactgtggctactggtggcacctctgtcttccagccagcat

SEQ ID NO: 47990 - DNA, 80 bp, synthetic construct
  source 1..80: mol_type = other DNA
ctttgcagggttccttctcagccccctcattccttaatcttcagtgtgtacctacacaatagagctgtcctaggcccatc

SEQ ID NO: 47991 - DNA, 80 bp, synthetic construct
  source 1..80: mol_type = other DNA
cagctccaccccagcccattgcatcttaagaagcccagatgatttatgtgcccatcgaagggcatgaaacactggcccag

SEQ ID NO: 47992 - DNA, 80 bp, synthetic construct
  source 1..80: mol_type = other DNA
tgactacctgggtttggagttttaaggggcatggatataaatcatggaataaagagtgaaataaacttgtcttatatggc

SEQ ID NO: 47993 - DNA, 80 bp, synthetic construct; identical to SEQ ID NO: 15857
  source 1..80: mol_type = other DNA

SEQ ID NO: 47994 - DNA, 80 bp, synthetic construct
  source 1..80: mol_type = other DNA
gttccattcctgctgctgacatcctgcattctctaaaactcctctccagtcccataaggcacgctctcaccctcatcctg

SEQ ID NO: 47995 - DNA, 80 bp, synthetic construct
  source 1..80: mol_type = other DNA
agagccccttgggggtagagttaaagagtttgggctccgagcacaagtgacaaaagaaaaaatataagtaaactggactt

SEQ ID NO: 47996 - DNA, 80 bp, synthetic construct
  source 1..80: mol_type = other DNA
aaggaagatatataaatgaccaacatgcacatggaaagatgtcctgcatcgttagtcatcagtcatttgcttttgcaaac

SEQ ID NO: 47997 - DNA, 80 bp, synthetic construct; identical to SEQ ID NO: 15858
  source 1..80: mol_type = other DNA

SEQ ID NO: 47998 - DNA, 80 bp, synthetic construct
  source 1..80: mol_type = other DNA
tataaaaaaaagatctgggctccgaggtcaaacagacatgggtcaggattgggtctctgcttctccctagctgcacaatc

SEQ ID NO: 47999 - DNA, 80 bp, synthetic construct
  source 1..80: mol_type = other DNA
catcctgagcttccttctccttcaacctaagtgcaggcagaattagcctccacagcacccactcccattcccagactcat

SEQ ID NO: 48000 - DNA, 80 bp, synthetic construct
  source 1..80: mol_type = other DNA
aggggagaaggggggtgagaaatgcactgaaaaaaattatgaaagaagctagggttgtacatggcattcagcagagaccc

SEQ ID NO: 48001 - DNA, 80 bp, synthetic construct; identical to SEQ ID NO: 15859
  source 1..80: mol_type = other DNA

SEQ ID NO: 48002 - DNA, 80 bp, synthetic construct
  source 1..80: mol_type = other DNA
gcctctcatcccagaccacccaccctcccactctaccctctagtgagcccaaagcccctgcaacactgccacagagagtg

SEQ ID NO: 48003 - DNA, 80 bp, synthetic construct
  source 1..80: mol_type = other DNA
attgtgcttcccttttagttcccacagtctgaaggctcaagggcaaatttaaacttcaaccttagtaattatgtcagtgc

SEQ ID NO: 48004 - DNA, 80 bp, synthetic construct
  source 1..80: mol_type = other DNA
ttatatatatatatatatatatatatatatatatatatatatatatatattttttttttttttttttttcttctgttctc

SEQ ID NO: 48005 - DNA, 80 bp, synthetic construct; identical to SEQ ID NO: 15860
  source 1..80: mol_type = other DNA

SEQ ID NO: 48006 - DNA, 80 bp, synthetic construct
  source 1..80: mol_type = other DNA
gatgctacatccttatcataccttcctccctatctctacgaggctgggacctctcttcatgatcagacatctgatagtgc

SEQ ID NO: 48007 - DNA, 80 bp, synthetic construct
  source 1..80: mol_type = other DNA
gcttcttcatggcattgtagtacttcttctgctcctctgtcatgaagatgtcctggccccctaagtgcaaagagaaggca

SEQ ID NO: 48008 - DNA, 80 bp, synthetic construct
  source 1..80: mol_type = other DNA
ggggccctgtcccttttcaccttgagatctctctggctttatgacctgcaaatccagtatccacccccctacccttttct

SEQ ID NO: 48009 - DNA, 80 bp, synthetic construct
  source 1..80: mol_type = other DNA
cagcttctcccaggagtctcatctcttaggtggattagggcaggcatggggcctcccaccaaagccccttcttacgttct

SEQ ID NO: 48010 - DNA, 80 bp, synthetic construct; identical to SEQ ID NO: 15861
  source 1..80: mol_type = other DNA

SEQ ID NO: 48011 - DNA, 80 bp, synthetic construct
  source 1..80: mol_type = other DNA
tgaagaaagacccaaagatgatgaaaatgacaaaatagatgtacatgtagaggttgtattcccactgaggctgctcttca

SEQ ID NO: 48012 - DNA, 80 bp, synthetic construct
  source 1..80: mol_type = other DNA
ctgtgggccagaggtgggtagggatagaggtgagaggagtggatggtggcaggtgaggacagcagacatgctgagctcag

SEQ ID NO: 48013 - DNA, 80 bp, synthetic construct
  source 1..80: mol_type = other DNA
cctggggtaaaagtcagtaaactacagtgagtttaatttgaaagacatttgagaattctgggacttcttaggagaccaag

SEQ ID NO: 48014 - DNA, 80 bp, synthetic construct; identical to SEQ ID NO: 15862
  source 1..80: mol_type = other DNA

SEQ ID NO: 48015 - DNA, 80 bp, synthetic construct
  source 1..80: mol_type = other DNA
atgccccaagaaggccatgcagcagggaataagcttcttgattgaggccgagagtctgagggggcttgcaggaggtctgc

SEQ ID NO: 48016 - DNA, 80 bp, synthetic construct
  source 1..80: mol_type = other DNA
catggactttcaagggaagttcccgaagaatctcaaccttcccttgtacttaagggggttcttttgtcaatggtgtgttg

SEQ ID NO: 48017 - DNA, 80 bp, synthetic construct; identical to SEQ ID NO: 15863
  source 1..80: mol_type = other DNA

SEQ ID NO: 48018 - DNA, 80 bp, synthetic construct
  source 1..80: mol_type = other DNA
cacaccaagggagtaaagagggaggctgaaccagagggggccctagtgctggtggcattgtctgccctagtctgggctgc

SEQ ID NO: 48019 - DNA, 80 bp, synthetic construct
  source 1..80: mol_type = other DNA
tcagctcactgcaacctctgcctcccgagttcaagtgattctcctgcctcagcctcctgaatagctgggattacaggcgt

SEQ ID NO: 48020 - DNA, 80 bp, synthetic construct
  source 1..80: mol_type = other DNA
ttcctttctaagcacaagctcaggtacacaaacttcctgtgtcgaagaattcttatgaggcaggtagggcagaaggggaa

SEQ ID NO: 48021 - DNA, 80 bp, synthetic construct; identical to SEQ ID NO: 15864
  source 1..80: mol_type = other DNA

SEQ ID NO: 48022 - DNA, 80 bp, synthetic construct
  source 1..80: mol_type = other DNA
acagcaagacaagcaagttgcagctctatgcattgtggttctattgcattggtcaaggctaatggtaggttaattttatg

SEQ ID NO: 48023 - DNA, 80 bp, synthetic construct
  source 1..80: mol_type = other DNA
agtgcagtggtgagatctcagctcacagcaagctccacctcccgggttcacgccattctcctgcctcagcctcccgagta

SEQ ID NO: 48024 - DNA, 80 bp, synthetic construct
  source 1..80: mol_type = other DNA
tgcgtctggctggaaatatgttcttttaaacaacacaagagctaacactatattttataacagagggtggccacagtcac

SEQ ID NO: 48025 - DNA, 80 bp, synthetic construct; identical to SEQ ID NO: 15865
  source 1..80: mol_type = other DNA

SEQ ID NO: 48026 - DNA, 80 bp, synthetic construct
  source 1..80: mol_type = other DNA
cacgttgtcaaagttgactttcaccttggtccagtacaattctccggtcaagttcaaggactcacactggctcttgttgt

SEQ ID NO: 48027 - DNA, 80 bp, synthetic construct
  source 1..80: mol_type = other DNA
attgaccaccacctcaagtggacagagaagtggctcagttcctgggggtgcccagagcacatgcccttttcaagaccccc

SEQ ID NO: 48028 - DNA, 80 bp, synthetic construct
  source 1..80: mol_type = other DNA
ttcccttcttggccctgccctgaatctgtgttctttaaaatctgattttcaccaaggtgtgtgctgattgaggataccag

SEQ ID NO: 48029 - DNA, 80 bp, synthetic construct; identical to SEQ ID NO: 15866
  source 1..80: mol_type = other DNA

SEQ ID NO: 48030 - DNA, 80 bp, synthetic construct
  source 1..80: mol_type = other DNA
ggaggtgaagctggtgtggactgtgtggtgtgggccagatgccaggttgggggatgctgttccccagcaggcacgctgaa

SEQ ID NO: 48031 - DNA, 80 bp, synthetic construct
  source 1..80: mol_type = other DNA
caaatgtccttgctcccaaagagacatttaactctgaacattatcttgtggatggtttcccaccaggaataagctatgtg

SEQ ID NO: 48032 - DNA, 80 bp, synthetic construct
  source 1..80: mol_type = other DNA
gggtcagtgagagacaaacaaacatgtcttctgaagccacacagaactggtatgttttgttaaaaaaaatatcccacgca

SEQ ID NO: 48033 - DNA, 80 bp, synthetic construct; identical to SEQ ID NO: 15867
  source 1..80: mol_type = other DNA

SEQ ID NO: 48034 - DNA, 80 bp, synthetic construct
  source 1..80: mol_type = other DNA
tgtctgccaggaggcagggcatgcagaggggcacacagagtgggcacacagagtgggcacacagagatgcagccctgcag

SEQ ID NO: 48035 - DNA, 80 bp, synthetic construct
  source 1..80: mol_type = other DNA
tgcctagcctcagggtgcctccatgcccagctgtgcctctcctggaggttctgggccatgctcctaccaagtcagcctcg

SEQ ID NO: 48036 - DNA, 80 bp, synthetic construct
  source 1..80: mol_type = other DNA
tgcacgcagcgtccgcagtgacttgatggggcccatctcggcaaagcccagggtgttggccaccaggctgaccagagaga

SEQ ID NO: 48037 - DNA, 80 bp, synthetic construct
  source 1..80: mol_type = other DNA
aggccagctctgcactgggccaggcttcccagagcccaagctggggcaagcccaagagtatcctggcttctgggccttta

SEQ ID NO: 48038 - DNA, 80 bp, synthetic construct; identical to SEQ ID NO: 15868
  source 1..80: mol_type = other DNA

SEQ ID NO: 48039 - DNA, 80 bp, synthetic construct
  source 1..80: mol_type = other DNA
gtggattttatccttctaaagctccatgggcatccactcccttcttacttcaccgctggcctgtgatcacaggccaaaaa

SEQ ID NO: 48040 - DNA, 80 bp, synthetic construct
  source 1..80: mol_type = other DNA
aggaagacacgccagactgatttctgtgttgcccccactcacccctcaaggatgctgggctattggcccccaatcctgga

SEQ ID NO: 48041 - DNA, 80 bp, synthetic construct; identical to SEQ ID NO: 15869
  source 1..80: mol_type = other DNA

SEQ ID NO: 48042 - DNA, 80 bp, synthetic construct
  source 1..80: mol_type = other DNA
ccttccaattccgcccccctacccccatttcattctaaatcaaaggccatattttttcaaaggcagcaatctggctgcat

SEQ ID NO: 48043 - DNA, 80 bp, synthetic construct
  source 1..80: mol_type = other DNA
ccaacttcaaacccgctcaaatgtgaccaaagtgcgcctactctgatcatcctatttaaaagtggtaacctgcaccttcc

SEQ ID NO: 48044 - DNA, 80 bp, synthetic construct
  source 1..80: mol_type = other DNA
tattgaaaaataatgcagaattcatcttggaaacatccttccctagactctgaggcctgagacaaactttcccatgaagc

SEQ ID NO: 48045 - DNA, 80 bp, synthetic construct; identical to SEQ ID NO: 15870
  source 1..80: mol_type = other DNA

SEQ ID NO: 48046 - DNA, 80 bp, synthetic construct
  source 1..80: mol_type = other DNA
tgtgtctagagctctccttgccccccttccaccccagcaccccctcaccccagcattagcatcctcttggccacctgggg

SEQ ID NO: 48047 - DNA, 80 bp, synthetic construct
  source 1..80: mol_type = other DNA
tgagcctctgagtggggtatggagactgcacaggcctgagcctgttctgtaaccacaggaaggatagctcctgctggtat

SEQ ID NO: 48048 - DNA, 80 bp, synthetic construct
  source 1..80: mol_type = other DNA
gtgcaaacccaggcctgccctgcaccgacccgtttctctctgcttggctactctccctcttgactgacgtcaggccccct

SEQ ID NO: 48049 - DNA, 80 bp, synthetic construct; identical to SEQ ID NO: 15871
  source 1..80: mol_type = other DNA

SEQ ID NO: 48050 - DNA, 80 bp, synthetic construct
  source 1..80: mol_type = other DNA
atctgtctagtgggcctgatggacacttacagtctgctgtggtgtgtgctagagcacaagcttgtctgctcacttccctt

SEQ ID NO: 48051 - DNA, 80 bp, synthetic construct
  source 1..80: mol_type = other DNA
tgagcctgggaacctgaggacaaggcctgggtcactcagacttacgtcctccttcctctctgcctgccccacagcactgc

SEQ ID NO: 48052 - DNA, 80 bp, synthetic construct
  source 1..80: mol_type = other DNA
cttgaagccgtaggccacccacttgagcagcatctccagcacgaagacatatgtgaacatcttgtcggcatactcaagca

SEQ ID NO: 48053 - DNA, 80 bp, synthetic construct
  source 1..80: mol_type = other DNA
gctctgttgcccaggctggagtgcagtggtgcaatcttggctcactgcaacctccgcctcccgggttcaagtgattctcc

SEQ ID NO: 48054 - DNA, 80 bp, synthetic construct; identical to SEQ ID NO: 15872
  source 1..80: mol_type = other DNA

SEQ ID NO: 48055 - DNA, 80 bp, synthetic construct
  source 1..80: mol_type = other DNA
attttaacaaggagagagggtatgcaggctcagctcacagctttctgctggaaacaacataaaatatttttgttttcact

SEQ ID NO: 48056 - DNA, 80 bp, synthetic construct
  source 1..80: mol_type = other DNA
actatattaaaagtcatttgtagatgtggtgtttaggaacaacaggtgtagataaagtcaaatgtcctgcaattctcagg

SEQ ID NO: 48057 - DNA, 80 bp, synthetic construct
  source 1..80: mol_type = other DNA
tacctccagcctactgatttgttcctgtttctctctctgtccagactgtgctatgaggctcctgtctaggcaactgaaca

SEQ ID NO: 48058 - DNA, 80 bp, synthetic construct; identical to SEQ ID NO: 15873
  source 1..80: mol_type = other DNA

SEQ ID NO: 48059 - DNA, 80 bp, synthetic construct
  source 1..80: mol_type = other DNA
tttgacagtgtgtatgtgtgtgcacatacacacaatcaccacaattttatgagacacactaaatatttgccttgaaatta

SEQ ID NO: 48060 - DNA, 80 bp, synthetic construct
  source 1..80: mol_type = other DNA
ttctttacagtttatccctagtggaaataaagttgcagtggacaggggattgttgaggataaattgggttgccagggcaa

SEQ ID NO: 48061 - DNA, 80 bp, synthetic construct
  source 1..80: mol_type = other DNA
gggctcttctctaccaccccaccgacattgctgtcatttctcctttttcacttttcccagcctaatgaaagaaacttgta

SEQ ID NO: 48062 - DNA, 80 bp, synthetic construct; identical to SEQ ID NO: 15874
  source 1..80: mol_type = other DNA

SEQ ID NO: 48063 - DNA, 80 bp, synthetic construct
  source 1..80: mol_type = other DNA
aaaattaaatatagtttggtaaggagtaaatatccattttaatgctttttttcagaatgtagctcatcaaatgccccaac

SEQ ID NO: 48064 - DNA, 80 bp, synthetic construct
  source 1..80: mol_type = other DNA
aaataattttcaagataaactttaccaatgtttcgtcatatttcctcagaaatgttgaaagcttgttatcgcattgaatc

SEQ ID NO: 48065 - DNA, 80 bp, synthetic construct; identical to SEQ ID NO: 15875
  source 1..80: mol_type = other DNA

SEQ ID NO: 48066 - DNA, 80 bp, synthetic construct
  source 1..80: mol_type = other DNA
ttcccaacttttatatcatgtgttcaattttcttaattaattacactggctagtaattcaagactattattaaataatga

SEQ ID NO: 48067 - DNA, 80 bp, synthetic construct
  source 1..80: mol_type = other DNA
attcagtagtagaaaacgtattttatttctattcttaccagagttctgaaaatcaggcattcactgaaataattatatgg

SEQ ID NO: 48068 - DNA, 80 bp, synthetic construct
  source 1..80: mol_type = other DNA
cagaagtatggagtatgaagcataaaaactggcctaggttttccttttggtatacttgaggttttaaaaatcagcactat

SEQ ID NO: 48069 - DNA, 80 bp, synthetic construct
  source 1..80: mol_type = other DNA
accaggcatggtggcgcatgcctgtaatcccagctactcaagaggctgaggcaggagaatccttgaacccgggaggcgga

SEQ ID NO: 48070 - DNA, 80 bp, synthetic construct; identical to SEQ ID NO: 15876
  source 1..80: mol_type = other DNA

SEQ ID NO: 48071 - DNA, 80 bp, synthetic construct
  source 1..80: mol_type = other DNA
ggttattttattaattacttgcctaggtttctttaagattattttgttatatttttaatttcttgaattaaataatttat

SEQ ID NO: 48072 - DNA, 80 bp, synthetic construct
  source 1..80: mol_type = other DNA
gatctcacgtggacagaattaatggaatcacaatctttgatttatagcacactatcatcaccattggtgcatgagtggcc

SEQ ID NO: 48073 - DNA, 80 bp, synthetic construct
  source 1..80: mol_type = other DNA
aggctggagtgcagtggcgcgatctcggctcactgcaagctccgcctcccaggttcacgccattctcctgcctcagcctc

SEQ ID NO: 48074 - DNA, 80 bp, synthetic construct; identical to SEQ ID NO: 15877
  source 1..80: mol_type = other DNA

SEQ ID NO: 48075 - DNA, 80 bp, synthetic construct
  source 1..80: mol_type = other DNA
atttagatctctcattgtcttgttctttccacttgaatgtcaagaactaatagaaatatggcaaagtttcccagtactag

SEQ ID NO: 48076 - DNA, 80 bp, synthetic construct
  source 1..80: mol_type = other DNA
aatatgcacttatataggtgcatattatatattataatatatacttatatttatatataggtttatataattgtatataa

SEQ ID NO: 48077 - DNA, 80 bp, synthetic construct
  source 1..80: mol_type = other DNA
tatttgtacatatatatttatatactttgtataatctatatttatgtattttgtataaatctatattcttttatagattt

SEQ ID NO: 48078 - DNA, 80 bp, synthetic construct; identical to SEQ ID NO: 15878
  source 1..80: mol_type = other DNA

SEQ ID NO: 48079 - DNA, 80 bp, synthetic construct
  source 1..80: mol_type = other DNA
catctcaagcttttaacattgaattcaacaaacaaaaagcaccctgaatttgttgtcataatttgcatttgcctgatcta

SEQ ID NO: 48080 - DNA, 80 bp, synthetic construct
  source 1..80: mol_type = other DNA
aggcattggtgtgaacagggctcactgcagccttgacctctcaggctcaagcaatcctctcccctcagcctcctgagtag

SEQ ID NO: 48081 - DNA, 80 bp, synthetic construct
  source 1..80: mol_type = other DNA
ccatgcctggtggcttttaatatttctgagtcgcattgttttaggtttgtcatttgaaagcacatggctgaaggtttttt

SEQ ID NO: 48082 - DNA, 80 bp, synthetic construct
  source 1..80: mol_type = other DNA
cttgcctctattatattattttgttttctgattttgttttcttgttgcttctttttccttctaccttttgctgtgagatc

SEQ ID NO: 48083 - DNA, 80 bp, synthetic construct; identical to SEQ ID NO: 15879
  source 1..80: mol_type = other DNA

SEQ ID NO: 48084 - DNA, 80 bp, synthetic construct
  source 1..80: mol_type = other DNA
aacaaaactagttaacatattgtcaaaccatctttctctgaagcctacagagatttggctctagctgccaatggtaaaac

SEQ ID NO: 48085 - DNA, 80 bp, synthetic construct
  source 1..80: mol_type = other DNA
cttggatcaaagtgccctttctctcactctgcagtctaaagcattctctgttagttgctcatctatggggttctcacctc

SEQ ID NO: 48086 - DNA, 80 bp, synthetic construct; identical to SEQ ID NO: 15880
  source 1..80: mol_type = other DNA

SEQ ID NO: 48087 - DNA, 80 bp, synthetic construct
  source 1..80: mol_type = other DNA
cccctccagggctgttccatctcttcctagaagtgcttggagagattagagcagcatgcctgggagccagatggggcaac

SEQ ID NO: 48088 - DNA, 80 bp, synthetic construct
  source 1..80: mol_type = other DNA
ctgtagctcccacatggctgaatacatagagctagatacaaggagggtttttagaagactgactgaacaaatgagaagtc

SEQ ID NO: 48089 - DNA, 80 bp, synthetic construct
  source 1..80: mol_type = other DNA
ttacttaatgcttctacaaagagttgtcatggggattacgcatcatcatgtgtgaactatagggcgcagcctccagcctg

SEQ ID NO: 48090 - DNA, 80 bp, synthetic construct; identical to SEQ ID NO: 15881
  source 1..80: mol_type = other DNA

SEQ ID NO: 48091 - DNA, 80 bp, synthetic construct
  source 1..80: mol_type = other DNA
cagccgtccctgccacaaccctgcatccccaggagggtaccagcgctccactgctgagtaggatcatgaagatgatgaat

SEQ ID NO: 48092 - DNA, 80 bp, synthetic construct
  source 1..80: mol_type = other DNA
gcccacatctaatggcagaaggttggatggttgaagagatgactgagagaaagagctacgatgatgggggtggcgaacag

SEQ ID NO: 48093 - DNA, 80 bp, synthetic construct
  source 1..80: mol_type = other DNA
taggttccagcttgtccgctgctcatctgggaaactgtccccctgggaaaatggtaggaactcctgggcattccctgggt

SEQ ID NO: 48094 - DNA, 80 bp, synthetic construct
  source 1..80: mol_type = other DNA
ggctcactgcaacctccgcctcccgggttcaagagattctcctgcctcagcctcctgagtagctgggattacaggtgcct

SEQ ID NO: 48095 - DNA, 80 bp, synthetic construct; identical to SEQ ID NO: 15882
  source 1..80: mol_type = other DNA

SEQ ID NO: 48096 - DNA, 80 bp, synthetic construct
  source 1..80: mol_type = other DNA
gcgaattagacccagaccctactgctgttgggcatacagtggtgccaacacaccacaaatacagtgtctccagtccttgg

SEQ ID NO: 48097 - DNA, 80 bp, synthetic construct
  source 1..80: mol_type = other DNA
tgggtggaactgaggctagggcagagggctgcccgggccattaccttcagtgaagcagtcctctgggtccttgacatcct

SEQ ID NO: 48098 - DNA, 80 bp, synthetic construct
  source 1..80: mol_type = other DNA
agagtctgcaggagcttagggctccctgaagggaggcagcatcttcatgacgcaccctgggacctgcacagagccacttt

SEQ ID NO: 48099 - DNA, 80 bp, synthetic construct; identical to SEQ ID NO: 15883
  source 1..80: mol_type = other DNA

SEQ ID NO: 48100 - DNA, 80 bp, synthetic construct
  source 1..80: mol_type = other DNA
tgtccttgcaagtctgctgccctgacctcaataacttgattatagggaggctacagagaggcatgtgcatgcaggtgtgc

SEQ ID NO: 48101 - DNA, 80 bp, synthetic construct
  source 1..80: mol_type = other DNA
attccactacataagaccactgcacccattcccagccacttgaatgctagctgcttagctggccctcctccagaaaatca

SEQ ID NO: 48102 - DNA, 80 bp, synthetic construct
  source 1..80: mol_type = other DNA
ggaaagcctttccgtagcttccttctttgcttcatcctgtttctcttactttctcctgagaacacccctcaacaagtcat

SEQ ID NO: 48103 - DNA, 80 bp, synthetic construct; identical to SEQ ID NO: 15884
  source 1..80: mol_type = other DNA

SEQ ID NO: 48104 - DNA, 80 bp, synthetic construct
  source 1..80: mol_type = other DNA
ctcctcctagctcagctgggggatgaaaggagttgggtgatgaaaggggcaggccagaggagagcagcatgcttattttt

SEQ ID NO: 48105 - DNA, 80 bp, synthetic construct
  source 1..80: mol_type = other DNA
gaagacttataaaattcattcaaaggttagcatccgtgtgagagagccacttctctcccatggcattttgcctctctcct

SEQ ID NO: 48106 - DNA, 80 bp, synthetic construct
  source 1..80: mol_type = other DNA
aagtgctggacggagtgaggtcaagctgcaggacagtggccaccaagcactctgaacacgtgccctccaccttccgtggg

SEQ ID NO: 48107 - DNA, 80 bp, synthetic construct; identical to SEQ ID NO: 15885
  source 1..80: mol_type = other DNA

SEQ ID NO: 48108 - DNA, 80 bp, synthetic construct
  source 1..80: mol_type = other DNA
agggatgcccaccctcccctctgcagactggtcttccacgctgcctgtgacagtggctgtggctcccaacagcaaatgca

SEQ ID NO: 48109 - DNA, 80 bp, synthetic construct
  source 1..80: mol_type = other DNA
aggcagtcgctgacacctggctccaggtcctggaatccggaggggcctctgggccaccggacacaggctgggattcctgc

SEQ ID NO: 48110 - DNA, 80 bp, synthetic construct
  source 1..80: mol_type = other DNA
ctgagcaggcaggtgggaggctcctggtaggtccaagcaaagggcctagagacaggaagcccctggccggcctggcataa

SEQ ID NO: 48111 - DNA, 80 bp, synthetic construct; identical to SEQ ID NO: 15886
  source 1..80: mol_type = other DNA

SEQ ID NO: 48112 - DNA, 80 bp, synthetic construct
  source 1..80: mol_type = other DNA
gagccttagatcaagttccacacatggggagcagctgctctccacagccaggcccagccagtgcaggcccagaggaagca

SEQ ID NO: 48113 - DNA, 80 bp, synthetic construct
  source 1..80: mol_type = other DNA
aataacaggttgcgagataagatagtgctgtccctgacacctcagtcttagggatgcttatttttaaatctcagaatgag

SEQ ID NO: 48114 - DNA, 80 bp, synthetic construct; identical to SEQ ID NO: 15887
  source 1..80: mol_type = other DNA

SEQ ID NO: 48115 - DNA, 80 bp, synthetic construct
  source 1..80: mol_type = other DNA
ctgggtggcccggacagcagagctctgggccctgtatatgtaggtgccttatacatgcaggggtgagggcccacctgctt

SEQ ID NO: 48116 - DNA, 80 bp, synthetic construct
  source 1..80: mol_type = other DNA
ggaggcaccttctccgtctctgggggtggcggggagtagggggtggcaatgcagctgggcagctggccctgggcggcaag

SEQ ID NO: 48117 - DNA, 80 bp, synthetic construct
  source 1..80: mol_type = other DNA
gagctgagcagcaaggccaggaagagattcaggacctgtcgagataatgggtcaggctcaccaaggcactgcaccatgcc

SEQ ID NO: 48118 - DNA, 80 bp, synthetic construct; identical to SEQ ID NO: 15888
  source 1..80: mol_type = other DNA

SEQ ID NO: 48119 - DNA, 80 bp, synthetic construct
  source 1..80: mol_type = other DNA
aggtctccttcctgggaagtgtgagtccagggacaagacagaatcccaccgagaagccacacagagcttttgggactttg

SEQ ID NO: 48120 - DNA, 80 bp, synthetic construct
  source 1..80: mol_type = other DNA
aatagctggaaaagaggtcaggaaggcacaggcagccttcaggcatttggactaatcatggggtcaggacatggagagct

SEQ ID NO: 48121 - DNA, 80 bp, synthetic construct
  source 1..80: mol_type = other DNA
agaattgcttgtcgttaagccctcctgcaagtgtgaagctttagcttttgtttaaaaagaaggcctttgatgtgtgacaa

SEQ ID NO: 48122 - DNA, 80 bp, synthetic construct
  source 1..80: mol_type = other DNA
tggtgtgtgagggtgggtgcacagttctttttggaaatccactctgagactctgttccggtttctcaagagcctctaaaa

SEQ ID NO: 48123 - DNA, 80 bp, synthetic construct; identical to SEQ ID NO: 15889
  source 1..80: mol_type = other DNA

SEQ ID NO: 48124 - DNA, 80 bp, synthetic construct
  source 1..80: mol_type = other DNA
ccacagcctcactcacaccaggccctgcatcccccaacctccaggagtcctgggcctaggctgggagtagggcgggtggt

SEQ ID NO: 48125 - DNA, 80 bp, synthetic construct
  source 1..80: mol_type = other DNA
cctcccacgcctggcagcggcccaattccttaggcggctggggagggggctgtgtgggctggcattagctccctcctcca

SEQ ID NO: 48126 - DNA, 80 bp, synthetic construct
  source 1..80: mol_type = other DNA
aacccttcaccccaagggatagctagtttggggggacataagggggagttgggggccagccaaagagcagggttctagtg

SEQ ID NO: 48127 - DNA, 80 bp, synthetic construct; identical to SEQ ID NO: 15890
  source 1..80: mol_type = other DNA

SEQ ID NO: 48128 - DNA, 80 bp, synthetic construct
  source 1..80: mol_type = other DNA
ctcttcctaaggtgccttctctggtatttaaattttggcttttctcagttccagaattccccacattggaaagacacaag

SEQ ID NO: 48129 - DNA, 80 bp, synthetic construct
  source 1..80: mol_type = other DNA
tttgctcatcctgttccttccctcttcagcattgcctgtttatcaggtcagctccaaaatctcttccagaaagatttcct

SEQ ID NO: 48130 - DNA, 80 bp, synthetic construct; identical to SEQ ID NO: 15891
  source 1..80: mol_type = other DNA

SEQ ID NO: 48131 - DNA, 80 bp, synthetic construct
  source 1..80: mol_type = other DNA
gtggctcacacctgtaatcccggcactttgggaggccgaggtggcggatcacctgagctcaggagtttgagaccagaccg

SEQ ID NO: 48132 - DNA, 80 bp, synthetic construct
  source 1..80: mol_type = other DNA
cctgggcgacaagagtgaaactcagtctcaaaaaaaaaaaaaatgcggtgagtgagtgaatggatggatgggtcaatgag

SEQ ID NO: 48133 - DNA, 80 bp, synthetic construct
  source 1..80: mol_type = other DNA
tgtaagtgaatgggtgggtacatagatgaatgggcatatggatgcataaatgtgtgaataggggttgatgaataggtgac

SEQ ID NO: 48134 - DNA, 80 bp, synthetic construct; identical to SEQ ID NO: 15892
  source 1..80: mol_type = other DNA

SEQ ID NO: 48135 - DNA, 80 bp, synthetic construct
  source 1..80: mol_type = other DNA
taaatggataattggatgggtgggtagctgggtagatgagtggatggtgtgtgtgtggcccttggccaacttaccacaag

SEQ ID NO: 48136 - DNA, 80 bp, synthetic construct
  source 1..80: mol_type = other DNA
cctgagtcgctgtccctcagctccgagtagttcttgccaaagagctgcatgcccaccacagcaaagatgaacacgatgat

SEQ ID NO: 48137 - DNA, 80 bp, synthetic construct
  source 1..80: mol_type = other DNA
atgggcaccctcactctctctagctcctgcctgaaagcccaaggagcccttggagggcactgacacctattccccccccg

SEQ ID NO: 48138 - DNA, 80 bp, synthetic construct
  source 1..80: mol_type = other DNA
tccaggaactgcccactagattctcccaacagggaatgtccttgctctttcacacctgtcctcatcaggtatcctttggg

SEQ ID NO: 48139 - DNA, 80 bp, synthetic construct; identical to SEQ ID NO: 15893
  source 1..80: mol_type = other DNA

SEQ ID NO: 48140 - DNA, 80 bp, synthetic construct
  source 1..80: mol_type = other DNA
catgtctggacctctcaagcatttcaagctccaagtgtggtccacagaccagcagctttgacatcacctcagaccgactg

SEQ ID NO: 48141 - DNA, 80 bp, synthetic construct
  source 1..80: mol_type = other DNA
ctctgttatctgccatgtggctgtgggaaattcgtctcatctctctgagtctcctcatctgtgaaatggaaatgtagtaa

SEQ ID NO: 48142 - DNA, 80 bp, synthetic construct
  source 1..80: mol_type = other DNA
catccaggggtaccaagcaaatggctgttgggtgaaggcatgacagatcaaagtagggatgaccaagtgatgacctcaga

SEQ ID NO: 48143 - DNA, 80 bp, synthetic construct; identical to SEQ ID NO: 15894
  source 1..80: mol_type = other DNA

SEQ ID NO: 48144 - DNA, 80 bp, synthetic construct
  source 1..80: mol_type = other DNA
ggacagctctcttctccagcctgctctcccagcccttgcagctgctcaccaagcataccaggcacaccagcttggccttc

SEQ ID NO: 48145 - DNA, 80 bp, synthetic construct
  source 1..80: mol_type = other DNA
catggctcccctgacccagggcctctgtccttgctgttcctgctcctcaggaggcccttcctcctcatctacctgctgga

SEQ ID NO: 48146 - DNA, 80 bp, synthetic construct; identical to SEQ ID NO: 15895
  source 1..80: mol_type = other DNA

SEQ ID NO: 48147 - DNA, 80 bp, synthetic construct
  source 1..80: mol_type = other DNA
gccctgcagtgtgccaattgatgggagcctggttcccagaggagagaatgttctgtgacggtgtggatggcaggaagtca

SEQ ID NO: 48148 - DNA, 80 bp, synthetic construct
  source 1..80: mol_type = other DNA
ctgagaacagtgtcaggcctgcagcagttgtgaggaggtgggggtcaaagacgggcatggctgaggcacctcgctggggt

SEQ ID NO: 48149 - DNA, 80 bp, synthetic construct
  source 1..80: mol_type = other DNA
cagagagaggcaccgggagggcaggtgggtgggctcctcagcactgccacacagggcaccacccaccagcccagccctcc

SEQ ID NO: 48150 - DNA, 80 bp, synthetic construct
  source 1..80: mol_type = other DNA
acctgctttcataacttttccaacccccagccccattgcctgttgctctcctgttccagccacgcctgttccttgctgtt

SEQ ID NO: 48151 - DNA, 80 bp, synthetic construct; identical to SEQ ID NO: 15896
  source 1..80: mol_type = other DNA

SEQ ID NO: 48152 - DNA, 80 bp, synthetic construct
  source 1..80: mol_type = other DNA
ctacccagcctcagacacacacagctgtgcttagagccctcactcagcagcacagcctgcacagctttgctgagagctcc

SEQ ID NO: 48153 - DNA, 80 bp, synthetic construct
  source 1..80: mol_type = other DNA
ctcagctgttttggtggtgagatggcagttatcaggtggagctaggactcaggaaaaaagagacaggagaggctcgtggg

SEQ ID NO: 48154 - DNA, 80 bp, synthetic construct; identical to SEQ ID NO: 15897
  source 1..80: mol_type = other DNA

SEQ ID NO: 48155 - DNA, 80 bp, synthetic construct
  source 1..80: mol_type = other DNA
ggtaacagacctcttccttccacaggctcatgccaggctttctaaggccatgcgatcaaagcttcatggtttaagatgtg

SEQ ID NO: 48156 - DNA, 80 bp, synthetic construct
  source 1..80: mol_type = other DNA
aagtggatactctctatgacagggcgattattgttactgtcagcagcatttattatgattgctgagagtggccaagagct

SEQ ID NO: 48157 - DNA, 80 bp, synthetic construct
  source 1..80: mol_type = other DNA
aattgggggaacttatggggaaccccaaattctctttgaccttggcatatgactttaatgggaccatactccatgcactg

SEQ ID NO: 48158 - DNA, 80 bp, synthetic construct
  source 1..80: mol_type = other DNA
cagatgtgctataactggtttagccatttccctgtgatagtcattcctttttccctattaaaaacattgccacaataaat

SEQ ID NO: 48159 - DNA, 80 bp, synthetic construct; identical to SEQ ID NO: 15898
  source 1..80: mol_type = other DNA

SEQ ID NO: 48160 - DNA, 80 bp, synthetic construct
  source 1..80: mol_type = other DNA
ctttatatattaaggatattacccttttgtctattagtactatttgtattgtcacaattttcctgatttgtcatttacct

SEQ ID NO: 48161 - DNA, 80 bp, synthetic construct
  source 1..80: mol_type = other DNA
aaaatagcaaatacttaaatagcatttgatgtatgccaggcactgttctagtgttttacatatactaaaccatttaaccc

SEQ ID NO: 48162 - DNA, 80 bp, synthetic construct; identical to SEQ ID NO: 15899
  source 1..80: mol_type = other DNA

SEQ ID NO: 48163 - DNA, 80 bp, synthetic construct
  source 1..80: mol_type = other DNA
gtttgagatttattgacacatgtataagtattcattctaatcgtgtacagtatttcattgtatgagtacaccacaattta

SEQ ID NO: 48164 - DNA, 80 bp, synthetic construct
  source 1..80: mol_type = other DNA
acacagtttatatctgtgatttaccaaatattgttcaattgctccccaaaatggttgtaccaaatccacactcttacaag

SEQ ID NO: 48165 - DNA, 80 bp, synthetic construct
  source 1..80: mol_type = other DNA
catttcctttgtccattgttgtggttctgtttttatcattttatcactatccctcttttcctattgatgtgtaactcttc

SEQ ID NO: 48166 - DNA, 80 bp, synthetic construct
  source 1..80: mol_type = other DNA
gctttttggattgttgaaggccttcccaatcccaagatcttaaagcttttttgcttgtttttattctaaaaactttaaag

SEQ ID NO: 48167 - DNA, 80 bp, synthetic construct; identical to SEQ ID NO: 15900
  source 1..80: mol_type = other DNA

SEQ ID NO: 48168 - DNA, 80 bp, synthetic construct
  source 1..80: mol_type = other DNA
agcctcctgagtagccagaactacaggtgcatgccaccacatccagctaatttttgtatttttagtagagacaggctttc

SEQ ID NO: 48169 - DNA, 80 bp, synthetic construct
  source 1..80: mol_type = other DNA
ggattgttctatttctgtggtctcaattctgtagcacaatctgtttttccacccctgcaccaatactataatatttttag

SEQ ID NO: 48170 - DNA, 80 bp, synthetic construct
  source 1..80: mol_type = other DNA
ttaatttgggaagaatttgtatccctacaatattcatactttcattcatgaaaatggtacatcgctctacttttatgtct

SEQ ID NO: 48171 - DNA, 80 bp, synthetic construct; identical to SEQ ID NO: 15901
  source 1..80: mol_type = other DNA

SEQ ID NO: 48172 - DNA, 80 bp, synthetic construct
  source 1..80: mol_type = other DNA
aatatgctatttgatgcgtacattgaaattttaatctcaatgtctatatttttcatttctggagattttatttggttctt

SEQ ID NO: 48173 - DNA, 80 bp, synthetic construct
  source 1..80: mol_type = other DNA
ccaagtgatcctgccacctcagcctcccaagtagctaggaccacaggtgcacaccaccacacccggctatttttgtgtat

SEQ ID NO: 48174 - DNA, 80 bp, synthetic construct
  source 1..80: mol_type = other DNA
ggccaattatgaacatttttatcatctctatcaagcagttctactatgtgacatttttaaggggatagcctgattgtgtc

SEQ ID NO: 48175 - DNA, 80 bp, synthetic construct; identical to SEQ ID NO: 15902
  source 1..80: mol_type = other DNA

SEQ ID NO: 48176 - DNA, 80 bp, synthetic construct
  source 1..80: mol_type = other DNA
gtgtgtaggttttttctggttcaccatttttctgaatgtatagtcatatccttacggggctactcagtttcaacccctac

SEQ ID NO: 48177 - DNA, 80 bp, synthetic construct
  source 1..80: mol_type = other DNA
tttactgctatggtttttaagcttctttttgtttttggcacttggggtttctgttaaagtagcccctcttatctacgggg

SEQ ID NO: 48178 - DNA, 80 bp, synthetic construct
  source 1..80: mol_type = other DNA
gcttctctttggcacatccgtattgccagcaacattactattctgctttggggaataatgattaagtaaaataagggtta

SEQ ID NO: 48179 - DNA, 80 bp, synthetic construct
  source 1..80: mol_type = other DNA
taacagagatagctagtaagtgactaatggataggttgcatatagagcgtggatacgctgaacaaagggacaattcatgt

SEQ ID NO: 48180 - DNA, 80 bp, synthetic construct; identical to SEQ ID NO: 15903
  source 1..80: mol_type = other DNA

SEQ ID NO: 48181 - DNA, 80 bp, synthetic construct
  source 1..80: mol_type = other DNA
cttctcctttgtggaatttgtcttcagagacatgcttagaaaggcttttcccatgctgattatttactcatgcttatttt

SEQ ID NO: 48182 - DNA, 80 bp, synthetic construct
  source 1..80: mol_type = other DNA
tagtacaatgcagttcagctacaacttgctgacccagtgaagccaccagtgctgttcatcacacctaacttgctgctcag

SEQ ID NO: 48183 - DNA, 80 bp, synthetic construct; identical to SEQ ID NO: 15904
  source 1..80: mol_type = other DNA

SEQ ID NO: 48184 - DNA, 80 bp, synthetic construct
  source 1..80: mol_type = other DNA
cgatgatgatctcacaagctcctttttaaggccagtgggatcatggcaactctgccctgggatcctctaaagatgggctg

SEQ ID NO: 48185 - DNA, 80 bp, synthetic construct
  source 1..80: mol_type = other DNA
agaattagaatccagacattctgacttccaggagcagtctaacaacaacaacaatagcacagctatcatttgttttgagt

SEQ ID NO: 48186 - DNA, 80 bp, synthetic construct
  source 1..80: mol_type = other DNA
tatttattgggccaattactgagtaaactgcttgagatcagctagttagtaagagctgagtcagaattcaaatctggctc

SEQ ID NO: 48187 - DNA, 80 bp, synthetic construct; identical to SEQ ID NO: 15905
  source 1..80: mol_type = other DNA

SEQ ID NO: 48188 - DNA, 80 bp, synthetic construct
  source 1..80: mol_type = other DNA
cctccaagatgtcctctatgatgattcccaccctcaaaagatccttctgtgtgcaggatcccttcttccttacccatgaa

SEQ ID NO: 48189 - DNA, 80 bp, synthetic construct
  source 1..80: mol_type = other DNA
gtgctccagcgccatgaagagtgtgttgagtacgatgcacatagtgatggtgaggtcagtaaacgggtccatgaccacca

SEQ ID NO: 48190 - DNA, 80 bp, synthetic construct
  source 1..80: mol_type = other DNA
cagccaatgagttagtttgattctgttgactgagtcatatgtaactggaataccttccaggaaagatttatgacttgctc

SEQ ID NO: 48191 - DNA, 80 bp, synthetic construct
  source 1..80: mol_type = other DNA
agattatcaggacaaacgtacaactgcttaagacaacagtcccacatagacctggggacactcaggggaggacaggctga

SEQ ID NO: 48192 - DNA, 80 bp, synthetic construct; identical to SEQ ID NO: 15906
  source 1..80: mol_type = other DNA

SEQ ID NO: 48193 - DNA, 80 bp, synthetic construct
  source 1..80: mol_type = other DNA
tgaaacagatgaaaagacatggaaggacaggcaaggctacacagaacagagaaggctgggacagtgtggggatgtctaaa

SEQ ID NO: 48194 - DNA, 80 bp, synthetic construct
  source 1..80: mol_type = other DNA
tcctcgaagccatctacacacggagcctgggaggtcagcatctggggcccgcctggctcctccgatggcgtggtctgagt

SEQ ID NO: 48195 - DNA, 80 bp, synthetic construct; identical to SEQ ID NO: 15907
  source 1..80: mol_type = other DNA

SEQ ID NO: 48196 - DNA, 80 bp, synthetic construct
  source 1..80: mol_type = other DNA
atctaacatgctctaagataatgctaatagcaggataaagtacaatgcttacatatggctggtggggggctgtgtctttt

SEQ ID NO: 48197 - DNA, 80 bp, synthetic construct
  source 1..80: mol_type = other DNA
aatcaatagcaaccatattcaaatcaattatagacacagtccaactctgggctctgatagacaacaaagagaacgaggca

SEQ ID NO: 48198 - DNA, 80 bp, synthetic construct
  source 1..80: mol_type = other DNA
catgtacttctgcactgtggggtttgttttcaccatgcatgcaccatttttatcagtaaaaaacccaggcctggaaacag

SEQ ID NO: 48199 - DNA, 80 bp, synthetic construct
  source 1..80: mol_type = other DNA
atagggcagagggaagatgggcctagattagccagggtagaagaagcagggcatagggtggataccaaatagatctgggc

SEQ ID NO: 48200 - DNA, 80 bp, synthetic construct; identical to SEQ ID NO: 15908
  source 1..80: mol_type = other DNA

SEQ ID NO: 48201 - DNA, 80 bp, synthetic construct
  source 1..80: mol_type = other DNA
aggaattctccatgaaaagagcttccccagatagctgtcaccttttcagcctaagcctcagaacaaagatgcagagcagc

SEQ ID NO: 48202 - DNA, 80 bp, synthetic construct
  source 1..80: mol_type = other DNA
gtttgttacacagcattattattataatagctgactaatacaccatcctagtccaggcagtcatcttctctttcccaaaa

SEQ ID NO: 48203 - DNA, 80 bp, synthetic construct
  source 1..80: mol_type = other DNA
tccaaacttatctatggtctagaaggccctgcacagtccaaatcctaactcatgaaattcattttaatgtttcaccacac

SEQ ID NO: 48204 - DNA, 80 bp, synthetic construct; identical to SEQ ID NO: 15909
  source 1..80: mol_type = other DNA

SEQ ID NO: 48205 - DNA, 80 bp, synthetic construct
  source 1..80: mol_type = other DNA
tggcactagatagatattggttggatggataaattcttgggaatcaatcggaaggcttgggttagagttccagctctgtt

SEQ ID NO: 48206 - DNA, 80 bp, synthetic construct
  source 1..80: mol_type = other DNA
tcatacaagcaaggggcaaagtaagtcttcagcccctacctcccaatctggataaactgaacgtgagctgtctgctgggc

SEQ ID NO: 48207 - DNA, 80 bp, synthetic construct
  source 1..80: mol_type = other DNA
tcaaatgtctccatcttggtttgctaattcctttaactttgcaaatgaccctgtcttggcctgctaatccctttaaggtt

SEQ ID NO: 48208 - DNA, 80 bp, synthetic construct; identical to SEQ ID NO: 15910
  source 1..80: mol_type = other DNA

SEQ ID NO: 48209 - DNA, 80 bp, synthetic construct
  source 1..80: mol_type = other DNA
agtgtggggccctgggcattctgcagtgtaccccaggatcctcactccttcctgcttactaataccaataacagataata

SEQ ID NO: 48210 - DNA, 80 bp, synthetic construct
  source 1..80: mol_type = other DNA
caaagagattaattaacctgtaccaagtcccacagattgagcgagagtctgagtggcacaaaataagccacgtggctggg

SEQ ID NO: 48211 - DNA, 80 bp, synthetic construct
  source 1..80: mol_type = other DNA
gcaaggacacctgatggctgattgggcagccatcagtctgtcatagaactgactaagtgaccaaagctctgattggcctt

SEQ ID NO: 48212 - DNA, 80 bp, synthetic construct; identical to SEQ ID NO: 15911
  source 1..80: mol_type = other DNA

SEQ ID NO: 48213 - DNA, 80 bp, synthetic construct
  source 1..80: mol_type = other DNA
gtagctgggattacaggcacgcgcctccatgcccggctaatttttgtatttttagtagagatggggtttcaccatgttgg

SEQ ID NO: 48214 - DNA, 80 bp, synthetic construct
  source 1..80: mol_type = other DNA
cattagcatggatgctctatgagggcccagttttttttttgtaagtttatgcacctagagcccagcacacagtaggtgct

SEQ ID NO: 48215 - DNA, 80 bp, synthetic construct
  source 1..80: mol_type = other DNA
ggtcgcctgcccccagtaatgagaccaccccattgcagtccacagtgctgttctttttgccatggagggcgtggccagga

SEQ ID NO: 48216 - DNA, 80 bp, synthetic construct; identical to SEQ ID NO: 15912
  source 1..80: mol_type = other DNA

SEQ ID NO: 48217 - DNA, 80 bp, synthetic construct
  source 1..80: mol_type = other DNA
agagataatcctgtatcttctgggatgtctactcccctcaaatctatgtctctggagctgggagcctgaaacttaactgg

SEQ ID NO: 48218 - DNA, 80 bp, synthetic construct
  source 1..80: mol_type = other DNA
gtcccccagccccggctccagtgccgggatactggcctcaggttggggatatcacaacacccaaaactaccctgtccctc

SEQ ID NO: 48219 - DNA, 80 bp, synthetic construct
  source 1..80: mol_type = other DNA
tgggaccatcttctgagtcagacttggggagcctgtcctccccacactcctcagttcctgaagacatccgttttctcctc

SEQ ID NO: 48220 - DNA, 80 bp, synthetic construct; identical to SEQ ID NO: 15913
  source 1..80: mol_type = other DNA

SEQ ID NO: 48221 - DNA, 80 bp, synthetic construct
  source 1..80: mol_type = other DNA
ttctagaaggtttagctggccaaaagtgtactggaatatgtggcatggggtagtgagaagaacaagtggatgcttctaat

SEQ ID NO: 48222 - DNA, 80 bp, synthetic construct
  source 1..80: mol_type = other DNA
accagaataaactatgtgcatgtatacatgcatctcttatccagcatgcactatgctcacagggaccatctttacccagg

SEQ ID NO: 48223 - DNA, 80 bp, synthetic construct; identical to SEQ ID NO: 15914
  source 1..80: mol_type = other DNA

SEQ ID NO: 48224 - DNA, 80 bp, synthetic construct
  source 1..80: mol_type = other DNA
cactgctcacccacctcgtgttctttcttgagcatttccatggcctcctggaagcgcttttccttctcctcggtctcagc

SEQ ID NO: 48225 - DNA, 80 bp, synthetic construct
  source 1..80: mol_type = other DNA
ctcactggggccccttctgggttatggcatttccaagtcacctagtctagttgtgccaggggttcaaatagccatagcct

SEQ ID NO: 48226 - DNA, 80 bp, synthetic construct
  source 1..80: mol_type = other DNA
tcctacagggagaaagagtgtcccactcacagagcagagagcatcctatacaaagggactggtacttcatcaccagcaaa

SEQ ID NO: 48227 - DNA, 80 bp, synthetic construct
  source 1..80: mol_type = other DNA
gcacacacacacctgctgatagaggcgctcccagcagtcctgcgtcatcaggcggaagagtgcaagaaaggcccaggcaa

SEQ ID NO: 48228 - DNA, 80 bp, synthetic construct; identical to SEQ ID NO: 15915
  source 1..80: mol_type = other DNA

SEQ ID NO: 48229 - DNA, 80 bp, synthetic construct
  source 1..80: mol_type = other DNA
ctggctcatgtctcttcctctgcccatctaccccatgaggagttgagtacagcatgggcatgggggagagcagggttggg

SEQ ID NO: 48230 - DNA, 80 bp, synthetic construct
  source 1..80: mol_type = other DNA
tcacagttcacagagctggaggtggtagcctctctccaaagaggaaatgctggtctggagtcatgtgtgcatgtatgtgt

SEQ ID NO: 48231 - DNA, 80 bp, synthetic construct; identical to SEQ ID NO: 15916
  source 1..80: mol_type = other DNA

SEQ ID NO: 48232 - DNA, 80 bp, synthetic construct
  source 1..80: mol_type = other DNA
agttctggggagcttctggaagggaatggagctgggggtgggctggttggggggctgtagaaggcatcccaggctatccc

SEQ ID NO: 48233 - DNA, 80 bp, synthetic construct
  source 1..80: mol_type = other DNA
gtcagggcataaatagaaaatacagtcagttgagaaaacaccaggagactcccctggcaggacaaggagacccggggtgg

SEQ ID NO: 48234 - DNA, 80 bp, synthetic construct
  source 1..80: mol_type = other DNA
acctcactagcggtcttccttcttctctgccccttccctgcccctgcccctgccctctgcctggccaggcttcaggcaac

SEQ ID NO: 48235 - DNA, 80 bp, synthetic construct
  source 1..80: mol_type = other DNA
ccaggaggcaagggtctgggcagttacggcttggctgccgagtcactgtggggccttggccggctactgcccagctctgt

SEQ ID NO: 48236 - DNA, 80 bp, synthetic construct; identical to SEQ ID NO: 15917
  source 1..80: mol_type = other DNA

SEQ ID NO: 48237 - DNA, 80 bp, synthetic construct
  source 1..80: mol_type = other DNA
tgaggccactgctgaactactcattgagtgtctatgttttgttttccaaagtggactgctggtgtatgtaagaggcccta

SEQ ID NO: 48238 - DNA, 80 bp, synthetic construct
  source 1..80: mol_type = other DNA
caacagaggggctcacacaacttggcacaatcattgggcttgttccaaccctcttgcagggttctggggtacacgtatat

SEQ ID NO: 48239 - DNA, 80 bp, synthetic construct; identical to SEQ ID NO: 15918
  source 1..80: mol_type = other DNA

SEQ ID NO: 48240 - DNA, 80 bp, synthetic construct
  source 1..80: mol_type = other DNA
tcacaaagtcttccccagctgcagagcaagttcgcacctggatcactgaggtaaaggtccagggattcccagaccaagcc

SEQ ID NO: 48241 - DNA, 80 bp, synthetic construct
  source 1..80: mol_type = other DNA
tgtgaggaccatcacatcagccagcttcttcacagactggatcagggcccccacgatggtcttcagccctggggaaggca

SEQ ID NO: 48242 - DNA, 80 bp, synthetic construct
  source 1..80: mol_type = other DNA
cacagctgagattctgtcctgatttccctgggcaggagtctaggctggctttgtagtttcagagggagcctgctcctctt

SEQ ID NO: 48243 - DNA, 80 bp, synthetic construct; identical to SEQ ID NO: 15919
  source 1..80: mol_type = other DNA

SEQ ID NO: 48244 - DNA, 80 bp, synthetic construct
  source 1..80: mol_type = other DNA
gtcaggtgtgtgctgggggctgtgggtgacggtctggcggggtcatggcgggtgatgtctaaggggcctgcgctggctca

SEQ ID NO: 48245 - DNA, 80 bp, synthetic construct
  source 1..80: mol_type = other DNA
gtgttctgttagttgcacagcctagctccctgcagaagccagcaccacatagcagaatgacagaaaagcatgtgtagaca

SEQ ID NO: 48246 - DNA, 80 bp, synthetic construct
  source 1..80: mol_type = other DNA
tgttaggagcgcctgtggcttctgtgcctgctgctgctgggcctgtgacccacaggcagggaggccatgatgagcaaaca

SEQ ID NO: 48247 - DNA, 80 bp, synthetic construct
  source 1..80: mol_type = other DNA
ggtggtgagattcacaagctcttcatggtccagagctcctcatctgtaacagagcttcctgtaccctttggtgggtttac

SEQ ID NO: 48248 - DNA, 80 bp, synthetic construct; identical to SEQ ID NO: 15920
  source 1..80: mol_type = other DNA

SEQ ID NO: 48249 - DNA, 80 bp, synthetic construct
  source 1..80: mol_type = other DNA
caattctgatttcactctcattttatggaaaagcgactgagtctagagaggactagggctatttcagactcagctcagag

SEQ ID NO: 48250 - DNA, 80 bp, synthetic construct
  source 1..80: mol_type = other DNA
tgagattggtgggcttcctccttttccccaggaccgagaaatatttccctttgtaaatctttcttataaaacacaccagg

SEQ ID NO: 48251 - DNA, 80 bp, synthetic construct
  source 1..80: mol_type = other DNA
tgagcgggagcagactgcctccttgctactggcccttggcaggggtctgggccacttgtgggagctctgggggagatgcg

SEQ ID NO: 48252 - DNA, 80 bp, synthetic construct; identical to SEQ ID NO: 15921
  source 1..80: mol_type = other DNA

SEQ ID NO: 48253 - DNA, 80 bp, synthetic construct
  source 1..80: mol_type = other DNA
attctcctgcctcagtctcccaagtagctgggattacatgcgtgcaccaccacgcccaactaatttttatatttttagta

SEQ ID NO: 48254 - DNA, 80 bp, synthetic construct
  source 1..80: mol_type = other DNA
tgtctttttaaaagaggtgccttacccagttctaagtgtggctgctttcggaaaagacttctggaaggaacctctgggca

SEQ ID NO: 48255 - DNA, 80 bp, synthetic construct; identical to SEQ ID NO: 15922
  source 1..80: mol_type = other DNA

SEQ ID NO: 48256 - DNA, 80 bp, synthetic construct
  source 1..80: mol_type = other DNA
cccgatgatgcctgtccacagattatgctttgtttcacaaaatggggctggggctctggccctacttctatcaccagatg

SEQ ID NO: 48257 - DNA, 80 bp, synthetic construct
  source 1..80: mol_type = other DNA
tattcaaatagctgagtgtggtttggaaaagcagtccactatcttggaaaaaatttaggttcagtgtaggccccaccgtg

SEQ ID NO: 48258 - DNA, 80 bp, synthetic construct
  source 1..80: mol_type = other DNA
ggcccaggcatatccctctagccttggtgtttaacctgattttcacctgaaatgactgatatagttttcagggcccggag

SEQ ID NO: 48259 - DNA, 80 bp, synthetic construct; identical to SEQ ID NO: 15923
  source 1..80: mol_type = other DNA

SEQ ID NO: 48260 - DNA, 80 bp, synthetic construct
  source 1..80: mol_type = other DNA
ggatagcccagggcctccctcaggttttcttctggatttcaaccctcctaacataggacttcggcttgagtgccgtaagg

SEQ ID NO: 48261 - DNA, 80 bp, synthetic construct
  source 1..80: mol_type = other DNA
gaagcctgttttccaggaggctcaggtcaggtgatacaggaagcaagtgcatttctggtcctagttttggttcacatctt

SEQ ID NO: 48262 - DNA, 80 bp, synthetic construct
  source 1..80: mol_type = other DNA
aaaaacagagttcccaagacagaggcactggaagatgggaagagaggttgcctgaatatctgttcttccaactactcaca

SEQ ID NO: 48263 - DNA, 80 bp, synthetic construct
  source 1..80: mol_type = other DNA
tcctggggtctgtcctgcttgggtccgagtgaggatcagcagggcaagtggctgtgggccccctcctggaacttgggcag

SEQ ID NO: 48264 - DNA, 80 bp, synthetic construct; identical to SEQ ID NO: 15924
  source 1..80: mol_type = other DNA

SEQ ID NO: 48265 - DNA, 80 bp, synthetic construct
  source 1..80: mol_type = other DNA
ctgctcccagcttcccaattccccttcaggctttgaatatctacaggaaagaacttggccagctgagtcaaggggcttaa

SEQ ID NO: 48266 - DNA, 80 bp, synthetic construct
  source 1..80: mol_type = other DNA
ctgccagagcttgctttcctctgatgacaccagaccctttctgtggtgtggcttccatttcgtctcctgtattcacttca

SEQ ID NO: 48267 - DNA, 80 bp, synthetic construct
  source 1..80: mol_type = other DNA
aacttctgagagctattccattctccacgacggctcagactctcagggctctgtccaacattcttctctcggtctctctc

SEQ ID NO: 48268 - DNA, 80 bp, synthetic construct; identical to SEQ ID NO: 15925
  source 1..80: mol_type = other DNA

SEQ ID NO: 48269 - DNA, 80 bp, synthetic construct
  source 1..80: mol_type = other DNA
tgcttggcctccattcattgtctgccttctaggcagctggtgtcccaaggtgacaaggacagcttagtgacagaataagg

SEQ ID NO: 48270 - DNA, 80 bp, synthetic construct
  source 1..80: mol_type = other DNA
aagaggacttacagggtaagggtgtggaatgtctggggccatgttggtgacttggtgtgctactgcctcttttattctac

SEQ ID NO: 48271 - DNA, 80 bp, synthetic construct
  source 1..80: mol_type = other DNA
gtctgctccttcagtgatggctaagctgctggccagaggcagacagctggacagcagacaggggcagaaagagcaaaggg

SEQ ID NO: 48272 - DNA, 80 bp, synthetic construct; identical to SEQ ID NO: 15926
  source 1..80: mol_type = other DNA

SEQ ID NO: 48273 - DNA, 80 bp, synthetic construct
  source 1..80: mol_type = other DNA
atggttaggagttgggagacttggttttagtctcagcattgcttctgattcagtctataactttgggcaagtgctaggtt

SEQ ID NO: 48274 - DNA, 80 bp, synthetic construct
  source 1..80: mol_type = other DNA
aaatctcctttgatcatcctagagtcccttgttactgaaccattgcatctctaagagaatgcatttcaaagccagaatcc

SEQ ID NO: 48275 - DNA, 80 bp, synthetic construct
  source 1..80: mol_type = other DNA
cggccctggcacacagcaaaggcaagcaggtttcggtgaggaaggcacacctgctttgtgactcccagtgaaagaagcgg

SEQ ID NO: 48276 - DNA, 80 bp, synthetic construct; identical to SEQ ID NO: 15927
  source 1..80: mol_type = other DNA

SEQ ID NO: 48277 - DNA, 80 bp, synthetic construct
  source 1..80: mol_type = other DNA
gacatgaaaagttctccctctctctgaaacctcagatgtgcctccccactctgttctcagctgatgatcaagcttcttat

SEQ ID NO: 48278 - DNA, 80 bp, synthetic construct
  source 1..80: mol_type = other DNA
gggctttgctcctgcaatccccttgctcatctacatcatctagcattctctctctactggatcattttcaccagcctgca

SEQ ID NO: 48279 - DNA, 80 bp, synthetic construct
  source 1..80: mol_type = other DNA
aagtgcatgtccttttcctccactggaacctctcttgtcaagggcaccagtgaccttccccctctgtcaaatccaatagt

SEQ ID NO: 48280 - DNA, 80 bp, synthetic construct; identical to SEQ ID NO: 15928
  source 1..80: mol_type = other DNA

SEQ ID NO: 48281 - DNA, 80 bp, synthetic construct
  source 1..80: mol_type = other DNA
ttcaaatgtcatacatcccaaactggacttttgattttcttcctacttcagccagtgtcgctctctccaattttccattt

SEQ ID NO: 48282 - DNA, 80 bp, synthetic construct
  source 1..80: mol_type = other DNA
ttccaagatatagcctcctaactactccgtctgtctctaccttctccagtctgtggtccacaccatagccaggggagtct

SEQ ID NO: 48283 - DNA, 80 bp, synthetic construct
  source 1..80: mol_type = other DNA
catactgggtttggggcaagtaagtggtattgtctctcagagccagttttcccacttgtaaaatggagggctagagttgg

SEQ ID NO: 48284 - DNA, 80 bp, synthetic construct; identical to SEQ ID NO: 15929
  source 1..80: mol_type = other DNA

SEQ ID NO: 48285 - DNA, 80 bp, synthetic construct
  source 1..80: mol_type = other DNA
ttgctctgttgcccaggctggagtgcagtgatgtgatcacagctcactgcagccttgacttcatgggttcaagtgatcct

SEQ ID NO: 48286 - DNA, 80 bp, synthetic construct
  source 1..80: mol_type = other DNA
gagccaccgcactcagccttcaaaatgcctttgatggttgagcctctgatcacgacttctgcagatgtcccatcagaacc

SEQ ID NO: 48287 - DNA, 80 bp, synthetic construct
  source 1..80: mol_type = other DNA
tcagttttctcacccataaaatgggctaagccatccccaggtagcctacttctctggctggtgtgaggatccactgtatt

SEQ ID NO: 48288 - DNA, 80 bp, synthetic construct; identical to SEQ ID NO: 15930
  source 1..80: mol_type = other DNA

SEQ ID NO: 48289 - DNA, 80 bp, synthetic construct
  source 1..80: mol_type = other DNA
ccttcctccagcctgtgtgcagagctgcatgtggactgcagggaggaagccagaaagagaggggtggtctggggcctggg

SEQ ID NO: 48290 - DNA, 80 bp, synthetic construct
  source 1..80: mol_type = other DNA
gagactcaaaggtgtaaatggcggtgaaggtgtacctgggcaggagaggccggtggggtttcttagggaggcctgagcag

SEQ ID NO: 48291 - DNA, 80 bp, synthetic construct; identical to SEQ ID NO: 15931
  source 1..80: mol_type = other DNA

SEQ ID NO: 48292 - DNA, 80 bp, synthetic construct
  source 1..80: mol_type = other DNA
cagggtgggtgggtccagctgtccaccttgggcttgaaggggtgttgatattataatgcatggggctgatgggagtcggg

SEQ ID NO: 48293 - DNA, 80 bp, synthetic construct
  source 1..80: mol_type = other DNA
acaactaggcagactgctttgggaagagagctgccccaacattctgttggtctcctgaaaactgcagccaaatgcagtaa

SEQ ID NO: 48294 - DNA, 80 bp, synthetic construct
  source 1..80: mol_type = other DNA
tttgtttgggaagaaaagaaccagaagcagtttctggaactgtgcaaatggttataggaggcaggacttgggaaaaaaaa

SEQ ID NO: 48295 - DNA, 80 bp, synthetic construct; identical to SEQ ID NO: 15932
  source 1..80: mol_type = other DNA

SEQ ID NO: 48296 - DNA, 80 bp, synthetic construct
  source 1..80: mol_type = other DNA
agaagttggcaggactgggaaaggcaaaagagggtagaagctgagccaagggctgccccaccgccatgggtaagttcctg

SEQ ID NO: 48297 - DNA, 80 bp, synthetic construct
  source 1..80: mol_type = other DNA
aggatggtgcacatgatgagcatgttgaagagcgtgcgtggggtcaaggaaagctgagcagcatgggccggccacgccac

SEQ ID NO: 48298 - DNA, 80 bp, synthetic construct
  source 1..80: mol_type = other DNA
ggccccctggcctgctccatgacacctaataggcaccagagacttgaaaccacactgctggtagggtctcgtgtggaggg

SEQ ID NO: 48299 - DNA, 80 bp, synthetic construct; identical to SEQ ID NO: 15933
  source 1..80: mol_type = other DNA

SEQ ID NO: 48300 - DNA, 80 bp, synthetic construct
  source 1..80: mol_type = other DNA
tgcctttctggtaacacggtgctgcctctgtgccctgcgggcttcgggcacccctcttttagccctggtggctcactgaa

SEQ ID NO: 48301 - DNA, 80 bp, synthetic construct
  source 1..80: mol_type = other DNA
gctccaatcgccctcctccacctctgcaaggcctgcagaggaacaagggggcagactctgggcctcctgtaggctggggc

SEQ ID NO: 48302 - DNA, 80 bp, synthetic construct
  source 1..80: mol_type = other DNA
attcccacaggccgcccaggagctgcggtaattgagctccaggggctgcctcttgcctccctagcatagctccacctcac

SEQ ID NO: 48303 - DNA, 80 bp, synthetic construct; identical to SEQ ID NO: 15934
  source 1..80: mol_type = other DNA

SEQ ID NO: 48304 - DNA, 80 bp, synthetic construct
  source 1..80: mol_type = other DNA
aggcttatatccctctccagctttcaaggcaggatcagataatcatctcagtatcagtaccccttctcccttacacacac

SEQ ID NO: 48305 - DNA, 80 bp, synthetic construct
  source 1..80: mol_type = other DNA
aaaatatgcaagcaatgatgctaagagtgaatattcattgagcccttcctaggtaccagaatttgctctccgtgtccatc

SEQ ID NO: 48306 - DNA, 80 bp, synthetic construct
  source 1..80: mol_type = other DNA
ccccaccacccccaaggtggccatggaggaatccccggaaactgtgaatatgctaatttgtatgacaaaatgagaccgtg

SEQ ID NO: 48307 - DNA, 80 bp, synthetic construct
  source 1..80: mol_type = other DNA
caggtgcacactaccatagccagctaatttttaatttttttttgtagacacaacgtcttaccatgttgcttagctggtct

SEQ ID NO: 48308 - DNA, 80 bp, synthetic construct; identical to SEQ ID NO: 15935
  source 1..80: mol_type = other DNA

SEQ ID NO: 48309 - DNA, 80 bp, synthetic construct
  source 1..80: mol_type = other DNA
gctgacaccctgagtttagtccagcaagaaccattttggacctctgacctccaaagctgtaaggtgataaatctgctttg

SEQ ID NO: 48310 - DNA, 80 bp, synthetic construct
  source 1..80: mol_type = other DNA
aggccacccggtccactctcctgcctccagactggagggtctgcatgagtcatgctgcttctggctctcacatgccaagc

SEQ ID NO: 48311 - DNA, 80 bp, synthetic construct; identical to SEQ ID NO: 15936
  source 1..80: mol_type = other DNA

SEQ ID NO: 48312 - DNA, 80 bp, synthetic construct
  source 1..80: mol_type = other DNA
ttccagctctagggggaccactcacagctctccttagagtgggggaacaggccccattgcagggagcagtggtgtgaaca

SEQ ID NO: 48313 - DNA, 80 bp, synthetic construct
  source 1..80: mol_type = other DNA
taccttttccagacacagcaatggcttagggtgacgtgtagcaagctcttgtctctctgccacttcactgctcaaaatcc

SEQ ID NO: 48314 - DNA, 80 bp, synthetic construct
  source 1..80: mol_type = other DNA
atagagacgagtcaactgaactcctggccagggcacacctgtttgcactgccttgtaatttcaggctgatgattgagctg

SEQ ID NO: 48315 - DNA, 80 bp, synthetic construct
  source 1..80: mol_type = other DNA
gctgcctaagtcttcagatcccagggagtttaaaaaaaaaaaccacccaaagaaaaggtaattaactctggaggggtatt

SEQ ID NO: 48316 - DNA, 80 bp, synthetic construct; identical to SEQ ID NO: 15937
  source 1..80: mol_type = other DNA

SEQ ID NO: 48317 - DNA, 80 bp, synthetic construct
  source 1..80: mol_type = other DNA
acttgctacggtctgtgagctcctggattgtcacgactgagcaggttttctcaccaggctgcattcctgcccacttttaa

SEQ ID NO: 48318 - DNA, 80 bp, synthetic construct
  source 1..80: mol_type = other DNA
atgagacctgatgttctttagaaatgcatagtgactgataatgggcacaggatttcttttggggtggtgcaaatgttctg

SEQ ID NO: 48319 - DNA, 80 bp, synthetic construct
  source 1..80: mol_type = other DNA
aagaccagcatggccaagatggtgaaaccccacctttactaaaaatacaaaaattagcccggcgtggtggcggacgcctg

SEQ ID NO: 48320 - DNA, 80 bp, synthetic construct; identical to SEQ ID NO: 15938
  source 1..80: mol_type = other DNA

SEQ ID NO: 48321 - DNA, 80 bp, synthetic construct
  source 1..80: mol_type = other DNA
caacatcctggtgaagctgatgctactggtccacacaccacactcaatgtcaaggctcaacagtgttgctgaggggctgc

SEQ ID NO: 48322 - DNA, 80 bp, synthetic construct
  source 1..80: mol_type = other DNA
cactgggaacccagtacaggtcctcactgatgcttgacaattccctggggcagctgtcctgggggatagaggctggctcc

SEQ ID NO: 48323 - DNA, 80 bp, synthetic construct
  source 1..80: mol_type = other DNA
gcaccttgcaggagctctggagcttctgctacatccctgagggcttctgtggctgccaaacagtgctgggttggttagat

SEQ ID NO: 48324 - DNA, 80 bp, synthetic construct; identical to SEQ ID NO: 15939
  source 1..80: mol_type = other DNA

SEQ ID NO: 48325 - DNA, 80 bp, synthetic construct
  source 1..80: mol_type = other DNA
cactttgctcacgccacagccatggtttgcatgtggggttgtctcatgaaccccaccagaaaggcaggggtaggctggag

SEQ ID NO: 48326 - DNA, 80 bp, synthetic construct
  source 1..80: mol_type = other DNA
gggcaggaaaagctcctgacctgccagcctcagtcctggttatttagtccctcactaggtatctgtaatcctgatgcctc

SEQ ID NO: 48327 - DNA, 80 bp, synthetic construct
  source 1..80: mol_type = other DNA
agcagagccacctgcgtgtgtgcactcaccctggttgccactggccaaagggaggcctgcccaggccctcgcagtgaaat

SEQ ID NO: 48328 - DNA, 80 bp, synthetic construct; identical to SEQ ID NO: 15940
  source 1..80: mol_type = other DNA

SEQ ID NO: 48329 - DNA, 80 bp, synthetic construct
  source 1..80: mol_type = other DNA
cagagttctttgagatactctgaaactgcaaacattttgtcaacgcctaatcaaaaagcaagtgctgcctccctcaaaag

SEQ ID NO: 48330 - DNA, 80 bp, synthetic construct
  source 1..80: mol_type = other DNA
gacagacgtcatttcttctgggatcctcagtagcttagcttctagaatgttctgaagaatcagaagagggtttctcaaac

SEQ ID NO: 48331 - DNA, 80 bp, synthetic construct
  source 1..80: mol_type = other DNA
tgtcttaggaccagcagggaatcagcgctactctcactcctaaactagaatggaggtggggtgggggcagcacgtgcaca

SEQ ID NO: 48332 - DNA, 80 bp, synthetic construct; identical to SEQ ID NO: 15941
  source 1..80: mol_type = other DNA

SEQ ID NO: 48333 - DNA, 80 bp, synthetic construct
  source 1..80: mol_type = other DNA
gagatttagtttcaaaattatagtcacaaaaagaagggagcttttacagtccttgcccagctgttgtcacagcagaggct

SEQ ID NO: 48334 - DNA, 80 bp, synthetic construct
  source 1..80: mol_type = other DNA
agaagcagtcccctgagagagcttttcttgggaccctgtctcctggagtccaggacaaatgtcagccccatcccacagga

SEQ ID NO: 48335 - DNA, 80 bp, synthetic construct
  source 1..80: mol_type = other DNA
aggacagcagtgcctccccacctgccccggtgtgtggtggtcacagctctgtggcctcacggaggtctaggggaatgtca

SEQ ID NO: 48336 - DNA, 80 bp, synthetic construct
  source 1..80: mol_type = other DNA
ctccattgccttgtggggctgcaggcagcgtggccagggatcaacaagtggaaacagaaagtgagaggccggaatcatcc

SEQ ID NO: 48337 - DNA, 80 bp, synthetic construct; identical to SEQ ID NO: 15942
  source 1..80: mol_type = other DNA

SEQ ID NO: 48338 - DNA, 80 bp, synthetic construct
  source 1..80: mol_type = other DNA
ccaagttcaaggcctcctcccccacctgtttatgtggactgggtgggcttttacttcacatgcacaaccactcacgtatc

SEQ ID NO: 48339 - DNA, 80 bp, synthetic construct
  source 1..80: mol_type = other DNA
gtgcctggccactgtcttcctcatactcagccttctgggaaaaatacctcccccaaattcaaatccaccttcctctggaa

SEQ ID NO: 48340 - DNA, 80 bp, synthetic construct; identical to SEQ ID NO: 15943
  source 1..80: mol_type = other DNA

SEQ ID NO: 48341 - DNA, 80 bp, synthetic construct
  source 1..80: mol_type = other DNA
gggtgtggggactacatgctgtccccattaaggagaaaggaccacaggctatgctctgtggcccaaactcaggcagggcc

SEQ ID NO: 48342 - DNA, 80 bp, synthetic construct
  source 1..80: mol_type = other DNA
ccaaaccagcatctcaggctgcataattcctgtttttattccagaattccaaaattaaggtgattggaatatagatcacc

SEQ ID NO: 48343 - DNA, 80 bp, synthetic construct
  source 1..80: mol_type = other DNA
tccaggtcctccaggggctctccgatgagctcttggggtggattgccatagagatctggcagctttttggaggcctgcag

SEQ ID NO: 48344 - DNA, 80 bp, synthetic construct; identical to SEQ ID NO: 15944
  source 1..80: mol_type = other DNA

SEQ ID NO: 48345 - DNA, 80 bp, synthetic construct
  source 1..80: mol_type = other DNA
ctccacaggcacacctgggcaacactggcctgggtaaacccaaagcccccccaggctacgaggcacacatgtagacaggc

SEQ ID NO: 48346 - DNA, 80 bp, synthetic construct
  source 1..80: mol_type = other DNA
tcttttggtttcttaactgtcatcacttgagacatttctcagcttggagttgtcatccagatgttggcaccctagtgtac

SEQ ID NO: 48347 - DNA, 80 bp, synthetic construct
  source 1..80: mol_type = other DNA
aacccgaagataactctgccttccatctcccccatcccctttaaaaatacatacatgcttacagattttgtaataaccaa

SEQ ID NO: 48348 - DNA, 80 bp, synthetic construct
  source 1..80: mol_type = other DNA
actcatcagcgaggacatccagccggcacaggcatgtgatgccaaaccgggagaatgtggcccctggtggcctcaaacaa

SEQ ID NO: 48349 - DNA, 80 bp, synthetic construct; identical to SEQ ID NO: 15945
  source 1..80: mol_type = other DNA

SEQ ID NO: 48350 - DNA, 80 bp, synthetic construct
  source 1..80: mol_type = other DNA
aatagtgagcaaacacaacacactcaggcctcaaaagggcgccgctcgtccctggggaagtgtggattgagatttgtgaa

SEQ ID NO: 48351 - DNA, 80 bp, synthetic construct
  source 1..80: mol_type = other DNA
tttgagtgaacagacatctgtaacactcatcaatgcatgtgagtgaggacttttttttcttagctcatggatatttgggt

SEQ ID NO: 48352 - DNA, 80 bp, synthetic construct
  source 1..80: mol_type = other DNA
ctccactgtgagcaatcagttccataaattgggaagccacctcttttgcttggacttaatttctaaaaacagtgttctct

SEQ ID NO: 48353 - DNA, 80 bp, synthetic construct; identical to SEQ ID NO: 15946
  source 1..80: mol_type = other DNA

SEQ ID NO: 48354 - DNA, 80 bp, synthetic construct
  source 1..80: mol_type = other DNA
gggaatcactctcctcactgctaatggcatagaccagttttgcctgtctgtgtattaatagttcaggggcccttcttaac

SEQ ID NO: 48355 - DNA, 80 bp, synthetic construct
  source 1..80: mol_type = other DNA
tgaccaaaagaaactgcagctatttccctgtcatgttacagttgctgctggcctctcaaataacattaatactcatcacg

SEQ ID NO: 48356 - DNA, 80 bp, synthetic construct; identical to SEQ ID NO: 15947
  source 1..80: mol_type = other DNA

SEQ ID NO: 48357 - DNA, 80 bp, synthetic construct
  source 1..80: mol_type = other DNA
tggcctctggctctgacttacctgaactttgtgtcatttctgggtgtggattgggaccccagtctgccccacccttggac

SEQ ID NO: 48358 - DNA, 80 bp, synthetic construct
  source 1..80: mol_type = other DNA
ggcctccagcagagcatccactcgctcggggccctggcctgggaggggtatagtctgcccaagggagctgctgaaaccag

SEQ ID NO: 48359 - DNA, 80 bp, synthetic construct
  source 1..80: mol_type = other DNA
ccctgcccttcctttagcagctcagggcccacgccctgctgtggccaagcctggctgagtcctgcctgcagggcttccgg

SEQ ID NO: 48360 - DNA, 80 bp, synthetic construct; identical to SEQ ID NO: 15948
  source 1..80: mol_type = other DNA

SEQ ID NO: 48361 - DNA, 80 bp, synthetic construct
  source 1..80: mol_type = other DNA
tagagccccacccccaactccatcctgccccaggttcatcagcttctggaactggatgcatccctccctgcatccggaag

SEQ ID NO: 48362 - DNA, 80 bp, synthetic construct
  source 1..80: mol_type = other DNA
cctccctctttccttctatcccacacatgcagccccctgctcctagatttagacattctccaaaattctgtgtgccctga

SEQ ID NO: 48363 - DNA, 80 bp, synthetic construct
  source 1..80: mol_type = other DNA
gtgtattcacatcaaggtagagatgctgcacaaggagaatattaactgttcacaccagaaactagacccccctgcactgt

SEQ ID NO: 48364 - DNA, 80 bp, synthetic construct
  source 1..80: mol_type = other DNA
ctacttgtcccggtttacatgggactttcctcattttggcagtaaaatttctgcaccttgggataccccccagtcctgga

SEQ ID NO: 48365 - DNA, 80 bp, synthetic construct; identical to SEQ ID NO: 15949
  source 1..80: mol_type = other DNA

SEQ ID NO: 48366 - DNA, 80 bp, synthetic construct
  source 1..80: mol_type = other DNA
gcactcgccttctgcctgcccctcagtgctaaagaagaggctcaggaagagggtgtgggtgccctcaaaacaggagctca

SEQ ID NO: 48367 - DNA, 80 bp, synthetic construct
  source 1..80: mol_type = other DNA
gatgtagcttgacaagctgtaacttcaccccagtcatccacaggcccccaaatgtggagatgacagccaggaacctcgct

SEQ ID NO: 48368 - DNA, 80 bp, synthetic construct; identical to SEQ ID NO: 15950
  source 1..80: mol_type = other DNA

SEQ ID NO: 48369 - DNA, 80 bp, synthetic construct
  source 1..80: mol_type = other DNA
tttcctgttcctagggataaggaagtggttagggctgtgcttggaagccagctcacctgagtgaatctgggccctggcca

SEQ ID NO: 48370 - DNA, 80 bp, synthetic construct
  source 1..80: mol_type = other DNA
ttgatatttgcacatgcttgacacacagaaagtgccaaatgaatttagttggtattgtggttattgttgttattattatt

SEQ ID NO: 48371 - DNA, 80 bp, synthetic construct
  source 1..80: mol_type = other DNA
tggatttttgtcctggtctcccaaagcagggactggtgaatgaaggaatgaaagaatgagggagtgtgagattaaccttc

SEQ ID NO: 48372 - DNA, 80 bp, synthetic construct; identical to SEQ ID NO: 15951
  source 1..80: mol_type = other DNA

SEQ ID NO: 48373 - DNA, 80 bp, synthetic construct
  source 1..80: mol_type = other DNA
ctgtgtctgtgacccccacttcaaggctaagagtcagccctgtcagcctcatctgagcctggttctccctctatgcagcc

SEQ ID NO: 48374 - DNA, 80 bp, synthetic construct
  source 1..80: mol_type = other DNA
aatgtggctactgtggactgagttgtgctattgtaaagtcacatccattttgcaggcttagtacaataaggaatgttgac

SEQ ID NO: 48375 - DNA, 80 bp, synthetic construct
  source 1..80: mol_type = other DNA
tgtgactcatattatatttctgttggatggcactggcatcaagttccagccaccaggccctaagcccttaaaaaaattct

SEQ ID NO: 48376 - DNA, 80 bp, synthetic construct
  source 1..80: mol_type = other DNA
gcacctgtaatcccagctaccaggaggctgaggcaggaaaattgcttgaactcgggaggcagaggttgcagtgagcggag

SEQ ID NO: 48377 - DNA, 80 bp, synthetic construct; identical to SEQ ID NO: 15952
  source 1..80: mol_type = other DNA

SEQ ID NO: 48378 - DNA, 80 bp, synthetic construct
  source 1..80: mol_type = other DNA
acattggtccgtccttgcacggggcctcagctaaccagctccccacaggctccgctcctttgaggctgcataggcattaa

SEQ ID NO: 48379 - DNA, 80 bp, synthetic construct
  source 1..80: mol_type = other DNA
ggaatgccctcatttacatacatttacatctcatttattccaacacccaggctgaagccgaggctaattcagctgacagg

SEQ ID NO: 48380 - DNA, 80 bp, synthetic construct
  source 1..80: mol_type = other DNA
gacaaactggcctgggggtagccactctcttcactgaaaggtgggtggccctgcttttttcttcatagcccttccccaca

SEQ ID NO: 48381 - DNA, 80 bp, synthetic construct; identical to SEQ ID NO: 15953
  source 1..80: mol_type = other DNA

SEQ ID NO: 48382 - DNA, 80 bp, synthetic construct
  source 1..80: mol_type = other DNA
tcaggccagaaaggtgcccacatgtggcccaggaaacaccgtcatggcacacaggtgcccgagacagcaatcagcgttct

SEQ ID NO: 48383 - DNA, 80 bp, synthetic construct
  source 1..80: mol_type = other DNA
tctagggtctcttagtgtccagagggaaataagccaatcaaccaatacactaaatttatgccacaaaagtgtccatgatg

SEQ ID NO: 48384 - DNA, 80 bp, synthetic construct; identical to SEQ ID NO: 15954
  source 1..80: mol_type = other DNA

SEQ ID NO: 48385 - DNA, 80 bp, synthetic construct
  source 1..80: mol_type = other DNA
actgtgaatacaagtcacccatctggggacgtgtccttaatttgatcataaaaggcgaggactggaagggacctgaagtc

SEQ ID NO: 48386 - DNA, 80 bp, synthetic construct
  source 1..80: mol_type = other DNA
gcaactagctgtcgctttatttaactggcagtctgtgctgcatctgacccagcacagtggtgaggctgtcgctgcaaatg

SEQ ID NO: 48387 - DNA, 80 bp, synthetic construct
  source 1..80: mol_type = other DNA
ctggggttcttcctaggagcatgcccagaggcagcagagctgcgcagccaagggcgggcaccttggctctgaggggcttg

SEQ ID NO: 48388 - DNA, 80 bp, synthetic construct; identical to SEQ ID NO: 15955
  source 1..80: mol_type = other DNA

SEQ ID NO: 48389 - DNA, 80 bp, synthetic construct
  source 1..80: mol_type = other DNA
tctgagctctgcccacttccccgtgtgaccttgagcctatggggcagccagcaccagccttggccacccagggctgttag

SEQ ID NO: 48390 - DNA, 80 bp, synthetic construct
  source 1..80: mol_type = other DNA
agaagaagaaactgaagaggagagaaagaactgaagcctcagtgcatagacattctctcctgacaacaggcccagtcaca

SEQ ID NO: 48391 - DNA, 80 bp, synthetic construct
  source 1..80: mol_type = other DNA
ttaagaattttcactgtccttttctgcccctccagaatagtaaacagagtgaggaatggacaagagaggttgagaaactg

SEQ ID NO: 48392 - DNA, 80 bp, synthetic construct
  source 1..80: mol_type = other DNA
ccatggctgtggctcttcagggaagacaagtgacggcaggcggggtggagaaggtaagataagtgttaaagaattgatgt

SEQ ID NO: 48393 - DNA, 80 bp, synthetic construct; identical to SEQ ID NO: 15956
  source 1..80: mol_type = other DNA

SEQ ID NO: 48394 - DNA, 80 bp, synthetic construct
  source 1..80: mol_type = other DNA
tttgcacttgcagttccctctgtaacattctttccctagacctcctcgggcttggttctttcatgttattcaggtctcag

SEQ ID NO: 48395 - DNA, 80 bp, synthetic construct
  source 1..80: mol_type = other DNA
gtaaacttcataagaacaattgttatagcttgtacaccttctagaaccttccatggcccaaaggcatgaactctgcctca

SEQ ID NO: 48396 - DNA, 80 bp, synthetic construct; identical to SEQ ID NO: 15957
  source 1..80: mol_type = other DNA

SEQ ID NO: 48397 - DNA, 80 bp, synthetic construct
  source 1..80: mol_type = other DNA
tccctcccagagattcacagaaagagttattccctctacccaggccttcctgactgccccctgaacaaacagtaaccact

SEQ ID NO: 48398 - DNA, 80 bp, synthetic construct
  source 1..80: mol_type = other DNA
cagctcccttctatctctctcctccctcttcaaccatcaaactctttgaaagagctgtctatacatgctgtctccacgtc

SEQ ID NO: 48399 - DNA, 80 bp, synthetic construct
  source 1..80: mol_type = other DNA
ggagtttctcctaccaaggtcaccagcaccctcaccatggctcgatctaatggacacttctttttaaattattcattctt

SEQ ID NO: 48400 - DNA, 80 bp, synthetic construct
  source 1..80: mol_type = other DNA
tctctgcagacttctcctgctttgatggttggagtatttctgggctcctgactcagcccccttccttcttaccctctaca

SEQ ID NO: 48401 - DNA, 80 bp, synthetic construct; identical to SEQ ID NO: 15958
  source 1..80: mol_type = other DNA

SEQ ID NO: 48402 - DNA, 80 bp, synthetic construct
  source 1..80: mol_type = other DNA
gtcacttttcctttgctcttcatcaagcttgccaacccaaatttaacttgcccattcttcttctcatggtgcgccagggg

SEQ ID NO: 48403 - DNA, 80 bp, synthetic construct
  source 1..80: mol_type = other DNA
gagctggggaggtggtatagtacacagcagatattgacacttgggctcaaacccaagttctgctacttagaaaatgtgac

SEQ ID NO: 48404 - DNA, 80 bp, synthetic construct
  source 1..80: mol_type = other DNA
ttagctatttttagtaacattactgaggataaattcccaattcctgagcagagctcacaagggcccccgtgactgtgacc

SEQ ID NO: 48405 - DNA, 80 bp, synthetic construct; identical to SEQ ID NO: 15959
  source 1..80: mol_type = other DNA

SEQ ID NO: 48406 - DNA, 80 bp, synthetic construct
  source 1..80: mol_type = other DNA
ctcttctcccatccccagctgtctctggtgcttcccactagtcctccaagcccaatcttcatgctgagtgagtcaatact

SEQ ID NO: 48407 - DNA, 80 bp, synthetic construct
  source 1..80: mol_type = other DNA
ttgccccacagaaagtagatctcaaggtgtcttcacattgcgtggtgcccccaatccactgattctctagatgacattga

SEQ ID NO: 48408 - DNA, 80 bp, synthetic construct; identical to SEQ ID NO: 15960
  source 1..80: mol_type = other DNA

SEQ ID NO: 48409 - DNA, 80 bp, synthetic construct
  source 1..80: mol_type = other DNA
cacgtggtttgccatctggatgatactgcctaggctcactgggagacacacctggggtctcagcaggaggcgagcagatg

SEQ ID NO: 48410 - DNA, 80 bp, synthetic construct
  source 1..80: mol_type = other DNA
caggcctacagccagggacttgtccccaacatcatttccccccatcctcatcaccaccactaacagtccccacacctctg

SEQ ID NO: 48411 - DNA, 80 bp, synthetic construct
  source 1..80: mol_type = other DNA
caatctcaccgcaaagagatctccaccccttcgagaagcacagagatcagacagaggagatgcggcccctttagggcgtc

SEQ ID NO: 48412 - DNA, 80 bp, synthetic construct; identical to SEQ ID NO: 15961
  source 1..80: mol_type = other DNA

SEQ ID NO: 48413 - DNA, 80 bp, synthetic construct
  source 1..80: mol_type = other DNA
ggcggatctgcgccccttctccccctccggctctctggggcactgatcggggagggagcggctgggcggacccggggcag

SEQ ID NO: 48414 - DNA, 80 bp, synthetic construct
  source 1..80: mol_type = other DNA
cgcggactcggctcggcgcggggctcggggcactgggcgcaggctcagcggccccgggggagcgatccctgcatcctacg

SEQ ID NO: 48415 - DNA, 80 bp, synthetic construct
  source 1..80: mol_type = other DNA
aatgcttgaggagagagagagagtaaggagccagccatgaatcctttccagaaaaatgagtccaaggaaactcttttttc

SEQ ID NO: 48416 - DNA, 80 bp, synthetic construct; identical to SEQ ID NO: 15962
  source 1..80: mol_type = other DNA

SEQ ID NO: 48417 - DNA, 80 bp, synthetic construct
  source 1..80: mol_type = other DNA
gggaaaaaagcaattcgaatgtccagggaaacttggcaagcattcttgtctgaagaactgtgtgtgattgttctttcttt

SEQ ID NO: 48418 - DNA, 80 bp, synthetic construct
  source 1..80: mol_type = other DNA
tatactcgctaaagcacttctaaactcatcatctcagtcaattcttacactaaaattctgtaagtggggaggatatagta

SEQ ID NO: 48419 - DNA, 80 bp, synthetic construct
  source 1..80: mol_type = other DNA
gtgtgtcggctaaactccagattgcataattctcaagctgtgagctgcaaaggtaagaagcccagttcattgtatgtttc

SEQ ID NO: 48420 - DNA, 80 bp, synthetic construct
  source 1..80: mol_type = other DNA
gatgtatatacttctcatgaaatgaggcaatataaatcttacaagatttgactgtactgaggacagatacctctatgtct

SEQ ID NO: 48421 - DNA, 80 bp, synthetic construct; identical to SEQ ID NO: 15963
  source 1..80: mol_type = other DNA

SEQ ID NO: 48422 - DNA, 80 bp, synthetic construct
  source 1..80: mol_type = other DNA
gcagagactgacatctgaatctcactgcttggatatcaggtattccataggctacctctttattctgttcctaggaagta

SEQ ID NO: 48423 - DNA, 80 bp, synthetic construct
  source 1..80: mol_type = other DNA
cacttttagtgttacctaataggtgtgtcatgaagagtagagaccattgctccattacctaccaagatgatttgaaataa

SEQ ID NO: 48424 - DNA, 80 bp, synthetic construct; identical to SEQ ID NO: 15964
  source 1..80: mol_type = other DNA

SEQ ID NO: 48425 - DNA, 80 bp, synthetic construct
  source 1..80: mol_type = other DNA
caagatcagaaaggcctgagacaaaccagaacatagactttgagaatgggtaagtgggtggagctgggcatgatggcatg

SEQ ID NO: 48426 - DNA, 80 bp, synthetic construct
  source 1..80: mol_type = other DNA
gggggggagggaaagctctcattatctcagttacatttttcatacctgttcctcaggtatgagctaacagctcttggcta

SEQ ID NO: 48427 - DNA, 80 bp, synthetic construct
  source 1..80: mol_type = other DNA
ttggcctaaatgatgctaggggtgcacatagactgaagggaggagtattatatttgtacattcaacatagtcccattcac

SEQ ID NO: 48428 - DNA, 80 bp, synthetic construct
  source 1..80: mol_type = other DNA
ccataagtcactttaatgcatctatcttgttttgtctccccacgcctccttttttttcccactacagctgtgctgatcct

SEQ ID NO: 48429 - DNA, 80 bp, synthetic construct; identical to SEQ ID NO: 15965
  source 1..80: mol_type = other DNA

SEQ ID NO: 48430 - DNA, 80 bp, synthetic construct
  source 1..80: mol_type = other DNA
attccatagtttaatattaaatcttgctctgatcttgttggagatagacagcactatccaccagcaaatttctaatttta

SEQ ID NO: 48431 - DNA, 80 bp, synthetic construct
  source 1..80: mol_type = other DNA
aaaatacaaaaattggccaggcatggtggcgggcacctgtaatcccagctacttgggaggctgaggcaggagagttgctt

SEQ ID NO: 48432 - DNA, 80 bp, synthetic construct
  source 1..80: mol_type = other DNA
atcccacctcctttaggatcttcttatgagtgtctcttttcagctcttttaccatctatttctcttctctaatgtctttt

SEQ ID NO: 48433 - DNA, 80 bp, synthetic construct; identical to SEQ ID NO: 15966
  source 1..80: mol_type = other DNA

SEQ ID NO: 48434 - DNA, 80 bp, synthetic construct
  source 1..80: mol_type = other DNA
tagaaggttgtagtatgtagtgtttcccaaaccagtttgactatggaatattttttctggatattttgtggacccagtgt

SEQ ID NO: 48435 - DNA, 80 bp, synthetic construct
  source 1..80: mol_type = other DNA
acagtttcttgacttgggagaggaatggtgggtgagtagctgagatctacatttgctacatatgtagtagtagtcaccaa

SEQ ID NO: 48436 - DNA, 80 bp, synthetic construct
  source 1..80: mol_type = other DNA
tggtgagcaattgtttcctggttaattcagagaaaatttaacaacctctacttgtgctctcaaatcaatccttcttgatg

SEQ ID NO: 48437 - DNA, 80 bp, synthetic construct; identical to SEQ ID NO: 15967
  source 1..80: mol_type = other DNA

SEQ ID NO: 48438 - DNA, 80 bp, synthetic construct
  source 1..80: mol_type = other DNA
gagcaccttctgtttgtccaaggaaccatggaggatgaagaggtgaattacacatactacctaattcatattgttcatat

SEQ ID NO: 48439 - DNA, 80 bp, synthetic construct
  source 1..80: mol_type = other DNA
taacatttcagtctgtttatcatttctgtgaaactccctggccttctctacagtatatttttctcactctcgtcctctta

SEQ ID NO: 48440 - DNA, 80 bp, synthetic construct; identical to SEQ ID NO: 15968
  source 1..80: mol_type = other DNA

SEQ ID NO: 48441 - DNA, 80 bp, synthetic construct
  source 1..80: mol_type = other DNA
gtttttactgcttcccatctctttttcctacaattgagcatatatgctactgccaaattaattttcctaaaagaaatcct

SEQ ID NO: 48442 - DNA, 80 bp, synthetic construct
  source 1..80: mol_type = other DNA
aatgacatctctttttcatgtctgtttgcattgtttctgcttcatggaaaccccttcttccccaccctttcatgtccaaa

SEQ ID NO: 48443 - DNA, 80 bp, synthetic construct
  source 1..80: mol_type = other DNA
ttatatatgaatctgatatcttctttcaaacacttagaggacaaagtcatttatatatatttttccccacccaccccagt

SEQ ID NO: 48444 - DNA, 80 bp, synthetic construct
  source 1..80: mol_type = other DNA
cgattctcctgcctcagcctcctgagtatctgggattatatgcatgtaccaccatgcccggctaatttttgtatttttag

SEQ ID NO: 48445 - DNA, 80 bp, synthetic construct; identical to SEQ ID NO: 15969
  source 1..80: mol_type = other DNA

SEQ ID NO: 48446 - DNA, 80 bp, synthetic construct
  source 1..80: mol_type = other DNA
tttgtatctctttcacaaagggagtagtttgagaaaatgtgggtaacttgttctcctgtagtcatgtttgtgtgtgtgtg

SEQ ID NO: 48447 - DNA, 80 bp, synthetic construct
  source 1..80: mol_type = other DNA
tgctagaggaaaatggatagatttttgtttcaaaccgttaagttcttccccacctctcatatgtttctctgcctgagtat

SEQ ID NO: 48448 - DNA, 80 bp, synthetic construct; identical to SEQ ID NO: 15970
  source 1..80: mol_type = other DNA

SEQ ID NO: 48449 - DNA, 80 bp, synthetic construct
  source 1..80: mol_type = other DNA
agttcctagattttatatcctattacccaggctcatcagttttgatttttgacctgggcaatcacttagaaccactctct

SEQ ID NO: 48450 - DNA, 80 bp, synthetic construct
  source 1..80: mol_type = other DNA
gtatttctcctaatgctatccctccaccagccctccaccccatgacaggcccccatgtgtgacgttccccgcctggtgtc

SEQ ID NO: 48451 - DNA, 80 bp, synthetic construct
  source 1..80: mol_type = other DNA
ggtgtatatgtgccacattttcttaatccagtctatcattgatggacatttggcttggttgcaagtttttgctattgtga

SEQ ID NO: 48452 - DNA, 80 bp, synthetic construct
  source 1..80: mol_type = other DNA
tcccaccaaccagtgtaaaagtgttcctatttctccacatcctctccagcatctgctgtctcctgcctttttaatgattg

SEQ ID NO: 48453 - DNA, 80 bp, synthetic construct; identical to SEQ ID NO: 15971
  source 1..80: mol_type = other DNA

SEQ ID NO: 48454 - DNA, 80 bp, synthetic construct
  source 1..80: mol_type = other DNA
atggtaatgtctaggttttcttctagggtttttatggttttaggtctaacatgtaagtctttaatccatcttgaattaat

SEQ ID NO: 48455 - DNA, 80 bp, synthetic construct
  source 1..80: mol_type = other DNA
gaggcctctgttctgttccattggtctatatatgtgttttggtaccagtaccatgctgttttggttactgtcgccttgta

SEQ ID NO: 48456 - DNA, 80 bp, synthetic construct; identical to SEQ ID NO: 15972
  source 1..80: mol_type = other DNA

SEQ ID NO: 48457 - DNA, 80 bp, synthetic construct
  source 1..80: mol_type = other DNA
tggtgtataagaatgcttgtgatttttgtacattgattttgtatcctgagactttgctgaagttgcttatcagcttaagg

SEQ ID NO: 48458 - DNA, 80 bp, synthetic construct
  source 1..80: mol_type = other DNA
gtgagagagggcatccctgtcttgtaccagttttcaaagggaatgcttccagttcttgcccattcagtatgatattggct

SEQ ID NO: 48459 - DNA, 80 bp, synthetic construct
  source 1..80: mol_type = other DNA
gccggattacgtttattgattggcatatgttgaaccagccttgcatcccagggatgaagccgacttgatcatggtggata

SEQ ID NO: 48460 - DNA, 80 bp, synthetic construct
  source 1..80: mol_type = other DNA
attctctctttttctattgattggaatagtttcagaaggaatgataccagcccctctttctacctctggtagaattcagc

SEQ ID NO: 48461 - DNA, 80 bp, synthetic construct; identical to SEQ ID NO: 15973
  source 1..80: mol_type = other DNA

SEQ ID NO: 48462 - DNA, 80 bp, synthetic construct
  source 1..80: mol_type = other DNA
tgatcttagttatttcttgccttctgctagcttttgaatttgtttgctcttgcttctctagttcttttaatggtgatgtt

SEQ ID NO: 48463 - DNA, 80 bp, synthetic construct
  source 1..80: mol_type = other DNA
tatttacccagtagtcattcaggagcaggttgttcagtttccatgtagttgtgcattttgagtgagtttcttaatcctga

SEQ ID NO: 48464 - DNA, 80 bp, synthetic construct
  source 1..80: mol_type = other DNA
agttctgtagatgtttattaggtccacttggtgcagagctgagttcatgtcctgtatatccttgttaaccttctatctca

SEQ ID NO: 48465 - DNA, 80 bp, synthetic construct
  source 1..80: mol_type = other DNA
tgatccctttaccattatgtaatggccttccttgtctcttttgatctttgttggtttaaagtctgttttgtcagagacta

SEQ ID NO: 48466 - DNA, 80 bp, synthetic construct; identical to SEQ ID NO: 15974
  source 1..80: mol_type = other DNA

SEQ ID NO: 48467 - DNA, 80 bp, synthetic construct
  source 1..80: mol_type = other DNA
caaaatctcttagcatttgcttgcctgtaaaggattttatttctccttcacttatgaagcttagtttggctggatatgaa

SEQ ID NO: 48468 - DNA, 80 bp, synthetic construct
  source 1..80: mol_type = other DNA
tcatttcaactttggtgaatctgacaattatgtgtcttggggttgcccttctcgaggagtatctttgtggtgttctctga

SEQ ID NO: 48469 - DNA, 80 bp, synthetic construct
  source 1..80: mol_type = other DNA
gttcatttctttttactcttttttctctaaacttctcttcttgcttatttcatttatttgatcttccatcactgataccc

SEQ ID NO: 48470 - DNA, 80 bp, synthetic construct; identical to SEQ ID NO: 15975
  source 1..80: mol_type = other DNA

SEQ ID NO: 48471 - DNA, 80 bp, synthetic construct
  source 1..80: mol_type = other DNA
ctacagatggggttttggtgtggatgtcctttctgttgatgttgatgctatttcttcctttttattagttttccttctaa

SEQ ID NO: 48472 - DNA, 80 bp, synthetic construct
  source 1..80: mol_type = other DNA
acacccgcctgtaatgaagtgtcagttggtccccactgagaggtgtctcccggttaggctacacaggcttcagggaccca

SEQ ID NO: 48473 - DNA, 80 bp, synthetic construct
  source 1..80: mol_type = other DNA
ggcagcaggccttgcagagctgcagtgggctctgcccagttcaagcttccccagcttctttgtttacctactcaagcctc

SEQ ID NO: 48474 - DNA, 80 bp, synthetic construct; identical to SEQ ID NO: 15976
  source 1..80: mol_type = other DNA

SEQ ID NO: 48475 - DNA, 80 bp, synthetic construct
  source 1..80: mol_type = other DNA
cagaccggagtggttcgtattcagccatcttggagttattatgcttttgaatgtcctctccacacttctcttttctcttt

SEQ ID NO: 48476 - DNA, 80 bp, synthetic construct
  source 1..80: mol_type = other DNA
ggctctggctttttatattcatatggtgaaataaaatgtattacttctttctcttccattttctttttccacattaactt

SEQ ID NO: 48477 - DNA, 80 bp, synthetic construct; identical to SEQ ID NO: 15977
  source 1..80: mol_type = other DNA

SEQ ID NO: 48478 - DNA, 80 bp, synthetic construct
  source 1..80: mol_type = other DNA
tacaggcatgcaccaccatgcctggcaaatttttgtatttttagtggaggtggggtttcactgtgttggccaggctggtc

SEQ ID NO: 48479 - DNA, 80 bp, synthetic construct
  source 1..80: mol_type = other DNA
agtcaacctaaagcatttctgtgtgctatggttgggattacaatgaccctaatatctcgtttcaaatgcagaattttcag

SEQ ID NO: 48480 - DNA, 80 bp, synthetic construct
  source 1..80: mol_type = other DNA
aaccacttacacttctttcattcatttagtccaagcttgtccaacctgcagcctgcaggccacatgcagcccaggacagc

SEQ ID NO: 48481 - DNA, 80 bp, synthetic construct; identical to SEQ ID NO: 15978
  source 1..80: mol_type = other DNA

SEQ ID NO: 48482 - DNA, 80 bp, synthetic construct
  source 1..80: mol_type = other DNA
agatgttacaagatcttttgggaaagttgttccctcccctgatgttaattagtcctagattagtcacctaactttttttt

SEQ ID NO: 48483 - DNA, 80 bp, synthetic construct
  source 1..80: mol_type = other DNA
taatttttgtatttttggtagacacagggtttcaccatgttggtcaggatggtctcgatctcctgacctcgtgatccacc

SEQ ID NO: 48484 - DNA, 80 bp, synthetic construct
  source 1..80: mol_type = other DNA
ctgacatctctggcctctctttgctatctttattccattctattctctttattccacattagcataaaacaccttaaaaa

SEQ ID NO: 48485 - DNA, 80 bp, synthetic construct
  source 1..80: mol_type = other DNA
cttctactttctatttgctgttcaagttctttgagaaaacaatacaacaggatgttccttccaactgcatgatttttgtc

SEQ ID NO: 48486 - DNA, 80 bp, synthetic construct; identical to SEQ ID NO: 15979
  source 1..80: mol_type = other DNA

SEQ ID NO: 48487 - DNA, 80 bp, synthetic construct
  source 1..80: mol_type = other DNA
tataggaagggaacttgaagggaatgtctattacctctaacactaaagagtgaagaattccactcctttttcctagtctg

SEQ ID NO: 48488 - DNA, 80 bp, synthetic construct
  source 1..80: mol_type = other DNA
gctctctcaacaggacaatcatctatctctccttggtgtatgtgcttggccatgtgatcaagtccttgggtgccttacca

SEQ ID NO: 48489 - DNA, 80 bp, synthetic construct; identical to SEQ ID NO: 15980
  source 1..80: mol_type = other DNA

SEQ ID NO: 48490 - DNA, 80 bp, synthetic construct
  source 1..80: mol_type = other DNA
tatgtgtagttccatatatttcagttgctattgatgtttatgggatcagaggcatttgataaattctgatgtctgtctat

SEQ ID NO: 48491 - DNA, 80 bp, synthetic construct
  source 1..80: mol_type = other DNA
tggagtgcagtggtgtgattttggctcactgaaacctttgcctcctgggttcaagtgattctcccacctcagcctcccga

SEQ ID NO: 48492 - DNA, 80 bp, synthetic construct
  source 1..80: mol_type = other DNA
ctgcacctggccttgatatttaataaatattactttcttattggtgtcccgtcaaaaatctttgacactgttgctattaa

SEQ ID NO: 48493 - DNA, 80 bp, synthetic construct; identical to SEQ ID NO: 15981
  source 1..80: mol_type = other DNA

SEQ ID NO: 48494 - DNA, 80 bp, synthetic construct
  source 1..80: mol_type = other DNA
ttgcccttgtacacattttttcccctctgcagctctgtagtccatctctacaggtgcatttagtatcaacatggttggca

SEQ ID NO: 48495 - DNA, 80 bp, synthetic construct
  source 1..80: mol_type = other DNA
gtaagaatcctgttattttgtattttcaagaatatagagccagcattaatgggggtatctggcaggtagccatttgccaa

SEQ ID NO: 48496 - DNA, 80 bp, synthetic construct
  source 1..80: mol_type = other DNA
agggatagttagcctggacaagaattgaggagaatactatagctgcttatagatgctggaaggatgtcagtgattaaacc

SEQ ID NO: 48497 - DNA, 80 bp, synthetic construct
  source 1..80: mol_type = other DNA
agcactttggcaatgggaggtgataagtagtatagagatgattttagcatcttgttttgagattccatgaaatgggaaag

SEQ ID NO: 48498 - DNA, 80 bp, synthetic construct; identical to SEQ ID NO: 15982
  source 1..80: mol_type = other DNA

SEQ ID NO: 48499 - DNA, 80 bp, synthetic construct
  source 1..80: mol_type = other DNA
ctgtcttccagtgtttttcttacctttcagaccatttgggttattttatactctttatctgtcaaagagtccatagatca

SEQ ID NO: 48500 - DNA, 80 bp, synthetic construct
  source 1..80: mol_type = other DNA
taatatggcagggagagatctggggtgtcagaatgaagcatgtcggtgtataatgaacgaaacatcagcaactttatttg

SEQ ID NO: 48501 - DNA, 80 bp, synthetic construct; identical to SEQ ID NO: 15983
  source 1..80: mol_type = other DNA

SEQ ID NO: 48502 - DNA, 80 bp, synthetic construct
  source 1..80: mol_type = other DNA
ggcaggagaatggcttgagcccgggaggcggagtttgcagtaagctgagactgcgccactgcattccagcctgggcggca

SEQ ID NO: 48503 - DNA, 80 bp, synthetic construct
  source 1..80: mol_type = other DNA
gggaggaaaagaatgctaaagctgctctggagtttgaaaggtgagtaaatgattggggtcagccagcaatgtttttaaat

SEQ ID NO: 48504 - DNA, 80 bp, synthetic construct
  source 1..80: mol_type = other DNA
tagatacttctcagtcttctacctgtccatcaatgcagggagcttgatttctacatttatcacacccatgctgagaggtt

SEQ ID NO: 48505 - DNA, 80 bp, synthetic construct; identical to SEQ ID NO: 15984
  source 1..80: mol_type = other DNA

SEQ ID NO: 48506 - DNA, 80 bp, synthetic construct
  source 1..80: mol_type = other DNA
ataatcattgatacctgacacatgtaaagcatcatgtaggcactttacacaagctgtttcattcaatcctcacaccaggc

SEQ ID NO: 48507 - DNA, 80 bp, synthetic construct
  source 1..80: mol_type = other DNA
gggcttttttttagtatctcgggtcattctaatgtatagtcaaggtggagatccactgctctacactacaatatataggg

SEQ ID NO: 48508 - DNA, 80 bp, synthetic construct
  source 1..80: mol_type = other DNA
caaggtggagatccactgctctacactacaatatatagggaagcaaggaagataatcctctttcaaattagtttacttca

SEQ ID NO: 48509 - DNA, 80 bp, synthetic construct
  source 1..80: mol_type = other DNA
taatgcaacttaaatcaagtggcattctctttatccctgagaacccagtcctggaagagaagagggatgtggtgttcctt

SEQ ID NO: 48510 - DNA, 80 bp, synthetic construct; identical to SEQ ID NO: 15985
  source 1..80: mol_type = other DNA

SEQ ID NO: 48511 - DNA, 80 bp, synthetic construct
  source 1..80: mol_type = other DNA
aaacaagtgctagctgtcattattagtcagcagcttcagttttctgggtgctaatcaataactcaattctctgatctttt

SEQ ID NO: 48512 - DNA, 80 bp, synthetic construct
  source 1..80: mol_type = other DNA
caggcgcccaccaccatgcctggctaattttttgtatttttagtagagacagggtttcaccgtgttagccaggatggtct

SEQ ID NO: 48513 - DNA, 80 bp, synthetic construct
  source 1..80: mol_type = other DNA
tgggatcacattggtgaattagatacctagagcattcatgttcccaaagaacttatatagttcagtagggaaaggaagac

SEQ ID NO: 48514 - DNA, 80 bp, synthetic construct; identical to SEQ ID NO: 15986
  source 1..80: mol_type = other DNA

SEQ ID NO: 48515 - DNA, 80 bp, synthetic construct
  source 1..80: mol_type = other DNA
taaataatactttggggattgtaaaaagtttgcctaaaggaatgacatttaaggtgagacctaagggccaaacagcaatt

SEQ ID NO: 48516 - DNA, 80 bp, synthetic construct
  source 1..80: mol_type = other DNA
atgaagggccttttaaaccaataagaaattagaactttattgtgagggagagtggggaactctaaaaacattttaacaga

SEQ ID NO: 48517 - DNA, 80 bp, synthetic construct
  source 1..80: mol_type = other DNA
atttagtgcttgagatgagtgcttcactcagtttaccctaatctggccctggttgaattaacaaaccttagaatggttag

SEQ ID NO: 48518 - DNA, 80 bp, synthetic construct
  source 1..80: mol_type = other DNA
attaactgagctagtgaggaaaagccagtttggggcaatgttgataaatttagttttgaacatgttgcattttatatgtt

SEQ ID NO: 48519 - DNA, 80 bp, synthetic construct; identical to SEQ ID NO: 15987
  source 1..80: mol_type = other DNA

SEQ ID NO: 48520 - DNA, 80 bp, synthetic construct
  source 1..80: mol_type = other DNA
tcactgatacgattagatcagttatggtaaatggtggaggctgaagactgattggaggagactgagaagtaaatgttaca

SEQ ID NO: 48521 - DNA, 80 bp, synthetic construct
  source 1..80: mol_type = other DNA
cggtggcgcccaaaaactcggagatgctagcaattgcagagtcctaagaggtgttatagctcctgctcagggagtcccaa

SEQ ID NO: 48522 - DNA, 80 bp, synthetic construct
  source 1..80: mol_type = other DNA
tttcattcccatcacccacagctcagcaagttccgggttcttgtcccatgatgaagaggaatggggtgtgtggacaccag

SEQ ID NO: 48523 - DNA, 80 bp, synthetic construct; identical to SEQ ID NO: 15988
  source 1..80: mol_type = other DNA

SEQ ID NO: 48524 - DNA, 80 bp, synthetic construct
  source 1..80: mol_type = other DNA
tagttggaaggtgacatggattcaagagaggatattgagcatgtgtgaatattattaggaataatccagtggagaaagag

SEQ ID NO: 48525 - DNA, 80 bp, synthetic construct
  source 1..80: mol_type = other DNA
atacaagaattaatagatctggtggcagggagttgaaggagtttccatttgaaggtttccattttctttgtgaagtaaga

SEQ ID NO: 48526 - DNA, 80 bp, synthetic construct; identical to SEQ ID NO: 15989
  source 1..80: mol_type = other DNA

SEQ ID NO: 48527 - DNA, 80 bp, synthetic construct
  source 1..80: mol_type = other DNA
ttctcctgccttagcgcctaagtagctgggactacaggtgcgcaccaccacgcccagctaatttttgtatttttagcaga

SEQ ID NO: 48528 - DNA, 80 bp, synthetic construct
  source 1..80: mol_type = other DNA
ggtacttttttatctgcccacttgactctcaggattagcattcctccactgaactattttttctatcaaccatgagaagg

SEQ ID NO: 48529 - DNA, 80 bp, synthetic construct
  source 1..80: mol_type = other DNA
tggaaaatgctacttgtcactgagaaaatcatctttagcagaggatctactagaggggcatcacgctgaagctgggaaat

SEQ ID NO: 48530 - DNA, 80 bp, synthetic construct; identical to SEQ ID NO: 15990
  source 1..80: mol_type = other DNA

SEQ ID NO: 48531 - DNA, 80 bp, synthetic construct
  source 1..80: mol_type = other DNA
gtacagtatgtggtgtaagaattagtgagtgagatgcattataaggattaaatacatagatttttgagtcagtcaagcct

SEQ ID NO: 48532 - DNA, 80 bp, synthetic construct
  source 1..80: mol_type = other DNA
taaaccttcaaatagatgttagggataacaataaccattaggataacaatgaatttgggaaggtctttcatgccaggagt

SEQ ID NO: 48533 - DNA, 80 bp, synthetic construct
  source 1..80: mol_type = other DNA
agagggggcaaataggcaatacgttaaagaaagaggaccaataaaacttggtaacatttcagatatggagatggagaaag

SEQ ID NO: 48534 - DNA, 80 bp, synthetic construct
  source 1..80: mol_type = other DNA
ttttgtcttctcttggctcctgcaattttgataactccaaaagtcaggaaatgtaagtcagctccctctttatgagattt

SEQ ID NO: 48535 - DNA, 80 bp, synthetic construct; identical to SEQ ID NO: 15991
  source 1..80: mol_type = other DNA

SEQ ID NO: 48536 - DNA, 80 bp, synthetic construct
  source 1..80: mol_type = other DNA
tgacctctattctattttcatgttttttaacaagctaagattaaccagtcttcttcttatgcctctacttaaccattaag

SEQ ID NO: 48537 - DNA, 80 bp, synthetic construct
  source 1..80: mol_type = other DNA
tcaatgcctgattaggtcaaagagttggaataagtcactagaagtatggtgtttgaaggaaggtataataagttggaaaa

SEQ ID NO: 48538 - DNA, 80 bp, synthetic construct
  source 1..80: mol_type = other DNA
tgggcggctgagaaatatccagtaagttggaaatgcagaaacatcttatggcttgatagagtctttcctaatgttcaaaa

SEQ ID NO: 48539 - DNA, 80 bp, synthetic construct; identical to SEQ ID NO: 15992
  source 1..80: mol_type = other DNA

SEQ ID NO: 48540 - DNA, 80 bp, synthetic construct
  source 1..80: mol_type = other DNA
ggggaaaaattaatttctttgtgattttgcctgaaaactaacaagatcttcagagaagtgcttttagcctgaaggtaccg

SEQ ID NO: 48541 - DNA, 80 bp, synthetic construct
  source 1..80: mol_type = other DNA
aagtttcaatgtatacaaggaagtattgagaggctagcaaatgatgtgatgcgtaacctgggatagtgattttcttctgt

SEQ ID NO: 48542 - DNA, 80 bp, synthetic construct
  source 1..80: mol_type = other DNA
ctttttccaaactccattctttagcccactcaaataaggtaccatctctactctcaattgttcttttcctagattagtgt

SEQ ID NO: 48543 - DNA, 80 bp, synthetic construct; identical to SEQ ID NO: 15993
  source 1..80: mol_type = other DNA

SEQ ID NO: 48544 - DNA, 80 bp, synthetic construct
  source 1..80: mol_type = other DNA
aacagcaaaatagtggccctgaaccaaagacctgatgaattttctctcatatgtttctcacttgctaactagcaaaatta

SEQ ID NO: 48545 - DNA, 80 bp, synthetic construct
  source 1..80: mol_type = other DNA
ctgcagtattacgattaacaaccataatttgatgcttttctccttgtacgctgataagggccaagcttcgacatgaaaac

SEQ ID NO: 48546 - DNA, 80 bp, synthetic construct; identical to SEQ ID NO: 15994
  source 1..80: mol_type = other DNA

SEQ ID NO: 48547 - DNA, 80 bp, synthetic construct
  source 1..80: mol_type = other DNA
tgcagtgctcacactcatgataggagaatatttgtagctaatcctttttatcatggtgttacaggttctaaatccccttc

SEQ ID NO: 48548 - DNA, 80 bp, synthetic construct
  source 1..80: mol_type = other DNA
tagtgaggattggttttagtttatcatctatctgcttctatttttccatgttagactaactgcctattgaccctgaaaaa

SEQ ID NO: 48549 - DNA, 80 bp, synthetic construct
  source 1..80: mol_type = other DNA
aagaaactcaaggcctttgatgactactaatccctttaaatctcctgttgtccctacaaaacaaatggggaacctagtag

SEQ ID NO: 48550 - DNA, 80 bp, synthetic construct
  source 1..80: mol_type = other DNA
aatttcattgtgatgaccactttaccagatgaaaatggccctttgtcatttgttcattgagcaaatgttgggaagtttag

SEQ ID NO: 48551 - DNA, 80 bp, synthetic construct; identical to SEQ ID NO: 15995
  source 1..80: mol_type = other DNA

SEQ ID NO: 48552 - DNA, 80 bp, synthetic construct
  source 1..80: mol_type = other DNA
tcacagagaagagcagttcaatgtgactcaagaacaagaagaaagaagaatgtatgaaggggagttctaggaaatccctt

SEQ ID NO: 48553 - DNA, 80 bp, synthetic construct
  source 1..80: mol_type = other DNA
gtagtcggatcatggggatgaattcctcataaatggtttagtgctatcccgttggtgctgtccttatgatagtgagttct

SEQ ID NO: 48554 - DNA, 80 bp, synthetic construct; identical to SEQ ID NO: 15996
  source 1..80: mol_type = other DNA

SEQ ID NO: 48555 - DNA, 80 bp, synthetic construct
  source 1..80: mol_type = other DNA
accctgggcctggaaaaccacgggcactcaacaacctgtgagagcagccacaggggctgaactctgcaaagccacaaggg

SEQ ID NO: 48556 - DNA, 80 bp, synthetic construct
  source 1..80: mol_type = other DNA
ttctcccttttggaatgggaatgtttacccagtatctatacccccattttatttggggagtcaataagttgttttgattt

SEQ ID NO: 48557 - DNA, 80 bp, synthetic construct
  source 1..80: mol_type = other DNA
ctagagatggaatgatatggtttgaatatttgtccctgccaaaatctcatgttgaaatgtaattcccagtgataaaggtg

SEQ ID NO: 48558 - DNA, 80 bp, synthetic construct
  source 1..80: mol_type = other DNA
catgtgacatgcctattccacctttggcttctcccatgattgaaagctcctcgatgcttcaccagaagctggaagatgcc

SEQ ID NO: 48559 - DNA, 80 bp, synthetic construct; identical to SEQ ID NO: 15997
  source 1..80: mol_type = other DNA

SEQ ID NO: 48560 - DNA, 80 bp, synthetic construct
  source 1..80: mol_type = other DNA
ccctgggacctagcacagtacctgttttataagaggtgcatcataagtatttgtgataaataagtagatacaggggtaaa

SEQ ID NO: 48561 - DNA, 80 bp, synthetic construct
  source 1..80: mol_type = other DNA
cctttctacatactcaagtaaaaaccttttggcagattgaatagccactattacggatgaggccacagctgagtcaaaaa

SEQ ID NO: 48562 - DNA, 80 bp, synthetic construct; identical to SEQ ID NO: 15998
  source 1..80: mol_type = other DNA

SEQ ID NO: 48563 - DNA, 80 bp, synthetic construct
  source 1..80: mol_type = other DNA
gatcttgatttttccttaacattaattgtatcataagcatcttcccatgtctttagataatctttgagcacatgatttta

SEQ ID NO: 48564 - DNA, 80 bp, synthetic construct
  source 1..80: mol_type = other DNA
aataaaatggctaggttaaagaaaggaattactaggttgaaagtgtctgatgaggtcacctaccctgagatgctacatcg

SEQ ID NO: 48565 - DNA, 80 bp, synthetic construct
  source 1..80: mol_type = other DNA
cctgaaatatcacaatttgtctctctacactgagcattctgtgcaggagaagaactggtacagtcttgtcattcgtgaag

SEQ ID NO: 48566 - DNA, 80 bp, synthetic construct
  source 1..80: mol_type = other DNA
ttttactttcctctgttgtaggtaaaggatacagaaagcagaacaaccaatgggatgacaaccgtgaggtttgaatgtca

SEQ ID NO: 48567 - DNA, 80 bp, synthetic construct; identical to SEQ ID NO: 15999
  source 1..80: mol_type = other DNA

SEQ ID NO: 48568 - DNA, 80 bp, synthetic construct
  source 1..80: mol_type = other DNA
ggtatagcacacatttggagtcaaaagacttagttttgaatccagataaggctgaagggtcttgtcaaatggtgagggac

SEQ ID NO: 48569 - DNA, 80 bp, synthetic construct
  source 1..80: mol_type = other DNA
tatggccaccaaggtcaagtggttgctgttgagaatagcattttagtggagaacttttagtgaaaagtctggatttcact

SEQ ID NO: 48570 - DNA, 80 bp, synthetic construct; identical to SEQ ID NO: 16000
  source 1..80: mol_type = other DNA

SEQ ID NO: 48571 - DNA, 80 bp, synthetic construct
  source 1..80: mol_type = other DNA
ccaaaacaattataataacctactctgggctgggagtctgagttttgcataggtcacattggacttcatttataagagga

SEQ ID NO: 48572 - DNA, 80 bp, synthetic construct
  source 1..80: mol_type = other DNA
atcatgatagtgtccgtctagctagaggtctggtgaggatgtggcagataaaagttcaagaaaaagaaacttagggacag

SEQ ID NO: 48573 - DNA, 80 bp, synthetic construct
  source 1..80: mol_type = other DNA
ccaaaacataaaaggcccctaacctcttttatcaggtgttcctgtttgtttgatatgtaaataatatctctaccctcagg

SEQ ID NO: 48574 - DNA, 80 bp, synthetic construct; identical to SEQ ID NO: 16001
  source 1..80: mol_type = other DNA

SEQ ID NO: 48575 - DNA, 80 bp, synthetic construct
  source 1..80: mol_type = other DNA
atttctactaaagaaggtactttggtaccttacactggcacttcattacttagagcttatcttctcaggttcactgttat

SEQ ID NO: 48576 - DNA, 80 bp, synthetic construct
  source 1..80: mol_type = other DNA
aaaataacctactccaagaaacatttctcttcaaagataattagtggcttcactgctttcctcaccatcagtagagagat

SEQ ID NO: 48577 - DNA, 80 bp, synthetic construct
  source 1..80: mol_type = other DNA
tttgttattactaatgtaagtagctcacagccacctctttaccctctctccatatacatatatctcctgagatcctctag

SEQ ID NO: 48578 - DNA, 80 bp, synthetic construct
  source 1..80: mol_type = other DNA
accatctcgactcactgcaacctctgcctcccgggttaaagtgattctcctgcctcaacctccccgagtatctgggatta

SEQ ID NO: 48579 - DNA, 80 bp, synthetic construct; identical to SEQ ID NO: 16002
  source 1..80: mol_type = other DNA

SEQ ID NO: 48580 - DNA, 80 bp, synthetic construct
  source 1..80: mol_type = other DNA
ccagcttcatatgcagatcttctcactctctggaaatttgatctgctagcatgtcacagtctgaaatactgaaactgata

SEQ ID NO: 48581 - DNA, 80 bp, synthetic construct; identical to SEQ ID NO: 16003
  source 1..80: mol_type = other DNA

SEQ ID NO: 48582 - DNA, 80 bp, synthetic construct
  source 1..80: mol_type = other DNA
aggtatatctcccagtgctatccctcccccctccgcgcaccccacaacagtccccagagtgtgatgttccccttcctgtg

SEQ ID NO: 48583 - DNA, 80 bp, synthetic construct
  source 1..80: mol_type = other DNA
atggtgtatatgtgccacattttcttaatccagtctatcattgttggacatttgggttggttccaagtctttgctattgt

SEQ ID NO: 48584 - DNA, 80 bp, synthetic construct
  source 1..80: mol_type = other DNA
agtttacagtcccaccaacagtgtaaaagtgttcctatttctccacatcctctccagcacctgttgtttcctgacttttt

SEQ ID NO: 48585 - DNA, 80 bp, synthetic construct
  source 1..80: mol_type = other DNA
atggggttgtttgtttttttcttgtaaatttgtttgagttcattgtagattctggatattagccctttgtcagatgagta

SEQ ID NO: 48586 - DNA, 80 bp, synthetic construct
  source 1..80: mol_type = other DNA
cctatgtcctgaatggtaatgcctaggttttcttctagggtttttatggttttaggtctaacgtttaagtctttaatcca

SEQ ID NO: 48587 - DNA, 80 bp, synthetic construct; identical to SEQ ID NO: 16004
  source 1..80: mol_type = other DNA

SEQ ID NO: 48588 - DNA, 80 bp, synthetic construct
  source 1..80: mol_type = other DNA
gggatggcattgaatctataaattaccttgggcagtatggccattttcacaatattgattcttcctacccatgagcatgg

SEQ ID NO: 48589 - DNA, 80 bp, synthetic construct
  source 1..80: mol_type = other DNA
gtttgtctgttattggtgtataagaatgcttgtgatttttgtacattgattttgtatcctgagactttgctgaagttgct

SEQ ID NO: 48590 - DNA, 80 bp, synthetic construct
  source 1..80: mol_type = other DNA
ttgaataggagtggagagagagggcatccctgtcttgtgccagttttcaaagggaatgcttccagtttttgcccattcag

SEQ ID NO: 48591 - DNA, 80 bp, synthetic construct; identical to SEQ ID NO: 16005
  source 1..80: mol_type = other DNA

SEQ ID NO: 48592 - DNA, 80 bp, synthetic construct
  source 1..80: mol_type = other DNA
aatgagttagggaggattccctctttttctattgattggaatagtttcagaaggaatggtatcagttcctccttgtatct

SEQ ID NO: 48593 - DNA, 80 bp, synthetic construct
  source 1..80: mol_type = other DNA
atttcttctagactttctagtttatttgtgtagaggtgtttgtagtattctctgatggtagtttgtatttctgtgggatt

SEQ ID NO: 48594 - DNA, 80 bp, synthetic construct
  source 1..80: mol_type = other DNA
tcctttagttctgctctgattttagttatttcttgccttctgctagcttttgaatgtgtttgctcttgcttttctagttc

SEQ ID NO: 48595 - DNA, 80 bp, synthetic construct; identical to SEQ ID NO: 16006
  source 1..80: mol_type = other DNA

SEQ ID NO: 48596 - DNA, 80 bp, synthetic construct
  source 1..80: mol_type = other DNA
ggaataggtgtggtgtggtgctgaaaaaaatgtacattctgttgatttggggtggagagttctgtagatgtctattaggt

SEQ ID NO: 48597 - DNA, 80 bp, synthetic construct
  source 1..80: mol_type = other DNA
gggtgctcctgtattgggtgcatatatatttaggatagttagctcttcttgttgaattgatccctttaccattatgtaat

SEQ ID NO: 48598 - DNA, 80 bp, synthetic construct
  source 1..80: mol_type = other DNA
tgaatacagcacactgatgggtcttgactctttatccaatttgccagtctgtgtcttttaattggagcatttagtccatt

SEQ ID NO: 48599 - DNA, 80 bp, synthetic construct; identical to SEQ ID NO: 16007
  source 1..80: mol_type = other DNA

SEQ ID NO: 48600 - DNA, 80 bp, synthetic construct
  source 1..80: mol_type = other DNA
agggtaacccgacctttctctctggctgcccttaacattttttccttcatttcaactttggtgaatctgacaattatgtg

SEQ ID NO: 48601 - DNA, 80 bp, synthetic construct
  source 1..80: mol_type = other DNA
ccaatcagacgtagatttggtcttttcacatagtcccatatttcttggaggctttgctcgtttctttttattcttttttc

SEQ ID NO: 48602 - DNA, 80 bp, synthetic construct; identical to SEQ ID NO: 16008
  source 1..80: mol_type = other DNA

SEQ ID NO: 48603 - DNA, 80 bp, synthetic construct; identical to SEQ ID NO: 12254
  source 1..80: mol_type = other DNA

SEQ ID NO: 48604 - DNA, 80 bp, synthetic construct
  source 1..80: mol_type = other DNA
ttctcagatctccagctgcatgctgggagaaccactgctctcttcaaagctgtcagacagggacatttaagtctgcagag

SEQ ID NO: 48605 - DNA, 80 bp, synthetic construct
  source 1..80: mol_type = other DNA
agcctcgctgccaccttgcatttgatctcagactgctgtgctagcaatcagcgagactccgtgggcgtaggaccctccca

SEQ ID NO: 48606 - DNA, 80 bp, synthetic construct
  source 1..80: mol_type = other DNA
caatgcctcgccctgctttggctcgcacacggtgtgctgcacccactgacctgcgcccactgtctggcactccctagtga

SEQ ID NO: 48607 - DNA, 80 bp, synthetic construct; identical to SEQ ID NO: 16009
  source 1..80: mol_type = other DNA

SEQ ID NO: 48608 - DNA, 80 bp, synthetic construct
  source 1..80: mol_type = other DNA
tttaaaatgttgtccaggatcaaaatgcctgatagggcaaaacggtggaaatccaaactgcaatatcaaaatattctctt

SEQ ID NO: 48609 - DNA, 80 bp, synthetic construct
  source 1..80: mol_type = other DNA
aatgctgtagttagaaatatttacttgagactactgacaagtccatttccattttctctttccctaagaacaccaatcag

SEQ ID NO: 48610 - DNA, 80 bp, synthetic construct
  source 1..80: mol_type = other DNA
aaattgaggcattgcttgaaggacaatgaattttaattctagcactgacttaaataggtatgttatctcttttggccttg

SEQ ID NO: 48611 - DNA, 80 bp, synthetic construct; identical to SEQ ID NO: 16010
  source 1..80: mol_type = other DNA

SEQ ID NO: 48612 - DNA, 80 bp, synthetic construct
  source 1..80: mol_type = other DNA
attcctggctaatttttgtatttttagtagagacagggtttcaccatgttggccaggctgatctctaactcctgaccttg

SEQ ID NO: 48613 - DNA, 80 bp, synthetic construct
  source 1..80: mol_type = other DNA
cagttaggagcttcatcttattcttactgtttacattattaacaccctctgaatcaatgtgatagctgaacttaataaga

SEQ ID NO: 48614 - DNA, 80 bp, synthetic construct
  source 1..80: mol_type = other DNA
tttcaaacttgtgtcatccccaggctccctctagcatgaaatctgtgctccaggcagcttggctattgacaattgcagtt

SEQ ID NO: 48615 - DNA, 80 bp, synthetic construct; identical to SEQ ID NO: 16011
  source 1..80: mol_type = other DNA

SEQ ID NO: 48616 - DNA, 80 bp, synthetic construct
  source 1..80: mol_type = other DNA
cctcatcctgtaaagatctctttagtttcaggtttctccatattcttctcatatttatttccccctgcagtgggccgaat

SEQ ID NO: 48617 - DNA, 80 bp, synthetic construct
  source 1..80: mol_type = other DNA
actctgatgactccctagattctgtcctgaccccaattcctggccctgtcttgaagcattttttttcttctactggatta

SEQ ID NO: 48618 - DNA, 80 bp, synthetic construct; identical to SEQ ID NO: 16012
  source 1..80: mol_type = other DNA

SEQ ID NO: 48619 - DNA, 80 bp, synthetic construct
  source 1..80: mol_type = other DNA
tatgtatgatgtgatctggtccagccagggcctggcttgtcagctctctaggtttgatatgactttagtaaatttgtcaa

SEQ ID NO: 48620 - DNA, 80 bp, synthetic construct
  source 1..80: mol_type = other DNA
ggaaaccagattagagatagtaagcattagtaaacattgttctggagaacaggaacaggtgtaagttgtagaaatcctga

SEQ ID NO: 48621 - DNA, 80 bp, synthetic construct
  source 1..80: mol_type = other DNA
gctgatccagctttttcttattattacaccttgtcttgcttattgcagcaaatattcaataacaacaatgtttctataag

SEQ ID NO: 48622 - DNA, 80 bp, synthetic construct; identical to SEQ ID NO: 16013
  source 1..80: mol_type = other DNA

SEQ ID NO: 48623 - DNA, 80 bp, synthetic construct
  source 1..80: mol_type = other DNA
tctagagagcttcatttccattggttttaaaacattattctcatgtagaacagtgttgggtctcatactgttaatgttaa

SEQ ID NO: 48624 - DNA, 80 bp, synthetic construct
  source 1..80: mol_type = other DNA
tttccagatatcttgatgtgaacctgaccctactcctttagaagacagcctgttcatttttaaatagctttaacccaaac

SEQ ID NO: 48625 - DNA, 80 bp, synthetic construct
  source 1..80: mol_type = other DNA
tttaaattaacatgtacgctgcagaacattggtttggaaaaaactgttgagcagttcttccttgtaagtgctgagcttcc

SEQ ID NO: 48626 - DNA, 80 bp, synthetic construct
  source 1..80: mol_type = other DNA
catggtgaaaccgtgtctctactaaaagtacaaaaattagccaggtgtgatggcaggtgcctgtaatcccagctactcgg

SEQ ID NO: 48627 - DNA, 80 bp, synthetic construct; identical to SEQ ID NO: 16014
  source 1..80: mol_type = other DNA

SEQ ID NO: 48628 - DNA, 80 bp, synthetic construct
  source 1..80: mol_type = other DNA
ctttcttcaaacaatgcacttctgttaatgcagtgtaaggtaacatgagttgtttttggaaactacatcataatgtgggc

SEQ ID NO: 48629 - DNA, 80 bp, synthetic construct
  source 1..80: mol_type = other DNA
atatggtgtagactgtttctcctaggctacaaacctgcacagcatgttactgtattaaatgctgtaggcaattgtaacac

SEQ ID NO: 48630 - DNA, 80 bp, synthetic construct; identical to SEQ ID NO: 16015
  source 1..80: mol_type = other DNA

SEQ ID NO: 48631 - DNA, 80 bp, synthetic construct
  source 1..80: mol_type = other DNA
caaggtgagggccgggcagcctccttccggcaggcgtgggggctcctggggctgtggagacagcctggggagggtcttcc

SEQ ID NO: 48632 - DNA, 80 bp, synthetic construct
  source 1..80: mol_type = other DNA
gctgaggggaggttctcagtgggctgcagctctgagctcgcgcctccctggggcctggcctgtggggtgcaggagcccag

SEQ ID NO: 48633 - DNA, 80 bp, synthetic construct
  source 1..80: mol_type = other DNA
cctggggagaagcctggatctttggagtgtgggccaccggctctcccactttcagagggagcagtgagccctccggggtg

SEQ ID NO: 48634 - DNA, 80 bp, synthetic construct
  source 1..80: mol_type = other DNA
catgcacgcaccaacctggacgcaaaccccaaacccgaccctcccctcaccagtggctcctgtcctccccagggctgcct

SEQ ID NO: 48635 - DNA, 80 bp, synthetic construct; identical to SEQ ID NO: 16016
  source 1..80: mol_type = other DNA

SEQ ID NO: 48636 - DNA, 80 bp, synthetic construct
  source 1..80: mol_type = other DNA
tgcatggcccctccccttccccaggaccccccaactcgtggtcaagggccagggtctgccccactaagcctggccccctt

SEQ ID NO: 48637 - DNA, 80 bp, synthetic construct; identical to SEQ ID NO: 16017
  source 1..80: mol_type = other DNA

SEQ ID NO: 48638 - DNA, 80 bp, synthetic construct
  source 1..80: mol_type = other DNA
cgtgggccggccgggcctggcgtggggctaacggcaggcaccctgcgggaaggtgtctggtaatcatcagtgcccagcag

SEQ ID NO: 48639 - DNA, 80 bp, synthetic construct
  source 1..80: mol_type = other DNA
ggccacagcctggggtcctgcagctcctcccagaggccacttataagcagccctgccatgtggccacacagcactggtca

SEQ ID NO: 48640 - DNA, 80 bp, synthetic construct
  source 1..80: mol_type = other DNA
ccacacgtgctcatgtgtgtacacatgcccatacactccacataggtgcacatatacacatgtattcatgcatatacgag

SEQ ID NO: 48641 - DNA, 80 bp, synthetic construct; identical to SEQ ID NO: 16018
  source 1..80: mol_type = other DNA

SEQ ID NO: 48642 - DNA, 80 bp, synthetic construct
  source 1..80: mol_type = other DNA
tggggcattttcagtcacctttttacctgagacgcagacccggtggcctcttcactcctcccgagggacgtctgtgcacg

SEQ ID NO: 48643 - DNA, 80 bp, synthetic construct
  source 1..80: mol_type = other DNA
gcctgacaggcaggccataagcctaacagctctctgccctccccacagggaatgcccggccccccaggacctccagggcc

SEQ ID NO: 48644 - DNA, 80 bp, synthetic construct
  source 1..80: mol_type = other DNA
tctggtgggcagtggattagcagctgagttcccacggaaggtgaaggcctgggaaagggagggctctctgggtgtggagc

SEQ ID NO: 48645 - DNA, 80 bp, synthetic construct; identical to SEQ ID NO: 16019
  source 1..80: mol_type = other DNA

SEQ ID NO: 48646 - DNA, 80 bp, synthetic construct
  source 1..80: mol_type = other DNA
agcagtgagactcccccagtggcccaaggccagtgctacacgcccagcccacgccccagttccgatgaccttggcccttc

SEQ ID NO: 48647 - DNA, 80 bp, synthetic construct
  source 1..80: mol_type = other DNA
catggcctgctgacggggacccagggcgcccctgctctccagcagctcctaccctgactgtccccatgtccatctgatgc

SEQ ID NO: 48648 - DNA, 80 bp, synthetic construct
  source 1..80: mol_type = other DNA
ggaccaccaggtgagcaactctggacatcccaggcaggagagccatggcgtggccagcactgaagtgtggtcacacctag

SEQ ID NO: 48649 - DNA, 80 bp, synthetic construct
  source 1..80: mol_type = other DNA
ctcctgaggagcagatggctgcccttccatgctagacccaggtgggcactgcgcagagacacagcagcttcagtgtcctg

SEQ ID NO: 48650 - DNA, 80 bp, synthetic construct; identical to SEQ ID NO: 16020
  source 1..80: mol_type = other DNA

SEQ ID NO: 48651 - DNA, 80 bp, synthetic construct
  source 1..80: mol_type = other DNA
gtcccctctcgccgccagggtcccctctcgccgccagggtcccctctcgccgccacggtcccctctcgccgccagggtcc

SEQ ID NO: 48652 - DNA, 80 bp, synthetic construct
  source 1..80: mol_type = other DNA
cctgtggaggcaaaggcaggcagaaagcaagcgggaagatggaagatgtgcccatgccagccttggatctctcagcgtca

SEQ ID NO: 48653 - DNA, 80 bp, synthetic construct
  source 1..80: mol_type = other DNA
gcagcagagagctgggaagctcagaggtgtcaggatgaacctggggctgaaggcggaacagttggagattgagacctgtg

SEQ ID NO: 48654 - DNA, 80 bp, synthetic construct; identical to SEQ ID NO: 16021
  source 1..80: mol_type = other DNA

SEQ ID NO: 48655 - DNA, 80 bp, synthetic construct
  source 1..80: mol_type = other DNA
gcaggaaccggcgtcccagcgacagggaggtcagaggctccctcgggaaccagcgtgggctgccccacatggcatcccag

SEQ ID NO: 48656 - DNA, 80 bp, synthetic construct
  source 1..80: mol_type = other DNA
ggctgccccgcatggcatcccaggaacagtggggtcagaggctcccgcaggaaccggcacaggctgcacagcatggtgtc

SEQ ID NO: 48657 - DNA, 80 bp, synthetic construct; identical to SEQ ID NO: 16022
  source 1..80: mol_type = other DNA

SEQ ID NO: 48658 - DNA, 80 bp, synthetic construct
  source 1..80: mol_type = other DNA
gtaagtatgacgagggtagatacatccattgaaggacagacattgtcaatgggatatggctaaaccatgtgccgcttaca

SEQ ID NO: 48659 - DNA, 80 bp, synthetic construct
  source 1..80: mol_type = other DNA
gggtgtatagtgtgggtgtgtgtggagtgtgtgtggctgggttgggtgtatagtgtggaggtgtgagggggtgtgtggag

SEQ ID NO: 48660 - DNA, 80 bp, synthetic construct
  source 1..80: mol_type = other DNA
tgtgtggtgtggggtgtgtgtggagtgtggctatgggggtgctgggtgtgtagtgtgggggtgtggtttggtgtgttgcg

SEQ ID NO: 48661 - DNA, 80 bp, synthetic construct
  source 1..80: mol_type = other DNA
tttggtgtgtgttgggtgtgtagtgtgggggtgtggtttggtgtgtgtgtgttgggtgtgtagtgtgggggtgtggtttg

SEQ ID NO: 48662 - DNA, 80 bp, synthetic construct; identical to SEQ ID NO: 16023
  source 1..80: mol_type = other DNA

SEQ ID NO: 48663 - DNA, 80 bp, synthetic construct
  source 1..80: mol_type = other DNA
tatatcctggagtaagaaacatggtcaaaaataaatgttcattgagacaacggagcaagtctaccagagaaattgagtaa

SEQ ID NO: 48664 - DNA, 80 bp, synthetic construct
  source 1..80: mol_type = other DNA
ggccacgtccccagcatcgggaccggggtctgccccagaggggcccaggctgggctgaaagcaggcctggcttccaggaa

SEQ ID NO: 48665 - DNA, 80 bp, synthetic construct; identical to SEQ ID NO: 16024
  source 1..80: mol_type = other DNA

SEQ ID NO: 48666 - DNA, 80 bp, synthetic construct
  source 1..80: mol_type = other DNA
gaaggacccccaggggcttcaaagccggtcacctccctctgcagaaggacccccaggggctccacagccggtcacctccc

SEQ ID NO: 48667 - DNA, 80 bp, synthetic construct
  source 1..80: mol_type = other DNA
gccggtcacctccctctgcagaaggacccggagcagggcccagcccgagagggagcacgggtcctgacagcagcagtgac

SEQ ID NO: 48668 - DNA, 80 bp, synthetic construct
  source 1..80: mol_type = other DNA
gccgtctaaggtcccacctggaaggagaaggggttttgtcatctccgttgacaaaattacagctttaagtagtacctgtt

SEQ ID NO: 48669 - DNA, 80 bp, synthetic construct; identical to SEQ ID NO: 16025
  source 1..80: mol_type = other DNA

SEQ ID NO: 48670 - DNA, 80 bp, synthetic construct
  source 1..80: mol_type = other DNA
ggcaggacgctgggaggaaagaagcgcgttgctcttttctcagcacgtctcccacgtaagccccacaagtggatctgcag

SEQ ID NO: 48671 - DNA, 80 bp, synthetic construct
  source 1..80: mol_type = other DNA
cagatggaagggcagtctagaaaaaccaccaccgagtcctaagcaattaaaaatgaagttttaaaaaggcaccattgtga

SEQ ID NO: 48672 - DNA, 80 bp, synthetic construct
  source 1..80: mol_type = other DNA
tttacagtcccaccaacagtgtaaaagtgttcctatttctctacatcctctccggcacctgttgtttccttactttttaa

SEQ ID NO: 48673 - DNA, 80 bp, synthetic construct; identical to SEQ ID NO: 16026
  source 1..80: mol_type = other DNA

SEQ ID NO: 48674 - DNA, 80 bp, synthetic construct
  source 1..80: mol_type = other DNA
gggagggatagcattgggagatatacctaatgctagatgacgagttagtgggtgcagcacaccagcatggcacatgtata

SEQ ID NO: 48675 - DNA, 80 bp, synthetic construct
  source 1..80: mol_type = other DNA
agtatcggttaactaggaagaacctaattaaatacgcgatctctaccgcgaaatggctagaagggcctcaggcaaaccca

SEQ ID NO: 48676 - DNA, 80 bp, synthetic construct
  source 1..80: mol_type = other DNA
tcctgtacatcccgctgggtggctgctcccaatttctcgccccatccggcccaagcccccttcctgttcagccctgcgag

SEQ ID NO: 48677 - DNA, 80 bp, synthetic construct
  source 1..80: mol_type = other DNA
gtaggggttcagggctcccgtgtaacaagtgtttccgtccacagggggagaagggagaccgaggtgatgcaggacagaaa

SEQ ID NO: 48678 - DNA, 80 bp, synthetic construct; identical to SEQ ID NO: 16027
  source 1..80: mol_type = other DNA

SEQ ID NO: 48679 - DNA, 80 bp, synthetic construct
  source 1..80: mol_type = other DNA
catcagtcctgaaagactccagagagccatgggccccagctactgcctgggggcccacactgttgtcaggtctctgctgg

SEQ ID NO: 48680 - DNA, 80 bp, synthetic construct
  source 1..80: mol_type = other DNA
ggcacgaggtaaccaggaagcgtctcttgtcgccgtccgtagggtcccaagggagagagcatccggggccagcccggccc

SEQ ID NO: 48681 - DNA, 80 bp, synthetic construct
  source 1..80: mol_type = other DNA
ttcccaccttggtttctctcctgcagctatcagcgttcccggccctccgggcccccctgggccccctgggccccctggaa

SEQ ID NO: 48682 - DNA, 80 bp, synthetic construct
  source 1..80: mol_type = other DNA
ggggccaggccatgggggaatcaggtggacccaggaggacgaccaccagccgggaagtgcccagggcctgtacattgtcc

SEQ ID NO: 48683 - DNA, 80 bp, synthetic construct; identical to SEQ ID NO: 16028
  source 1..80: mol_type = other DNA

SEQ ID NO: 48684 - DNA, 80 bp, synthetic construct
  source 1..80: mol_type = other DNA
ccggacagggatgggagcaggtggcagccagcgcttcttaaactttcaaacttttggtaaagtttagtaaaatacttttg

SEQ ID NO: 48685 - DNA, 80 bp, synthetic construct
  source 1..80: mol_type = other DNA
gggtcatgtcacagtgaacgtttacaaagataaatgtcacctcacacacccgataataagacaaggcgcctgacgggacg

SEQ ID NO: 48686 - DNA, 80 bp, synthetic construct; identical to SEQ ID NO: 16029
  source 1..80: mol_type = other DNA

SEQ ID NO: 48687 - DNA, 80 bp, synthetic construct
  source 1..80: mol_type = other DNA
acagccctgactcctggagccctcccaccttccaacacacccaccttccttctagagccctcccaccttccctctggaac

SEQ ID NO: 48688 - DNA, 80 bp, synthetic construct
  source 1..80: mol_type = other DNA
cagatgctgagctggtgcccactgtgtgccaggtgtgcttgtaggcacccggatgcagccccatcctaactttcaggggc

SEQ ID NO: 48689 - DNA, 80 bp, synthetic construct
  source 1..80: mol_type = other DNA
gggagaggcgggtgctgggcagggagggcaccctcctgtgggctgggagggccgggtgttggggagggagaggtgggtgc

SEQ ID NO: 48690 - DNA, 80 bp, synthetic construct
  source 1..80: mol_type = other DNA
ttggaggggcaggtgctgggcagggagggcaccctcctgtgggctgggagggccaggtgctggggcgggagagtcgggtg

SEQ ID NO: 48691 - DNA, 80 bp, synthetic construct; identical to SEQ ID NO: 16030
  source 1..80: mol_type = other DNA

SEQ ID NO: 48692 - DNA, 80 bp, synthetic construct
  source 1..80: mol_type = other DNA
aaaatccacatcttgtgtctttgccttccctcacccaaagtgccagacacaagaatggatatctctaagagtggtgggtg

SEQ ID NO: 48693 - DNA, 80 bp, synthetic construct
  source 1..80: mol_type = other DNA
tgggtggatggaaaggtgggtgagtggataggtaggtagctggggagatggatggatggtggacaggtgggtgagtgtat

SEQ ID NO: 48694 - DNA, 80 bp, synthetic construct; identical to SEQ ID NO: 16031
  source 1..80: mol_type = other DNA

SEQ ID NO: 48695 - DNA, 80 bp, synthetic construct
  source 1..80: mol_type = other DNA
gtgtcaggggctccacagcggcctgtctcctcacagggttcagcccagtctgctctcactcatttgctgattcattcttt

SEQ ID NO: 48696 - DNA, 80 bp, synthetic construct
  source 1..80: mol_type = other DNA
gggccgtggggaaaggtgcagaatcaataggggcatccggactggggtgcaggcctgggggctgggatttctagggtgga

SEQ ID NO: 48697 - DNA, 80 bp, synthetic construct
  source 1..80: mol_type = other DNA
tggggcctgagcagaggtgacccgcgatccggcgccacggcaggcaggactccccacccttgctgctgcctacaccccca

SEQ ID NO: 48698 - DNA, 80 bp, synthetic construct
  source 1..80: mol_type = other DNA
ccttgcagccccccgtggtgcagctgcacgacagcaacccctacccgcggcgggagcacccccaccccaccgcgcggccc

SEQ ID NO: 48699 - DNA, 80 bp, synthetic construct
  source 1..80: mol_type = other DNA
ccccaaagtgggcttggctccatctagcccctcggctctcggcagcagaagagggcccagcccctgcagagctgctgggg

SEQ ID NO: 48700 - DNA, 80 bp, synthetic construct
  source 1..80: mol_type = other DNA
gctgggggcacccacgtggcccggggctgctctgacctggcagcgtatgggggctgctgcctgggcccctcagtgtgtca

SEQ ID NO: 48701 - DNA, 80 bp, synthetic construct
  source 1..80: mol_type = other DNA
tgtcaggcggcatgcggggcatccgcggggccgacttccagtgcttccagcaggcgcgggccgtggggctggcgggcacc

SEQ ID NO: 48702 - DNA, 80 bp, synthetic construct
  source 1..80: mol_type = other DNA
gggagctcccctctagggcctctggaggccaccatgttacagacactggcgcctaggctggcgacttcagggcaggctcc

SEQ ID NO: 48703 - DNA, 80 bp, synthetic construct; identical to SEQ ID NO: 16032
  source 1..80: mol_type = other DNA

SEQ ID NO: 48704 - DNA, 80 bp, synthetic construct
  source 1..80: mol_type = other DNA
acagggtcccctgccttagccaaggcctcttggggtctgcagaggctgcctggccaggcctggctcccccacgcttgttc

SEQ ID NO: 48705 - DNA, 80 bp, synthetic construct
  source 1..80: mol_type = other DNA
acccacacccatccacacccccacacaccacacacacatacacacggtttctcttccaggacgagctgctgtttcccagc

SEQ ID NO: 48706 - DNA, 80 bp, synthetic construct; identical to SEQ ID NO: 16033
  source 1..80: mol_type = other DNA

SEQ ID NO: 48707 - DNA, 80 bp, synthetic construct
  source 1..80: mol_type = other DNA
cagcgcagcgagtttattcaccgagaataaactcctcaaagggcaacacggagtccgagcatgtgtgcccttaaaatgtt

SEQ ID NO: 48708 - DNA, 80 bp, synthetic construct
  source 1..80: mol_type = other DNA
agatgcacctgccaagggtctctgacaggagtgctgtgggcagggctgggccccagggaaggcctgaaagccaggagccc

SEQ ID NO: 48709 - DNA, 80 bp, synthetic construct
  source 1..80: mol_type = other DNA
cccctccacaggcagccagcagggaggccatgtggccctccaggttgtgggagcctctgcagccccctggtaaccccagg

SEQ ID NO: 48710 - DNA, 80 bp, synthetic construct
  source 1..80: mol_type = other DNA
gagacgtggcggacggaggctccctcggccacgggccaggcctcctcgctgctggggggcaggctcctggggcagagtgc

SEQ ID NO: 48711 - DNA, 80 bp, synthetic construct; identical to SEQ ID NO: 16034
  source 1..80: mol_type = other DNA

SEQ ID NO: 48712 - DNA, 80 bp, synthetic construct
  source 1..80: mol_type = other DNA
tgggaagccgtgctcgccccagcaggtgctgacttcatctcccacctagcagcaccgttctgtgcacaaaacccagacct

SEQ ID NO: 48713 - DNA, 80 bp, synthetic construct
  source 1..80: mol_type = other DNA
tccacagcaaccccaggctgaagcaggttcccaagctcagaggcgcactgtgacccccagctccggcctgtcctccaaca

SEQ ID NO: 48714 - DNA, 80 bp, synthetic construct
  source 1..80: mol_type = other DNA
gctgggacgtggctcagccagcacttgtccagctgagcgccaggatggaacacggccacatcaaagaggctgaggctggc

SEQ ID NO: 48715 - DNA, 80 bp, synthetic construct
  source 1..80: mol_type = other DNA
ccacaggccgccctgcgggtgaacaaagcagccacgaggtgcaacaaggtcctctgtcagtcacagccacccctgagatc

SEQ ID NO: 48716 - DNA, 80 bp, synthetic construct; identical to SEQ ID NO: 16035
  source 1..80: mol_type = other DNA

SEQ ID NO: 48717 - DNA, 80 bp, synthetic construct
  source 1..80: mol_type = other DNA
aggcatgcacgggtgtgtggacacacaccaacactcttaggtctctcctcacagcaggacctgacttgctcccagcaaca

SEQ ID NO: 48718 - DNA, 80 bp, synthetic construct
  source 1..80: mol_type = other DNA
acgctctagcccatggcacaggcccagcccacctccacccatcacatcctgctagatctacgagcccaggaaatggctgg

SEQ ID NO: 48719 - DNA, 80 bp, synthetic construct; identical to SEQ ID NO: 16036
  source 1..80: mol_type = other DNA

SEQ ID NO: 48720 - DNA, 80 bp, synthetic construct
  source 1..80: mol_type = other DNA
ctgaatcagaagccctgcgcacactcacttaagtgtgtttaatgtatgtgggaagagtattcacatcacatcagatggtc

SEQ ID NO: 48721 - DNA, 80 bp, synthetic construct
  source 1..80: mol_type = other DNA
cctccgggctggcacaagtgtgggagcagctgaggacccgcaggtcaggatggacacacttcagaaggacagacaggacc

SEQ ID NO: 48722 - DNA, 80 bp, synthetic construct
  source 1..80: mol_type = other DNA
agccacatgcagttcttcattctacgtcagttaaaaaaaaaaaaagcatctttcaaaaaagcaagagcaccaaggatgac

SEQ ID NO: 48723 - DNA, 80 bp, synthetic construct
  source 1..80: mol_type = other DNA
gcatgagccagtgaggcctggtggacgcagaagcccaccacccacctcttccagcaacaaagcccgcggggcacagtgca

SEQ ID NO: 48724 - DNA, 80 bp, synthetic construct; identical to SEQ ID NO: 16037
  source 1..80: mol_type = other DNA

SEQ ID NO: 48725 - DNA, 80 bp, synthetic construct
  source 1..80: mol_type = other DNA
cctgggccaggtatgggtcgctctgtctctgctccagggaggctggccccacagcccccaggctgtcttctggggaaagc

SEQ ID NO: 48726 - DNA, 80 bp, synthetic construct
  source 1..80: mol_type = other DNA
agaagtagatgatggacaggatcaggaagtacacggagtataactggaactggaaagagaggccgggtgaggcgggtggg

SEQ ID NO: 48727 - DNA, 80 bp, synthetic construct
  source 1..80: mol_type = other DNA
ggtgccacagtgctcaccacagcccccccgacctccaccacctggcacaggcctgaaggggggttcccaccatttcccaa

SEQ ID NO: 48728 - DNA, 80 bp, synthetic construct; identical to SEQ ID NO: 16038
  source 1..80: mol_type = other DNA

SEQ ID NO: 48729 - DNA, 80 bp, synthetic construct
  source 1..80: mol_type = other DNA
gacaccagggagggacctgatcattcccggaggtgcagagggttcaggaggctgcagtgccctcaggacatccgtgggca

SEQ ID NO: 48730 - DNA, 80 bp, synthetic construct
  source 1..80: mol_type = other DNA
ccaagacactgagataaacacctgggaagactctgaaagcaggagcgaggaggacagactgaccaggccctcggggtctg

SEQ ID NO: 48731 - DNA, 80 bp, synthetic construct; identical to SEQ ID NO: 16039
  source 1..80: mol_type = other DNA

SEQ ID NO: 48732 - DNA, 80 bp, synthetic construct
  source 1..80: mol_type = other DNA
actggttggtaaagacacccaccctcacccccaaggagtcagcagagaccacagggaagcccaagatgtcacccccaaag

SEQ ID NO: 48733 - DNA, 80 bp, synthetic construct
  source 1..80: mol_type = other DNA
aagcgggagtccagactttcacctacccagcaataatgagaatgtcccaaccccaggggcatcaagggggccacgagggg

SEQ ID NO: 48734 - DNA, 80 bp, synthetic construct
  source 1..80: mol_type = other DNA
caacaggatgctgaaattacatcatacccaaaatgcttgcatctcactaaaaaatcccttggcacactaaaccacaaaga

SEQ ID NO: 48735 - DNA, 80 bp, synthetic construct
  source 1..80: mol_type = other DNA
ctggaaacaaatgaaaaaacacagtctcagcaaagaaataggagaaataaaaaaaatttagaactgaaatgtacaataat

SEQ ID NO: 48736 - DNA, 80 bp, synthetic construct; identical to SEQ ID NO: 16040
  source 1..80: mol_type = other DNA

SEQ ID NO: 48737 - DNA, 80 bp, synthetic construct
  source 1..80: mol_type = other DNA
gccagagaaaaatgacactttacgggcaagcaatttgaataacagtaattgctcatcaaaaatcctgaaagctatgagga

SEQ ID NO: 48738 - DNA, 80 bp, synthetic construct
  source 1..80: mol_type = other DNA
aggggcaccacatttctcacaggctaaaaaaaaagaacactgtctacccagcatcctatatccagtgaaaacatcctttg

SEQ ID NO: 48739 - DNA, 80 bp, synthetic construct; identical to SEQ ID NO: 16041
  source 1..80: mol_type = other DNA

SEQ ID NO: 48740 - DNA, 80 bp, synthetic construct
  source 1..80: mol_type = other DNA
aaaaaagctatactaagtacattcaaaaacacaatagataaaccaaacaaaattctaaaggatgtacaagtaacccactg

SEQ ID NO: 48741 - DNA, 80 bp, synthetic construct
  source 1..80: mol_type = other DNA
acatgactcaactacgtgctgtctacaagaaactcacttcaaatataccaagataggaaggttgaaagtaaaacgatgga

SEQ ID NO: 48742 - DNA, 80 bp, synthetic construct
  source 1..80: mol_type = other DNA
acaagagggtcagtccaccaaaacaaatttcaatccctaacgtgtatgcaacaaacaaaagagctgccaatatgtgaagc

SEQ ID NO: 48743 - DNA, 80 bp, synthetic construct; identical to SEQ ID NO: 16042
  source 1..80: mol_type = other DNA

SEQ ID NO: 48744 - DNA, 80 bp, synthetic construct
  source 1..80: mol_type = other DNA
ataacaggaaaatctcaaaacacttggaaattaaacaacaaaatttgaaataatgatgcatcaaaaaacacactgaaatg

SEQ ID NO: 48745 - DNA, 80 bp, synthetic construct
  source 1..80: mol_type = other DNA
ctaaagcaagcagaaagaaggaattaataaagttccagccagtgcactaagtcaagaaaaagaaataaaagatatacaga

SEQ ID NO: 48746 - DNA, 80 bp, synthetic construct
  source 1..80: mol_type = other DNA
catttctatacactagcaacgaacatgtatacactgttatggaatgaattgtgaacccatcacccaattcatatgttgaa

SEQ ID NO: 48747 - DNA, 80 bp, synthetic construct
  source 1..80: mol_type = other DNA
gcactttgggaggctgaggcgggtggatcacctgaggtccagagttcaagactagcctggccaacatggagaaaccccgt

SEQ ID NO: 48748 - DNA, 80 bp, synthetic construct; identical to SEQ ID NO: 16043
  source 1..80: mol_type = other DNA

SEQ ID NO: 48749 - DNA, 80 bp, synthetic construct
  source 1..80: mol_type = other DNA
cagactaatgcagataacaaatttcaaaatatggtttgatttacttaagaaaaagcataaactaaaaacatgtatagtac

SEQ ID NO: 48750 - DNA, 80 bp, synthetic construct
  source 1..80: mol_type = other DNA
aaaacaacacagtaaacacgtcaattctcccaaaattgatacactggcttaattgcaattcctaacaaaatctgagcagg

SEQ ID NO: 48751 - DNA, 80 bp, synthetic construct; identical to SEQ ID NO: 16044
  source 1..80: mol_type = other DNA

SEQ ID NO: 48752 - DNA, 80 bp, synthetic construct
  source 1..80: mol_type = other DNA
caaaaattaaagctggtcagagacttaaatgtaaaaacacgaaactttaaaaaagaaatttgaggaaaatcttctgaatt

SEQ ID NO: 48753 - DNA, 80 bp, synthetic construct
  source 1..80: mol_type = other DNA
taatatctggaatacacaaaccatgcttaaaactcaagagtataaaaatgaacaatccaatgagaaaatgggcagaagat

SEQ ID NO: 48754 - DNA, 80 bp, synthetic construct
  source 1..80: mol_type = other DNA
aaatatcactacacctatcacaacggccaaaataaaaactagtggcaacacggcataccaaagacgctgtgactggatct

SEQ ID NO: 48755 - DNA, 80 bp, synthetic construct
  source 1..80: mol_type = other DNA
aaacaagcaactacctggtgacccagcacttgcacttctgggcgtctgtcccagggaaaggaaaacctatattcacacaa

SEQ ID NO: 48756 - DNA, 80 bp, synthetic construct; identical to SEQ ID NO: 16045
  source 1..80: mol_type = other DNA

SEQ ID NO: 48757 - DNA, 80 bp, synthetic construct
  source 1..80: mol_type = other DNA
gtgatgtgctacagaactgtaagacgtgaccactgtgaaaactgggtacggggtacatggatctccctgtattatttatt

SEQ ID NO: 48758 - DNA, 80 bp, synthetic construct
  source 1..80: mol_type = other DNA
aaacagcatgtgaatataagattacccaaatataaagcttaatttaaaaagcaggcaaacccaggcaagctctagccctg

SEQ ID NO: 48759 - DNA, 80 bp, synthetic construct; identical to SEQ ID NO: 16046
  source 1..80: mol_type = other DNA

SEQ ID NO: 48760 - DNA, 80 bp, synthetic construct
  source 1..80: mol_type = other DNA
gctctctggggaagaactgctccaccccctgcaccaagcccccatgggcccttagaagcccaccgtgaggggtcccctcc

SEQ ID NO: 48761 - DNA, 80 bp, synthetic construct
  source 1..80: mol_type = other DNA
gccagttccagcctggctggggccacacagggccctgagggtctccctgggacgggcactccctgcccatacatgctggc

SEQ ID NO: 48762 - DNA, 80 bp, synthetic construct
  source 1..80: mol_type = other DNA
cctgagaccagcccggccaccaggaggctgtgtccacccaggccgggcctggacacattcacccgtgggccttggagact

SEQ ID NO: 48763 - DNA, 80 bp, synthetic construct
  source 1..80: mol_type = other DNA
tgagtgttcacacctgggcctcggaggctcacccgccctgagtgttcacacctgggcctcagaggctcacccaccctgag

SEQ ID NO: 48764 - DNA, 80 bp, synthetic construct
  source 1..80: mol_type = other DNA
cctgggccttggaggctcatcaccctgagtgttcacgcctgggccttggaggctcacctgccctgagtgttcacacctgg

SEQ ID NO: 48765 - DNA, 80 bp, synthetic construct; identical to SEQ ID NO: 16047
  source 1..80: mol_type = other DNA

SEQ ID NO: 48766 - DNA, 80 bp, synthetic construct
  source 1..80: mol_type = other DNA
gggctctgtggcacagggccacgtggcctgccagcgtggacaggccctaatgacactcttgggctgaagaatgcatttcg

SEQ ID NO: 48767 - DNA, 80 bp, synthetic construct
  source 1..80: mol_type = other DNA
gagacctgggccccaggtggacaaagcccttgtcccacccgccaagggcatctgtctagctgcaggctggggcagtcctg

SEQ ID NO: 48768 - DNA, 80 bp, synthetic construct; identical to SEQ ID NO: 16048
  source 1..80: mol_type = other DNA

SEQ ID NO: 48769 - DNA, 80 bp, synthetic construct
  source 1..80: mol_type = other DNA
acttcctgctctcgctggcctggtgtgtcccactggaagccccaggcccgcaccctgtgcccccagcccacagtgggctc

SEQ ID NO: 48770 - DNA, 80 bp, synthetic construct
  source 1..80: mol_type = other DNA
aaagaacgtgttgaccccgaagaccagggcacagagctctttagacagagaagatgcaatctgaaagctgaacgggaaga

SEQ ID NO: 48771 - DNA, 80 bp, synthetic construct
  source 1..80: mol_type = other DNA
gccaggcaggagccagcacccaggccaccctcgaggggccattctgggagctgccgtgtccccctggctcagtacagagt

SEQ ID NO: 48772 - DNA, 80 bp, synthetic construct; identical to SEQ ID NO: 16049
  source 1..80: mol_type = other DNA

SEQ ID NO: 48773 - DNA, 80 bp, synthetic construct
  source 1..80: mol_type = other DNA
tggattttttgttatttttttttagatggagtctcgctctgttgcccaggcgtgcaatggcacaatctcagctcactgca

SEQ ID NO: 48774 - DNA, 80 bp, synthetic construct
  source 1..80: mol_type = other DNA
tccacccacctcagcctcccaaagtgctgggatcacaggtgtgagccactgcgcccagctgaattctggctgttttgatt

SEQ ID NO: 48775 - DNA, 80 bp, synthetic construct; identical to SEQ ID NO: 16050
  source 1..80: mol_type = other DNA

SEQ ID NO: 48776 - DNA, 80 bp, synthetic construct
  source 1..80: mol_type = other DNA
tgcccgggcaggccctggaggtgagtggcagcgggcagggtgggcccaggaggtgagaggcagccaggcagggcaggccc

SEQ ID NO: 48777 - DNA, 80 bp, synthetic construct
  source 1..80: mol_type = other DNA
gccctggaggtgagtggcagccagttactgcaggccctggaggtgagtggcagcagggcagggtgggccctggaggtgag

SEQ ID NO: 48778 - DNA, 80 bp, synthetic construct
  source 1..80: mol_type = other DNA
gtgagtggcagccaggcagggcgggccctggaggtgagcggtggcatgaacatgtccaggaatgaaggcaccacattcct

SEQ ID NO: 48779 - DNA, 80 bp, synthetic construct; identical to SEQ ID NO: 16051
  source 1..80: mol_type = other DNA

SEQ ID NO: 48780 - DNA, 80 bp, synthetic construct
  source 1..80: mol_type = other DNA
gaagggcagacgaacaacagggagaactgagcacaaacacgagcttctggatgccagcgctgggcagggcagagcccagg

SEQ ID NO: 48781 - DNA, 80 bp, synthetic construct
  source 1..80: mol_type = other DNA
ggagacacacaggggccactcagtccacagcaggccggccggcctcactctggttaaggaaaggctgggagcccagccgg

SEQ ID NO: 48782 - DNA, 80 bp, synthetic construct
  source 1..80: mol_type = other DNA
gggtcattattagaatttggaaacaaaaatgtaggtagaagggcattcatctcagtgttttcctcgtgtaagaaaaatgg

SEQ ID NO: 48783 - DNA, 80 bp, synthetic construct; identical to SEQ ID NO: 16052
  source 1..80: mol_type = other DNA

SEQ ID NO: 48784 - DNA, 80 bp, synthetic construct
  source 1..80: mol_type = other DNA
agaaggcggccacacaggagcagaaggggccccgagtatggcaggggcgggagagaagggtgggccgggctgcccatgcc

SEQ ID NO: 48785 - DNA, 80 bp, synthetic construct
  source 1..80: mol_type = other DNA
ggggatgacccacggagggagggagatagggctcggaggccaccctggaggggaagcccaggaaggggtactgagctggg

SEQ ID NO: 48786 - DNA, 80 bp, synthetic construct
  source 1..80: mol_type = other DNA
tgtgtgaacgtgtccatgtgtaaacgtgtggtgtgtccatgtgtgaacgtgtggtgtgtgtccatgtgtgagcatgtgtt

SEQ ID NO: 48787 - DNA, 80 bp, synthetic construct
  source 1..80: mol_type = other DNA
atgtgtaagcatatggtgcattcatgtgagtgtggtgggtgtctgtgaacatgtggtgtgtccctgtgagtgtgtgtgtg

SEQ ID NO: 48788 - DNA, 80 bp, synthetic construct; identical to SEQ ID NO: 16053
  source 1..80: mol_type = other DNA

SEQ ID NO: 48789 - DNA, 80 bp, synthetic construct
  source 1..80: mol_type = other DNA
tgcgatatatccatgtgtgagtgtggtgtgtttgtccatgtgtgcacgtgtggtatgtgttcatgagtgtgtggtgagtg

SEQ ID NO: 48790 - DNA, 80 bp, synthetic construct
  source 1..80: mol_type = other DNA
ggcctagagggtggggttgggagcagggcaaggctgtgagcccagcaggcttcagagaggagcgtggagggcctggggga

SEQ ID NO: 48791 - DNA, 80 bp, synthetic construct; identical to SEQ ID NO: 16054
  source 1..80: mol_type = other DNA

SEQ ID NO: 48792 - DNA, 80 bp, synthetic construct
  source 1..80: mol_type = other DNA
ctgagaggggagggatggggcgttgcagcggccctggggggccacggggcagggggaggtagcgggagcttctgaggaaa

SEQ ID NO: 48793 - DNA, 80 bp, synthetic construct
  source 1..80: mol_type = other DNA
ggagcctccgggggaaggatccacggggcagggggaggtggcggagagcctctgggggaaggtatccatggggcaggggg

SEQ ID NO: 48794 - DNA, 80 bp, synthetic construct
  source 1..80: mol_type = other DNA
ccacctcgttccacaggatgtgcacgtagtagaccaccaggtagtagccggccgagttgaagacccaccagagggaccac

SEQ ID NO: 48795 - DNA, 80 bp, synthetic construct
  source 1..80: mol_type = other DNA
cgtcgcggttgaagaagaggctgcgcttggggcgcttcaggaagagggcgaggaccacgctgaaggtgaggaaggccagc

SEQ ID NO: 48796 - DNA, 80 bp, synthetic construct; identical to SEQ ID NO: 16055
  source 1..80: mol_type = other DNA

SEQ ID NO: 48797 - DNA, 80 bp, synthetic construct
  source 1..80: mol_type = other DNA
gtgatctcgttcgtgacctgcggacaggcgggcgtgcgccccaccaggtgttagcaatgctgccgctgcggcagacacag

SEQ ID NO: 48798 - DNA, 80 bp, synthetic construct
  source 1..80: mol_type = other DNA
ggaaagctggcagtggccacagaaggaatcgttattaacaagcctgttcatctaagcttctctatttttatctctttctt

SEQ ID NO: 48799 - DNA, 80 bp, synthetic construct
  source 1..80: mol_type = other DNA
tacaggtgcgtaccaccatgtctggctaatttttgtatttttagtagagatgggggtttcaccatgttgggcaggctggt

SEQ ID NO: 48800 - DNA, 80 bp, synthetic construct; identical to SEQ ID NO: 16056
  source 1..80: mol_type = other DNA

SEQ ID NO: 48801 - DNA, 80 bp, synthetic construct
  source 1..80: mol_type = other DNA
gaaagagaggaagtggggtagggcagagggccctgggctgtgcactcccatctcacacttgtccccagagcaaggtcttt

SEQ ID NO: 48802 - DNA, 80 bp, synthetic construct
  source 1..80: mol_type = other DNA
tgctggtggacactccaggcctggcttccatgcctgtggcctcaacacacatccaccttccatgggaacgtggagctggg

SEQ ID NO: 48803 - DNA, 80 bp, synthetic construct; identical to SEQ ID NO: 16057
  source 1..80: mol_type = other DNA

SEQ ID NO: 48804 - DNA, 80 bp, synthetic construct
  source 1..80: mol_type = other DNA
cacagccccactcgtgctgccccaggtgacctcagcccctgccagccacacttggcaggaccaaaccctgggtcagcacg

SEQ ID NO: 48805 - DNA, 80 bp, synthetic construct
  source 1..80: mol_type = other DNA
cccaggggctcaggggaaggctgcccagagaccccacctcagggcaccctgaggtcgcaccctggagcctgcaccctcat

SEQ ID NO: 48806 - DNA, 80 bp, synthetic construct
  source 1..80: mol_type = other DNA
gccatcggcttctgcactgtgtttacagcaatgtcctggggacatcaaacagcccctctgtgggcaagctctcctggctg

SEQ ID NO: 48807 - DNA, 80 bp, synthetic construct; identical to SEQ ID NO: 16058
  source 1..80: mol_type = other DNA

SEQ ID NO: 48808 - DNA, 80 bp, synthetic construct
  source 1..80: mol_type = other DNA
ccttggcagccacccagagccctcccgctcctctccctgcacctcctcaacggcccctactccctcttcctcagccttgg

SEQ ID NO: 48809 - DNA, 80 bp, synthetic construct
  source 1..80: mol_type = other DNA
gtcggccctgctctccacaggtcttggttggggtccaggctgaatgggcagagtgcaggcagctgcgcccaaatctacgt

SEQ ID NO: 48810 - DNA, 80 bp, synthetic construct
  source 1..80: mol_type = other DNA
ggcacccaacaggggctggctggggacggggcatgggccgcaggtcaggagggactgctgtgcacagggtcctgggccgg

SEQ ID NO: 48811 - DNA, 80 bp, synthetic construct; identical to SEQ ID NO: 16059
  source 1..80: mol_type = other DNA

SEQ ID NO: 48812 - DNA, 80 bp, synthetic construct
  source 1..80: mol_type = other DNA
cagcggccagacggccggcgctcagcagcccacccgagctggtgaggggaacgtgggcagcccgtggcaggctgcagagg

SEQ ID NO: 48813 - DNA, 80 bp, synthetic construct
  source 1..80: mol_type = other DNA
caccttgtagttcaacccaggaggcgcagcttaagaacagcctcgaacccacgtggaacgtctctcaagtcagattgggc

SEQ ID NO: 48814 - DNA, 80 bp, synthetic construct
  source 1..80: mol_type = other DNA
cggcgcccacgtgcctgctcccgcgtgaagttcttgtcgggccccaggagggagggcgtgatgaagctctccccgggcct

SEQ ID NO: 48815 - DNA, 80 bp, synthetic construct; identical to SEQ ID NO: 16060
  source 1..80: mol_type = other DNA

SEQ ID NO: 48816 - DNA, 80 bp, synthetic construct
  source 1..80: mol_type = other DNA
accgacagccggagccagggcaagaccctgtcctcgcctagaaagtgacccagcctggcggttagcagtgctggccgtgg

SEQ ID NO: 48817 - DNA, 80 bp, synthetic construct
  source 1..80: mol_type = other DNA
aagaggcatgccgagcgtcagccatgtgggagcagaggacggggtcagcggctgggatgggcaggtgagcaggcccaggg

SEQ ID NO: 48818 - DNA, 80 bp, synthetic construct
  source 1..80: mol_type = other DNA
ctgagagacccgtgactgggcataagcctattagaacagtttcaataagaccctttgtcctcatggctgagtaaaatgaa

SEQ ID NO: 48819 - DNA, 80 bp, synthetic construct; identical to SEQ ID NO: 16061
  source 1..80: mol_type = other DNA

SEQ ID NO: 48820 - DNA, 80 bp, synthetic construct
  source 1..80: mol_type = other DNA
taggcggccgccctggcacccagcacccacgtgcctattccagaagctgctccccgcccacccacaggcggccgcccagc

SEQ ID NO: 48821 - DNA, 80 bp, synthetic construct
  source 1..80: mol_type = other DNA
gctccctgcccacccactggcggccgcccccgcatcccggcgcccacgtgcctattccagacgctgctccccgcccaccc

SEQ ID NO: 48822 - DNA, 80 bp, synthetic construct
  source 1..80: mol_type = other DNA
cggagctcggggtcaggcccaggttccacgggcacctgcttctccaccgctgggctggagggcaccatcctgctcaggcc

SEQ ID NO: 48823 - DNA, 80 bp, synthetic construct; identical to SEQ ID NO: 16062
  source 1..80: mol_type = other DNA

SEQ ID NO: 48824 - DNA, 80 bp, synthetic construct
  source 1..80: mol_type = other DNA
ctgctgggcagtacctgtggcggtcagggggcacacctcaccccacaggcctgagggcagcccacgtgcctgctgctgct

SEQ ID NO: 48825 - DNA, 80 bp, synthetic construct
  source 1..80: mol_type = other DNA
cagtgagggaagggcagagggaaaagcaggtgtccttgagggggctgagagcagccagggttgaaacacgcgtgggaggg

SEQ ID NO: 48826 - DNA, 80 bp, synthetic construct
  source 1..80: mol_type = other DNA
tgcacccaaccttggggaccatcccgccagcacccccgccccacacggccagggcacgtggtggagcagcagcagcacga

SEQ ID NO: 48827 - DNA, 80 bp, synthetic construct; identical to SEQ ID NO: 16063
  source 1..80: mol_type = other DNA

SEQ ID NO: 48828 - DNA, 80 bp, synthetic construct
  source 1..80: mol_type = other DNA
gcatgcagagggcagctgagcagccttgtggggcggggtcgccgtcccatctgcactgggctgacagttggacaattgtg

SEQ ID NO: 48829 - DNA, 80 bp, synthetic construct
  source 1..80: mol_type = other DNA
ggggtccagggacccctaggaaaatctgccccaggctctcagcattcagtcttcacgtatcagagaccactcaggctgga

SEQ ID NO: 48830 - DNA, 80 bp, synthetic construct
  source 1..80: mol_type = other DNA
cccgtcttgacacctctacacactcatgtctgtgacaaaggaacataggtgatggcagggaagcccttaagaggcagagg

SEQ ID NO: 48831 - DNA, 80 bp, synthetic construct
  source 1..80: mol_type = other DNA
gaaaacagccggccaggcaggaggaagcgcaggcaggggccactgccaggccgaggcagatctgacggtcgcctgcctcg

SEQ ID NO: 48832 - DNA, 80 bp, synthetic construct; identical to SEQ ID NO: 16064
  source 1..80: mol_type = other DNA

SEQ ID NO: 48833 - DNA, 80 bp, synthetic construct
  source 1..80: mol_type = other DNA
cctccagaagcgaccagaacattccttccttggagagacagccagagtctccgccagcaaggggctgctgctggtcttaa

SEQ ID NO: 48834 - DNA, 80 bp, synthetic construct
  source 1..80: mol_type = other DNA
caagtgtccagaccccagcccagtcccatacagcttgaggcctcttcccggcatctgaaggaagtccccgaccagacagg

SEQ ID NO: 48835 - DNA, 80 bp, synthetic construct; identical to SEQ ID NO: 16065
  source 1..80: mol_type = other DNA

SEQ ID NO: 48836 - DNA, 80 bp, synthetic construct
  source 1..80: mol_type = other DNA
agataactgtactatctggaattataaaaatccaccaaagccccttcggaaagaaagcaattagcaattgcaacaagcag

SEQ ID NO: 48837 - DNA, 80 bp, synthetic construct
  source 1..80: mol_type = other DNA
tttacagggcggccaacaggcgcctccaaggactttatcccaccttccctctggatgcattctggatttcggggccagct

SEQ ID NO: 48838 - DNA, 80 bp, synthetic construct
  source 1..80: mol_type = other DNA
gggattgctccgctggatccgcacccacagctgctccaaggggaagttgcacctacaaagcttctggcacaggagacaat

SEQ ID NO: 48839 - DNA, 80 bp, synthetic construct; identical to SEQ ID NO: 16066
  source 1..80: mol_type = other DNA

SEQ ID NO: 48840 - DNA, 80 bp, synthetic construct
  source 1..80: mol_type = other DNA
gaccccggcccacgccccgcaccctccccagggccccgcggaccccaggctgcagaccgcagaccccggcccacgccccg

SEQ ID NO: 48841 - DNA, 80 bp, synthetic construct
  source 1..80: mol_type = other DNA
gactcggcggggcggctgccctggggctcccggacccggccccgcgcacgcggactccgggactacagcgcccacaaggc

SEQ ID NO: 48842 - DNA, 80 bp, synthetic construct
  source 1..80: mol_type = other DNA
cccacggccgtctcccagccccggcgccggcctctccccacccggtcaccgccggggtcacgcggcccctcgtgctgcgg

SEQ ID NO: 48843 - DNA, 80 bp, synthetic construct; identical to SEQ ID NO: 16067
  source 1..80: mol_type = other DNA

SEQ ID NO: 48844 - DNA, 80 bp, synthetic construct
  source 1..80: mol_type = other DNA
acgggcttgtaccaaggagcaagccggatccaggacgtggcccggggccaccagtccccatcccagcagggacagcccgg

SEQ ID NO: 48845 - DNA, 80 bp, synthetic construct
  source 1..80: mol_type = other DNA
gtgcaggacacggggagaagtggggggcctcagggtcactttcccctggagttacccagggcctggctatggggagggaa

SEQ ID NO: 48846 - DNA, 80 bp, synthetic construct
  source 1..80: mol_type = other DNA
ggtgagtctggggcagcagcccctggaatgtaccccttccggagtgtagacagcacaatccgcgacctgcctcctggtgt

SEQ ID NO: 48847 - DNA, 80 bp, synthetic construct; identical to SEQ ID NO: 16068
  source 1..80: mol_type = other DNA

SEQ ID NO: 48848 - DNA, 80 bp, synthetic construct
  source 1..80: mol_type = other DNA
ggggccagctcgccagggcagcctgctccctttacacgcaggacaggccaggaagccgaggggaagtggggatgaacagc

SEQ ID NO: 48849 - DNA, 80 bp, synthetic construct
  source 1..80: mol_type = other DNA
cccccggccgcgaggggcctgcccaagctgccctcgggtccccctgcgtggcaggagtcctgggagttccccagccacac

SEQ ID NO: 48850 - DNA, 80 bp, synthetic construct
  source 1..80: mol_type = other DNA
ggccacagacagtggggcgtgggcttccagagggctccacccaaaatagagatttacaaacgcaggtgacttgggagtga

SEQ ID NO: 48851 - DNA, 80 bp, synthetic construct
  source 1..80: mol_type = other DNA
tcagcaggggcccagcagtgtggatcccggccctccagcctgtaggctccagccatatacagtgatgtctgggggctgca

SEQ ID NO: 48852 - DNA, 80 bp, synthetic construct; identical to SEQ ID NO: 16069
  source 1..80: mol_type = other DNA

SEQ ID NO: 48853 - DNA, 80 bp, synthetic construct
  source 1..80: mol_type = other DNA
cacatgcagatggacacagacatgcgcagacacgcacacacactgatgtggtttggattctctgtcccctccaaatctca

SEQ ID NO: 48854 - DNA, 80 bp, synthetic construct
  source 1..80: mol_type = other DNA
accccccccttgccctcccctcctcccactcttgctatgtgacgctggctccccgtcaccttccaccatgtgtggaagct

SEQ ID NO: 48855 - DNA, 80 bp, synthetic construct; identical to SEQ ID NO: 16070
  source 1..80: mol_type = other DNA

SEQ ID NO: 48856 - DNA, 80 bp, synthetic construct
  source 1..80: mol_type = other DNA
gtgcttctgctcccatctgaatctgcttggtagaggtgcggtgcgccctgtaaatgccttacctggcttgctggccagtg

SEQ ID NO: 48857 - DNA, 80 bp, synthetic construct
  source 1..80: mol_type = other DNA
tgcccctgtgtcaggcctcccagcactagccccaagcccaggcctgcctgcagctgtggcccccatcctctcagaggctg

SEQ ID NO: 48858 - DNA, 80 bp, synthetic construct
  source 1..80: mol_type = other DNA
cctcacagcctgtcacagccccacagcagtggggctaacctgggcctgtgcctgccacacttcttccctggaagggtgtc

SEQ ID NO: 48859 - DNA, 80 bp, synthetic construct; identical to SEQ ID NO: 16071
  source 1..80: mol_type = other DNA

SEQ ID NO: 48860 - DNA, 80 bp, synthetic construct
  source 1..80: mol_type = other DNA
ataatgtcatctaacgaaagagtgttcgaaaaacattaaaataaccagtggaaatctggcctactgcaaggtggagtttg

SEQ ID NO: 48861 - DNA, 80 bp, synthetic construct
  source 1..80: mol_type = other DNA
atccgagaaacctaagcgtgacattagaagacaaaatgattgggaaggaagcggcagagtctctgttcacagatgatgca

SEQ ID NO: 48862 - DNA, 80 bp, synthetic construct
  source 1..80: mol_type = other DNA
attgtcagggcagtaaatcctaacaggttatcaaaaatactagaaataagggcatttagcaaggtcatgagatactaagt

SEQ ID NO: 48863 - DNA, 80 bp, synthetic construct
  source 1..80: mol_type = other DNA
tactgagagaaattagtgaagagctaaacaaatgggggagacagaccttgttcatggattgtgtaaaccaaaaataaact

SEQ ID NO: 48864 - DNA, 80 bp, synthetic construct; identical to SEQ ID NO: 16072
  source 1..80: mol_type = other DNA

SEQ ID NO: 48865 - DNA, 80 bp, synthetic construct
  source 1..80: mol_type = other DNA
gtatatcttacatgtatttgattggtgtctcatgttcccttaaatgtatgagaccaggctgtgcccagtcaccttggacg

SEQ ID NO: 48866 - DNA, 80 bp, synthetic construct
  source 1..80: mol_type = other DNA
tcagtgcaatccaacagagatctcacaggcttatttcttagaaattgaaatgttgattcagaattgagatggaaatgcaa

SEQ ID NO: 48867 - DNA, 80 bp, synthetic construct
  source 1..80: mol_type = other DNA
tttccaacaagggtgtccacgtaattcatttggggaaagggtggtctctagatcacatagttcaagaacagctggatatc

SEQ ID NO: 48868 - DNA, 80 bp, synthetic construct; identical to SEQ ID NO: 16073
  source 1..80: mol_type = other DNA

SEQ ID NO: 48869 - DNA, 80 bp, synthetic construct
  source 1..80: mol_type = other DNA
cgggtgcctgtagtcccagctactcaggaggctgaggcaggagaattgcttgaatctgggaggtggaggttgcaatgagc

SEQ ID NO: 48870 - DNA, 80 bp, synthetic construct
  source 1..80: mol_type = other DNA
aagtaccaaaccactcctactataaaggctaaaatttaagaagctgacaatactaagtgttgacaaggctgtggagtagt

SEQ ID NO: 48871 - DNA, 80 bp, synthetic construct
  source 1..80: mol_type = other DNA
accctgttctcatgtaactgctaaaaactggcaacaacccgaatatccattatgggatgaaggataaacacgcagtacat

SEQ ID NO: 48872 - DNA, 80 bp, synthetic construct; identical to SEQ ID NO: 16074
  source 1..80: mol_type = other DNA

SEQ ID NO: 48873 - DNA, 80 bp, synthetic construct
  source 1..80: mol_type = other DNA
ctctcgtgtctcttgggagacaatccaggcctcagttggttacaagggagaacccagaacagcctcagcctcgggagaaa

SEQ ID NO: 48874 - DNA, 80 bp, synthetic construct
  source 1..80: mol_type = other DNA
ggacacttggcggattgtggggaggaggacaggtggggggtggtggacggtggggaggggacagctgggcgcacactgtg

SEQ ID NO: 48875 - DNA, 80 bp, synthetic construct
  source 1..80: mol_type = other DNA
ttgggaactgtctctccccggccaggctggcacatgcggatgttgcagcattggccaaaagtggacagtgggggtcagtg

SEQ ID NO: 48876 - DNA, 80 bp, synthetic construct
  source 1..80: mol_type = other DNA
tcctgcctgatgagacctctgagccccaaagggtcacatgagactgtgtccccaggtggcagctgttggttctctccagc

SEQ ID NO: 48877 - DNA, 80 bp, synthetic construct; identical to SEQ ID NO: 16075
  source 1..80: mol_type = other DNA

SEQ ID NO: 48878 - DNA, 80 bp, synthetic construct
  source 1..80: mol_type = other DNA
ggcttccgtggttttgttgcatgcagatttcgtcgtcttcttctgaatgtttcagtattcatgtgttcctggatgactgg

SEQ ID NO: 48879 - DNA, 80 bp, synthetic construct
  source 1..80: mol_type = other DNA
cctctgccttcctcccctctcctccgcctttctgtccccttccctcccaccaccgccccccaccctccccccgcctcccc

SEQ ID NO: 48880 - DNA, 80 bp, synthetic construct; identical to SEQ ID NO: 16076
  source 1..80: mol_type = other DNA

SEQ ID NO: 48881 - DNA, 80 bp, synthetic construct
  source 1..80: mol_type = other DNA
ttaattaatttctgcttttctcattattttttctttttcctgttgactttgttgttcctttcctgttctagtttctgagt

SEQ ID NO: 48882 - DNA, 80 bp, synthetic construct
  source 1..80: mol_type = other DNA
cttggactcatgactcattacagagaatgattcaaacgtttccagtaggcagatgttgttgtttgttggtttaatatgtc

SEQ ID NO: 48883 - DNA, 80 bp, synthetic construct
  source 1..80: mol_type = other DNA
ataaaatctaaattgcaaatagtgggatttcaatctctgatagcctcattcatgcattgtctggggtatgtgtcaagttt

SEQ ID NO: 48884 - DNA, 80 bp, synthetic construct; identical to SEQ ID NO: 16077
  source 1..80: mol_type = other DNA

SEQ ID NO: 48885 - DNA, 80 bp, synthetic construct
  source 1..80: mol_type = other DNA
tgcccaggggagctacatcctggcctcaggacctccctcccagcctgagcagcaggggtcaggctggtccagctctcagg

SEQ ID NO: 48886 - DNA, 80 bp, synthetic construct
  source 1..80: mol_type = other DNA
caggaccgcagccctcgaatgtgcagagaccccgggtcctacccaggcccgggtctcgggaccacgtggaggagggatta

SEQ ID NO: 48887 - DNA, 80 bp, synthetic construct
  source 1..80: mol_type = other DNA
ccagacccctaatgcggagcctgcaggtcattcctggcccatgagtctgacctgacacgggagtctctgggctggtccgc

SEQ ID NO: 48888 - DNA, 80 bp, synthetic construct; identical to SEQ ID NO: 16078
  source 1..80: mol_type = other DNA

SEQ ID NO: 48889 - DNA, 80 bp, synthetic construct
  source 1..80: mol_type = other DNA
agcagaggctggggctgggtcctgccctgcaagctctactggtccttccaggcaccgcgcatccctcccaccggcctaag

SEQ ID NO: 48890 - DNA, 80 bp, synthetic construct
  source 1..80: mol_type = other DNA
tcacagtgccagccctaggccttgctgttattattttgtattttttttgtggtaaaagagacataaaatgtaccatgtta

SEQ ID NO: 48891 - DNA, 80 bp, synthetic construct
  source 1..80: mol_type = other DNA
cgcgcccccttcccagtcccccacaccccatcccagtcccccacgccccatcccagtcccccacaccccctcccaatccc

SEQ ID NO: 48892 - DNA, 80 bp, synthetic construct; identical to SEQ ID NO: 16079
  source 1..80: mol_type = other DNA

SEQ ID NO: 48893 - DNA, 80 bp, synthetic construct
  source 1..80: mol_type = other DNA
ccccccgcgcccccttcccagtcccccacaccccctcccaatcccccacgccccctcccagtcccccacgccccctccca

SEQ ID NO: 48894 - DNA, 80 bp, synthetic construct
  source 1..80: mol_type = other DNA
tcccccacgccccctcccaatcccccgcgccccctcccaatccccccgcgcccccttcccagtcccccacgccccctccc

SEQ ID NO: 48895 - DNA, 80 bp, synthetic construct
  source 1..80: mol_type = other DNA
tcctcttgtgcctggccaggggcactcagcatcgtgtctccaggtccctgcacggggcagcggcgtggaaacttcctttc

SEQ ID NO: 48896 - DNA, 80 bp, synthetic construct
  source 1..80: mol_type = other DNA
attattgttatgacaagttgacaagtgaatctttctcttacggtttcggtttttcccatcttatttgcttttaactgtcc

SEQ ID NO: 48897 - DNA, 80 bp, synthetic construct
  source 1..80: mol_type = other DNA
gcgtggggccgccctgtgcgcgcgcctggaggcctcgggtttccccgacgcaacgcggggagtggccaccagggggcgag

SEQ ID NO: 48898 - DNA, 80 bp, synthetic construct
  source 1..80: mol_type = other DNA
gggcggcgcagggggcggcgcagggggcggcgcagggggcggcgcagggggcggcgggggcggcggggggcggcgggggg

SEQ ID NO: 48899 - DNA, 80 bp, synthetic construct
  source 1..80: mol_type = other DNA
gccatgcaggcgacgcgggttgcagggaacggaggtgcagggggcggcggcgggggcggcggcgaaaggggacgggcttg

SEQ ID NO: 48900 - DNA, 80 bp, synthetic construct
  source 1..80: mol_type = other DNA
gaacggcgggcgctggcagaaagcgacccacgcagagttccgcgccagccgaggggcccggctgccgcccatgcgcggtc

SEQ ID NO: 48901 - DNA, 80 bp, synthetic construct; identical to SEQ ID NO: 16080
  source 1..80: mol_type = other DNA

SEQ ID NO: 48902 - DNA, 80 bp, synthetic construct
  source 1..80: mol_type = other DNA
acggcctgcggcccggggagacctgagactcctaagctgagcacgtcagcgtctctacctccaccgcagacagaaagacc

SEQ ID NO: 48903 - DNA, 80 bp, synthetic construct
  source 1..80: mol_type = other DNA
cttttcaagagaagcttgaaatctgtaattcttatgtgaaatcctgcctttcttaactaattaaagacttaaaattagct

SEQ ID NO: 48904 - DNA, 80 bp, synthetic construct
  source 1..80: mol_type = other DNA
agacaggacagaacaggacgttgtcaagcgctctgtggctgatctgtctctgttgcaccaaagtattttaaatgttctct

SEQ ID NO: 48905 - DNA, 80 bp, synthetic construct
  source 1..80: mol_type = other DNA
gacgcatgtgtctcctgggacggcgactcagatgcatgtgtctcctgggacggcgcctcagaggcctggctactccgaga

SEQ ID NO: 48906 - DNA, 80 bp, synthetic construct; identical to SEQ ID NO: 16081
  source 1..80: mol_type = other DNA

SEQ ID NO: 48907 - DNA, 80 bp, synthetic construct
  source 1..80: mol_type = other DNA
tggccccagcctggccctgagccccgggtcctgcacaccttgctggtagtctctgtcacagagacggttgggcccggagg

SEQ ID NO: 48908 - DNA, 80 bp, synthetic construct
  source 1..80: mol_type = other DNA
gaagggatgctctgaggctcccggggagcctcaaccctccaccacactcagacagtgtgcctctcttggaccgtgtcctg

SEQ ID NO: 48909 - DNA, 80 bp, synthetic construct; identical to SEQ ID NO: 16082
  source 1..80: mol_type = other DNA

SEQ ID NO: 48910 - DNA, 80 bp, synthetic construct
  source 1..80: mol_type = other DNA
gactggaggcggcttctgaaaacccttcggggccaaggctctctagtcggactccacacggctggtgacagatcaggcca

SEQ ID NO: 48911 - DNA, 80 bp, synthetic construct
  source 1..80: mol_type = other DNA
gggtgtgggcctgcagctctggctgctgagaaatccccagtgggcccttcaatctttgaaggattcgccccattgtcact

SEQ ID NO: 48912 - DNA, 80 bp, synthetic construct
  source 1..80: mol_type = other DNA
tgtttcttcttcgtatgtggccagtgtgacttgagttcagccccagaaataaatgtgtgagaggactgcgtttggtttga

SEQ ID NO: 48913 - DNA, 80 bp, synthetic construct; identical to SEQ ID NO: 16083
  source 1..80: mol_type = other DNA

SEQ ID NO: 48914 - DNA, 80 bp, synthetic construct
  source 1..80: mol_type = other DNA
ctaatttttgtatttttagtagagacggggtttcaccatgttggccaggatggtctcgatctcttgacctcgtgatccat

SEQ ID NO: 48915 - DNA, 80 bp, synthetic construct
  source 1..80: mol_type = other DNA
aaacatctttaagtcaaaaagcaccatgaagaactgccagcccctcagctgtgtggaaacatcgcaacgttgaggccggg

SEQ ID NO: 48916 - DNA, 80 bp, synthetic construct
  source 1..80: mol_type = other DNA
cggagaccacgggaaggccaggtcttccagctccaacttgcaaagatttgctaagatttatatttttttccagttgtttt

SEQ ID NO: 48917 - DNA, 80 bp, synthetic construct
  source 1..80: mol_type = other DNA
ggtggttccacatcagcacacgcagagcttccgtgttccttattaacagcagtgaagaactagtcattcaaatgcgcatc

SEQ ID NO: 48918 - DNA, 80 bp, synthetic construct; identical to SEQ ID NO: 16084
  source 1..80: mol_type = other DNA

SEQ ID NO: 48919 - DNA, 80 bp, synthetic construct
  source 1..80: mol_type = other DNA
tcccaaaatgtaggaaactggctcgtgccaggtgtggctagaacgtgggcataggggagccctggggtcactcatggagc

SEQ ID NO: 48920 - DNA, 80 bp, synthetic construct
  source 1..80: mol_type = other DNA
cgggacactccatgtccatcaccttgggagggtcaggcaaagcgcactgggtgcccactatggcccccacaggagctaat

SEQ ID NO: 48921 - DNA, 80 bp, synthetic construct; identical to SEQ ID NO: 16085
  source 1..80: mol_type = other DNA

SEQ ID NO: 48922 - DNA, 80 bp, synthetic construct
  source 1..80: mol_type = other DNA
aggccaaacagacaaacaagaagagcagcacccaggcttggagctgagggaggcccgagccccggagaatcggcgctgtc

SEQ ID NO: 48923 - DNA, 80 bp, synthetic construct
  source 1..80: mol_type = other DNA
atgtgcaaaggaagaaggaaagaacgagaataaacgaccaagcctaatccactttccctgccttgcgaaccacagtattt

SEQ ID NO: 48924 - DNA, 80 bp, synthetic construct
  source 1..80: mol_type = other DNA
attgcagtaacttgccatgccattcacttgtaataaatgaacctctttcaagttagaacatgttgcgtttgtgcagccag

SEQ ID NO: 48925 - DNA, 80 bp, synthetic construct
  source 1..80: mol_type = other DNA
gggcagatcacctgaggttaggagttcgagaccagcctggtcaacatggtgaaaccctgtctctactaaaaatacaaaaa

SEQ ID NO: 48926 - DNA, 80 bp, synthetic construct; identical to SEQ ID NO: 16086
  source 1..80: mol_type = other DNA

SEQ ID NO: 48927 - DNA, 80 bp, synthetic construct
  source 1..80: mol_type = other DNA
aatacaaaaattagctgggcatggtggcgggcgcctgtaatcccagctattcaggaggctgaggcaggagaatcacttga

SEQ ID NO: 48928 - DNA, 80 bp, synthetic construct
  source 1..80: mol_type = other DNA
tcagagagctcaggcatgaaccaaaatctatgtttgtggaaaatgatacacagacaacactcaccacacaggtgcatcac

SEQ ID NO: 48929 - DNA, 80 bp, synthetic construct; identical to SEQ ID NO: 16087
  source 1..80: mol_type = other DNA

SEQ ID NO: 48930 - DNA, 80 bp, synthetic construct
  source 1..80: mol_type = other DNA
tggccataaaccacaggacggagtcccagacagaaaggagctgtacttacggtagattccaacaatccgcagaagatcct

SEQ ID NO: 48931 - DNA, 80 bp, synthetic construct
  source 1..80: mol_type = other DNA
cctccggtatctacgtgtgtacggatctgtgcaggtgtgagaggcaaatactcaaggccagggaaagaccatcagaaaga

SEQ ID NO: 48932 - DNA, 80 bp, synthetic construct
  source 1..80: mol_type = other DNA
accttgcctgaaacgttcaaagcaagcctcgggagaaacaaactgtttccatgtaacttaattgcattccagaacaaagc

SEQ ID NO: 48933 - DNA, 80 bp, synthetic construct
  source 1..80: mol_type = other DNA
tgaggatataaattaatccatagaaacagatctagaaatgacaaagaaggtagatttagcagaaaaggacattaaaacaa

SEQ ID NO: 48934 - DNA, 80 bp, synthetic construct; identical to SEQ ID NO: 16088
  source 1..80: mol_type = other DNA

SEQ ID NO: 48935 - DNA, 80 bp, synthetic construct
  source 1..80: mol_type = other DNA
gcactttaagttgtaaaacaaggatttgaacaaggtaaacccacaaatccaagaatctcagtaaaccccaagcacaagaa

SEQ ID NO: 48936 - DNA, 80 bp, synthetic construct
  source 1..80: mol_type = other DNA
aggataaggatggatttctgattggaaacaatgcaagtgagaagaccatggagcaacctctttaaagtgccaacagattc

SEQ ID NO: 48937 - DNA, 80 bp, synthetic construct
  source 1..80: mol_type = other DNA
caggcatgctccaccacgcctggctaacttttgtatttttagtagagatggggtttcaccatgttggctaagatggtctc

SEQ ID NO: 48938 - DNA, 80 bp, synthetic construct; identical to SEQ ID NO: 16089
  source 1..80: mol_type = other DNA

SEQ ID NO: 48939 - DNA, 80 bp, synthetic construct
  source 1..80: mol_type = other DNA
gtgaggttggccaggtacggtggctcacacctgtaatcccagcactttgggaggccgagacgggcggattgcttgagctc

SEQ ID NO: 48940 - DNA, 80 bp, synthetic construct
  source 1..80: mol_type = other DNA
tgatcgtgccattgcactccacaatccagcctggatgacagagtaagaaagaccctgtctcaaaaaaaaaaaaagtgtga

SEQ ID NO: 48941 - DNA, 80 bp, synthetic construct; identical to SEQ ID NO: 16090
  source 1..80: mol_type = other DNA

SEQ ID NO: 48942 - DNA, 80 bp, synthetic construct
  source 1..80: mol_type = other DNA
aaatataaatatataaaattggcttaaaatcaaaagatggaaaaatatataccatcgcactattcaaaagatggccagag

SEQ ID NO: 48943 - DNA, 80 bp, synthetic construct
  source 1..80: mol_type = other DNA
agaatgtaaggagaagtacacaaaccaacaattacagtcagagagttcaacacctcatttcaataactgatagaacaaat

SEQ ID NO: 48944 - DNA, 80 bp, synthetic construct
  source 1..80: mol_type = other DNA
cccggccgggtgcggtggctcatgcctgtaatctcagcactttgggaggctgagttgggtggatcacgaggtcaggagat

SEQ ID NO: 48945 - DNA, 80 bp, synthetic construct
  source 1..80: mol_type = other DNA
tcgcaccactgcactccagcctgggtgacagagcgagactccgtctcaaaaaaaaaaaaaaaaaaaaattcccaataaat

SEQ ID NO: 48946 - DNA, 80 bp, synthetic construct; identical to SEQ ID NO: 16091
  source 1..80: mol_type = other DNA

SEQ ID NO: 48947 - DNA, 80 bp, synthetic construct
  source 1..80: mol_type = other DNA
caaataacgctatgttgctccacatacaagtatcttgtaacagaatattcccagtcctctcccatcccttaccacattgc

SEQ ID NO: 48948 - DNA, 80 bp, synthetic construct
  source 1..80: mol_type = other DNA
tctgacctatataatttccttcttcctaaggaacttcttctaatatttctggtagagcatgtctgctggtgattaattct

SEQ ID NO: 48949 - DNA, 80 bp, synthetic construct
  source 1..80: mol_type = other DNA
tgcccaacaacatataaaaaagaaactccactgtgacctactggtgtttatgccaagaatgtaaggttggtttagcaatg

SEQ ID NO: 48950 - DNA, 80 bp, synthetic construct; identical to SEQ ID NO: 16092
  source 1..80: mol_type = other DNA

SEQ ID NO: 48951 - DNA, 80 bp, synthetic construct
  source 1..80: mol_type = other DNA
acctgtgaaactttacagtacaaagaatacaccccattgtatgcaaatttaaaaaccatttaggaagctcaaggacctca

SEQ ID NO: 48952 - DNA, 80 bp, synthetic construct
  source 1..80: mol_type = other DNA
taaaggcaaaggaacagtacgtaagcactggactctagctgacaaagttgtctcccagtgaggtgtgaattaacagttct

SEQ ID NO: 48953 - DNA, 80 bp, synthetic construct
  source 1..80: mol_type = other DNA
ctctggagagtcccaggtggcacagggcatcagatggtgagggtcttacaagagatggccagactcgcttttacaacaga

SEQ ID NO: 48954 - DNA, 80 bp, synthetic construct; identical to SEQ ID NO: 16093
  source 1..80: mol_type = other DNA

SEQ ID NO: 48955 - DNA, 80 bp, synthetic construct
  source 1..80: mol_type = other DNA
atatgcatatatacatggttaatatatgcacatatattttctcctctgtgagctgagagggtttggcagcaacaacacct

SEQ ID NO: 48956 - DNA, 80 bp, synthetic construct
  source 1..80: mol_type = other DNA
atgagactagaacatcttgtactaaaatgtagtaataaaatgccaaaacaaacctcagattgatgggctatgtcaaaggg

SEQ ID NO: 48957 - DNA, 80 bp, synthetic construct
  source 1..80: mol_type = other DNA
agaagagacaaatctgcatggaggaatgacaaataatttatgtagacactctgcctcagagggggcgtaactccccagtt

SEQ ID NO: 48958 - DNA, 80 bp, synthetic construct; identical to SEQ ID NO: 16094
  source 1..80: mol_type = other DNA

SEQ ID NO: 48959 - DNA, 80 bp, synthetic construct
  source 1..80: mol_type = other DNA
gatcctggggcagaaaaggcgccttagagaaaaactaataatatctgaataaagtggggactttggagagcgacaatgta

SEQ ID NO: 48960 - DNA, 80 bp, synthetic construct
  source 1..80: mol_type = other DNA
ctgtaatcctagcactttgggaggctgaggtgggtggatcacttgaggtcaggagttcaagaccagcctggccaatatgg

SEQ ID NO: 48961 - DNA, 80 bp, synthetic construct; identical to SEQ ID NO: 16095
  source 1..80: mol_type = other DNA

SEQ ID NO: 48962 - DNA, 80 bp, synthetic construct
  source 1..80: mol_type = other DNA
accatcgtggctaacatggtgaaaccccgtctctactaaaaatacaaaaacttagccgggtgtggtggcgggcgcttgta

SEQ ID NO: 48963 - DNA, 80 bp, synthetic construct
  source 1..80: mol_type = other DNA
cgcatgacttggtgaaggagtgaccggcccgtgcaatgctgtgaataaatgtcaaagcaattgtgctcatgactgaggcc

SEQ ID NO: 48964 - DNA, 80 bp, synthetic construct
  source 1..80: mol_type = other DNA
gcaattttagtagagacagggtttcaccatgttggccaggctggtctcgaactccctacctcaggtgatccgcccgcctc

SEQ ID NO: 48965 - DNA, 80 bp, synthetic construct
  source 1..80: mol_type = other DNA
ggaagagattttggggtaaatatgttcatgacctagattttagtgacagtttcagaagtgcctacgtatcatattgtgta

SEQ ID NO: 48966 - DNA, 80 bp, synthetic construct; identical to SEQ ID NO: 16096
  source 1..80: mol_type = other DNA

SEQ ID NO: 48967 - DNA, 80 bp, synthetic construct
  source 1..80: mol_type = other DNA
gcgtctcatgtttaaaaaataacactgctaatagctgacttctcctcagcaggctgagtggaaacatgccccgctgaact

SEQ ID NO: 48968 - DNA, 80 bp, synthetic construct
  source 1..80: mol_type = other DNA
agctgccaaggccaagcagaaactggcaagcgtccccagagacgcatcttagtcttcaacataaaccagacctgattccg

SEQ ID NO: 48969 - DNA, 80 bp, synthetic construct
  source 1..80: mol_type = other DNA
tttaaaagcacacgctcccctcctcactccagttagaaaaaaacggagtgtgcaggtgcattgtgactcatgaaatcgct

SEQ ID NO: 48970 - DNA, 80 bp, synthetic construct; identical to SEQ ID NO: 16097
  source 1..80: mol_type = other DNA

SEQ ID NO: 48971 - DNA, 80 bp, synthetic construct
  source 1..80: mol_type = other DNA
gagaggagggaggagacttgaaccctgggctgagagatgtgttggaggatgacttaacactgtggaaaggacagaagctg

SEQ ID NO: 48972 - DNA, 80 bp, synthetic construct
  source 1..80: mol_type = other DNA
tacctggggagggggctgcatggagtctgggtttgcaggccaactgcctattcttagggtgcagcgacttccccgttatg

SEQ ID NO: 48973 - DNA, 80 bp, synthetic construct
  source 1..80: mol_type = other DNA
agaagcttgcgctgtcgctggtgtggggtgtgggtgtgaagcctggaactactgcagttacttttttatttttgacacag

SEQ ID NO: 48974 - DNA, 80 bp, synthetic construct
  source 1..80: mol_type = other DNA
agacggggttgtaccatgttggccaggtggcctggaactcctgacctcaagtgatccgcccaccttggactcccaaagtg

SEQ ID NO: 48975 - DNA, 80 bp, synthetic construct; identical to SEQ ID NO: 16098
  source 1..80: mol_type = other DNA

SEQ ID NO: 48976 - DNA, 80 bp, synthetic construct
  source 1..80: mol_type = other DNA
ccaaggtctccacgggcaggaacttgcttcgtcttcccgatagcattatgggcgggagctgtaattagctccatcttgca

SEQ ID NO: 48977 - DNA, 80 bp, synthetic construct
  source 1..80: mol_type = other DNA
acacttggacagcaaactgatttcaaaccactccttttcaaagatctctgagggagacattgcacctggccactgcagcc

SEQ ID NO: 48978 - DNA, 80 bp, synthetic construct
  source 1..80: mol_type = other DNA
cttcctgggtttcacacctgaccaccactgccagagtcctggggtggctgagctgagccagcgctgtggctggagccctg

SEQ ID NO: 48979 - DNA, 80 bp, synthetic construct; identical to SEQ ID NO: 16099
  source 1..80: mol_type = other DNA

SEQ ID NO: 48980 - DNA, 80 bp, synthetic construct
  source 1..80: mol_type = other DNA
agtcgggggccaggttgccaggttgcttgaatgggagttgactgggagaccaggagcctctctgcctgccccactggctt

SEQ ID NO: 48981 - DNA, 80 bp, synthetic construct; identical to SEQ ID NO: 16100
  source 1..80: mol_type = other DNA

SEQ ID NO: 48982 - DNA, 80 bp, synthetic construct
  source 1..80: mol_type = other DNA
attttgctttgagaatcctttagtaaaaagtgtcaccacatttttttcccatcatgagcccttttgaaactattgcacgg

SEQ ID NO: 48983 - DNA, 80 bp, synthetic construct
  source 1..80: mol_type = other DNA
gtctctgttcttcctcttttccctttcctgagtggtatcagcggtgacacatttagggctattactggaggaaagcttag

SEQ ID NO: 48984 - DNA, 80 bp, synthetic construct
  source 1..80: mol_type = other DNA
accatctgacattcccactgggaatctagaagcagaccaggatgaggatgtgtttgctctctgggactgagacatactct

SEQ ID NO: 48985 - DNA, 80 bp, synthetic construct; identical to SEQ ID NO: 16101
  source 1..80: mol_type = other DNA

SEQ ID NO: 48986 - DNA, 80 bp, synthetic construct
  source 1..80: mol_type = other DNA
agcaaggagaggggacaggtggagtagaggggaggggaagtagatccccagaccaaggggagagcttgagcctaggctca

SEQ ID NO: 48987 - DNA, 80 bp, synthetic construct
  source 1..80: mol_type = other DNA
ctcgaacatttgaacttcagataatccaactggataggatacttacttcccagatactgcatgatatttggtactgataa

SEQ ID NO: 48988 - DNA, 80 bp, synthetic construct
  source 1..80: mol_type = other DNA
taccttagtgcccaacaaaggagtttgggtcttatttaggcaggcaagcaaggtgaccctagctggactcgtgaatgggt

SEQ ID NO: 48989 - DNA, 80 bp, synthetic construct
  source 1..80: mol_type = other DNA
aaggaggcccagcttggcggagggctctggcttggggggtataggcaaatggagcttctgaacgctgaactgggagcctt

SEQ ID NO: 48990 - DNA, 80 bp, synthetic construct; identical to SEQ ID NO: 16102
  source 1..80: mol_type = other DNA

SEQ ID NO: 48991 - DNA, 80 bp, synthetic construct
  source 1..80: mol_type = other DNA
ccccaacttccttggccccagctcctcctccaaaactgaaaattattgttggggaatcaatcttagttattcatttctgc

SEQ ID NO: 48992 - DNA, 80 bp, synthetic construct
  source 1..80: mol_type = other DNA
tgactctcccaacaagaggatctcctctggtgctaagatcatgaggtccactcgggggggatgtgggcattttcctgact

SEQ ID NO: 48993 - DNA, 80 bp, synthetic construct
  source 1..80: mol_type = other DNA
ctggcttttgactctcccaacaagaggatctcctctggtgctaagatcatgaggtccactcggggaggatgtgggcattt

SEQ ID NO: 48994 - DNA, 80 bp, synthetic construct; identical to SEQ ID NO: 16103
  source 1..80: mol_type = other DNA

SEQ ID NO: 48995 - DNA, 80 bp, synthetic construct
  source 1..80: mol_type = other DNA
gtgggcattttcctggcttttgactctcccaacaagaggatctcctctggtgctaagatcatgaggtccactcggggggg

SEQ ID NO: 48996 - DNA, 80 bp, synthetic construct
  source 1..80: mol_type = other DNA
ggggatgtgggcattttcctggcttttgactctcccaacaagaggatctcctctgctgctaagatcatgaggtccactcg

SEQ ID NO: 48997 - DNA, 80 bp, synthetic construct
  source 1..80: mol_type = other DNA
actcgggggggatgtgggcattttcctggcttttgactctcccaacaagaggatctcctctggtgctaagatcatgaggt

SEQ ID NO: 48998 - DNA, 80 bp, synthetic construct
  source 1..80: mol_type = other DNA
aggtccactcgggagggatgtgggcattttcctggcttttgactctcccaacaagaggatctcctctggtgctaagatca

SEQ ID NO: 48999 - DNA, 80 bp, synthetic construct
  source 1..80: mol_type = other DNA
gatcatgaggtccactcgggggggatgtgggcattttcctggcttttgactctcccaacaagaggatctcctctatcagt

SEQ ID NO: 49000 - DNA, 80 bp, synthetic construct
  source 1..80: mol_type = other DNA
acccactgaggcagaatacacagggaatctgtggttccaccaggaccctgtgtggttctcgtgatgaagcagtaggttgc

SEQ ID NO: 49001 - DNA, 80 bp, synthetic construct; identical to SEQ ID NO: 16105
  source 1..80: mol_type = other DNA

SEQ ID NO: 49002 - DNA, 80 bp, synthetic construct
  source 1..80: mol_type = other DNA
agataccaacttgcaaagattataataaaaaccagacaaacaatggctgagaagggaataagccgaggccccaggtaata

SEQ ID NO: 49003 - DNA, 80 bp, synthetic construct
  source 1..80: mol_type = other DNA
tgggtgacctgggaggcgctccatggagaagctgtgttttaagctgaattttagaggaaatcaatattgggattggcaga

SEQ ID NO: 49004 - DNA, 80 bp, synthetic construct
  source 1..80: mol_type = other DNA
ggaaaaaaaaaagtgctcatgtcaaggaactagtcagtccatcagacagaacccaggctggctgagttcagagtccttga

SEQ ID NO: 49005 - DNA, 80 bp, synthetic construct; identical to SEQ ID NO: 16106
  source 1..80: mol_type = other DNA

SEQ ID NO: 49006 - DNA, 80 bp, synthetic construct
  source 1..80: mol_type = other DNA
gtttctaaaataaaagggtttattatttattaaagctatctgcatgtgatttctcccctccaatgcacccagcagcccta

SEQ ID NO: 49007 - DNA, 80 bp, synthetic construct
  source 1..80: mol_type = other DNA
gtgtcgaccacccaggaggggctgtaccaggaactgaaagggtcgagaggcctccacccaacaccctctgttctccccag

SEQ ID NO: 49008 - DNA, 80 bp, synthetic construct
  source 1..80: mol_type = other DNA
cctctaaacgcagggaatatctgccttctccaaaaacccaaacaaaacaagcccttcccagcagcccatgcctgtctttt

SEQ ID NO: 49009 - DNA, 80 bp, synthetic construct
  source 1..80: mol_type = other DNA
ctttgccaatcacataaacagccaatgaacacatatcttgtatgttatatgtattatacactgtattattacaataaagt

SEQ ID NO: 49010 - DNA, 80 bp, synthetic construct; identical to SEQ ID NO: 16107
  source 1..80: mol_type = other DNA

SEQ ID NO: 49011 - DNA, 80 bp, synthetic construct
  source 1..80: mol_type = other DNA
tttgctgaagagaggatggaagggtgtagtcctgactcacacatggttctgtgcttttcgtcctcctcttgccgtggtat

SEQ ID NO: 49012 - DNA, 80 bp, synthetic construct
  source 1..80: mol_type = other DNA
cagattctaagggcgaatctgttctcagtggtggagaacatgaccagttggaattaactgcagaagctgctggagacaag

SEQ ID NO: 49013 - DNA, 80 bp, synthetic construct
  source 1..80: mol_type = other DNA
tcgtgaggccattttgagatgggatgcagagggttaggaagggattttgttgcagcggttgataggggagaggttatgga

SEQ ID NO: 49014 - DNA, 80 bp, synthetic construct; identical to SEQ ID NO: 16108
  source 1..80: mol_type = other DNA

SEQ ID NO: 49015 - DNA, 80 bp, synthetic construct
  source 1..80: mol_type = other DNA
ggcaggagagtggagttgtgtgaacaactctttaaaagagtgtggggagggtccaggatgaggaggctgataggggaggg

SEQ ID NO: 49016 - DNA, 80 bp, synthetic construct
  source 1..80: mol_type = other DNA
gagagggtacagagccaggcgccactgcaggagacagggagaggggacagagccaggtgccgctggaggagacagggaga

SEQ ID NO: 49017 - DNA, 80 bp, synthetic construct
  source 1..80: mol_type = other DNA
gaagacgtgggttctggcagaagttcctatgttttcacaaagggcaagggtttactggccggtttggggctgtcctgagg

SEQ ID NO: 49018 - DNA, 80 bp, synthetic construct; identical to SEQ ID NO: 16109
  source 1..80: mol_type = other DNA

SEQ ID NO: 49019 - DNA, 80 bp, synthetic construct
  source 1..80: mol_type = other DNA
aaaaggagaagagaaacagccctgtatggctacactatcagagctgaatatggcactgaaaagcttccatgatggttgat

SEQ ID NO: 49020 - DNA, 80 bp, synthetic construct
  source 1..80: mol_type = other DNA
tcagactcctcttcagacccggaagggctgcggagcttgttgggacagatgagcaggctgggcggtgcactgggcactgc

SEQ ID NO: 49021 - DNA, 80 bp, synthetic construct
  source 1..80: mol_type = other DNA
tgggaactgtgctggtcaacgcggtgtcgggcgtgctcatggccttctcgcccaactacatgtccatgctgctcttccgc

SEQ ID NO: 49022 - DNA, 80 bp, synthetic construct; identical to SEQ ID NO: 16110
  source 1..80: mol_type = other DNA

SEQ ID NO: 49023 - DNA, 80 bp, synthetic construct
  source 1..80: mol_type = other DNA
caaacttgacgggcttgaatggcactcaagaattaggaaagaaaacaggagcaaataaaataaggattgtgaaaatcagg

SEQ ID NO: 49024 - DNA, 80 bp, synthetic construct
  source 1..80: mol_type = other DNA
agccagcagtgaggatgagccacacttttactcatttgtgggggagaaaaaagaaatagcctgtcttttcatctttgaaa

SEQ ID NO: 49025 - DNA, 80 bp, synthetic construct
  source 1..80: mol_type = other DNA
acatggtttggggggtctgacccggggccacatccacgctccaacaccacccgcagcccctccacccacgactcccctga

SEQ ID NO: 49026 - DNA, 80 bp, synthetic construct; identical to SEQ ID NO: 16111
  source 1..80: mol_type = other DNA

SEQ ID NO: 49027 - DNA, 80 bp, synthetic construct
  source 1..80: mol_type = other DNA
gtttgatgggtccggggccccggtttgatgggtccggggccccagagagaaggggaggcgtgagcgcggctgtggtttgc

SEQ ID NO: 49028 - DNA, 80 bp, synthetic construct
  source 1..80: mol_type = other DNA
acgtccacacctcctgtttcagtcacagaatttgttggctcgggctccagaagaacggtggcgatcatgtaccagatggc

SEQ ID NO: 49029 - DNA, 80 bp, synthetic construct; identical to SEQ ID NO: 16112
  source 1..80: mol_type = other DNA

SEQ ID NO: 49030 - DNA, 80 bp, synthetic construct
  source 1..80: mol_type = other DNA
gggtttccgacacgcatgacgcatagggatgagctggtcccggggtttcccacacgcatgacgcatagggatgagctggt

SEQ ID NO: 49031 - DNA, 80 bp, synthetic construct
  source 1..80: mol_type = other DNA
gcacagagcccggggtttcccacaggcatgatgcatagggctgcacagagcctggggtttcccacacgcatatcgcatgg

SEQ ID NO: 49032 - DNA, 80 bp, synthetic construct
  source 1..80: mol_type = other DNA
ggaaaactcagggcctcagcatgtgcactttccagaaacacaaggctgaacctcactcccgggtgaaggaggcagctttt

SEQ ID NO: 49033 - DNA, 80 bp, synthetic construct
  source 1..80: mol_type = other DNA
atcctctccctcttccccctcttctcttcctctctgctgtcatctctgctcttctcccacttcttcatttttatagtact

SEQ ID NO: 49034 - DNA, 80 bp, synthetic construct; identical to SEQ ID NO: 16113
  source 1..80: mol_type = other DNA

SEQ ID NO: 49035 - DNA, 80 bp, synthetic construct
  source 1..80: mol_type = other DNA
ttgctgagagcagacctcatctgtgggtggcactagagttaacccagtctctctaaatgaaagagttgtacacgtatggc

SEQ ID NO: 49036 - DNA, 80 bp, synthetic construct
  source 1..80: mol_type = other DNA
gtaccctcctcgtcccatttgaaatagacagcatggtgttgatttgattttaaaggacagtaaatacattttattttgtt

SEQ ID NO: 49037 - DNA, 80 bp, synthetic construct; identical to SEQ ID NO: 16114
  source 1..80: mol_type = other DNA

SEQ ID NO: 49038 - DNA, 80 bp, synthetic construct
  source 1..80: mol_type = other DNA
cgcaggtgtgtgccggagtcccctcggtggctgttatcacaaaaaagaaacactgaagcaataaagataatggaccacat

SEQ ID NO: 49039 - DNA, 80 bp, synthetic construct
  source 1..80: mol_type = other DNA
ggtggtggcaaggctcacctccccaggggctcccaggtggctctgctcatgacagcgtgagtgtggctgatgctctccct

SEQ ID NO: 49040 - DNA, 80 bp, synthetic construct
  source 1..80: mol_type = other DNA
tcgcccaagcactgggctatagattagagacagtggaatactcaggtggaaaaagagaaagggaaaaagaattgtaatat

SEQ ID NO: 49041 - DNA, 80 bp, synthetic construct; identical to SEQ ID NO: 16115
  source 1..80: mol_type = other DNA

SEQ ID NO: 49042 - DNA, 80 bp, synthetic construct
  source 1..80: mol_type = other DNA
gagcatctctgtgcatttgttacctattgactagagaacgcacacccacatggacccacgcacacacgctttgcacattc

SEQ ID NO: 49043 - DNA, 80 bp, synthetic construct
  source 1..80: mol_type = other DNA
agctccgctacccaggcacacttgtttgctcttctatgtgaggttttattggaacaaagagtttgtagtaagtcagtgcc

SEQ ID NO: 49044 - DNA, 80 bp, synthetic construct
  source 1..80: mol_type = other DNA
gcccgtgaacctttgcaaatagccccatgtacctggtgggtttccatggatactcagtgttgaactcagcatggaggctg

SEQ ID NO: 49045 - DNA, 80 bp, synthetic construct
  source 1..80: mol_type = other DNA
ccagtcctctggcaagttccatcaactggcttggaaatgccttcagaacctgctgcctcccatcttgggcaccctgggtt

SEQ ID NO: 49046 - DNA, 80 bp, synthetic construct; identical to SEQ ID NO: 16116
  source 1..80: mol_type = other DNA

SEQ ID NO: 49047 - DNA, 80 bp, synthetic construct
  source 1..80: mol_type = other DNA
atttccccctcagtaatgggagaagtgatagtacctatctcacagatgtgttgggaggattaaggagattatatgtgtaa

SEQ ID NO: 49048 - DNA, 80 bp, synthetic construct
  source 1..80: mol_type = other DNA
cgttcctttctcttaaaccagtttctttatcagtaatatgactgctgtctttaactggctaaatggtacagaggcactca

SEQ ID NO: 49049 - DNA, 80 bp, synthetic construct; identical to SEQ ID NO: 16117
  source 1..80: mol_type = other DNA

SEQ ID NO: 49050 - DNA, 80 bp, synthetic construct
  source 1..80: mol_type = other DNA
ctgtgtgccatatgctgtaatgttgctacattttctcaaatatggacggagggggtgtgcagtgaatggaagagcgtagg

SEQ ID NO: 49051 - DNA, 80 bp, synthetic construct
  source 1..80: mol_type = other DNA
gctaattcagtgagtactcaagacaaacagatgtgggaggtactattacaatcccatttacagacgagggaactgaggcc

SEQ ID NO: 49052 - DNA, 80 bp, synthetic construct
  source 1..80: mol_type = other DNA
atctgcagtgaacagtagccatcctcacgtgcagtctccaggagacttggaggcatatcctacaagtcagactctcacat

SEQ ID NO: 49053 - DNA, 80 bp, synthetic construct
  source 1..80: mol_type = other DNA
gactcatgcctttgacttgaaacctcctcttggctcaggttcacggactctgtgctctatcaggggctcatcctgcacat

SEQ ID NO: 49054 - DNA, 80 bp, synthetic construct; identical to SEQ ID NO: 16118
  source 1..80: mol_type = other DNA

SEQ ID NO: 49055 - DNA, 80 bp, synthetic construct
  source 1..80: mol_type = other DNA
aagaccagcctggccaacatggtgaaaccccatctctactaaaaatacaaaattagccgggcttggtggcgggcgcctgt

SEQ ID NO: 49056 - DNA, 80 bp, synthetic construct
  source 1..80: mol_type = other DNA
attaaattgagttttaacatacatacaatcagcaaactataagtgcatgactccatgagtttttaaaaatgtgtacaccc

SEQ ID NO: 49057 - DNA, 80 bp, synthetic construct; identical to SEQ ID NO: 16119
  source 1..80: mol_type = other DNA

SEQ ID NO: 49058 - DNA, 80 bp, synthetic construct
  source 1..80: mol_type = other DNA
tttgtagagatggggtcttactatgttgcccaagctggtctcaaactcctgggctcaagcaatcctcccacctcagcctt

SEQ ID NO: 49059 - DNA, 80 bp, synthetic construct
  source 1..80: mol_type = other DNA
acttgtgttgcttccaatgtttgccacttattgggactaaaatcatccttgcacgtatctttgggcaggcacatgctttc

SEQ ID NO: 49060 - DNA, 80 bp, synthetic construct
  source 1..80: mol_type = other DNA
cacttgatctggctcatctttttaagagtggccattttggtggatgtatactttagtctgtaattcttacaatcaaagat

SEQ ID NO: 49061 - DNA, 80 bp, synthetic construct; identical to SEQ ID NO: 16120
  source 1..80: mol_type = other DNA

SEQ ID NO: 49062 - DNA, 80 bp, synthetic construct
  source 1..80: mol_type = other DNA
aaatagattttgctcactttcttcccaatctctctgtttctggaatcctgggtaagatgtgatggatgggcatactttta

SEQ ID NO: 49063 - DNA, 80 bp, synthetic construct
  source 1..80: mol_type = other DNA
gacagtcattcattcaacccgcaggaaatatctccaggccttctatatggctggcaggtatctaggtcctaggatttcaa

SEQ ID NO: 49064 - DNA, 80 bp, synthetic construct
  source 1..80: mol_type = other DNA
tgcaaggcccttggggtgagaagaatgtggcattggagggactgctcgggatctagggacaagggtcaggcgagctcgtg

SEQ ID NO: 49065 - DNA, 80 bp, synthetic construct
  source 1..80: mol_type = other DNA
gggtgcagagtggaggcatgttcagttctctgaggccagggatgctgtttacctctggtcaagcatcaccaggctaaaga

SEQ ID NO: 49066 - DNA, 80 bp, synthetic construct; identical to SEQ ID NO: 16121
  source 1..80: mol_type = other DNA

SEQ ID NO: 49067 - DNA, 80 bp, synthetic construct
  source 1..80: mol_type = other DNA
ggttattaaggatctgagcttctttccaatgaagccaaattctttgatcattctcaatagggagagggctttctgggcct

SEQ ID NO: 49068 - DNA, 80 bp, synthetic construct
  source 1..80: mol_type = other DNA
actactactagagggattatgtttattgagtgctttctgtgtttcaggcactgaactagaatggatactatcatataata

SEQ ID NO: 49069 - DNA, 80 bp, synthetic construct
  source 1..80: mol_type = other DNA
aagctgagattcaaaaagcccattctttcccctgttcaatggagtcttcttgaatatgtcatcgtcaactccccaaatct

SEQ ID NO: 49070 - DNA, 80 bp, synthetic construct; identical to SEQ ID NO: 16122
  source 1..80: mol_type = other DNA

SEQ ID NO: 49071 - DNA, 80 bp, synthetic construct
  source 1..80: mol_type = other DNA
cattgttaagaaatcacgttcagagagatggggttaagcatcaagagagggtcaacccataattatagcagagaatgtga

SEQ ID NO: 49072 - DNA, 80 bp, synthetic construct
  source 1..80: mol_type = other DNA
cctgtccttggcactaattgattgtataaacatcagccatttcattgacacttctgggcatcattttcttaaacagctga

SEQ ID NO: 49073 - DNA, 80 bp, synthetic construct; identical to SEQ ID NO: 16123
  source 1..80: mol_type = other DNA

SEQ ID NO: 49074 - DNA, 80 bp, synthetic construct
  source 1..80: mol_type = other DNA
ccaccctccagctcctgacaaccgcctgtctactttctgtttctatgagtttggttactttaggtacctcatataagtgg

SEQ ID NO: 49075 - DNA, 80 bp, synthetic construct
  source 1..80: mol_type = other DNA
gtcaatggacacttgggatgctccacttcttggctattgtgaataatactgctatggacatgaatgtacaaatatctctt

SEQ ID NO: 49076 - DNA, 80 bp, synthetic construct
  source 1..80: mol_type = other DNA
tattttacattcccaccaacagttcacaaaggttccaattcctccacatccttgccaacacttgttaatttctgttggtc

SEQ ID NO: 49077 - DNA, 80 bp, synthetic construct
  source 1..80: mol_type = other DNA
ctggttttgttgttcttgagttgtagcaatggtttatataatctggagattaactctttatcaggtacaaaatctgcaaa

SEQ ID NO: 49078 - DNA, 80 bp, synthetic construct; identical to SEQ ID NO: 16124
  source 1..80: mol_type = other DNA

SEQ ID NO: 49079 - DNA, 80 bp, synthetic construct
  source 1..80: mol_type = other DNA
gaccatgcagttttagcttttccagaatgagctgtaaatgtaataatagggcacgtcaccttttgtgtttggcttccttc

SEQ ID NO: 49080 - DNA, 80 bp, synthetic construct
  source 1..80: mol_type = other DNA
tctgatgcagatgctatagacatttgggtacaggcctttgagtggatacatgttttcatttacgttgggttaaaaactca

SEQ ID NO: 49081 - DNA, 80 bp, synthetic construct
  source 1..80: mol_type = other DNA
tcagctttttttttttttgagatggagtttcactcttgttgcccaggctggagtgcagtggcgtgatctcggctcactgc

SEQ ID NO: 49082 - DNA, 80 bp, synthetic construct; identical to SEQ ID NO: 16125
  source 1..80: mol_type = other DNA

SEQ ID NO: 49083 - DNA, 80 bp, synthetic construct
  source 1..80: mol_type = other DNA
taaactctttttcctctgtatacattgtttcttctccttatgtcatcataccagtagtttctaggaaataccccagctcc

SEQ ID NO: 49084 - DNA, 80 bp, synthetic construct
  source 1..80: mol_type = other DNA
aaggcatattaaaaagaaaaccttctatatttggcagttctgagcccagagtctaaaatagccaggccaaacaattccat

SEQ ID NO: 49085 - DNA, 80 bp, synthetic construct; identical to SEQ ID NO: 16126
  source 1..80: mol_type = other DNA

SEQ ID NO: 49086 - DNA, 80 bp, synthetic construct
  source 1..80: mol_type = other DNA
tcctcttcactttgtgcagcacgtgttgtaagaacattcatttggcattaatacccactgccttgttttgaaaatgatct

SEQ ID NO: 49087 - DNA, 80 bp, synthetic construct
  source 1..80: mol_type = other DNA
tgactcaatgaatgaagtaccgcaaacatctgaattttaaataaggggcctagttccctacttcttctagcttctgtgtg

SEQ ID NO: 49088 - DNA, 80 bp, synthetic construct
  source 1..80: mol_type = other DNA
gtgtttgaaactgtgataacatgaaaagacaatctacaagaggaagggctgcctagtgtgtgaggtctaagggagtccga

SEQ ID NO: 49089 - DNA, 80 bp, synthetic construct
  source 1..80: mol_type = other DNA
tgttgtatggctgaaggtgaagcagggagggcaaggctgtaaaagaagatatgcaggaactttcagacagcagttactga

SEQ ID NO: 49090 - DNA, 80 bp, synthetic construct; identical to SEQ ID NO: 16127
  source 1..80: mol_type = other DNA

SEQ ID NO: 49091 - DNA, 80 bp, synthetic construct
  source 1..80: mol_type = other DNA
ttaataaatcagtcatctctataaaaataagactttaaagcagaggtatagttctagagagaatatctggcaagacaata

SEQ ID NO: 49092 - DNA, 80 bp, synthetic construct
  source 1..80: mol_type = other DNA
gagggaaaggcaagacaggactaagagttgcaaagtaaaatggaaataagaaataagcagagtttaatccaggcatggtg

SEQ ID NO: 49093 - DNA, 80 bp, synthetic construct
  source 1..80: mol_type = other DNA
agcagggtgaggcaggagaatcacttgaacccaggaggtggaggttgcagtgagacaagatcgagccactgcactccagc

SEQ ID NO: 49094 - DNA, 80 bp, synthetic construct; identical to SEQ ID NO: 16128
  source 1..80: mol_type = other DNA

SEQ ID NO: 49095 - DNA, 80 bp, synthetic construct
  source 1..80: mol_type = other DNA
aagaagaacaaattgttatcatttgatgaagacagtcaatgcctgcagtgacctcaagaaaataaagtgcaatccagtga

SEQ ID NO: 49096 - DNA, 80 bp, synthetic construct
  source 1..80: mol_type = other DNA
ggattacagatgttagccatcacgcgcgaatccagtgaattttatccaaccaagctctcatttctatatagaagcaatag

SEQ ID NO: 49097 - DNA, 80 bp, synthetic construct; identical to SEQ ID NO: 16129
  source 1..80: mol_type = other DNA

SEQ ID NO: 49098 - DNA, 80 bp, synthetic construct
  source 1..80: mol_type = other DNA
taaaagtaatgatagaatcaactaaatcaggtcatggagggatggtttgagggggaagtagaaatatactaattttatga

SEQ ID NO: 49099 - DNA, 80 bp, synthetic construct
  source 1..80: mol_type = other DNA
taaaaagccctggtgtgaataggtgatagaatatgaatagatgacagcattgatatgacagaactgacatggtagaatta

SEQ ID NO: 49100 - DNA, 80 bp, synthetic construct
  source 1..80: mol_type = other DNA
ctaattaaagttgaatttatgggaaaaggtgctaaataagataaggagggccctaaataatgataaagaaggaatccaca

SEQ ID NO: 49101 - DNA, 80 bp, synthetic construct; identical to SEQ ID NO: 16130
  source 1..80: mol_type = other DNA

SEQ ID NO: 49102 - DNA, 80 bp, synthetic construct
  source 1..80: mol_type = other DNA
acgtttgttttaaaaatttctaagagatgatataagcatttttatcatcaggatataggtcatggggggagggattggga

SEQ ID NO: 49103 - DNA, 80 bp, synthetic construct
  source 1..80: mol_type = other DNA
attattcctattttaatcatgttttcaaaacaaagctcaagattgtttctaggaatacaaaatcgagcatggaacaaagt

SEQ ID NO: 49104 - DNA, 80 bp, synthetic construct
  source 1..80: mol_type = other DNA
ggtagaattagtggacatgaacattagaacagttatgatacctatattctctatgtttaaggtcctagagtaaagattga

SEQ ID NO: 49105 - DNA, 80 bp, synthetic construct; identical to SEQ ID NO: 16131
  source 1..80: mol_type = other DNA

SEQ ID NO: 49106 - DNA, 80 bp, synthetic construct
  source 1..80: mol_type = other DNA
gaaaccttctttctacaaaatatacaaaaattagctgggtgtggtggtgcatgcatgtagtctcagctactatagaggct

SEQ ID NO: 49107 - DNA, 80 bp, synthetic construct
  source 1..80: mol_type = other DNA
aataggaacaaagataagaatgacagaaaatttctcattggaaatgatacaaacaagaaggtggtagaacatctttaaag

SEQ ID NO: 49108 - DNA, 80 bp, synthetic construct
  source 1..80: mol_type = other DNA
agactttttcaaacttacaaagtctgaaagaattaatcaccagcagacttatactacaggaaatattagtcttgaagatc

SEQ ID NO: 49109 - DNA, 80 bp, synthetic construct; identical to SEQ ID NO: 16132
  source 1..80: mol_type = other DNA

SEQ ID NO: 49110 - DNA, 80 bp, synthetic construct
  source 1..80: mol_type = other DNA
ctgcaagctctacctcccaggttcacaccattctcctgcctcagcctcccaagtagctgggactacaggcacctgccacc

SEQ ID NO: 49111 - DNA, 80 bp, synthetic construct
  source 1..80: mol_type = other DNA
ctaaaaaaccttttaatcatgtaaaaaccatttctaactcaaagctaaaaatgctgtctttggcctgtgggctgtagttt

SEQ ID NO: 49112 - DNA, 80 bp, synthetic construct
  source 1..80: mol_type = other DNA
gatcaaagagttaggttttctgtaaacctaaatcaaaaattaaaaaacaaaataattatagctattaagtcaacacagaa

SEQ ID NO: 49113 - DNA, 80 bp, synthetic construct
  source 1..80: mol_type = other DNA
gttaaaaggaagagattatcagattggacaaaaaagtgaaacacaaccccatgctgtctacaagaaactgactttaaata

SEQ ID NO: 49114 - DNA, 80 bp, synthetic construct; identical to SEQ ID NO: 16133
  source 1..80: mol_type = other DNA

SEQ ID NO: 49115 - DNA, 80 bp, synthetic construct
  source 1..80: mol_type = other DNA
ggaaaggagctctaagttagaatttcaatgattagtcttctctttctcaacaactacaaattcagcaccagattatcctc

SEQ ID NO: 49116 - DNA, 80 bp, synthetic construct
  source 1..80: mol_type = other DNA
agatccctcattctgattaggtctcctttcttccccatgtgcctcctctaagggtcacttgttggctattgaggtgatgg

SEQ ID NO: 49117 - DNA, 80 bp, synthetic construct
  source 1..80: mol_type = other DNA
caggagtgaggtaaaattgaagtttagagcagggagcatgtgttctttttatctttgtaaggcttgtagcaattcttcag

SEQ ID NO: 49118 - DNA, 80 bp, synthetic construct; identical to SEQ ID NO: 16134
  source 1..80: mol_type = other DNA

SEQ ID NO: 49119 - DNA, 80 bp, synthetic construct
  source 1..80: mol_type = other DNA
ggtgaacatttggaaaagtgaatcacagaattatcgtattttttgtcctttgtattttatcaggaacctcggagtgatgg

SEQ ID NO: 49120 - DNA, 80 bp, synthetic construct
  source 1..80: mol_type = other DNA
ggaactgagtgtgagtactcagtcgtatttgttgagtgaagggaatgatatctctcagtgagtttacagaaggcaaggat

SEQ ID NO: 49121 - DNA, 80 bp, synthetic construct
  source 1..80: mol_type = other DNA
atactataggacagaatctgagagaccttttgacagtctcctgataaatctgatcaccaattcttacacatttaacacac

SEQ ID NO: 49122 - DNA, 80 bp, synthetic construct; identical to SEQ ID NO: 16135
  source 1..80: mol_type = other DNA

SEQ ID NO: 49123 - DNA, 80 bp, synthetic construct
  source 1..80: mol_type = other DNA
actgtgctctatagctaattctatgtgtatatgtaccccaacaacaaatccccaaatacttaaacatcagttactatgga

SEQ ID NO: 49124 - DNA, 80 bp, synthetic construct
  source 1..80: mol_type = other DNA
ctttggctggctgtgattatttctgtaaatgacattggctgtgctctaatggctccatttgcaatctgtttcctttgaag

SEQ ID NO: 49125 - DNA, 80 bp, synthetic construct
  source 1..80: mol_type = other DNA
gcctaatatcactccacattctccatttcctctatcttaaaagtttaggagagctttacagatatttgtatgtcttttta

SEQ ID NO: 49126 - DNA, 80 bp, synthetic construct; identical to SEQ ID NO: 16136
  source 1..80: mol_type = other DNA

SEQ ID NO: 49127 - DNA, 80 bp, synthetic construct
  source 1..80: mol_type = other DNA
aggtttgctggagtttcatattctagtcttagagcaataaaaaaggaaaggaaggaacagtgcttgatgaggtgatctct

SEQ ID NO: 49128 - DNA, 80 bp, synthetic construct
  source 1..80: mol_type = other DNA
gactcagtaggccatgtgactttgggaatgtcattgaaccctatggagctttatttttcatttaatttccatgcctgcaa

SEQ ID NO: 49129 - DNA, 80 bp, synthetic construct
  source 1..80: mol_type = other DNA
tccaaactaagtgtgcagaagaagcacaaaaggaacatgctaaaatgctaaattccttggccttcttggtttttggttta

SEQ ID NO: 49130 - DNA, 80 bp, synthetic construct; identical to SEQ ID NO: 16137
  source 1..80: mol_type = other DNA

SEQ ID NO: 49131 - DNA, 80 bp, synthetic construct
  source 1..80: mol_type = other DNA
ccatgcctggctaatttattatttttagtacagacaggttttctccatgttggtcaggctggtctcgaactcctgacttc

SEQ ID NO: 49132 - DNA, 80 bp, synthetic construct
  source 1..80: mol_type = other DNA
cctgaaccccctgtgcatccttggttcttgacagtactcttcacacgttataataattgtttatttcattgtctgtcttc

SEQ ID NO: 49133 - DNA, 80 bp, synthetic construct
  source 1..80: mol_type = other DNA
catgtgcatttcaccgaatcctcccaaaacattgggaggcagcttctatggttatcagacccattccacagatgaaggag

SEQ ID NO: 49134 - DNA, 80 bp, synthetic construct; identical to SEQ ID NO: 16138
  source 1..80: mol_type = other DNA

SEQ ID NO: 49135 - DNA, 80 bp, synthetic construct
  source 1..80: mol_type = other DNA
tctttgctgtttgccatccttactttctctttgtcttgacacttattcatttctgtgtacaactttgcaacagttccatc

SEQ ID NO: 49136 - DNA, 80 bp, synthetic construct
  source 1..80: mol_type = other DNA
ggatgaagatggagttatcctctgcagaaattcctagacgccttcacttctctgtattcttcctcatacttgcctacccc

SEQ ID NO: 49137 - DNA, 80 bp, synthetic construct
  source 1..80: mol_type = other DNA
ctgttatgtgtcaggcactgtcttagttaatgaggattcaacagtaaattaaaaacaaaagaaaaaccaaaaaacctccg

SEQ ID NO: 49138 - DNA, 80 bp, synthetic construct; identical to SEQ ID NO: 16139
  source 1..80: mol_type = other DNA

SEQ ID NO: 49139 - DNA, 80 bp, synthetic construct
  source 1..80: mol_type = other DNA
cagaacaaaacccaagatggaggacagaatagagacttcataataaagacttgggaaactgctgaaaacaaatggtagtg

SEQ ID NO: 49140 - DNA, 80 bp, synthetic construct
  source 1..80: mol_type = other DNA
caacctattcagcaatttagtgactacaacatactaggcagctggtggcttcattctgccatatgtaatttgcaagatgg

SEQ ID NO: 49141 - DNA, 80 bp, synthetic construct
  source 1..80: mol_type = other DNA
ggtgcctatgttctagttctcatatttataaaatggggagggattttccaccttacatccaaggaggaaaaactaccaga

SEQ ID NO: 49142 - DNA, 80 bp, synthetic construct
  source 1..80: mol_type = other DNA
cacccttgaatagttaagttgctcacggccacagtcttgcttaaatattttcaaattgctggatgacatcctttttttaa

SEQ ID NO: 49143 - DNA, 80 bp, synthetic construct; identical to SEQ ID NO: 16140
  source 1..80: mol_type = other DNA

SEQ ID NO: 49144 - DNA, 80 bp, synthetic construct
  source 1..80: mol_type = other DNA
ttggtgggaggaaataaagcatgatacaacaaagttaaccaaaaggatcttttatgtaagagaattaaatagtagagaag

SEQ ID NO: 49145 - DNA, 80 bp, synthetic construct
  source 1..80: mol_type = other DNA
tggctggtcctaaagacaagaaaaatgcaaagttcaagaaggtcagggaaatgtttttgccaaagagcaaggactcttgg

SEQ ID NO: 49146 - DNA, 80 bp, synthetic construct
  source 1..80: mol_type = other DNA
gcaagcacgccaaggaaaaagcacatgagtttccaataaagtttacaagctgttcaattagttcaacaaaactgatgtga

SEQ ID NO: 49147 - DNA, 80 bp, synthetic construct; identical to SEQ ID NO: 16141
  source 1..80: mol_type = other DNA

SEQ ID NO: 49148 - DNA, 80 bp, synthetic construct
  source 1..80: mol_type = other DNA
ccttgggcagaaacagccacagaactgttcatcactttcaaagataaaaaaaattaaaatggtatcttaaaacgttttag

SEQ ID NO: 49149 - DNA, 80 bp, synthetic construct
  source 1..80: mol_type = other DNA
tactaaaaatacaaaaattagctgggtgtggtggtgggtgcctgtaatcccaactacttgggaggctgaggcaggagaat

SEQ ID NO: 49150 - DNA, 80 bp, synthetic construct
  source 1..80: mol_type = other DNA
tcctaccttagctgtcatactcctaacggtaattacagtcaactcttcaaatggtactttaaattccaggctagaactgt

SEQ ID NO: 49151 - DNA, 80 bp, synthetic construct; identical to SEQ ID NO: 16142
  source 1..80: mol_type = other DNA

SEQ ID NO: 49152 - DNA, 80 bp, synthetic construct
  source 1..80: mol_type = other DNA
cggggaagaggtgtggggtgggtggctgagcggggaagaggtgtggaggaggcaacagtgttcctggaccaaactgaggg

SEQ ID NO: 49153 - DNA, 80 bp, synthetic construct
  source 1..80: mol_type = other DNA
atgtctatgtaaaagtgtacattcttctaaagacgtaagtgattaacattttctaatctctaaagtctgagtcctgaaga

SEQ ID NO: 49154 - DNA, 80 bp, synthetic construct
  source 1..80: mol_type = other DNA
cagttaaacttgtttaatcctaaacgggtcctgttaagaattccttaaaaaaaaaaaattcctttgttatcttgtcatgc

SEQ ID NO: 49155 - DNA, 80 bp, synthetic construct; identical to SEQ ID NO: 16143
  source 1..80: mol_type = other DNA

SEQ ID NO: 49156 - DNA, 80 bp, synthetic construct
  source 1..80: mol_type = other DNA
gggtccaaaccaaaggctgctctctttgtatgagaaaaaacatgtttaagacgaatgagcctggggctgatacctctacc

SEQ ID NO: 49157 - DNA, 80 bp, synthetic construct
  source 1..80: mol_type = other DNA
tgtcttctgccagtgagagccactgtgtaaaggatgcagagacttgaattaatgatcagttaaaagaaaaccgtgcgctg

SEQ ID NO: 49158 - DNA, 80 bp, synthetic construct
  source 1..80: mol_type = other DNA
aaccattatctccccccaccaacttttattttgtcttgggtagagtccacataacggaaaactatggctcaagaaatttc

SEQ ID NO: 49159 - DNA, 80 bp, synthetic construct; identical to SEQ ID NO: 16144
  source 1..80: mol_type = other DNA

SEQ ID NO: 49160 - DNA, 80 bp, synthetic construct
  source 1..80: mol_type = other DNA
tcttgaatagagagtattaatacatgtttaccatggctcctgaatgagtgtatgatcccctttttctattgaagaaggat

SEQ ID NO: 49161 - DNA, 80 bp, synthetic construct
  source 1..80: mol_type = other DNA
ctgtgaatacatttctttatcaagttacaatttctgtttccttaaccttcagttgctggaatggaatggcccccacattc

SEQ ID NO: 49162 - DNA, 80 bp, synthetic construct
  source 1..80: mol_type = other DNA
tatcaggaaaaaagagtgggtggaatctgctaaccagtatcagactatcaatgccaggaaatttccatttcattgtgagc

SEQ ID NO: 49163 - DNA, 80 bp, synthetic construct; identical to SEQ ID NO: 16145
  source 1..80: mol_type = other DNA

SEQ ID NO: 49164 - DNA, 80 bp, synthetic construct
  source 1..80: mol_type = other DNA
tgaaaatctctatgcatgctctttccaagattctagaagacaatgaagtcacagaaagggaagcatttgttagtacatat

SEQ ID NO: 49165 - DNA, 80 bp, synthetic construct
  source 1..80: mol_type = other DNA
aaagcacaaagaaagcagacacagtagatgccatgtgcatctgcagaggggtgaagtttgaaattaactcccatttgttt

SEQ ID NO: 49166 - DNA, 80 bp, synthetic construct
  source 1..80: mol_type = other DNA
ccaagaccatgtatttatttatttattgattcatttattcatttatttatttatttttgagacagtctcactctgttacc

SEQ ID NO: 49167 - DNA, 80 bp, synthetic construct; identical to SEQ ID NO: 16146
  source 1..80: mol_type = other DNA

SEQ ID NO: 49168 - DNA, 80 bp, synthetic construct
  source 1..80: mol_type = other DNA
tctatgaaaaataccaaataaaaaactaaagggcgaatgaccaactccaagaaacaatttgaaaaaggctctgacggaaa

SEQ ID NO: 49169 - DNA, 80 bp, synthetic construct
  source 1..80: mol_type = other DNA
agtcacttcataatataaagaaaattagcaataaccatgaaaacatgttcaacctcactcctcaaagaaattcagataaa

SEQ ID NO: 49170 - DNA, 80 bp, synthetic construct
  source 1..80: mol_type = other DNA
gagcgctgtgtgtgtgtggcaaagaagacatgaaaaagccacactctggcattgtgttggtgaaattaatttgtaacaca

SEQ ID NO: 49171 - DNA, 80 bp, synthetic construct; identical to SEQ ID NO: 16147
  source 1..80: mol_type = other DNA

SEQ ID NO: 49172 - DNA, 80 bp, synthetic construct
  source 1..80: mol_type = other DNA
tttgtactgctgttaccaactcttgcctcttatggaatactttagagacaatcactccactagtcttagttagcagagct

SEQ ID NO: 49173 - DNA, 80 bp, synthetic construct
  source 1..80: mol_type = other DNA
ttaaaatgtgagctaagataacgctgtgtcagtgtctgaccttgggcggctcatttcccaattaggaaaactggagacag

SEQ ID NO: 49174 - DNA, 80 bp, synthetic construct
  source 1..80: mol_type = other DNA
tattgctcagagttctggaggttgggaagtccaagatcaaggtgccagcagatttgtttcttggtgagggctctcttctt

SEQ ID NO: 49175 - DNA, 80 bp, synthetic construct; identical to SEQ ID NO: 16148
  source 1..80: mol_type = other DNA

SEQ ID NO: 49176 - DNA, 80 bp, synthetic construct
  source 1..80: mol_type = other DNA
cagccttcaagacaagagtcagccaacatcatagttaggtcaaaaggttgatgctcagagtctaaatggtttttgtatat

SEQ ID NO: 49177 - DNA, 80 bp, synthetic construct
  source 1..80: mol_type = other DNA
ttacatgaaaaacactaccacagtcacacacacaaaaatctgtcaagttaattggaacctttttgtattgttggtggtgg

SEQ ID NO: 49178 - DNA, 80 bp, synthetic construct
  source 1..80: mol_type = other DNA
gagcattattcacaacagccaagagatgcaagcaacccaactgaccattgacagatgaatgcatgaacaaaatgtgatgt

SEQ ID NO: 49179 - DNA, 80 bp, synthetic construct; identical to SEQ ID NO: 16149
  source 1..80: mol_type = other DNA

SEQ ID NO: 49180 - DNA, 80 bp, synthetic construct
  source 1..80: mol_type = other DNA
atatatcaagctaaatgccccacagtgctgtggtgagttatttctgtgcatggcaagatagtctcaagtaacagataaag

SEQ ID NO: 49181 - DNA, 80 bp, synthetic construct
  source 1..80: mol_type = other DNA
agtgcattctttgtgtcagttgttgctctaggtgagtatgttcaattcaccatgataaccagaactgtaacttcttgctt

SEQ ID NO: 49182 - DNA, 80 bp, synthetic construct
  source 1..80: mol_type = other DNA
cttgtctccctgtagattttaatactgcttttctcttatgcattgagattggcagaggtttttctgtaagatctatagat

SEQ ID NO: 49183 - DNA, 80 bp, synthetic construct; identical to SEQ ID NO: 16150
  source 1..80: mol_type = other DNA

SEQ ID NO: 49184 - DNA, 80 bp, synthetic construct
  source 1..80: mol_type = other DNA
ttgatctcggctcactgtaagctctgcctcctgggttcaggccattctcctgcctcagcctcccgagtagctgggactac

SEQ ID NO: 49185 - DNA, 80 bp, synthetic construct
  source 1..80: mol_type = other DNA
gtcatcttgatttagactgatccccaaagggttcccagaaagtctggggttcacccaaagtttataggccaaggagtatt

SEQ ID NO: 49186 - DNA, 80 bp, synthetic construct
  source 1..80: mol_type = other DNA
caatactctagactgggcctgcaatacgtttagcatttcagggagtttacattattgtagttttaatcccagaatcaagt

SEQ ID NO: 49187 - DNA, 80 bp, synthetic construct
  source 1..80: mol_type = other DNA
tggctcactgcaacctctgcctcccaggttcatgccattctcctacctcagcctcctgagtagctgggactacaggcgcc

SEQ ID NO: 49188 - DNA, 80 bp, synthetic construct; identical to SEQ ID NO: 16151
  source 1..80: mol_type = other DNA

SEQ ID NO: 49189 - DNA, 80 bp, synthetic construct
  source 1..80: mol_type = other DNA
atcatctgctttgaatgaataaaaacataaagtccatttcatctgcttgctttccaatttttaagattacttattgagtc

SEQ ID NO: 49190 - DNA, 80 bp, synthetic construct
  source 1..80: mol_type = other DNA
gctcctttgctctcttagaataggaatttgcaggatatttccttggttactaacttgcctgattagtaattaaattttac

SEQ ID NO: 49191 - DNA, 80 bp, synthetic construct; identical to SEQ ID NO: 16152
  source 1..80: mol_type = other DNA

SEQ ID NO: 49192 - DNA, 80 bp, synthetic construct
  source 1..80: mol_type = other DNA
actgcatcaactaacgagcaaaataaccagctaacatcatcatgacgggatcaaatgcacacataacaatattaacctta

SEQ ID NO: 49193 - DNA, 80 bp, synthetic construct
  source 1..80: mol_type = other DNA
gaaaacaaaaaaaggcaggggttgcagtcctagtctcagataaaacagactttaatctaacaaagatcaaaagagacaaa

SEQ ID NO: 49194 - DNA, 80 bp, synthetic construct
  source 1..80: mol_type = other DNA
acaccccactgtcaacattagacagattaacaagacagaaagttaacaaggatatccaggaattgaactcagctctgcat

SEQ ID NO: 49195 - DNA, 80 bp, synthetic construct
  source 1..80: mol_type = other DNA
tctcagaccacagtgcaatcaaactagaactcaggattaagaaactcactcaaaaccgctcaactacatggaaactgaac

SEQ ID NO: 49196 - DNA, 80 bp, synthetic construct; identical to SEQ ID NO: 16153
  source 1..80: mol_type = other DNA

SEQ ID NO: 49197 - DNA, 80 bp, synthetic construct
  source 1..80: mol_type = other DNA
gaatcaaatagacacaataaaaaatgacaaaggggataccaccaccgatcccacagaaatacaaactatcatcagagaat

SEQ ID NO: 49198 - DNA, 80 bp, synthetic construct
  source 1..80: mol_type = other DNA
caaaaaaagtccaggaccagatggattcacagctgaattctaccagaggtagaaggaggagctggtaccattccttctga

SEQ ID NO: 49199 - DNA, 80 bp, synthetic construct; identical to SEQ ID NO: 16154
  source 1..80: mol_type = other DNA

SEQ ID NO: 49200 - DNA, 80 bp, synthetic construct
  source 1..80: mol_type = other DNA
caaaataataagagctatctatgagagacccacagccaatatcatactgaatgggcaaaaactggaagcattccctttga

SEQ ID NO: 49201 - DNA, 80 bp, synthetic construct
  source 1..80: mol_type = other DNA
tctagaaaaccccatcttctcagcccaaaatctccttaagctgataagcaacttcagcaaagtctcaggatacaaaatca

SEQ ID NO: 49202 - DNA, 80 bp, synthetic construct
  source 1..80: mol_type = other DNA
gctgcccaatgaaataaaagaggatacaaaccaatggaagaacattccgtgctcatgggtaggaagaatcaatatcatga

SEQ ID NO: 49203 - DNA, 80 bp, synthetic construct; identical to SEQ ID NO: 16155
  source 1..80: mol_type = other DNA

SEQ ID NO: 49204 - DNA, 80 bp, synthetic construct
  source 1..80: mol_type = other DNA
tggatcccttccttacaccttatacaaaaattaattcaagacggtttaaagacttacatgttagacctaaaaccataaaa

SEQ ID NO: 49205 - DNA, 80 bp, synthetic construct; identical to SEQ ID NO: 12567
  source 1..80: mol_type = other DNA

SEQ ID NO: 49206 - DNA, 80 bp, synthetic construct
  source 1..80: mol_type = other DNA
aatgagataccatctcacaccagttagaatggcaatcattaaaaagtcaggaaacaacaggtgctggagaggatgtggag

SEQ ID NO: 49207 - DNA, 80 bp, synthetic construct; identical to SEQ ID NO: 16156
  source 1..80: mol_type = other DNA

SEQ ID NO: 49208 - DNA, 80 bp, synthetic construct
  source 1..80: mol_type = other DNA
cactcataggtgggaactgaacaatgagaacacatggacacaggaaggggaacatcacacatcggggactgttgtggggt

SEQ ID NO: 49209 - DNA, 80 bp, synthetic construct
  source 1..80: mol_type = other DNA
aaaaagaaagacccagaattatgtataaatacaatgacacataagcttcaaagtgtatagcctgaaaaatggtgcttcag

SEQ ID NO: 49210 - DNA, 80 bp, synthetic construct
  source 1..80: mol_type = other DNA
aatgatatacaggaagactttcgcttctgacagcatggaatagagaattagaaaaaggaccgccaaatttactcaaagta

SEQ ID NO: 49211 - DNA, 80 bp, synthetic construct
  source 1..80: mol_type = other DNA
aaaatagaaaaggggcataattacagatctgggaggtatttattttttctttttaaatagccaagttcaagaggaaatat

SEQ ID NO: 49212 - DNA, 80 bp, synthetic construct; identical to SEQ ID NO: 16157
  source 1..80: mol_type = other DNA

SEQ ID NO: 49213 - DNA, 80 bp, synthetic construct
  source 1..80: mol_type = other DNA
ttaggtatatctcctaatgctatctctcccctctccccccaacccacaacagtccctgatgtgtgatgttccccttcctg

SEQ ID NO: 49214 - DNA, 80 bp, synthetic construct
  source 1..80: mol_type = other DNA
tgttagcatggaatgctaacacttgttttgatttctgtgttaatccaagtcctctgagaagcaaatgccaaagcagaatt

SEQ ID NO: 49215 - DNA, 80 bp, synthetic construct; identical to SEQ ID NO: 16158
  source 1..80: mol_type = other DNA

SEQ ID NO: 49216 - DNA, 80 bp, synthetic construct
  source 1..80: mol_type = other DNA
aaaattctaaacacatactagaaaaccacatccaacaataaataaaaatgataatgctatgaccaagtcaggtttgtcat

SEQ ID NO: 49217 - DNA, 80 bp, synthetic construct
  source 1..80: mol_type = other DNA
gatgaaatgttataattattccatttaaaattagggctaatggaacgatggtacactcaataaggcttcaacactgtgct

SEQ ID NO: 49218 - DNA, 80 bp, synthetic construct
  source 1..80: mol_type = other DNA
ccagcagcaacgacaagaaaaacatagtttcataaatatatcatttaaaacagtaacaacaaataaaagatagctaacaa

SEQ ID NO: 49219 - DNA, 80 bp, synthetic construct
  source 1..80: mol_type = other DNA
aaacaattccaataaaaatcccaactaggtttggagtttctaggggaatctgaaaaattaatatgtaagagcaaaggcct

SEQ ID NO: 49220 - DNA, 80 bp, synthetic construct; identical to SEQ ID NO: 16159
  source 1..80: mol_type = other DNA

SEQ ID NO: 49221 - DNA, 80 bp, synthetic construct
  source 1..80: mol_type = other DNA
tctgtgtagtaaaggatttcttaaacaagatattacccatgcaaatctaaaagataaatttagctgtgttaaactcaaga

SEQ ID NO: 49222 - DNA, 80 bp, synthetic construct
  source 1..80: mol_type = other DNA
gtggcgtgatcttggcttgctgcaacctccgcctcctgggttcaagaaattctccctgtctcacccgcccccccgagtag

SEQ ID NO: 49223 - DNA, 80 bp, synthetic construct
  source 1..80: mol_type = other DNA
gcactcagccagcaagcaatacatgatttgagatgccaggcactcatcctccacacaagaaaggataaaggccatgaaag

SEQ ID NO: 49224 - DNA, 80 bp, synthetic construct; identical to SEQ ID NO: 16160
  source 1..80: mol_type = other DNA

SEQ ID NO: 49225 - DNA, 80 bp, synthetic construct
  source 1..80: mol_type = other DNA
ctgtgaagctactttagcatggcaccacctcttgagttcattctactctgacagccagcagccactggacttttctagcc

SEQ ID NO: 49226 - DNA, 80 bp, synthetic construct
  source 1..80: mol_type = other DNA
agtccccccaaggcaaacttgcccttgagccagtcaaacttctatgtgccttcccccaagcaggaaaggtcctcaagcca

SEQ ID NO: 49227 - DNA, 80 bp, synthetic construct
  source 1..80: mol_type = other DNA
aggcagagaacccccaggccaattgagcagactggtacctgtgttctggtcttgagaaacatcctcatgggccatacctg

SEQ ID NO: 49228 - DNA, 80 bp, synthetic construct; identical to SEQ ID NO: 16161
  source 1..80: mol_type = other DNA

SEQ ID NO: 49229 - DNA, 80 bp, synthetic construct
  source 1..80: mol_type = other DNA
gaaccaaagccaatgcactccaccaaattgacatcccaagacccacccatatgagtaagtctttttctacaaagtgcact

SEQ ID NO: 49230 - DNA, 80 bp, synthetic construct
  source 1..80: mol_type = other DNA
acaagtgaacacagacaattctaaaaaactaggaaaaccattcattatttaaaagagaagttcaacaaagacacagaaat

SEQ ID NO: 49231 - DNA, 80 bp, synthetic construct
  source 1..80: mol_type = other DNA
ataaaaagtaaaaaggaatgaagaaaatccataggatttatgggacaccagtaggtaaacagatgttcaccttagagtgt

SEQ ID NO: 49232 - DNA, 80 bp, synthetic construct; identical to SEQ ID NO: 16162
  source 1..80: mol_type = other DNA

SEQ ID NO: 49233 - DNA, 80 bp, synthetic construct
  source 1..80: mol_type = other DNA
agctattcttcagaaatgaaggataaataatatctttcaaaacaaataaaaactaaagggattcttcaccactagactaa

SEQ ID NO: 49234 - DNA, 80 bp, synthetic construct
  source 1..80: mol_type = other DNA
accacaaaaataagcaaaaagggaagaaggaacaaaaggtgtacaaacaaccagaaaaaatttgataaaatgacaggaga

SEQ ID NO: 49235 - DNA, 80 bp, synthetic construct
  source 1..80: mol_type = other DNA
atctgtaaagacacacataaactgaaagtgaaggaattgaaaaagatatttcacacaaacagaaaccaaaaccaagcagt

SEQ ID NO: 49236 - DNA, 80 bp, synthetic construct; identical to SEQ ID NO: 16163
  source 1..80: mol_type = other DNA

SEQ ID NO: 49237 - DNA, 80 bp, synthetic construct
  source 1..80: mol_type = other DNA
aaattatatcaagtaccttatcagactacaatataataaaaccagaaatcaatacaaagaaaaacgttcaaaactgtata

SEQ ID NO: 49238 - DNA, 80 bp, synthetic construct
  source 1..80: mol_type = other DNA
atagcaataaatgcctacatttaaaaagtagaaagatttcaaataacctaaagatgcctctcaaggaataagaaaagcaa

SEQ ID NO: 49239 - DNA, 80 bp, synthetic construct; identical to SEQ ID NO: 16164
  source 1..80: mol_type = other DNA

SEQ ID NO: 49240 - DNA, 80 bp, synthetic construct
  source 1..80: mol_type = other DNA
ggcttcaccactgaattctgcccaatctttaaagaagaattaataccaattcttctcaaactattcttaaaaatggaaaa

SEQ ID NO: 49241 - DNA, 80 bp, synthetic construct
  source 1..80: mol_type = other DNA
acatcagaaagataatacaccatgaacaaatgggatttatcccaagaatgcaaggatggtttaacatacacaaatcaata

SEQ ID NO: 49242 - DNA, 80 bp, synthetic construct
  source 1..80: mol_type = other DNA
atgacaaacccatagcaaacaccatactgaatgggggaatgctgaaagcttttcctctaggaactggaacaaggcaagga

SEQ ID NO: 49243 - DNA, 80 bp, synthetic construct
  source 1..80: mol_type = other DNA
agtgtcccgagtagctgggattacaggggtgcaccaccacacctggctaatttttttttatttttagtagagacagggtt

SEQ ID NO: 49244 - DNA, 80 bp, synthetic construct; identical to SEQ ID NO: 16165
  source 1..80: mol_type = other DNA

SEQ ID NO: 49245 - DNA, 80 bp, synthetic construct
  source 1..80: mol_type = other DNA
caaaactcagtagtatttctctacactaattacaaactagctgaaaaagaaatcaagacagcaatctcatttactatagc

SEQ ID NO: 49246 - DNA, 80 bp, synthetic construct
  source 1..80: mol_type = other DNA
catatgacccaaagccacctaaagatccaataaaatccccaccaaattaccaatgaaattcttacagaaagaaaaaaaaa

SEQ ID NO: 49247 - DNA, 80 bp, synthetic construct; identical to SEQ ID NO: 16166
  source 1..80: mol_type = other DNA

SEQ ID NO: 49248 - DNA, 80 bp, synthetic construct
  source 1..80: mol_type = other DNA
caaaatgcttaaagacctaaatatgacacccaaaagtacaaaactactagaagaaaacataggggaaatatttcaggata

SEQ ID NO: 49249 - DNA, 80 bp, synthetic construct
  source 1..80: mol_type = other DNA
aaactattcacctgacagggcattatatccagaatataaaaggaacttaaataactcaacagcaaaaaatgctcaatctg

SEQ ID NO: 49250 - DNA, 80 bp, synthetic construct
  source 1..80: mol_type = other DNA
ttatcaaaaagacaaaaacaaaaaacaaaacaaacaaataaaaaacaaatactggtgaggatgtggagaaaagggaatgc

SEQ ID NO: 49251 - DNA, 80 bp, synthetic construct
  source 1..80: mol_type = other DNA
cgtgccaccatgcctggctaattttttgtatttttagtagagatggggtttcaccatgttagccaggatggtcttgatct

SEQ ID NO: 49252 - DNA, 80 bp, synthetic construct; identical to SEQ ID NO: 16167
  source 1..80: mol_type = other DNA

SEQ ID NO: 49253 - DNA, 80 bp, synthetic construct
  source 1..80: mol_type = other DNA
tggaactgggggacattatgttaagtgaaataagccaggaacagaaagttaaatactacaagttctcactcatctgtgca

SEQ ID NO: 49254 - DNA, 80 bp, synthetic construct
  source 1..80: mol_type = other DNA
aatataattaacaataatgcatagtttcaaatagctagaagtagggtattgaatgttcccaacacaaagaaatgatgaac

SEQ ID NO: 49255 - DNA, 80 bp, synthetic construct; identical to SEQ ID NO: 16168
  source 1..80: mol_type = other DNA

SEQ ID NO: 49256 - DNA, 80 bp, synthetic construct
  source 1..80: mol_type = other DNA
gatgtaaattgacaggacatttttgatgctgcagatgggagtgtaaattgatacactttaaaaaataattgagaattcta

SEQ ID NO: 49257 - DNA, 80 bp, synthetic construct
  source 1..80: mol_type = other DNA
gtaggagagtggacatataaattgtactaaaaagaatcacatgctggtttcacagtgaaacttcctgtggcagtgtaatg

SEQ ID NO: 49258 - DNA, 80 bp, synthetic construct
  source 1..80: mol_type = other DNA
atagacaattcaggatgtgttctatctgtttctcgtggtagaattccctcactagtgaccatgatgaatgcccttcagtg

SEQ ID NO: 49259 - DNA, 80 bp, synthetic construct; identical to SEQ ID NO: 16169
  source 1..80: mol_type = other DNA

SEQ ID NO: 49260 - DNA, 80 bp, synthetic construct
  source 1..80: mol_type = other DNA
aggggcattcagaagcttttggggatgatggatataaattcattatctcgattatggtgatgattttacaagtatgtaaa

SEQ ID NO: 49261 - DNA, 80 bp, synthetic construct
  source 1..80: mol_type = other DNA
aaaataaaaagcaaggacataatacagacaaaactggaacagtcttccctttggtgtggtgagggggctgggtaagggat

SEQ ID NO: 49262 - DNA, 80 bp, synthetic construct
  source 1..80: mol_type = other DNA
tgaaatcttacctccatttccattttaaccattttggatgaaactgtttccaagatgtcttatacgttttcttgcttttt

SEQ ID NO: 49263 - DNA, 80 bp, synthetic construct
  source 1..80: mol_type = other DNA
cacatggcaaaagtaagagcaagagagtgaggtggggaggtgccacacacttttaaatgaccagatctcatgagaactca

SEQ ID NO: 49264 - DNA, 80 bp, synthetic construct; identical to SEQ ID NO: 16170
  source 1..80: mol_type = other DNA

SEQ ID NO: 49265 - DNA, 80 bp, synthetic construct
  source 1..80: mol_type = other DNA
tctaatcacattattttgttttccttcctaggtctgtttctcatttatttgcttctctccacccaccccacctcctgttg

SEQ ID NO: 49266 - DNA, 80 bp, synthetic construct
  source 1..80: mol_type = other DNA
ctgctatctctgtagggaacatgctttctcctacctttcctgtctgcctggaaaatcttgttgatttctagaattgcagc

SEQ ID NO: 49267 - DNA, 80 bp, synthetic construct; identical to SEQ ID NO: 16171
  source 1..80: mol_type = other DNA

SEQ ID NO: 49268 - DNA, 80 bp, synthetic construct
  source 1..80: mol_type = other DNA
tggtgtctctaagcctgacataaaaatagttactggacatctgtttttttgggtaaatagcttatgatattcctggagat

SEQ ID NO: 49269 - DNA, 80 bp, synthetic construct
  source 1..80: mol_type = other DNA
attttaaacgtctgcagcaatattccagtgagaaatggtgttcacgggaaaccctcaggacagctaaatggcaatgtctg

SEQ ID NO: 49270 - DNA, 80 bp, synthetic construct
  source 1..80: mol_type = other DNA
atggctcggttagtttccaggatagtgtcctctactcccatgctgcactctgtggcagagtcctcagattctgggtggtg

SEQ ID NO: 49271 - DNA, 80 bp, synthetic construct; identical to SEQ ID NO: 16172
  source 1..80: mol_type = other DNA

SEQ ID NO: 49272 - DNA, 80 bp, synthetic construct
  source 1..80: mol_type = other DNA
agaattgttgtcaaagacatcagaatgtcaacttgagcccaagaccactttgtctgatgatgtgaagtggagtcaaactg

SEQ ID NO: 49273 - DNA, 80 bp, synthetic construct
  source 1..80: mol_type = other DNA
tcgtcagggtggagttttatatatgtggttctcttcaaagaggctcgtgtgagggaaataaaaacaattgtatgttttgt

SEQ ID NO: 49274 - DNA, 80 bp, synthetic construct
  source 1..80: mol_type = other DNA
agttacaggctgaccaagagtaggttggatttgttcccagatgtattttattttctcattaaacttggtattgaaattgc

SEQ ID NO: 49275 - DNA, 80 bp, synthetic construct
  source 1..80: mol_type = other DNA
gtgttatacaaatctgggatttgggattcagaatgtttcagaatgttttcagttctagctctactttaaagaaaccagaa

SEQ ID NO: 49276 - DNA, 80 bp, synthetic construct; identical to SEQ ID NO: 16173
  source 1..80: mol_type = other DNA

SEQ ID NO: 49277 - DNA, 80 bp, synthetic construct
  source 1..80: mol_type = other DNA
ccaggaatgttcatttttatttttctttccaaattgccccctggctacttgcctgcatacaaaaaaatgatgtttaattc

SEQ ID NO: 49278 - DNA, 80 bp, synthetic construct
  source 1..80: mol_type = other DNA
ttaaggtttgtgggccagagagtctctctggcaataactcagttctacagctgatttatttcaatctactgtagattgaa

SEQ ID NO: 49279 - DNA, 80 bp, synthetic construct
  source 1..80: mol_type = other DNA
cagcaagagttcttaactgggtgaggaatcaataaagtctgtgaacatttgtataagttttggttatgtatttttctggg

SEQ ID NO: 49280 - DNA, 80 bp, synthetic construct; identical to SEQ ID NO: 16174
  source 1..80: mol_type = other DNA

SEQ ID NO: 49281 - DNA, 80 bp, synthetic construct
  source 1..80: mol_type = other DNA
ttctatgttgttttagcacgtgtagatttatgtaaccactaccatcatcagccaccaatctgttttccatctaaaaaatg

SEQ ID NO: 49282 - DNA, 80 bp, synthetic construct
  source 1..80: mol_type = other DNA
attacaaataaagctgttgtgaagaattgtgtataggttttgtgtggacattggtttactgggataaacgctcaggagtg

SEQ ID NO: 49283 - DNA, 80 bp, synthetic construct; identical to SEQ ID NO: 16175
  source 1..80: mol_type = other DNA

SEQ ID NO: 49284 - DNA, 80 bp, synthetic construct
  source 1..80: mol_type = other DNA
ctgaggagtggatataccactatgtaagcattcctcatgtttatgaactttggttatttctaagtttgctgtcgtcaata

SEQ ID NO: 49285 - DNA, 80 bp, synthetic construct
  source 1..80: mol_type = other DNA
gccaaattgccttcttaaaggaatgtatcaatcaatactcctaccagcaattaggaaagtttacttacacacttgtccac

SEQ ID NO: 49286 - DNA, 80 bp, synthetic construct
  source 1..80: mol_type = other DNA
tttgggatctttttttcccttactttttcttattgatttttagtagctccttatttctattagacagaagtcctttggat

SEQ ID NO: 49287 - DNA, 80 bp, synthetic construct; identical to SEQ ID NO: 16176
  source 1..80: mol_type = other DNA

SEQ ID NO: 49288 - DNA, 80 bp, synthetic construct
  source 1..80: mol_type = other DNA
gctgggactacaggcgcctgccaccatgctcggctaattttttgtatttttagtagagatggggtttcaccatattggac

SEQ ID NO: 49289 - DNA, 80 bp, synthetic construct
  source 1..80: mol_type = other DNA
caaactactggaactggtggccaatggttcagctagcacattaaatctaaatcttgcattagggaactcatatcaataaa

SEQ ID NO: 49290 - DNA, 80 bp, synthetic construct
  source 1..80: mol_type = other DNA
ttaagctatatctttcctagactgcaatcttttgacttgtcttgagatgtacgtgggaatctactctagacatatctggg

SEQ ID NO: 49291 - DNA, 80 bp, synthetic construct; identical to SEQ ID NO: 16177
  source 1..80: mol_type = other DNA

SEQ ID NO: 49292 - DNA, 80 bp, synthetic construct
  source 1..80: mol_type = other DNA
ggcaagagagcttgtgcatgggaactcccatttataaaaccattagatttcatgagacttattcactaccatgagaacag

SEQ ID NO: 49293 - DNA, 80 bp, synthetic construct
  source 1..80: mol_type = other DNA
aaaaccaatcatgccttcccaatagtcccccaaagtcttaactcattgcagcattaactcaaaagtccacagtccaaagt

SEQ ID NO: 49294 - DNA, 80 bp, synthetic construct
  source 1..80: mol_type = other DNA
tacaggtcccatgcaagtccaaaatccaatggagcagtcaagtcttgaagctctgaaataatttcctttgactccatgtc

SEQ ID NO: 49295 - DNA, 80 bp, synthetic construct
  source 1..80: mol_type = other DNA
ctactattctggggtctggaagatgatggccctcttctcacagctccactaggcagtgccccagtgggtactctgtgtgg

SEQ ID NO: 49296 - DNA, 80 bp, synthetic construct; identical to SEQ ID NO: 16178
  source 1..80: mol_type = other DNA

SEQ ID NO: 49297 - DNA, 80 bp, synthetic construct
  source 1..80: mol_type = other DNA
agagacagtgtccccattgtcttggggagtaacatttggctcctagctacttatgcaaatttccacagtggcttggattt

SEQ ID NO: 49298 - DNA, 80 bp, synthetic construct
  source 1..80: mol_type = other DNA
tgaacgctttgctgcttagaaatttcttccacccgatgccctgaatcttctctctcaagctcaaagttccacaaatctct

SEQ ID NO: 49299 - DNA, 80 bp, synthetic construct
  source 1..80: mol_type = other DNA
caaactgtcccacatcttcctatcttcttctgagctctccaaactgttccaacctctgcctgttacctagttacaaagtc

SEQ ID NO: 49300 - DNA, 80 bp, synthetic construct; identical to SEQ ID NO: 16179
  source 1..80: mol_type = other DNA

SEQ ID NO: 49301 - DNA, 80 bp, synthetic construct
  source 1..80: mol_type = other DNA
catctattttctctaagggcagccactataaaacttcaaaagaactttggtctccacaatctttatccttttttttttta

SEQ ID NO: 49302 - DNA, 80 bp, synthetic construct
  source 1..80: mol_type = other DNA
ctggtgtgtgatgtttcctccctgtgttcaagtgttctcattgttcaattcccacctatgggtgagaacatgtggtattt

SEQ ID NO: 49303 - DNA, 80 bp, synthetic construct
  source 1..80: mol_type = other DNA
ttggttccaagtctttgctattgtgaatagtgctgcaataaacatacatgtgcatgtgtctttatagtaacaagatttat

SEQ ID NO: 49304 - DNA, 80 bp, synthetic construct; identical to SEQ ID NO: 16180
  source 1..80: mol_type = other DNA

SEQ ID NO: 49305 - DNA, 80 bp, synthetic construct
  source 1..80: mol_type = other DNA
agccctttgtcagatgggtagattgcaaaagttttctcccattctgtaggttgcctgttcactctgatggtagttttttt

SEQ ID NO: 49306 - DNA, 80 bp, synthetic construct
  source 1..80: mol_type = other DNA
ttaagtttttaatccatctggaattaatttttgtataaggtgtaaggaaggtatccagtttcagctttctacatatggct

SEQ ID NO: 49307 - DNA, 80 bp, synthetic construct
  source 1..80: mol_type = other DNA
atgctgttttggttactgtagccttgtagtatagtttgaagtcaggtagcgtgatgtctccagctttgttcttttggctt

SEQ ID NO: 49308 - DNA, 80 bp, synthetic construct; identical to SEQ ID NO: 16181
  source 1..80: mol_type = other DNA

SEQ ID NO: 49309 - DNA, 80 bp, synthetic construct
  source 1..80: mol_type = other DNA
tttgctgaagttgcttatcagcttaaggagattttgggctgagatgatggggttttctaaatatacaatcacgtcacctg

SEQ ID NO: 49310 - DNA, 80 bp, synthetic construct
  source 1..80: mol_type = other DNA
tttttgcccattcaatatgatattggctgtgggtttgtgataaatagctcttactattttgagatacgtcccatcaacac

SEQ ID NO: 49311 - DNA, 80 bp, synthetic construct; identical to SEQ ID NO: 16182
  source 1..80: mol_type = other DNA

SEQ ID NO: 49312 - DNA, 80 bp, synthetic construct; identical to SEQ ID NO: 12326
  source 1..80: mol_type = other DNA

SEQ ID NO: 49313 - DNA, 80 bp, synthetic construct
  source 1..80: mol_type = other DNA
gtatttctgtgggatcagtggtgatatcccctttatcattttttattgcatctatttgattcttctctcttttcttcttc

SEQ ID NO: 49314 - DNA, 80 bp, synthetic construct
  source 1..80: mol_type = other DNA
ctcttgcttctctagttcttttaattgtgacgttagggtctcaattttagatctttcctgctttcttttgtggcatttag

SEQ ID NO: 49315 - DNA, 80 bp, synthetic construct
  source 1..80: mol_type = other DNA
gttgtgtggttttgagtgagtttcttaatcctgagttttaatttgattgcattgtggtctgagagacagtttgttgtgat

SEQ ID NO: 49316 - DNA, 80 bp, synthetic construct; identical to SEQ ID NO: 16183
  source 1..80: mol_type = other DNA

SEQ ID NO: 49317 - DNA, 80 bp, synthetic construct
  source 1..80: mol_type = other DNA
tttgttggtttaaagcctgttttatcagagactaggattgcaactcgttttttttttgttttgttttccatttgcttggt

SEQ ID NO: 49318 - DNA, 80 bp, synthetic construct
  source 1..80: mol_type = other DNA
tgttatgtgtgaatttgatcctgtcattatgatgtttgctgattattttgcctgttaattgatgcagtttcttcctagga

SEQ ID NO: 49319 - DNA, 80 bp, synthetic construct
  source 1..80: mol_type = other DNA
tatgaagcttagtttgtctgcacatgaaattctgcgttgaaaattcttttctttaagaatgtttaatattggcccccact

SEQ ID NO: 49320 - DNA, 80 bp, synthetic construct; identical to SEQ ID NO: 16184
  source 1..80: mol_type = other DNA

SEQ ID NO: 49321 - DNA, 80 bp, synthetic construct
  source 1..80: mol_type = other DNA
ctttatttcattcatttgatcttcaatcactgaccctttcttccacttgatcaaatcagctactgaagcttttgcatgcg

SEQ ID NO: 49322 - DNA, 80 bp, synthetic construct
  source 1..80: mol_type = other DNA
gaccttctgaagcctacttctgtcaactcgttaaagtcattctccgtcctcctttgttccgctgctggtgaggagctgcg

SEQ ID NO: 49323 - DNA, 80 bp, synthetic construct
  source 1..80: mol_type = other DNA
ttgctttatgtttgttagtttttcttctaacagtcatgtccctcagctgcaggtctgttggagtttgctggaggtccact

SEQ ID NO: 49324 - DNA, 80 bp, synthetic construct; identical to SEQ ID NO: 16185
  source 1..80: mol_type = other DNA

SEQ ID NO: 49325 - DNA, 80 bp, synthetic construct
  source 1..80: mol_type = other DNA
gctttgtttacctactcaagcttcagcaatggcagatgctcctgccactgccaggctgctgccttgtaggttgatctcag

SEQ ID NO: 49326 - DNA, 80 bp, synthetic construct
  source 1..80: mol_type = other DNA
cttggctaggaaagggaaatcccctgacctcttgcgcttcccaggtgaggtgacaccccaccctgcttcagccctccatg

SEQ ID NO: 49327 - DNA, 80 bp, synthetic construct; identical to SEQ ID NO: 16186
  source 1..80: mol_type = other DNA

SEQ ID NO: 49328 - DNA, 80 bp, synthetic construct
  source 1..80: mol_type = other DNA
aggacctcctgagagctgtgtcacgagccatggtcactcatatttggctcagaataaatctctttaaatattttatagag

SEQ ID NO: 49329 - DNA, 80 bp, synthetic construct
  source 1..80: mol_type = other DNA
aggagcaaaagcacgtattacatgacagaaagcaagaggagtcctggcatgtaaaggggaattccctattatgaaaccat

SEQ ID NO: 49330 - DNA, 80 bp, synthetic construct
  source 1..80: mol_type = other DNA
tccattccagttctgagattccctccttcctacccattttgtaacttttgtttaagagacctgatgagggtatgaattca

SEQ ID NO: 49331 - DNA, 80 bp, synthetic construct; identical to SEQ ID NO: 16187
  source 1..80: mol_type = other DNA

SEQ ID NO: 49332 - DNA, 80 bp, synthetic construct
  source 1..80: mol_type = other DNA
aaaagaagagaaaccaatgcgtgacgtatttgaatacattgaggggagagctattattctgtcagatagtttggaggaaa

SEQ ID NO: 49333 - DNA, 80 bp, synthetic construct
  source 1..80: mol_type = other DNA
caaagtttaaagggaacagaaaagctgtgtgttgggatgaagggagagatgaagagagttacatttttatctgttatatt

SEQ ID NO: 49334 - DNA, 80 bp, synthetic construct
  source 1..80: mol_type = other DNA
tctcagggggaaaattcacctaaaatagttgaaaattttctctgagaaattagtagaggtgaaatagggcaaggaaattt

SEQ ID NO: 49335 - DNA, 80 bp, synthetic construct; identical to SEQ ID NO: 16188
  source 1..80: mol_type = other DNA

SEQ ID NO: 49336 - DNA, 80 bp, synthetic construct
  source 1..80: mol_type = other DNA
atttctttaagaaaatagatgctcctctcccaactttactgtttttcacacttttttctattttgtttgcctagcccaca

SEQ ID NO: 49337 - DNA, 80 bp, synthetic construct
  source 1..80: mol_type = other DNA
ataaagtgagctggaagaatttggcaggatctggtcccatgggtatttttccacagtgtacaatagactccactggctgt

SEQ ID NO: 49338 - DNA, 80 bp, synthetic construct
  source 1..80: mol_type = other DNA
ggtctctcttcttagttcaatggaatgtctagtttctgaacttggaggtaaatcatcttttctttattttttcttggtct

SEQ ID NO: 49339 - DNA, 80 bp, synthetic construct; identical to SEQ ID NO: 16189
  source 1..80: mol_type = other DNA

SEQ ID NO: 49340 - DNA, 80 bp, synthetic construct
  source 1..80: mol_type = other DNA
cagcttgataaatgaagactgcaattaaaacatttgttcaaattgcaagttttctcaatcatcttgtcttcgtgaatgcc

SEQ ID NO: 49341 - DNA, 80 bp, synthetic construct
  source 1..80: mol_type = other DNA
tagtattgtctcgttttctggaccaatccaatctgagacgagggatggcagaagcttacccaaatcaccctatggttttg

SEQ ID NO: 49342 - DNA, 80 bp, synthetic construct
  source 1..80: mol_type = other DNA
gcaacagtagcagcaatagtagcaacagcagcaacaacagtaattacagcagcaactgcaatagcaacagtagaagcatc

SEQ ID NO: 49343 - DNA, 80 bp, synthetic construct; identical to SEQ ID NO: 16190
  source 1..80: mol_type = other DNA

SEQ ID NO: 49344 - DNA, 80 bp, synthetic construct
  source 1..80: mol_type = other DNA
aacaccatcacaattaagagcaacaacagcagcaacaatagccacagaaatagcaaaatcagcagtagcaacaacagaag

SEQ ID NO: 49345 - DNA, 80 bp, synthetic construct
  source 1..80: mol_type = other DNA
cagtagcagcagcaatagcaacagtaatagtagcagcaacagcaatagcaacagtagcagcatcagcaacaataacagca

SEQ ID NO: 49346 - DNA, 80 bp, synthetic construct
  source 1..80: mol_type = other DNA
taagtacaatagcaataacaacagtaatagcaacagcaaaaacaatagcagcagtaacaataacaacagcaatagcagca

SEQ ID NO: 49347 - DNA, 80 bp, synthetic construct; identical to SEQ ID NO: 16191
  source 1..80: mol_type = other DNA

SEQ ID NO: 49348 - DNA, 80 bp, synthetic construct
  source 1..80: mol_type = other DNA
agttttaccataaagtgaatcatacatttttgttggtttcccagttcatataaaagttacggttacactatactgtagtc

SEQ ID NO: 49349 - DNA, 80 bp, synthetic construct
  source 1..80: mol_type = other DNA
tgctgaaggttgaagtggctgttgaaacttcttaaaacaagaatatgaagttttcaatgttgattgactcttctcttcat

SEQ ID NO: 49350 - DNA, 80 bp, synthetic construct
  source 1..80: mol_type = other DNA
aggatctccaccaggagtagattccatctcaagaaaccactttctaagctcatctgtaagaagcaactcctcatctgttc

SEQ ID NO: 49351 - DNA, 80 bp, synthetic construct; identical to SEQ ID NO: 16192
  source 1..80: mol_type = other DNA

SEQ ID NO: 49352 - DNA, 80 bp, synthetic construct
  source 1..80: mol_type = other DNA
tgggtgaccaggtgtatgtattgtcaatgagcagtaatcttttgaaagcaatcttcttttctaagcagtaggtctaaacg

SEQ ID NO: 49353 - DNA, 80 bp, synthetic construct
  source 1..80: mol_type = other DNA
ccagctgcattcacccttcacaagagagtcaacctgtccttcgagctttgaaaccagacattgattttttcctcgctctt

SEQ ID NO: 49354 - DNA, 80 bp, synthetic construct
  source 1..80: mol_type = other DNA
aagttatggagatggcttctttccttaagccttatgaaccaaacttactaacttcgaatttttcttctgctacttcttca

SEQ ID NO: 49355 - DNA, 80 bp, synthetic construct; identical to SEQ ID NO: 16193
  source 1..80: mol_type = other DNA

SEQ ID NO: 49356 - DNA, 80 bp, synthetic construct
  source 1..80: mol_type = other DNA
aggagagggagagagatgggggaatgctcagtgtgtggaacagttagatcacacgcatttatcaattaagtttgctgttt

SEQ ID NO: 49357 - DNA, 80 bp, synthetic construct
  source 1..80: mol_type = other DNA
ttggaaaaatgctgcaaataaacttgcttaatgtagggttgctgtataccttcaatctgttaaaaaacacaatatctgca

SEQ ID NO: 49358 - DNA, 80 bp, synthetic construct
  source 1..80: mol_type = other DNA
ttatatttgtaactaggacaggtttagtgcccttaggaaccataacaatttaatcaggaaccaatcgacacttaattagt

SEQ ID NO: 49359 - DNA, 80 bp, synthetic construct
  source 1..80: mol_type = other DNA
attactgcctgcctggcactggcgctggctagagaaagaaacttcaattaggcatgctgtagaaggaacttcagcattta

SEQ ID NO: 49360 - DNA, 80 bp, synthetic construct; identical to SEQ ID NO: 16194
  source 1..80: mol_type = other DNA

SEQ ID NO: 49361 - DNA, 80 bp, synthetic construct
  source 1..80: mol_type = other DNA
gccaagcgatcattcagctcctacaaattgccaacaagaggaaatatcttctcagtgttaccaaatcttctgctttttaa

SEQ ID NO: 49362 - DNA, 80 bp, synthetic construct
  source 1..80: mol_type = other DNA
ggaaaagcctcagaccactgtgatttaccagcattttgcccaagtactgaaaatgttaaacatgaaggtttggtaaaatg

SEQ ID NO: 49363 - DNA, 80 bp, synthetic construct
  source 1..80: mol_type = other DNA
tatggtccaaaattcaaaattacaaaaaggtaagcattgaagtctcccttctacctgtatctcacagtcactcaattcca

SEQ ID NO: 49364 - DNA, 80 bp, synthetic construct
  source 1..80: mol_type = other DNA
aaatgatagaatatatacatttctatgttttgctttttcccccattagcaatatatcttggagaactttccttgtcagcg

SEQ ID NO: 49365 - DNA, 80 bp, synthetic construct; identical to SEQ ID NO: 16195
  source 1..80: mol_type = other DNA

SEQ ID NO: 49366 - DNA, 80 bp, synthetic construct
  source 1..80: mol_type = other DNA
gggattacaggcgcataccaccacacccagataatttttttgtacttttttagtagagacggggtttcaccatgttaccc

SEQ ID NO: 49367 - DNA, 80 bp, synthetic construct; identical to SEQ ID NO: 16196
  source 1..80: mol_type = other DNA

SEQ ID NO: 49368 - DNA, 80 bp, synthetic construct
  source 1..80: mol_type = other DNA
ttctattaggtggtcgcttttatggaattgttaggaaaattagcccaatgtagagtagtaaatattttcttcaagtttat

SEQ ID NO: 49369 - DNA, 80 bp, synthetic construct
  source 1..80: mol_type = other DNA
tgtaattttactaatttttttgatgctttcaagtctttgatttagtttgaatttatctcagtgtatggtgtgaagtataa

SEQ ID NO: 49370 - DNA, 80 bp, synthetic construct
  source 1..80: mol_type = other DNA
ctccagcaaccaagccaagcacgcctgaaagccaaacagatgaatatcacattaagaactgaaaaactcaaggtctataa

SEQ ID NO: 49371 - DNA, 80 bp, synthetic construct; identical to SEQ ID NO: 16197
  source 1..80: mol_type = other DNA

SEQ ID NO: 49372 - DNA, 80 bp, synthetic construct
  source 1..80: mol_type = other DNA
ctattactatgtaagagcactaaaaagtatagccaggattttagttaaaattcaggtgttcattaaattcccgttattcc

SEQ ID NO: 49373 - DNA, 80 bp, synthetic construct
  source 1..80: mol_type = other DNA
agaatacagaaaataggatgtgggttctttactagttttgaggtctcaaaacactgcatgccagtctctatttttacacc

SEQ ID NO: 49374 - DNA, 80 bp, synthetic construct
  source 1..80: mol_type = other DNA
atactggtctcaaggccttgggaagttctgtaatctttctgatgctccagacattcctatataaattgggataacatact

SEQ ID NO: 49375 - DNA, 80 bp, synthetic construct
  source 1..80: mol_type = other DNA
agtgaaagagatctaacttaatcgacttcatcttgcttctaacctccaagctgtccttgtcattcttgggtataggctga

SEQ ID NO: 49376 - DNA, 80 bp, synthetic construct; identical to SEQ ID NO: 16198
  source 1..80: mol_type = other DNA

SEQ ID NO: 49377 - DNA, 80 bp, synthetic construct
  source 1..80: mol_type = other DNA
tccccaaatgctcaggagactgatttgagtaataataaaactccagtctcccacacagccggctctgtgtgaattactca

SEQ ID NO: 49378 - DNA, 80 bp, synthetic construct
  source 1..80: mol_type = other DNA
ccattatttgtgtacctcacttccgatttgtgtacgtgattttctttttctgtccataaatcttctttcaccctgtggtt

SEQ ID NO: 49379 - DNA, 80 bp, synthetic construct; identical to SEQ ID NO: 16199
  source 1..80: mol_type = other DNA

SEQ ID NO: 49380 - DNA, 80 bp, synthetic construct
  source 1..80: mol_type = other DNA
aaaaaattaaaatattttaccccaaaatatatttctttgccctattttgaaatggcctggcaaagccatcttttgtggag

SEQ ID NO: 49381 - DNA, 80 bp, synthetic construct
  source 1..80: mol_type = other DNA
atttgccattgattttctcaaagggtaccacctatgagacttcatctacataataagagccttggtttccataaccactt

SEQ ID NO: 49382 - DNA, 80 bp, synthetic construct
  source 1..80: mol_type = other DNA
gtgttgtcttgcttttctggaccaaactaatggatacctcgcatgtattgatggatggcttttgtctgcttaatacgtat

SEQ ID NO: 49383 - DNA, 80 bp, synthetic construct; identical to SEQ ID NO: 16200
  source 1..80: mol_type = other DNA

SEQ ID NO: 49384 - DNA, 80 bp, synthetic construct
  source 1..80: mol_type = other DNA
ctacactcccaccagtactgtgacagtttacaaatgccatggcaacatcaggaagttaccctatatggtcaaaaaacagg

SEQ ID NO: 49385 - DNA, 80 bp, synthetic construct
  source 1..80: mol_type = other DNA
ggggtctggatcggacacctttccaataacatctttctggtgaaccctgaagggaggatactgaggagacctcccctccg

SEQ ID NO: 49386 - DNA, 80 bp, synthetic construct
  source 1..80: mol_type = other DNA
gacacttgactgaacttgggtttgaggactaacttagaaaggctagagtctttcctaagactgaggggattagaggtccc

SEQ ID NO: 49387 - DNA, 80 bp, synthetic construct
  source 1..80: mol_type = other DNA
atacaggatcatagaaacatggatagtaattgtcaggcctctgagcccaagctaagccatcatatcccctgtggcctgca

SEQ ID NO: 49388 - DNA, 80 bp, synthetic construct; identical to SEQ ID NO: 16201
  source 1..80: mol_type = other DNA

SEQ ID NO: 49389 - DNA, 80 bp, synthetic construct
  source 1..80: mol_type = other DNA
ctgtcctcctgctctttgctctgtgagaaagatccacctatgacctctggtcctcagactaaccagcccaaggaacatct

SEQ ID NO: 49390 - DNA, 80 bp, synthetic construct
  source 1..80: mol_type = other DNA
gcattttatctgtggacctgaagctccagcaccagtcacggacttgggtttaatcatgtggggatgcctgcctgattatt

SEQ ID NO: 49391 - DNA, 80 bp, synthetic construct
  source 1..80: mol_type = other DNA
ccccttctccactttcctggggggcaagcacctcccaccccttttacacttttctggggggcaagcaccccccactcctt

SEQ ID NO: 49392 - DNA, 80 bp, synthetic construct; identical to SEQ ID NO: 16202
  source 1..80: mol_type = other DNA

SEQ ID NO: 49393 - DNA, 80 bp, synthetic construct
  source 1..80: mol_type = other DNA
accctaatcatcactgggtctttccaatcttccttttctacagactcatctgacctgtcccctcctcaccaggctgctcc

SEQ ID NO: 49394 - DNA, 80 bp, synthetic construct
  source 1..80: mol_type = other DNA
ggagctaaaggcgtagtcaaggttaatgttcctttttctttatctgacctctcccaaatcagttagcatttaggctcttt

SEQ ID NO: 49395 - DNA, 80 bp, synthetic construct
  source 1..80: mol_type = other DNA
taaattccagccctcaaaccccacaacaggacttaattaaccttgccttcaaggtgtacaataatagagtagaggcagcc

SEQ ID NO: 49396 - DNA, 80 bp, synthetic construct; identical to SEQ ID NO: 16203
  source 1..80: mol_type = other DNA

SEQ ID NO: 49397 - DNA, 80 bp, synthetic construct
  source 1..80: mol_type = other DNA
tgggtaactcttatggtggagggtaagtccgtccccttcttaatcaatacggaggctacccactccacattaccttcttt

SEQ ID NO: 49398 - DNA, 80 bp, synthetic construct
  source 1..80: mol_type = other DNA
agatattttaaccaaattatctgcttccctgactattcctggactacagccacatctcattgccgtccttcttcccaacc

SEQ ID NO: 49399 - DNA, 80 bp, synthetic construct; identical to SEQ ID NO: 16204
  source 1..80: mol_type = other DNA

SEQ ID NO: 49400 - DNA, 80 bp, synthetic construct
  source 1..80: mol_type = other DNA
taaacctagctgaccccataaatcctaaatcctttccccactcccctttccattccttaaaaaacagccctaaaagctgc

SEQ ID NO: 49401 - DNA, 80 bp, synthetic construct
  source 1..80: mol_type = other DNA
tgtgtgtggtggctaccactgtgttaatgcttttagaggccctcaaaatcccaaactatgctcagctcactctctacagt

SEQ ID NO: 49402 - DNA, 80 bp, synthetic construct
  source 1..80: mol_type = other DNA
tctctgatccacctgacattcaccccatttccccatatttccttctttcctgttcctcaccctgatcacacttggtttat

SEQ ID NO: 49403 - DNA, 80 bp, synthetic construct; identical to SEQ ID NO: 16205
  source 1..80: mol_type = other DNA

SEQ ID NO: 49404 - DNA, 80 bp, synthetic construct
  source 1..80: mol_type = other DNA
aagcagccatcaaaaggcatcagatcccatcactcaggacaatgcttatgctgataaggtagctaaaaaagcagctagca

SEQ ID NO: 49405 - DNA, 80 bp, synthetic construct
  source 1..80: mol_type = other DNA
atcatttcgtagtctcttccatgtaggttacaagccactagcccatctcttagaacctctcatttcctttccatcgtgga

SEQ ID NO: 49406 - DNA, 80 bp, synthetic construct
  source 1..80: mol_type = other DNA
ctaaaatacctcttggtctgggtagacactttcactggatgggtagaggccttttccacagggtctgagaaggccaccat

SEQ ID NO: 49407 - DNA, 80 bp, synthetic construct; identical to SEQ ID NO: 16206
  source 1..80: mol_type = other DNA

SEQ ID NO: 49408 - DNA, 80 bp, synthetic construct
  source 1..80: mol_type = other DNA
tctcaattcatacaaaaatgcatccaggccatcaccaatcattctatatgacaaatgcgccttctaacaaccttaccgca

SEQ ID NO: 49409 - DNA, 80 bp, synthetic construct
  source 1..80: mol_type = other DNA
tcttattaatataaggagacaggaatgtcaggcctctgagcccaagctaagccatcatatcccctgtgacctgcacgtat

SEQ ID NO: 49410 - DNA, 80 bp, synthetic construct
  source 1..80: mol_type = other DNA
cgagaactacccactttgactgtaattttcctttacctacccacatcctataaaacggccccaccctatctcctttcact

SEQ ID NO: 49411 - DNA, 80 bp, synthetic construct
  source 1..80: mol_type = other DNA
cttcgctaccgacaagtggtcacctgaacagtgttactgtaatgggtgggtctttctctggcctccctgagcacctctcc

SEQ ID NO: 49412 - DNA, 80 bp, synthetic construct; identical to SEQ ID NO: 16207
  source 1..80: mol_type = other DNA

SEQ ID NO: 49413 - DNA, 80 bp, synthetic construct
  source 1..80: mol_type = other DNA
cttagggaatgaatcctttctggtttaaaatctgtataacctttaccactggttaattctcttcctctccacaaaccatc

SEQ ID NO: 49414 - DNA, 80 bp, synthetic construct
  source 1..80: mol_type = other DNA
agcctggaactccttgggaaaaacagaggagacatcacagacctccttttggtaaaacctctgttttcctcataaagccc

SEQ ID NO: 49415 - DNA, 80 bp, synthetic construct
  source 1..80: mol_type = other DNA
tgatgtgtgactaggtaggaaatatagtttcagggatagctaatggcagttatggggagatcctcagctctttgcaagtt

SEQ ID NO: 49416 - DNA, 80 bp, synthetic construct; identical to SEQ ID NO: 16208
  source 1..80: mol_type = other DNA

SEQ ID NO: 49417 - DNA, 80 bp, synthetic construct
  source 1..80: mol_type = other DNA
taggataaaagcacaataggtttttcttacagcactgatctgctctttaataaaaagtttgtaaagagttataaaaggtt

SEQ ID NO: 49418 - DNA, 80 bp, synthetic construct
  source 1..80: mol_type = other DNA
tgggctctatttgtataaatacattaatggtatgtgttccaaaattatatgaaactcctataattctgataggacttagt

SEQ ID NO: 49419 - DNA, 80 bp, synthetic construct
  source 1..80: mol_type = other DNA
tataatcaactataggactttaacaggtattcttgaatgcaggtttctgataactttggagattgtgacattagaataga

SEQ ID NO: 49420 - DNA, 80 bp, synthetic construct; identical to SEQ ID NO: 16209
  source 1..80: mol_type = other DNA

SEQ ID NO: 49421 - DNA, 80 bp, synthetic construct
  source 1..80: mol_type = other DNA
ggaatgttgtgctttcctttaagaaatcaaacttaactggtagagccaataaaagtcccctgggaaaactgacatcatac

SEQ ID NO: 49422 - DNA, 80 bp, synthetic construct
  source 1..80: mol_type = other DNA
ctttgaaaaaaaaagtcttatctgagattccttttatggaacaaagttttgtcaaagccaatttaaaaagcctatgtgaa

SEQ ID NO: 49423 - DNA, 80 bp, synthetic construct; identical to SEQ ID NO: 16210
  source 1..80: mol_type = other DNA

SEQ ID NO: 49424 - DNA, 80 bp, synthetic construct
  source 1..80: mol_type = other DNA
ctgttgtggaacatattgccgttttactctttgtgtaggaatacacaaagggttgtgcaggataagcttaccaaatgttt

SEQ ID NO: 49425 - DNA, 80 bp, synthetic construct
  source 1..80: mol_type = other DNA
gaatgaaaaagttacagaagatggatctttgtctctctgcaaccattaagattaagagttctcttacaaaagggaatggg

SEQ ID NO: 49426 - DNA, 80 bp, synthetic construct
  source 1..80: mol_type = other DNA
tgatcaaacaggctgcaataaagaagctggctacaacccaccaaaaccaagatggcaatgagagtgacctctggttgtcc

SEQ ID NO: 49427 - DNA, 80 bp, synthetic construct
  source 1..80: mol_type = other DNA
tcagggctgccctgcctatggagcagccattctttatttgtttactttcttaataaacttgctttcacatcactctgtga

SEQ ID NO: 49428 - DNA, 80 bp, synthetic construct; identical to SEQ ID NO: 16211
  source 1..80: mol_type = other DNA

SEQ ID NO: 49429 - DNA, 80 bp, synthetic construct
  source 1..80: mol_type = other DNA
cagccaggattttccagtgtgttgactttcagtcttctttgattatcgttttatggctatttcaagaccacaattagcac

SEQ ID NO: 49430 - DNA, 80 bp, synthetic construct
  source 1..80: mol_type = other DNA
atgtagttataatcctttatctttcctgcaggaaggtgtcaggcaggaacaagggtcaataaagtactatttgttaaata

SEQ ID NO: 49431 - DNA, 80 bp, synthetic construct
  source 1..80: mol_type = other DNA
gtcacaaagaccttggtgataaaacaggaagtggtaaagaagctggcccaaacccaccaaaaccaagatggcgatggaag

SEQ ID NO: 49432 - DNA, 80 bp, synthetic construct; identical to SEQ ID NO: 16212
  source 1..80: mol_type = other DNA

SEQ ID NO: 49433 - DNA, 80 bp, synthetic construct
  source 1..80: mol_type = other DNA
aggacctctttccagtaacgaagtaaccatctgctatccagaaatgtcctgctgacccattagtcacccactgtccacct

SEQ ID NO: 49434 - DNA, 80 bp, synthetic construct
  source 1..80: mol_type = other DNA
agtagcaccagctactctgtggccaagttatctcaggataaagagcttgtgctctgtcaactttggccatcttattgcta

SEQ ID NO: 49435 - DNA, 80 bp, synthetic construct; identical to SEQ ID NO: 16213
  source 1..80: mol_type = other DNA

SEQ ID NO: 49436 - DNA, 80 bp, synthetic construct
  source 1..80: mol_type = other DNA
gtcagtcgaggtttattaagtcagctttagggcatgtccctgaaaagcaatgagccacagacacatctgtggctgttttt

SEQ ID NO: 49437 - DNA, 80 bp, synthetic construct
  source 1..80: mol_type = other DNA
taaagagaaaatgggagtaaagaaaagaatcaattatgcaggcctctctgagtaggtggaggaatgactgatcttgtctt

SEQ ID NO: 49438 - DNA, 80 bp, synthetic construct
  source 1..80: mol_type = other DNA
aaagaatttacttatgaatgacctgcaggggtggtcctttgtagataactgaggcatgatgtataatgcttgtaacagct

SEQ ID NO: 49439 - DNA, 80 bp, synthetic construct; identical to SEQ ID NO: 16214
  source 1..80: mol_type = other DNA

SEQ ID NO: 49440 - DNA, 80 bp, synthetic construct
  source 1..80: mol_type = other DNA
cacaggtgctccattatgctgatgcattttcttaatgtgggtctttatttcctctgggttttgaaattgccttttgcaaa

SEQ ID NO: 49441 - DNA, 80 bp, synthetic construct
  source 1..80: mol_type = other DNA
ttctcttcaacattctgcctctatggcaggagtcccatacttgagtattagtagtgatgataatattatgaatactgaac

SEQ ID NO: 49442 - DNA, 80 bp, synthetic construct
  source 1..80: mol_type = other DNA
aggtctctagaaaaataagttttcacttaaagacatctgtgaagatttcttaccgaaaaccatcagcgggagctcaagcc

SEQ ID NO: 49443 - DNA, 80 bp, synthetic construct; identical to SEQ ID NO: 16215
  source 1..80: mol_type = other DNA

SEQ ID NO: 49444 - DNA, 80 bp, synthetic construct
  source 1..80: mol_type = other DNA
aaatttttttttaatgatgggaggagcaattgtttctttttacttccatcacctggcttccctaagctgtttctatggac

SEQ ID NO: 49445 - DNA, 80 bp, synthetic construct
  source 1..80: mol_type = other DNA
ttcccttacactgtgttttgaaggtaagatatcctttgtctgcacttgtggtggttccagccaatgaacaaatgtctcac

SEQ ID NO: 49446 - DNA, 80 bp, synthetic construct
  source 1..80: mol_type = other DNA
ataatttttagccattgtagatctaagagggaaaagaacagtacttatccgtacacagatgattcctcatcttcagacag

SEQ ID NO: 49447 - DNA, 80 bp, synthetic construct
  source 1..80: mol_type = other DNA
gaatgggacaagaaagaaaaatgacttcttctataggctcatgttaatgtcagcagattctcacgtttgttcatcttaac

SEQ ID NO: 49448 - DNA, 80 bp, synthetic construct; identical to SEQ ID NO: 16216
  source 1..80: mol_type = other DNA

SEQ ID NO: 49449 - DNA, 80 bp, synthetic construct
  source 1..80: mol_type = other DNA
gacctcagttgttaatgacaacggagttataccagtttccaaagctgggccaactttagtctatagaagtcaaagaaaga

SEQ ID NO: 49450 - DNA, 80 bp, synthetic construct
  source 1..80: mol_type = other DNA
ttacttacatttttctcatttattctgcaggttgatgcagggaggtcaagagagtccccagttaacacccaggaagggct

SEQ ID NO: 49451 - DNA, 80 bp, synthetic construct; identical to SEQ ID NO: 16217
  source 1..80: mol_type = other DNA

SEQ ID NO: 49452 - DNA, 80 bp, synthetic construct
  source 1..80: mol_type = other DNA
gtgaggatgatcatgaaggcagctgggaattcaaccagggcagagtagaagaaatccaggtagatattgtcacctgcaag

SEQ ID NO: 49453 - DNA, 80 bp, synthetic construct
  source 1..80: mol_type = other DNA
ctacttcagtggctggctgtggctgggtagtttccaaaaaccaggagaagggaagaaattggaatagttagaactaatta

SEQ ID NO: 49454 - DNA, 80 bp, synthetic construct
  source 1..80: mol_type = other DNA
ttcaagttattcccctgcctcagcctccctagtagttgggattacagacgtgtaccacctgctaatttttgtgcttttag

SEQ ID NO: 49455 - DNA, 80 bp, synthetic construct; identical to SEQ ID NO: 16218
  source 1..80: mol_type = other DNA

SEQ ID NO: 49456 - DNA, 80 bp, synthetic construct
  source 1..80: mol_type = other DNA
aaaaggaaagaaggataatgaggccaaatttcaaagctgcctctcctgtgcactattgtaaaggttgctaaagtaattcc

SEQ ID NO: 49457 - DNA, 80 bp, synthetic construct
  source 1..80: mol_type = other DNA
ctgtaggtagcaaacacaataaagatcaagtcactgggctgtgaagccactggaattattcttgttcagaaatttatttt

SEQ ID NO: 49458 - DNA, 80 bp, synthetic construct
  source 1..80: mol_type = other DNA
tcacctggagaattaaaaaactattggtttccaagccctaccctagaacaattaaatcagtatttctgggggttttggct

SEQ ID NO: 49459 - DNA, 80 bp, synthetic construct; identical to SEQ ID NO: 16219
  source 1..80: mol_type = other DNA

SEQ ID NO: 49460 - DNA, 80 bp, synthetic construct
  source 1..80: mol_type = other DNA
ttaatgctagtgtccctgggtcacatagggaataacaataatttcttaccgtcctgagcgcccatctcatgcccagcact

SEQ ID NO: 49461 - DNA, 80 bp, synthetic construct
  source 1..80: mol_type = other DNA
ctgagtagctgggattacaggcatgcaccacaatgcccagcttttttttttttttttttttccccgagacagggtcttgc

SEQ ID NO: 49462 - DNA, 80 bp, synthetic construct
  source 1..80: mol_type = other DNA
tttcaccatgttggccaggctggtctcaaactcctgacctagtgatctgcccgcctcggcttcccaaagtgctgggatta

SEQ ID NO: 49463 - DNA, 80 bp, synthetic construct; identical to SEQ ID NO: 16220
  source 1..80: mol_type = other DNA

SEQ ID NO: 49464 - DNA, 80 bp, synthetic construct
  source 1..80: mol_type = other DNA
gttcgagatcagcctagccaacatggcgaaactctgtctctactaaaaacacaaaaattagcttggcgtggtggtgctcg

SEQ ID NO: 49465 - DNA, 80 bp, synthetic construct
  source 1..80: mol_type = other DNA
agtgtttacaattctaagaaatcatgtgtgtttaaagaactgctttactgatctaagaatctgacctgaggatggtgaat

SEQ ID NO: 49466 - DNA, 80 bp, synthetic construct
  source 1..80: mol_type = other DNA
gtttccacctgtttgaaatattctcccacggaaccacaaatcttagcatataaaattctctgttgcattccgctacaggt

SEQ ID NO: 49467 - DNA, 80 bp, synthetic construct; identical to SEQ ID NO: 16221
  source 1..80: mol_type = other DNA

SEQ ID NO: 49468 - DNA, 80 bp, synthetic construct
  source 1..80: mol_type = other DNA
tcgtgtagggggatatgtggttctttcctccctcaaatgctaaatccctcctcagggatttctaagcagaaacacaggaa

SEQ ID NO: 49469 - DNA, 80 bp, synthetic construct
  source 1..80: mol_type = other DNA
aagtatgtatatgtgttatgctcaatttcccaaaggaatgagataagaatttgaggtcagagggtgaggtaactgaaaag

SEQ ID NO: 49470 - DNA, 80 bp, synthetic construct
  source 1..80: mol_type = other DNA
gagaaaggagataatagggctgctgctgtggcagttatggtgtaaatgtaggaaggccccagttgggatcatcactctgg

SEQ ID NO: 49471 - DNA, 80 bp, synthetic construct
  source 1..80: mol_type = other DNA
tgcaatttggagttggggcctgtggcaggtaattaagtttagctgaggtctggagagtggggcccccagatatccttaca

SEQ ID NO: 49472 - DNA, 80 bp, synthetic construct; identical to SEQ ID NO: 16222
  source 1..80: mol_type = other DNA

SEQ ID NO: 49473 - DNA, 80 bp, synthetic construct
  source 1..80: mol_type = other DNA
cacattaggggtttctaagagtttctggtatttcccatgtgtttcccttaggcagggatgactaatatattttacttgcc

SEQ ID NO: 49474 - DNA, 80 bp, synthetic construct
  source 1..80: mol_type = other DNA
ctctgagtggggagagaatagtaatagtgatattttcagtctcttcaaagggtctaccgtccaaattgtaccacagctcc

SEQ ID NO: 49475 - DNA, 80 bp, synthetic construct
  source 1..80: mol_type = other DNA
tctggagagtgaaagcaatctcagaatcagaaagatagtgtgcattaaggaaggcagacttcttagcagaataaaatact

SEQ ID NO: 49476 - DNA, 80 bp, synthetic construct; identical to SEQ ID NO: 16223
  source 1..80: mol_type = other DNA

SEQ ID NO: 49477 - DNA, 80 bp, synthetic construct
  source 1..80: mol_type = other DNA
tatagtcccattgtagatgggatgaaaggcctgccaacataagcaaacacatttgatttataattttcatgatgcaattg

SEQ ID NO: 49478 - DNA, 80 bp, synthetic construct
  source 1..80: mol_type = other DNA
tttgtttatttgtataaatggcttggtaacttagcagagggctggaatcagctagtgctggctggcaggaactggtttta

SEQ ID NO: 49479 - DNA, 80 bp, synthetic construct; identical to SEQ ID NO: 16224
  source 1..80: mol_type = other DNA

SEQ ID NO: 49480 - DNA, 80 bp, synthetic construct
  source 1..80: mol_type = other DNA
gattcttctttatgaataggtctggtaggatgaattttctttccacacaatactccagggtacagaaaacaaaaattcca

SEQ ID NO: 49481 - DNA, 80 bp, synthetic construct
  source 1..80: mol_type = other DNA
gaaataaaaaaatctctcaatattgtcttgaagctgggtcccttttcttgcatgccgccccccacctgactctattttgg

SEQ ID NO: 49482 - DNA, 80 bp, synthetic construct
  source 1..80: mol_type = other DNA
tttatgaggactgtagttaggaggcagagcttacggccaaacctgcaggaagaaaaacaaagagagggaattgaattaat

SEQ ID NO: 49483 - DNA, 80 bp, synthetic construct; identical to SEQ ID NO: 16225
  source 1..80: mol_type = other DNA

SEQ ID NO: 49484 - DNA, 80 bp, synthetic construct
  source 1..80: mol_type = other DNA
ttcagtatataccccctttctttttcaacagtgcttttaggctttgtgaaaattgtctttggtgccacacatgttactat

SEQ ID NO: 49485 - DNA, 80 bp, synthetic construct
  source 1..80: mol_type = other DNA
aaacaattggcaacctgggtttcatcatgaccttcctacttactatgatgttgggcaacctattcaaccatattcagtgt

SEQ ID NO: 49486 - DNA, 80 bp, synthetic construct
  source 1..80: mol_type = other DNA
actgttattttcgccatgtcctggtttgcttgtaaaagacaccctaatccacttagtggatatttaaaaaaattcttcac

SEQ ID NO: 49487 - DNA, 80 bp, synthetic construct
  source 1..80: mol_type = other DNA
tcaaaataatccacattattaataattattttggaagagtaatattttaaatatgaaattttaaggttaagcagttacat

SEQ ID NO: 49488 - DNA, 80 bp, synthetic construct; identical to SEQ ID NO: 16226
  source 1..80: mol_type = other DNA

SEQ ID NO: 49489 - DNA, 80 bp, synthetic construct
  source 1..80: mol_type = other DNA
cacacagtagaacaccacagtagtgccccatgtagatggacaaaatcttttaggtgatgagagggaatattcatcatctg

SEQ ID NO: 49490 - DNA, 80 bp, synthetic construct
  source 1..80: mol_type = other DNA
gggctatttaaatggttaaatggaaaacaatcagaagaaacaggacaggaagggtggactccccatactgctggcttggt

SEQ ID NO: 49491 - DNA, 80 bp, synthetic construct
  source 1..80: mol_type = other DNA
atgcaacttagcatttgggaagcagtgctttaatttcacagagcctcggtttcttcatccattgtaaattatggataatg

SEQ ID NO: 49492 - DNA, 80 bp, synthetic construct; identical to SEQ ID NO: 16227
  source 1..80: mol_type = other DNA

SEQ ID NO: 49493 - DNA, 80 bp, synthetic construct
  source 1..80: mol_type = other DNA
gatattccataggcagtgtgcctggaatagcagctcagaggagtctgttctgtactcatatttatttttaattatatgca

SEQ ID NO: 49494 - DNA, 80 bp, synthetic construct
  source 1..80: mol_type = other DNA
tgccattaaaaggggctggagattgccatgttgccatggcaatagtaaaccgacatggtgcactggtggtcatgtcttat

SEQ ID NO: 49495 - DNA, 80 bp, synthetic construct
  source 1..80: mol_type = other DNA
acataaaagtagggtgctggctcttaagagctaatgatcagacttacagaaaatttgcaagctaattgttagcataacca

SEQ ID NO: 49496 - DNA, 80 bp, synthetic construct; identical to SEQ ID NO: 16228
  source 1..80: mol_type = other DNA

SEQ ID NO: 49497 - DNA, 80 bp, synthetic construct
  source 1..80: mol_type = other DNA
taaggtcagtagttcgagatcaacctggccaacatggtgaaaccctgtctctactaaaaatacaaaaattagctgggcat

SEQ ID NO: 49498 - DNA, 80 bp, synthetic construct
  source 1..80: mol_type = other DNA
ctgggattggtgaggaattgcttttttgtctcaggtgacactcaaaatcattgatgaggaagttatgggttatacttggg

SEQ ID NO: 49499 - DNA, 80 bp, synthetic construct
  source 1..80: mol_type = other DNA
aggcattaactatacaaaaaacaaattgctttctcatttctttaggctaggcttctcactcctgcatgcaggcacagaac

SEQ ID NO: 49500 - DNA, 80 bp, synthetic construct; identical to SEQ ID NO: 16229
  source 1..80: mol_type = other DNA

SEQ ID NO: 49501 - DNA, 80 bp, synthetic construct
  source 1..80: mol_type = other DNA
ggtggactccggacctccccttgttaatgtgtctctcctgatttaatgcgtcatctttaaagaatcatcctcaattctgc

SEQ ID NO: 49502 - DNA, 80 bp, synthetic construct
  source 1..80: mol_type = other DNA
tgccagttgggccccaggcccctgtgaagtgcatatgccttgggggtgtgatatattaagccatcattattcatccttaa

SEQ ID NO: 49503 - DNA, 80 bp, synthetic construct
  source 1..80: mol_type = other DNA
gtttggattatatcatagatgtagttggggatggcatgggagggcaacaagcataaaatgcattgactttaccatgtatt

SEQ ID NO: 49504 - DNA, 80 bp, synthetic construct
  source 1..80: mol_type = other DNA
acacagtgcctggccatggaaaacactcaataaacggtgttatgaatattaaataattagccctgacggccaagttatct

SEQ ID NO: 49505 - DNA, 80 bp, synthetic construct; identical to SEQ ID NO: 16230
  source 1..80: mol_type = other DNA

SEQ ID NO: 49506 - DNA, 80 bp, synthetic construct
  source 1..80: mol_type = other DNA
cttccacatatatggtcatatatggccccaggaacccaattcaggactcttgcaatcccacgggtattagggagattcta

SEQ ID NO: 49507 - DNA, 80 bp, synthetic construct
  source 1..80: mol_type = other DNA
cgacttgaagcttctgcatagcccccatggaagatttgctgtgtaatgttgaaatatctgtctatgaccccagagaattt

SEQ ID NO: 49508 - DNA, 80 bp, synthetic construct; identical to SEQ ID NO: 16231
  source 1..80: mol_type = other DNA

SEQ ID NO: 49509 - DNA, 80 bp, synthetic construct
  source 1..80: mol_type = other DNA
ttgaattgaactgtatagttaagtggcaataagccattgtttcttgatcatgccaattttcttcttcttctctctctctc

SEQ ID NO: 49510 - DNA, 80 bp, synthetic construct
  source 1..80: mol_type = other DNA
cagcctcagttttctttacataaccaaaaggcttgcccttccatctggcaatttgtcatgaagctaaaactacagcattg

SEQ ID NO: 49511 - DNA, 80 bp, synthetic construct
  source 1..80: mol_type = other DNA
catttagcatctccctgctgtctgtttaataaaaggggattaggagtgactgctgaaggctgctgcatttgctcttattt

SEQ ID NO: 49512 - DNA, 80 bp, synthetic construct; identical to SEQ ID NO: 16232
  source 1..80: mol_type = other DNA

SEQ ID NO: 49513 - DNA, 80 bp, synthetic construct
  source 1..80: mol_type = other DNA
ttcacaaatagcttttgatgtcatctgtagtttttaacaaaataatagtgccatagcatgatctccagccccaaatgatt

SEQ ID NO: 49514 - DNA, 80 bp, synthetic construct
  source 1..80: mol_type = other DNA
gaaaaagaggaggatccacaatatccctatcttggcaacatttccaggagtcctaatatgctttggcctgttccttattg

SEQ ID NO: 49515 - DNA, 80 bp, synthetic construct
  source 1..80: mol_type = other DNA
agaagctgcatgttctcatttggaaactaggattttgtaagatacatgcaggccaaagagatgtccaggcagggtttata

SEQ ID NO: 49516 - DNA, 80 bp, synthetic construct
  source 1..80: mol_type = other DNA
tggtgtccaggctggccagggggtccacgcagtcgaaggtgctctggttccagtccacctcgtagcgcctacactgtctt

SEQ ID NO: 49517 - DNA, 80 bp, synthetic construct; identical to SEQ ID NO: 16233
  source 1..80: mol_type = other DNA

SEQ ID NO: 49518 - DNA, 80 bp, synthetic construct
  source 1..80: mol_type = other DNA
ctttccttggtccagctgacttcaaaggtgcacccctccagcgggggtgcatgtccttctgcacttcccaaatgccctga

SEQ ID NO: 49519 - DNA, 80 bp, synthetic construct
  source 1..80: mol_type = other DNA
gagcagccaggaacttaatatactcctatctcatgcgcaccgccagcttttcttcaaggccctatggagaaaacacacgt

SEQ ID NO: 49520 - DNA, 80 bp, synthetic construct; identical to SEQ ID NO: 16234
  source 1..80: mol_type = other DNA

SEQ ID NO: 49521 - DNA, 80 bp, synthetic construct
  source 1..80: mol_type = other DNA
caggtcaagtgtaaatgcaggcaggtgtgtccaagccactatctttgtgtcctagatttttctgtcaaggtctgttgggg

SEQ ID NO: 49522 - DNA, 80 bp, synthetic construct
  source 1..80: mol_type = other DNA
agaatccttcttcctcaaagcagctcgtggaaaccagactcttttctccccaaagccagccagaaagcctagaaatacca

SEQ ID NO: 49523 - DNA, 80 bp, synthetic construct
  source 1..80: mol_type = other DNA
cctgcgaacatgggctgctgccctttttgtccaactacagttctatactgccatccagttttccctgtatctgtgggtct

SEQ ID NO: 49524 - DNA, 80 bp, synthetic construct; identical to SEQ ID NO: 16235
  source 1..80: mol_type = other DNA

SEQ ID NO: 49525 - DNA, 80 bp, synthetic construct
  source 1..80: mol_type = other DNA
ccttgccgcagctgcaggcttcttattttcttaaaaaagcaaaaagcagggcgccggcaaggacatccattgacctccac

SEQ ID NO: 49526 - DNA, 80 bp, synthetic construct
  source 1..80: mol_type = other DNA
tgtctgcacctgttccccgtcaaagagctgtaggagggcgagttaaagagttaaaaagtgacagaggttgtcaaacttta

SEQ ID NO: 49527 - DNA, 80 bp, synthetic construct
  source 1..80: mol_type = other DNA
ggaaacaatgttgaaatttgctacaaattacttagagggaacaatcagataaggagaagttcagacctcaggttgcttac

SEQ ID NO: 49528 - DNA, 80 bp, synthetic construct; identical to SEQ ID NO: 16236
  source 1..80: mol_type = other DNA

SEQ ID NO: 49529 - DNA, 80 bp, synthetic construct
  source 1..80: mol_type = other DNA
taaccttctgggccccctgcacaaaaagacacgggggcagttagggtgggaagttaggatggatgaatcctacctatccc

SEQ ID NO: 49530 - DNA, 80 bp, synthetic construct
  source 1..80: mol_type = other DNA
cgtctacctgagacaaaaatgatagaaataggttgtctcacagtgacgggtgccatctgtcctctacgcagctaagatgg

SEQ ID NO: 49531 - DNA, 80 bp, synthetic construct
  source 1..80: mol_type = other DNA
gactattactgagcacagtggcttcaatagttggaagttattcacggagacactttcaccctctctattcctcccttgtt

SEQ ID NO: 49532 - DNA, 80 bp, synthetic construct
  source 1..80: mol_type = other DNA
aaggcagcttagaggacagtaggcagcaccatctgacacttcaattcctcaacacctgtcccaagtagttacacggaaat

SEQ ID NO: 49533 - DNA, 80 bp, synthetic construct; identical to SEQ ID NO: 16237
  source 1..80: mol_type = other DNA

SEQ ID NO: 49534 - DNA, 80 bp, synthetic construct
  source 1..80: mol_type = other DNA
agggctgactagaactctccttgggctttcttcatcagtgtcgttctgattttattcatttctctttactggttctattt

SEQ ID NO: 49535 - DNA, 80 bp, synthetic construct; identical to SEQ ID NO: 16238
  source 1..80: mol_type = other DNA

SEQ ID NO: 49536 - DNA, 80 bp, synthetic construct
  source 1..80: mol_type = other DNA
ttaaaggctgtattattactctatgtaaaattaagtgcaaagtatttggtttggccctgggcttccaagttagtggtggg

SEQ ID NO: 49537 - DNA, 80 bp, synthetic construct
  source 1..80: mol_type = other DNA
ccttatctctgaagacacaagacttcagagatagatctgaacaaacacctcttcgtaagtttcccctggtttattgccat

SEQ ID NO: 49538 - DNA, 80 bp, synthetic construct
  source 1..80: mol_type = other DNA
tcttgtaaaatatgggtaaatgtatatgattttcttttgttaatctctctcgtgttagtaggggccacagctgtgcacct

SEQ ID NO: 49539 - DNA, 80 bp, synthetic construct
  source 1..80: mol_type = other DNA
ggaggccaaggtgggaggatcccttgagcccagtagttcaagaccagcctgggcaacacagtgagaccctgttcctaaaa

SEQ ID NO: 49540 - DNA, 80 bp, synthetic construct; identical to SEQ ID NO: 16239
  source 1..80: mol_type = other DNA

SEQ ID NO: 49541 - DNA, 80 bp, synthetic construct
  source 1..80: mol_type = other DNA
ttcgttttttaaaagtttgggttagcaaccaatttcctccttgaccaggtgattttttccttagactgtttatccagagc

SEQ ID NO: 49542 - DNA, 80 bp, synthetic construct
  source 1..80: mol_type = other DNA
gtggctcaccactggaagtgtaactgttgtaatctggctagagaggaaagtccattacattttaatttttttatgacttc

SEQ ID NO: 49543 - DNA, 80 bp, synthetic construct; identical to SEQ ID NO: 16240
  source 1..80: mol_type = other DNA

SEQ ID NO: 49544 - DNA, 80 bp, synthetic construct
  source 1..80: mol_type = other DNA
ggcacgtgcctgtagtcccacttacttgggaggctgaggcaggagaattgcttgaacctaggaggtggaggttgcagtga

SEQ ID NO: 49545 - DNA, 80 bp, synthetic construct
  source 1..80: mol_type = other DNA
tgcaatagatattaagtttactcaatgaaatgctgatgagaaatttcgtattggaggggtcaggctgacaccatcactag

SEQ ID NO: 49546 - DNA, 80 bp, synthetic construct
  source 1..80: mol_type = other DNA
atgtgttggggataaagtaacaagctaaatgacaatagaaggaagcaatcagacaaatgtaggattcagaacattctgcc

SEQ ID NO: 49547 - DNA, 80 bp, synthetic construct
  source 1..80: mol_type = other DNA
taggtctggtcatcatggccttgctttaaaaagggaggcctaattaattagaatatatcatactgaagtatttgtgggtg

SEQ ID NO: 49548 - DNA, 80 bp, synthetic construct; identical to SEQ ID NO: 16241
  source 1..80: mol_type = other DNA

SEQ ID NO: 49549 - DNA, 80 bp, synthetic construct
  source 1..80: mol_type = other DNA
tgctcagccgtgtgtggagccacagttgtgctgtgctcagttactaaaagtgaaagttatcagtggtactgagagatggc

SEQ ID NO: 49550 - DNA, 80 bp, synthetic construct
  source 1..80: mol_type = other DNA
tctgagtttcagccactggcctgaaagccaccctcaagggaaaaattatgcaggaacaacgtgaagtatctctaagatct

SEQ ID NO: 49551 - DNA, 80 bp, synthetic construct; identical to SEQ ID NO: 16242
  source 1..80: mol_type = other DNA

SEQ ID NO: 49552 - DNA, 80 bp, synthetic construct
  source 1..80: mol_type = other DNA
ggacatgctttgcgtgcaagccatatgggactgtctttttgatgaccgcgatattcacctgttaaacatgcctgttaccc

SEQ ID NO: 49553 - DNA, 80 bp, synthetic construct
  source 1..80: mol_type = other DNA
ggattacaggcgcctgccgccacgcccaactaatttttgtatttttagtagagacagggtttcaccatgctggccaggct

SEQ ID NO: 49554 - DNA, 80 bp, synthetic construct
  source 1..80: mol_type = other DNA
tggagtcttggtatggccagattctctctgtgttaggtctgtgtggtgtgtgcactggagcttacatcaaagcctgtgag

SEQ ID NO: 49555 - DNA, 80 bp, synthetic construct; identical to SEQ ID NO: 16243
  source 1..80: mol_type = other DNA

SEQ ID NO: 49556 - DNA, 80 bp, synthetic construct
  source 1..80: mol_type = other DNA
agttccaaggtgaagagacacacagtcctgttggaagggctactttgatcaaagcaggctaaaacaaatcaacttggtgg

SEQ ID NO: 49557 - DNA, 80 bp, synthetic construct
  source 1..80: mol_type = other DNA
ggagcacagccctgtggaaatctgagggtgcattaaagtaaaacaagtcaatgctcatcagaactcccttccagattcca

SEQ ID NO: 49558 - DNA, 80 bp, synthetic construct
  source 1..80: mol_type = other DNA
aggatgcaaatgctcactgtgccattcaaaagccagaacagaagatattgcaccaatttggatggcccagtcacatttct

SEQ ID NO: 49559 - DNA, 80 bp, synthetic construct
  source 1..80: mol_type = other DNA
aatgggcagagctagtctcctccgggtaatagtttgatagaaaagtagaacaggcaattcaaacattagttgtcctaaac

SEQ ID NO: 49560 - DNA, 80 bp, synthetic construct; identical to SEQ ID NO: 16244
  source 1..80: mol_type = other DNA

SEQ ID NO: 49561 - DNA, 80 bp, synthetic construct
  source 1..80: mol_type = other DNA
gtcactatgtttttaaaacttgtgtcagaattcccaagggcctgatggggatgggttgtgccttcaccccatctggcaaa

SEQ ID NO: 49562 - DNA, 80 bp, synthetic construct
  source 1..80: mol_type = other DNA
caagggtggaaacgtttgggtctaaacaaagagaaggagaaatcatagctgagggtaaaggagtgaataaaacgctcctg

SEQ ID NO: 49563 - DNA, 80 bp, synthetic construct
  source 1..80: mol_type = other DNA
tgcaaatctgagtagccccaccctgggagacatttccataagatatgatgatggactggactaactattaatgaatgagt

SEQ ID NO: 49564 - DNA, 80 bp, synthetic construct; identical to SEQ ID NO: 16245
  source 1..80: mol_type = other DNA

SEQ ID NO: 49565 - DNA, 80 bp, synthetic construct
  source 1..80: mol_type = other DNA
aaatggagttaataatcaatgacacgtatgtgatgaagctgccataaaaatccctgaactgcagggtgtggagagcttct

SEQ ID NO: 49566 - DNA, 80 bp, synthetic construct
  source 1..80: mol_type = other DNA
ccggagttccatgagatgctttagcaaatgaatcaaacctgaggcggaagtcatgggaactcctgatttatagctgattc

SEQ ID NO: 49567 - DNA, 80 bp, synthetic construct; identical to SEQ ID NO: 16246
  source 1..80: mol_type = other DNA

SEQ ID NO: 49568 - DNA, 80 bp, synthetic construct
  source 1..80: mol_type = other DNA
cccagcacttcagaggtgaccctgtttggagacagggctgttacagatgtaattacttgaggtcctgctggggtaggtgg

SEQ ID NO: 49569 - DNA, 80 bp, synthetic construct
  source 1..80: mol_type = other DNA
cccttacagatttcagaggcggcatggccctgctgacaccttggtaccagacttctggcctctagaaccatgggagaata

SEQ ID NO: 49570 - DNA, 80 bp, synthetic construct
  source 1..80: mol_type = other DNA
tctccaggccctcatagtctcactcctgtattcctagggacaaagcatgctatagtctgaattttggtgtcccttgccaa

SEQ ID NO: 49571 - DNA, 80 bp, synthetic construct; identical to SEQ ID NO: 16247
  source 1..80: mol_type = other DNA

SEQ ID NO: 49572 - DNA, 80 bp, synthetic construct
  source 1..80: mol_type = other DNA
ttccttttgttgcctctcccctcattaaggaacgggaagggagagatgagggataaacaagcgtggtgacggattggtcc

SEQ ID NO: 49573 - DNA, 80 bp, synthetic construct
  source 1..80: mol_type = other DNA
tccctttttcccaaacctatcctgatgagaagtttgaattctgttttaaggaaagaccttccaatgcagtgtggagtgag

SEQ ID NO: 49574 - DNA, 80 bp, synthetic construct
  source 1..80: mol_type = other DNA
tgacatttttgaaagccctaaaataatttggtgcccatagtgggaaccttgtcatacttatttacatagtatggaaggct

SEQ ID NO: 49575 - DNA, 80 bp, synthetic construct; identical to SEQ ID NO: 16248
  source 1..80: mol_type = other DNA

SEQ ID NO: 49576 - DNA, 80 bp, synthetic construct
  source 1..80: mol_type = other DNA
tccatcctctgtagttggttagggcacttagttcactctctccagttggggttgattgtagagttctaactttttacgtg

SEQ ID NO: 49577 - DNA, 80 bp, synthetic construct
  source 1..80: mol_type = other DNA
ctagtcatctggtaagtgaccaataagctttagttactcaatacaaagaaaccaaaccagcattagatggggaggagagt

SEQ ID NO: 49578 - DNA, 80 bp, synthetic construct
  source 1..80: mol_type = other DNA
ttaggtctctgagatcatagtaatgcagtcagcaatgaaacctacctggttaattagagaaacacagctccatcaatgta

SEQ ID NO: 49579 - DNA, 80 bp, synthetic construct
  source 1..80: mol_type = other DNA
atattttctatctctttagttctctgggtcaaagtctattttgtgttctcagatgtagtttcggctcactagttttccct

SEQ ID NO: 49580 - DNA, 80 bp, synthetic construct; identical to SEQ ID NO: 16249
  source 1..80: mol_type = other DNA

SEQ ID NO: 49581 - DNA, 80 bp, synthetic construct
  source 1..80: mol_type = other DNA
tccttctatgactttatgactctatgactctatgactctagcacctttcttgcttttgagctctctttcccacaatggtt

SEQ ID NO: 49582 - DNA, 80 bp, synthetic construct
  source 1..80: mol_type = other DNA
acagaaataaacaaggcatgggcttttccctcaagaaatttatagtccaaaggaccagacagcaaatgaaccaacattta

SEQ ID NO: 49583 - DNA, 80 bp, synthetic construct; identical to SEQ ID NO: 16250
  source 1..80: mol_type = other DNA

SEQ ID NO: 49584 - DNA, 80 bp, synthetic construct
  source 1..80: mol_type = other DNA
aggttataacctggaagactttgaatcattgccaactgccattgtaaatatttatgagaagtttgttcccaatgtcttag

SEQ ID NO: 49585 - DNA, 80 bp, synthetic construct
  source 1..80: mol_type = other DNA
ataaaaaaaaattagctgggcatggtgactcacatctgtagtcccaactatttgggaggctgaggtgggaggattgcttg

SEQ ID NO: 49586 - DNA, 80 bp, synthetic construct
  source 1..80: mol_type = other DNA
atatactgaactatctgtaggaccataagatgtttaagctggatgttaccttgttgaaaatgaggtaaatctaggtgaaa

SEQ ID NO: 49587 - DNA, 80 bp, synthetic construct; identical to SEQ ID NO: 16251
  source 1..80: mol_type = other DNA

SEQ ID NO: 49588 - DNA, 80 bp, synthetic construct
  source 1..80: mol_type = other DNA
tactcaaatttggcaagcttgtcctgtttgagttgtctccaattcacttaagaaccaggatttttgtgaaatttcaatga

SEQ ID NO: 49589 - DNA, 80 bp, synthetic construct
  source 1..80: mol_type = other DNA
tgattgagtgactgcatgcatgcttgccaaacagtaaataaatccgtacatagcttttgttcattggataatcgggtgta

SEQ ID NO: 49590 - DNA, 80 bp, synthetic construct
  source 1..80: mol_type = other DNA
ggtcctgccatttgcctctcattcatcatgttgacaaacaagtgtaagggaaaacagagggtgaatgagaccaggctcca

SEQ ID NO: 49591 - DNA, 80 bp, synthetic construct; identical to SEQ ID NO: 16252
  source 1..80: mol_type = other DNA

SEQ ID NO: 49592 - DNA, 80 bp, synthetic construct
  source 1..80: mol_type = other DNA
ccgcttacgctacgaccagcaaaagcaaaccccgcagctgcctgccagccgggaagaaggactgtgtttccatgttgtga

SEQ ID NO: 49593 - DNA, 80 bp, synthetic construct; identical to SEQ ID NO: 16255
  source 1..80: mol_type = other DNA

SEQ ID NO: 49594 - DNA, 80 bp, synthetic construct
  source 1..80: mol_type = other DNA
gcaagtcaaaaactttggatttcatttgtggctgtgacactgggttggggtcagtggctcagtgttgggagggtctcatt

SEQ ID NO: 49595 - DNA, 80 bp, synthetic construct; identical to SEQ ID NO: 16253
  source 1..80: mol_type = other DNA

SEQ ID NO: 49596 - DNA, 80 bp, synthetic construct
  source 1..80: mol_type = other DNA
tataaaaggttcactgtaaaccaggatttagaaaatgcaaacccttgggtaaaatgaagtgttttcaggacactcaccag

SEQ ID NO: 49597 - DNA, 80 bp, synthetic construct
  source 1..80: mol_type = other DNA
ctaatgatgaagctcaggtgctgagagcaactgatcagatgttggcaggatcatctaaatccataggcagccaagcagcc

SEQ ID NO: 49598 - DNA, 80 bp, synthetic construct
  source 1..80: mol_type = other DNA
ctgcatttgcagttttatgtcattctaactggtttaaagtttatgcagccacatgtggttagcgactaaggcactggaca

SEQ ID NO: 49599 - DNA, 80 bp, synthetic construct; identical to SEQ ID NO: 16254
  source 1..80: mol_type = other DNA

SEQ ID NO: 49600 - DNA, 80 bp, synthetic construct
  source 1..80: mol_type = other DNA
aaagggtggacttgttgcagttgctgtaggattctaaatccaggtaagaaccattgagattctctaatttttacatatat

SEQ ID NO: 49601 - DNA, 80 bp, synthetic construct
  source 1..80: mol_type = other DNA
cgcttacattctgagcccttaaaacatagtaaatattccttctgggagtagaagagcctcaggtttatatactgttaaaa

SEQ ID NO: 49602 - DNA, 80 bp, synthetic construct; identical to SEQ ID NO: 16256
  source 1..80: mol_type = other DNA

SEQ ID NO: 49603 - DNA, 80 bp, synthetic construct
  source 1..80: mol_type = other DNA
tttttatttcattattattatactttaagttttagggtacatgtgcacaacatgcaggtttgttacatatgtatacatgt

SEQ ID NO: 49604 - DNA, 80 bp, synthetic construct
  source 1..80: mol_type = other DNA
agaacatgcggtgtttggttttttgtccttgcgatagtttgttgagaatgatggtttccagtttcatccatgtccctaca

SEQ ID NO: 49605 - DNA, 80 bp, synthetic construct; identical to SEQ ID NO: 16257
  source 1..80: mol_type = other DNA

SEQ ID NO: 49606 - DNA, 80 bp, synthetic construct
  source 1..80: mol_type = other DNA
tgtggttttgatttgcatttctctgatggccagtgatgatgagcattttttcacgtgttttttggctgcataaatgtctt

SEQ ID NO: 49607 - DNA, 80 bp, synthetic construct
  source 1..80: mol_type = other DNA
ctgatggtagtttcttttgctgtgcagaagctctttagtttaattatatctcatttgtcatttttggcttttgttgccat

SEQ ID NO: 49608 - DNA, 80 bp, synthetic construct
  source 1..80: mol_type = other DNA
ttcagctttctacatatggcttgccagttttcccagcatcatttattaaatagggaatcctttccccattgcttgttttt

SEQ ID NO: 49609 - DNA, 80 bp, synthetic construct; identical to SEQ ID NO: 16258
  source 1..80: mol_type = other DNA

SEQ ID NO: 49610 - DNA, 80 bp, synthetic construct
  source 1..80: mol_type = other DNA
gtggtttgtagttctccttgaagaggtccttcacatcccttgtaagttggattcctaggtattttattctctttgaagca

SEQ ID NO: 49611 - DNA, 80 bp, synthetic construct
  source 1..80: mol_type = other DNA
gatatacaatcatgtgatctgcaaacagggacaatttgacttcctcttttcctaattgaataccctttattttcttctcc

SEQ ID NO: 49612 - DNA, 80 bp, synthetic construct
  source 1..80: mol_type = other DNA
tgagatacatcccatcaatacctaatttattgagagtttttagcatgaagggttgttgaattttgtcaaaggccttttct

SEQ ID NO: 49613 - DNA, 80 bp, synthetic construct
  source 1..80: mol_type = other DNA
ccagtattttattgaggatttttgcatcaatgttcatcaaggatattggtctaaaattctctttttttgttgtttctctg

SEQ ID NO: 49614 - DNA, 80 bp, synthetic construct; identical to SEQ ID NO: 16259
  source 1..80: mol_type = other DNA

SEQ ID NO: 49615 - DNA, 80 bp, synthetic construct
  source 1..80: mol_type = other DNA
tcttctctgttttcttctttattagtcttgctagtggtctatcaattttgttgatgctttcaaaaaaccagctcctggat

SEQ ID NO: 49616 - DNA, 80 bp, synthetic construct
  source 1..80: mol_type = other DNA
ttctcttgtgggcatttagtgctataaatttccctctacacactgctttaaatgtgtcccagagattctcgtatgttgtg

SEQ ID NO: 49617 - DNA, 80 bp, synthetic construct; identical to SEQ ID NO: 16260
  source 1..80: mol_type = other DNA

SEQ ID NO: 49618 - DNA, 80 bp, synthetic construct
  source 1..80: mol_type = other DNA
tgttaaagtctcccattattattgagtggaattctaagtctctttgtaggtcactaaggacttgctttatgaatctgggt

SEQ ID NO: 49619 - DNA, 80 bp, synthetic construct
  source 1..80: mol_type = other DNA
ttccatttgcttggtagatcttcctccatccctttattttgagcctatgtgtgtctctgcatgtgagatggatttcctga

SEQ ID NO: 49620 - DNA, 80 bp, synthetic construct
  source 1..80: mol_type = other DNA
agtttcttcctagccttgatggtctttacaatttggcatgtttttgcagtggctggtaccagttgttcctttccatgttt

SEQ ID NO: 49621 - DNA, 80 bp, synthetic construct; identical to SEQ ID NO: 16261
  source 1..80: mol_type = other DNA

SEQ ID NO: 49622 - DNA, 80 bp, synthetic construct
  source 1..80: mol_type = other DNA
gaagttctcctggataatatcctgcagagtgttttccaacttggttcccttctccccatcactttcaggtacaccaatca

SEQ ID NO: 49623 - DNA, 80 bp, synthetic construct
  source 1..80: mol_type = other DNA
gcttctgcatttgtcatgtggctctcttgccttggttttcagctccatcaagtcctttaagaacttctctgcattggtta

SEQ ID NO: 49624 - DNA, 80 bp, synthetic construct
  source 1..80: mol_type = other DNA
ggagctgcattcctttggaggaggagaggcgctctgatctttagagtttccagtttttctgctctgtttttttctcatct

SEQ ID NO: 49625 - DNA, 80 bp, synthetic construct; identical to SEQ ID NO: 16262
  source 1..80: mol_type = other DNA

SEQ ID NO: 49626 - DNA, 80 bp, synthetic construct
  source 1..80: mol_type = other DNA
aagctgtcagagagggacatttaagtctgcagaggttactgctgtctttttgtttgtctgtgccctgcccccagagatgg

SEQ ID NO: 49627 - DNA, 80 bp, synthetic construct
  source 1..80: mol_type = other DNA
gcttgcaatgagcgagactctgtgggcataggaccctccaagccaggtgcaggatataatctcctggtgtgctgtttttt

SEQ ID NO: 49628 - DNA, 80 bp, synthetic construct
  source 1..80: mol_type = other DNA
cacccactgtcctgcacctactgtctggcactccccagtgagatgaacccggtacctcagttggaaatgcagaaatcacc

SEQ ID NO: 49629 - DNA, 80 bp, synthetic construct; identical to SEQ ID NO: 16263
  source 1..80: mol_type = other DNA

SEQ ID NO: 49630 - DNA, 80 bp, synthetic construct
  source 1..80: mol_type = other DNA
gacctcttccgggaagaattgcaatgctaaatccaaatgcctatggttctatcttataaacaaatggtgtcctcaaaatt

SEQ ID NO: 49631 - DNA, 80 bp, synthetic construct
  source 1..80: mol_type = other DNA
gaggaacaaagtgtccacctttttttcctgaatattttatctgaagatctaggagagagatgtgaaatagtatttttctg

SEQ ID NO: 49632 - DNA, 80 bp, synthetic construct
  source 1..80: mol_type = other DNA
gatcagcattacaaccaagaatggagaatgacattcaggattgaaagaaacatacaagagggcagaaagctttcttcttg

SEQ ID NO: 49633 - DNA, 80 bp, synthetic construct; identical to SEQ ID NO: 16264
  source 1..80: mol_type = other DNA

SEQ ID NO: 49634 - DNA, 80 bp, synthetic construct
  source 1..80: mol_type = other DNA
atagaaacagatattcatggaaaaaatggggtgaaattaatcaaagggcagcttattaccttgagactaaacagccattg

SEQ ID NO: 49635 - DNA, 80 bp, synthetic construct
  source 1..80: mol_type = other DNA
gtaataattggagttcacttagaggtacacatgtatgggtttctgtattcaaccatatgttgatatatactcacatatat

SEQ ID NO: 49636 - DNA, 80 bp, synthetic construct
  source 1..80: mol_type = other DNA
aaatttgtctattcactaaaattcctttgtaacaccaaaatcaatactgctggactttcatgggcattcacatgcatgtg

SEQ ID NO: 49637 - DNA, 80 bp, synthetic construct; identical to SEQ ID NO: 16265
  source 1..80: mol_type = other DNA

SEQ ID NO: 49638 - DNA, 80 bp, synthetic construct
  source 1..80: mol_type = other DNA
atattgaacaatttaccaaaatattgtgaccagaggcagacaggcatataactaaccccacatctctccaaggaacaatg

SEQ ID NO: 49639 - DNA, 80 bp, synthetic construct
  source 1..80: mol_type = other DNA
tcatgtatctatgctgtgtctgcttatatagatatcttagatacataaatatgtattgtttacatacataggagcaagaa

SEQ ID NO: 49640 - DNA, 80 bp, synthetic construct
  source 1..80: mol_type = other DNA
atttctctcatacattgactccaaaactttagttgttgaatttattctgcagatatggccacataaaaccaaaatggcat

SEQ ID NO: 49641 - DNA, 80 bp, synthetic construct
  source 1..80: mol_type = other DNA
gaaagacttattaagattaagtatatagagaagataaaaaggtagagaatgatgtttaaggtatgctaccatttgcattg

SEQ ID NO: 49642 - DNA, 80 bp, synthetic construct; identical to SEQ ID NO: 16266
  source 1..80: mol_type = other DNA

SEQ ID NO: 49643 - DNA, 80 bp, synthetic construct
  source 1..80: mol_type = other DNA
aggggctaataggcacattttaaaactagaaggataaagaaaacatatatttgcttttataaattttacaatataggtgt

SEQ ID NO: 49644 - DNA, 80 bp, synthetic construct
  source 1..80: mol_type = other DNA
tttgtttccagcattgacctagcagagtggtaacgacatagtagaccctgagtgaatgttagtgaatggttgattgattg

SEQ ID NO: 49645 - DNA, 80 bp, synthetic construct; identical to SEQ ID NO: 16267
  source 1..80: mol_type = other DNA

SEQ ID NO: 49646 - DNA, 80 bp, synthetic construct
  source 1..80: mol_type = other DNA
tatcaatgtagaaaatttagaaatattttgatagcttctctttggttttggattgatcacgacatatttaggaatgtgat

SEQ ID NO: 49647 - DNA, 80 bp, synthetic construct
  source 1..80: mol_type = other DNA
taatttaggctcatggaacggaggtctatgatagtcaaaaacttggccaaaagacctgtttgacgatttagaaaagccat

SEQ ID NO: 49648 - DNA, 80 bp, synthetic construct
  source 1..80: mol_type = other DNA
gaattgaaaaccctggaacccaagacaaagcctttaaatccccatatggaagtcttgaggaaatcaagaaataagggtca

SEQ ID NO: 49649 - DNA, 80 bp, synthetic construct; identical to SEQ ID NO: 16268
  source 1..80: mol_type = other DNA

SEQ ID NO: 49650 - DNA, 80 bp, synthetic construct
  source 1..80: mol_type = other DNA
ggagaagctgggagttagggaattagcagtgtgtggaaaggacattaactgcagcccaataaagaagactagagctagag

SEQ ID NO: 49651 - DNA, 80 bp, synthetic construct
  source 1..80: mol_type = other DNA
attttacaataattctgtaaagacttgcgtgcctgtagttgaggtttgttgcatttctgagcttactttttattcatgag

SEQ ID NO: 49652 - DNA, 80 bp, synthetic construct
  source 1..80: mol_type = other DNA
gaaatattatgatttagagatatctctgtagatagaaagataatgaaaacaatagtaaaacaaatgtaattcaggagcat

SEQ ID NO: 49653 - DNA, 80 bp, synthetic construct; identical to SEQ ID NO: 16269
  source 1..80: mol_type = other DNA

SEQ ID NO: 49654 - DNA, 80 bp, synthetic construct
  source 1..80: mol_type = other DNA
ggttaaattattgagtgtcaagcaactgtggattctaacacttgctaacatgcatgcacacacccaaatatacatgttgt

SEQ ID NO: 49655 - DNA, 80 bp, synthetic construct
  source 1..80: mol_type = other DNA
cctgctagtatatgtttcatcattacacttgtcatttcttctcttcaaatttaaacccaacaagatacaggggaagattt

SEQ ID NO: 49656 - DNA, 80 bp, synthetic construct
  source 1..80: mol_type = other DNA
aagaatctcagagtttgaagattacccctttgaatcaacacaagcagacaaaattaaaggaaaaatattaatgaaaaaaa

SEQ ID NO: 49657 - DNA, 80 bp, synthetic construct; identical to SEQ ID NO: 16270
  source 1..80: mol_type = other DNA

SEQ ID NO: 49658 - DNA, 80 bp, synthetic construct
  source 1..80: mol_type = other DNA
ctattttcaccatccttaaagaaaagaaattgcaactaagaattttatattctgccaaactaagcttcataagtaaagaa

SEQ ID NO: 49659 - DNA, 80 bp, synthetic construct
  source 1..80: mol_type = other DNA
attatgcaatcaagccaacataataaccagctaacaacactatgacagaatcaaatcctcacatatcagtattaatcttg

SEQ ID NO: 49660 - DNA, 80 bp, synthetic construct; identical to SEQ ID NO: 16271
  source 1..80: mol_type = other DNA

SEQ ID NO: 49661 - DNA, 80 bp, synthetic construct
  source 1..80: mol_type = other DNA
ttttttttttttttttttttttttttagtagagatgaggtcttaccttgttgccaggctggtcttaaattcctaggctca

SEQ ID NO: 49662 - DNA, 80 bp, synthetic construct
  source 1..80: mol_type = other DNA
atgtgacttctagatttttgcaatttaagtaggcataaaatggtactttgttttagtatttgtctgtgctccttgattct

SEQ ID NO: 49663 - DNA, 80 bp, synthetic construct
  source 1..80: mol_type = other DNA
ttgtaatatctttgtgtggtcttggtattaggttaatgttggcctcaataaatgagataggaagtatttttttctgcttc

SEQ ID NO: 49664 - DNA, 80 bp, synthetic construct
  source 1..80: mol_type = other DNA
tttattcttgtacaaaattgggtagatcgtgtctttcaatatattggtctattttatataggttatcatagttgtaggca

SEQ ID NO: 49665 - DNA, 80 bp, synthetic construct; identical to SEQ ID NO: 16272
  source 1..80: mol_type = other DNA

SEQ ID NO: 49666 - DNA, 80 bp, synthetic construct
  source 1..80: mol_type = other DNA
tcccaaggtggaaacttagatattgattttagcattttcttgttttctaacatatgcattcagtgcaataaatctctaag

SEQ ID NO: 49667 - DNA, 80 bp, synthetic construct
  source 1..80: mol_type = other DNA
tagttaatctccacatattttggtatttttccagttatctttctgttatattctagcttaatttcattgtcatctaagag

SEQ ID NO: 49668 - DNA, 80 bp, synthetic construct; identical to SEQ ID NO: 16273
  source 1..80: mol_type = other DNA

SEQ ID NO: 49669 - DNA, 80 bp, synthetic construct
  source 1..80: mol_type = other DNA
cttgctttagagtctgctgtgtccaaaattaatttagattgtcttgctttgttttggttattgttaccatggaatgtttt

SEQ ID NO: 49670 - DNA, 80 bp, synthetic construct
  source 1..80: mol_type = other DNA
ccccccaacccccaacaggtgctggtgtgtaatgttcccctccctgtgtccatgtgttctcattgttcaactcccactta

SEQ ID NO: 49671 - DNA, 80 bp, synthetic construct
  source 1..80: mol_type = other DNA
ttcaattattgatgggcatttgggttggttccaagtctttgctattgtgaatagtgctgcaataaacatacatgtgcatg

SEQ ID NO: 49672 - DNA, 80 bp, synthetic construct; identical to SEQ ID NO: 16274
  source 1..80: mol_type = other DNA

SEQ ID NO: 49673 - DNA, 80 bp, synthetic construct
  source 1..80: mol_type = other DNA
aggttgcctgttcactctgatgatagtttcttttgctatgcaggagctttttagtttaattagatcccatttgtcaatct

SEQ ID NO: 49674 - DNA, 80 bp, synthetic construct
  source 1..80: mol_type = other DNA
aagaaaggggtccagtttcaattttctgcatatggctagccagttttcccaacatcatatatattaagaagggaatcctt

SEQ ID NO: 49675 - DNA, 80 bp, synthetic construct
  source 1..80: mol_type = other DNA
tcaggaagcatgatgcctccagctttgttctttttgcttaggattgtcttggctatatgggctttttttttttttttttt

SEQ ID NO: 49676 - DNA, 80 bp, synthetic construct; identical to SEQ ID NO: 16275
  source 1..80: mol_type = other DNA

SEQ ID NO: 49677 - DNA, 80 bp, synthetic construct
  source 1..80: mol_type = other DNA
agattttgggctgagacaatggggttttctaaatatacaatcatatcatctgcaaacaaagacaatttgacttcctctct

SEQ ID NO: 49678 - DNA, 80 bp, synthetic construct
  source 1..80: mol_type = other DNA
gtgggtttgttatagatagctcttattattttgagatatattccatcaatacctagtttattgagagattttagcacagc

SEQ ID NO: 49679 - DNA, 80 bp, synthetic construct
  source 1..80: mol_type = other DNA
caagttgtcaggaaacttcctcccctagccaagggaagccacgagggactgtgccctgaggaaaagtgcattctggtcca

SEQ ID NO: 49680 - DNA, 80 bp, synthetic construct; identical to SEQ ID NO: 16276
  source 1..80: mol_type = other DNA

SEQ ID NO: 49681 - DNA, 80 bp, synthetic construct
  source 1..80: mol_type = other DNA
aaagccactaggaactgggtggagcccaccgcagctccacaaagcccctgtagccagactgcctctctagattcctcctc

SEQ ID NO: 49682 - DNA, 80 bp, synthetic construct
  source 1..80: mol_type = other DNA
ggatctcctagcaccattctcaagctctgctaagggacagactgcctccttaagtgggtccctgactcccgtgcctcctg

SEQ ID NO: 49683 - DNA, 80 bp, synthetic construct
  source 1..80: mol_type = other DNA
ggtctggagtggacctccagcaaactccagcagacctgcagctgaggggcctgactgttagaagaaaaacctacaaacag

SEQ ID NO: 49684 - DNA, 80 bp, synthetic construct
  source 1..80: mol_type = other DNA
aaaggatcatgtttacttttaatctatatgtgtttatatatttaaagtgggtttcatgtagacaacatatagttggttct

SEQ ID NO: 49685 - DNA, 80 bp, synthetic construct; identical to SEQ ID NO: 16277
  source 1..80: mol_type = other DNA

SEQ ID NO: 49686 - DNA, 80 bp, synthetic construct
  source 1..80: mol_type = other DNA
cattatgacatgtgtgactgtagttagattagtatctaccatagcggttgggttgcctgggtgtttgcaagataaattta

SEQ ID NO: 49687 - DNA, 80 bp, synthetic construct
  source 1..80: mol_type = other DNA
atttcaattttgtgtcagcatacataatcaaatacattatagatattattttaaaaacagttatgtcttagattaagaat

SEQ ID NO: 49688 - DNA, 80 bp, synthetic construct; identical to SEQ ID NO: 16278
  source 1..80: mol_type = other DNA

SEQ ID NO: 49689 - DNA, 80 bp, synthetic construct
  source 1..80: mol_type = other DNA
tctgtggtttgttgtctgatactaatttggggaaattctcggttgttattgtttcaaatatttctttagtctctatttct

SEQ ID NO: 49690 - DNA, 80 bp, synthetic construct
  source 1..80: mol_type = other DNA
ttaattcatatatcctgaatctcagatatcctgttttcagtcttgtgcagtatactgatgtgtttaccaaaggcattctt

SEQ ID NO: 49691 - DNA, 80 bp, synthetic construct
  source 1..80: mol_type = other DNA
cacagttgttttaaattctcagtccaataaatccaacatcctttctgtatctgagtttggttctgattcttgctctgtct

SEQ ID NO: 49692 - DNA, 80 bp, synthetic construct
  source 1..80: mol_type = other DNA
ctctggactgtaaccttcacaagtgtttttttagtattttttttccttcttggtcagaatgggtttggtagagtgagatg

SEQ ID NO: 49693 - DNA, 80 bp, synthetic construct; identical to SEQ ID NO: 16279
  source 1..80: mol_type = other DNA

SEQ ID NO: 49694 - DNA, 80 bp, synthetic construct
  source 1..80: mol_type = other DNA
atcaattatagtgaaggtatttctaccttgtcactggttcctgtgcagtttctgttcatgagtctctactgctataagct

SEQ ID NO: 49695 - DNA, 80 bp, synthetic construct
  source 1..80: mol_type = other DNA
aaggtttccagagcctagaaaccagaaataccagcatatattttttattgtattttcttatctcatgtcttacagttcta

SEQ ID NO: 49696 - DNA, 80 bp, synthetic construct; identical to SEQ ID NO: 16280
  source 1..80: mol_type = other DNA

SEQ ID NO: 49697 - DNA, 80 bp, synthetic construct
  source 1..80: mol_type = other DNA
tattgatttttgcttatatattttgcatctactaagtgcattattatataaccgttttatcttttaggatgatataattc

SEQ ID NO: 49698 - DNA, 80 bp, synthetic construct
  source 1..80: mol_type = other DNA
agaggtaaattttgaagaaaaatccaaactaaaaattatctatctttaaactagcaattttctacacttatgtttattgt

SEQ ID NO: 49699 - DNA, 80 bp, synthetic construct
  source 1..80: mol_type = other DNA
atgtttgtttccccccaaatttgtatgtcgagtcataatcaccaaggtgattctattagaaggtggagactttggaaagt

SEQ ID NO: 49700 - DNA, 80 bp, synthetic construct; identical to SEQ ID NO: 16281
  source 1..80: mol_type = other DNA

SEQ ID NO: 49701 - DNA, 80 bp, synthetic construct
  source 1..80: mol_type = other DNA
gtttggttgcagtatttttgaggccttatatgcttgagcatatatctctttatagctgagaggctgtttatctcaatgta

SEQ ID NO: 49702 - DNA, 80 bp, synthetic construct
  source 1..80: mol_type = other DNA
tccaaatatgtctgtgttcttacttatctcttgtgttgagcattcaatgggcactctcaacctgcattttttgttttttt

SEQ ID NO: 49703 - DNA, 80 bp, synthetic construct
  source 1..80: mol_type = other DNA
aattatgtatatcttaaccttttacctatatatgctttcaatgttttaaatgaaataaccaattttattttccaattctt

SEQ ID NO: 49704 - DNA, 80 bp, synthetic construct
  source 1..80: mol_type = other DNA
atatattttgtgtatttgtaatgcttaaactcctgttaagtgttttgtaaaacaattactccttatggtgtcttcaaacc

SEQ ID NO: 49705 - DNA, 80 bp, synthetic construct; identical to SEQ ID NO: 16282
  source 1..80: mol_type = other DNA

SEQ ID NO: 49706 - DNA, 80 bp, synthetic construct
  source 1..80: mol_type = other DNA
gattttactctggaggacacatgcaaccaatgtctgaacagtcatactcaatccctgcattgaggtagaaagcactgatt

SEQ ID NO: 49707 - DNA, 80 bp, synthetic construct
  source 1..80: mol_type = other DNA
gtttgtgatttcataatggagacctttgaatgctagaagctaccccctccctttgtaaagaacaacattaggtaaatgat

SEQ ID NO: 49708 - DNA, 80 bp, synthetic construct; identical to SEQ ID NO: 16283
  source 1..80: mol_type = other DNA

SEQ ID NO: 49709 - DNA, 80 bp, synthetic construct
  source 1..80: mol_type = other DNA
atagaattgcctaacgttagttaataacagaaaaaatatcagaaattttaaaaaatgctgtcttaatctattaaaattat

SEQ ID NO: 49710 - DNA, 80 bp, synthetic construct
  source 1..80: mol_type = other DNA
agttcatctgaaatgtattttacagaggtaagaacaagcaacttggtgctcaactctcttcctgctcttcgcctagtgct

SEQ ID NO: 49711 - DNA, 80 bp, synthetic construct
  source 1..80: mol_type = other DNA
gatattcacaaacatcttcatgaacacacgaacataatttcttttgaatcttaccatgaccttctaaaataagtaagcta

SEQ ID NO: 49712 - DNA, 80 bp, synthetic construct; identical to SEQ ID NO: 16284
  source 1..80: mol_type = other DNA

SEQ ID NO: 49713 - DNA, 80 bp, synthetic construct
  source 1..80: mol_type = other DNA
ctgagagctaataataaaatgatatacacagcattctaaccagaaaatcttctaagcaattgtacaattcagataagaag

SEQ ID NO: 49714 - DNA, 80 bp, synthetic construct
  source 1..80: mol_type = other DNA
gcctcagcctcccaagtagctgggactacaggcgcccaccaccacgcccactaattttttgtatttttagtagagacggg

SEQ ID NO: 49715 - DNA, 80 bp, synthetic construct
  source 1..80: mol_type = other DNA
tgttcctgaagggcagggaaaatgtagtggtaatttttcaagatgaattggaagataaagaaagagaggtcacattattt

SEQ ID NO: 49716 - DNA, 80 bp, synthetic construct; identical to SEQ ID NO: 16285
  source 1..80: mol_type = other DNA

SEQ ID NO: 49717 - DNA, 80 bp, synthetic construct
  source 1..80: mol_type = other DNA
aggtaaaaatttctcacattaggctaggtgcgtggctcatgcctgtaatcccagcactttgggaggccaaggcgggcaga

SEQ ID NO: 49718 - DNA, 80 bp, synthetic construct
  source 1..80: mol_type = other DNA
cagtgagccaagaccacgccattgcactccagccttgggggaagagtaagagtctgtctcaagaaaaaaaaaattctcac

SEQ ID NO: 49719 - DNA, 80 bp, synthetic construct
  source 1..80: mol_type = other DNA
attttatttgtcaatcataccttaatatgagaaaataatgttcttcttttccaaagtaaaaagaaattaatagagcaaag

SEQ ID NO: 49720 - DNA, 80 bp, synthetic construct; identical to SEQ ID NO: 16286
  source 1..80: mol_type = other DNA

SEQ ID NO: 49721 - DNA, 80 bp, synthetic construct
  source 1..80: mol_type = other DNA
tgacacgtagaaaaattattttaatacaggtctcatttgaattagataaacttatattctatacctgaataaaaagtaat

SEQ ID NO: 49722 - DNA, 80 bp, synthetic construct
  source 1..80: mol_type = other DNA
ttgagaaaattcctatttggcattatttgctgtgagtttaccaagataatgtttttctccattttaaaaacaatggtcta

SEQ ID NO: 49723 - DNA, 80 bp, synthetic construct
  source 1..80: mol_type = other DNA
caaaccgagagccaaatcaggaaggcaatcccattcacaattgacacaaaaagaataaaatactttgaaatatagctaac

SEQ ID NO: 49724 - DNA, 80 bp, synthetic construct
  source 1..80: mol_type = other DNA
tattaaactaccagcaatattcttcacagaactaaaaaaaaaaaaaaaaaaaactattttgaaattcatacagaaccaaa

SEQ ID NO: 49725 - DNA, 80 bp, synthetic construct; identical to SEQ ID NO: 16287
  source 1..80: mol_type = other DNA

SEQ ID NO: 49726 - DNA, 80 bp, synthetic construct
  source 1..80: mol_type = other DNA
aaaaaccctggaagacaacctaggcaatatcatcctggacataggaatggcaaagatttcatgacaaatgacaccgaaag

SEQ ID NO: 49727 - DNA, 80 bp, synthetic construct
  source 1..80: mol_type = other DNA
aagaaacttaaatttacaagagaaaaacaaacggcctcattaaaatgtaggcaaagggtatgaacagacacttttcaaaa

SEQ ID NO: 49728 - DNA, 80 bp, synthetic construct
  source 1..80: mol_type = other DNA
aaaagtgaacacttatacactgttggtgggagtgtaaattagttcaaccatgtgcaaagcagtgtggcaattcctcaaag

SEQ ID NO: 49729 - DNA, 80 bp, synthetic construct
  source 1..80: mol_type = other DNA
atcaatgacagattggataaagaaaatgtggtacatactatggaatactatgcagccataaaagaacaagatcatgtctt

SEQ ID NO: 49730 - DNA, 80 bp, synthetic construct; identical to SEQ ID NO: 16288
  source 1..80: mol_type = other DNA

SEQ ID NO: 49731 - DNA, 80 bp, synthetic construct
  source 1..80: mol_type = other DNA
tcatagcactttgggatgccgaggtgggcgaatcacttgaggtcgggggtttgagatcagcctggccaacatggtgaaac

SEQ ID NO: 49732 - DNA, 80 bp, synthetic construct
  source 1..80: mol_type = other DNA
tgagactctgcctcaaaaaatacatataaaataaaaaagattttaaataatattataaataaactaaaatttctaggaac

SEQ ID NO: 49733 - DNA, 80 bp, synthetic construct
  source 1..80: mol_type = other DNA
agcaataaaaggaacacttaaaaatattttcttcaatttaattgactatatttttttatttggaaaacaattttaacaca

SEQ ID NO: 49734 - DNA, 80 bp, synthetic construct; identical to SEQ ID NO: 16289
  source 1..80: mol_type = other DNA

SEQ ID NO: 49735 - DNA, 80 bp, synthetic construct
  source 1..80: mol_type = other DNA
tgttccaattccctttatgctttacttcagttttgtttctctagttaaataactttgcatctctaaactttattattctt

SEQ ID NO: 49736 - DNA, 80 bp, synthetic construct
  source 1..80: mol_type = other DNA
gtgaagtgcaggaaagtggtgtgaagttatttttgtgggatatctggtgtaatctttctcttttatctatgttatcaaat

SEQ ID NO: 49737 - DNA, 80 bp, synthetic construct
  source 1..80: mol_type = other DNA
ttatacttatttacttcagatattgcaaatttttcttatttttataccttctttcttttaatgacatttcctatattttc

SEQ ID NO: 49738 - DNA, 80 bp, synthetic construct
  source 1..80: mol_type = other DNA
tcttcataagtgggtaattttgaacactgttatattatttcaaagggtgttatttgtttgttcagatgttttacaaagta

SEQ ID NO: 49739 - DNA, 80 bp, synthetic construct; identical to SEQ ID NO: 16290
  source 1..80: mol_type = other DNA

SEQ ID NO: 49740 - DNA, 80 bp, synthetic construct
  source 1..80: mol_type = other DNA
acaaacattcattctatgacagatggtaatcgaagcaaagacaatgaatgggtttgcccagcaagagtatgtagagtaaa

SEQ ID NO: 49741 - DNA, 80 bp, synthetic construct
  source 1..80: mol_type = other DNA
atgtaacagccagaataacatgatctaaggatacttgggaggaattatgcaaaaaataggatttgagtcatgcaggcaaa

SEQ ID NO: 49742 - DNA, 80 bp, synthetic construct; identical to SEQ ID NO: 16291
  source 1..80: mol_type = other DNA

SEQ ID NO: 49743 - DNA, 80 bp, synthetic construct
  source 1..80: mol_type = other DNA
ccttgtgtgtctgtaagcttgttatacacttttcatctctactcttttttattttctgaagtcagctttctaacagatct

SEQ ID NO: 49744 - DNA, 80 bp, synthetic construct
  source 1..80: mol_type = other DNA
tccgtgttatttcacttcttaggggcttttcatgtgcttcctattttgttttaagtattttgtgtcttcaatatctaagc

SEQ ID NO: 49745 - DNA, 80 bp, synthetic construct
  source 1..80: mol_type = other DNA
gctgctgaagattataattttcagtgcattgattatgtcttatttgtttttactgcccttgttcctgttcctctgtacct

SEQ ID NO: 49746 - DNA, 80 bp, synthetic construct
  source 1..80: mol_type = other DNA
taataaattaatgaccgatctgccatgattgcaggcaagtagagactttatttcttatctcaatgtcagttgtctctttc

SEQ ID NO: 49747 - DNA, 80 bp, synthetic construct; identical to SEQ ID NO: 16292
  source 1..80: mol_type = other DNA

SEQ ID NO: 49748 - DNA, 80 bp, synthetic construct
  source 1..80: mol_type = other DNA
ggagtctttgggagctaaagagatcatgagaaatttgctcttataatgtgagtagtgccttacaagaaaatgctggagag

SEQ ID NO: 49749 - DNA, 80 bp, synthetic construct
  source 1..80: mol_type = other DNA
cgttccatcataatttgtgatagcagtctgaactgacttagacaaaagttcaacagcaaatttgagcagttagaacacag

SEQ ID NO: 49750 - DNA, 80 bp, synthetic construct; identical to SEQ ID NO: 16293
  source 1..80: mol_type = other DNA

SEQ ID NO: 49751 - DNA, 80 bp, synthetic construct
  source 1..80: mol_type = other DNA
aaataaattcagaatcttgacagcaacaagagtaggaaataatcatgggcaagagttccttaataagattaacaactgat

SEQ ID NO: 49752 - DNA, 80 bp, synthetic construct
  source 1..80: mol_type = other DNA
acaacaaatgagcatgtggaaaaatgctccacatcccgtcattagggaattgtaaattaaacaataagctatgtcactgt

SEQ ID NO: 49753 - DNA, 80 bp, synthetic construct
  source 1..80: mol_type = other DNA
ttaccatacaatcaagcatttgtagtccttggtatttactgaaataagtatcaagtggaaagcatgtctacacaacagcc

SEQ ID NO: 49754 - DNA, 80 bp, synthetic construct
  source 1..80: mol_type = other DNA
aaagacatgaaacattaaaagtatatttataagtaaaagaacgcaatattaaaatgttacctactatatgattccaacta

SEQ ID NO: 49755 - DNA, 80 bp, synthetic construct
  source 1..80: mol_type = other DNA
taataaaatgtgacaatgaaaatttagctgagtataaaagaacctaaattagtagacagtgagagaggaatgggggaggg

SEQ ID NO: 49756 - DNA, 80 bp, synthetic construct
  source 1..80: mol_type = other DNA
actctggcactttaaacatatccagtaggagaggttaattctctcagcaggagaccactcacattacttttttctcccta

SEQ ID NO: 49757 - DNA, 80 bp, synthetic construct
  source 1..80: mol_type = other DNA
gatctcttgaactttttcattttccattgctgaaactttgtatccactaaactatcttctcctcagttctaagtaagtac

SEQ ID NO: 49758 - DNA, 80 bp, synthetic construct
  source 1..80: mol_type = other DNA
tcaagcgattctcctgcctcagcctcccaagtagctgggattacaggtgactaccaccatgcgcaggtaatttttttttt

SEQ ID NO: 49759 - DNA, 80 bp, synthetic construct; identical to SEQ ID NO: 16294
  source 1..80: mol_type = other DNA

SEQ ID NO: 49760 - DNA, 80 bp, synthetic construct
  source 1..80: mol_type = other DNA
tgggttgcttctacatcttggccgttgttaataatgctgcatgaatatgcatgtacaaatatctctgctagatcctgttt

SEQ ID NO: 49761 - DNA, 80 bp, synthetic construct
  source 1..80: mol_type = other DNA
atcaacaaacatgaagttcctaacttctcttactcgttattttctattcttgaaatagtggcttttctgatggttgtggg

SEQ ID NO: 49762 - DNA, 80 bp, synthetic construct
  source 1..80: mol_type = other DNA
tggaaaagtccatatattctagatattaactcctcatcacttatattatttgcatttattctgtgccattccataggtta

SEQ ID NO: 49763 - DNA, 80 bp, synthetic construct
  source 1..80: mol_type = other DNA
cctgtgctttttgtatcacattttaaaaattgccaaattgaatgtcctgaagcttttcttttatttttttctggaagttt

SEQ ID NO: 49764 - DNA, 80 bp, synthetic construct; identical to SEQ ID NO: 16295
  source 1..80: mol_type = other DNA

SEQ ID NO: 49765 - DNA, 80 bp, synthetic construct
  source 1..80: mol_type = other DNA
gtattcccataatgcatatgttgccctgctggatggagtcccataatttctttaggctcttcttttctttttgctcctgt

SEQ ID NO: 49766 - DNA, 80 bp, synthetic construct
  source 1..80: mol_type = other DNA
ttgctattttgtttatttgttatgttcctcatttcatttaattgtctgttcatattctcttttaattcattgcactactt

SEQ ID NO: 49767 - DNA, 80 bp, synthetic construct; identical to SEQ ID NO: 16296
  source 1..80: mol_type = other DNA

SEQ ID NO: 49768 - DNA, 80 bp, synthetic construct
  source 1..80: mol_type = other DNA
ctccacctcgtgtctctgtctggaactgcagtttttggtgtacctttgcttgcaaagaccgcatttttattagtacttga

SEQ ID NO: 49769 - DNA, 80 bp, synthetic construct
  source 1..80: mol_type = other DNA
ttgttttcacgatagcctggaggtacagaaaccttgtaattggttctgaagttctcacagaggcatttagtacatatgtt

SEQ ID NO: 49770 - DNA, 80 bp, synthetic construct
  source 1..80: mol_type = other DNA
tttttacaagatgttagaattgactatctttgaagaaaatcttcataatttttgtctaactctgttgcccctttctcctg

SEQ ID NO: 49771 - DNA, 80 bp, synthetic construct; identical to SEQ ID NO: 16297
  source 1..80: mol_type = other DNA

SEQ ID NO: 49772 - DNA, 80 bp, synthetic construct
  source 1..80: mol_type = other DNA
tgatggggctaatattctgctgtggcaatataaaataaactcataaaggaataaatgtattgtgagcagaaaggggtgca

SEQ ID NO: 49773 - DNA, 80 bp, synthetic construct
  source 1..80: mol_type = other DNA
ctggaatgctcaatatacagcaacaaggtctaatgtagctggagaggaatgaccaaggacaagagtaacaaagtataaga

SEQ ID NO: 49774 - DNA, 80 bp, synthetic construct; identical to SEQ ID NO: 16298
  source 1..80: mol_type = other DNA

SEQ ID NO: 49775 - DNA, 80 bp, synthetic construct
  source 1..80: mol_type = other DNA
tctggcataattgagttctgataagggccctattcctggtttccagaaggccatatcctcattgtgtcatcacttggggg

SEQ ID NO: 49776 - DNA, 80 bp, synthetic construct
  source 1..80: mol_type = other DNA
tataaatttgaggtaggggatataaagatgtaatacataacagggtaaatattaatagtagagagcccaaagaaatttgt

SEQ ID NO: 49777 - DNA, 80 bp, synthetic construct
  source 1..80: mol_type = other DNA
tggtcatagaatttttctttgcctctgcaaagttctgtttttcagctggcttcctggaaatgctgcctttgagaatgtac

SEQ ID NO: 49778 - DNA, 80 bp, synthetic construct
  source 1..80: mol_type = other DNA
ataaccaaattagaaatgatgctttatcagtgtagtgataataacatttaaatggctgagtagtagtacctggtaaaagg

SEQ ID NO: 49779 - DNA, 80 bp, synthetic construct; identical to SEQ ID NO: 16299
  source 1..80: mol_type = other DNA

SEQ ID NO: 49780 - DNA, 80 bp, synthetic construct
  source 1..80: mol_type = other DNA
gtaaatttatctctcacaggcaatttggcaataactaaaaacatttgtggttgtcataactgcacaggggttgggggcaa

SEQ ID NO: 49781 - DNA, 80 bp, synthetic construct
  source 1..80: mol_type = other DNA
cacaaattcattttttgcaaactaacgccatgtcatactttacctcccctctctcaagatgaagaaactttgggagagga

SEQ ID NO: 49782 - DNA, 80 bp, synthetic construct
  source 1..80: mol_type = other DNA
tatgttggatttctccaataacagctcagggaaaacattttctggttcatatttgtgtttttccctattagtaatttttt

SEQ ID NO: 49783 - DNA, 80 bp, synthetic construct; identical to SEQ ID NO: 16300
  source 1..80: mol_type = other DNA

SEQ ID NO: 49784 - DNA, 80 bp, synthetic construct
  source 1..80: mol_type = other DNA
attagaagtggtcatgactttttttttttttttttttgagacggagtctcgctctgtcgcccaggctgtagtgcagtggt

SEQ ID NO: 49785 - DNA, 80 bp, synthetic construct
  source 1..80: mol_type = other DNA
tgatccacccacctcagcctcctaaagtgctgggattacaggtgtgagccaccatgcctggcctctggaagttcttaatt

SEQ ID NO: 49786 - DNA, 80 bp, synthetic construct
  source 1..80: mol_type = other DNA
atattaagaataaataaagaaacgcatgaaggagcaccttaccctcatcaggaagattcatctccatttttcttcattcc

SEQ ID NO: 49787 - DNA, 80 bp, synthetic construct; identical to SEQ ID NO: 16301
  source 1..80: mol_type = other DNA

SEQ ID NO: 49788 - DNA, 80 bp, synthetic construct
  source 1..80: mol_type = other DNA
agttaattggaatcggttgtttcattatgggaattggaggtgttttgactgctttgccacatttcttcatgggatagtaa

SEQ ID NO: 49789 - DNA, 80 bp, synthetic construct
  source 1..80: mol_type = other DNA
ataggcagttaccttttgagaagatacccactaagtgtgtacagaaatgaaatagtgtctatttgtctacataatcattt

SEQ ID NO: 49790 - DNA, 80 bp, synthetic construct
  source 1..80: mol_type = other DNA
cacctatacccactgaagtatagttgttcccatcatttcactgaagctgttattcctaaggtcactgtgtagttataatt

SEQ ID NO: 49791 - DNA, 80 bp, synthetic construct; identical to SEQ ID NO: 16302
  source 1..80: mol_type = other DNA

SEQ ID NO: 49792 - DNA, 80 bp, synthetic construct
  source 1..80: mol_type = other DNA
agagaggatattaggagacaatgagcagtttctgttagagacaccaattacttactcattgccaaatccagcaatgacat

SEQ ID NO: 49793 - DNA, 80 bp, synthetic construct
  source 1..80: mol_type = other DNA
tctttgtgtcttcttcatcatgtccattttttttcatctgcttttggcaccataccgtcagagtcctctaatttcctttt

SEQ ID NO: 49794 - DNA, 80 bp, synthetic construct
  source 1..80: mol_type = other DNA
tctacagccttgaatacctttgtttctttgtctacccttctattcatcttccagattcgttttacctgtcattctcatgt

SEQ ID NO: 49795 - DNA, 80 bp, synthetic construct; identical to SEQ ID NO: 16303
  source 1..80: mol_type = other DNA

SEQ ID NO: 49796 - DNA, 80 bp, synthetic construct
  source 1..80: mol_type = other DNA
gaagagtcatacattagagcgtgtgtgtgaatatgtgtccatgaaagaaaatctgacagactgatcatctttgaagataa

SEQ ID NO: 49797 - DNA, 80 bp, synthetic construct
  source 1..80: mol_type = other DNA
cttccatttcacttttacccatcacatctcttaaaacacatgctgggaaattgacagaaagtactctggtaatttgggga

SEQ ID NO: 49798 - DNA, 80 bp, synthetic construct
  source 1..80: mol_type = other DNA
tccacttgtttaattaatcaaattttatcactcaatagagcatcacctgagatagtgggaaaaggtaagaattaatattg

SEQ ID NO: 49799 - DNA, 80 bp, synthetic construct; identical to SEQ ID NO: 16304
  source 1..80: mol_type = other DNA

SEQ ID NO: 49800 - DNA, 80 bp, synthetic construct
  source 1..80: mol_type = other DNA
tcaataggaaattgacaaagaatatatgcattaaagtaaaacagaaggaaatggtataaatatgtaaataatataacttt

SEQ ID NO: 49801 - DNA, 80 bp, synthetic construct
  source 1..80: mol_type = other DNA
aggatttcacattgtatatattgctggaagtgtatacgtttgtaaatctttctggagattcattatcaatatatgttaag

SEQ ID NO: 49802 - DNA, 80 bp, synthetic construct
  source 1..80: mol_type = other DNA
taaacacatttggaaacttattcagcacattactgtccagtcattaaagttttgatattaaagaaatcttaacaacatgg

SEQ ID NO: 49803 - DNA, 80 bp, synthetic construct; identical to SEQ ID NO: 16305
  source 1..80: mol_type = other DNA

SEQ ID NO: 49804 - DNA, 80 bp, synthetic construct
  source 1..80: mol_type = other DNA
tgaggccccccagccatgaggaactatgagtccattagacccttttcctttataaattacccagtctcaggtatgtattt

SEQ ID NO: 49805 - DNA, 80 bp, synthetic construct
  source 1..80: mol_type = other DNA
aaacactctcttatctacataggttgtttaaaggaatctgggtcatacatgtggatatatgtgttcatgggtaatatgct

SEQ ID NO: 49806 - DNA, 80 bp, synthetic construct; identical to SEQ ID NO: 16306
  source 1..80: mol_type = other DNA

SEQ ID NO: 49807 - DNA, 80 bp, synthetic construct
  source 1..80: mol_type = other DNA
acgtggatattggatatgtagatctaagtaagtacaaccagaacaaggtaccatgataacgtctttctaagcacacatgc

SEQ ID NO: 49808 - DNA, 80 bp, synthetic construct
  source 1..80: mol_type = other DNA
aatgtaaacaaatttattttcatgagcttggtccaaaataaccaaatgtaaaatgtctccctcccaaactgactgtccag

SEQ ID NO: 49809 - DNA, 80 bp, synthetic construct
  source 1..80: mol_type = other DNA
agcagagggcttggcgtatggcaatgttcagtaagtacttgttgaacaaaggaataaagcagaggacacataaataaaat

SEQ ID NO: 49810 - DNA, 80 bp, synthetic construct; identical to SEQ ID NO: 16307
  source 1..80: mol_type = other DNA

SEQ ID NO: 49811 - DNA, 80 bp, synthetic construct
  source 1..80: mol_type = other DNA
gcacctaggaaaatatcagctaaattagctaagatatctcaccttctcacctcccatccacttctaaatccagtataatc

SEQ ID NO: 49812 - DNA, 80 bp, synthetic construct
  source 1..80: mol_type = other DNA
aaatctgatctcatcaccttacctccaaccccactgtattccctatattcctccttttgatgaatatccataccttattc

SEQ ID NO: 49813 - DNA, 80 bp, synthetic construct
  source 1..80: mol_type = other DNA
cttagagaagccttacttcaccactttccattagtctcaaattaatagccaagagcatgcctttattgtaacccttctca

SEQ ID NO: 49814 - DNA, 80 bp, synthetic construct; identical to SEQ ID NO: 16308
  source 1..80: mol_type = other DNA

SEQ ID NO: 49815 - DNA, 80 bp, synthetic construct
  source 1..80: mol_type = other DNA
ttctactcattcaactccagtttcatcactgctttatcacgaagagtacagaaatacgtggtaaatgtccttaggttaat

SEQ ID NO: 49816 - DNA, 80 bp, synthetic construct
  source 1..80: mol_type = other DNA
aaaggagctgaagacataaaaataaatgagtaaagagtgccaggaacaggaatttagggtgtgatggttagaataggaga

SEQ ID NO: 49817 - DNA, 80 bp, synthetic construct
  source 1..80: mol_type = other DNA
ttcaatttttaagactgtgagtgagccaagaaaaactttttctcacgtcctatctagcgcgattatgacccttagttact

SEQ ID NO: 49818 - DNA, 80 bp, synthetic construct
  source 1..80: mol_type = other DNA
atttaaacccagatctgtgcatacttgaaaataattatttctaggtagtttgttatcaagtcaatgttatcttatattag

SEQ ID NO: 49819 - DNA, 80 bp, synthetic construct; identical to SEQ ID NO: 16309
  source 1..80: mol_type = other DNA

SEQ ID NO: 49820 - DNA, 80 bp, synthetic construct
  source 1..80: mol_type = other DNA
ctattataagaaattaaacttattagagggtacaagatggccaactagacacactcaggaagcaccacttccactgagga

SEQ ID NO: 49821 - DNA, 80 bp, synthetic construct
  source 1..80: mol_type = other DNA
gtggctcctagctaaggggtgagtaaagtggcagtgggacagcctactctcactgttgacatctgggatcctacctacaa

SEQ ID NO: 49822 - DNA, 80 bp, synthetic construct; identical to SEQ ID NO: 16310
  source 1..80: mol_type = other DNA

SEQ ID NO: 49823 - DNA, 80 bp, synthetic construct
  source 1..80: mol_type = other DNA
cagcctccactgctcagcctgagggttttttcaaggacccccacctgagtacttcctcagtatccttggagcacttcaga

SEQ ID NO: 49824 - DNA, 80 bp, synthetic construct
  source 1..80: mol_type = other DNA
ggggtgagatgcacgggttcatgggccagtgcagaatgagacatgcctcatttcataggcccagtccaggaaggctgtgt

SEQ ID NO: 49825 - DNA, 80 bp, synthetic construct
  source 1..80: mol_type = other DNA
cccgctgccacaagcactgttgtaaacacactgaaaaacaaaagagttatgtccccgagtaacagcttatctgccagcca

SEQ ID NO: 49826 - DNA, 80 bp, synthetic construct
  source 1..80: mol_type = other DNA
cagcctcaagctcctaggctcaagccattctcccacctcagccttctgagtagctgggactacaggcacacaccactaca

SEQ ID NO: 49827 - DNA, 80 bp, synthetic construct; identical to SEQ ID NO: 16311
  source 1..80: mol_type = other DNA

SEQ ID NO: 49828 - DNA, 80 bp, synthetic construct
  source 1..80: mol_type = other DNA
gcaattcaaaaagtaagaatgtaccttaaccttcaaatgggtgcatttgagctctccagcgatggttcttaaccacattg

SEQ ID NO: 49829 - DNA, 80 bp, synthetic construct
  source 1..80: mol_type = other DNA
ggaattaaaaaaaatactacatggatttgataatacatccagacctttagcaacagaacataccaaagagagaaaagaat

SEQ ID NO: 49830 - DNA, 80 bp, synthetic construct
  source 1..80: mol_type = other DNA
aaacttctaggaatttggtttccttctgtaaagaaaccaagcctatgattcattggaattcctgagagagaaaaagagag

SEQ ID NO: 49831 - DNA, 80 bp, synthetic construct; identical to SEQ ID NO: 16312
  source 1..80: mol_type = other DNA

SEQ ID NO: 49832 - DNA, 80 bp, synthetic construct
  source 1..80: mol_type = other DNA
caagcaaacattgaggaaatttcttatcactaaaccagccttataacaggtctctagaagagtgctaaacatggaaacaa

SEQ ID NO: 49833 - DNA, 80 bp, synthetic construct
  source 1..80: mol_type = other DNA
cccaagtaaaagacactgagtgacaagcttcataagtagacaaaacttagccttctgttgtctttaaaagacacatctta

SEQ ID NO: 49834 - DNA, 80 bp, synthetic construct; identical to SEQ ID NO: 16313
  source 1..80: mol_type = other DNA

SEQ ID NO: 49835 - DNA, 80 bp, synthetic construct
  source 1..80: mol_type = other DNA
ctcatctgcatatagattgtattctaaaatcaatcatatgctcagtcataaagtctcaatacattcaaaaaattaaaaga

SEQ ID NO: 49836 - DNA, 80 bp, synthetic construct
  source 1..80: mol_type = other DNA
gacacacctcactaaaatctttgggatctatctaaagcagtgttaagaggaagtttacaatgctaaaggccttcatcaag

SEQ ID NO: 49837 - DNA, 80 bp, synthetic construct
  source 1..80: mol_type = other DNA
tcaaaagaatacaaaaagattaatagactgttaactagattaacaaggaaaaaaaggagacccaattaagcacaatcgga

SEQ ID NO: 49838 - DNA, 80 bp, synthetic construct
  source 1..80: mol_type = other DNA
tcaaattgaattagtaataaaaaacctactgaccaaaaaaaaagccctggaccagatggattctcagccaaattctacta

SEQ ID NO: 49839 - DNA, 80 bp, synthetic construct; identical to SEQ ID NO: 16314
  source 1..80: mol_type = other DNA

SEQ ID NO: 49840 - DNA, 80 bp, synthetic construct
  source 1..80: mol_type = other DNA
cttaaaacaccatgtgacactaattatctccacatgaacagttcctctctccaataaattgcggattgcagcaaaatctg

SEQ ID NO: 49841 - DNA, 80 bp, synthetic construct
  source 1..80: mol_type = other DNA
taatgcagattgaggtcttcagctgcccattgtttcaatacaaatgaatccagcataaagatcattgtaaaaaacaaaaa

SEQ ID NO: 49842 - DNA, 80 bp, synthetic construct
  source 1..80: mol_type = other DNA
gtgatttgagaaaaagtgaagttattatatgaccatttaaagcaaaggaaggtgagggatctaaaactggagaaactaat

SEQ ID NO: 49843 - DNA, 80 bp, synthetic construct; identical to SEQ ID NO: 16315
  source 1..80: mol_type = other DNA

SEQ ID NO: 49844 - DNA, 80 bp, synthetic construct
  source 1..80: mol_type = other DNA
tctgaacaattagtactctttttcagaattgtttccatcaatgccttgttcctgaagacaggaagtagcttgacagtaag

SEQ ID NO: 49845 - DNA, 80 bp, synthetic construct
  source 1..80: mol_type = other DNA
gcctctagatcatggagtcataagaaactttaaaggatcattacagatgatactctaacgaaaggattatcagtgctatc

SEQ ID NO: 49846 - DNA, 80 bp, synthetic construct
  source 1..80: mol_type = other DNA
ccagagaaaattttgttcagatgttgtgcataaattcataggattaacaacatggccaatcaagaaaattatgaaagaga

SEQ ID NO: 49847 - DNA, 80 bp, synthetic construct; identical to SEQ ID NO: 16316
  source 1..80: mol_type = other DNA

SEQ ID NO: 49848 - DNA, 80 bp, synthetic construct
  source 1..80: mol_type = other DNA
aattatggcgtatttatgaaatagttactgaatgtacttgcctcttttgccttccctctacctcctccacctcttccacc

SEQ ID NO: 49849 - DNA, 80 bp, synthetic construct
  source 1..80: mol_type = other DNA
acatacaaaacatgtgttaatcaactgtttatgttattggtaaggattctgatcaacagtagctggtatgatttggatct

SEQ ID NO: 49850 - DNA, 80 bp, synthetic construct; identical to SEQ ID NO: 16317
  source 1..80: mol_type = other DNA

SEQ ID NO: 49851 - DNA, 80 bp, synthetic construct
  source 1..80: mol_type = other DNA
gttttatgttcctcacatgaatgtaatcatgtagtatatgtccttctgtaactggttcattttgcctaatgtcctcaaag

SEQ ID NO: 49852 - DNA, 80 bp, synthetic construct
  source 1..80: mol_type = other DNA
tttacagctagctattatgaatagtgctgcaatgaacgtgcaaatgcaaatggtctcttcaagataatgatttcaattct

SEQ ID NO: 49853 - DNA, 80 bp, synthetic construct
  source 1..80: mol_type = other DNA
taccgtgttcaaatatctccacattcttgcaaacactttctttcttaaatgatagccattctacaggtgtaaggtgtagg

SEQ ID NO: 49854 - DNA, 80 bp, synthetic construct
  source 1..80: mol_type = other DNA
ctctcactctgtcacccaggctggagtgcagttgtgtgatctcagctcactgcaatctctgcctgccaggttccagtgat

SEQ ID NO: 49855 - DNA, 80 bp, synthetic construct; identical to SEQ ID NO: 16318
  source 1..80: mol_type = other DNA

SEQ ID NO: 49856 - DNA, 80 bp, synthetic construct
  source 1..80: mol_type = other DNA
gcaattttttcctcctaattgtaattatgtatgctttgaccagtatctcctcatgtgggagatcagtcagagtggtggaa

SEQ ID NO: 49857 - DNA, 80 bp, synthetic construct
  source 1..80: mol_type = other DNA
ctgttctcttaccctgaggcagagcacaagaaataggtataaggaagtataggggaatttatctaaataggcttgtctac

SEQ ID NO: 49858 - DNA, 80 bp, synthetic construct; identical to SEQ ID NO: 16319
  source 1..80: mol_type = other DNA

SEQ ID NO: 49859 - DNA, 80 bp, synthetic construct
  source 1..80: mol_type = other DNA
gtagatgttgtttttcgttacatgggtgaattctataatgataaattttgatattttacatacctgagtaatgtacattg

SEQ ID NO: 49860 - DNA, 80 bp, synthetic construct
  source 1..80: mol_type = other DNA
cttcacttagaataatgtcctccagttccatccaagttcctgcaaaatttttcatcgttattatttttttgctattgagt

SEQ ID NO: 49861 - DNA, 80 bp, synthetic construct
  source 1..80: mol_type = other DNA
ttaattactatagctttaaaatacattttgtaattaggaaatatgaggcagctttattctttctcaatgcttttttggct

SEQ ID NO: 49862 - DNA, 80 bp, synthetic construct
  source 1..80: mol_type = other DNA
tgtctttctaattatttatggcttctttatttcctcagtgtcttgaagtatttcatgcacaagtctttcaccttcttaaa

SEQ ID NO: 49863 - DNA, 80 bp, synthetic construct; identical to SEQ ID NO: 16320
  source 1..80: mol_type = other DNA

SEQ ID NO: 49864 - DNA, 80 bp, synthetic construct
  source 1..80: mol_type = other DNA
aatagaagtgatgagaatggccattcttcctttgttcctgaaagctttctgtttttcactcttgaatttaatgctagctg

SEQ ID NO: 49865 - DNA, 80 bp, synthetic construct
  source 1..80: mol_type = other DNA
acattacgcttggtgatatttgttaaacttagcatttcaggtataaatcccccttgaatatagtgtagtatcctttttat

SEQ ID NO: 49866 - DNA, 80 bp, synthetic construct; identical to SEQ ID NO: 16321
  source 1..80: mol_type = other DNA

SEQ ID NO: 49867 - DNA, 80 bp, synthetic construct
  source 1..80: mol_type = other DNA
ctcttttgcttagtctagtttaaagtttgtcaattttgcctctctttcaaaaagatcaacacttagttgtgttgatattt

SEQ ID NO: 49868 - DNA, 80 bp, synthetic construct
  source 1..80: mol_type = other DNA
aattatgtgatatttatcagtgtgtactgagagcaaacaatgccagatgctactagtgaccataaattagagaaataacc

SEQ ID NO: 49869 - DNA, 80 bp, synthetic construct
  source 1..80: mol_type = other DNA
tttgacaatttaattattgaaaagtttgttagtatccatatttttaaaattttctacttttctttttgatactaatttcc

SEQ ID NO: 49870 - DNA, 80 bp, synthetic construct; identical to SEQ ID NO: 16322
  source 1..80: mol_type = other DNA

SEQ ID NO: 49871 - DNA, 80 bp, synthetic construct
  source 1..80: mol_type = other DNA
accattgttcacagataccaagagatgattttattgtatttctctatatttctcttttcagttctgtccatgtttgcttt

SEQ ID NO: 49872 - DNA, 80 bp, synthetic construct
  source 1..80: mol_type = other DNA
caaacttgtatgctctgcttcccctttaaatataactttcaactttaggtcatttctttgctctcatatctgagcattgc

SEQ ID NO: 49873 - DNA, 80 bp, synthetic construct
  source 1..80: mol_type = other DNA
aggctggagtgcagtggtgcgatctcggctcactacaagctccacctcccaggttcacactattctcctgtttctgcctc

SEQ ID NO: 49874 - DNA, 80 bp, synthetic construct; identical to SEQ ID NO: 16323
  source 1..80: mol_type = other DNA

SEQ ID NO: 49875 - DNA, 80 bp, synthetic construct
  source 1..80: mol_type = other DNA
gcctattttattttctatagcctcataacagaggtgagactagtgattttagagccacacttcctggcttctgtttttat

SEQ ID NO: 49876 - DNA, 80 bp, synthetic construct
  source 1..80: mol_type = other DNA
ctgcattttggtcataatcatttatcagtttccaagaagtttcaaactttccttcattttcttatcttcttctgagtcct

SEQ ID NO: 49877 - DNA, 80 bp, synthetic construct
  source 1..80: mol_type = other DNA
aaagaggtttaattggcttatgattctgcaagctgtacaggcatggcactggcattatctcagattctgaggagacccca

SEQ ID NO: 49878 - DNA, 80 bp, synthetic construct; identical to SEQ ID NO: 16324
  source 1..80: mol_type = other DNA

SEQ ID NO: 49879 - DNA, 80 bp, synthetic construct
  source 1..80: mol_type = other DNA
agaagcccgtcacttggtcaactcccagaaaattttgaatatttcacatgctatccaattttttccttcccaaggagaat

SEQ ID NO: 49880 - DNA, 80 bp, synthetic construct
  source 1..80: mol_type = other DNA
aatttaagccaccatttttgtgctctttgtagcccattggaagcaagcatatgcctagccccaagataggcaagacaatg

SEQ ID NO: 49881 - DNA, 80 bp, synthetic construct
  source 1..80: mol_type = other DNA
catactagttcaagctgccttctttattttccgtagcctccaaaggtctggtatatgctgagtcctgtcaacacttcaag

SEQ ID NO: 49882 - DNA, 80 bp, synthetic construct; identical to SEQ ID NO: 16325
  source 1..80: mol_type = other DNA

SEQ ID NO: 49883 - DNA, 80 bp, synthetic construct
  source 1..80: mol_type = other DNA
tgaaagaaaaaagggtccagtccttcctattaggctatcttgctgataactcatattggctttttttattacttagattg

SEQ ID NO: 49884 - DNA, 80 bp, synthetic construct
  source 1..80: mol_type = other DNA
tttcactgtattttcttatcctctgtgctgtcaggagagttggaaatgcttatttcaggcatggtgggaagcccctttat

SEQ ID NO: 49885 - DNA, 80 bp, synthetic construct
  source 1..80: mol_type = other DNA
aaactgtccagtcatgtaatcagaaaagccatcaagtgcacacaagctcaggcaatgacaacaatatcatgactgattcc

SEQ ID NO: 49886 - DNA, 80 bp, synthetic construct; identical to SEQ ID NO: 16326
  source 1..80: mol_type = other DNA

SEQ ID NO: 49887 - DNA, 80 bp, synthetic construct
  source 1..80: mol_type = other DNA
tggaaacaaatgatgaaaaggatcaaacagctaatttgaccaatcaaggaaaaaatattaccaaaaatgtgactggtaag

SEQ ID NO: 49888 - DNA, 80 bp, synthetic construct
  source 1..80: mol_type = other DNA
tatgtcttgagcacataacaagtggaagagaattaggtttgtactttttagcagggagaaaccaacaaaagtttacaaac

SEQ ID NO: 49889 - DNA, 80 bp, synthetic construct
  source 1..80: mol_type = other DNA
caagaacctagtgggtgatgctgagaaatatatagacaatagcaatatagtgccttaagtattatggtgaaattaaactt

SEQ ID NO: 49890 - DNA, 80 bp, synthetic construct; identical to SEQ ID NO: 16327
  source 1..80: mol_type = other DNA

SEQ ID NO: 49891 - DNA, 80 bp, synthetic construct
  source 1..80: mol_type = other DNA
tgcaacacttaaaccctcagcatctttttcaagttttctttaaagtaagatgacaaattctccagtgtagcctaggttct

SEQ ID NO: 49892 - DNA, 80 bp, synthetic construct
  source 1..80: mol_type = other DNA
tttcagctacattggtaggttgaaattgttcatggcaagagaattaccatgatttattaccatggaaattgggatatact

SEQ ID NO: 49893 - DNA, 80 bp, synthetic construct
  source 1..80: mol_type = other DNA
tataaggagcggggttgactgtgatccaaacagaacagagaggataatgaagttgtaaaaataggacaattgtagacata

SEQ ID NO: 49894 - DNA, 80 bp, synthetic construct
  source 1..80: mol_type = other DNA
tgatttcagttcattacaaaaacagtgtgtaaacaatgagaacttttcaaaagtggaggaaattgcttcctaaggtactt

SEQ ID NO: 49895 - DNA, 80 bp, synthetic construct; identical to SEQ ID NO: 16328
  source 1..80: mol_type = other DNA

SEQ ID NO: 49896 - DNA, 80 bp, synthetic construct
  source 1..80: mol_type = other DNA
atgactggggagacctgtggagagaaatgtggcacttttgcccaagaattttaaatgttgtttattcccactatacattt

SEQ ID NO: 49897 - DNA, 80 bp, synthetic construct
  source 1..80: mol_type = other DNA
caaagtccgtatcatccaactctcagtaaccatatcttggctctgtcttgatgaactctgatacttcctactgtttttct

SEQ ID NO: 49898 - DNA, 80 bp, synthetic construct
  source 1..80: mol_type = other DNA
gacacaatattatcccctggctgctttccttgtatcttaagacagagggttaataatattgccaaatttactgagaaagt

SEQ ID NO: 49899 - DNA, 80 bp, synthetic construct
  source 1..80: mol_type = other DNA
cttatatcattaagtactaataaataagaaacatcatatgtcttattcactttttgtttgtttgtttttgggtttttttg

SEQ ID NO: 49900 - DNA, 80 bp, synthetic construct; identical to SEQ ID NO: 16329
  source 1..80: mol_type = other DNA

SEQ ID NO: 49901 - DNA, 80 bp, synthetic construct
  source 1..80: mol_type = other DNA
ttgcaatagtattgtaaagtacccaggataaccaaatattaagtgaagaaagcaagttacaaaacagcacttacgtatga

SEQ ID NO: 49902 - DNA, 80 bp, synthetic construct
  source 1..80: mol_type = other DNA
tgtgaacagcctgtggtattgcaggctattctcactctttgtgttatgtgtttatagaattttaaatcttacatgactta

SEQ ID NO: 49903 - DNA, 80 bp, synthetic construct
  source 1..80: mol_type = other DNA
attggtgcttttacttatgtcttcaaatacgtagagcaacagtatggtcagccttcatctaaggctaacatcttattggg

SEQ ID NO: 49904 - DNA, 80 bp, synthetic construct
  source 1..80: mol_type = other DNA
gtgatgtcactattgctctgcatttgaagttgcatcttattttagatgagttcctgaaaaaaatgttgcaaataaatgga

SEQ ID NO: 49905 - DNA, 80 bp, synthetic construct; identical to SEQ ID NO: 16330
  source 1..80: mol_type = other DNA

SEQ ID NO: 49906 - DNA, 80 bp, synthetic construct
  source 1..80: mol_type = other DNA
ataatgttttgactcccagtaacctagcctgagctttttcctagagaagacttcatctttgttaactcttattagacaaa

SEQ ID NO: 49907 - DNA, 80 bp, synthetic construct; identical to SEQ ID NO: 16331
  source 1..80: mol_type = other DNA

SEQ ID NO: 49908 - DNA, 80 bp, synthetic construct
  source 1..80: mol_type = other DNA
taagattggcattctactataaagatacatgcacacatatgtttattgcagcactatttgcaatagcaaagacttggaac

SEQ ID NO: 49909 - DNA, 80 bp, synthetic construct
  source 1..80: mol_type = other DNA
aaaccaaacactgcatgttcccactcataagtgggagttgaacaatgagaacacatggacacagggaggggaacatcaca

SEQ ID NO: 49910 - DNA, 80 bp, synthetic construct
  source 1..80: mol_type = other DNA
tatcccagaacttaaagtaaaattttaaaaagaagcaataatattgaataaatttgattgacatacattgtgtttcatct

SEQ ID NO: 49911 - DNA, 80 bp, synthetic construct; identical to SEQ ID NO: 16332
  source 1..80: mol_type = other DNA

SEQ ID NO: 49912 - DNA, 80 bp, synthetic construct
  source 1..80: mol_type = other DNA
tttcttaagacctcaaacacattcttttattcctccactaaagagaagcaacataggttgtaataataataactattatt

SEQ ID NO: 49913 - DNA, 80 bp, synthetic construct
  source 1..80: mol_type = other DNA
gtaatcttggatggatcataagagttacataaatggcattagccaaaagtgactaaacaacttttatctacagttcatat

SEQ ID NO: 49914 - DNA, 80 bp, synthetic construct
  source 1..80: mol_type = other DNA
cttttccatgattaccatgtatagcaaagtatttttagtgcaacagtctccacctcaaatcaagggcaagaatcctatgc

SEQ ID NO: 49915 - DNA, 80 bp, synthetic construct; identical to SEQ ID NO: 16333
  source 1..80: mol_type = other DNA

SEQ ID NO: 49916 - DNA, 80 bp, synthetic construct
  source 1..80: mol_type = other DNA
atacattgtcctagaatactgaattttagaggtaaaagaaccttagagatgatgcaatccaacccttgtattatactttc

SEQ ID NO: 49917 - DNA, 80 bp, synthetic construct
  source 1..80: mol_type = other DNA
cagtttcttgacaacaaggttagtcactgtacaaagtatacaaaagatggcagcagagttaaacagaatttgtttcattt

SEQ ID NO: 49918 - DNA, 80 bp, synthetic construct
  source 1..80: mol_type = other DNA
gaattattgcagaggtctcggaatgtgttctgaatatctctaaggatccctgagactttatcaaggggtgcacaacttca

SEQ ID NO: 49919 - DNA, 80 bp, synthetic construct
  source 1..80: mol_type = other DNA
cttagtattactttctaatatagtacatgtcaagaggtacaacttaatttaacaaaatccctttggaacaagccctcaat

SEQ ID NO: 49920 - DNA, 80 bp, synthetic construct; identical to SEQ ID NO: 16334
  source 1..80: mol_type = other DNA

SEQ ID NO: 49921 - DNA, 80 bp, synthetic construct
  source 1..80: mol_type = other DNA
gcaggcaaagggtcagtaattccattcatgagtactcatcctcatgaccttatcactttctagaggcctgacttcataaa

SEQ ID NO: 49922 - DNA, 80 bp, synthetic construct
  source 1..80: mol_type = other DNA
tgaatcttagtttttcatttaaattatgtgctcattcaaagataacacatcaatcctcaattattatcaaattaaacatt

SEQ ID NO: 49923 - DNA, 80 bp, synthetic construct; identical to SEQ ID NO: 16335
  source 1..80: mol_type = other DNA

SEQ ID NO: 49924 - DNA, 80 bp, synthetic construct
  source 1..80: mol_type = other DNA
gaaactcagtctcagaaaaaagatgtaacttatctaatgtgaagtttcttcatagaattataacaacttcttgtctaagt

SEQ ID NO: 49925 - DNA, 80 bp, synthetic construct
  source 1..80: mol_type = other DNA
tctactttttttccctctttctctgctttcactttacttcttccttctcctccccttctttgtctttttcttctctctct

SEQ ID NO: 49926 - DNA, 80 bp, synthetic construct
  source 1..80: mol_type = other DNA
tctgtggaaacaatggaataacttacatctcaccctgtctagcaggttgcaaatcttcaagtggcaataaaaagcctata

SEQ ID NO: 49927 - DNA, 80 bp, synthetic construct
  source 1..80: mol_type = other DNA
gttttatataaaagtctgcttagggcacaatcaggtttttctgttacttgaattctaattggagatcaccccactttttt

SEQ ID NO: 49928 - DNA, 80 bp, synthetic construct; identical to SEQ ID NO: 16336
  source 1..80: mol_type = other DNA

SEQ ID NO: 49929 - DNA, 80 bp, synthetic construct
  source 1..80: mol_type = other DNA
aaacctttctttccatgtgaactacagtttttctctaatctcctgggtagctacctgtcactgggaatgggttatggtgt

SEQ ID NO: 49930 - DNA, 80 bp, synthetic construct
  source 1..80: mol_type = other DNA
catggatctacctaccaattataataaggaatggcatgtagaattttaaagaataaagcatcctggactttttgaagaaa

SEQ ID NO: 49931 - DNA, 80 bp, synthetic construct
  source 1..80: mol_type = other DNA
ttaggtaaaggggatacaaatgaatttgtgttagatgggtatattgtgataagctaaagtttagggtacaatcattccca

SEQ ID NO: 49932 - DNA, 80 bp, synthetic construct; identical to SEQ ID NO: 16337
  source 1..80: mol_type = other DNA

SEQ ID NO: 49933 - DNA, 80 bp, synthetic construct
  source 1..80: mol_type = other DNA
atttattttcctttgggtatatacccggtagtgggattgctgagttgaatggtagttctgtttaagttctttgggaaatc

SEQ ID NO: 49934 - DNA, 80 bp, synthetic construct
  source 1..80: mol_type = other DNA
tttgcatttttttgatgattagtgatgttaaacatttttatgtgtttgttagctgcttgtatgtcttcttttgagaagtg

SEQ ID NO: 49935 - DNA, 80 bp, synthetic construct
  source 1..80: mol_type = other DNA
tttttgttgtgcagaagctcattagtttaattatatcccacttgtccattttttttgttgcaattgcttttgagaactta

SEQ ID NO: 49936 - DNA, 80 bp, synthetic construct; identical to SEQ ID NO: 16338
  source 1..80: mol_type = other DNA

SEQ ID NO: 49937 - DNA, 80 bp, synthetic construct
  source 1..80: mol_type = other DNA
ttgctttgactattcagtctcttttttcctatggaattttacaatagttttattctaattcagtgaaaaatcatgccggt

SEQ ID NO: 49938 - DNA, 80 bp, synthetic construct
  source 1..80: mol_type = other DNA
tttcacttccttggtttaaatgtattcctaggtatttaatttattgtagttattctaaatggaattgcattattgatttg

SEQ ID NO: 49939 - DNA, 80 bp, synthetic construct; identical to SEQ ID NO: 16339
  source 1..80: mol_type = other DNA

SEQ ID NO: 49940 - DNA, 80 bp, synthetic construct
  source 1..80: mol_type = other DNA
ttttttgttcttgcaacagtttactgagaatgatgttttccagtttcatccatgtccctacaaaggacatgaactcatca

SEQ ID NO: 49941 - DNA, 80 bp, synthetic construct; identical to SEQ ID NO: 14707
  source 1..80: mol_type = other DNA

SEQ ID NO: 49942 - DNA, 80 bp, synthetic construct
  source 1..80: mol_type = other DNA
tttctctgatggccagtgatgatgagcattttttcatgtgttttttggctgcataagtgtcttcttttgagaagtgtctg

SEQ ID NO: 49943 - DNA, 80 bp, synthetic construct; identical to SEQ ID NO: 16340
  source 1..80: mol_type = other DNA

SEQ ID NO: 49944 - DNA, 80 bp, synthetic construct
  source 1..80: mol_type = other DNA
atatggctagccagttttcccagcaccatttattaaatagggaatcctttccccattgcttgtttttctcaggtttgtca

SEQ ID NO: 49945 - DNA, 80 bp, synthetic construct
  source 1..80: mol_type = other DNA
tcttttggcttaggattgacttggcgatgtgggctcttttttggttccatatgaactttaaagtattttccaattctgtg

SEQ ID NO: 49946 - DNA, 80 bp, synthetic construct
  source 1..80: mol_type = other DNA
tctccttgaagaggtccttcacatcgcttgtaagttggattcctaggtattttattctctttaaagcaattgtgaatggg

SEQ ID NO: 49947 - DNA, 80 bp, synthetic construct; identical to SEQ ID NO: 16341
  source 1..80: mol_type = other DNA

SEQ ID NO: 49948 - DNA, 80 bp, synthetic construct
  source 1..80: mol_type = other DNA
catcaatacctaatttattgagagtttttagcatgaagtgttgttgcattttgtcaaaggctttttctgcatctattgag

SEQ ID NO: 49949 - DNA, 80 bp, synthetic construct
  source 1..80: mol_type = other DNA
tgaggatttttgcatcaatgttcatcaaggatattggtctaagattctctttttttgttgtgtctctgcctggctttggt

SEQ ID NO: 49950 - DNA, 80 bp, synthetic construct
  source 1..80: mol_type = other DNA
tactgattattgccacaatttcagatcctgttattggtctattcagagattcaacatcttcctgatttagtcttcggaga

SEQ ID NO: 49951 - DNA, 80 bp, synthetic construct; identical to SEQ ID NO: 16342
  source 1..80: mol_type = other DNA

SEQ ID NO: 49952 - DNA, 80 bp, synthetic construct
  source 1..80: mol_type = other DNA
ggcatttagtgctataaatttccctctacacactgctttgaatgcgtcccagagattctggtatgtcgtgtctttgttct

SEQ ID NO: 49953 - DNA, 80 bp, synthetic construct
  source 1..80: mol_type = other DNA
tgttataatttctgttcttttccatttgctgaggagagctttacttcccagtatgtggtcagttttggaataggtgtggt

SEQ ID NO: 49954 - DNA, 80 bp, synthetic construct
  source 1..80: mol_type = other DNA
tcccattattaatgtgtgggagtctaagtctctttgtaggtcactcaggacttgctttatgaatcttggtgctcctgtat

SEQ ID NO: 49955 - DNA, 80 bp, synthetic construct
  source 1..80: mol_type = other DNA
ttggtagatcttcctccatccttttattttgagcctatgtgtgtctctgcacgtgagatgggtctcctgaatacagcaca

SEQ ID NO: 49956 - DNA, 80 bp, synthetic construct; identical to SEQ ID NO: 16343
  source 1..80: mol_type = other DNA

SEQ ID NO: 49957 - DNA, 80 bp, synthetic construct
  source 1..80: mol_type = other DNA
ccactctcttctggcttatagggtttctgccgagagatccgctgttagtctgatgggcttccctttgagggtaacccgac

SEQ ID NO: 49958 - DNA, 80 bp, synthetic construct
  source 1..80: mol_type = other DNA
ctcctggataatatcctgcagagtgttttccaacttggttccattctccccatcactttcaggtacaccaatcagacgta

SEQ ID NO: 49959 - DNA, 80 bp, synthetic construct
  source 1..80: mol_type = other DNA
gcattctccacgtagttctcgagccttggttttcagctccatcagctcctttaagcacttctctgtattggttattctag

SEQ ID NO: 49960 - DNA, 80 bp, synthetic construct; identical to SEQ ID NO: 16344
  source 1..80: mol_type = other DNA

SEQ ID NO: 49961 - DNA, 80 bp, synthetic construct
  source 1..80: mol_type = other DNA
gcctcccagttaggctgctcaggggtcaggggtcagggacccacttgaggaggcagtgtgcccgttctcagatctccagc

SEQ ID NO: 49962 - DNA, 80 bp, synthetic construct
  source 1..80: mol_type = other DNA
ttcgagcttccaggccgctttgtttttcctaatcaagcctgggcaatggcgggcgcccctcccccagcctcgctgccgcc

SEQ ID NO: 49963 - DNA, 80 bp, synthetic construct
  source 1..80: mol_type = other DNA
tgtccgtcacccctttctttgactgggaaagggaactccctgaccccttgcgcttcccaagccaggcaatgcctcgccct

SEQ ID NO: 49964 - DNA, 80 bp, synthetic construct; identical to SEQ ID NO: 16345
  source 1..80: mol_type = other DNA

SEQ ID NO: 49965 - DNA, 80 bp, synthetic construct
  source 1..80: mol_type = other DNA
ttccagcttttgcacattatatatgaagttggctgtggttttatcatagatggctcttattattttgagctatgttcctt

SEQ ID NO: 49966 - DNA, 80 bp, synthetic construct
  source 1..80: mol_type = other DNA
tcaaaaataaagcctacttggtcatgatgaattcactttttgatgtgctgctggattcagtttgctagtgttttgttgag

SEQ ID NO: 49967 - DNA, 80 bp, synthetic construct
  source 1..80: mol_type = other DNA
tcaatttttcagaataatttagtacagtgggtactcactcttttttgtatttccagtagaatttggctatgaatgcattt

SEQ ID NO: 49968 - DNA, 80 bp, synthetic construct; identical to SEQ ID NO: 16346
  source 1..80: mol_type = other DNA

SEQ ID NO: 49969 - DNA, 80 bp, synthetic construct
  source 1..80: mol_type = other DNA
caatacacttgttccataaaaaattcctctatattattcctagtgaaaaaaaatagtaagaactgtaagtttggcagaac

SEQ ID NO: 49970 - DNA, 80 bp, synthetic construct
  source 1..80: mol_type = other DNA
ctgaaatcacttgtttctacattttccacttctgtgctctaaacactagtggggcattctgttgtgtttaacctctctgg

SEQ ID NO: 49971 - DNA, 80 bp, synthetic construct; identical to SEQ ID NO: 16347
  source 1..80: mol_type = other DNA

SEQ ID NO: 49972 - DNA, 80 bp, synthetic construct
  source 1..80: mol_type = other DNA
catgaattacattgtcttatatagaaagaaatccacaaaactattttaccttttatctcttaagcaactgtatttttaga

SEQ ID NO: 49973 - DNA, 80 bp, synthetic construct
  source 1..80: mol_type = other DNA
ttaaggtgttttacaactgcagttgtttggaagtaactggtctccagaacagaaattactcagcccatttgggtgaatgc

SEQ ID NO: 49974 - DNA, 80 bp, synthetic construct
  source 1..80: mol_type = other DNA
aggcacctcacatgtcatgctgattgttaagtaagtatgacttttaaaaacattttcatatgcatgagactataaacaca

SEQ ID NO: 49975 - DNA, 80 bp, synthetic construct; identical to SEQ ID NO: 16348
  source 1..80: mol_type = other DNA

SEQ ID NO: 49976 - DNA, 80 bp, synthetic construct
  source 1..80: mol_type = other DNA
gcatgacttttataatacccttgtagaaaaataaaaaaatacacaggaagaattagttcctttcttggctcattagaaaa

SEQ ID NO: 49977 - DNA, 80 bp, synthetic construct
  source 1..80: mol_type = other DNA
tccctaaaaagaaagattcaaaaggaaagttaatttaggattgaggtggggggctgtgaagaagaggattcagagtacat

SEQ ID NO: 49978 - DNA, 80 bp, synthetic construct
  source 1..80: mol_type = other DNA
gtgacacatgataagattggagagttaggaagggtgcaggtaatgcatgccctactggccaagttgattcaatcacctaa

SEQ ID NO: 49979 - DNA, 80 bp, synthetic construct
  source 1..80: mol_type = other DNA
catttttaacatttgttaacattagtatcaacctgtaaattgaatttacagttgtttaattttgaccctgactgcaaatc

SEQ ID NO: 49980 - DNA, 80 bp, synthetic construct; identical to SEQ ID NO: 16349
  source 1..80: mol_type = other DNA

SEQ ID NO: 49981 - DNA, 80 bp, synthetic construct
  source 1..80: mol_type = other DNA
taaacttgattaagtaggcagaaggacatccatttattcaatatgtattcattttttatgtcaggcatagttgtatgcac

SEQ ID NO: 49982 - DNA, 80 bp, synthetic construct
  source 1..80: mol_type = other DNA
acagttaagaaaatagaaaaaaatgagaaaataggcaagagatactagttcagatatggtgctttggaagtcctttgagt

SEQ ID NO: 49983 - DNA, 80 bp, synthetic construct; identical to SEQ ID NO: 16350
  source 1..80: mol_type = other DNA

SEQ ID NO: 49984 - DNA, 80 bp, synthetic construct
  source 1..80: mol_type = other DNA
gtgtgttttgtgaaaacaatagtgaagtcagggaaaacagaaggcttgaattgttcttctcaagatggaagcttgattga

SEQ ID NO: 49985 - DNA, 80 bp, synthetic construct
  source 1..80: mol_type = other DNA
tgctgcaaccctccgcctcccaggttcaaacgatgctcctgcctcaacctcctaagtagctggaattacaggtgcacgcc

SEQ ID NO: 49986 - DNA, 80 bp, synthetic construct
  source 1..80: mol_type = other DNA
ttaatgcaaagccagtagggtttgctgagacattgaatgtggcatgtgagaaagataatttaaggataatcccaaagttc

SEQ ID NO: 49987 - DNA, 80 bp, synthetic construct
  source 1..80: mol_type = other DNA
ttcaatatctagcaatgtcatatatgcaatccaacaggagaaaccttgatgccagagccataaattttagagtcagcaac

SEQ ID NO: 49988 - DNA, 80 bp, synthetic construct; identical to SEQ ID NO: 16351
  source 1..80: mol_type = other DNA

SEQ ID NO: 49989 - DNA, 80 bp, synthetic construct
  source 1..80: mol_type = other DNA
catgagaaaaactaggaaagagcgttgtcctcaaactaataaagcatatgtcaaaaagagcataagtaactgtgtcaagg

SEQ ID NO: 49990 - DNA, 80 bp, synthetic construct
  source 1..80: mol_type = other DNA
aaattatcaataaaacactagcaaatcaaatccgatggcacataagaaaaattttataacatgatcaagttgtttttatt

SEQ ID NO: 49991 - DNA, 80 bp, synthetic construct
  source 1..80: mol_type = other DNA
ctttcatgacaaaaatcctcaacaatctgggcatcaaaggaacatacctcaaaataataaaagctatgtatgacaaaccc

SEQ ID NO: 49992 - DNA, 80 bp, synthetic construct; identical to SEQ ID NO: 16352
  source 1..80: mol_type = other DNA

SEQ ID NO: 49993 - DNA, 80 bp, synthetic construct
  source 1..80: mol_type = other DNA
tacaaaaaaactcatcaagaaaaaaattattaaaaatagggtaaatgatacgaccagcatgtttcaaaagacaaacagtc

SEQ ID NO: 49994 - DNA, 80 bp, synthetic construct
  source 1..80: mol_type = other DNA
tatatactgttgagaatataaattagtacaacctttatgaaaaacaatgtggagatttttcaagtatctgaaaatagaag

SEQ ID NO: 49995 - DNA, 80 bp, synthetic construct; identical to SEQ ID NO: 16353
  source 1..80: mol_type = other DNA

SEQ ID NO: 49996 - DNA, 80 bp, synthetic construct
  source 1..80: mol_type = other DNA
gtttctttgcctttgtcttgtttcagaattgttcaacctgaattgaaatcacttgcactgggtttccactcaatggttat

SEQ ID NO: 49997 - DNA, 80 bp, synthetic construct
  source 1..80: mol_type = other DNA
aaataaaattagtatcctttctatttctgtgataaataaaaacaataagagacagagtaaaattgagtgatggacctaaa

SEQ ID NO: 49998 - DNA, 80 bp, synthetic construct
  source 1..80: mol_type = other DNA
agaaaaataagaatatttcctcccagtaggcagagtgaagggcctaacttctaaactgtggcatgatttaggcaaggcct

SEQ ID NO: 49999 - DNA, 80 bp, synthetic construct; identical to SEQ ID NO: 16354
  source 1..80: mol_type = other DNA

SEQ ID NO: 50000 - DNA, 80 bp, synthetic construct
  source 1..80: mol_type = other DNA
aaaatgagtttcaccattctaattctgagtatcctatttcgatgtatccaatctgtggcacgatggaacctaaatgcacc

SEQ ID NO: 50001 - DNA, 80 bp, synthetic construct
  source 1..80: mol_type = other DNA
tttttcaaagggtggctgtgatttttgaaacctgaaaatttctcactcatttcctcagtaccgggttttctcagatacat

SEQ ID NO: 50002 - DNA, 80 bp, synthetic construct
  source 1..80: mol_type = other DNA
aagtaaagttatgaacactttagttgcaccatcttaaggacagttctctactggcgtgtccctaaaattcttcatcaaat

SEQ ID NO: 50003 - DNA, 80 bp, synthetic construct; identical to SEQ ID NO: 16355
  source 1..80: mol_type = other DNA

SEQ ID NO: 50004 - DNA, 80 bp, synthetic construct
  source 1..80: mol_type = other DNA
aagcactctctgaagctcagcctatacttatctggggagggagttctgatgaagcactcacttttaaattctcttaaaat

SEQ ID NO: 50005 - DNA, 80 bp, synthetic construct
  source 1..80: mol_type = other DNA
aacagagtatatatgcatgtatgtagggagggtacgagtaggtaaaaggtgtcaatgacattactacatgatttgggtct

SEQ ID NO: 50006 - DNA, 80 bp, synthetic construct
  source 1..80: mol_type = other DNA
tattacaggaggaattctagctccaatatattttggggctctgattgatacaacgtgtataaagtggtccaccaacaact

SEQ ID NO: 50007 - DNA, 80 bp, synthetic construct; identical to SEQ ID NO: 16356
  source 1..80: mol_type = other DNA

SEQ ID NO: 50008 - DNA, 80 bp, synthetic construct
  source 1..80: mol_type = other DNA
cgattgcctctgacttctctagaaagaaacagaatgactagctggggctctggtcatatgtcaattaagaaaaaacggga

SEQ ID NO: 50009 - DNA, 80 bp, synthetic construct
  source 1..80: mol_type = other DNA
gaaatgtgaaactacatgtattaaaactcatagtataatttctttcaattatctacgaagcagaaactaagtatgaccca

SEQ ID NO: 50010 - DNA, 80 bp, synthetic construct; identical to SEQ ID NO: 16357
  source 1..80: mol_type = other DNA

SEQ ID NO: 50011 - DNA, 80 bp, synthetic construct
  source 1..80: mol_type = other DNA
ctgttaagtaatcatgcacctaggtatttacctaagttagatgaaaacatgaccccacaaaaacctgcacttgcatatga

SEQ ID NO: 50012 - DNA, 80 bp, synthetic construct
  source 1..80: mol_type = other DNA
caagaaagaaattaaatgcatgtagctaagtgaaagaaggcagtctaaagaagcttctgggcctggtgcagtggcccatg

SEQ ID NO: 50013 - DNA, 80 bp, synthetic construct
  source 1..80: mol_type = other DNA
taaagcacaagaatcccttgaacccaggaggcggaggttgcagtaagccaagctcatggcactgctctccggcctggctg

SEQ ID NO: 50014 - DNA, 80 bp, synthetic construct
  source 1..80: mol_type = other DNA
gataaggatgagtaggtggagcacagggcattttaagggtggtgaaatgattttatatgatattatcatgttggatacat

SEQ ID NO: 50015 - DNA, 80 bp, synthetic construct; identical to SEQ ID NO: 16358
  source 1..80: mol_type = other DNA

SEQ ID NO: 50016 - DNA, 80 bp, synthetic construct
  source 1..80: mol_type = other DNA
cacccaaattgtcaaccatcaaaaatgttaagtagacattgtcttggcaaaagtacagaactttgagccagcagcaaact

SEQ ID NO: 50017 - DNA, 80 bp, synthetic construct
  source 1..80: mol_type = other DNA
ctgcaggaaaatgaatagtctgatgtcttgaaaaaagaagaaaaaattatttgtttactaatatggaaccttcttcaaga

SEQ ID NO: 50018 - DNA, 80 bp, synthetic construct
  source 1..80: mol_type = other DNA
ctatctaaaatccccagcagataaaatgatccaactttttccagaattgtaccccacagacattctcacaaatttattta

SEQ ID NO: 50019 - DNA, 80 bp, synthetic construct; identical to SEQ ID NO: 16359
  source 1..80: mol_type = other DNA

SEQ ID NO: 50020 - DNA, 80 bp, synthetic construct
  source 1..80: mol_type = other DNA
cttgttgaacaactggtatagtatccaaatttttaatatactgcaaagaccattgtgataacattatatagtgtatatgt

SEQ ID NO: 50021 - DNA, 80 bp, synthetic construct
  source 1..80: mol_type = other DNA
atttcttcttgcatgtcagattctatctagggtcattttccttctgattaaagtcgatttttaaaaatgtctttcagtga

SEQ ID NO: 50022 - DNA, 80 bp, synthetic construct
  source 1..80: mol_type = other DNA
ctcttgataagtaagctgttgtctgttttcttgttcctttaaggtaacctcactcctctgtggattctttaaatatcttg

SEQ ID NO: 50023 - DNA, 80 bp, synthetic construct; identical to SEQ ID NO: 16360
  source 1..80: mol_type = other DNA

SEQ ID NO: 50024 - DNA, 80 bp, synthetic construct
  source 1..80: mol_type = other DNA
aactaagacaagtattaggcttctaactgccaggaaatgctccgggcttagctcacacacccttttctttcataaagttc

SEQ ID NO: 50025 - DNA, 80 bp, synthetic construct
  source 1..80: mol_type = other DNA
gacttaccacattgtagctaactcatggcccttatcactttccttttggtcacttgtgttctttgcttgattgtgtaaag

SEQ ID NO: 50026 - DNA, 80 bp, synthetic construct
  source 1..80: mol_type = other DNA
cccacacatgcatagcctatcctaccatcaatgtctcccaacaaagggtgatacagttgttacaaatgatgaaacaacat

SEQ ID NO: 50027 - DNA, 80 bp, synthetic construct; identical to SEQ ID NO: 16361
  source 1..80: mol_type = other DNA

SEQ ID NO: 50028 - DNA, 80 bp, synthetic construct
  source 1..80: mol_type = other DNA
atcttgatggcttccaagtttcatgtttctttgatgatatatatgaagatgtttgattctgttatattaaccctggatcc

SEQ ID NO: 50029 - DNA, 80 bp, synthetic construct
  source 1..80: mol_type = other DNA
tgagaggggacgtttttgacttgttcctgaccttagtgggaagactttgagtttctcactattaagtatgaagttagatg

SEQ ID NO: 50030 - DNA, 80 bp, synthetic construct; identical to SEQ ID NO: 16362
  source 1..80: mol_type = other DNA

SEQ ID NO: 50031 - DNA, 80 bp, synthetic construct
  source 1..80: mol_type = other DNA
gatcatggctcaccgcaacctccgcttcccaggttcaagcgattctcctgcctcagcctcccgagtagctgggattacag

SEQ ID NO: 50032 - DNA, 80 bp, synthetic construct
  source 1..80: mol_type = other DNA
gtagtattcttttcttgtaatgtctttgtctgattttgttattaggataatgctagcctcacagaatgaaataggaagta

SEQ ID NO: 50033 - DNA, 80 bp, synthetic construct
  source 1..80: mol_type = other DNA
ctggtttgttacataggtatacatgtgccatgttggtgtactgcacccattaactactcatttacattaggtatatctct

SEQ ID NO: 50034 - DNA, 80 bp, synthetic construct
  source 1..80: mol_type = other DNA
gtttccagcttcatccatgtccctacaaaggacatgaactcatccttttttatggctgcatagtattccatggtttatat

SEQ ID NO: 50035 - DNA, 80 bp, synthetic construct; identical to SEQ ID NO: 16363
  source 1..80: mol_type = other DNA

SEQ ID NO: 50036 - DNA, 80 bp, synthetic construct
  source 1..80: mol_type = other DNA
acaagatccaagaagagaaaaagcacaaaggtcttgtatatagatatatacacacacagacacacacacatatatataca

SEQ ID NO: 50037 - DNA, 80 bp, synthetic construct
  source 1..80: mol_type = other DNA
tttagctatagtgccctttaaaaaaaatcctttatatctcttattatctgactttagcaaggccaaacagccagtatttc

SEQ ID NO: 50038 - DNA, 80 bp, synthetic construct
  source 1..80: mol_type = other DNA
attcaagaagggaagccagaagttggtcatggaggagcagagaatcaacaaatggaaaaagccacaagaatatcaaatca

SEQ ID NO: 50039 - DNA, 80 bp, synthetic construct
  source 1..80: mol_type = other DNA
gagataatttttagagctaactatgacattaactacaaaattcctgtcctctagatggcagagaccaagagtaagtactg

SEQ ID NO: 50040 - DNA, 80 bp, synthetic construct; identical to SEQ ID NO: 16364
  source 1..80: mol_type = other DNA

SEQ ID NO: 50041 - DNA, 80 bp, synthetic construct
  source 1..80: mol_type = other DNA
agacagagagacagagaccagaagcttggctggtaacaaattcttaccccttttgccagcataccacgtttctgggttcc

SEQ ID NO: 50042 - DNA, 80 bp, synthetic construct
  source 1..80: mol_type = other DNA
ggctgcatgaggaaccaaattaacattttccaccccagcctagcaaaatacacataacaaaacagacatttgtcacctca

SEQ ID NO: 50043 - DNA, 80 bp, synthetic construct; identical to SEQ ID NO: 16365
  source 1..80: mol_type = other DNA

SEQ ID NO: 50044 - DNA, 80 bp, synthetic construct
  source 1..80: mol_type = other DNA
ctattctccacctgagaattctccctaaaatcttcttgattgaagagaaatctcctgaaccaagacttcctactaattag

SEQ ID NO: 50045 - DNA, 80 bp, synthetic construct
  source 1..80: mol_type = other DNA
gagttggcagtgcctagaatactcaccaaattagtttggagacagacatcatttccaggaactatttctccattgcaatt

SEQ ID NO: 50046 - DNA, 80 bp, synthetic construct
  source 1..80: mol_type = other DNA
gatgagacccctagtgtgtaaccacctaacgggttcaccttgcccactgcctagacagagcttatttatcaagaaagatc

SEQ ID NO: 50047 - DNA, 80 bp, synthetic construct; identical to SEQ ID NO: 16366
  source 1..80: mol_type = other DNA

SEQ ID NO: 50048 - DNA, 80 bp, synthetic construct
  source 1..80: mol_type = other DNA
atgcattactcctaaatcataatttctaatcttttggctaattcgttagtcctacaaaggtagtctgtttcccaggcaag

SEQ ID NO: 50049 - DNA, 80 bp, synthetic construct
  source 1..80: mol_type = other DNA
agtctcggttatagttttgcagtgaaaatttcataagcatttagtgcaataaactttccactttatgctgttgaagctat

SEQ ID NO: 50050 - DNA, 80 bp, synthetic construct
  source 1..80: mol_type = other DNA
ttctatttttattctgctgtggttcatgaagatgtttgttataactctgattttttaaaaaatttattgtgacttatgac

SEQ ID NO: 50051 - DNA, 80 bp, synthetic construct; identical to SEQ ID NO: 16367
  source 1..80: mol_type = other DNA

SEQ ID NO: 50052 - DNA, 80 bp, synthetic construct
  source 1..80: mol_type = other DNA
gatagatctttcttcattcttttactttaagtctatgggtgtccttacatacgagatggattccttaagggcagcagaag

SEQ ID NO: 50053 - DNA, 80 bp, synthetic construct
  source 1..80: mol_type = other DNA
ggatctgtaggctttgtaattatgggtgcttttatagtagcaagtattggtctgttttttcctgttttgaactcctttga

SEQ ID NO: 50054 - DNA, 80 bp, synthetic construct
  source 1..80: mol_type = other DNA
ccagtctcttctagcttgtaatgtatctgctgggaagttcacctttagtctaatggtatttccttcataaataatttggc

SEQ ID NO: 50055 - DNA, 80 bp, synthetic construct; identical to SEQ ID NO: 16368
  source 1..80: mol_type = other DNA

SEQ ID NO: 50056 - DNA, 80 bp, synthetic construct
  source 1..80: mol_type = other DNA
acccctgtgcctaccaaagtcagagcagtttgttggacatgtttgccaggaattgggtggcatggtgactcaaagatgga

SEQ ID NO: 50057 - DNA, 80 bp, synthetic construct
  source 1..80: mol_type = other DNA
tcaagagggcagaggaaattcctaacaatttggtggtcagcagattatcagagatgtgaggggagcagagaagcactttc

SEQ ID NO: 50058 - DNA, 80 bp, synthetic construct
  source 1..80: mol_type = other DNA
ttctttctgaggagaactgtaatttgatgtccctggtcagccatcttgaaaagaacttgacttatttttttatcagtggc

SEQ ID NO: 50059 - DNA, 80 bp, synthetic construct
  source 1..80: mol_type = other DNA
ttggtggatttagatcattgacattaaaagtgactactgatgttgtgagaccaatgttgattataattttactattgtct

SEQ ID NO: 50060 - DNA, 80 bp, synthetic construct; identical to SEQ ID NO: 16369
  source 1..80: mol_type = other DNA

SEQ ID NO: 50061 - DNA, 80 bp, synthetic construct
  source 1..80: mol_type = other DNA
atggtttctgaagagaagtctattttctcccctatagataaaatttgtttttccttctggttagtttcaggataaagttt

SEQ ID NO: 50062 - DNA, 80 bp, synthetic construct
  source 1..80: mol_type = other DNA
tctgtgatatagtgtctgacattaatttaagagaaattcttagtaatttttttttttttgagatggagtctcactctgtt

SEQ ID NO: 50063 - DNA, 80 bp, synthetic construct
  source 1..80: mol_type = other DNA
catgttggtcaggctggtctctaactcctgacctcgtgatctgcctgcctcagtctcccaaagtgctgggattacaggca

SEQ ID NO: 50064 - DNA, 80 bp, synthetic construct; identical to SEQ ID NO: 16370
  source 1..80: mol_type = other DNA

SEQ ID NO: 50065 - DNA, 80 bp, synthetic construct
  source 1..80: mol_type = other DNA
aaattccattttgaaaatttccacgtcccggacatatctaggtctggtttaaagcttacttattcctttcaatctatgtt

SEQ ID NO: 50066 - DNA, 80 bp, synthetic construct
  source 1..80: mol_type = other DNA
gttataatccagtaacctctggattataaatttcaaacatacttctcagtttctcctcccagctgtaggtggggcaggat

SEQ ID NO: 50067 - DNA, 80 bp, synthetic construct; identical to SEQ ID NO: 16371
  source 1..80: mol_type = other DNA

SEQ ID NO: 50068 - DNA, 80 bp, synthetic construct
  source 1..80: mol_type = other DNA
tgttttattttctctatttctacagaagggtctacttgggcttgtcttcaatgttaagagtctcatcacttgttttatat

SEQ ID NO: 50069 - DNA, 80 bp, synthetic construct
  source 1..80: mol_type = other DNA
agaaaaaaagccacttctgcttctgtgtttccaaacagcattgcattgattcagtaagatgttatttttgaggagttcct

SEQ ID NO: 50070 - DNA, 80 bp, synthetic construct
  source 1..80: mol_type = other DNA
atacttgttcaggtaattctaattcttaataaaacaaatgagtatcatacaggtagaggttaaaaaggaggagctagatt

SEQ ID NO: 50071 - DNA, 80 bp, synthetic construct
  source 1..80: mol_type = other DNA
ataattaacaattatcttgtttaagtaaatttagaatacatttaagtattgtggaagaaataaagacattccaatatttg

SEQ ID NO: 50072 - DNA, 80 bp, synthetic construct
  source 1..80: mol_type = other DNA
attagacctctgcagactgtagactttcaactgcagactgggaggttactaagtccttagcagctgagtacagaacacga

SEQ ID NO: 50073 - DNA, 80 bp, synthetic construct
  source 1..80: mol_type = other DNA
agaattttggtttgggataaatttatgtggatcttcgctttggtgccataaaggtaagtgctaaagatgtttctggggga

SEQ ID NO: 50074 - DNA, 80 bp, synthetic construct; identical to SEQ ID NO: 16372
  source 1..80: mol_type = other DNA

SEQ ID NO: 50075 - DNA, 80 bp, synthetic construct
  source 1..80: mol_type = other DNA
acattatgggataaaataggatttcttttattacctctaagaataaaactctcctcatcctgctaggaaatgactggctt

SEQ ID NO: 50076 - DNA, 80 bp, synthetic construct
  source 1..80: mol_type = other DNA
ctcaggagtttgagaacagcctgggcaacatagctgaaaccccgtctctacgaaaatacaaaaaaaaaaaaaaaaaatta

SEQ ID NO: 50077 - DNA, 80 bp, synthetic construct
  source 1..80: mol_type = other DNA
aaacaaacaaagaaacatacttaattgtttaatcacagctttgagccagtacccacacttctgaaagtcagggaatctaa

SEQ ID NO: 50078 - DNA, 80 bp, synthetic construct; identical to SEQ ID NO: 16373
  source 1..80: mol_type = other DNA

SEQ ID NO: 50079 - DNA, 80 bp, synthetic construct
  source 1..80: mol_type = other DNA
ttattgatatagtcaaggaaccaactttggttttgttgattttctttatttttctattctctatttcatttatttctgtt

SEQ ID NO: 50080 - DNA, 80 bp, synthetic construct
  source 1..80: mol_type = other DNA
tatcccataaatttgggcatgttgtgtgttcattttcattcatctcaaattattttctaatttcccttgttattctttta

SEQ ID NO: 50081 - DNA, 80 bp, synthetic construct; identical to SEQ ID NO: 16374
  source 1..80: mol_type = other DNA

SEQ ID NO: 50082 - DNA, 80 bp, synthetic construct
  source 1..80: mol_type = other DNA
ttgcctgaggtcaggagtttgagaccagcctgaccaatatggtgaaaccccatctttactaaaaatacaaaaattagcca

SEQ ID NO: 50083 - DNA, 80 bp, synthetic construct
  source 1..80: mol_type = other DNA
atatatatatatatatatatatatatatatatatataaaattaatgcagaagaaatggcatttcaataaatattattcta

SEQ ID NO: 50084 - DNA, 80 bp, synthetic construct
  source 1..80: mol_type = other DNA
ccctctcccagctacatcaagatataaaatatagcacatagtaggttcatgatatatgtacttactatgtgaatgacagc

SEQ ID NO: 50085 - DNA, 80 bp, synthetic construct
  source 1..80: mol_type = other DNA
tctactggagagaatcagtaaaattaggaccattagtcagacacactatgactcagaatgagcactgcactctgagataa

SEQ ID NO: 50086 - DNA, 80 bp, synthetic construct; identical to SEQ ID NO: 16375
  source 1..80: mol_type = other DNA

SEQ ID NO: 50087 - DNA, 80 bp, synthetic construct
  source 1..80: mol_type = other DNA
cacagatgaactcctcatgcccttatgtaaagtcagtcacagcctgggcaacatgcaaaaccccattcctaaaaataaaa

SEQ ID NO: 50088 - DNA, 80 bp, synthetic construct
  source 1..80: mol_type = other DNA
aaataaagccattcacttcaaatctcccctctctcctccatcaccaatttttctctctactgaatcattcccaccagtgt

SEQ ID NO: 50089 - DNA, 80 bp, synthetic construct; identical to SEQ ID NO: 16376
  source 1..80: mol_type = other DNA

SEQ ID NO: 50090 - DNA, 80 bp, synthetic construct
  source 1..80: mol_type = other DNA
ccaaaaatgccttattttataatactgactttaaaaattgttataattatgactttaaaaattataagggtggtggctca

SEQ ID NO: 50091 - DNA, 80 bp, synthetic construct
  source 1..80: mol_type = other DNA
ggctgaggcacaagaatggcgtgaacctgggaggcggagcttgcagtgaaccgagatcgccaacagagcgagactccgtc

SEQ ID NO: 50092 - DNA, 80 bp, synthetic construct
  source 1..80: mol_type = other DNA
acaaaaattagccagctgtggtggtgcaagcctatagtcccagctacttgggaggctgaggcaggagaatcacttgaacc

SEQ ID NO: 50093 - DNA, 80 bp, synthetic construct
  source 1..80: mol_type = other DNA
acaggaggggcaaatgccttctcttggagaactcactcctgatagagcctaaaccaaaggtagacctttccattattgtt

SEQ ID NO: 50094 - DNA, 80 bp, synthetic construct; identical to SEQ ID NO: 16377
  source 1..80: mol_type = other DNA

SEQ ID NO: 50095 - DNA, 80 bp, synthetic construct
  source 1..80: mol_type = other DNA
ttccatgagcagtttgtctttgattttcttggaactacgtctacattcttttctagaacaaaagcattcgtgatgtgtaa

SEQ ID NO: 50096 - DNA, 80 bp, synthetic construct
  source 1..80: mol_type = other DNA
aaaaataagggttatgtcactaatcattagagaaatgtaaactaaaaccacaatgagataccatctcacactagtcagaa

SEQ ID NO: 50097 - DNA, 80 bp, synthetic construct; identical to SEQ ID NO: 16378
  source 1..80: mol_type = other DNA

SEQ ID NO: 50098 - DNA, 80 bp, synthetic construct
  source 1..80: mol_type = other DNA
attctaagtgaactaatgcagaacaggaaaccaaatactgcacgttttcactttaagtgggagctaaacattgagtacac

SEQ ID NO: 50099 - DNA, 80 bp, synthetic construct
  source 1..80: mol_type = other DNA
ccaggagttcaataccaggcttggcaatatggcgaaaccttgtctctaccaaaaatacaaaaattagccgggtgtacgta

SEQ ID NO: 50100 - DNA, 80 bp, synthetic construct
  source 1..80: mol_type = other DNA
acagtcctgggttgctcattgctctatgattgattgtgaagcctagctcccagattttgaagtggtgactggaaaatgct

SEQ ID NO: 50101 - DNA, 80 bp, synthetic construct; identical to SEQ ID NO: 16379
  source 1..80: mol_type = other DNA

SEQ ID NO: 50102 - DNA, 80 bp, synthetic construct
  source 1..80: mol_type = other DNA
tccaaggcttttcactgccaggactatccaagggtcatatcaggcttgagtcaccagcaaagcagggtcaccaaaaatac

SEQ ID NO: 50103 - DNA, 80 bp, synthetic construct
  source 1..80: mol_type = other DNA
attttgaattatatactacatctaagtaatacagccctgtgcttagggccaaaagacattttcccagggcacagaacttg

SEQ ID NO: 50104 - DNA, 80 bp, synthetic construct
  source 1..80: mol_type = other DNA
tctgccaggaagtgcttatgccccttcaactaatgaagaaaactgaggtcagagaaggccaggccctccttcaaggtcac

SEQ ID NO: 50105 - DNA, 80 bp, synthetic construct
  source 1..80: mol_type = other DNA
caaatcaatgagctattttctgagtgtccctctgcgttttgcagagtgggggttcagagacagatgtcacatgacccaca

SEQ ID NO: 50106 - DNA, 80 bp, synthetic construct; identical to SEQ ID NO: 16380
  source 1..80: mol_type = other DNA

SEQ ID NO: 50107 - DNA, 80 bp, synthetic construct
  source 1..80: mol_type = other DNA
ggccttggccaagaagatttgaatcccatctgtgagtgcatccattgcccagacttgccaggatatctggccaaaggcct

SEQ ID NO: 50108 - DNA, 80 bp, synthetic construct
  source 1..80: mol_type = other DNA
tcatctgccaagcccgtcccctttgtgtctccaaatctggccccagagggaagagccaggtaggtgttgagctgtgtccc

SEQ ID NO: 50109 - DNA, 80 bp, synthetic construct
  source 1..80: mol_type = other DNA
tgagaaaaacatcattaacagccctcatgggttccagaactttacaaccaatggggcaacttttaactaccttattccat

SEQ ID NO: 50110 - DNA, 80 bp, synthetic construct; identical to SEQ ID NO: 16381
  source 1..80: mol_type = other DNA

SEQ ID NO: 50111 - DNA, 80 bp, synthetic construct
  source 1..80: mol_type = other DNA
tactctgtaaaataagtgtaagagagtccagccaaattctggtatttcctgtgatggactaattgaaaggtgctttgaaa

SEQ ID NO: 50112 - DNA, 80 bp, synthetic construct
  source 1..80: mol_type = other DNA
atcctctccacttggttgtttcatgcctcttttgctgtggatgctctgagaattgagatttctccaaagttctaacactt

SEQ ID NO: 50113 - DNA, 80 bp, synthetic construct; identical to SEQ ID NO: 16382
  source 1..80: mol_type = other DNA

SEQ ID NO: 50114 - DNA, 80 bp, synthetic construct
  source 1..80: mol_type = other DNA
ttgtttaccatcagtgacagggccctcattgccattcagatagtgagcgatccacttacagaatctcatcctcagaatct

SEQ ID NO: 50115 - DNA, 80 bp, synthetic construct
  source 1..80: mol_type = other DNA
aaatatgagtttcaactgaaattgtacctcattccacaggtgctctggagtgtgaaaggcactatagcattgttctacct

SEQ ID NO: 50116 - DNA, 80 bp, synthetic construct
  source 1..80: mol_type = other DNA
atattcatagcagatacatggattaccaacagtgacttctacatatggtatttacccttctgtgtctggtttttttttca

SEQ ID NO: 50117 - DNA, 80 bp, synthetic construct
  source 1..80: mol_type = other DNA
attgcttctatgtgtttttgtatccagtgctcctattaggaaatctggtatcaatctgaatcttatttctttgtagatga

SEQ ID NO: 50118 - DNA, 80 bp, synthetic construct; identical to SEQ ID NO: 16383
  source 1..80: mol_type = other DNA

SEQ ID NO: 50119 - DNA, 80 bp, synthetic construct
  source 1..80: mol_type = other DNA
gcaacctggaaatgtcaacaggttcaaacaaacaaaaaaaagccaatgaaagggtagtctgtttaaccccaaaaggccag

SEQ ID NO: 50120 - DNA, 80 bp, synthetic construct
  source 1..80: mol_type = other DNA
agctcccctacagccccttcaccattgtgtcagagaattatctgatgaagattttaaggcagtcattataaaaatgcctc

SEQ ID NO: 50121 - DNA, 80 bp, synthetic construct
  source 1..80: mol_type = other DNA
ccaagtagctgggactacaggcatgtgccatcacacccagctaatttttgttttagtaaagatggggtttcaccatgttg

SEQ ID NO: 50122 - DNA, 80 bp, synthetic construct; identical to SEQ ID NO: 16384
  source 1..80: mol_type = other DNA

SEQ ID NO: 50123 - DNA, 80 bp, synthetic construct
  source 1..80: mol_type = other DNA
gctttaagaaactaagtgaaccccaaatagagaaccccaaggaaatacaccctaacatacatcatagtcaaacttcagaa

SEQ ID NO: 50124 - DNA, 80 bp, synthetic construct
  source 1..80: mol_type = other DNA
ccaagagtcctttatccagcaagaacattctttggtaatatagaagaagttaagatattctcagaagagagaaaactaag

SEQ ID NO: 50125 - DNA, 80 bp, synthetic construct; identical to SEQ ID NO: 16385
  source 1..80: mol_type = other DNA

SEQ ID NO: 50126 - DNA, 80 bp, synthetic construct
  source 1..80: mol_type = other DNA
gagagatgctttgaaaacaagacgggatagagcacatggcccctcatgtctcttgcctgagtgactacattccttaaaag

SEQ ID NO: 50127 - DNA, 80 bp, synthetic construct
  source 1..80: mol_type = other DNA
acattcctcacagggcagcaggaaggagaagtgccaaacaaagtgggaaaagccccttattaaaccatcagatctcgtga

SEQ ID NO: 50128 - DNA, 80 bp, synthetic construct
  source 1..80: mol_type = other DNA
tcagtggggacagagccaaaccatatcaatgactttagtccttgccttttcctacacataagataacatctgacagggtt

SEQ ID NO: 50129 - DNA, 80 bp, synthetic construct; identical to SEQ ID NO: 16386
  source 1..80: mol_type = other DNA

SEQ ID NO: 50130 - DNA, 80 bp, synthetic construct
  source 1..80: mol_type = other DNA
atagataaatcaaaatggaatgcttagaaaatgttcaggtaactcacagggagacaggataaagaacacaaagaattgaa

SEQ ID NO: 50131 - DNA, 80 bp, synthetic construct
  source 1..80: mol_type = other DNA
cccacttcaactatgataataatgttggttgaaagtgaaaggatagagaaagatgtataatacaaacattaactagaaga

SEQ ID NO: 50132 - DNA, 80 bp, synthetic construct
  source 1..80: mol_type = other DNA
tctccacacacacacacacacacacacacacaaagccaggtatggtagtgtacacctgtagtcctagctacaggggaggc

SEQ ID NO: 50133 - DNA, 80 bp, synthetic construct
  source 1..80: mol_type = other DNA
agcaaagaaataatcagagacagagagggaaattacatagtgataaaagggccaatctactaagaacacaaagcaatcct

SEQ ID NO: 50134 - DNA, 80 bp, synthetic construct; identical to SEQ ID NO: 16387
  source 1..80: mol_type = other DNA

SEQ ID NO: 50135 - DNA, 80 bp, synthetic construct
  source 1..80: mol_type = other DNA
aagctgagacgggagaatcacttgaacctcggaggtggaggttgcagtgagctgagatcgtgccactgcactccagcctg

SEQ ID NO: 50136 - DNA, 80 bp, synthetic construct
  source 1..80: mol_type = other DNA
ggaattaaactaaaaatcaataacagaaacgtaacaagagagccttcaaacactgaaaattaaacaacatattcctaaat

SEQ ID NO: 50137 - DNA, 80 bp, synthetic construct
  source 1..80: mol_type = other DNA
ggtgaatcacttgatcccaggagctcaagaccagcctgggcaacatggcaaaaccccatctctacaaaaaatacaaaaat

SEQ ID NO: 50138 - DNA, 80 bp, synthetic construct; identical to SEQ ID NO: 16388
  source 1..80: mol_type = other DNA

SEQ ID NO: 50139 - DNA, 80 bp, synthetic construct
  source 1..80: mol_type = other DNA
tatctctacccatttgtgatggttaatattaggcgttaacctgattggattgaaggatgcctaaatagctggtaagtatt

SEQ ID NO: 50140 - DNA, 80 bp, synthetic construct
  source 1..80: mol_type = other DNA
cctgagtcttccggctttcatctttctcctatgctggatgtttcctcctgttccttcttcccttggacatcagatgccaa

SEQ ID NO: 50141 - DNA, 80 bp, synthetic construct
  source 1..80: mol_type = other DNA
tggcctatcatgggacttcaccttgtgatcatgtgagtcaatactccttaataaactccccttcatatgtacatatatcc

SEQ ID NO: 50142 - DNA, 80 bp, synthetic construct; identical to SEQ ID NO: 16389
  source 1..80: mol_type = other DNA

SEQ ID NO: 50143 - DNA, 80 bp, synthetic construct
  source 1..80: mol_type = other DNA
ttatgtttttctgcctagtctcactctggtgcttttatttatttccttgtgggcctggtggatcctttgagcccagtagt

SEQ ID NO: 50144 - DNA, 80 bp, synthetic construct
  source 1..80: mol_type = other DNA
gatcacagcactgcactccagcctgggcaagagagggacaccctgaaaaaaaaatgaaaggtagaaagaaagaaaaagag

SEQ ID NO: 50145 - DNA, 80 bp, synthetic construct
  source 1..80: mol_type = other DNA
aagaaagaaagaaagaaagaaagaaagaaaaggaaagaaggaaagaagaaagaaagaagaaaaataatttaaatctaggg

SEQ ID NO: 50146 - DNA, 80 bp, synthetic construct; identical to SEQ ID NO: 16390
  source 1..80: mol_type = other DNA

SEQ ID NO: 50147 - DNA, 80 bp, synthetic construct
  source 1..80: mol_type = other DNA
ctcagagaaaattccgcttcttttctttgcctgtctgtattccttccaattttggcctcgttgttccatagtatcttatc

SEQ ID NO: 50148 - DNA, 80 bp, synthetic construct
  source 1..80: mol_type = other DNA
aataaaaaactcaaggatcaaactgagttagtttactttttacaggcttaagtgaagtacatttaaaaggcagggagggg

SEQ ID NO: 50149 - DNA, 80 bp, synthetic construct
  source 1..80: mol_type = other DNA
aaaatacaaaattagctgggcatggtggtgtgtgcctgtaatcccagctactcaggaggctgaggcaggagaatcacttg

SEQ ID NO: 50150 - DNA, 80 bp, synthetic construct; identical to SEQ ID NO: 16391
  source 1..80: mol_type = other DNA

SEQ ID NO: 50151 - DNA, 80 bp, synthetic construct
  source 1..80: mol_type = other DNA
tatccttcacactttcacacttgataaaggtggcagagcctttaattatgaagccagcccaatgtttaatgttgaaatcc

SEQ ID NO: 50152 - DNA, 80 bp, synthetic construct
  source 1..80: mol_type = other DNA
tttagttaagggggttgacactaagtaaaagtaatcttgggggttctccactgtagaccaagaacagctctgaaaaatca

SEQ ID NO: 50153 - DNA, 80 bp, synthetic construct
  source 1..80: mol_type = other DNA
agctccagtctacagctcccagcatgagtgacacagaagatgaatgatttctgcatttccaactgaggtactgggttcat

SEQ ID NO: 50154 - DNA, 80 bp, synthetic construct; identical to SEQ ID NO: 16392
  source 1..80: mol_type = other DNA

SEQ ID NO: 50155 - DNA, 80 bp, synthetic construct
  source 1..80: mol_type = other DNA
ccacagctcatggaggcctgcctgcctctgtagactccacctctgggggcagggcatagccaaacaaaaggcagcagaaa

SEQ ID NO: 50156 - DNA, 80 bp, synthetic construct
  source 1..80: mol_type = other DNA
acggccgggtactcctctgagacaaaacttccagaggaacaatcaggcagcaacatttgctgttcaccaatatacgctgt

SEQ ID NO: 50157 - DNA, 80 bp, synthetic construct; identical to SEQ ID NO: 16393
  source 1..80: mol_type = other DNA

SEQ ID NO: 50158 - DNA, 80 bp, synthetic construct
  source 1..80: mol_type = other DNA
gttggaacccatggcaaagaagttaaaaaccttgaaaaaagattagatcaatggcaactagaataaccaatgcagagaag

SEQ ID NO: 50159 - DNA, 80 bp, synthetic construct
  source 1..80: mol_type = other DNA
taaaaagaaatgaacatagcctcccagaaatatgggactatgtgaaaagaccaaatctacgtctgattggtgtacctgaa

SEQ ID NO: 50160 - DNA, 80 bp, synthetic construct; identical to SEQ ID NO: 16394
  source 1..80: mol_type = other DNA

SEQ ID NO: 50161 - DNA, 80 bp, synthetic construct
  source 1..80: mol_type = other DNA
ccaaactaagcttcataagtgaaggagaaataaaatactttacagacaagcaaatgctggagattttgtcaccaccaggc

SEQ ID NO: 50162 - DNA, 80 bp, synthetic construct
  source 1..80: mol_type = other DNA
aaattcacacataacaatattaaccttaaatgtcaatgggctaaatgctccaattaaaagacacagactggcaaattcga

SEQ ID NO: 50163 - DNA, 80 bp, synthetic construct
  source 1..80: mol_type = other DNA
aggcaggggttccaatcctagtctctgataaaacagactttaaaccaacaacgatcaaagagacaaagaaggccattaca

SEQ ID NO: 50164 - DNA, 80 bp, synthetic construct; identical to SEQ ID NO: 16395
  source 1..80: mol_type = other DNA

SEQ ID NO: 50165 - DNA, 80 bp, synthetic construct
  source 1..80: mol_type = other DNA
gcaatcaaactagaactcaggattaagaaactcactcaaacccgctcaactacatggaaactgaacaacctgctcctgaa

SEQ ID NO: 50166 - DNA, 80 bp, synthetic construct
  source 1..80: mol_type = other DNA
tctaaaattgacaccctaacatcgcaattaaaagaactagagaagcaagagcaaacacattcaaaagctagcagaaggca

SEQ ID NO: 50167 - DNA, 80 bp, synthetic construct
  source 1..80: mol_type = other DNA
gcaataaaaatgataaaggggatatcaccaccaatcccacagaaatacaaactaccatcagagaatactataaacacctc

SEQ ID NO: 50168 - DNA, 80 bp, synthetic construct
  source 1..80: mol_type = other DNA
gaccagatggattcacagccgaattctaccagaggtacaaggaggagctggtaccattccttctgaaactattccaatca

SEQ ID NO: 50169 - DNA, 80 bp, synthetic construct; identical to SEQ ID NO: 16396
  source 1..80: mol_type = other DNA

SEQ ID NO: 50170 - DNA, 80 bp, synthetic construct
  source 1..80: mol_type = other DNA
tatctatgacaaacccacagccaatatcatactgagtgggcaaaaactggaagcattccctttgaaaactggcacaagac

SEQ ID NO: 50171 - DNA, 80 bp, synthetic construct
  source 1..80: mol_type = other DNA
tctcagcccaaaatctccttaagctgataagcaacttcagcaaagtctcggcatacaaaatcaatgtacaaaaactacaa

SEQ ID NO: 50172 - DNA, 80 bp, synthetic construct
  source 1..80: mol_type = other DNA
aagaggatacaaacaaatggaagaacattccatgctcatgagaaggaagaatcaatatcgtgaaaatggccatactgccc

SEQ ID NO: 50173 - DNA, 80 bp, synthetic construct; identical to SEQ ID NO: 16397
  source 1..80: mol_type = other DNA

SEQ ID NO: 50174 - DNA, 80 bp, synthetic construct
  source 1..80: mol_type = other DNA
ttacaccttatacaaaaattaattcaagatggattaaagacttacatattagacctaaaaccataaaaaccctagaagaa

SEQ ID NO: 50175 - DNA, 80 bp, synthetic construct
  source 1..80: mol_type = other DNA
ctacagaatgggagaacatttttgcaatctactcatctgacaaatggctaataaccagaatctacaatgaactcaaacaa

SEQ ID NO: 50176 - DNA, 80 bp, synthetic construct
  source 1..80: mol_type = other DNA
atctcacaccagttagaatggtgatcattaaaaagtcaggaaacaacaggtgctggagaggatgtggagaaataggaaca

SEQ ID NO: 50177 - DNA, 80 bp, synthetic construct; identical to SEQ ID NO: 16398
  source 1..80: mol_type = other DNA

SEQ ID NO: 50178 - DNA, 80 bp, synthetic construct
  source 1..80: mol_type = other DNA
gtgggaattgaacaatgagaacacatggacccaggaaggggaacatcacacaccagggcctgttgtggggtggggggagg

SEQ ID NO: 50179 - DNA, 80 bp, synthetic construct
  source 1..80: mol_type = other DNA
aactacttgaaaaccctaatggctagtacaatcatcatattatctcagctcagtgaagtcttgactcctaggtttggtag

SEQ ID NO: 50180 - DNA, 80 bp, synthetic construct; identical to SEQ ID NO: 16399
  source 1..80: mol_type = other DNA

SEQ ID NO: 50181 - DNA, 80 bp, synthetic construct
  source 1..80: mol_type = other DNA
gaagagagaagttatgctaagcatattcagattagtcttcccaagcagactttaagtcatcctaaatgtcccaggataca

SEQ ID NO: 50182 - DNA, 80 bp, synthetic construct
  source 1..80: mol_type = other DNA
acttgtatacaggggatgcagtaacttgttggttgactaatgagttttttattttagctgttctcagtgctattgaggaa

SEQ ID NO: 50183 - DNA, 80 bp, synthetic construct
  source 1..80: mol_type = other DNA
tccattttgttcctcaacccattctttctgttttgggagaaaaagctaaccttgcaattggctgtgtttcgtattgggaa

SEQ ID NO: 50184 - DNA, 80 bp, synthetic construct; identical to SEQ ID NO: 16400
  source 1..80: mol_type = other DNA

SEQ ID NO: 50185 - DNA, 80 bp, synthetic construct
  source 1..80: mol_type = other DNA
gggaaatgtaaaaccagatgatctgttttttccagccttgatattctgggactcctcattctaaccaaaaggttttcaga

SEQ ID NO: 50186 - DNA, 80 bp, synthetic construct
  source 1..80: mol_type = other DNA
aattgaaaaggaaaatttggctgggctcggtggctcacacctgtaatcccagcactgtgggaggctgaggcgggtggatc

SEQ ID NO: 50187 - DNA, 80 bp, synthetic construct
  source 1..80: mol_type = other DNA
cagtgattcgagattgcaccactgcactccagcctgggcaacagaacgagactccatctcaaaaaaaaaggaaaggaaaa

SEQ ID NO: 50188 - DNA, 80 bp, synthetic construct
  source 1..80: mol_type = other DNA
ttctctctttcttttctttctttcgacagggtcgcactctgtcccccaggttggagtgcagtggcatgatctcggctcgc

SEQ ID NO: 50189 - DNA, 80 bp, synthetic construct; identical to SEQ ID NO: 16401
  source 1..80: mol_type = other DNA

SEQ ID NO: 50190 - DNA, 80 bp, synthetic construct
  source 1..80: mol_type = other DNA
ccggggttaattccttaacgggtatattaaaaagctaatttgaagtttagcttgggaataattgaacccatactctgaac

SEQ ID NO: 50191 - DNA, 80 bp, synthetic construct
  source 1..80: mol_type = other DNA
agcctgggcaacatagtgagaccccatgtctacaaaaataaaaatcaaaaaattagccagtcatggtggtgcatgcctgt

SEQ ID NO: 50192 - DNA, 80 bp, synthetic construct; identical to SEQ ID NO: 16402
  source 1..80: mol_type = other DNA

SEQ ID NO: 50193 - DNA, 80 bp, synthetic construct
  source 1..80: mol_type = other DNA
gcaggatgtcatttcctcatatgaatacccttattaatggggtttgtgaaaaattatccacttattcagtgtccggctaa

SEQ ID NO: 50194 - DNA, 80 bp, synthetic construct
  source 1..80: mol_type = other DNA
ctgtccatccttgctctgatccttgtgtgatttctaaggagaagtgagatttaaactcctttagcagtgtagcaggacaa

SEQ ID NO: 50195 - DNA, 80 bp, synthetic construct
  source 1..80: mol_type = other DNA
tgataaatcgagcaagcctggggaatgtgactggggctacacgcatcagctaacaaaacagacagttttgcaatgctttt

SEQ ID NO: 50196 - DNA, 80 bp, synthetic construct; identical to SEQ ID NO: 16403
  source 1..80: mol_type = other DNA

SEQ ID NO: 50197 - DNA, 80 bp, synthetic construct
  source 1..80: mol_type = other DNA
cccagctaatttttgtatttttactagagacggggtttcaccatgttggccaggctagtctcaaactcctgacctcaagt

SEQ ID NO: 50198 - DNA, 80 bp, synthetic construct
  source 1..80: mol_type = other DNA
gtggttttcttacccagtctttccaagctccccaaccctccactgcctgtgttgctgataaatgagtacttgctaacaaa

SEQ ID NO: 50199 - DNA, 80 bp, synthetic construct
  source 1..80: mol_type = other DNA
cttttttctctctgggtctgactcctacactcaactatagatgcctccagggaaacaatttttgtctggttcatttctgt

SEQ ID NO: 50200 - DNA, 80 bp, synthetic construct; identical to SEQ ID NO: 16404
  source 1..80: mol_type = other DNA

SEQ ID NO: 50201 - DNA, 80 bp, synthetic construct
  source 1..80: mol_type = other DNA
aaaaattaactgggtgtagtggcaggtgcctgtaatcccagctacttgggaggctgaggcaggagaatcacttgaaccca

SEQ ID NO: 50202 - DNA, 80 bp, synthetic construct
  source 1..80: mol_type = other DNA
attgggaaaacttcctgatccagtatttgagaaccagattgtagctgtctgctcaaataaacgaaaccaaattagattgc

SEQ ID NO: 50203 - DNA, 80 bp, synthetic construct
  source 1..80: mol_type = other DNA
gttcctcagcatgcaggtgagagtggagaacaggtgtgagaatggcatggcatatacagggagggaaggatgtattaaag

SEQ ID NO: 50204 - DNA, 80 bp, synthetic construct
  source 1..80: mol_type = other DNA
aggggcaggtcagcgctgtaggccacataggctatggcaatggatgagtagtaggtgcccactaccgggagatgggagct

SEQ ID NO: 50205 - DNA, 80 bp, synthetic construct; identical to SEQ ID NO: 16405
  source 1..80: mol_type = other DNA

SEQ ID NO: 50206 - DNA, 80 bp, synthetic construct
  source 1..80: mol_type = other DNA
tcataggccatgaccaccaggatgaaggcttctgagcaggagaagctgtggaacaggtacatctgtaggaagcaggcagg

SEQ ID NO: 50207 - DNA, 80 bp, synthetic construct
  source 1..80: mol_type = other DNA
gctggcctctgccatcacaaccaccaggatctggtcattacccaccaggataagcggatagattaagaagaaaatcaagg

SEQ ID NO: 50208 - DNA, 80 bp, synthetic construct
  source 1..80: mol_type = other DNA
agctactccagaggctgaggtgggaggattgcttgaacctgggaggtggagtttgcagtgagcagagattgcgccattgc

SEQ ID NO: 50209 - DNA, 80 bp, synthetic construct; identical to SEQ ID NO: 16406
  source 1..80: mol_type = other DNA

SEQ ID NO: 50210 - DNA, 80 bp, synthetic construct
  source 1..80: mol_type = other DNA
ttttcctttccaaccatggatctcagtcccaacactttctttgtgccaggaattgtattgcacaattaagattcccagag

SEQ ID NO: 50211 - DNA, 80 bp, synthetic construct
  source 1..80: mol_type = other DNA
cactgttagcagcttcaggggcccagagatcaatcccacatatggaagcagtttcttaccattagaatgaccccataatg

SEQ ID NO: 50212 - DNA, 80 bp, synthetic construct
  source 1..80: mol_type = other DNA
taaaaatacaaaaattagccaggcgtggtggcacatacctgtagtcccagctattcaggaggctgaggcaggaaaataac

SEQ ID NO: 50213 - DNA, 80 bp, synthetic construct; identical to SEQ ID NO: 16407
  source 1..80: mol_type = other DNA

SEQ ID NO: 50214 - DNA, 80 bp, synthetic construct
  source 1..80: mol_type = other DNA
tttagaggctaaggccagaggatcgcttgaggccagaagtttgagaccagccaggcaacatagaaagaccccttttctat

SEQ ID NO: 50215 - DNA, 80 bp, synthetic construct
  source 1..80: mol_type = other DNA
taagctgggcagcagagcaagatcttatcttacaaaaattaaaaaataagattgcggtgttggtgggcaaatttaaccta

SEQ ID NO: 50216 - DNA, 80 bp, synthetic construct; identical to SEQ ID NO: 16408
  source 1..80: mol_type = other DNA

SEQ ID NO: 50217 - DNA, 80 bp, synthetic construct
  source 1..80: mol_type = other DNA
gagtaaagctaaactctagagtgaaaactatgtcgttcattctaaggttcccttgatggtgtgttcctctcagcctggag

SEQ ID NO: 50218 - DNA, 80 bp, synthetic construct
  source 1..80: mol_type = other DNA
gaatgttatgtctgaatcagtgccctttgtttcagtctctccatttccattcacatgagaattccttttctgtgatatct

SEQ ID NO: 50219 - DNA, 80 bp, synthetic construct
  source 1..80: mol_type = other DNA
tgccctgggacctgtctttgtatcctttctctttgtcatatcatacagtgaccaaccatattgatttgcccagaactgtc

SEQ ID NO: 50220 - DNA, 80 bp, synthetic construct; identical to SEQ ID NO: 16409
  source 1..80: mol_type = other DNA

SEQ ID NO: 50221 - DNA, 80 bp, synthetic construct
  source 1..80: mol_type = other DNA
aaaataaaaataacttaaaaatacatttttttaaagctgataggggagctgatcttggtcaaggctacacagagagctat

SEQ ID NO: 50222 - DNA, 80 bp, synthetic construct
  source 1..80: mol_type = other DNA
gggcctgggatgtgttctgacccctcttctacaaaatcaacatgtcagtggggtctgggcacctggtttcccagttttcc

SEQ ID NO: 50223 - DNA, 80 bp, synthetic construct
  source 1..80: mol_type = other DNA
acagtcacacagatggcaaaccagcagcatagcctgcctgccaggaatgctctaaatcagagcacaaagagtttggccca

SEQ ID NO: 50224 - DNA, 80 bp, synthetic construct
  source 1..80: mol_type = other DNA
gctcatctgcccaacccaggccatgccagctgctccttcctctcccgaagtcagtgctgcctcagtgggaagaaccaggt

SEQ ID NO: 50225 - DNA, 80 bp, synthetic construct; identical to SEQ ID NO: 16410
  source 1..80: mol_type = other DNA

SEQ ID NO: 50226 - DNA, 80 bp, synthetic construct
  source 1..80: mol_type = other DNA
agcctctgcaccaatgacacaaatgaaaaagttagtgaaaattttccgtgtaaatgtaaaaggctgtgctattggttggt

SEQ ID NO: 50227 - DNA, 80 bp, synthetic construct
  source 1..80: mol_type = other DNA
acagaacagagagccactcagtcttccaaatcctcactctcttgctcactcttgatcgttcttagcggctgatatggttt

SEQ ID NO: 50228 - DNA, 80 bp, synthetic construct; identical to SEQ ID NO: 16411
  source 1..80: mol_type = other DNA

SEQ ID NO: 50229 - DNA, 80 bp, synthetic construct
  source 1..80: mol_type = other DNA
agatacccaaaactgtggaagcgactttggaactgggtaacaggcacaggttggaacagtttggagggctcagaagattg

SEQ ID NO: 50230 - DNA, 80 bp, synthetic construct
  source 1..80: mol_type = other DNA
atgctgccattttaaagattaagataactgaggttcgtttttcattccacattgaataaggctggctttgcactgggtgc

SEQ ID NO: 50231 - DNA, 80 bp, synthetic construct
  source 1..80: mol_type = other DNA
gcatcatggaagacatctcttaaatgggtcataaatttcaagcagatgaatagagtgcaggccacaaaggagggggtaaa

SEQ ID NO: 50232 - DNA, 80 bp, synthetic construct
  source 1..80: mol_type = other DNA
tcagcatgaggacattggaaagccagaaccagggctcagacagagggctaagatagtcagctacatgtttgagaaagctc

SEQ ID NO: 50233 - DNA, 80 bp, synthetic construct; identical to SEQ ID NO: 16412
  source 1..80: mol_type = other DNA

SEQ ID NO: 50234 - DNA, 80 bp, synthetic construct
  source 1..80: mol_type = other DNA
gggaggctgaggcgggtggatcacttgaggtcaggagttcgagatcagcctggccaacatggtgaaaccccaactctact

SEQ ID NO: 50235 - DNA, 80 bp, synthetic construct
  source 1..80: mol_type = other DNA
aaatttggagaatcttcaagaggtagaatagtcagaatttgacaactgattatggaaaggtccaagatgatgcccagtat

SEQ ID NO: 50236 - DNA, 80 bp, synthetic construct
  source 1..80: mol_type = other DNA
ggaaacaacatgagactgaggcagaacaagaaatttctgtaaaagatactgagaaacaacagccagagagcgtgaagcaa

SEQ ID NO: 50237 - DNA, 80 bp, synthetic construct; identical to SEQ ID NO: 16413
  source 1..80: mol_type = other DNA

SEQ ID NO: 50238 - DNA, 80 bp, synthetic construct
  source 1..80: mol_type = other DNA
tgagggctgctctctgcttcatagatggcactttctagctgtgtcctcacatggtggaagggaccaacaagctctctcag

SEQ ID NO: 50239 - DNA, 80 bp, synthetic construct
  source 1..80: mol_type = other DNA
ggcccaggcttgtcttgaacccctggcctcaaacaatcctcctgccttagcctcccaagtagctgggagctgagaccatg

SEQ ID NO: 50240 - DNA, 80 bp, synthetic construct
  source 1..80: mol_type = other DNA
ctcccatatagctgggattacaggcacatgccactatgcccggctagtgttttccatttctgtagagacagagtctcact

SEQ ID NO: 50241 - DNA, 80 bp, synthetic construct; identical to SEQ ID NO: 16414
  source 1..80: mol_type = other DNA

SEQ ID NO: 50242 - DNA, 80 bp, synthetic construct
  source 1..80: mol_type = other DNA
agactggagtggtaggagaattttgtgaagatattgagactgtagaagtgtttgttccccattgaacgggactgggaggc

SEQ ID NO: 50243 - DNA, 80 bp, synthetic construct
  source 1..80: mol_type = other DNA
gtcttgctctgtcgcccaggctggagtgcagtagtgcaatctctgctcactgcaacctccgcctcccaggttcaagcaat

SEQ ID NO: 50244 - DNA, 80 bp, synthetic construct
  source 1..80: mol_type = other DNA
acctcggcctcccaaagtgctggcgtgagccaccatgcccggcctcatcatcaggtatttcttaagtgcaagctctgagc

SEQ ID NO: 50245 - DNA, 80 bp, synthetic construct; identical to SEQ ID NO: 16415
  source 1..80: mol_type = other DNA

SEQ ID NO: 50246 - DNA, 80 bp, synthetic construct
  source 1..80: mol_type = other DNA
tgccaaagggaggttatgaatatgtccagagagaacctgggccaccttaccgaccatgcagaggaggccatggagctcag

SEQ ID NO: 50247 - DNA, 80 bp, synthetic construct
  source 1..80: mol_type = other DNA
tgtgtgtccttgggcgcgcatgacttcacttctctctgcctctgtttcctctttgggaatgggggtaataataatggcaa

SEQ ID NO: 50248 - DNA, 80 bp, synthetic construct; identical to SEQ ID NO: 16416
  source 1..80: mol_type = other DNA

SEQ ID NO: 50249 - DNA, 80 bp, synthetic construct
  source 1..80: mol_type = other DNA
gatgctggtcagccaaggacacgtggagaactagggtatgactgtgagcacgtgtgtattctttcaggaggaagcaggga

SEQ ID NO: 50250 - DNA, 80 bp, synthetic construct
  source 1..80: mol_type = other DNA
gtggtgatgagcagcaaatgttaggctaagaaataggctttgctctgaggagaatggctgggcacaataagattagggtt

SEQ ID NO: 50251 - DNA, 80 bp, synthetic construct
  source 1..80: mol_type = other DNA
acaaaaataaaaataaaaaaaattagctgtgcatggtggtgcatgcctgtggtcccggctacttggaaagcttgaggtgg

SEQ ID NO: 50252 - DNA, 80 bp, synthetic construct
  source 1..80: mol_type = other DNA
gatgattaaggaggctgtgcaagggttctacaggaacaaggagtggtctttgaatttagggagaagagggaataagacag

SEQ ID NO: 50253 - DNA, 80 bp, synthetic construct; identical to SEQ ID NO: 16417
  source 1..80: mol_type = other DNA

SEQ ID NO: 50254 - DNA, 80 bp, synthetic construct
  source 1..80: mol_type = other DNA
caggtctctctgtacctcagtttcctcatctgtaaattggggattataataggttgtttggagcattaactgagctgata

SEQ ID NO: 50255 - DNA, 80 bp, synthetic construct
  source 1..80: mol_type = other DNA
ggtttgcttaagctaactgcttgccaccgctggctctttctggaggatggttgatgtctttaactgaaaagactagagtc

SEQ ID NO: 50256 - DNA, 80 bp, synthetic construct; identical to SEQ ID NO: 16418
  source 1..80: mol_type = other DNA

SEQ ID NO: 50257 - DNA, 80 bp, synthetic construct
  source 1..80: mol_type = other DNA
tcaagcaaaacgcaaactgttgtgctctgaataagcaacactgatggaagcaagttagcctgctccagcccctcctgaga

SEQ ID NO: 50258 - DNA, 80 bp, synthetic construct
  source 1..80: mol_type = other DNA
taacccagcagcagaggaagtgactcatcttcccagatgagatgggcggcatgcttccccagcagctctcagaaaatctg

SEQ ID NO: 50259 - DNA, 80 bp, synthetic construct
  source 1..80: mol_type = other DNA
aaacacattcagtgattagttccatccgtcagatgagaaaacagaggtggaatgaagaacacatgaatctgagtctccgt

SEQ ID NO: 50260 - DNA, 80 bp, synthetic construct
  source 1..80: mol_type = other DNA
cactttgggaggccatgatgggcagatcacctgaggtcatgagttccagaccagcctggccaacatggtgaaaccttgtc

SEQ ID NO: 50261 - DNA, 80 bp, synthetic construct; identical to SEQ ID NO: 16419
  source 1..80: mol_type = other DNA

SEQ ID NO: 50262 - DNA, 80 bp, synthetic construct
  source 1..80: mol_type = other DNA
gctgggtcagggttttacacagaaaggggcatggtaggatttaagggtcagaaagttccctctggcttgcaagaagatgg

SEQ ID NO: 50263 - DNA, 80 bp, synthetic construct
  source 1..80: mol_type = other DNA
ctggcccacccagttcagcctctggacagtggtccttcaaggtcccctccctgactgaagcctcagaggaaaagtcaggg

SEQ ID NO: 50264 - DNA, 80 bp, synthetic construct; identical to SEQ ID NO: 16420
  source 1..80: mol_type = other DNA

SEQ ID NO: 50265 - DNA, 80 bp, synthetic construct
  source 1..80: mol_type = other DNA
atcatagctcactgcagcctccaactcctgggctcaagggatcctccccacttcagcctccccagtagctgggaccacag

SEQ ID NO: 50266 - DNA, 80 bp, synthetic construct
  source 1..80: mol_type = other DNA
ccaccctccaccattttataataaggaaactgaggaccaggcagggaatgagacctgaccagcatgtcagtggcagagcc

SEQ ID NO: 50267 - DNA, 80 bp, synthetic construct
  source 1..80: mol_type = other DNA
tgggttgtcagtgagatcaggctgacctggcacgtacgtgtcatgatttacttcctcctcatcctctgcttccagaatta

SEQ ID NO: 50268 - DNA, 80 bp, synthetic construct; identical to SEQ ID NO: 16421
  source 1..80: mol_type = other DNA

SEQ ID NO: 50269 - DNA, 80 bp, synthetic construct
  source 1..80: mol_type = other DNA
ggaggcttcttgtgtcaactaaaactaaaatctaagcccctcaattcactgaatggacaacccacctcttggccaagggg

SEQ ID NO: 50270 - DNA, 80 bp, synthetic construct
  source 1..80: mol_type = other DNA
aagatgccaaactataaacatgacctagggtcacgccaggcaagggttaagtcccacacccatacactaaagaataaact

SEQ ID NO: 50271 - DNA, 80 bp, synthetic construct
  source 1..80: mol_type = other DNA
agactgtttcaggaattttttctgataagagaccaccgaccatggatgggttctggccagtttatagacaccgcacttga

SEQ ID NO: 50272 - DNA, 80 bp, synthetic construct; identical to SEQ ID NO: 16422
  source 1..80: mol_type = other DNA

SEQ ID NO: 50273 - DNA, 80 bp, synthetic construct
  source 1..80: mol_type = other DNA
gcttgagaccagcctaggcaacatagtgagacgctgtctctacaaaaacttacaaaattaaccagccggggtggcatgca

SEQ ID NO: 50274 - DNA, 80 bp, synthetic construct
  source 1..80: mol_type = other DNA
gaaataaagtcttctctccaaatttatagatctcatgatttttcagttatcacgtttcatctctatttcacagatgaaga

SEQ ID NO: 50275 - DNA, 80 bp, synthetic construct
  source 1..80: mol_type = other DNA
actttcagggaaggatgcagtttccaacacagtgtgttttcccataggctggagggagaaactgctgagagatggaggga

SEQ ID NO: 50276 - DNA, 80 bp, synthetic construct
  source 1..80: mol_type = other DNA
ggaagagccaggggctgtgttgaggttaggtggctgtgcaacctggacacccacccggcctgcacacctgctcctctcct

SEQ ID NO: 50277 - DNA, 80 bp, synthetic construct; identical to SEQ ID NO: 16423
  source 1..80: mol_type = other DNA

SEQ ID NO: 50278 - DNA, 80 bp, synthetic construct
  source 1..80: mol_type = other DNA
ttaacgagccatacacgggagtgtgtctgcacagcgacggtctgactccaaggcagcatccagcgggcagggaaggctga

SEQ ID NO: 50279 - DNA, 80 bp, synthetic construct
  source 1..80: mol_type = other DNA
accccgcccacaccccgtcttctgagccatctcacagtgatcctcaggacaggcctgaggtggagggttggatgtcagga

SEQ ID NO: 50280 - DNA, 80 bp, synthetic construct
  source 1..80: mol_type = other DNA
aagagtctcctatttttcctggtttatcagaaggcattttcctaagtgggttggcttgaagaaggtaagggcttgggttc

SEQ ID NO: 50281 - DNA, 80 bp, synthetic construct; identical to SEQ ID NO: 16424
  source 1..80: mol_type = other DNA

SEQ ID NO: 50282 - DNA, 80 bp, synthetic construct
  source 1..80: mol_type = other DNA
ctgacccttgctcaagttccacagctcaagttcaggaatattcttggaccaggctttgccagcctggggaagttgaggta

SEQ ID NO: 50283 - DNA, 80 bp, synthetic construct
  source 1..80: mol_type = other DNA
gaggccaggaatttgagaccagtctggccaaaatggtgaaaccctgtctctactaaaaatacaaaaatcagccaggtgtg

SEQ ID NO: 50284 - DNA, 80 bp, synthetic construct
  source 1..80: mol_type = other DNA
acaaacaaacaaaaagaaaaagatcaatcagataaacttagccagacaagctggtccccctaccaagaccattccatgca

SEQ ID NO: 50285 - DNA, 80 bp, synthetic construct; identical to SEQ ID NO: 16425
  source 1..80: mol_type = other DNA

SEQ ID NO: 50286 - DNA, 80 bp, synthetic construct
  source 1..80: mol_type = other DNA
taatccaagccagttcttgacctttctcagtggaatggtcatgtactcacatttctggtttctcaaagactcatttattc

SEQ ID NO: 50287 - DNA, 80 bp, synthetic construct
  source 1..80: mol_type = other DNA
atgtttctctgttattgcaccctgaaagttagactccaaacccacatcctcattccacgcaaagactttattccagagac

SEQ ID NO: 50288 - DNA, 80 bp, synthetic construct
  source 1..80: mol_type = other DNA
cctcatttgtaaaatcagggaataaataacctgatgttacagtgtcaaggggaggacccagtggggccttgtgtgtgaaa

SEQ ID NO: 50289 - DNA, 80 bp, synthetic construct; identical to SEQ ID NO: 16426
  source 1..80: mol_type = other DNA

SEQ ID NO: 50290 - DNA, 80 bp, synthetic construct
  source 1..80: mol_type = other DNA
ccactggatacttagtggacagagccccttcttgctgtggatccttggagctcagggagaagatgagggatttagtgaga

SEQ ID NO: 50291 - DNA, 80 bp, synthetic construct
  source 1..80: mol_type = other DNA
aacaagagcttggtaggagaagggctcaggtgggaaatgggagtgcagtgaggagactgggggatgaatgtggaaggttg

SEQ ID NO: 50292 - DNA, 80 bp, synthetic construct
  source 1..80: mol_type = other DNA
gagaggctggacttgaacaaacccagccttctatacaaccgtggagccagggcaagggagagacagaaggagcaagtgac

SEQ ID NO: 50293 - DNA, 80 bp, synthetic construct
  source 1..80: mol_type = other DNA
gtctccaggagcccctgagaagatttgcttcctctcccctgctaagctccaggtcctgagattaaattaggggctggagc

SEQ ID NO: 50294 - DNA, 80 bp, synthetic construct; identical to SEQ ID NO: 16427
  source 1..80: mol_type = other DNA

SEQ ID NO: 50295 - DNA, 80 bp, synthetic construct
  source 1..80: mol_type = other DNA
atagagacagacagagcagagaaaaagagaaaagtgtagtcagacagtgcagacaggcaggctcaaacgaagaggcacac

SEQ ID NO: 50296 - DNA, 80 bp, synthetic construct
  source 1..80: mol_type = other DNA
ctacagacagacctgcaggcagcatcagaagatccacccagaagaccaggagattgagagtgacctgcagagacctgcat

SEQ ID NO: 50297 - DNA, 80 bp, synthetic construct; identical to SEQ ID NO: 16428
  source 1..80: mol_type = other DNA

SEQ ID NO: 50298 - DNA, 80 bp, synthetic construct
  source 1..80: mol_type = other DNA
gggactgcagtacggcaggaagggtgggatggatgcctcctctcggggcacctcacaggacagatgagaatgaggtcaga

SEQ ID NO: 50299 - DNA, 80 bp, synthetic construct
  source 1..80: mol_type = other DNA
actatttttctgacccctgcagggcccagctctggaatattctccaggtgcccactgaccttccacacagacagcaggaa

SEQ ID NO: 50300 - DNA, 80 bp, synthetic construct
  source 1..80: mol_type = other DNA
agggagaggggaagctgtcccagtcagggcagacaccagagaggagtgaagttcagatccggctccagcagagcccctcc

SEQ ID NO: 50301 - DNA, 80 bp, synthetic construct
  source 1..80: mol_type = other DNA
ttccaactcttccaaatgccaactcctccaggaagccgttccagattcttccagctgggggtaacctctcccatatgctg

SEQ ID NO: 50302 - DNA, 80 bp, synthetic construct; identical to SEQ ID NO: 16429
  source 1..80: mol_type = other DNA

SEQ ID NO: 50303 - DNA, 80 bp, synthetic construct
  source 1..80: mol_type = other DNA
cagggtgagcatggccagggaaggagatagcactgcaaatgcttagaaaagtgactacacctgcatgtctgtggagctag

SEQ ID NO: 50304 - DNA, 80 bp, synthetic construct
  source 1..80: mol_type = other DNA
tttttcttaaaggcaattgggagctatagaaagtatctgaggaggaagtggccctgcttcagtggcccagagaatctgtg

SEQ ID NO: 50305 - DNA, 80 bp, synthetic construct
  source 1..80: mol_type = other DNA
agcctcccgagtagctgggactacaggcactcaccaccacgcccagctaatttacgtatttttagtagagatggggtttc

SEQ ID NO: 50306 - DNA, 80 bp, synthetic construct; identical to SEQ ID NO: 16430
  source 1..80: mol_type = other DNA

SEQ ID NO: 50307 - DNA, 80 bp, synthetic construct
  source 1..80: mol_type = other DNA
aatgaggaaataaaagctaggaggagttctgttacctgcccaaggccatgcagctactcagcaacagaactggggctcaa

SEQ ID NO: 50308 - DNA, 80 bp, synthetic construct
  source 1..80: mol_type = other DNA
tggtgccaaaacagcctgaagacggtcatttgggtcactttgtgtttggagcactacagcttcatgatccgagtgagatg

SEQ ID NO: 50309 - DNA, 80 bp, synthetic construct; identical to SEQ ID NO: 16431
  source 1..80: mol_type = other DNA

SEQ ID NO: 50310 - DNA, 80 bp, synthetic construct
  source 1..80: mol_type = other DNA
gagtctcacaaagctggacctcaagcatgctattgtcctcccagcagaccacccaaggtcctgctgggaggaatttccca

SEQ ID NO: 50311 - DNA, 80 bp, synthetic construct
  source 1..80: mol_type = other DNA
cagaccccgtgctccagccttctcttccccttcatttagtttagttcaattcaacaatcttgttcttttattgagacgga

SEQ ID NO: 50312 - DNA, 80 bp, synthetic construct
  source 1..80: mol_type = other DNA
acatgccaccatgcccggctaattttggtatttttagtagagacagagtttcaccatgttggccaggctggtttcgagct

SEQ ID NO: 50313 - DNA, 80 bp, synthetic construct
  source 1..80: mol_type = other DNA
tgaggtggaaaagaacatgatgaatttggggaatggcaagaatctattggagccagggaataatgctcactagggtgggg

SEQ ID NO: 50314 - DNA, 80 bp, synthetic construct; identical to SEQ ID NO: 16432
  source 1..80: mol_type = other DNA

SEQ ID NO: 50315 - DNA, 80 bp, synthetic construct
  source 1..80: mol_type = other DNA
ggagtttattgcctagtcaggcagataagagggaaacataagtaatgcaagagagtgaccggcagaaattggcctgggag

SEQ ID NO: 50316 - DNA, 80 bp, synthetic construct
  source 1..80: mol_type = other DNA
tggagggaggtgtctgccattatcatgaggaatggattgcccagcatctgctgctgatgttaccagaaaggggtctggat

SEQ ID NO: 50317 - DNA, 80 bp, synthetic construct; identical to SEQ ID NO: 16433
  source 1..80: mol_type = other DNA

SEQ ID NO: 50318 - DNA, 80 bp, synthetic construct
  source 1..80: mol_type = other DNA
ccctactcaagatgaagatggagatggagatgggtaagaatctcaattcaatggttttgaattttgtggggagagagtct

SEQ ID NO: 50319 - DNA, 80 bp, synthetic construct
  source 1..80: mol_type = other DNA
gttgacggtaaggtacagtttgagttttttagctgtcaggctgaatgtggggatagatggctttcatcctcaggagatgc

SEQ ID NO: 50320 - DNA, 80 bp, synthetic construct
  source 1..80: mol_type = other DNA
tatggaaggggatggatccagctgggcccgattgcctcagatgtgcttgaatatttatcaggaaaagagagcaagggcca

SEQ ID NO: 50321 - DNA, 80 bp, synthetic construct; identical to SEQ ID NO: 16434
  source 1..80: mol_type = other DNA

SEQ ID NO: 50322 - DNA, 80 bp, synthetic construct
  source 1..80: mol_type = other DNA
tagtttttattatattgaattaaattaaattatttatttatttattttttgagacagggtctcacgctgtcgcccaggct

SEQ ID NO: 50323 - DNA, 80 bp, synthetic construct
  source 1..80: mol_type = other DNA
ccaggctggtttattattttttaatcatctagcctaaaatgtcaaaaacttgtgactttttatgccaagtttgatgaaga

SEQ ID NO: 50324 - DNA, 80 bp, synthetic construct; identical to SEQ ID NO: 16435
  source 1..80: mol_type = other DNA

SEQ ID NO: 50325 - DNA, 80 bp, synthetic construct
  source 1..80: mol_type = other DNA
gcacatctgggattccaacccaggtctgaggccttaaagcctattctcagcctcacatttccctgagatctgtcctttgc

SEQ ID NO: 50326 - DNA, 80 bp, synthetic construct
  source 1..80: mol_type = other DNA
cccttgaagggtgagtctctgactgaccagatacctgggaaacgaagtttgtggctgacagactttcaggaacttgtctg

SEQ ID NO: 50327 - DNA, 80 bp, synthetic construct
  source 1..80: mol_type = other DNA
cctggagccacctggcctacctgggaccccaaaacttagctgcccacctgggagagagagggactgggttttttaaacta

SEQ ID NO: 50328 - DNA, 80 bp, synthetic construct; identical to SEQ ID NO: 16436
  source 1..80: mol_type = other DNA

SEQ ID NO: 50329 - DNA, 80 bp, synthetic construct
  source 1..80: mol_type = other DNA
tggactttgccctccacaaacagccatatctctaaaggataaagtactcccaggaaggctttgagccttggcagaaaagg

SEQ ID NO: 50330 - DNA, 80 bp, synthetic construct
  source 1..80: mol_type = other DNA
aagctaagtggagggtccagggtctggcctggaggcgggggcctcacattctgagctggcccacaggcttccacccctct

SEQ ID NO: 50331 - DNA, 80 bp, synthetic construct
  source 1..80: mol_type = other DNA
cagagaaaagcactgtgcttcttccccctgtcaaacttgtacaaggagcattgagtgatgttgagtttaacacttacctg

SEQ ID NO: 50332 - DNA, 80 bp, synthetic construct
  source 1..80: mol_type = other DNA
cagcaggaaacccactgcggctggtgagaggagctgaggctcagaaatggtcccctccacctcctctgggagcctttgct

SEQ ID NO: 50333 - DNA, 80 bp, synthetic construct; identical to SEQ ID NO: 16437
  source 1..80: mol_type = other DNA

SEQ ID NO: 50334 - DNA, 80 bp, synthetic construct
  source 1..80: mol_type = other DNA
ccacctctaccctatgaggatggctataattgaaaaggcagacaatgaaagtattagcaaagatgtagagaaattgggac

SEQ ID NO: 50335 - DNA, 80 bp, synthetic construct
  source 1..80: mol_type = other DNA
tttgtacatgaatgcttctaatacctaagacttgaaaacattatgctaagtgaaagaagccagtcacaaaaggccacata

SEQ ID NO: 50336 - DNA, 80 bp, synthetic construct; identical to SEQ ID NO: 16438
  source 1..80: mol_type = other DNA

SEQ ID NO: 50337 - DNA, 80 bp, synthetic construct
  source 1..80: mol_type = other DNA
aggtcaattttcaggctccagaaagcatgctgagtgaaaggaaactcctgccggtggtgagagggacatgaaacaatgga

SEQ ID NO: 50338 - DNA, 80 bp, synthetic construct
  source 1..80: mol_type = other DNA
cctctgaaggggctcagctttcctctcattgcagtgagtgagatactgatggttaccatagttaccatgtgaggaaagcc

SEQ ID NO: 50339 - DNA, 80 bp, synthetic construct
  source 1..80: mol_type = other DNA
ttagctctgtgatgacatgcacaggggttccctgtgcaggggttgaaatctactccaatacaccccagaaaagcctttat

SEQ ID NO: 50340 - DNA, 80 bp, synthetic construct
  source 1..80: mol_type = other DNA
ccactacctgcaggtgtgttgtgtagagaggtcagcagcttctccctagaagggaagtttttctgggagcagagtgaagt

SEQ ID NO: 50341 - DNA, 80 bp, synthetic construct; identical to SEQ ID NO: 16439
  source 1..80: mol_type = other DNA

SEQ ID NO: 50342 - DNA, 80 bp, synthetic construct
  source 1..80: mol_type = other DNA
gcaggggcctccgagtctagaagagcaggctctgccacgtgctggtggtgtaatgccaaggaagactttctctgagcctc

SEQ ID NO: 50343 - DNA, 80 bp, synthetic construct
  source 1..80: mol_type = other DNA
gtttcccactttcccagagaaacagagaagtgccctggggatcccgaacctatgtggatactgggagtcctagctccacc

SEQ ID NO: 50344 - DNA, 80 bp, synthetic construct; identical to SEQ ID NO: 16440
  source 1..80: mol_type = other DNA

SEQ ID NO: 50345 - DNA, 80 bp, synthetic construct
  source 1..80: mol_type = other DNA
ctcctggagtgtacccaggatagcttttctagtttttagtcctgtgtgagaagctgtgagttacaccagtaaccatctct

SEQ ID NO: 50346 - DNA, 80 bp, synthetic construct
  source 1..80: mol_type = other DNA
tgctgctccctctgcctccttctgcctctttgtctccccctgcaccgcccacctctgcctgcctccgggtccccccacag

SEQ ID NO: 50347 - DNA, 80 bp, synthetic construct
  source 1..80: mol_type = other DNA
ggggtggacactgagggaggcttgcaccgcaccttccaccagcctcccctctcactaccctaccttaaggccttcccctc

SEQ ID NO: 50348 - DNA, 80 bp, synthetic construct; identical to SEQ ID NO: 16441
  source 1..80: mol_type = other DNA

SEQ ID NO: 50349 - DNA, 80 bp, synthetic construct
  source 1..80: mol_type = other DNA
tttgggtggatttggagatcagagtccagctgtgccccagtccttcagtccttcccccgccagatgtttttaccctgaag

SEQ ID NO: 50350 - DNA, 80 bp, synthetic construct
  source 1..80: mol_type = other DNA
ctctgggagtttgggcaagtcactcccctgtctctgggcctcagggccctatctatgaatacggccactatggagtgtgg

SEQ ID NO: 50351 - DNA, 80 bp, synthetic construct; identical to SEQ ID NO: 16442
  source 1..80: mol_type = other DNA

SEQ ID NO: 50352 - DNA, 80 bp, synthetic construct
  source 1..80: mol_type = other DNA
ttgggaggctgaggcaggagaattgctcgaacctgggaggaagaggttgcagtgagctgagatcacaccattgcactcca

SEQ ID NO: 50353 - DNA, 80 bp, synthetic construct
  source 1..80: mol_type = other DNA
tccttccccatgttctaacatggggtccaatctgtgttcaaaaatggaattgaactcctagctttctccactctgccctc

SEQ ID NO: 50354 - DNA, 80 bp, synthetic construct
  source 1..80: mol_type = other DNA
atgggtcacctcgtccttttgcaggtggggaacacagccttgattgtgtttgtgagctattttggcagccgggtgcaccg

SEQ ID NO: 50355 - DNA, 80 bp, synthetic construct
  source 1..80: mol_type = other DNA
gcgctggggcccaccccacaggcattcatctggcaggatacaccccaaaacctcaacaccccaggacagctgctagtccc

SEQ ID NO: 50356 - DNA, 80 bp, synthetic construct; identical to SEQ ID NO: 16443
  source 1..80: mol_type = other DNA

SEQ ID NO: 50357 - DNA, 80 bp, synthetic construct
  source 1..80: mol_type = other DNA
ttgacaaatggatgtctcttacagaatgaccctaacaacctgatcgttcactttattccttccctctcctacccactcac

SEQ ID NO: 50358 - DNA, 80 bp, synthetic construct
  source 1..80: mol_type = other DNA
caggggaatcagtcctttttactctagggagctcccagcctgggagaggagacagataaaacaaaaaacaattgtgtgag

SEQ ID NO: 50359 - DNA, 80 bp, synthetic construct
  source 1..80: mol_type = other DNA
gggagagaagatgaagcagacatgacccagtggggcgcagggttggcgtgagcacgggcaactctgctacaaggtataga

SEQ ID NO: 50360 - DNA, 80 bp, synthetic construct; identical to SEQ ID NO: 16444
  source 1..80: mol_type = other DNA

SEQ ID NO: 50361 - DNA, 80 bp, synthetic construct
  source 1..80: mol_type = other DNA
ctgtgcaaggtcatgcatgttcttcatccttactaccatacaaacccctctgcaataggtgcccctgaatcctcaagcaa

SEQ ID NO: 50362 - DNA, 80 bp, synthetic construct
  source 1..80: mol_type = other DNA
ggcactggggacacagggatggggaaggcagacatgacctctctaataattgttgcatctaacgtctagtaggccccatg

SEQ ID NO: 50363 - DNA, 80 bp, synthetic construct; identical to SEQ ID NO: 16445
  source 1..80: mol_type = other DNA

SEQ ID NO: 50364 - DNA, 80 bp, synthetic construct
  source 1..80: mol_type = other DNA
gccaccactcccggctaatttttgtattttagtagcgatgggatttctccatgttggccagcctggtctcaaactcctga

SEQ ID NO: 50365 - DNA, 80 bp, synthetic construct
  source 1..80: mol_type = other DNA
gcagcctccgtggaaggcttctttcacgttcttgaccttggttcacatggctctttgcagcccaagggagtggctctccg

SEQ ID NO: 50366 - DNA, 80 bp, synthetic construct
  source 1..80: mol_type = other DNA
attaagaaattcttttctgtactctgcatctgtgtcccaagctgacactgaaccctcccccaaagtgaatgccaagggcc

SEQ ID NO: 50367 - DNA, 80 bp, synthetic construct
  source 1..80: mol_type = other DNA
ctccctggaacacccctcccctccctctttttctggaaaattgtgtttattcttccggacccagttcaaactacaccacc

SEQ ID NO: 50368 - DNA, 80 bp, synthetic construct; identical to SEQ ID NO: 16446
  source 1..80: mol_type = other DNA

SEQ ID NO: 50369 - DNA, 80 bp, synthetic construct
  source 1..80: mol_type = other DNA
caatggcaactgctcaagctacacagaaacccagcatctgagtgtggtggggatcatgttcgtggcacagaccctgctgg

SEQ ID NO: 50370 - DNA, 80 bp, synthetic construct
  source 1..80: mol_type = other DNA
ggctggagatggaatccctgccccctgccccatctggccagtaaaggtccagggaagccctggagagttccccatccctg

SEQ ID NO: 50371 - DNA, 80 bp, synthetic construct
  source 1..80: mol_type = other DNA
tcatgctgcgcctttatgtggacattaaccagatgccagaaggtgagcctcaggagcacatgtttgctagaccctagcta

SEQ ID NO: 50372 - DNA, 80 bp, synthetic construct; identical to SEQ ID NO: 16447
  source 1..80: mol_type = other DNA

SEQ ID NO: 50373 - DNA, 80 bp, synthetic construct
  source 1..80: mol_type = other DNA
acaagacttgagttaaacagagaggacagtgcacactggagagaacttttggagcagaacttggtgactcaaagtattac

SEQ ID NO: 50374 - DNA, 80 bp, synthetic construct
  source 1..80: mol_type = other DNA
ggtctgaaggtggccaggagggaggggtgttgggggttccagggttctggagtccttggagagcagtagcgtactcctgt

SEQ ID NO: 50375 - DNA, 80 bp, synthetic construct
  source 1..80: mol_type = other DNA
tgtgtggctgaatggacatgcagacgctgcttctcgttccccagcttttgcccacaagcgcctccagccagaacagatct

SEQ ID NO: 50376 - DNA, 80 bp, synthetic construct; identical to SEQ ID NO: 16448
  source 1..80: mol_type = other DNA

SEQ ID NO: 50377 - DNA, 80 bp, synthetic construct
  source 1..80: mol_type = other DNA
agataacaagtaaggagagaatcaagtctaatcagcgcaaaagccaaacccatccccggctttacaggtgcgtttgctaa

SEQ ID NO: 50378 - DNA, 80 bp, synthetic construct
  source 1..80: mol_type = other DNA
cctagcttactgcagccttggatgcctgggctcaagcaatcttcccacctcaggctcttgagtagctgagactgcaggtg

SEQ ID NO: 50379 - DNA, 80 bp, synthetic construct
  source 1..80: mol_type = other DNA
gtatttttatgaagcatttttggatgctgtggaaattgaaggaaaatgtacacaactcagccttgtgattaagaagtatg

SEQ ID NO: 50380 - DNA, 80 bp, synthetic construct; identical to SEQ ID NO: 16449
  source 1..80: mol_type = other DNA

SEQ ID NO: 50381 - DNA, 80 bp, synthetic construct
  source 1..80: mol_type = other DNA
tttcacaaaggacaaaaactgaggcacaaagaggttgtgtaggttgcccaaggttatgagttagtaatggaattcagacc

SEQ ID NO: 50382 - DNA, 80 bp, synthetic construct
  source 1..80: mol_type = other DNA
ggccacctcatgtctcagaggccagtcccaggatggcggcttagaagtgacagcctatcatcctgaccctaatgtcacca

SEQ ID NO: 50383 - DNA, 80 bp, synthetic construct; identical to SEQ ID NO: 16450
  source 1..80: mol_type = other DNA

SEQ ID NO: 50384 - DNA, 80 bp, synthetic construct
  source 1..80: mol_type = other DNA
atcgagaccatcctggctaacacggtgaaaccccgtctctactaaaaatagaaaaaattagccgggcatggtggtgggca

SEQ ID NO: 50385 - DNA, 80 bp, synthetic construct
  source 1..80: mol_type = other DNA
gcactatactttctgcctgggctccatcacatctttctgacagccttgcacagtgaatatcacctgctgtctccacagct

SEQ ID NO: 50386 - DNA, 80 bp, synthetic construct
  source 1..80: mol_type = other DNA
ttctgaatgtgccataggaatgttaagaattgggagggtgggtaggatcatctgggaagacttccctgaagaggagggat

SEQ ID NO: 50387 - DNA, 80 bp, synthetic construct
  source 1..80: mol_type = other DNA
gctggatctgaagatcagtccgtggcctccacccttccagcgggcacagtctagggaggacacagactcacggagaagtc

SEQ ID NO: 50388 - DNA, 80 bp, synthetic construct; identical to SEQ ID NO: 16451
  source 1..80: mol_type = other DNA

SEQ ID NO: 50389 - DNA, 80 bp, synthetic construct
  source 1..80: mol_type = other DNA
ctcccaaatagctgggattacaggtgtgtgccaccatgcctggctaattttgtatttttagtagagatggcgtttcacca

SEQ ID NO: 50390 - DNA, 80 bp, synthetic construct
  source 1..80: mol_type = other DNA
tttcattacattctgaaaatttgtgcattagatttcctccttctcaagtatgggaggtggctgttgagaaatcatagaca

SEQ ID NO: 50391 - DNA, 80 bp, synthetic construct
  source 1..80: mol_type = other DNA
agctctgatggtggtccaggccaggtggaagccgtgcattggcagtgaggggatagaggtgcatctgggagctacccagg

SEQ ID NO: 50392 - DNA, 80 bp, synthetic construct; identical to SEQ ID NO: 16452
  source 1..80: mol_type = other DNA

SEQ ID NO: 50393 - DNA, 80 bp, synthetic construct
  source 1..80: mol_type = other DNA
aaaggaaagagagagagcctatattgctggttacagatgatctccaaattgagtcctaaatttgaacagagaagaatgcc

SEQ ID NO: 50394 - DNA, 80 bp, synthetic construct
  source 1..80: mol_type = other DNA
ctgtgcgcctcagattctgagaatgcacgagtccttgagtcggagctgctatgattcagatactcagattttaagagctg

SEQ ID NO: 50395 - DNA, 80 bp, synthetic construct
  source 1..80: mol_type = other DNA
aaaaagaaacaagggctgagaacatgatgatctgcttccagcagctctcaggcaataaatattgatgtgggaggaattgt

SEQ ID NO: 50396 - DNA, 80 bp, synthetic construct; identical to SEQ ID NO: 16453
  source 1..80: mol_type = other DNA

SEQ ID NO: 50397 - DNA, 80 bp, synthetic construct
  source 1..80: mol_type = other DNA
agacaaggtctgtcggctctgacaggttcaaggccatctcctctaaatgactcactgtctctggagaaatatgtgagcat

SEQ ID NO: 50398 - DNA, 80 bp, synthetic construct
  source 1..80: mol_type = other DNA
caatagcagtccccacagagaagagcaggacatgggattgggggaggccatgcagggaatgggaggggacaggagcccta

SEQ ID NO: 50399 - DNA, 80 bp, synthetic construct
  source 1..80: mol_type = other DNA
actcctggcagatggctctgcagggtctgtggggtaaagatggtctcttgagggctccctgacagattcttcgtccccat

SEQ ID NO: 50400 - DNA, 80 bp, synthetic construct
  source 1..80: mol_type = other DNA
gtccctctccaggctctgagcaccaccggactctgtgaccatagagaccaggagtctgtttgtctgttatttctggaata

SEQ ID NO: 50401 - DNA, 80 bp, synthetic construct; identical to SEQ ID NO: 16454
  source 1..80: mol_type = other DNA

SEQ ID NO: 50402 - DNA, 80 bp, synthetic construct
  source 1..80: mol_type = other DNA
tccctgggactttgtgtctccgtggcagcatctgtgagttctgaggtgcgcaggcctcctagtgcccagggcctccactt

SEQ ID NO: 50403 - DNA, 80 bp, synthetic construct
  source 1..80: mol_type = other DNA
gaccaccaggtctgcacatagagcttcctttaacatcgacgaggcttgaggccctgttggggcaatctgcttgagtggtt

SEQ ID NO: 50404 - DNA, 80 bp, synthetic construct; identical to SEQ ID NO: 16455
  source 1..80: mol_type = other DNA

SEQ ID NO: 50405 - DNA, 80 bp, synthetic construct
  source 1..80: mol_type = other DNA
ctgacttcagtagggatggcaccatgctcgaggggctgaagaaaagacccggagtgagcaaacaagacatagggtttatt

SEQ ID NO: 50406 - DNA, 80 bp, synthetic construct
  source 1..80: mol_type = other DNA
acaaagggccttgatccttcatacagcctgtgtttcatgggatgagccagaggttcagatgttcttcataaataagaaat

SEQ ID NO: 50407 - DNA, 80 bp, synthetic construct
  source 1..80: mol_type = other DNA
gtcaggagttcgagactggcctgaccaaatggtgaaacccgtctctactaaaaatataaaaattagctgggcatgatggt

SEQ ID NO: 50408 - DNA, 80 bp, synthetic construct; identical to SEQ ID NO: 16456
  source 1..80: mol_type = other DNA

SEQ ID NO: 50409 - DNA, 80 bp, synthetic construct
  source 1..80: mol_type = other DNA
aaacaggagtgcttgttcttggcatctttctccgagcaggccagctcttaaggggaaaactaagagaaaaagtgcctttt

SEQ ID NO: 50410 - DNA, 80 bp, synthetic construct
  source 1..80: mol_type = other DNA
tatgtatgcattggggagtggataaatcaagctgtttagcacatgccttacctcacttacttatctttttgtgtgtgtgg

SEQ ID NO: 50411 - DNA, 80 bp, synthetic construct
  source 1..80: mol_type = other DNA
ttctgctttttgcttctatgagtttggcttttttatatttcacaccaaggtgagaacatgcagtatttgtttttctgtgc

SEQ ID NO: 50412 - DNA, 80 bp, synthetic construct; identical to SEQ ID NO: 16457
  source 1..80: mol_type = other DNA

SEQ ID NO: 50413 - DNA, 80 bp, synthetic construct
  source 1..80: mol_type = other DNA
gtacagtggtgcgatcttggctcactgcaacctccgcctccggggttcaagcaattctcctgcctcagccttctgagtag

SEQ ID NO: 50414 - DNA, 80 bp, synthetic construct
  source 1..80: mol_type = other DNA
tgcccagcctacatgagatattttgaattggcatacaatgtgtaataattatatcagggtaaatggggtatccaacacct

SEQ ID NO: 50415 - DNA, 80 bp, synthetic construct
  source 1..80: mol_type = other DNA
gtctcactctgtcacccaggctggagtgcagtggcacaatcttggctcactgcaacctccacctcccgagttaaagcaat

SEQ ID NO: 50416 - DNA, 80 bp, synthetic construct
  source 1..80: mol_type = other DNA
cttagttatttttatttattatttatttattttgaaatggagtctctctctgtcacccaggctggagtgcagtagcgcaa

SEQ ID NO: 50417 - DNA, 80 bp, synthetic construct; identical to SEQ ID NO: 16458
  source 1..80: mol_type = other DNA

SEQ ID NO: 50418 - DNA, 80 bp, synthetic construct
  source 1..80: mol_type = other DNA
tctccacagcctccccagcacttgttatctatcatattttttataatagccattctactctattttaatatattatatgg

SEQ ID NO: 50419 - DNA, 80 bp, synthetic construct
  source 1..80: mol_type = other DNA
tctgtaccatgcaatgttctaagacctttgtatggatgatctcatttagtccccataacccacctgtgaagtagatatag

SEQ ID NO: 50420 - DNA, 80 bp, synthetic construct; identical to SEQ ID NO: 16459
  source 1..80: mol_type = other DNA

SEQ ID NO: 50421 - DNA, 80 bp, synthetic construct
  source 1..80: mol_type = other DNA
tactaaaaatacgaaaaattagccaggcatggtggtgggtgcctataatcccagctacttgggaggctgaggcaggagaa

SEQ ID NO: 50422 - DNA, 80 bp, synthetic construct
  source 1..80: mol_type = other DNA
ggaagtgtgtttcattcttcatggaaactcagctcttgctgaaaaacactctctttcatggggtgggaggaagttaagca

SEQ ID NO: 50423 - DNA, 80 bp, synthetic construct
  source 1..80: mol_type = other DNA
gacaaagccttcttttaataggaacttagttctcaccaaggatagcgcctggatccctgggggcccagcagacaggaggg

SEQ ID NO: 50424 - DNA, 80 bp, synthetic construct; identical to SEQ ID NO: 16460
  source 1..80: mol_type = other DNA

SEQ ID NO: 50425 - DNA, 80 bp, synthetic construct
  source 1..80: mol_type = other DNA
ttggtgtccccactgtgtcctgcacaagacctccaccaccgtgcctctgcttcaaatctgctctccctttctatctaccc

SEQ ID NO: 50426 - DNA, 80 bp, synthetic construct
  source 1..80: mol_type = other DNA
gggagactagagaacctgggtttggtttgagagcctgctctgccaataactgtctgggtgacactcccccttttggggcc

SEQ ID NO: 50427 - DNA, 80 bp, synthetic construct
  source 1..80: mol_type = other DNA
acccgaggtcaggagttcgagaccagcctgcccaacatggtgaaacccagtctctactaaaaatacaaaattagccaggt

SEQ ID NO: 50428 - DNA, 80 bp, synthetic construct; identical to SEQ ID NO: 16461
  source 1..80: mol_type = other DNA

SEQ ID NO: 50429 - DNA, 80 bp, synthetic construct
  source 1..80: mol_type = other DNA
agatcactctcccagagctcagacgggactcagaaaggagcaaggattcactgattctctttaaggcagcatgtccaaaa

SEQ ID NO: 50430 - DNA, 80 bp, synthetic construct
  source 1..80: mol_type = other DNA
aacatataatagtaaaaaattaatgatgaaacattttccttttttcatactaagtcttcaaaatgcgatgtgtattttat

SEQ ID NO: 50431 - DNA, 80 bp, synthetic construct
  source 1..80: mol_type = other DNA
gccttacccaaaaaaataagacatggtaggatttcagtttccttcaaatcacaccacaaagatgcctcctaattctccag

SEQ ID NO: 50432 - DNA, 80 bp, synthetic construct
  source 1..80: mol_type = other DNA
gcctcttgagtagctgggaccacaggtgcatgtcaccatgcccagctaattttaaaatttttgtcgaaatggggtcttac

SEQ ID NO: 50433 - DNA, 80 bp, synthetic construct; identical to SEQ ID NO: 16462
  source 1..80: mol_type = other DNA

SEQ ID NO: 50434 - DNA, 80 bp, synthetic construct
  source 1..80: mol_type = other DNA
ccatcagcagttcaagaactccctggcggcatgatggcatctcctcttgctttcattttttcccccaaaagcctggcatt

SEQ ID NO: 50435 - DNA, 80 bp, synthetic construct
  source 1..80: mol_type = other DNA
ataaacatgaatcctgctcttgcagagctcagggtccagcaggggagaaagatgtcaaataaggtttgcctcagacctaa

SEQ ID NO: 50436 - DNA, 80 bp, synthetic construct
  source 1..80: mol_type = other DNA
gcaccagggaggcccccccagcagacatcagcatcagcccactgtggtcactatggtgatgcccacttgccatcctggcc

SEQ ID NO: 50437 - DNA, 80 bp, synthetic construct; identical to SEQ ID NO: 16463
  source 1..80: mol_type = other DNA

SEQ ID NO: 50438 - DNA, 80 bp, synthetic construct
  source 1..80: mol_type = other DNA
tccctgctggaatgaaagaagaaagaagaaagggaaaaaaagtccaagggaacacacacatgaattaatatttgaatgaa

SEQ ID NO: 50439 - DNA, 80 bp, synthetic construct
  source 1..80: mol_type = other DNA
atccagcatttgcctcatgatgatctcagaaaaaatgagatgggagaagaaagagaaagtgtcagacccaaccagagtgt

SEQ ID NO: 50440 - DNA, 80 bp, synthetic construct; identical to SEQ ID NO: 16464
  source 1..80: mol_type = other DNA

SEQ ID NO: 50441 - DNA, 80 bp, synthetic construct
  source 1..80: mol_type = other DNA
gagcaagtttattaagaaagtaaaggaataaagaatggctactccataggcagagcagggtgttcccgaaagtaagagga

SEQ ID NO: 50442 - DNA, 80 bp, synthetic construct
  source 1..80: mol_type = other DNA
ttctgttctccagacatggggctatcaggacactcctaagtctgggtctctttagtaaacatgatcaatctgttccctta

SEQ ID NO: 50443 - DNA, 80 bp, synthetic construct
  source 1..80: mol_type = other DNA
agcctcttgtgtagctgggactactggtgtgtgccaccacacctggctgattttttttttttttgagagggagtctcgct

SEQ ID NO: 50444 - DNA, 80 bp, synthetic construct
  source 1..80: mol_type = other DNA
ttagtcatgttggccaggctggtcttgaactcctgacctcaggtgatccactggcctcaccctcccaaagtgctgagatt

SEQ ID NO: 50445 - DNA, 80 bp, synthetic construct; identical to SEQ ID NO: 16465
  source 1..80: mol_type = other DNA

SEQ ID NO: 50446 - DNA, 80 bp, synthetic construct
  source 1..80: mol_type = other DNA
aaattacactccacttgcccacttgtattcagatgaccctgtgcccatagcaacttctccaagattttgtttcctcatct

SEQ ID NO: 50447 - DNA, 80 bp, synthetic construct
  source 1..80: mol_type = other DNA
ctggaccacttattatctgtgtgaaataagttgaaataagttattttctctctgtgtctcagttttatcacctgacaaaa

SEQ ID NO: 50448 - DNA, 80 bp, synthetic construct; identical to SEQ ID NO: 16466
  source 1..80: mol_type = other DNA

SEQ ID NO: 50449 - DNA, 80 bp, synthetic construct
  source 1..80: mol_type = other DNA
agcagtgacagtgggagtgaagattgactggattggtgtgttggtgttttgggtaacattggtggtgatgatggcagtgg

SEQ ID NO: 50450 - DNA, 80 bp, synthetic construct
  source 1..80: mol_type = other DNA
ggtgatcatgacagagacaacaataacaatcatcacatcgtgatggtaatgtcgtgactaaatttgtcatttagtcacaa

SEQ ID NO: 50451 - DNA, 80 bp, synthetic construct
  source 1..80: mol_type = other DNA
aaccacaagaattttattcatcctttcaaaaccacttgttgggtacctatagggccaagaacaaatggaacactgcaggc

SEQ ID NO: 50452 - DNA, 80 bp, synthetic construct
  source 1..80: mol_type = other DNA
cctggggagtccacgaagaagcaggatggcctagtccagattgcaccaaacctgactgtgatccagttcattaaaggtaa

SEQ ID NO: 50453 - DNA, 80 bp, synthetic construct; identical to SEQ ID NO: 16467
  source 1..80: mol_type = other DNA

SEQ ID NO: 50454 - DNA, 80 bp, synthetic construct
  source 1..80: mol_type = other DNA
gtagtctcagctgcttgggaggctgaggcagaagaatcacttgaacctgggaggcagaggttgcagtgagccaagatcac

SEQ ID NO: 50455 - DNA, 80 bp, synthetic construct
  source 1..80: mol_type = other DNA
agggcttctagatcagttcagatctgagcctgtgttcctgaaggtcaggcctgtgctggctcatctatgacccttcctct

SEQ ID NO: 50456 - DNA, 80 bp, synthetic construct
  source 1..80: mol_type = other DNA
agccaggagtagactcaatgatctaacgtcttgaggctatgatcctgagactacgaactcagtctatcagtaaccagagt

SEQ ID NO: 50457 - DNA, 80 bp, synthetic construct; identical to SEQ ID NO: 16468
  source 1..80: mol_type = other DNA

SEQ ID NO: 50458 - DNA, 80 bp, synthetic construct
  source 1..80: mol_type = other DNA
ggcatgtccacaggagttgcctcatagtccttactgaggatttctgcaacaggaaggaattaggcctattcttgggaaga

SEQ ID NO: 50459 - DNA, 80 bp, synthetic construct
  source 1..80: mol_type = other DNA
aaagaaagaattagccgggcttggtggtgcatgcctgtggtccaagctactggggaggctgaggtgggaggattgcttga

SEQ ID NO: 50460 - DNA, 80 bp, synthetic construct; identical to SEQ ID NO: 16469
  source 1..80: mol_type = other DNA

SEQ ID NO: 50461 - DNA, 80 bp, synthetic construct
  source 1..80: mol_type = other DNA
gggtgccctcaggccctgtggctggtgagccagcctggcttctgctgagctccaggggccagtctaactctagggcctgg

SEQ ID NO: 50462 - DNA, 80 bp, synthetic construct
  source 1..80: mol_type = other DNA
tgtgagagatacaatctctctgatggaggttacgtagtccctgaatggagcgagaccctgccttgtctgatggaagagac

SEQ ID NO: 50463 - DNA, 80 bp, synthetic construct
  source 1..80: mol_type = other DNA
cagaggatacctggcctctagctgggtgaggctcctggctgatgaggaagacagagtcactgacttgagggaggccctgg

SEQ ID NO: 50464 - DNA, 80 bp, synthetic construct
  source 1..80: mol_type = other DNA
ggtgccatgctgtggatgctgaggagagatgggggatggctacaaagcacactgcagtgatcagtgcaggagaatggact

SEQ ID NO: 50465 - DNA, 80 bp, synthetic construct; identical to SEQ ID NO: 16470
  source 1..80: mol_type = other DNA

SEQ ID NO: 50466 - DNA, 80 bp, synthetic construct
  source 1..80: mol_type = other DNA
agggggaattccacagcccccacccaccgtcctgaactgtttgtttttattttctggttcccaaggaaacagatcctagc

SEQ ID NO: 50467 - DNA, 80 bp, synthetic construct
  source 1..80: mol_type = other DNA
gttttgctcctctccctccataccttatatttgacttcagtcttgcctactgcaggcagaaacacaggttagtggagaga

SEQ ID NO: 50468 - DNA, 80 bp, synthetic construct; identical to SEQ ID NO: 16471
  source 1..80: mol_type = other DNA

SEQ ID NO: 50469 - DNA, 80 bp, synthetic construct
  source 1..80: mol_type = other DNA
gcagactcagatttcactttctctggaggtctttgattctgccccagacatattgacatttgatcacatattagtccata

SEQ ID NO: 50470 - DNA, 80 bp, synthetic construct
  source 1..80: mol_type = other DNA
acaaacaaaaccccctgatcttttaaagaaggcttacgttctggtagggtgacaataaaacagctagatgagtgagaggt

SEQ ID NO: 50471 - DNA, 80 bp, synthetic construct
  source 1..80: mol_type = other DNA
gggagaggaatgaatacgtagagtagaaaaaatgaaatgacatgggatgggatggacgaaattgaatcaaataggatggc

SEQ ID NO: 50472 - DNA, 80 bp, synthetic construct
  source 1..80: mol_type = other DNA
tgggaggccaaggagggtggattacttggggcctagggttcgagagcagcttagccaacaaggcaaaacccatctctact

SEQ ID NO: 50473 - DNA, 80 bp, synthetic construct; identical to SEQ ID NO: 16472
  source 1..80: mol_type = other DNA

SEQ ID NO: 50474 - DNA, 80 bp, synthetic construct
  source 1..80: mol_type = other DNA
gtatgcttgtcatccatggctgcgggcatggccaccttcctgcccaagttcctggagcgccagttttccatcacagcctc

SEQ ID NO: 50475 - DNA, 80 bp, synthetic construct
  source 1..80: mol_type = other DNA
ttctttatcggctgctccagccaccagattgcgggcatcacacaccagaccaggtgagtgtgtgcgtgggcacgtaaagg

SEQ ID NO: 50476 - DNA, 80 bp, synthetic construct; identical to SEQ ID NO: 16473
  source 1..80: mol_type = other DNA

SEQ ID NO: 50477 - DNA, 80 bp, synthetic construct
  source 1..80: mol_type = other DNA
atgagagggtgagcaagggactggatggcccctatcagggaggctgcagaggggactcaggcactgggaaaagattggac

SEQ ID NO: 50478 - DNA, 80 bp, synthetic construct
  source 1..80: mol_type = other DNA
cacacctttacccttgggagccttcttggagaggatgttggaagtcacattcctgcctcttctccagaatgatttcattt

SEQ ID NO: 50479 - DNA, 80 bp, synthetic construct
  source 1..80: mol_type = other DNA
gccaaggagcacccagcccctccccgtctgtcccaggtcccaccctcgctgatctctcccccatctcccctccctcctcc

SEQ ID NO: 50480 - DNA, 80 bp, synthetic construct; identical to SEQ ID NO: 16474
  source 1..80: mol_type = other DNA

SEQ ID NO: 50481 - DNA, 80 bp, synthetic construct
  source 1..80: mol_type = other DNA
gaccatttgggaccaactgagctaggcaagaagaactttccatatttctgcacaaccgcaggtactaacagctgcaagaa

SEQ ID NO: 50482 - DNA, 80 bp, synthetic construct
  source 1..80: mol_type = other DNA
agccaggactctccccacagaagcaatcagctccaggtggtcaatgacagcgaggagcggaggaaggactccctagctct

SEQ ID NO: 50483 - DNA, 80 bp, synthetic construct
  source 1..80: mol_type = other DNA
acacacacaagcactgtctggcagaggaggaagaggaaatattttgtggctgatgatcttccttccctctctgatagagt

SEQ ID NO: 50484 - DNA, 80 bp, synthetic construct; identical to SEQ ID NO: 16475
  source 1..80: mol_type = other DNA

SEQ ID NO: 50485 - DNA, 80 bp, synthetic construct
  source 1..80: mol_type = other DNA
ccctctgacatcctgcccctgcccaccttcaccttgccctggccacctggagctggggcaccccagggatttgggaacag

SEQ ID NO: 50486 - DNA, 80 bp, synthetic construct
  source 1..80: mol_type = other DNA
gtcccacactcatagctctgattttctgagaaatgaagcaatcattgattttcggagaaaggaagctgattgagggaaag

SEQ ID NO: 50487 - DNA, 80 bp, synthetic construct
  source 1..80: mol_type = other DNA
ctccatacttgcccaccttcattgcaaggagctcactatcacgccatcatcgggcagccctgatgatgaaaatcctctgt

SEQ ID NO: 50488 - DNA, 80 bp, synthetic construct
  source 1..80: mol_type = other DNA
tgcccattggacggctttaaccctgtctgcgaccccagcactcgtgtggaatacatcacaccctgccacgcaggctgctc

SEQ ID NO: 50489 - DNA, 80 bp, synthetic construct; identical to SEQ ID NO: 16476
  source 1..80: mol_type = other DNA

SEQ ID NO: 50490 - DNA, 80 bp, synthetic construct
  source 1..80: mol_type = other DNA
aaaattagccaggcgtggtggtgtgcacctgtaatcccagctactcaggaggctgaggcaggagaatcacttgaatccgg

SEQ ID NO: 50491 - DNA, 80 bp, synthetic construct
  source 1..80: mol_type = other DNA
agatgcaaaaggaaagaactcacaggaattccagaggtgctgataggtaaaacaactggtccctacaagcacatacaaag

SEQ ID NO: 50492 - DNA, 80 bp, synthetic construct
  source 1..80: mol_type = other DNA
aaggaacacacatgcgcaagcatgcacacacactgtttctgttggagcagaagcacaagggttcatgaagggaaggcagg

SEQ ID NO: 50493 - DNA, 80 bp, synthetic construct; identical to SEQ ID NO: 16477
  source 1..80: mol_type = other DNA

SEQ ID NO: 50494 - DNA, 80 bp, synthetic construct
  source 1..80: mol_type = other DNA
atttgtgggggcagcagcatcaggctggtggttatgacaacatctccctctctccagagtcctcccacctcccaccctca

SEQ ID NO: 50495 - DNA, 80 bp, synthetic construct
  source 1..80: mol_type = other DNA
tggagcagtgaactcctgtggatatgggaaccgattcaaatccttcttaggcctctaactgactctgttaccttaggcaa

SEQ ID NO: 50496 - DNA, 80 bp, synthetic construct; identical to SEQ ID NO: 16478
  source 1..80: mol_type = other DNA

SEQ ID NO: 50497 - DNA, 80 bp, synthetic construct
  source 1..80: mol_type = other DNA
gactgttgtcacactggcctggaatcgtgtcttgacatgtctgcctccttggattgtgaacatcttggctcagggatggg

SEQ ID NO: 50498 - DNA, 80 bp, synthetic construct
  source 1..80: mol_type = other DNA
cttcctgccatggaattagatgaatgtgaagggtcaggaaaaacccaagtgaagggtgaggaaaaacccaagtgaagcct

SEQ ID NO: 50499 - DNA, 80 bp, synthetic construct
  source 1..80: mol_type = other DNA
aagatgatatgcacttaggggtcacacagcttgtgtgaagggtcttcagacccttgtgtgaaggatcagcacagcttcat

SEQ ID NO: 50500 - DNA, 80 bp, synthetic construct; identical to SEQ ID NO: 16479
  source 1..80: mol_type = other DNA

SEQ ID NO: 50501 - DNA, 80 bp, synthetic construct
  source 1..80: mol_type = other DNA
ggggcacatgagtctagaagctctggtctatgggaaagcaaagagaagcccaggcctcttggcttgggctggcttctatc

SEQ ID NO: 50502 - DNA, 80 bp, synthetic construct
  source 1..80: mol_type = other DNA
agaatgtgggggaatgatgctctcctggctccctccctcttcttctctactttctctctgcttccctctccctgcccacc

SEQ ID NO: 50503 - DNA, 80 bp, synthetic construct
  source 1..80: mol_type = other DNA
ccttggccagctgcctgcccttggaggctcttgaagtctcttcctcctcttcccactccaggttttctacaccaactgca

SEQ ID NO: 50504 - DNA, 80 bp, synthetic construct; identical to SEQ ID NO: 16480
  source 1..80: mol_type = other DNA

SEQ ID NO: 50505 - DNA, 80 bp, synthetic construct
  source 1..80: mol_type = other DNA
agtactggttccctggcccacagcccaggctcctacttgcccaggggagaggaggacatacctagggccctgtcctggcc

SEQ ID NO: 50506 - DNA, 80 bp, synthetic construct
  source 1..80: mol_type = other DNA
gccttttgggccaagatctttgtggccctcgtcctaagaatgcctgctggccctgacaaattgtcacctgagttcaaagt

SEQ ID NO: 50507 - DNA, 80 bp, synthetic construct
  source 1..80: mol_type = other DNA
ttcacgccattctcctgcctcagcctccctagtagctgggattacaggcacccgccaccacacccaactaattgtatttt

SEQ ID NO: 50508 - DNA, 80 bp, synthetic construct
  source 1..80: mol_type = other DNA
acagaagacttctgcaaccagaagtgtgggggtattttcccacacaccaggcactcaattaattctgcagtggaccctag

SEQ ID NO: 50509 - DNA, 80 bp, synthetic construct
  source 1..80: mol_type = other DNA
gctgttttaccaatgattctgactgaccagccgtatgctggggtttccacagccccatctttgagtttgctttatttgct

SEQ ID NO: 50510 - DNA, 80 bp, synthetic construct; identical to SEQ ID NO: 16481
  source 1..80: mol_type = other DNA

SEQ ID NO: 50511 - DNA, 80 bp, synthetic construct
  source 1..80: mol_type = other DNA
ttccaagaattttaggagtgtatgccgggaagaccaaatacacatctcacaatatcacagggacctcagagcaagataat

SEQ ID NO: 50512 - DNA, 80 bp, synthetic construct
  source 1..80: mol_type = other DNA
actttctaggaaattagaagggaaatggagcctcttgcaaataccagaagacatgtagatctagaacacaagctggcctg

SEQ ID NO: 50513 - DNA, 80 bp, synthetic construct
  source 1..80: mol_type = other DNA
aaatggggctaatgtacacctcgctcataggagtgatgtggggttgcagggcagagttactgagcccgtagtaagcgctc

SEQ ID NO: 50514 - DNA, 80 bp, synthetic construct; identical to SEQ ID NO: 16482
  source 1..80: mol_type = other DNA

SEQ ID NO: 50515 - DNA, 80 bp, synthetic construct
  source 1..80: mol_type = other DNA
catgtctctgcttgttagaggagtgaagaaagaagacaagactttggctgtgggcatccagttcatgttcctgaggattt

SEQ ID NO: 50516 - DNA, 80 bp, synthetic construct
  source 1..80: mol_type = other DNA
gtatagaggcagagtctagacagcccgtcaggaagccacctcggatgcaggggtggggcgggcttgagggccagacagcc

SEQ ID NO: 50517 - DNA, 80 bp, synthetic construct
  source 1..80: mol_type = other DNA
tgggccctgagctgtgggcgtcgagctgtctgtcgctactacaataatgacctgctccgaaaccggtgagacctggtttg

SEQ ID NO: 50518 - DNA, 80 bp, synthetic construct; identical to SEQ ID NO: 16483
  source 1..80: mol_type = other DNA

SEQ ID NO: 50519 - DNA, 80 bp, synthetic construct
  source 1..80: mol_type = other DNA
cagctctgtctccctcatcatgggacttatcttgtctggggctcagtcttcccatctgtacaaaggggaactcaaaggaa

SEQ ID NO: 50520 - DNA, 80 bp, synthetic construct
  source 1..80: mol_type = other DNA
tcaaacaagggctttgatagttaaacaggggagagggaatccgtttgttcttgtggcaggtggcgcaatataaaattgca

SEQ ID NO: 50521 - DNA, 80 bp, synthetic construct; identical to SEQ ID NO: 16484
  source 1..80: mol_type = other DNA

SEQ ID NO: 50522 - DNA, 80 bp, synthetic construct
  source 1..80: mol_type = other DNA
aagaggcaaggaccaaagagagcagatccagccctgccgtagagcagcaattgctagtgtcggggccagggaagaagcca

SEQ ID NO: 50523 - DNA, 80 bp, synthetic construct
  source 1..80: mol_type = other DNA
tgatcctctctcagcctttgcttgctagtctgaaccaaagagttgtttgggcatttgctgtgttggccatttctggagca

SEQ ID NO: 50524 - DNA, 80 bp, synthetic construct
  source 1..80: mol_type = other DNA
cgcctggatcaccttctttgagccttagccatctcctgtcaggtaggaatgaacttgccagccttcaggctcgttcagct

SEQ ID NO: 50525 - DNA, 80 bp, synthetic construct
  source 1..80: mol_type = other DNA
gacttggcagggccttcaagaggcctgtgtgggggccccaggaatccttagctgaagcggggagactcactctccatctc

SEQ ID NO: 50526 - DNA, 80 bp, synthetic construct; identical to SEQ ID NO: 16485
  source 1..80: mol_type = other DNA

SEQ ID NO: 50527 - DNA, 80 bp, synthetic construct
  source 1..80: mol_type = other DNA
aggatcctaatttctctattttctcctgggtgcctgggtctgtgtcacctggggcagtgtggataatgtttagttctgtg

SEQ ID NO: 50528 - DNA, 80 bp, synthetic construct
  source 1..80: mol_type = other DNA
tttgttttatggctagtcttatctggcctggttatttccttgcggggaggagagggtttgctaatctgctcccagcccaa

SEQ ID NO: 50529 - DNA, 80 bp, synthetic construct; identical to SEQ ID NO: 16486
  source 1..80: mol_type = other DNA

SEQ ID NO: 50530 - DNA, 80 bp, synthetic construct
  source 1..80: mol_type = other DNA
gttcttgcataatgtctcttctattacaaaaattctttcttcataaactgcattagaggtttgcaacaaccacatcattt

SEQ ID NO: 50531 - DNA, 80 bp, synthetic construct
  source 1..80: mol_type = other DNA
ggtttcaaaaatggaataaggtcatgaggatttctgaatcctcacctgtccaaattgtcattcacattttatagaagagg

SEQ ID NO: 50532 - DNA, 80 bp, synthetic construct
  source 1..80: mol_type = other DNA
tttttttttttttagtagagacggggtttcaccatgttggccagactggtcctgaatcataatttatgttaagtaaattg

SEQ ID NO: 50533 - DNA, 80 bp, synthetic construct; identical to SEQ ID NO: 16487
  source 1..80: mol_type = other DNA

SEQ ID NO: 50534 - DNA, 80 bp, synthetic construct
  source 1..80: mol_type = other DNA
ggtctcgaactcctgggctcaaatgatcctcccacctcagcctccaaattgctgggattacagacatgacctaccgtccc

SEQ ID NO: 50535 - DNA, 80 bp, synthetic construct
  source 1..80: mol_type = other DNA
cgccacggtgaaggtggtcttccagtccccagccatgcctgggggaggaaggcagggagcaaagctggagtctcatccca

SEQ ID NO: 50536 - DNA, 80 bp, synthetic construct
  source 1..80: mol_type = other DNA
ctgaaccacgaagtccacggtctcctctggcagggagcgccccacaaactccaggatcttttgaatctcccttttcgggt

SEQ ID NO: 50537 - DNA, 80 bp, synthetic construct; identical to SEQ ID NO: 16488
  source 1..80: mol_type = other DNA

SEQ ID NO: 50538 - DNA, 80 bp, synthetic construct
  source 1..80: mol_type = other DNA
caggatggggaatctggtcctgctgtgggggctgcccagggagggggctgggtggccttggcgggtccctgtgaggtgcc

SEQ ID NO: 50539 - DNA, 80 bp, synthetic construct
  source 1..80: mol_type = other DNA
tgccaacacagggttgctgtgcgttgtagccaccaccccttagctccacactttccttcctcccatcaaacccaccttct

SEQ ID NO: 50540 - DNA, 80 bp, synthetic construct
  source 1..80: mol_type = other DNA
cacagcctgtcccaggccagctcatctcttggattggcaaaggaggaacctgaggcttagaggctgacttgtttgagatc

SEQ ID NO: 50541 - DNA, 80 bp, synthetic construct
  source 1..80: mol_type = other DNA
ccaccaaattttgtgggcctgtgaggacccaccctctagctttcttaggtctacactgaagagtcttacgttcttggtca

SEQ ID NO: 50542 - DNA, 80 bp, synthetic construct; identical to SEQ ID NO: 16489
  source 1..80: mol_type = other DNA

SEQ ID NO: 50543 - DNA, 80 bp, synthetic construct
  source 1..80: mol_type = other DNA
aacctcagactttccagtagctggaactacagcgctatgccaccatgccctgctgatattttgcatttttatagagatgg

SEQ ID NO: 50544 - DNA, 80 bp, synthetic construct
  source 1..80: mol_type = other DNA
tgctcttgttgctcaggctggaatgcaatggtgggatctctggctcaccacaacctccttctcccgggttcaagtgattc

SEQ ID NO: 50545 - DNA, 80 bp, synthetic construct
  source 1..80: mol_type = other DNA
ggattatggatgtgaaacactgtgccctgcctcaccttgaccttctgatccaacagagtctgggggagcagagccagggg

SEQ ID NO: 50546 - DNA, 80 bp, synthetic construct; identical to SEQ ID NO: 16490
  source 1..80: mol_type = other DNA

SEQ ID NO: 50547 - DNA, 80 bp, synthetic construct
  source 1..80: mol_type = other DNA
gtcatcaggccgggcctggaagctctgcaggggccccagtgcctctgcaaagtacttgatgagcgggacccccttcacgt

SEQ ID NO: 50548 - DNA, 80 bp, synthetic construct
  source 1..80: mol_type = other DNA
cactcacaaagccactcagtggcggggctggggctgaaaaccaggtcgggctctaatgcggtggttccccagcctggcct

SEQ ID NO: 50549 - DNA, 80 bp, synthetic construct
  source 1..80: mol_type = other DNA
tgtctccctgccagccagcgccctttgtctcaccacttcctgctgggacccccagcctccacccagtggagatgctcccc

SEQ ID NO: 50550 - DNA, 80 bp, synthetic construct; identical to SEQ ID NO: 16491
  source 1..80: mol_type = other DNA

SEQ ID NO: 50551 - DNA, 80 bp, synthetic construct
  source 1..80: mol_type = other DNA
tgcagtggccaggatcccacagcactccagcctgggtgacagcaagacctggcctccccggggaaaaaaacaaacaaaca

SEQ ID NO: 50552 - DNA, 80 bp, synthetic construct
  source 1..80: mol_type = other DNA
ctcttgggaacctggcctcgtgccctcctcgcccgcagtggctgattgtgggtgttgtgtggggaatgcagggttgttct

SEQ ID NO: 50553 - DNA, 80 bp, synthetic construct
  source 1..80: mol_type = other DNA
gccacgactgagtttgctgtgtagaaaacagaagaatgaaaggggaaaggcccaatggtgggtttgtttttgtaggtttt

SEQ ID NO: 50554 - DNA, 80 bp, synthetic construct; identical to SEQ ID NO: 16492
  source 1..80: mol_type = other DNA

SEQ ID NO: 50555 - DNA, 80 bp, synthetic construct
  source 1..80: mol_type = other DNA
cttcatggctcctggggacctcagagaacattgatagaagatcctagaagaaccacaacccgtggcaggtggttttattt

SEQ ID NO: 50556 - DNA, 80 bp, synthetic construct
  source 1..80: mol_type = other DNA
taaacaaccatctgagtaaaggtgaatctcccaagacttccaagaaatgcgtgagttcagaggcaagcggacaggtggga

SEQ ID NO: 50557 - DNA, 80 bp, synthetic construct; identical to SEQ ID NO: 16493
  source 1..80: mol_type = other DNA

SEQ ID NO: 50558 - DNA, 80 bp, synthetic construct
  source 1..80: mol_type = other DNA
caaccagacacaacatggcgctgtatttgatgtaggtttcacctaggatctcattgtatgatcagtaacatatgaaaccg

SEQ ID NO: 50559 - DNA, 80 bp, synthetic construct
  source 1..80: mol_type = other DNA
ccacggtcttgagaaatctttaccttttcctggactcttcatgaatatacccctctttagttgaagaagcccataaaggt

SEQ ID NO: 50560 - DNA, 80 bp, synthetic construct
  source 1..80: mol_type = other DNA
cctggcacggtggctcactcctgtaatcccagcactttgggaggccgaggcaggcagaccacctgaagtcgggagtttga

SEQ ID NO: 50561 - DNA, 80 bp, synthetic construct
  source 1..80: mol_type = other DNA
ttgcactccagcctgggcaacaagagtgaaactcggtctcaaaaaaacaaaacaaaacaaaaaaaagcgtggaaacgggc

SEQ ID NO: 50562 - DNA, 80 bp, synthetic construct; identical to SEQ ID NO: 16494
  source 1..80: mol_type = other DNA

SEQ ID NO: 50563 - DNA, 80 bp, synthetic construct
  source 1..80: mol_type = other DNA
ccaaagctggaccaggctggggccgggggactgcactcagctagggcattggccctctaggggcagaagctgccctggtt

SEQ ID NO: 50564 - DNA, 80 bp, synthetic construct
  source 1..80: mol_type = other DNA
cactgttccgggcattacacagctccatcccgtgaggcagaggtgactgttatttgcatcttacagatgaggaaatggag

SEQ ID NO: 50565 - DNA, 80 bp, synthetic construct; identical to SEQ ID NO: 16495
  source 1..80: mol_type = other DNA

SEQ ID NO: 50566 - DNA, 80 bp, synthetic construct
  source 1..80: mol_type = other DNA
cctagccggtgagatagtaagtattcaggtaaagaagcagacggggaagtacacaagaggtgcaattttattttatattt

SEQ ID NO: 50567 - DNA, 80 bp, synthetic construct
  source 1..80: mol_type = other DNA
tgcaattttaaatcgggagatagagaagacctccctgtggaggtggcaggttatcaagataggtgtagagaagaaccttc

SEQ ID NO: 50568 - DNA, 80 bp, synthetic construct
  source 1..80: mol_type = other DNA
gcctggggcggacctcccctggagctcaagggctcgcagggcgcacaggcctcttgggccccgggtccggctcaggctcg

SEQ ID NO: 50569 - DNA, 80 bp, synthetic construct; identical to SEQ ID NO: 16496
  source 1..80: mol_type = other DNA

SEQ ID NO: 50570 - DNA, 80 bp, synthetic construct
  source 1..80: mol_type = other DNA
cagcctagccccaggccctgcccctaaatgaagtcacgccccctgcacctgcccacctcaggccgcgcctccagcccagg

SEQ ID NO: 50571 - DNA, 80 bp, synthetic construct
  source 1..80: mol_type = other DNA
aatttacatgtggtatatcttccatcttgagattttaggaagtcagtattccccagtgaagacacatattacataaatga

SEQ ID NO: 50572 - DNA, 80 bp, synthetic construct
  source 1..80: mol_type = other DNA
ggttctcatctctttctgcagatcagcgttctgtttctcagatccatgtgctggaatgtggctgccccacagctcccagg

SEQ ID NO: 50573 - DNA, 80 bp, synthetic construct
  source 1..80: mol_type = other DNA
tgcctcagcctcccaagtagctgggattacaggcacgtgccaccacgcctggctaatttttttgtatttttagtagagac

SEQ ID NO: 50574 - DNA, 80 bp, synthetic construct; identical to SEQ ID NO: 16497
  source 1..80: mol_type = other DNA

SEQ ID NO: 50575 - DNA, 80 bp, synthetic construct
  source 1..80: mol_type = other DNA
gtgagcaaggagttgcttcaaattaatagccttacaaatctattagaatacatcgatggcagagagcttctagggtagaa

SEQ ID NO: 50576 - DNA, 80 bp, synthetic construct
  source 1..80: mol_type = other DNA
cagcacatgtgcgtgcatgcgtgcacacacacacgtaactcgttttttataatacacaaccatcctattaacatgagcta

SEQ ID NO: 50577 - DNA, 80 bp, synthetic construct
  source 1..80: mol_type = other DNA
aaacagattaaattataaaaaacaacaattgccaaactcagagaaaacttaaagaaaaatttattcttagaatttgggaa

SEQ ID NO: 50578 - DNA, 80 bp, synthetic construct; identical to SEQ ID NO: 16498
  source 1..80: mol_type = other DNA

SEQ ID NO: 50579 - DNA, 80 bp, synthetic construct
  source 1..80: mol_type = other DNA
ggcgcacacctgtaatcccagctactcaggaggctgaggcaggagaatcacctgaacctgggaggcagaggttgcagtga

SEQ ID NO: 50580 - DNA, 80 bp, synthetic construct
  source 1..80: mol_type = other DNA
ggtaaaatatcttgcaatctgcaagacacataggcataatctttcacatcataatctcctctccaaaggagctactttaa

SEQ ID NO: 50581 - DNA, 80 bp, synthetic construct
  source 1..80: mol_type = other DNA
cttttctgtaagtagatataacttttcaaaaagacagtcaattccccaacttttatgtcgttcttcaaaagcatcaacct

SEQ ID NO: 50582 - DNA, 80 bp, synthetic construct; identical to SEQ ID NO: 16499
  source 1..80: mol_type = other DNA

SEQ ID NO: 50583 - DNA, 80 bp, synthetic construct
  source 1..80: mol_type = other DNA
caaaaccttgaaattattttaaaaacagtgtacactaaacatttttctcttctttttaatcaaaacagaggaatgctaag

SEQ ID NO: 50584 - DNA, 80 bp, synthetic construct
  source 1..80: mol_type = other DNA
caatgtggttaaaccccatctctacaaaaaaatagaaaaattagctaagcattgtggtgcatgcctctggtcccagaaac

SEQ ID NO: 50585 - DNA, 80 bp, synthetic construct
  source 1..80: mol_type = other DNA
tacctttaacatagagcatatagcatatatacagagcatatttacagagattagttccttttctaagataaaacaacttt

SEQ ID NO: 50586 - DNA, 80 bp, synthetic construct
  source 1..80: mol_type = other DNA
aggttcaagcaattcccatgcctcagcctctcaaatagttgggactacaggcacatgccaccacactggcctaatttttg

SEQ ID NO: 50587 - DNA, 80 bp, synthetic construct; identical to SEQ ID NO: 16500
  source 1..80: mol_type = other DNA

SEQ ID NO: 50588 - DNA, 80 bp, synthetic construct
  source 1..80: mol_type = other DNA
atccccatcatatccatctttagcttagatgagacagctaaaccggtcaagggacttaggctcattgaaatcagagtgga

SEQ ID NO: 50589 - DNA, 80 bp, synthetic construct
  source 1..80: mol_type = other DNA
cagactccacctccagacagggcctgctgtattttcttcccaaaggttctttgttagggcttctgttcattaatggaatt

SEQ ID NO: 50590 - DNA, 80 bp, synthetic construct; identical to SEQ ID NO: 16501
  source 1..80: mol_type = other DNA

SEQ ID NO: 50591 - DNA, 80 bp, synthetic construct
  source 1..80: mol_type = other DNA
gggtgtgatggcatacactgtaatcccagctacttgggaggctgaggcaggagaatcacttgaacccggaaggcggacgt

SEQ ID NO: 50592 - DNA, 80 bp, synthetic construct
  source 1..80: mol_type = other DNA
agcatgttaaaaagctcagttgaaaatcaaaaaggtgactcttacaaattaaaagtctatgtatttctccagccatgaca

SEQ ID NO: 50593 - DNA, 80 bp, synthetic construct
  source 1..80: mol_type = other DNA
aggacaataatttagagtttttcctgcacaacttctgcatccccatattcacttctcaccccgtgcttgtgtatgtgaag

SEQ ID NO: 50594 - DNA, 80 bp, synthetic construct
  source 1..80: mol_type = other DNA
cccgctcttctctagtctgaattgtgaatggtaaacaaaatgggaaaggaatacaagaaaatcatgtacaatatagaaga

SEQ ID NO: 50595 - DNA, 80 bp, synthetic construct; identical to SEQ ID NO: 16502
  source 1..80: mol_type = other DNA

SEQ ID NO: 50596 - DNA, 80 bp, synthetic construct
  source 1..80: mol_type = other DNA
ttctcattttaaaagtgagaaatgggtttagcaaattatggcccctgcctaagctgggaattggtccagatgggaatcaa

SEQ ID NO: 50597 - DNA, 80 bp, synthetic construct
  source 1..80: mol_type = other DNA
ggacagtggtttctagaccaggctgggtgtcaaaatcactggggtgcttgttgaaagaaaagatgcctgagctccatccc

SEQ ID NO: 50598 - DNA, 80 bp, synthetic construct
  source 1..80: mol_type = other DNA
tttagttagaaatgagagtaacaagcaggccaaaaaaaggtggcatgaaattaaagctctgcaagtgtggcataaaccat

SEQ ID NO: 50599 - DNA, 80 bp, synthetic construct; identical to SEQ ID NO: 16503
  source 1..80: mol_type = other DNA

SEQ ID NO: 50600 - DNA, 80 bp, synthetic construct
  source 1..80: mol_type = other DNA
aggaaggagcctgggctcttggcactccagtttctatggagcctggctagactgtgatctatgtccagaggtctgccaga

SEQ ID NO: 50601 - DNA, 80 bp, synthetic construct
  source 1..80: mol_type = other DNA
agaattcaccagtggatcactcttccttgtaggtgaaagaaccacatcaaagcaaacttttgaacagaaactgttacttt

SEQ ID NO: 50602 - DNA, 80 bp, synthetic construct; identical to SEQ ID NO: 16504
  source 1..80: mol_type = other DNA

SEQ ID NO: 50603 - DNA, 80 bp, synthetic construct
  source 1..80: mol_type = other DNA
ggaggccgaggtgggcagatcacctgaggtcgggagttcgagaccagcctgaccaacatggagaaaccccgtctctagta

SEQ ID NO: 50604 - DNA, 80 bp, synthetic construct
  source 1..80: mol_type = other DNA
aaaaaaaaccctaagatactaccagtacatagtaaactaatatcgcccttgctcagagtgcagttcacttcttccattca

SEQ ID NO: 50605 - DNA, 80 bp, synthetic construct
  source 1..80: mol_type = other DNA
ctgcttggtggattttaccatgccaaccagagcctgtagaaggactaacctctaaggaatggatgatcatcttcagggag

SEQ ID NO: 50606 - DNA, 80 bp, synthetic construct; identical to SEQ ID NO: 16505
  source 1..80: mol_type = other DNA

SEQ ID NO: 50607 - DNA, 80 bp, synthetic construct
  source 1..80: mol_type = other DNA
tggggtccggagttcgagaccagcctgaccaacatggagaaaccccgtctctactaaaaatacaaaaaaattagccgggt

SEQ ID NO: 50608 - DNA, 80 bp, synthetic construct
  source 1..80: mol_type = other DNA
tctctcataaaatttttttttctttctggtaggacaaatattggcaatttttgggtgagagcataaggctgaggatggtg

SEQ ID NO: 50609 - DNA, 80 bp, synthetic construct
  source 1..80: mol_type = other DNA
aaagagggaaacaggagcatgaaaattaagatgcggcatggtctaatttaaaaagattaggtttggcagtaagccttact

SEQ ID NO: 50610 - DNA, 80 bp, synthetic construct
  source 1..80: mol_type = other DNA
gggttcaagcaattctcctgcctcagcctcccaagtagctggggctacaggtgtgcgccaccaagcccagctaatttttg

SEQ ID NO: 50611 - DNA, 80 bp, synthetic construct; identical to SEQ ID NO: 16506
  source 1..80: mol_type = other DNA

SEQ ID NO: 50612 - DNA, 80 bp, synthetic construct
  source 1..80: mol_type = other DNA
tcatttatacagttctttagagatgacaaggtatttcctacatatttcatttctttcaattcccacaaaaatcctttgag

SEQ ID NO: 50613 - DNA, 80 bp, synthetic construct
  source 1..80: mol_type = other DNA
gagtagctgggattacaggccaccacattgggctgatttttgtatttttagtagagatggggtttcaccatgttggccag

SEQ ID NO: 50614 - DNA, 80 bp, synthetic construct; identical to SEQ ID NO: 16507
  source 1..80: mol_type = other DNA

SEQ ID NO: 50615 - DNA, 80 bp, synthetic construct
  source 1..80: mol_type = other DNA
agctttgaacttctgggctcaccctcctgcctcagcctcccaagtagctgggactacaagcacataccaccacggtcgga

SEQ ID NO: 50616 - DNA, 80 bp, synthetic construct
  source 1..80: mol_type = other DNA
cctggaataggcaagtgaccagtaagtattacctggtaatattagtggaggtggtgatgattgtgttagtattacagaaa

SEQ ID NO: 50617 - DNA, 80 bp, synthetic construct
  source 1..80: mol_type = other DNA
ggtttttataaattccaaacataataacctatttcaaactcatagaagtctaagctgattttctagaacccagaaaaagt

SEQ ID NO: 50618 - DNA, 80 bp, synthetic construct
  source 1..80: mol_type = other DNA
aaaatcaaatctttaagaagatgagcagcgtcccccatggtgcatgctggtacttcaacaatcgtcaaggtattaggatc

SEQ ID NO: 50619 - DNA, 80 bp, synthetic construct; identical to SEQ ID NO: 16508
  source 1..80: mol_type = other DNA

SEQ ID NO: 50620 - DNA, 80 bp, synthetic construct
  source 1..80: mol_type = other DNA
tgtaataaaaatatctgcagaacagacattcaaaaaaatgctttgtggatgttacacaggaggaagagagtgaggaagac

SEQ ID NO: 50621 - DNA, 80 bp, synthetic construct
  source 1..80: mol_type = other DNA
ttttacttagtaagtacttgaatagtcaaggaaagagggccaagcaaagcaaaagttctagggaaagaatgtgttaatta

SEQ ID NO: 50622 - DNA, 80 bp, synthetic construct
  source 1..80: mol_type = other DNA
tctaacaatgtttcctcgagcagagtgatatttttactctgctaaagataaatctgcaggtcaaccaattatcaggcagg

SEQ ID NO: 50623 - DNA, 80 bp, synthetic construct; identical to SEQ ID NO: 16509
  source 1..80: mol_type = other DNA

SEQ ID NO: 50624 - DNA, 80 bp, synthetic construct
  source 1..80: mol_type = other DNA
aacaaaaggtgacttttggccaggtgtggcagcttacacctgtaattccagcactttgggaggctgaagcaggcagatcg

SEQ ID NO: 50625 - DNA, 80 bp, synthetic construct
  source 1..80: mol_type = other DNA
ctgtgattgtgccactgccctccagcctgtgtgagagtaagaccctgtctcaaaaacaaacacttggagcaaaataatcc

SEQ ID NO: 50626 - DNA, 80 bp, synthetic construct
  source 1..80: mol_type = other DNA
aggaaaggtgtgtcagcacacaagactgctagattttattctgaaatgaggtccccacacaggtttacaagtagaggagg

SEQ ID NO: 50627 - DNA, 80 bp, synthetic construct; identical to SEQ ID NO: 16510
  source 1..80: mol_type = other DNA

SEQ ID NO: 50628 - DNA, 80 bp, synthetic construct
  source 1..80: mol_type = other DNA
tttttttgagacagagtcttactctcttgcccaggctggagtgcagtggtgcgatcttggctcgctgcaacctccacctc

SEQ ID NO: 50629 - DNA, 80 bp, synthetic construct
  source 1..80: mol_type = other DNA
tgcccagctgagcaattaatttcaatatttagaaaagagtactttgtgagacactgaatatacagatggacaatagatcc

SEQ ID NO: 50630 - DNA, 80 bp, synthetic construct
  source 1..80: mol_type = other DNA
catagatgccggcagtttgtgccaatcatgttcaaaatggtggctctatcttcccttctctgtcagccacctgtagagta

SEQ ID NO: 50631 - DNA, 80 bp, synthetic construct; identical to SEQ ID NO: 16511
  source 1..80: mol_type = other DNA

SEQ ID NO: 50632 - DNA, 80 bp, synthetic construct
  source 1..80: mol_type = other DNA
ctgccagcttccctgatttttactaccacacttcttccaatttaggatcagccagagaaaggcaaacatgctccccaaac

SEQ ID NO: 50633 - DNA, 80 bp, synthetic construct
  source 1..80: mol_type = other DNA
cccacttgggtagtgtttgtttatttacactggctcattctgctcacagcataaagaccactcccaaacctatcattttg

SEQ ID NO: 50634 - DNA, 80 bp, synthetic construct
  source 1..80: mol_type = other DNA
taaatgttgctttaatccatcctaaccactctctatgccccatcactctccttgctcagggattcatgatgtctttcctg

SEQ ID NO: 50635 - DNA, 80 bp, synthetic construct; identical to SEQ ID NO: 16512
  source 1..80: mol_type = other DNA

SEQ ID NO: 50636 - DNA, 80 bp, synthetic construct
  source 1..80: mol_type = other DNA
caagcctaaaagcttgagtacagagaggctttgacctcagcttttatatacatatgtctatacctatttaggtagctatc

SEQ ID NO: 50637 - DNA, 80 bp, synthetic construct
  source 1..80: mol_type = other DNA
caaaccttaaatactttggttccaggaatttcggtgattggttcttctgagtaagaaagattctgctctgtaaaaaattc

SEQ ID NO: 50638 - DNA, 80 bp, synthetic construct
  source 1..80: mol_type = other DNA
tatgaattcaggttcatagggtttcaaagaacatgcaggaaagcagatctatattattttcaaaccttataaaaattctg

SEQ ID NO: 50639 - DNA, 80 bp, synthetic construct; identical to SEQ ID NO: 16513
  source 1..80: mol_type = other DNA

SEQ ID NO: 50640 - DNA, 80 bp, synthetic construct
  source 1..80: mol_type = other DNA
aacactatccaaaaatttgtatattttatcatatacaaatagcattgtcctggtaattttatttatttatttatttattt

SEQ ID NO: 50641 - DNA, 80 bp, synthetic construct
  source 1..80: mol_type = other DNA
gtatttttagtagagacggggtttcaccatgttggccaggctggtctcgagctcccgaactcaggtgatccacctgcctc

SEQ ID NO: 50642 - DNA, 80 bp, synthetic construct
  source 1..80: mol_type = other DNA
gctcactgcaacctccacctcccgagttcaaccaattctcctgcctcagcctccagagtagctgggattacaggtgtgcc

SEQ ID NO: 50643 - DNA, 80 bp, synthetic construct; identical to SEQ ID NO: 16514
  source 1..80: mol_type = other DNA

SEQ ID NO: 50644 - DNA, 80 bp, synthetic construct
  source 1..80: mol_type = other DNA
taaatactacaatatggcactttacggtgaaaaagacctaatgctcactaaggtagctgggggatgttggtgcattccat

SEQ ID NO: 50645 - DNA, 80 bp, synthetic construct
  source 1..80: mol_type = other DNA
gcaggactgactgtaccttttatctacaaaagagtacgtactttcaatgtgggcagagcatgaactgtttagttgtaaaa

SEQ ID NO: 50646 - DNA, 80 bp, synthetic construct
  source 1..80: mol_type = other DNA
aattggctgtatgtgtttttatttcccattcaacagatggaaaaatgaagcatagcctactacaacctgtaataaaaaca

SEQ ID NO: 50647 - DNA, 80 bp, synthetic construct; identical to SEQ ID NO: 16515
  source 1..80: mol_type = other DNA

SEQ ID NO: 50648 - DNA, 80 bp, synthetic construct
  source 1..80: mol_type = other DNA
gacagagtctcactctgtcacctaggctggagtgcatgggctcattgcaacctccgcctcctggattcaagcaattctcc

SEQ ID NO: 50649 - DNA, 80 bp, synthetic construct
  source 1..80: mol_type = other DNA
gcacctggccagttctgatattttttgtaatgtctttattacaaatggctttagaccccaaatattcaacaatcacattt

SEQ ID NO: 50650 - DNA, 80 bp, synthetic construct
  source 1..80: mol_type = other DNA
aattggctatttcataccattttcctaatgttgcctcagaacctgtttgtactacattgttaccatttatggtgacatca

SEQ ID NO: 50651 - DNA, 80 bp, synthetic construct
  source 1..80: mol_type = other DNA
acaaaggctctcagctacagttgattggttgctggctgcaaaaattctatcatctctacttgaaaatcaactcccaaaaa

SEQ ID NO: 50652 - DNA, 80 bp, synthetic construct; identical to SEQ ID NO: 16516
  source 1..80: mol_type = other DNA

SEQ ID NO: 50653 - DNA, 80 bp, synthetic construct
  source 1..80: mol_type = other DNA
cacaagaaatactttcttaatcactggttttataacaatgattcacgataacagaaactcctgtgttccctggtgggagg

SEQ ID NO: 50654 - DNA, 80 bp, synthetic construct
  source 1..80: mol_type = other DNA
aatgtaaaagggaaggctgttttttctccccccattggctccaaactgattttttaatttcaaaactcaatccagaaaga

SEQ ID NO: 50655 - DNA, 80 bp, synthetic construct; identical to SEQ ID NO: 16517
  source 1..80: mol_type = other DNA

SEQ ID NO: 50656 - DNA, 80 bp, synthetic construct
  source 1..80: mol_type = other DNA
ataatctccagcttacatatgaagaaacaggtaacttgctcagacacacacccagtcagtggtaaatctgacttacaccc

SEQ ID NO: 50657 - DNA, 80 bp, synthetic construct
  source 1..80: mol_type = other DNA
tttttcaacattaatttcatggtacgttctctaaacgtgtactcaagcctcggaagtaaacctgagaagtgtaactcctg

SEQ ID NO: 50658 - DNA, 80 bp, synthetic construct
  source 1..80: mol_type = other DNA
actttactcagcactggtcccatgatttattgctgctatgaagactactactacattgcacaacatcctaactcacttta

SEQ ID NO: 50659 - DNA, 80 bp, synthetic construct; identical to SEQ ID NO: 16518
  source 1..80: mol_type = other DNA

SEQ ID NO: 50660 - DNA, 80 bp, synthetic construct
  source 1..80: mol_type = other DNA
tcatgccacagatgcactgtgactcgggagacacaaaaatgtgaagaattaaatgtgcatcctaaaagttagtcaaataa

SEQ ID NO: 50661 - DNA, 80 bp, synthetic construct
  source 1..80: mol_type = other DNA
acttgtcttgccattcttccagagttagtacttggtttttctgtacctcagtatccgagtactcttcaatgtcaagtgaa

SEQ ID NO: 50662 - DNA, 80 bp, synthetic construct
  source 1..80: mol_type = other DNA
aaatatttctttctttttttatttctggttttatttttgagatggagtctcactctgtctcccagcctggggtacagtag

SEQ ID NO: 50663 - DNA, 80 bp, synthetic construct
  source 1..80: mol_type = other DNA
caggctggagaccctggcttactgcaagcttcaacctcctgggctcaagcgatcctcccatttcagcctcccaagtagct

SEQ ID NO: 50664 - DNA, 80 bp, synthetic construct; identical to SEQ ID NO: 16519
  source 1..80: mol_type = other DNA

SEQ ID NO: 50665 - DNA, 80 bp, synthetic construct
  source 1..80: mol_type = other DNA
tatcttctgatttaattctgacattacctacctggagatagtgtcagattctatatgttgggggctcagtccctaagatt

SEQ ID NO: 50666 - DNA, 80 bp, synthetic construct
  source 1..80: mol_type = other DNA
cgaagaatatacttgaagagatgtgttagctacaggaccttcacctgttgagctattaggaggctctccaaaccccatcc

SEQ ID NO: 50667 - DNA, 80 bp, synthetic construct; identical to SEQ ID NO: 16520
  source 1..80: mol_type = other DNA

SEQ ID NO: 50668 - DNA, 80 bp, synthetic construct
  source 1..80: mol_type = other DNA
gttagactattcctcatccttgatgcatagctctgctgggtatcaaattcttggttagaagtgtgggggccatagggggt

SEQ ID NO: 50669 - DNA, 80 bp, synthetic construct
  source 1..80: mol_type = other DNA
atttctccttctgggacccctattatttgtctctagaatcttctgacccggtatggtaaatttctcatttttttctattt

SEQ ID NO: 50670 - DNA, 80 bp, synthetic construct; identical to SEQ ID NO: 16521
  source 1..80: mol_type = other DNA

SEQ ID NO: 50671 - DNA, 80 bp, synthetic construct
  source 1..80: mol_type = other DNA
caaagaatgtgggtggggcttataatgtagggtgatgtgagtggatttcatttggaaacctagatttatttatttattta

SEQ ID NO: 50672 - DNA, 80 bp, synthetic construct
  source 1..80: mol_type = other DNA
cctggctaatgtctttaatttccttgtggtagtcagactttccatagatggatctcccaattcctgtcttaaggattctg

SEQ ID NO: 50673 - DNA, 80 bp, synthetic construct
  source 1..80: mol_type = other DNA
ttaccctttccagagaataaatccccaaagcctgctggtgtggtgagatgtacacacttggttgcaagaagttgagaaaa

SEQ ID NO: 50674 - DNA, 80 bp, synthetic construct; identical to SEQ ID NO: 16522
  source 1..80: mol_type = other DNA

SEQ ID NO: 50675 - DNA, 80 bp, synthetic construct
  source 1..80: mol_type = other DNA
acatgtacaatgtaaactaacaataaaattcaaagcctctcaactgactgaaggcacactttctttccttttctttcttt

SEQ ID NO: 50676 - DNA, 80 bp, synthetic construct
  source 1..80: mol_type = other DNA
ctatacctcctctcttgctaaccacaattaggctttgttctataaggacttaagggaaaccagccctttcaaaagattct

SEQ ID NO: 50677 - DNA, 80 bp, synthetic construct
  source 1..80: mol_type = other DNA
cctgtgattgtggtaacaccgccattttttgtgcatggtacccatgaagctcaattactcatgggtactttcctcctttc

SEQ ID NO: 50678 - DNA, 80 bp, synthetic construct; identical to SEQ ID NO: 16523
  source 1..80: mol_type = other DNA

SEQ ID NO: 50679 - DNA, 80 bp, synthetic construct
  source 1..80: mol_type = other DNA
taatctgtgaaatagcaaacattgcataaaagcatgtatttcaggcaaatttccccttttgttgccaaatttggcctcag

SEQ ID NO: 50680 - DNA, 80 bp, synthetic construct
  source 1..80: mol_type = other DNA
tatgcttaggatatagggaggaggcatttctctcattacctgggaacatgaattcacttcttagcaaatatttgttgaca

SEQ ID NO: 50681 - DNA, 80 bp, synthetic construct
  source 1..80: mol_type = other DNA
taaagcagttctctacttaaaagagaagcataatctttatcagagttccacagcagcctggagtagcacaactctattcc

SEQ ID NO: 50682 - DNA, 80 bp, synthetic construct
  source 1..80: mol_type = other DNA
cttcaacctcctgagtacctgggactataagggtgcaccaccatgcctggctaatttttaaatattttgtagagacaggg

SEQ ID NO: 50683 - DNA, 80 bp, synthetic construct; identical to SEQ ID NO: 16524
  source 1..80: mol_type = other DNA

SEQ ID NO: 50684 - DNA, 80 bp, synthetic construct
  source 1..80: mol_type = other DNA
atcaccagggatcactcactatttggcagtacttattttttcccaaaaatcactaatacaccaggctggggaaaaaaccg

SEQ ID NO: 50685 - DNA, 80 bp, synthetic construct
  source 1..80: mol_type = other DNA
aaaataattaaaacacaccagtgctttggaagcactttaaatcctggacattggattcaggtcatttactgtccgacctc

SEQ ID NO: 50686 - DNA, 80 bp, synthetic construct; identical to SEQ ID NO: 16525
  source 1..80: mol_type = other DNA

SEQ ID NO: 50687 - DNA, 80 bp, synthetic construct
  source 1..80: mol_type = other DNA
cggcccttgccccccgccgcacaggagcgggacgccgagccgcgtccgccgcacggggagctgcagtacctggggcagat

SEQ ID NO: 50688 - DNA, 80 bp, synthetic construct
  source 1..80: mol_type = other DNA
cgggagctgccgggcgctgcggaccccgtttagtcctaacctcaatcctgcgagggaggggacgcatcgtcctcctcgcc

SEQ ID NO: 50689 - DNA, 80 bp, synthetic construct
  source 1..80: mol_type = other DNA
agcgtttgcccagtgctggagggttagggagagctgcctgggcttgaccgcgcgccggtctcaaagtcctggctttggcc

SEQ ID NO: 50690 - DNA, 80 bp, synthetic construct; identical to SEQ ID NO: 16526
  source 1..80: mol_type = other DNA

SEQ ID NO: 50691 - DNA, 80 bp, synthetic construct
  source 1..80: mol_type = other DNA
agctgcgcgggggaggggactcgaaggtgtgtgagccaggggctgaccttgaccgctcagataaatggagcgcagccttg

SEQ ID NO: 50692 - DNA, 80 bp, synthetic construct
  source 1..80: mol_type = other DNA
gagttttgtctgaggagagggatccacttttctgcagctccaagcccaggggcctttgatgagccatagacctcattttt

SEQ ID NO: 50693 - DNA, 80 bp, synthetic construct; identical to SEQ ID NO: 16527
  source 1..80: mol_type = other DNA

SEQ ID NO: 50694 - DNA, 80 bp, synthetic construct
  source 1..80: mol_type = other DNA
ctcgccaccatctcactgtgtggaattcctgtgtccactggtcaccggggcacagaagtgctgtctcagcctgaatcggg

SEQ ID NO: 50695 - DNA, 80 bp, synthetic construct
  source 1..80: mol_type = other DNA
tgaaaccgtatggcaaattgtttttcagatgaattccctctgctgacaaccaaacgtgtgttctggaagggtgttttgga

SEQ ID NO: 50696 - DNA, 80 bp, synthetic construct
  source 1..80: mol_type = other DNA
agtcagatcacctgaggttaggaatttgagaccagcctggccaacatggcgacaccccagtctctactaataacacaaaa

SEQ ID NO: 50697 - DNA, 80 bp, synthetic construct; identical to SEQ ID NO: 16528
  source 1..80: mol_type = other DNA

SEQ ID NO: 50698 - DNA, 80 bp, synthetic construct
  source 1..80: mol_type = other DNA
cctcctgatttaaaactgtgactctcccccaacctccttggtgtttctccatagacgaacatcaccatctgatgtatgtc

SEQ ID NO: 50699 - DNA, 80 bp, synthetic construct
  source 1..80: mol_type = other DNA
actaaatgtagataccacctgtgttcccatgttcatataaattctagaagagtctcttcagtaacaaggtgaaccccttc

SEQ ID NO: 50700 - DNA, 80 bp, synthetic construct
  source 1..80: mol_type = other DNA
gctcaggtctgggccatactagaagctgggatcccttctatagagcacttggtatggcttgtatggtcttggggcaagcc

SEQ ID NO: 50701 - DNA, 80 bp, synthetic construct; identical to SEQ ID NO: 16529
  source 1..80: mol_type = other DNA

SEQ ID NO: 50702 - DNA, 80 bp, synthetic construct
  source 1..80: mol_type = other DNA
attcccctgtttcaacttaatgcttcaattcaggattctaaggaatccttgccaggaatgtcagactcaccttgatagtt

SEQ ID NO: 50703 - DNA, 80 bp, synthetic construct
  source 1..80: mol_type = other DNA
agacaacacatttcattaagaaacataaaactgtcagatcggtggaatacttaaaagcacttggaggtgtttagcctaaa

SEQ ID NO: 50704 - DNA, 80 bp, synthetic construct
  source 1..80: mol_type = other DNA
cgggaggccgaagtgggcggatcacctgaggtcaggagttcgaggccagcctgaccaacatggagaaacactgtctctac

SEQ ID NO: 50705 - DNA, 80 bp, synthetic construct; identical to SEQ ID NO: 16530
  source 1..80: mol_type = other DNA

SEQ ID NO: 50706 - DNA, 80 bp, synthetic construct
  source 1..80: mol_type = other DNA
actttttggacagcctgggattctccaccagagaagaaggggacttgggcccagtttatggcttccagtggaggcatttt

SEQ ID NO: 50707 - DNA, 80 bp, synthetic construct
  source 1..80: mol_type = other DNA
atagctttgaccttgtgaggggtggtgccaggttaagccacaattaagcctcatgaaggccgtttcacactctttttttt

SEQ ID NO: 50708 - DNA, 80 bp, synthetic construct
  source 1..80: mol_type = other DNA
cctcctcccaccccacaacagtccccagagtgtgatgttccccttcctgtgtccatatgttctcgttgttcaattcccac

SEQ ID NO: 50709 - DNA, 80 bp, synthetic construct; identical to SEQ ID NO: 9146
  source 1..80: mol_type = other DNA

SEQ ID NO: 50710 - DNA, 80 bp, synthetic construct; identical to SEQ ID NO: 16531
  source 1..80: mol_type = other DNA

SEQ ID NO: 50711 - DNA, 80 bp, synthetic construct
  source 1..80: mol_type = other DNA
tgatggggttgtttgtttttttcttataaatttgtttgagttcattgtagattctggatattagctctttgtcagatgag

SEQ ID NO: 50712 - DNA, 80 bp, synthetic construct
  source 1..80: mol_type = other DNA
tccttgcccatgcctatgtcctgaatggtaatgcctaggttttcttctagggtttttatggttttaggtctaacgtttaa

SEQ ID NO: 50713 - DNA, 80 bp, synthetic construct; identical to SEQ ID NO: 16532
  source 1..80: mol_type = other DNA

SEQ ID NO: 50714 - DNA, 80 bp, synthetic construct
  source 1..80: mol_type = other DNA
attctgtgaagaaagtcattggtagcttgatggggatggcattgaatctataaattaccttgggcagtatggccattttc

SEQ ID NO: 50715 - DNA, 80 bp, synthetic construct
  source 1..80: mol_type = other DNA
gaagcaattgtgagtggaagttcactcatgatttggctctctgtttgtctgttattggtgtataagaatgcttgtgattt

SEQ ID NO: 50716 - DNA, 80 bp, synthetic construct
  source 1..80: mol_type = other DNA
ctttatttccttctcctgcctaattgccctggccagaacttccaacactatgttgaataggagtggtgagagagggcatc

SEQ ID NO: 50717 - DNA, 80 bp, synthetic construct; identical to SEQ ID NO: 16533
  source 1..80: mol_type = other DNA

SEQ ID NO: 50718 - DNA, 80 bp, synthetic construct
  source 1..80: mol_type = other DNA
attggtctaaaattctcttttttggttgtgtctctgcccagctttggtatcaggatgatgctggcttcataaaatgagtt

SEQ ID NO: 50719 - DNA, 80 bp, synthetic construct
  source 1..80: mol_type = other DNA
attggtctattcagagattcaacttcttcctggtttagtcttgggagagtgtatgtgtcaaggaatttatccatttcttc

SEQ ID NO: 50720 - DNA, 80 bp, synthetic construct
  source 1..80: mol_type = other DNA
tgttgatcctttcaaaaaaccagctcctggattcattaattttttgaagggttttttgtgtctctatttccttcagttct

SEQ ID NO: 50721 - DNA, 80 bp, synthetic construct
  source 1..80: mol_type = other DNA
cacactgctttgaatgtgtcccagagattctggtatgttgtgtctctgttctcgttggtttcaaagaacatctttatttc

SEQ ID NO: 50722 - DNA, 80 bp, synthetic construct; identical to SEQ ID NO: 16534
  source 1..80: mol_type = other DNA

SEQ ID NO: 50723 - DNA, 80 bp, synthetic construct
  source 1..80: mol_type = other DNA
tctctttgtaggtcagatgattggcacttactgggcgcttggcactttccatactgtgtcatcggcagatagctgcatgg

SEQ ID NO: 50724 - DNA, 80 bp, synthetic construct
  source 1..80: mol_type = other DNA
agctctgcagaggtggagaaagaatgaaacatctcactcctggacttccactttcctgtcactgttggtgtcacctctta

SEQ ID NO: 50725 - DNA, 80 bp, synthetic construct; identical to SEQ ID NO: 16535
  source 1..80: mol_type = other DNA

SEQ ID NO: 50726 - DNA, 80 bp, synthetic construct
  source 1..80: mol_type = other DNA
ggggagttcatgtttaatgggcacagaggttttgttagggatgacgaaaaagttcgggagatggtgatggagatggtgat

SEQ ID NO: 50727 - DNA, 80 bp, synthetic construct
  source 1..80: mol_type = other DNA
atggagatggtgatggtgatggagatggagatggagatggtgatggtgatggtgatggagatggtgatggtgatggtgat

SEQ ID NO: 50728 - DNA, 80 bp, synthetic construct
  source 1..80: mol_type = other DNA
tggagatggtgatggtgatggagatggtgatggagatggtgatggtgatggagatggtgatggtgatggtgatggtgatg

SEQ ID NO: 50729 - DNA, 80 bp, synthetic construct; identical to SEQ ID NO: 16536
  source 1..80: mol_type = other DNA

SEQ ID NO: 50730 - DNA, 80 bp, synthetic construct
  source 1..80: mol_type = other DNA
ccagtccccgggcttaatgatgctttaaatcctgcctagtattcaattatttcttgtcgcttaaaaggcctaataaaatt

SEQ ID NO: 50731 - DNA, 80 bp, synthetic construct
  source 1..80: mol_type = other DNA
ccagtttcccccagtgataatatcttgggtaacatcctgtatacattcacattggtgcattcctcagagttgtcagattt

SEQ ID NO: 50732 - DNA, 80 bp, synthetic construct
  source 1..80: mol_type = other DNA
cagtgaccatgagaggactttcctcccaaaattttgagaactactgaaccagaatatagtctgacactaataggtagaaa

SEQ ID NO: 50733 - DNA, 80 bp, synthetic construct
  source 1..80: mol_type = other DNA
ccaagtcagtcgtgtgttgagctgctaaactctaaagtaattttaggtggaagtgttggaaacatgctgctgaggtgata

SEQ ID NO: 50734 - DNA, 80 bp, synthetic construct; identical to SEQ ID NO: 16537
  source 1..80: mol_type = other DNA

SEQ ID NO: 50735 - DNA, 80 bp, synthetic construct
  source 1..80: mol_type = other DNA
aagagactgtaatagatgacctctaaggccatctcatgacatgtgtgattaatgtatgtacctgtcctctctttttgaca

SEQ ID NO: 50736 - DNA, 80 bp, synthetic construct
  source 1..80: mol_type = other DNA
gaatccaagaggttgaaagaaccccgtcgtcttcatttatactaaccatactcttagagggaagcaatctggttttgtgc

SEQ ID NO: 50737 - DNA, 80 bp, synthetic construct
  source 1..80: mol_type = other DNA
gacagagttttgctctgttgcccaggctggaatgcaacggcgtgatcttggctcactgtaacctctgcctcctgggttcg

SEQ ID NO: 50738 - DNA, 80 bp, synthetic construct; identical to SEQ ID NO: 16538
  source 1..80: mol_type = other DNA

SEQ ID NO: 50739 - DNA, 80 bp, synthetic construct
  source 1..80: mol_type = other DNA
aaggcgagaggatcatttgaacccaggaatttgaggctgtagtgagtcatgatcacgccattgcactccagcctgggcaa

SEQ ID NO: 50740 - DNA, 80 bp, synthetic construct
  source 1..80: mol_type = other DNA
gtgtgatctccgctcacggcaacctccatctcccaggttcaagtgagttcccattcctcagccccagagctgggaccaca

SEQ ID NO: 50741 - DNA, 80 bp, synthetic construct
  source 1..80: mol_type = other DNA
taatataggagggtgtaccagaagcaccagtttcctgtggcaaacagaattattcctgctgtatttgtaatctggtgcca

SEQ ID NO: 50742 - DNA, 80 bp, synthetic construct; identical to SEQ ID NO: 16539
  source 1..80: mol_type = other DNA

SEQ ID NO: 50743 - DNA, 80 bp, synthetic construct
  source 1..80: mol_type = other DNA
tcacgtacatgattgcgcacatcacgggcctgaaggtgggctgtctcgggaagggtgacttgccagcctaccacactgag

SEQ ID NO: 50744 - DNA, 80 bp, synthetic construct
  source 1..80: mol_type = other DNA
aacagatctatacaggttgtttgtgatacagcttctatggattttctcaaaagctatgctgaggttgggtatggtggctc

SEQ ID NO: 50745 - DNA, 80 bp, synthetic construct
  source 1..80: mol_type = other DNA
cggtgtctgcatattctaatgtttttaaatgatgttttaaagaattgaaactaacatactgttctgctttctcccccggg

SEQ ID NO: 50746 - DNA, 80 bp, synthetic construct; identical to SEQ ID NO: 16540
  source 1..80: mol_type = other DNA

SEQ ID NO: 50747 - DNA, 80 bp, synthetic construct
  source 1..80: mol_type = other DNA
caagccaggggattgtccaaaagggggcattttaactcattttaacttgaaggagaattgaagtgcaaatgtttttcctt

SEQ ID NO: 50748 - DNA, 80 bp, synthetic construct
  source 1..80: mol_type = other DNA
ccacacccagctaatttttgtattattagtagagatggggtttcatcatgttggccaggctagtctcaaactcctgactt

SEQ ID NO: 50749 - DNA, 80 bp, synthetic construct
  source 1..80: mol_type = other DNA
gccaacaattgatatgaaatggcaataaaaatgtaagttcatctgcttcatgagccttaaggaaaaaaactcagaaccag

SEQ ID NO: 50750 - DNA, 80 bp, synthetic construct; identical to SEQ ID NO: 16541
  source 1..80: mol_type = other DNA

SEQ ID NO: 50751 - DNA, 80 bp, synthetic construct
  source 1..80: mol_type = other DNA
tttaataaatttgccaagagtggttataagaacttacacctgatgaggcaccaggctcctgatgctgtgtaatgtcacaa

SEQ ID NO: 50752 - DNA, 80 bp, synthetic construct
  source 1..80: mol_type = other DNA
agcaattacaacaggtcgtacaattatggcaaaataatggccttattttgtttttagcttcagcgagaacccagaccttt

SEQ ID NO: 50753 - DNA, 80 bp, synthetic construct
  source 1..80: mol_type = other DNA
ctttaggggttgggctggatgccgaggtaaaagttctttttgctctaaaagaaaaaggaactaggtcaaaaatctgtccg

SEQ ID NO: 50754 - DNA, 80 bp, synthetic construct
  source 1..80: mol_type = other DNA
gctcttagcaaaaacatgtatgtgcatttcaatcccacgtacttataaagaaggttggtgaatttcacaagctatttttg

SEQ ID NO: 50755 - DNA, 80 bp, synthetic construct; identical to SEQ ID NO: 16542
  source 1..80: mol_type = other DNA

SEQ ID NO: 50756 - DNA, 80 bp, synthetic construct
  source 1..80: mol_type = other DNA
ggcaggagcaaaggcgccatggctgtggagtcccagggcggacgcccacttgtcctgggcctgctgctgtgtgtgctggg

SEQ ID NO: 50757 - DNA, 80 bp, synthetic construct; identical to SEQ ID NO: 16587
  source 1..80: mol_type = other DNA

SEQ ID NO: 50758 - DNA, 80 bp, synthetic construct
  source 1..80: mol_type = other DNA
aacatacaagaaaataaaaaaggactctgctatgcttttgtctggctgttcccacttactgcacaacaaggagctcatgg

SEQ ID NO: 50759 - DNA, 80 bp, synthetic construct
  source 1..80: mol_type = other DNA
aggcctctctcctctcattcagatcacatgaccttcctgcagcgggtgaagaacatgctcattgccttttcacagaactt

SEQ ID NO: 50760 - DNA, 80 bp, synthetic construct
  source 1..80: mol_type = other DNA
tatggtttttgttggtggaatcaactgccttcaccaaaatccactatcccaggtgtgtattggagtgggacttttacatg

SEQ ID NO: 50761 - DNA, 80 bp, synthetic construct
  source 1..80: mol_type = other DNA
ctgagatttcgggaaagcattccttggacattttactctgtgtgctccagtggatagtaatcaattagaaacaacaagct

SEQ ID NO: 50762 - DNA, 80 bp, synthetic construct
  source 1..80: mol_type = other DNA
gaccctggttaaagctccagtttctaaatattctgataagaagctaaatcctgcagtccgttctcttctaatgagtgaat

SEQ ID NO: 50763 - DNA, 80 bp, synthetic construct
  source 1..80: mol_type = other DNA
cttcagatggagcgttagggaattactctttgaggaggtgacatttcagagagcgttcattcacttatcctgcaaagatt

SEQ ID NO: 50764 - DNA, 80 bp, synthetic construct
  source 1..80: mol_type = other DNA
tgtgcattttccttcatagcacatcaaatatggcagccatttcacttagatagttgttgattgtccgcttcacatcatga

SEQ ID NO: 50765 - DNA, 80 bp, synthetic construct
  source 1..80: mol_type = other DNA
aatgaatgagaagaaaggtgccaaccgaggtctagttaatgggtcgagagtaatccacaatagctctttttagttctttg

SEQ ID NO: 50766 - DNA, 80 bp, synthetic construct; identical to SEQ ID NO: 16589
  source 1..80: mol_type = other DNA

SEQ ID NO: 50767 - DNA, 80 bp, synthetic construct
  source 1..80: mol_type = other DNA
ggtcactactgtgaatgtgttatttttttgcatttctatctctagctgattatctactcattactcagctatctcatcaa

SEQ ID NO: 50768 - DNA, 80 bp, synthetic construct
  source 1..80: mol_type = other DNA
cagggctattgaatttattagaatctctaaaaacagttgaataattctggcaataggaaagatgcccgtcttgctgctat

SEQ ID NO: 50769 - DNA, 80 bp, synthetic construct
  source 1..80: mol_type = other DNA
ccataaaagtctaagtggtgaactgtgttgactacatatttgttgttgccttgtttggtgcagtcaggcttaggtgtgaa

SEQ ID NO: 50770 - DNA, 80 bp, synthetic construct
  source 1..80: mol_type = other DNA
aagctttcttcctttttaaacaacatggcactggtatttttaatccagtcaggcagttgctttaataagtgcattttgcc

SEQ ID NO: 50771 - DNA, 80 bp, synthetic construct; identical to SEQ ID NO: 16590
  source 1..80: mol_type = other DNA

SEQ ID NO: 50772 - DNA, 80 bp, synthetic construct
  source 1..80: mol_type = other DNA
atagcagtggttcacagacaatcgcaatgctgggtctgagaaaaataactaaacagaagattagtgaggaccaaggcttc

SEQ ID NO: 50773 - DNA, 80 bp, synthetic construct
  source 1..80: mol_type = other DNA
gttaaatgtctcattttggctggtgaagtctcatcagaacagggaaattctctcattcaggggcatctcatcttttcttt

SEQ ID NO: 50774 - DNA, 80 bp, synthetic construct
  source 1..80: mol_type = other DNA
ttggccgtgatgacaacttctctgcagtttgccctgcgtgaatctccagatgaacttttgtgccatttaaactttcgtga

SEQ ID NO: 50775 - DNA, 80 bp, synthetic construct
  source 1..80: mol_type = other DNA
tgggtttcatgaagagcaaaggtcctaggaaatttaagtaagccatttaccaacgctcagaagaaagaacttgaagagca

SEQ ID NO: 50776 - DNA, 80 bp, synthetic construct
  source 1..80: mol_type = other DNA
actctgtcctccctgacttttagatgagcccaagggaaaaggcaaagacaaagcccttaagagccagaggactcacgagg

SEQ ID NO: 50777 - DNA, 80 bp, synthetic construct
  source 1..80: mol_type = other DNA
tgtgtctcacatctagggtgaccagcatcctggcttcctcaggactgttcaggttttagcactgaacatcacatgtccta

SEQ ID NO: 50778 - DNA, 80 bp, synthetic construct
  source 1..80: mol_type = other DNA
tgcacatatttgtttattgcagcactattcacaataacaaagtcatggaaccaacccagatgcccatcaatggtagattg

SEQ ID NO: 50779 - DNA, 80 bp, synthetic construct
  source 1..80: mol_type = other DNA
agtgggagttgaacagtgagaatgcgtagacgcagggaggggaacaacacacaccagggcttgtggcggggtgaggggtg

SEQ ID NO: 50780 - DNA, 80 bp, synthetic construct; identical to SEQ ID NO: 16592
  source 1..80: mol_type = other DNA

SEQ ID NO: 50781 - DNA, 80 bp, synthetic construct
  source 1..80: mol_type = other DNA
agttttgccctctatagtcagcttgtgttaaccagctcaattacaccctctaccttgtcgcaaggacagagggctttctg

SEQ ID NO: 50782 - DNA, 80 bp, synthetic construct
  source 1..80: mol_type = other DNA
ggcccgggctcggtggcccgggctcggtggcctgggctctcctccgactgcctcagccaaactccgcgttgttctgctgg

SEQ ID NO: 50783 - DNA, 80 bp, synthetic construct
  source 1..80: mol_type = other DNA
gtggttttgggaaatgaaacatttaggcaggaaaacaaaaatgcctgtcctcacctaggtccatgggcacaggtctgggg

SEQ ID NO: 50784 - DNA, 80 bp, synthetic construct
  source 1..80: mol_type = other DNA
atgtacctgtgcttttcttttggaaaactagcacattacctggattttgcatctcaaggataattctgtaagcaggaacc

SEQ ID NO: 50785 - DNA, 80 bp, synthetic construct
  source 1..80: mol_type = other DNA
aaaaattaactgaaaatttttcttctggctctaggaatttgaagcctacattaatgcttctggagaacatggaattgtgg

SEQ ID NO: 50786 - DNA, 80 bp, synthetic construct
  source 1..80: mol_type = other DNA
gcttccagattaattctcttaattggaaccttagatttggcttttccctgccacttcccaactattaatccaaaggtttt

SEQ ID NO: 50787 - DNA, 80 bp, synthetic construct
  source 1..80: mol_type = other DNA
gaagtatttctccaaaaagctgttggttagaacactgaatttatgtcttacatttctgctcttatagttctgcatccact

SEQ ID NO: 50788 - DNA, 80 bp, synthetic construct
  source 1..80: mol_type = other DNA
ttactgatcctcccactctgttaaagactgttccttcagaggacccctgttttctagttagtatagcagatttgttttct

SEQ ID NO: 50789 - DNA, 80 bp, synthetic construct
  source 1..80: mol_type = other DNA
tgttgggcggattggatgtataggtcaaaccagggtcaaattaagaaaatggcttaagcacagctattctaaaggattgt

SEQ ID NO: 50790 - DNA, 80 bp, synthetic construct
  source 1..80: mol_type = other DNA
gagtctttggagtgttttcagaacctagatgtgtccagctgtgaaactcagagatgtaactgctgacatcctccctattt

SEQ ID NO: 50791 - DNA, 80 bp, synthetic construct
  source 1..80: mol_type = other DNA
gctggagtgaccctgaatgttctggaaatgacttctgaagatttagaaaatgctctaaaagcagtcatcaatgacaaaag

SEQ ID NO: 50792 - DNA, 80 bp, synthetic construct
  source 1..80: mol_type = other DNA
tttttgagatggagtcttgctctgtcacctaggctggagtgcagtggtgcaatcttggcttactgcaacctccacctccc

SEQ ID NO: 50793 - DNA, 80 bp, synthetic construct
  source 1..80: mol_type = other DNA
aggcatgagccagcgcgtctgacctggatttataaataagataatttagaggttattattcactttataaaaggattctt

SEQ ID NO: 50794 - DNA, 80 bp, synthetic construct
  source 1..80: mol_type = other DNA
gagaaaaacaactcaaatgcttagaagtacagctttttgcagcactggaacctgtgagaaattttgtccatggagtttat

SEQ ID NO: 50795 - DNA, 80 bp, synthetic construct
  source 1..80: mol_type = other DNA
tattagaaccttatgggaagaagtggtggccagtggtagatttcatccgacaatagatactgtgtgcatatgtgcgtgtg

SEQ ID NO: 50796 - DNA, 80 bp, synthetic construct
  source 1..80: mol_type = other DNA
aagggacaacaggggaggactgatgactgacttcccacctttgaggtgctaatgtgtgtgtggtggcactggataaaaga

SEQ ID NO: 50797 - DNA, 80 bp, synthetic construct
  source 1..80: mol_type = other DNA
aaaaaaaaaaaaaaatgaaaagtccacataacctgagcatcatgtgcccagagcgttgggtggtgtggtcccattccttc

SEQ ID NO: 50798 - DNA, 80 bp, synthetic construct
  source 1..80: mol_type = other DNA
gacttctttccctgcactgttgaagctccttcttgaggctcacattatggatataattttgattctttcttcagtggtat

SEQ ID NO: 50799 - DNA, 80 bp, synthetic construct; identical to SEQ ID NO: 16596
  source 1..80: mol_type = other DNA

SEQ ID NO: 50800 - DNA, 80 bp, synthetic construct
  source 1..80: mol_type = other DNA
ccaaaaaaatataaaaaaattacccaggcatggtggtgtatgcctgtaatcccagctatttgggaggctgaggcaggaaa

SEQ ID NO: 50801 - DNA, 80 bp, synthetic construct
  source 1..80: mol_type = other DNA
acatgattcatggccaagtactaatattacattataataatgtttccaaataacattatagatatgtttaaagacagtgt

SEQ ID NO: 50802 - DNA, 80 bp, synthetic construct
  source 1..80: mol_type = other DNA
gaaggcaatgcgggagcttgcatgtcacatggcaaaagcaggagcgagagagagttgggggggaaggtgccacacacttt

SEQ ID NO: 50803 - DNA, 80 bp, synthetic construct; identical to SEQ ID NO: 16597
  source 1..80: mol_type = other DNA

SEQ ID NO: 50804 - DNA, 80 bp, synthetic construct
  source 1..80: mol_type = other DNA
gtggctgcacagaccctgcctcatgctaaatctagcacccagatagtttaatgtttcaatgactgaattacaaatatatc

SEQ ID NO: 50805 - DNA, 80 bp, synthetic construct
  source 1..80: mol_type = other DNA
aaagaaaagaagaagagtaggaagcaaggttaaaatatttctaaaatataattttggtctttctttttctcccttccttc

SEQ ID NO: 50806 - DNA, 80 bp, synthetic construct
  source 1..80: mol_type = other DNA
gcctgggcaacacaataagaccttgtttctacaaaaaatttaaaaattggccagacatagtggtgcatgactaattccag

SEQ ID NO: 50807 - DNA, 80 bp, synthetic construct; identical to SEQ ID NO: 16598
  source 1..80: mol_type = other DNA

SEQ ID NO: 50808 - DNA, 80 bp, synthetic construct
  source 1..80: mol_type = other DNA
atcacctttaaatgttgtgcttatggctaccggaaatgcttggggaaaaaagggcgagttaagaaagcccacaaatccaa

SEQ ID NO: 50809 - DNA, 80 bp, synthetic construct
  source 1..80: mol_type = other DNA
aaataaaaataatagactcgctagtcagtaaagatatttgaatatgtatcgtgccccctctggtgtctttgatcaggatg

SEQ ID NO: 50810 - DNA, 80 bp, synthetic construct
  source 1..80: mol_type = other DNA
atggttgcaattgatccttaaccaataatggtcagtcctcatctctgtcgtgcttcataggtgccaccttgtgtgtttaa

SEQ ID NO: 50811 - DNA, 80 bp, synthetic construct
  source 1..80: mol_type = other DNA
agctgaatttgataaaaacccaaaatacagctatgaagtgctgggcaagtttactttttttctgatgtttcctacaacta

SEQ ID NO: 50812 - DNA, 80 bp, synthetic construct
  source 1..80: mol_type = other DNA
aatgacaaggtaattaaggcgaaggaaacaaatgtagcaggcacagcgtggggtggacagtcagctgtcggtggcttctg

SEQ ID NO: 50813 - DNA, 80 bp, synthetic construct; identical to SEQ ID NO: 16543
  source 1..80: mol_type = other DNA

SEQ ID NO: 50814 - DNA, 80 bp, synthetic construct
  source 1..80: mol_type = other DNA
tacgctgggctacactcaagggttctttgaaacagaacatcttctgaagagatattctagaagtatggcaattatgaaca

SEQ ID NO: 50815 - DNA, 80 bp, synthetic construct
  source 1..80: mol_type = other DNA
ttggaggtacattccatgtgacttagactttaagggcacacagtgtccaaatccttcctcctatattcctaagttactaa

SEQ ID NO: 50816 - DNA, 80 bp, synthetic construct
  source 1..80: mol_type = other DNA
ttcagagagaggtgtcagtggtggatcttgtcagctatgcatccgtgtggctgttccgaggggactttgtgatggactac

SEQ ID NO: 50817 - DNA, 80 bp, synthetic construct
  source 1..80: mol_type = other DNA
tatctttccaaagattttattttggcttctttataacagataaactgttgaggggcctagtgtatttcaagttttcagtg

SEQ ID NO: 50818 - DNA, 80 bp, synthetic construct
  source 1..80: mol_type = other DNA
tggggtttttgcttgcctgattttcagctgaacggtgatgcaacagtaaattagaattgtggacatgataatttttagtg

SEQ ID NO: 50819 - DNA, 80 bp, synthetic construct; identical to SEQ ID NO: 16544
  source 1..80: mol_type = other DNA

SEQ ID NO: 50820 - DNA, 80 bp, synthetic construct
  source 1..80: mol_type = other DNA
tggaatgctgaaattatcaagagtgggtggaagggactagggaggagataagaccgtgaatctataagcccagtgaagct

SEQ ID NO: 50821 - DNA, 80 bp, synthetic construct
  source 1..80: mol_type = other DNA
gggtttcattgaaatagtactctgggatgtgaaaaaccaaattcacacaccaatgaatttggtttctaaatccattaagg

SEQ ID NO: 50822 - DNA, 80 bp, synthetic construct; identical to SEQ ID NO: 16545
  source 1..80: mol_type = other DNA

SEQ ID NO: 50823 - DNA, 80 bp, synthetic construct
  source 1..80: mol_type = other DNA
ttgtattcttatttctgtacttctttttattagtgtaggtattattgcaaaggacactaaactttatttttgtttttgat

SEQ ID NO: 50824 - DNA, 80 bp, synthetic construct
  source 1..80: mol_type = other DNA
tgaatatattctttagactgaactgcactggctcaaatcttcactctcatttttctagctatgtgacctaggacaggtac

SEQ ID NO: 50825 - DNA, 80 bp, synthetic construct
  source 1..80: mol_type = other DNA
tctgtgcaacctcatcctcaggtttaggaacaatttgttccttatcagtaaagatcatcttgaatgtggcagtggggggt

SEQ ID NO: 50826 - DNA, 80 bp, synthetic construct
  source 1..80: mol_type = other DNA
catgtaagggttaatccaataatgagctctgcaagacgcatggctcatcttggatgctttgtttacttggataagcttaa

SEQ ID NO: 50827 - DNA, 80 bp, synthetic construct; identical to SEQ ID NO: 16546
  source 1..80: mol_type = other DNA

SEQ ID NO: 50828 - DNA, 80 bp, synthetic construct
  source 1..80: mol_type = other DNA
gactcctgcaggacaagatgtgtcacctggagacctttgccatgttcgtgccaatttactgagtgcatgaaagatcattt

SEQ ID NO: 50829 - DNA, 80 bp, synthetic construct
  source 1..80: mol_type = other DNA
acgtttcttctccctctctttctccttgatttaaagtttatggataggttgaattatttgattggtcttctcaaagaaat

SEQ ID NO: 50830 - DNA, 80 bp, synthetic construct; identical to SEQ ID NO: 16547
  source 1..80: mol_type = other DNA

SEQ ID NO: 50831 - DNA, 80 bp, synthetic construct
  source 1..80: mol_type = other DNA
ttttgaaggaaaaaataaatttattgctcattaagtggaagtggatcatcataaaggtcttcatcctcattgtctccatg

SEQ ID NO: 50832 - DNA, 80 bp, synthetic construct
  source 1..80: mol_type = other DNA
actttatggaaatatatcatcatttttgtttgacttttttcctttctcatttctctgaaaatgtttctgtacagtaccaa

SEQ ID NO: 50833 - DNA, 80 bp, synthetic construct
  source 1..80: mol_type = other DNA
gcctcccaggttcaagcaattctcctgtctcagcctcacaagtagctaggactacaggcacacgtcaccacacctggcta

SEQ ID NO: 50834 - DNA, 80 bp, synthetic construct; identical to SEQ ID NO: 16548
  source 1..80: mol_type = other DNA

SEQ ID NO: 50835 - DNA, 80 bp, synthetic construct
  source 1..80: mol_type = other DNA
tcttgcaccgcccttaatccatttaaccctgagtggacacagcacatgtttcagagagcacagggttgggggtaaggtca

SEQ ID NO: 50836 - DNA, 80 bp, synthetic construct
  source 1..80: mol_type = other DNA
atcctggcccgttctcaatgagctgttgggcacacctcccagacggggtggtggccgggcagaggggctcctcacttccc

SEQ ID NO: 50837 - DNA, 80 bp, synthetic construct
  source 1..80: mol_type = other DNA
ctcccggacggggcggctggccgggcggggggctgacccccccacctccctcccggacggggcggctggccaggcggggg

SEQ ID NO: 50838 - DNA, 80 bp, synthetic construct; identical to SEQ ID NO: 16549
  source 1..80: mol_type = other DNA

SEQ ID NO: 50839 - DNA, 80 bp, synthetic construct
  source 1..80: mol_type = other DNA
ctcctcacatcccagacgatgggcggccaggcagagacactcctcacttcccagacggggtggcggccgggcagaggctg

SEQ ID NO: 50840 - DNA, 80 bp, synthetic construct
  source 1..80: mol_type = other DNA
cactcgcggttaggggctggagaccggcccggccaaacagcaaaacccggtctccaccaaaaccagtcaggcgtggcggc

SEQ ID NO: 50841 - DNA, 80 bp, synthetic construct
  source 1..80: mol_type = other DNA
agaggaggcagaggcagaggaggcagaggcagaggaggcagaggcagaggaggcagaggcagaggcagaggcagaggcag

SEQ ID NO: 50842 - DNA, 80 bp, synthetic construct; identical to SEQ ID NO: 16550
  source 1..80: mol_type = other DNA

SEQ ID NO: 50843 - DNA, 80 bp, synthetic construct
  source 1..80: mol_type = other DNA
tgtagttagtgactaccatatggtcaatgtttacaaatgtaaacattgtaagagacttacattttcttcacatagtttgt

SEQ ID NO: 50844 - DNA, 80 bp, synthetic construct
  source 1..80: mol_type = other DNA
caggaggattgtttgagcccaggagtctgagagcagcctgggaaacgtgctgagactgcatctctacaaaaaatcaaaaa

SEQ ID NO: 50845 - DNA, 80 bp, synthetic construct
  source 1..80: mol_type = other DNA
aaatttctttggcatatggaaatcttgtttaaaaagtttagaaaacattttttaaaactccaatatgaaaagctgggtgc

SEQ ID NO: 50846 - DNA, 80 bp, synthetic construct
  source 1..80: mol_type = other DNA
attgcttccatctcatagtcttttgatgtcagcattctgattctgtccactcttaatcttattctttccactgaatgtaa

SEQ ID NO: 50847 - DNA, 80 bp, synthetic construct; identical to SEQ ID NO: 16551
  source 1..80: mol_type = other DNA

SEQ ID NO: 50848 - DNA, 80 bp, synthetic construct
  source 1..80: mol_type = other DNA
agtcttctattctccaggcttcagagctatcagcttaccattcaattatctccttttttcctgatcttccttttttcatt

SEQ ID NO: 50849 - DNA, 80 bp, synthetic construct
  source 1..80: mol_type = other DNA
tttgtgtgtttaggtctgtgagattggcagaggggaacaagaccacacaggtcagtctttcaggatgcttttttctgtct

SEQ ID NO: 50850 - DNA, 80 bp, synthetic construct; identical to SEQ ID NO: 16552
  source 1..80: mol_type = other DNA

SEQ ID NO: 50851 - DNA, 80 bp, synthetic construct
  source 1..80: mol_type = other DNA
ctctatgtccttacaaattcccaggaatcatcctctactggacagttcccaaagcccttgcagaccttccttttctgtgc

SEQ ID NO: 50852 - DNA, 80 bp, synthetic construct
  source 1..80: mol_type = other DNA
aggcaagaagacacaggggcagtgagatagaaagtgcacaccccagacagcctgcccacatcatcctgaggtgaccagga

SEQ ID NO: 50853 - DNA, 80 bp, synthetic construct
  source 1..80: mol_type = other DNA
cacaaattgtgcagcccattctgttctggaggaaccattcttatcagaacttggtgctggattgacttggagaagagcct

SEQ ID NO: 50854 - DNA, 80 bp, synthetic construct
  source 1..80: mol_type = other DNA
tttgctagggttgtcttgcccatgtgtgctttagatagcagcacctcttcttccatggtgtatatggagaatcctcaaca

SEQ ID NO: 50855 - DNA, 80 bp, synthetic construct; identical to SEQ ID NO: 16553
  source 1..80: mol_type = other DNA

SEQ ID NO: 50856 - DNA, 80 bp, synthetic construct
  source 1..80: mol_type = other DNA
gataaacatggttaacagagaagtaggagacagtgacatgaaatgggtgttcacagccttgtgttgggaattggatgaga

SEQ ID NO: 50857 - DNA, 80 bp, synthetic construct
  source 1..80: mol_type = other DNA
tggttaataattaactagaggagggcactctgtcttccaattacacgttgatttgctaagtggctcagtgacaaggtaat

SEQ ID NO: 50858 - DNA, 80 bp, synthetic construct
  source 1..80: mol_type = other DNA
ggtgttggtggtgcccattgatggcagccactggctcagcatgcgggaggtcttgcgggagctccatgccagaggccacc

SEQ ID NO: 50859 - DNA, 80 bp, synthetic construct; identical to SEQ ID NO: 16554
  source 1..80: mol_type = other DNA

SEQ ID NO: 50860 - DNA, 80 bp, synthetic construct
  source 1..80: mol_type = other DNA
ttcctcctatattcctagattactaacaaccaattcagaccacatgacattcatgcaaagggtcaagaacatgctctacc

SEQ ID NO: 50861 - DNA, 80 bp, synthetic construct
  source 1..80: mol_type = other DNA
gcccaacatggtcttcattgggggcatcaactgtgccaacaggaagccactatctcaggtctgtattggtgccttcatcc

SEQ ID NO: 50862 - DNA, 80 bp, synthetic construct; identical to SEQ ID NO: 16555
  source 1..80: mol_type = other DNA

SEQ ID NO: 50863 - DNA, 80 bp, synthetic construct
  source 1..80: mol_type = other DNA
taatttttagttgtcccatcttgcaaatgatagacaggtgaccacaggagacctaggcactcacatgaaatagaagtgtc

SEQ ID NO: 50864 - DNA, 80 bp, synthetic construct
  source 1..80: mol_type = other DNA
gttcggaaggcaaagtaatggttgcatctcaaatgattcttctacttggaatgctgaaattatcaagaaatggcggaagg

SEQ ID NO: 50865 - DNA, 80 bp, synthetic construct
  source 1..80: mol_type = other DNA
ctttaccaaaaatttcagaggcagctttcattaatccagaatatttgggtttcgttgaaatggtactctgggacctgaat

SEQ ID NO: 50866 - DNA, 80 bp, synthetic construct; identical to SEQ ID NO: 16556
  source 1..80: mol_type = other DNA

SEQ ID NO: 50867 - DNA, 80 bp, synthetic construct
  source 1..80: mol_type = other DNA
gatttgtaaaaatgttgaaaagtgggatggcatttaaatagtgactgttgcccttccagtttttctttcttttttttttt

SEQ ID NO: 50868 - DNA, 80 bp, synthetic construct
  source 1..80: mol_type = other DNA
ccctggcgtgtgatgttccctggcctgtgtccagtgttcttgctgttcagttcccacctatgagtgagaacatgcggtgt

SEQ ID NO: 50869 - DNA, 80 bp, synthetic construct
  source 1..80: mol_type = other DNA
tggattggttccaggtctttgctattgtgaatagtgccacaataaacatacgtgtgcatgtgtccttagagtagtatcat

SEQ ID NO: 50870 - DNA, 80 bp, synthetic construct; identical to SEQ ID NO: 16557
  source 1..80: mol_type = other DNA

SEQ ID NO: 50871 - DNA, 80 bp, synthetic construct
  source 1..80: mol_type = other DNA
gattctggatattagccctttgtcagatgggtagattgcaaaaattttctcccattctgtaggttgcctgttcactctga

SEQ ID NO: 50872 - DNA, 80 bp, synthetic construct
  source 1..80: mol_type = other DNA
tttcttctaggatttttatggttttaggtctaacatttgagtctttaatccatctggaattaatttttgtataaggcgta

SEQ ID NO: 50873 - DNA, 80 bp, synthetic construct
  source 1..80: mol_type = other DNA
ttggtctatatatctgttttggtaccagcacccatgctgttttgttactgtagccttgtagtacagtttgaagtcaggta

SEQ ID NO: 50874 - DNA, 80 bp, synthetic construct
  source 1..80: mol_type = other DNA
tgggcagtatggccattttcacgatattgattcttcctatccatgagcatggaatgttcttccatttgtttgtgtcttct

SEQ ID NO: 50875 - DNA, 80 bp, synthetic construct; identical to SEQ ID NO: 16558
  source 1..80: mol_type = other DNA

SEQ ID NO: 50876 - DNA, 80 bp, synthetic construct
  source 1..80: mol_type = other DNA
tgttttgtgccagttttcaaagggaatgcttccagttttcgcctactcagtatgatattggctgcgggtttgtcataaat

SEQ ID NO: 50877 - DNA, 80 bp, synthetic construct
  source 1..80: mol_type = other DNA
ttgcatatgttgaaccagccttgcatcccaaggatgaagccgacttgatcgatgtggataaactttttgatgtgctgctg

SEQ ID NO: 50878 - DNA, 80 bp, synthetic construct
  source 1..80: mol_type = other DNA
attggaatagtttcagaaggaatggtaccagctcctgtttgtacctctctggtagaattcggctgtgaggaaggggaaca

SEQ ID NO: 50879 - DNA, 80 bp, synthetic construct; identical to SEQ ID NO: 16559
  source 1..80: mol_type = other DNA

SEQ ID NO: 50880 - DNA, 80 bp, synthetic construct
  source 1..80: mol_type = other DNA
tggtagtttgtatttctgtgggatcggtggtgatattgcctttactattttttattgcgtctatttgattcttctctctt

SEQ ID NO: 50881 - DNA, 80 bp, synthetic construct
  source 1..80: mol_type = other DNA
tgcttatctagttcttttatttgtgatgttagtgtgttgattttagatctttcctgctttctcctgtggggatttaatgc

SEQ ID NO: 50882 - DNA, 80 bp, synthetic construct; identical to SEQ ID NO: 16560
  source 1..80: mol_type = other DNA

SEQ ID NO: 50883 - DNA, 80 bp, synthetic construct
  source 1..80: mol_type = other DNA
tcctggatatccttgttaacctttggtcttgttgaactgtctaatatcgacagtgggatgttaaagtctctcattattat

SEQ ID NO: 50884 - DNA, 80 bp, synthetic construct
  source 1..80: mol_type = other DNA
gttaaagtctgttttatcagagactaggattgcaacccctgctttttttttgctttccatttgtttggtagatcttcctc

SEQ ID NO: 50885 - DNA, 80 bp, synthetic construct
  source 1..80: mol_type = other DNA
aatttgatcctgtcattatggtgttatcgggttattttgcccgttaattgatgcagtttcttcacagcatcgatagtctt

SEQ ID NO: 50886 - DNA, 80 bp, synthetic construct
  source 1..80: mol_type = other DNA
tttggctgcatatgaatttctgggttgaaaattcttttctttaagaatgttgaatattggcccccactctcttctgtctt

SEQ ID NO: 50887 - DNA, 80 bp, synthetic construct; identical to SEQ ID NO: 16561
  source 1..80: mol_type = other DNA

SEQ ID NO: 50888 - DNA, 80 bp, synthetic construct
  source 1..80: mol_type = other DNA
aatttgatcttcagtcactgataccctttcttccagttgctctaatcagctattgaattttgtgcatgtgttatgaagtt

SEQ ID NO: 50889 - DNA, 80 bp, synthetic construct
  source 1..80: mol_type = other DNA
ctgaagcctacttctgtcaactcgtcaaagtcattctctttccagctttgctccattgctagcaaggagctgtgatcctt

SEQ ID NO: 50890 - DNA, 80 bp, synthetic construct
  source 1..80: mol_type = other DNA
tcctttctgtttgttagttttccttctaacagtcagatccctcagctgcaggtctgttggagtttgctggaggtccactc

SEQ ID NO: 50891 - DNA, 80 bp, synthetic construct; identical to SEQ ID NO: 16562
  source 1..80: mol_type = other DNA

SEQ ID NO: 50892 - DNA, 80 bp, synthetic construct
  source 1..80: mol_type = other DNA
ttccagcttcctggatgctttgtttacctactcaagcctcagcaatggcggacacccctcacccagccaggctgccgcct

SEQ ID NO: 50893 - DNA, 80 bp, synthetic construct
  source 1..80: mol_type = other DNA
gtctgtcatggctccccttgtctaggaaagggaaatccctcaccctcttgcacttcctaggtgaggcgacgccctgccct

SEQ ID NO: 50894 - DNA, 80 bp, synthetic construct
  source 1..80: mol_type = other DNA
cttccgttctcctctccaacacctcctttttttttccttttctcttccagtttttcaatgtgaacatattctctagagtt

SEQ ID NO: 50895 - DNA, 80 bp, synthetic construct; identical to SEQ ID NO: 16563
  source 1..80: mol_type = other DNA

SEQ ID NO: 50896 - DNA, 80 bp, synthetic construct; identical to SEQ ID NO: 16576
  source 1..80: mol_type = other DNA

SEQ ID NO: 50897 - DNA, 80 bp, synthetic construct
  source 1..80: mol_type = other DNA
tgaaaatgtggaagtgacttggaactgggtaacaggcagaggctggaacagtttggagagctcagaagacaggaagatgt

SEQ ID NO: 50898 - DNA, 80 bp, synthetic construct
  source 1..80: mol_type = other DNA
gtggcatttttgcccctgccctagagctctttggaactacgaacttgagagagatgatctgaaattggaacttatgttta

SEQ ID NO: 50899 - DNA, 80 bp, synthetic construct; identical to SEQ ID NO: 16564
  source 1..80: mol_type = other DNA

SEQ ID NO: 50900 - DNA, 80 bp, synthetic construct
  source 1..80: mol_type = other DNA
tggtgttgggcctgcgggtacacagaagataagaatttaggtttgggaacctccacataaattttagaggatgtaaggaa

SEQ ID NO: 50901 - DNA, 80 bp, synthetic construct
  source 1..80: mol_type = other DNA
cagaacccagaagggcagatccaatagcttgcactgtgtgcctggaagagccacagacatcaatgccaccctctgaaagc

SEQ ID NO: 50902 - DNA, 80 bp, synthetic construct
  source 1..80: mol_type = other DNA
acttgcatggggcctatagcccctttgttttggccagtttctcccatttgaaatgggaacatttacccaatttctgtacc

SEQ ID NO: 50903 - DNA, 80 bp, synthetic construct; identical to SEQ ID NO: 16565
  source 1..80: mol_type = other DNA

SEQ ID NO: 50904 - DNA, 80 bp, synthetic construct
  source 1..80: mol_type = other DNA
gagagctgatggttttataagggactctttctcctttactcacaagcttttcctctctgtctctcgcctgctgccatgtg

SEQ ID NO: 50905 - DNA, 80 bp, synthetic construct
  source 1..80: mol_type = other DNA
ttggtggtgattgaagttatactgaaagggtttaaaggagagtctgagaaaaggaaatgaatctgcatttattgagaaag

SEQ ID NO: 50906 - DNA, 80 bp, synthetic construct
  source 1..80: mol_type = other DNA
ccagtgtgtgatgtaagctgaactaaaatcagctgtgttgaactccagccagaaaaaatgtccggcattttgttttttgg

SEQ ID NO: 50907 - DNA, 80 bp, synthetic construct; identical to SEQ ID NO: 16566
  source 1..80: mol_type = other DNA

SEQ ID NO: 50908 - DNA, 80 bp, synthetic construct
  source 1..80: mol_type = other DNA
aaaattctttaaataaaatgctcttgcagggacaacatagtaggtcaacattgttcccatctccacaaaaagtttttttt

SEQ ID NO: 50909 - DNA, 80 bp, synthetic construct
  source 1..80: mol_type = other DNA
cagacaatcaagctttacacttctataaaagcaacactttccatttatgacagcactaatccaggatatatcaaaactga

SEQ ID NO: 50910 - DNA, 80 bp, synthetic construct; identical to SEQ ID NO: 16567
  source 1..80: mol_type = other DNA

SEQ ID NO: 50911 - DNA, 80 bp, synthetic construct
  source 1..80: mol_type = other DNA
tgatacttcttttatggttattgtatgagaatcaactacccaggcacctcggagcatgttgatttcagagttcagtgtca

SEQ ID NO: 50912 - DNA, 80 bp, synthetic construct
  source 1..80: mol_type = other DNA
tttctgtaaaaaattaccagcatgctgctcttaatttttttcagcctatccagttcagttgccttttgctctcatgcctt

SEQ ID NO: 50913 - DNA, 80 bp, synthetic construct
  source 1..80: mol_type = other DNA
cctaatttgatatgtcccaagcatagcaataggatagttctgtgtggccttatggagatcctttttttacatttccagga

SEQ ID NO: 50914 - DNA, 80 bp, synthetic construct
  source 1..80: mol_type = other DNA
ggctgagagccccaaacagagatttacccacatatttattgacagcaagcctgtgataagcatcatttctatagattata

SEQ ID NO: 50915 - DNA, 80 bp, synthetic construct; identical to SEQ ID NO: 16568
  source 1..80: mol_type = other DNA

SEQ ID NO: 50916 - DNA, 80 bp, synthetic construct
  source 1..80: mol_type = other DNA
gcttccaccgatttcagctcagtgatatgggattcaaatgtctgacctccaaaatattaagataataaatgcatgttgtt

SEQ ID NO: 50917 - DNA, 80 bp, synthetic construct
  source 1..80: mol_type = other DNA
ctaccactagcaaataatcattgtctgcctcaggcttaagtttaataaatagcaaattgcatacagatattttacaacga

SEQ ID NO: 50918 - DNA, 80 bp, synthetic construct
  source 1..80: mol_type = other DNA
tgtggactggaattacttggtgtcaatgcggagtaactgctctttgctatttattatgaaggactttaactcaactctcc

SEQ ID NO: 50919 - DNA, 80 bp, synthetic construct; identical to SEQ ID NO: 16569
  source 1..80: mol_type = other DNA

SEQ ID NO: 50920 - DNA, 80 bp, synthetic construct
  source 1..80: mol_type = other DNA
gaaggggtcctcgaagggcctgccgcctgtgcagccgccctccgcccccgcctcgccatagcggtcatagatatcgcgtt

SEQ ID NO: 50921 - DNA, 80 bp, synthetic construct
  source 1..80: mol_type = other DNA
cacctcgtagtagtccaccatgctggatggccagaacggcccaccaggcactggcacagcgagcggcaaggctgccagca

SEQ ID NO: 50922 - DNA, 80 bp, synthetic construct
  source 1..80: mol_type = other DNA
gtgatgctccaagaccaggccccgcccactccggcctccaaccagccatggtctccaaaaaggatgggaaaaagaggttg

SEQ ID NO: 50923 - DNA, 80 bp, synthetic construct
  source 1..80: mol_type = other DNA
ctccaacgttccagccccggtgcccatttgcttttgttcatgtggattatatctatcatacgtactgcattagagattaa

SEQ ID NO: 50924 - DNA, 80 bp, synthetic construct
  source 1..80: mol_type = other DNA
tagagaggtggattctcatgtcagcttctgtattcaatctactgtgatattacacatcacccatgtagcttctggaaaac

SEQ ID NO: 50925 - DNA, 80 bp, synthetic construct
  source 1..80: mol_type = other DNA
tattctgaagggattagtttaggacaaccctcctctccataccaaaatctagatgctcaagctccttttataaaatgaca

SEQ ID NO: 50926 - DNA, 80 bp, synthetic construct
  source 1..80: mol_type = other DNA
atatttttaatctgctgttggctgaatctgcagatgtgaagcccaagtatatggagggtcaaatgtgcatgttattcact

SEQ ID NO: 50927 - DNA, 80 bp, synthetic construct
  source 1..80: mol_type = other DNA
ggatgcagtgattatttccactagaactgctatatcatgaccatgaattttgggggaatttttttgagatctgagttctc

SEQ ID NO: 50928 - DNA, 80 bp, synthetic construct; identical to SEQ ID NO: 16571
  source 1..80: mol_type = other DNA

SEQ ID NO: 50929 - DNA, 80 bp, synthetic construct
  source 1..80: mol_type = other DNA
ttagacaggggggctggggtctatcccagagttttgagagcaaggcagaggactctgaattttcttctgtgcccaggaag

SEQ ID NO: 50930 - DNA, 80 bp, synthetic construct
  source 1..80: mol_type = other DNA
cagattcagcacttacttgctggcttggatgcagggtctagaacgaaaagagaagaggagtcacttctatacagaaacat

SEQ ID NO: 50931 - DNA, 80 bp, synthetic construct
  source 1..80: mol_type = other DNA
aggacagatatgcaaactgctaaaagatacaaggcagaacagaacaaaacgctgtggggattcaaggaaggtggctttgt

SEQ ID NO: 50932 - DNA, 80 bp, synthetic construct
  source 1..80: mol_type = other DNA
cctattaacttatgtcttcagcttaaaaagaaagtaccttcaaaagggttccagaaacactttccatggacatgtcactc

SEQ ID NO: 50933 - DNA, 80 bp, synthetic construct
  source 1..80: mol_type = other DNA
cgagttcctagcatagtaggtagggctcacacattccataaatatttggtggataagggaattagcaatggattctgctt

SEQ ID NO: 50934 - DNA, 80 bp, synthetic construct
  source 1..80: mol_type = other DNA
gcagcctgataaacgtggttaacagagaagtaggaggctgtgacatgaaatgggtttccacaggcctttgttgggaattg

SEQ ID NO: 50935 - DNA, 80 bp, synthetic construct; identical to SEQ ID NO: 16573
  source 1..80: mol_type = other DNA

SEQ ID NO: 50936 - DNA, 80 bp, synthetic construct
  source 1..80: mol_type = other DNA
catcaaacaagagaaatttttcaccctgacaacctatgccatttcatggacccaggatgaatttgatcgccttgtgctgg

SEQ ID NO: 50937 - DNA, 80 bp, synthetic construct
  source 1..80: mol_type = other DNA
ggttttaatagacccaatttacctctgtggggcagtgctggctaagtacctatcaattcctgctgtgttttttttgagga

SEQ ID NO: 50938 - DNA, 80 bp, synthetic construct
  source 1..80: mol_type = other DNA
tgctccttatgcaagccttgcctctgagctttttcagagggaggtgtcagtggtggatcttctcagccatgcatctgtgt

SEQ ID NO: 50939 - DNA, 80 bp, synthetic construct; identical to SEQ ID NO: 16574
  source 1..80: mol_type = other DNA

SEQ ID NO: 50940 - DNA, 80 bp, synthetic construct
  source 1..80: mol_type = other DNA
gtccttcattgggaaggagcagggacactacattgagacttgacccatctggattttttgtttgcacaattttcagggga

SEQ ID NO: 50941 - DNA, 80 bp, synthetic construct
  source 1..80: mol_type = other DNA
ggatatatgtctgtgattatagaattacacactgagttcagtttccagagagggatctgtgctgacaaaagatttttctg

SEQ ID NO: 50942 - DNA, 80 bp, synthetic construct
  source 1..80: mol_type = other DNA
agttaagctggggacggtgatgaatggacatgtgtccaagaagggaagtgtttctcaggtgaagctgaacatatcaccaa

SEQ ID NO: 50943 - DNA, 80 bp, synthetic construct; identical to SEQ ID NO: 16575
  source 1..80: mol_type = other DNA

SEQ ID NO: 50944 - DNA, 80 bp, synthetic construct
  source 1..80: mol_type = other DNA
gtgggatggaatttaaatagtgactcttgcccttttcttccagtttttcaatgtgaacatattctctagtgttaactaca

SEQ ID NO: 50945 - DNA, 80 bp, synthetic construct
  source 1..80: mol_type = other DNA
ggtaaagaacaggctaatgtattcaatagtgaggccactgactctgtctcaacatgaagtcacactagatttatcatgat

SEQ ID NO: 50946 - DNA, 80 bp, synthetic construct
  source 1..80: mol_type = other DNA
tataaggggccattgtcccttcacttgcaagctcttcctctttctctctttcatgtaagacgtgtctttgcctctctctc

SEQ ID NO: 50947 - DNA, 80 bp, synthetic construct
  source 1..80: mol_type = other DNA
ggagtactgctataaagatacttgaaaatgtggaagtgactttggaactgggtaacaggcagaggttggaacagtttgga

SEQ ID NO: 50948 - DNA, 80 bp, synthetic construct
  source 1..80: mol_type = other DNA
cttgctatgctttagcaaagagactggtggcattttgcccctgccctagagatctgtggaactttgaacttcagagagat

SEQ ID NO: 50949 - DNA, 80 bp, synthetic construct
  source 1..80: mol_type = other DNA
agccaaatgttaattgccaagacaatggggaaaatggcttcagtgcacatcagagacctttgcagcagaccctcccatca

SEQ ID NO: 50950 - DNA, 80 bp, synthetic construct
  source 1..80: mol_type = other DNA
acctcaagccttggcagcatcgatgtggtgttgggcctgtgggtacacagaagataagaatttaggtttgggaacctcca

SEQ ID NO: 50951 - DNA, 80 bp, synthetic construct; identical to SEQ ID NO: 16577
  source 1..80: mol_type = other DNA

SEQ ID NO: 50952 - DNA, 80 bp, synthetic construct
  source 1..80: mol_type = other DNA
taatgactgccctgcctggttttggacttgcatggggcctgtagccccctttttttggccagtttctcccatttggaatg

SEQ ID NO: 50953 - DNA, 80 bp, synthetic construct
  source 1..80: mol_type = other DNA
gaaggcacgattggttttgaaatgtgaaaagacatgagatttgggaggggccagagggcagaatgatatggtttgactct

SEQ ID NO: 50954 - DNA, 80 bp, synthetic construct; identical to SEQ ID NO: 16578
  source 1..80: mol_type = other DNA

SEQ ID NO: 50955 - DNA, 80 bp, synthetic construct
  source 1..80: mol_type = other DNA
tatactgaaagggtttaaaggagagtctgagaaaaggaaatgaatctgcatttattgagaaagttgatgagaaagtggaa

SEQ ID NO: 50956 - DNA, 80 bp, synthetic construct
  source 1..80: mol_type = other DNA
ctgaattaaaatcagctgtgttgaactccagccagaaaaaatatctggcattttggttttttggaccctactgtgatggt

SEQ ID NO: 50957 - DNA, 80 bp, synthetic construct
  source 1..80: mol_type = other DNA
acctgatttatcgaacccttttataaaagatgaatacccacatataggcctctagcagtgttatgtttttgagatgagac

SEQ ID NO: 50958 - DNA, 80 bp, synthetic construct
  source 1..80: mol_type = other DNA
gaggaaggatcacttgagcccagaaattcatgtttactagtggggtatgatcttgcctaggcaacagctacagagagaga

SEQ ID NO: 50959 - DNA, 80 bp, synthetic construct; identical to SEQ ID NO: 16579
  source 1..80: mol_type = other DNA

SEQ ID NO: 50960 - DNA, 80 bp, synthetic construct
  source 1..80: mol_type = other DNA
cttcacacatgtaagttcccttatccggatcactaaaaaatgaactcatttttcaaaagccctgacagtctgtcttattt

SEQ ID NO: 50961 - DNA, 80 bp, synthetic construct
  source 1..80: mol_type = other DNA
attggactctgagggtactagagcatatccaaacccattgtcacagtatttgttggttaatgatgtgttcaggccatgat

SEQ ID NO: 50962 - DNA, 80 bp, synthetic construct
  source 1..80: mol_type = other DNA
tttggggcataacccgtgccaacacaaaggtactttctcaattgtgtgtatggtgcctcacccaaacaatattacagatg

SEQ ID NO: 50963 - DNA, 80 bp, synthetic construct
  source 1..80: mol_type = other DNA
acataaccccaaggtctgtcctcagccttcagaaggaacatgcttcttacaccgatttcagctcagtgatatgggattca

SEQ ID NO: 50964 - DNA, 80 bp, synthetic construct; identical to SEQ ID NO: 16580
  source 1..80: mol_type = other DNA

SEQ ID NO: 50965 - DNA, 80 bp, synthetic construct
  source 1..80: mol_type = other DNA
taaatagcaaattgcatacagatatttacaatgatcgaaagacaaacagaggtcctatccgtgcagtcccaacaataaag

SEQ ID NO: 50966 - DNA, 80 bp, synthetic construct
  source 1..80: mol_type = other DNA
ctggaattacttggtgtcaatggggagcaactgctctatgccgtttattatgaaggactttaactcaactctccatcttc

SEQ ID NO: 50967 - DNA, 80 bp, synthetic construct
  source 1..80: mol_type = other DNA
ccaaaggaacgaaatcctgtatcaaaagaagaaaaaccaccctcaaaagctggaaattcactgaaggcagagaaaagggg

SEQ ID NO: 50968 - DNA, 80 bp, synthetic construct
  source 1..80: mol_type = other DNA
tcgcctcgccatagcggtcatagatatcgcgtttctacgcgtccgacaacacctcgtaggcctcagccacctgcttgaat

SEQ ID NO: 50969 - DNA, 80 bp, synthetic construct
  source 1..80: mol_type = other DNA
cactggcacagcgagcggcaaggctgccagcacccgcgcacaggtcagaggcttggcgacctgggccgcctggagggccg

SEQ ID NO: 50970 - DNA, 80 bp, synthetic construct
  source 1..80: mol_type = other DNA
ggtctccaaaaaggatgggaaaaagaggttggggaaaagagagggccttgactttggctgcctgaagaactgtttttctt

SEQ ID NO: 50971 - DNA, 80 bp, synthetic construct
  source 1..80: mol_type = other DNA
tccagccccggtgcccatttgcttttgttcatctggattatgcctatcatatgtactgcattagagattaaaacagaatt

SEQ ID NO: 50972 - DNA, 80 bp, synthetic construct; identical to SEQ ID NO: 16570
  source 1..80: mol_type = other DNA

SEQ ID NO: 50973 - DNA, 80 bp, synthetic construct
  source 1..80: mol_type = other DNA
ggattagtttaggacaaccctccttccccataccaaaatctagatgctcaagctccttttataaaatgacacagtatttg

SEQ ID NO: 50974 - DNA, 80 bp, synthetic construct
  source 1..80: mol_type = other DNA
tcaatctgctgttggctgaatctgcagatgtgaagcccaagtatatggagggtcaaatgtgcatgttattcacttttctt

SEQ ID NO: 50975 - DNA, 80 bp, synthetic construct
  source 1..80: mol_type = other DNA
attttggggggactttttttgagatctgagttctcttcacctcctccttattctctttttgacactggattctttgcttt

SEQ ID NO: 50976 - DNA, 80 bp, synthetic construct; identical to SEQ ID NO: 16583
  source 1..80: mol_type = other DNA

SEQ ID NO: 50977 - DNA, 80 bp, synthetic construct
  source 1..80: mol_type = other DNA
ggacaggtgggctggggtctatcccagagttttgagagcaaggcagaggactctgaattttctgtgcccaggaagctgct

SEQ ID NO: 50978 - DNA, 80 bp, synthetic construct
  source 1..80: mol_type = other DNA
tcagcacttacttgctggcttggatgcagggtctagaacgaaaagagaagaaaagtcacttctatacagaaacatgtcca

SEQ ID NO: 50979 - DNA, 80 bp, synthetic construct; identical to SEQ ID NO: 16572
  source 1..80: mol_type = other DNA

SEQ ID NO: 50980 - DNA, 80 bp, synthetic construct
  source 1..80: mol_type = other DNA
agtgtgtctgatggtggcctactaacttatgtcttcagcttaaaaagaaagtagcttcaaaagggttccagaaacacttt

SEQ ID NO: 50981 - DNA, 80 bp, synthetic construct
  source 1..80: mol_type = other DNA
aacttgactttctgggcctagttcctagcatagtgactgccatccagtagggctcacacgttccataaatatttggcaga

SEQ ID NO: 50982 - DNA, 80 bp, synthetic construct
  source 1..80: mol_type = other DNA
catccaggtacacagcagaagcagcctcaaaaagcttggaagctctgcatgatgcaggaaagtcataaaatcattacagt

SEQ ID NO: 50983 - DNA, 80 bp, synthetic construct
  source 1..80: mol_type = other DNA
ttctaataaggacacaacaaagagtgaaagcattgctatgtctattctgcttgcccagaatcttggtcctaaaaaatgaa

SEQ ID NO: 50984 - DNA, 80 bp, synthetic construct; identical to SEQ ID NO: 16585
  source 1..80: mol_type = other DNA

SEQ ID NO: 50985 - DNA, 80 bp, synthetic construct
  source 1..80: mol_type = other DNA
cttgggccagtggaatgagtacaatttaacttaattgaatttgcttatctatttggtttcctgttgtgaacaaaagttct

SEQ ID NO: 50986 - DNA, 80 bp, synthetic construct
  source 1..80: mol_type = other DNA
tatgcaaatgaaggatggaaacttgcttagttcttattggtcactgcagctgcattctgattggttgatgaagctgagcc

SEQ ID NO: 50987 - DNA, 80 bp, synthetic construct
  source 1..80: mol_type = other DNA
aagggccagttggctctattttaaatccaggcccagttagccactcaagatctatcttacaggactggctctttcaggtt

SEQ ID NO: 50988 - DNA, 80 bp, synthetic construct; identical to SEQ ID NO: 16586
  source 1..80: mol_type = other DNA

SEQ ID NO: 50989 - DNA, 80 bp, synthetic construct
  source 1..80: mol_type = other DNA
cgaaagcgggggtacagttgtgttcttttctttctaaaaggctttctaaaaagccttctgtttaatttctggaaaagaag

SEQ ID NO: 50990 - DNA, 80 bp, synthetic construct
  source 1..80: mol_type = other DNA
cctgaggttctggaagtactttgctgtgttcactcaagaatgtgatttgagtatgaaattccagccagttcaactgttgt

SEQ ID NO: 50991 - DNA, 80 bp, synthetic construct
  source 1..80: mol_type = other DNA
tatcgattggtttttgccatatatatatatataagtaggagagggcgaacctctggcaggagcaaaggcgccatggctgt

SEQ ID NO: 50992 - DNA, 80 bp, synthetic construct
  source 1..80: mol_type = other DNA
atagttgtcctagcacctgacgcctcgttgtacatcagagacggagcattttacaccttgaagacgtaccctgtgccatt

SEQ ID NO: 50993 - DNA, 80 bp, synthetic construct
  source 1..80: mol_type = other DNA
tcaaaacatacaagaaaataaaaaaggactctgctatgcttttgtctggctgttcccacttactgcacaacaaggagctc

SEQ ID NO: 50994 - DNA, 80 bp, synthetic construct
  source 1..80: mol_type = other DNA
tctcctacgtgcccaggcctctctcctctcattcagatcacatgaccttcctgcagcgggtgaagaacatgctcattgcc

SEQ ID NO: 50995 - DNA, 80 bp, synthetic construct
  source 1..80: mol_type = other DNA
ccaatatggtttttgttggtggaatcaactgccttcaccaaaatccactatcccaggtgtgtattggagtgggactttta

SEQ ID NO: 50996 - DNA, 80 bp, synthetic construct
  source 1..80: mol_type = other DNA
gtatctgagatttcgggaaagcattccttggacattttactctgtgtgctccagtggatagtaatcaattagaaacaaca

SEQ ID NO: 50997 - DNA, 80 bp, synthetic construct
  source 1..80: mol_type = other DNA
ttgtgaccctggttaaagctccagtttctaaatattctgataagaagctaaatcctgcagtccgttctcttctaatgagt

SEQ ID NO: 50998 - DNA, 80 bp, synthetic construct; identical to SEQ ID NO: 16588
  source 1..80: mol_type = other DNA

SEQ ID NO: 50999 - DNA, 80 bp, synthetic construct
  source 1..80: mol_type = other DNA
tagcacatcaaatatggcagccatttcacttagatagttgttgattgtccgcttcacatcatgagccatgtggggacctg

SEQ ID NO: 51000 - DNA, 80 bp, synthetic construct
  source 1..80: mol_type = other DNA
atatgtgttacattaatgaatgagaagaaaggtgccaaccgaggtctagttaatgggtcgagagtaatccacaatagctc

SEQ ID NO: 51001 - DNA, 80 bp, synthetic construct
  source 1..80: mol_type = other DNA
ctttttaaactatgaaatagtatttcatggtacttgtgtaccacagtgtattctgctggagatctagtctagttccccac

SEQ ID NO: 51002 - DNA, 80 bp, synthetic construct
  source 1..80: mol_type = other DNA
ttttcttaagtattttacacggttttttttttttggtcactactgtgaatgtgttatttttttgcatttctatctctagc

SEQ ID NO: 51003 - DNA, 80 bp, synthetic construct
  source 1..80: mol_type = other DNA
atatcagggctattgaatttattagaatctctaaaaacagttgaataattctggcaataggaaagatgcccgtcttgctg

SEQ ID NO: 51004 - DNA, 80 bp, synthetic construct
  source 1..80: mol_type = other DNA
ataaccataaaagtctaagtggtgaactgtgttgactacatatttgttgttgccttgtttggtgcagtcaggcttaggtg

SEQ ID NO: 51005 - DNA, 80 bp, synthetic construct
  source 1..80: mol_type = other DNA
ttccctagcacatctttagtactcctttgtcttcaagctttcttcctttttaaacaacatggcactggtatttttaatcc

SEQ ID NO: 51006 - DNA, 80 bp, synthetic construct
  source 1..80: mol_type = other DNA
gatttctactggttggtcaagttactgttcttattttctctttcttcctttgttaactaaaaatgccactctgcactacc

SEQ ID NO: 51007 - DNA, 80 bp, synthetic construct
  source 1..80: mol_type = other DNA
gcgtgtctttggtgtgtctgaaggaaaagagatagtggaacaacattgggagaaaaggaatgaaactcaagaattccaag

SEQ ID NO: 51008 - DNA, 80 bp, synthetic construct
  source 1..80: mol_type = other DNA
actgggaatgcgtgatggtgaagtcacagatgacccacatggtgtctaagtgctaaagaagaattctgggaaaatgaaat

SEQ ID NO: 51009 - DNA, 80 bp, synthetic construct
  source 1..80: mol_type = other DNA
aatcaatggtgggggattggagtgttattttcagttaatatgttgcttcactctttggtcattccggtaactgtgaagtc

SEQ ID NO: 51010 - DNA, 80 bp, synthetic construct
  source 1..80: mol_type = other DNA
cgtgaatctccagatgaacttttgtgccatttaaactttcgtgatctcctgctatttaacttcgaatgtttatggacctg

SEQ ID NO: 51011 - DNA, 80 bp, synthetic construct; identical to SEQ ID NO: 16591
  source 1..80: mol_type = other DNA

SEQ ID NO: 51012 - DNA, 80 bp, synthetic construct
  source 1..80: mol_type = other DNA
tgcagcatggtggtggggaggatgactctgtcctccctgacttttagatgagcccaagggaaaaggcaaagacaaagccc

SEQ ID NO: 51013 - DNA, 80 bp, synthetic construct
  source 1..80: mol_type = other DNA
tgtcagaggtctcctgtgtctcacatctagggtgaccagcatcctggcttcctcaggactgttcaggttttagcactgaa

SEQ ID NO: 51014 - DNA, 80 bp, synthetic construct
  source 1..80: mol_type = other DNA
cacatgcacatatttgtttattgcagcactattcacaataacaaagtcatggaaccaacccagatgcccatcaatggtag

SEQ ID NO: 51015 - DNA, 80 bp, synthetic construct
  source 1..80: mol_type = other DNA
cataagtgggagttgaacagtgagaatgcgtagacgcagggaggggaacaacacacaccagggcttgtggcggggtgagg

SEQ ID NO: 51016 - DNA, 80 bp, synthetic construct
  source 1..80: mol_type = other DNA
ggaccactgaaaatctacagtgagaaaagaattgccatgttgatgaaacaggaaaactttccttgtccccctcacagagc

SEQ ID NO: 51017 - DNA, 80 bp, synthetic construct
  source 1..80: mol_type = other DNA
ttttagttttgccctctatagtcagcttgtgttaaccagctcaattacaccctctaccttgtcgcaaggacagagggctt

SEQ ID NO: 51018 - DNA, 80 bp, synthetic construct
  source 1..80: mol_type = other DNA
cagtggcccgggctcggtggcccgggctcggtggcctgggctctcctccgactgcctcagccaaactccgcgttgttctg

SEQ ID NO: 51019 - DNA, 80 bp, synthetic construct
  source 1..80: mol_type = other DNA
cagggtggttttgggaaatgaaacatttaggcaggaaaacaaaaatgcctgtcctcacctaggtccatgggcacaggtct

SEQ ID NO: 51020 - DNA, 80 bp, synthetic construct; identical to SEQ ID NO: 16593
  source 1..80: mol_type = other DNA

SEQ ID NO: 51021 - DNA, 80 bp, synthetic construct
  source 1..80: mol_type = other DNA
tttttcttctggctctaggaatttgaagcctacattaatgcttctggagaacatggaattgtggttttctctttgggatc

SEQ ID NO: 51022 - DNA, 80 bp, synthetic construct
  source 1..80: mol_type = other DNA
atcccagacttccagcttccagattaattctcttaattggaaccttagatttggcttttccctgccacttcccaactatt

SEQ ID NO: 51023 - DNA, 80 bp, synthetic construct
  source 1..80: mol_type = other DNA
aagctgttggttagaacactgaatttatgtcttacatttctgctcttatagttctgcatccacttgtttcattaagcaaa

SEQ ID NO: 51024 - DNA, 80 bp, synthetic construct
  source 1..80: mol_type = other DNA
tctgttaaagactgttccttcagaggacccctgttttctagttagtatagcagatttgttttctaatcatattatgttct

SEQ ID NO: 51025 - DNA, 80 bp, synthetic construct; identical to SEQ ID NO: 16594
  source 1..80: mol_type = other DNA

SEQ ID NO: 51026 - DNA, 80 bp, synthetic construct
  source 1..80: mol_type = other DNA
ttggagtgttttcagaacctagatgtgtccagctgtgaaactcagagatgtaactgctgacatcctccctattttgcatc

SEQ ID NO: 51027 - DNA, 80 bp, synthetic construct
  source 1..80: mol_type = other DNA
atgttctggaaatgacttctgaagatttagaaaatgctctaaaagcagtcatcaatgacaaaaggtaagaaagaagatac

SEQ ID NO: 51028 - DNA, 80 bp, synthetic construct
  source 1..80: mol_type = other DNA
ttgctctgtcacctaggctggagtgcagtggtgcaatcttggcttactgcaacctccacctcccacgttcaagcagttct

SEQ ID NO: 51029 - DNA, 80 bp, synthetic construct
  source 1..80: mol_type = other DNA
ttacaggcatgagccagcgcgtctgacctggatttataaataagataatttagaggttattattcactttataaaaggat

SEQ ID NO: 51030 - DNA, 80 bp, synthetic construct; identical to SEQ ID NO: 16595
  source 1..80: mol_type = other DNA

SEQ ID NO: 51031 - DNA, 80 bp, synthetic construct
  source 1..80: mol_type = other DNA
agtatattactgtcaagctcactggtaataggcttattagaaccttatgggaagaagtggtggccagtggtagatttcat

SEQ ID NO: 51032 - DNA, 80 bp, synthetic construct
  source 1..80: mol_type = other DNA
agcagcagtcaggaagacagatgtgaagagctggagcatgttcagatgagaggagacggaacacggggacacaccagctt

SEQ ID NO: 51033 - DNA, 80 bp, synthetic construct
  source 1..80: mol_type = other DNA
gcccagaagttggaggctgctatgagccgtgatcatgccactgcactccagcaacctgggcaacagagtgagaccctgtc

SEQ ID NO: 51034 - DNA, 80 bp, synthetic construct
  source 1..80: mol_type = other DNA
tttccctgcactgttgaagctccttcttgaggctcacattatggatataattttgattctttcttcagtggtatagataa

SEQ ID NO: 51035 - DNA, 80 bp, synthetic construct
  source 1..80: mol_type = other DNA
ggggatagtgcctacacaaaataaaaagaagtggaaaattttcaaacatcagtttatgctgacaaccaggccataatagg

SEQ ID NO: 51036 - DNA, 80 bp, synthetic construct
  source 1..80: mol_type = other DNA
aaatataaaaaaattacccaggcatggtggtgtatgcctgtaatcccagctatttgggaggctgaggcaggaaaatcact

SEQ ID NO: 51037 - DNA, 80 bp, synthetic construct
  source 1..80: mol_type = other DNA
ttcatggccaagtactaatattacattataataatgtttccaaataacattatagatatgtttaaagacagtgtattagg

SEQ ID NO: 51038 - DNA, 80 bp, synthetic construct
  source 1..80: mol_type = other DNA
aatgcgggagcttgcatgtcacatggcaaaagcaggagcgagagagagttgggggggaaggtgccacacactttttaatg

SEQ ID NO: 51039 - DNA, 80 bp, synthetic construct
  source 1..80: mol_type = other DNA
tgtatcagtcaacagcgatcataattagtcctgaataggagtgcctttttttttctttcttctcccttttcttttctact

SEQ ID NO: 51040 - DNA, 80 bp, synthetic construct
  source 1..80: mol_type = other DNA
tgcctcatgctaaatctagcacccagatagtttaatgtttcaatgactgaattacaaatatatcatcaccttggatttgg

SEQ ID NO: 51041 - DNA, 80 bp, synthetic construct
  source 1..80: mol_type = other DNA
gtaggaagcaaggttaaaatatttctaaaatataattttggtctttctttttctcccttccttcctccgtccctctctcc

SEQ ID NO: 51042 - DNA, 80 bp, synthetic construct
  source 1..80: mol_type = other DNA
aagaccttgtttctacaaaaaatttaaaaattggccagacatagtggtgcatgactaattccagctactctggaggctga

SEQ ID NO: 51043 - DNA, 80 bp, synthetic construct
  source 1..80: mol_type = other DNA
agtcttcttaagcagccatgagcataaagagaggattgttcataccacaggtgttccaggcataacgaaactgtctttgt

SEQ ID NO: 51044 - DNA, 80 bp, synthetic construct
  source 1..80: mol_type = other DNA
cattccttggacgtgattggtttcctcttggccgtcgtgctgacagtggccttcatcacctttaaatgttgtgcttatgg

SEQ ID NO: 51045 - DNA, 80 bp, synthetic construct
  source 1..80: mol_type = other DNA
gcccacaaatccaagacccattgagaagtgggtgggaaataaggtaaaattttgaaccattccctagtcatttccaaact

SEQ ID NO: 51046 - DNA, 80 bp, synthetic construct
  source 1..80: mol_type = other DNA
ctttgatcaggatgacatgtgccatttttcagaggacgtgcagacaggctggcattctagattacttttcttactctgaa

SEQ ID NO: 51047 - DNA, 80 bp, synthetic construct; identical to SEQ ID NO: 16599
  source 1..80: mol_type = other DNA

SEQ ID NO: 51048 - DNA, 80 bp, synthetic construct
  source 1..80: mol_type = other DNA
acagctatgaagtgctgggcaagtttactttttttctgatgtttcctacaactaaaaataaattaataaatttatataaa

SEQ ID NO: 51049 - DNA, 80 bp, synthetic construct
  source 1..80: mol_type = other DNA
ttatggcttggatgacactttattttcagatccaatactagaagttgtttccatgttcacattttccttcctggtttaaa

SEQ ID NO: 51050 - DNA, 80 bp, synthetic construct
  source 1..80: mol_type = other DNA
ctatccttccccccattgtatttttcatagcttaaaaatcattgacatagaataattcagctaaagtacgtattaaatcc

SEQ ID NO: 51051 - DNA, 80 bp, synthetic construct
  source 1..80: mol_type = other DNA
ttcttctttccttttttggcaagctttcggaaacaaaacaggcaaaattttgtgatgataaatatcacagttgccacgca

SEQ ID NO: 51052 - DNA, 80 bp, synthetic construct
  source 1..80: mol_type = other DNA
tcgatccaggggcttcattggttggtcatgatgaattcttgataatttcatgacattctctttatagctgaaggataaat

SEQ ID NO: 51053 - DNA, 80 bp, synthetic construct; identical to SEQ ID NO: 16600
  source 1..80: mol_type = other DNA

SEQ ID NO: 51054 - DNA, 80 bp, synthetic construct
  source 1..80: mol_type = other DNA
cctttctctttcggtctcaagtaatcctacatctcagtctcatgagaagctaggactacaactgcacaccaccatgcctg

SEQ ID NO: 51055 - DNA, 80 bp, synthetic construct
  source 1..80: mol_type = other DNA
aaagaagaattgtgacacaactggtgaaatgcctcctaactagtttctcagcttctactctaatcttttgtcttctacca

SEQ ID NO: 51056 - DNA, 80 bp, synthetic construct
  source 1..80: mol_type = other DNA
tcttgttacattaagaataaattccaaatctgtctttggtctagagaactctacacaggcacctacttgtcctagccctt

SEQ ID NO: 51057 - DNA, 80 bp, synthetic construct
  source 1..80: mol_type = other DNA
tttcttgcaactacttgaggtttgcttctatttctttttgaggcttccccttgtatgatacctcttggagagtcttttcc

SEQ ID NO: 51058 - DNA, 80 bp, synthetic construct
  source 1..80: mol_type = other DNA
ttttaagattatcttaaacattatcccaaagtgaagacaccaatttatcacaaactgcatagaagaactctctcctcctg

SEQ ID NO: 51059 - DNA, 80 bp, synthetic construct; identical to SEQ ID NO: 16602
  source 1..80: mol_type = other DNA

SEQ ID NO: 51060 - DNA, 80 bp, synthetic construct
  source 1..80: mol_type = other DNA
atcagattgttttcagttatcgtttttggatgatttataatttatttctagtatgactagaacatataatttttatgaat

SEQ ID NO: 51061 - DNA, 80 bp, synthetic construct
  source 1..80: mol_type = other DNA
caatttgcatctcctgggttcaagtgattctcatgcctcaatctcccaagtatctgggactacaggtgctcatcccctac

SEQ ID NO: 51062 - DNA, 80 bp, synthetic construct
  source 1..80: mol_type = other DNA
aaaatgtttattttctgtctacacacacacaaccagagatatatgtatggatacatatatacagataaatgtgcaatata

SEQ ID NO: 51063 - DNA, 80 bp, synthetic construct; identical to SEQ ID NO: 16603
  source 1..80: mol_type = other DNA

SEQ ID NO: 51064 - DNA, 80 bp, synthetic construct
  source 1..80: mol_type = other DNA
gccctcctcagcctcccaaagtgctgggattacgggcgtgagtcactgcacctggtcagttcaaatttttttaaaaagtt

SEQ ID NO: 51065 - DNA, 80 bp, synthetic construct
  source 1..80: mol_type = other DNA
atcccccggtgtgtgttgttcccctccctgagtccatgtattctcattgttcaactccctcttataagtgagaacatgtg

SEQ ID NO: 51066 - DNA, 80 bp, synthetic construct
  source 1..80: mol_type = other DNA
tttgggttggttccatatctttgatattgtagatagcgctgcaatagacatacatgtgcatgtgtctttatagtagaatg

SEQ ID NO: 51067 - DNA, 80 bp, synthetic construct; identical to SEQ ID NO: 16604
  source 1..80: mol_type = other DNA

SEQ ID NO: 51068 - DNA, 80 bp, synthetic construct
  source 1..80: mol_type = other DNA
gattccggatattagacctttgtcagagggatagattgcaaaaatcttccctcattctgtaggttgcctgttccctctga

SEQ ID NO: 51069 - DNA, 80 bp, synthetic construct; identical to SEQ ID NO: 16629
  source 1..80: mol_type = other DNA

SEQ ID NO: 51070 - DNA, 80 bp, synthetic construct
  source 1..80: mol_type = other DNA
tctttgttccagtactatgctggtttggttactgtaaggtgtaaggaagggatccagtggcagttttctccatatggcta

SEQ ID NO: 51071 - DNA, 80 bp, synthetic construct
  source 1..80: mol_type = other DNA
tctgttttggttatgtagccttgtagtacagtttgaagtcaggtagcatgatgcctccagctttgttctttttgcttagg

SEQ ID NO: 51072 - DNA, 80 bp, synthetic construct
  source 1..80: mol_type = other DNA
atccatgaggatggaatgtttttccatttgtttgtgtcctgtcttaattccttcagcagtggtttctagtcctccctgaa

SEQ ID NO: 51073 - DNA, 80 bp, synthetic construct
  source 1..80: mol_type = other DNA
aggctttgctgaagttgcttatcagcttaaggaattttggagctgcgacaaaggggttttctaactatagaattatgtca

SEQ ID NO: 51074 - DNA, 80 bp, synthetic construct
  source 1..80: mol_type = other DNA
tgtttttaatgtattcccttagctggtaccacctaacctcataataatattggtaggagtaatagactctgaattgatgg

SEQ ID NO: 51075 - DNA, 80 bp, synthetic construct
  source 1..80: mol_type = other DNA
tttgaaaatcacatatttgataagggattgtatctataatatataaataattcttatgaatccataagataaatagaaaa

SEQ ID NO: 51076 - DNA, 80 bp, synthetic construct; identical to SEQ ID NO: 16637
  source 1..80: mol_type = other DNA

SEQ ID NO: 51077 - DNA, 80 bp, synthetic construct
  source 1..80: mol_type = other DNA
acaacaatttcccatatgtctcagcaagtccactcctagcatctcctcaaaagaagtaaaaacatatttttacacggaaa

SEQ ID NO: 51078 - DNA, 80 bp, synthetic construct
  source 1..80: mol_type = other DNA
aattatgctaagtgaaagaagtcatttatgaaacaccataaattgtatgatttcatttatataaaatatgtgaagagaat

SEQ ID NO: 51079 - DNA, 80 bp, synthetic construct
  source 1..80: mol_type = other DNA
tttagtgaatgttatgctatgcaaattataattcattatcacatttcttaaaataatgataataaaaataaatttttgag

SEQ ID NO: 51080 - DNA, 80 bp, synthetic construct
  source 1..80: mol_type = other DNA
cattggtgacccattaaatctgtggggttgaaatgtaactttgaaataaactgtctggtggaaagtaaggacagatttta

SEQ ID NO: 51081 - DNA, 80 bp, synthetic construct; identical to SEQ ID NO: 16638
  source 1..80: mol_type = other DNA

SEQ ID NO: 51082 - DNA, 80 bp, synthetic construct
  source 1..80: mol_type = other DNA
atgcacaatataaggaacttaaagcaaaactgttccctaggtaacattatacccacaaaactgcattgaaattgttttca

SEQ ID NO: 51083 - DNA, 80 bp, synthetic construct; identical to SEQ ID NO: 16607
  source 1..80: mol_type = other DNA

SEQ ID NO: 51084 - DNA, 80 bp, synthetic construct
  source 1..80: mol_type = other DNA
taaataggagacagacagaaaatccaggatgttatttaaaacctgtgagaggaaattacacctgaacaaagagattttta

SEQ ID NO: 51085 - DNA, 80 bp, synthetic construct
  source 1..80: mol_type = other DNA
attatcactccaatttgctgttactaatatattcactgtttgttctccagaatcttaccaagaaggtcattctggggtaa

SEQ ID NO: 51086 - DNA, 80 bp, synthetic construct
  source 1..80: mol_type = other DNA
ttcttgccatcaaatctccatagaacctgttagggcaaggaaaatatcttgttcaatgaatagaactctaaaaacatagc

SEQ ID NO: 51087 - DNA, 80 bp, synthetic construct; identical to SEQ ID NO: 16608
  source 1..80: mol_type = other DNA

SEQ ID NO: 51088 - DNA, 80 bp, synthetic construct
  source 1..80: mol_type = other DNA
tgacctggaagccccttccatgcttcaagttgctctgcctttgtttctagctgtctcccatttctggaccgaacaaatgt

SEQ ID NO: 51089 - DNA, 80 bp, synthetic construct
  source 1..80: mol_type = other DNA
aactgtctcatatattcagggttcatattttggtaaccatgaagagattctgagtggaggttccctgacctttgataaat

SEQ ID NO: 51090 - DNA, 80 bp, synthetic construct
  source 1..80: mol_type = other DNA
tttggagttttacttgcttcctacaagaaaggcaagatttcctgtttccatgacaatggaaggcaggtaactctatggag

SEQ ID NO: 51091 - DNA, 80 bp, synthetic construct
  source 1..80: mol_type = other DNA
taccattacagtgcttagtgatcacatttctgggatttttttttttttttgtacattccagtatttctcccatcagattt

SEQ ID NO: 51092 - DNA, 80 bp, synthetic construct; identical to SEQ ID NO: 16609
  source 1..80: mol_type = other DNA

SEQ ID NO: 51093 - DNA, 80 bp, synthetic construct
  source 1..80: mol_type = other DNA
gatttttttctcagtccaaagctctgttttcctatgttgaatgacctgatctctttggctttgagattaccacagattac

SEQ ID NO: 51094 - DNA, 80 bp, synthetic construct
  source 1..80: mol_type = other DNA
tgttgtaaagggtctcctctattgtttttattccccaaattaatctcatttggcttgtctgtgtggatttgtgtgagaaa

SEQ ID NO: 51095 - DNA, 80 bp, synthetic construct
  source 1..80: mol_type = other DNA
gaaatccccaataaaaattaacttttaaaaaaaggctagtccaggaaacacatatgagggcagatcacccagcattttga

SEQ ID NO: 51096 - DNA, 80 bp, synthetic construct; identical to SEQ ID NO: 16610
  source 1..80: mol_type = other DNA

SEQ ID NO: 51097 - DNA, 80 bp, synthetic construct
  source 1..80: mol_type = other DNA
ttgtctgcaagctggtcaattttttttatctcatggctaaagttctgaagtaaaagccatagaatcttttgtgtgtgtgt

SEQ ID NO: 51098 - DNA, 80 bp, synthetic construct
  source 1..80: mol_type = other DNA
atatgcaaatgtaagactatttagcttacaactgcctatggtgatcaagtattcatacagattacctattgaaacaggtt

SEQ ID NO: 51099 - DNA, 80 bp, synthetic construct
  source 1..80: mol_type = other DNA
aaataaaagtgcttgaattaaatactttgccagaaaaaaaagactagtcaaatgctttttcaagtttatgtaacttcaat

SEQ ID NO: 51100 - DNA, 80 bp, synthetic construct
  source 1..80: mol_type = other DNA
aagggttacaaaactgtaaaccaagcccaaaacagaatgatctttgcttgtgtaattttttaataaataagacattgata

SEQ ID NO: 51101 - DNA, 80 bp, synthetic construct
  source 1..80: mol_type = other DNA
ttttcctcaagttctgtttgttgtggcataatgctaacagtgctttctaaaagctattcagctcctcaaggtccagggac

SEQ ID NO: 51102 - DNA, 80 bp, synthetic construct
  source 1..80: mol_type = other DNA
cttcttaataaagattataaaggttatgaaaggctgaggaaagttatatcttatggtcaagattagaattttatagattg

SEQ ID NO: 51103 - DNA, 80 bp, synthetic construct
  source 1..80: mol_type = other DNA
gtgatattaagtgttttaaacctttgatatttgagaaattttccaaacaaattataaattatgattttttctgacctaag

SEQ ID NO: 51104 - DNA, 80 bp, synthetic construct; identical to SEQ ID NO: 16612
  source 1..80: mol_type = other DNA

SEQ ID NO: 51105 - DNA, 80 bp, synthetic construct
  source 1..80: mol_type = other DNA
gataattttggagattgtgacattagaatggaagaaaaactttcaggactcatggagaactaaaatgttcatgagtatca

SEQ ID NO: 51106 - DNA, 80 bp, synthetic construct
  source 1..80: mol_type = other DNA
ctcctatgaaaaaaatttagaacgtatttgtttccctctacctgatttttcagaatttggaaactatttgtgagtatttt

SEQ ID NO: 51107 - DNA, 80 bp, synthetic construct
  source 1..80: mol_type = other DNA
ccttgggaaaactggcctcataccttcatctataaggtccctgtacagggttcctgaactgtgttaagcaaagaatgtaa

SEQ ID NO: 51108 - DNA, 80 bp, synthetic construct
  source 1..80: mol_type = other DNA
cactttaaaagcctatgtaaataaaaaattattcttcctcctctgtatacaataatcaggccaagtataataaagcaaat

SEQ ID NO: 51109 - DNA, 80 bp, synthetic construct
  source 1..80: mol_type = other DNA
gcgacacgtcttcaaaatagtgtcttcaggttttttttcctccctttccaccatttttcctagtttggagtcactgtaaa

SEQ ID NO: 51110 - DNA, 80 bp, synthetic construct
  source 1..80: mol_type = other DNA
tgaactttcctaataactcaggacctgcttaggaataaaccttccttgccattagagatcagatgaaaacctgagaccag

SEQ ID NO: 51111 - DNA, 80 bp, synthetic construct; identical to SEQ ID NO: 16614
  source 1..80: mol_type = other DNA

SEQ ID NO: 51112 - DNA, 80 bp, synthetic construct
  source 1..80: mol_type = other DNA
atttaatataaatttattaatttttgagtgatatgagaagagtttacttatatccacttgtctactagtcataagttatt

SEQ ID NO: 51113 - DNA, 80 bp, synthetic construct
  source 1..80: mol_type = other DNA
tcagactattatcagtattgctacttttgtaaatgctaacaatgtaggaaaaaggagcccattgacaattcatgattaac

SEQ ID NO: 51114 - DNA, 80 bp, synthetic construct
  source 1..80: mol_type = other DNA
agaattcccaagcaatctttataaactggagtagaatttacaagtgttgaccttgtatttgatatgggagtgttaaagta

SEQ ID NO: 51115 - DNA, 80 bp, synthetic construct; identical to SEQ ID NO: 16615
  source 1..80: mol_type = other DNA

SEQ ID NO: 51116 - DNA, 80 bp, synthetic construct
  source 1..80: mol_type = other DNA
ggcaccctgaacagaacactaaatagacctattccaatacatgggaagtaaaaacagccagattgcttggtaagacgaag

SEQ ID NO: 51117 - DNA, 80 bp, synthetic construct
  source 1..80: mol_type = other DNA
atcctgtaaaccaaaaggagcaaatgacagggcagaatttagtgatttctatgtacatgctacgataccatgataatacc

SEQ ID NO: 51118 - DNA, 80 bp, synthetic construct
  source 1..80: mol_type = other DNA
aattttcaggcagaacatttctgtaatggactcttgaagagtttaacagattcatttagtagccatccacagttaaggca

SEQ ID NO: 51119 - DNA, 80 bp, synthetic construct; identical to SEQ ID NO: 16616
  source 1..80: mol_type = other DNA

SEQ ID NO: 51120 - DNA, 80 bp, synthetic construct
  source 1..80: mol_type = other DNA
atgtatgtgtgtgtaaggaggaaatgaaacaaagctatgacactgcagtaggaggagataatgctagaaaatgttacacc

SEQ ID NO: 51121 - DNA, 80 bp, synthetic construct
  source 1..80: mol_type = other DNA
taggagtcattggagccattacatgactatgagcattgaggaaaagttagttacaattggaatgatattatatctacatt

SEQ ID NO: 51122 - DNA, 80 bp, synthetic construct
  source 1..80: mol_type = other DNA
aagtataagaatcactgacattcagcagtctggtattgtggtttggaatttctgggaaatagttctgagaattccattta

SEQ ID NO: 51123 - DNA, 80 bp, synthetic construct
  source 1..80: mol_type = other DNA
ccttttgtcctgaaatcacactgtgaatttgatgtgctatgtataactgaatgtgggggaccctcatcatcactttgctg

SEQ ID NO: 51124 - DNA, 80 bp, synthetic construct
  source 1..80: mol_type = other DNA
cctgatgtgtccctgtttttaaacttaaatccattctctaatgccacatcgctcaatgtattctcacaccaaaaaaaaaa

SEQ ID NO: 51125 - DNA, 80 bp, synthetic construct
  source 1..80: mol_type = other DNA
agtaaaataatgaccaaccccttctgtcataacaaatatactttctggtcctaatcattgggggaaatttctttataaaa

SEQ ID NO: 51126 - DNA, 80 bp, synthetic construct
  source 1..80: mol_type = other DNA
gctcattgcaacctctgcctcccaggttaaagcaattctcctgcctcagtctcctgagtagctgggattacaggcacctg

SEQ ID NO: 51127 - DNA, 80 bp, synthetic construct
  source 1..80: mol_type = other DNA
aattggagattcagtgtatggctattagagataattcatgaggcatccaggaactcagtgtaattgcagttgcctgtagc

SEQ ID NO: 51128 - DNA, 80 bp, synthetic construct
  source 1..80: mol_type = other DNA
actgccaaaagtctgcttcacccacccagtattgaagtaataaaacatctatttatagacagatcagcactgatctcatt

SEQ ID NO: 51129 - DNA, 80 bp, synthetic construct
  source 1..80: mol_type = other DNA
tgtacatatgtgatgtttatttagaaaattttattctcattgtatatgcctttttattctacaaaaaaactgtgatcttg

SEQ ID NO: 51130 - DNA, 80 bp, synthetic construct; identical to SEQ ID NO: 16618
  source 1..80: mol_type = other DNA

SEQ ID NO: 51131 - DNA, 80 bp, synthetic construct
  source 1..80: mol_type = other DNA
atcagtttcacaattatttacttggattcaagtctaccttctgcaagttaacaacaacggaggctcacacttgtaatccc

SEQ ID NO: 51132 - DNA, 80 bp, synthetic construct
  source 1..80: mol_type = other DNA
agccgagatcatgctagtatcagtaataatcactattgtactactagtcatttatcccttgtccttattctgctactctc

SEQ ID NO: 51133 - DNA, 80 bp, synthetic construct
  source 1..80: mol_type = other DNA
ctttacaatacaactttagctttccagcttgttcaactgactgcccaaacttaaacatttacatttaaacaagtacacag

SEQ ID NO: 51134 - DNA, 80 bp, synthetic construct
  source 1..80: mol_type = other DNA
ttggatcactggctgtgtgtcagagacaacttaagtgttttatctgtggtaactactttttttccacacagcacaatatg

SEQ ID NO: 51135 - DNA, 80 bp, synthetic construct
  source 1..80: mol_type = other DNA
attttttaaaaggaaatctgatcatatctcttcatttcttaactcttttcactcttttcagtagctctccattgtcccta

SEQ ID NO: 51136 - DNA, 80 bp, synthetic construct
  source 1..80: mol_type = other DNA
ccggggttcaagtgattctcctgcctcagcttcccaagtagctgctattacagtcacctgccaacatgcctggctaactt

SEQ ID NO: 51137 - DNA, 80 bp, synthetic construct
  source 1..80: mol_type = other DNA
acgcccggcccatcattgacttttactcaaccttttcctgtaaattaaatttggagttcctgggaactgcccttattgct

SEQ ID NO: 51138 - DNA, 80 bp, synthetic construct
  source 1..80: mol_type = other DNA
tcagcctcttaagtagctacgactatgagactacaggcacacaccagcatgcctggctattattttattttttatttttg

SEQ ID NO: 51139 - DNA, 80 bp, synthetic construct; identical to SEQ ID NO: 16620
  source 1..80: mol_type = other DNA

SEQ ID NO: 51140 - DNA, 80 bp, synthetic construct
  source 1..80: mol_type = other DNA
attttttgaagaaatgaatcatactatcttttgggtggcacaatgaaggccttactttaaccaaccctgttttcaaaatc

SEQ ID NO: 51141 - DNA, 80 bp, synthetic construct
  source 1..80: mol_type = other DNA
tctgaaaatgtcaagcaaacaaatgaaacaagaatacatttaccttaggcaggggtttggctggtttacagtgaagtcct

SEQ ID NO: 51142 - DNA, 80 bp, synthetic construct
  source 1..80: mol_type = other DNA
gttatttgaatatgcaggtattttcctgaaaggacttggaataacatacccaaacatatataaaatgtctgtgcattgat

SEQ ID NO: 51143 - DNA, 80 bp, synthetic construct
  source 1..80: mol_type = other DNA
attaaaataagtcactaatatggtttgactgtccccacccaaatctcctctcatcttgaattataatccccataatcccc

SEQ ID NO: 51144 - DNA, 80 bp, synthetic construct; identical to SEQ ID NO: 16621
  source 1..80: mol_type = other DNA

SEQ ID NO: 51145 - DNA, 80 bp, synthetic construct
  source 1..80: mol_type = other DNA
caattaattcatcttaccttacccatgaaaacagctttccaggaagtactctagtgtctacagtttattaagctagtccc

SEQ ID NO: 51146 - DNA, 80 bp, synthetic construct
  source 1..80: mol_type = other DNA
acatagagatatgtgctctcccttaatttggcccctattttctttgatggagagatgcagtttaataaaatatagattaa

SEQ ID NO: 51147 - DNA, 80 bp, synthetic construct
  source 1..80: mol_type = other DNA
agccactatattactcaactgtgaaggaatccttcttacatgaaaaacaaaatttaatttctaaatgaggaaactgagga

SEQ ID NO: 51148 - DNA, 80 bp, synthetic construct; identical to SEQ ID NO: 16622
  source 1..80: mol_type = other DNA

SEQ ID NO: 51149 - DNA, 80 bp, synthetic construct
  source 1..80: mol_type = other DNA
ccttcaaaggcacagaaaagttagaacttaataagcaccagttagacacatgacttacctagaacttcactataaaactg

SEQ ID NO: 51150 - DNA, 80 bp, synthetic construct
  source 1..80: mol_type = other DNA
aatgtgtagccaacagagaatcgaagactgtacagaaagggtatgttaaatagttcagccagtagctcaccacagggatt

SEQ ID NO: 51151 - DNA, 80 bp, synthetic construct
  source 1..80: mol_type = other DNA
acaccatatatccatctatcgagaattttcagaagagaatcttccaaataatttttagttaaagatgtaggataaacttc

SEQ ID NO: 51152 - DNA, 80 bp, synthetic construct; identical to SEQ ID NO: 16623
  source 1..80: mol_type = other DNA

SEQ ID NO: 51153 - DNA, 80 bp, synthetic construct
  source 1..80: mol_type = other DNA
ctgagtatttgcaaaacaatgttgatactatgagtggagttgttaatgttttgtgttcaaatacaatgtgtgaaacataa

SEQ ID NO: 51154 - DNA, 80 bp, synthetic construct
  source 1..80: mol_type = other DNA
tgacttaacagggtaagttgtgaaaagacgttttgtcgcaggaaaaaggaaatcctccatttaaaaccctccatgctgga

SEQ ID NO: 51155 - DNA, 80 bp, synthetic construct
  source 1..80: mol_type = other DNA
tcataaatatcatagttgccacgcaggccagcaggaatgctatcacatccaaagagtggtactggatccaggtgaggttg

SEQ ID NO: 51156 - DNA, 80 bp, synthetic construct
  source 1..80: mol_type = other DNA
ttaaaagtaaatttattgcttaagcatatcaagtctatggatggtctttgaaaagcgccacacaagtgattcaaagtaag

SEQ ID NO: 51157 - DNA, 80 bp, synthetic construct; identical to SEQ ID NO: 16625
  source 1..80: mol_type = other DNA

SEQ ID NO: 51158 - DNA, 80 bp, synthetic construct
  source 1..80: mol_type = other DNA
tttacatttttagatatgaggtcttgctgtagtgcccatactcatctggaactcctgtggtctaatcattctgcctctgt

SEQ ID NO: 51159 - DNA, 80 bp, synthetic construct
  source 1..80: mol_type = other DNA
ctggtgaaatgtctcctaactagtttctcagcttctactctaatcttctgtcttctaccgtattttcctactagtagcca

SEQ ID NO: 51160 - DNA, 80 bp, synthetic construct; identical to SEQ ID NO: 16601
  source 1..80: mol_type = other DNA

SEQ ID NO: 51161 - DNA, 80 bp, synthetic construct
  source 1..80: mol_type = other DNA
cctcttagagagtgttttcctggccacactataggcacccataggatttctctactgcttcgttcttattttgctatttg

SEQ ID NO: 51162 - DNA, 80 bp, synthetic construct
  source 1..80: mol_type = other DNA
ttatccaaaagtgaaaacaccaatttatcacaaactgcatagaagaactctttcctcctgggccattttagtcactactt

SEQ ID NO: 51163 - DNA, 80 bp, synthetic construct; identical to SEQ ID NO: 16626
  source 1..80: mol_type = other DNA

SEQ ID NO: 51164 - DNA, 80 bp, synthetic construct
  source 1..80: mol_type = other DNA
agaattttttgactgaattttttaaaaaatattttttattttaaagaatcagagattgtttttagttatcattttctgga

SEQ ID NO: 51165 - DNA, 80 bp, synthetic construct; identical to SEQ ID NO: 16627
  source 1..80: mol_type = other DNA

SEQ ID NO: 51166 - DNA, 80 bp, synthetic construct
  source 1..80: mol_type = other DNA
tggaattacaggtgtgagccaccacacccagtctccataaactcttttaaaaatgtttattttctgtctacacacacaca

SEQ ID NO: 51167 - DNA, 80 bp, synthetic construct
  source 1..80: mol_type = other DNA
tttaaatttaatgcgagtactggtaggttcacttttttgttgtgatctttgagatggagtctcgctctgtcaccaggctg

SEQ ID NO: 51168 - DNA, 80 bp, synthetic construct
  source 1..80: mol_type = other DNA
aggagtatggtctcgatctcttgacctcgtgatctgccctcctcagccacccaaagtgctgggattacaggcttgagcca

SEQ ID NO: 51169 - DNA, 80 bp, synthetic construct; identical to SEQ ID NO: 16628
  source 1..80: mol_type = other DNA

SEQ ID NO: 51170 - DNA, 80 bp, synthetic construct
  source 1..80: mol_type = other DNA
tacatgcatcatattttctttatccagtctatcattgatgagtatttgtgttggttccatatctttgatattgtagatag

SEQ ID NO: 51171 - DNA, 80 bp, synthetic construct
  source 1..80: mol_type = other DNA
cattcccaccaaaaatgtaaaagttttcctatatctccccagtttcaccagcatctgttgttttttgactttttaatcat

SEQ ID NO: 51172 - DNA, 80 bp, synthetic construct
  source 1..80: mol_type = other DNA
tgttttttttcttgtaaatttgtttaagttacttgtagattctggatattggacctttgtcagagggatagattgcaaaa

SEQ ID NO: 51173 - DNA, 80 bp, synthetic construct
  source 1..80: mol_type = other DNA
gaatgatgttgcttaggttttcttccagggtttttatggttttgggttttacatttaagtctttaatccatcttgagtta

SEQ ID NO: 51174 - DNA, 80 bp, synthetic construct
  source 1..80: mol_type = other DNA
tgaggcctctgttctgttccattggtctatatgtctgcttttgttccagtactatgctggtttggttactgtaaggtgta

SEQ ID NO: 51175 - DNA, 80 bp, synthetic construct; identical to SEQ ID NO: 16605
  source 1..80: mol_type = other DNA

SEQ ID NO: 51176 - DNA, 80 bp, synthetic construct
  source 1..80: mol_type = other DNA
tgtgggaagaagccaagatggccgaataagaacagctccagtctacagctcccagtgtgaatgacacagatgaggaatga

SEQ ID NO: 51177 - DNA, 80 bp, synthetic construct
  source 1..80: mol_type = other DNA
aaggataggggtaacagatggcacctggaaaattgggttactcccaccctaatactgcgcttttccaaaaggttttagca

SEQ ID NO: 51178 - DNA, 80 bp, synthetic construct; identical to SEQ ID NO: 16630
  source 1..80: mol_type = other DNA

SEQ ID NO: 51179 - DNA, 80 bp, synthetic construct
  source 1..80: mol_type = other DNA
ctgggaggcaccccccagtaggggcagactgacacctcacacagccgggtactcctctgagaaaacttccagaggaacaa

SEQ ID NO: 51180 - DNA, 80 bp, synthetic construct
  source 1..80: mol_type = other DNA
atccacaccaaaacccatttctacatcgccatcatcaaaaaccaaaggtagataaaaccacaaagatgggggaaaaaaga

SEQ ID NO: 51181 - DNA, 80 bp, synthetic construct
  source 1..80: mol_type = other DNA
cgaaccgaaggcaaagaaggtaaaaaccttgaaaaaagattagatgaatggctaactagataaccaatgcagagaagtcc

SEQ ID NO: 51182 - DNA, 80 bp, synthetic construct
  source 1..80: mol_type = other DNA
aaagaaatgaacaaagcctccaagaaatatgggactatgtgaaaagaccaaatctacatctgattggtgtacctgaaagt

SEQ ID NO: 51183 - DNA, 80 bp, synthetic construct; identical to SEQ ID NO: 16631
  source 1..80: mol_type = other DNA

SEQ ID NO: 51184 - DNA, 80 bp, synthetic construct
  source 1..80: mol_type = other DNA
catttacagacaagcaaatgctgagagattttgtcaccaccaggcctgccctaaaagagctcctgaaggaagcactaaac

SEQ ID NO: 51185 - DNA, 80 bp, synthetic construct
  source 1..80: mol_type = other DNA
atgggttaaatgctagaattaaaagacacagactggcaaactggatcaagagtcaagacccatcactgtgctgtattcag

SEQ ID NO: 51186 - DNA, 80 bp, synthetic construct
  source 1..80: mol_type = other DNA
cataatggtaaagggatcaattcaacaagaagagctaactatcctaaatatacatgcacccagattcataaagcaagtcc

SEQ ID NO: 51187 - DNA, 80 bp, synthetic construct; identical to SEQ ID NO: 16632
  source 1..80: mol_type = other DNA

SEQ ID NO: 51188 - DNA, 80 bp, synthetic construct
  source 1..80: mol_type = other DNA
ataatgaaatgaaggcagaattaaagatgttctttgaaaccaacgagaacaaagacacaacataccagaatctctgggac

SEQ ID NO: 51189 - DNA, 80 bp, synthetic construct
  source 1..80: mol_type = other DNA
tcagagcagaactgaaggaaatagagacacaaaaaactcttcaaaaaatcaatgaatccaagagctggttttttgaaaag

SEQ ID NO: 51190 - DNA, 80 bp, synthetic construct; identical to SEQ ID NO: 16633
  source 1..80: mol_type = other DNA

SEQ ID NO: 51191 - DNA, 80 bp, synthetic construct
  source 1..80: mol_type = other DNA
aatcctccctaactcattttatgaggccaacatcatcctgataccaaagcctggcagggacacaagaaaaaaaagagaat

SEQ ID NO: 51192 - DNA, 80 bp, synthetic construct
  source 1..80: mol_type = other DNA
tccagcacataaacagaaccaatgacaaaaaccacatgattatctcaatagatgcagaaaagacctttgacaaaattcaa

SEQ ID NO: 51193 - DNA, 80 bp, synthetic construct
  source 1..80: mol_type = other DNA
tctcaccactcctattcaacacagtgttggatgttctggccaggagaataaggcaggataaggaaatacagggtattcaa

SEQ ID NO: 51194 - DNA, 80 bp, synthetic construct; identical to SEQ ID NO: 16634
  source 1..80: mol_type = other DNA

SEQ ID NO: 51195 - DNA, 80 bp, synthetic construct
  source 1..80: mol_type = other DNA
atagatccaatgccatccccatcaagctaccaatgactttcttcacagaattggaaaaaactacttgaattcatatggaa

SEQ ID NO: 51196 - DNA, 80 bp, synthetic construct
  source 1..80: mol_type = other DNA
ccctcagaaataatgccacacatctacaactatctgatctttgacaaaccttacaaaaacaagaaatggggaaaggattc

SEQ ID NO: 51197 - DNA, 80 bp, synthetic construct
  source 1..80: mol_type = other DNA
accattcaggacataggcatgggcaaggacttcatgactaaaacaccaaaagcaatggcaacaaaagccaaaattgacaa

SEQ ID NO: 51198 - DNA, 80 bp, synthetic construct; identical to SEQ ID NO: 16635
  source 1..80: mol_type = other DNA

SEQ ID NO: 51199 - DNA, 80 bp, synthetic construct
  source 1..80: mol_type = other DNA
tggtgggactgtaaactagttcaaccattgtggaagtcagtgtggcgattcctcagggatctagaactagaaatatcatt

SEQ ID NO: 51200 - DNA, 80 bp, synthetic construct
  source 1..80: mol_type = other DNA
ggcacacatacactatagaatactatgcagccataaaaaatgatgagttcatgtcctttgcagggacatggatgaagctg

SEQ ID NO: 51201 - DNA, 80 bp, synthetic construct
  source 1..80: mol_type = other DNA
attaggagatacacttaatgttaaatgacgagttaatgggtgcagcacaccaacatggcacatgtatacatatgtagcaa

SEQ ID NO: 51202 - DNA, 80 bp, synthetic construct; identical to SEQ ID NO: 16636
  source 1..80: mol_type = other DNA

SEQ ID NO: 51203 - DNA, 80 bp, synthetic construct
  source 1..80: mol_type = other DNA
ttatgtcatctgcaaatagagacaatttaacttcttctctttctatttatagaataccctttatttctttttcttgcctg

SEQ ID NO: 51204 - DNA, 80 bp, synthetic construct; identical to SEQ ID NO: 16606
  source 1..80: mol_type = other DNA

SEQ ID NO: 51205 - DNA, 80 bp, synthetic construct
  source 1..80: mol_type = other DNA
ggatagtatctataacatattaataattcttatgaatccataataaggtaaatagaaaaatgacaaaatgttcacaagat

SEQ ID NO: 51206 - DNA, 80 bp, synthetic construct
  source 1..80: mol_type = other DNA
gtgttgggaagagtgtgaagaaattagagccctcctatccagctggtggtaatgaaaaatgatgcaaatactttgaaaaa

SEQ ID NO: 51207 - DNA, 80 bp, synthetic construct
  source 1..80: mol_type = other DNA
taagtgccaaaattggaaagacctaaaatgtccatgccctgataaatgggtaattttggtataaacatatcaaagaatat

SEQ ID NO: 51208 - DNA, 80 bp, synthetic construct
  source 1..80: mol_type = other DNA
taagtcggtatttttctaggactggaggtgtattgggagtgacttcatgcattttgagtttaatttgagctcacaaaaat

SEQ ID NO: 51209 - DNA, 80 bp, synthetic construct
  source 1..80: mol_type = other DNA
ctttcagaaattttaggtattgaattgaaatattttatcatatttctctagttacataatttctattgtgtattctatca

SEQ ID NO: 51210 - DNA, 80 bp, synthetic construct
  source 1..80: mol_type = other DNA
tcaatcccttcaaaattagtctcttaacaaagggttcaaactcatattcactgttgacaaaataatttgtaagtaccacc

SEQ ID NO: 51211 - DNA, 80 bp, synthetic construct
  source 1..80: mol_type = other DNA
ccaccatagggatcccatggtagattgcctcatagatgccattggttccaccatgagttataaaagctttggttttggga

SEQ ID NO: 51212 - DNA, 80 bp, synthetic construct
  source 1..80: mol_type = other DNA
gcacctacttctgctggaaaggtaagtgaaggctacatgaaaaggtggtggtctgtgtgtcttcacagtggaaacataaa

SEQ ID NO: 51213 - DNA, 80 bp, synthetic construct; identical to SEQ ID NO: 16639
  source 1..80: mol_type = other DNA

SEQ ID NO: 51214 - DNA, 80 bp, synthetic construct
  source 1..80: mol_type = other DNA
ataagagacagaaaatccaggatgttatttaaaacctgtgagaggtaattacacctgaataaagagatttttattctgac

SEQ ID NO: 51215 - DNA, 80 bp, synthetic construct
  source 1..80: mol_type = other DNA
ttctaattggctgttactaatatattcagtatttgttctccagagtcttaccaagaaggtcattctggggtaaccactta

SEQ ID NO: 51216 - DNA, 80 bp, synthetic construct
  source 1..80: mol_type = other DNA
atgaagaaataagaagaagtgatgtcaagtaatgagaactactaaaagtctgaggtaagctgaatacccacatttaatat

SEQ ID NO: 51217 - DNA, 80 bp, synthetic construct
  source 1..80: mol_type = other DNA
aaagtcagcccttggctcactgagataaatgcatatctaattgcctcatttggagaggctaatcagaaactcaaaggaat

SEQ ID NO: 51218 - DNA, 80 bp, synthetic construct; identical to SEQ ID NO: 16640
  source 1..80: mol_type = other DNA

SEQ ID NO: 51219 - DNA, 80 bp, synthetic construct
  source 1..80: mol_type = other DNA
ttggtaccagcatgagctaactttatggctcaaacaaataagacaattggctgaggtctgggagcaacccctccagagaa

SEQ ID NO: 51220 - DNA, 80 bp, synthetic construct
  source 1..80: mol_type = other DNA
ttgagctcactcccaggagggaggataaatttgaggtttctttcctacttctaggacgacagagggcagttttagcctga

SEQ ID NO: 51221 - DNA, 80 bp, synthetic construct
  source 1..80: mol_type = other DNA
actttacctgacttgatcatatctgagtgagaattccaaattgtgggtaacaaagcctgtctaatttggtgaaaattctt

SEQ ID NO: 51222 - DNA, 80 bp, synthetic construct
  source 1..80: mol_type = other DNA
acaaatgttcttttgtttacttttcctccaccctatacctccttttgtcttttgccatttgtagtaccaaaaatctagag

SEQ ID NO: 51223 - DNA, 80 bp, synthetic construct
  source 1..80: mol_type = other DNA
tccaaagctctgttttcctatgttgaatgacctgatctctttggcttcgagattaccacagattaccttgtactgtgaga

SEQ ID NO: 51224 - DNA, 80 bp, synthetic construct
  source 1..80: mol_type = other DNA
tcctctattgtttttattccccaaattaatctcatttggcttgtctgtgtggatttgtgtgagaaactgaactgtggttt

SEQ ID NO: 51225 - DNA, 80 bp, synthetic construct
  source 1..80: mol_type = other DNA
aaattaacttttaaaaaaaggctagtccaggaaacacatatgagggcagatcacccagcattttgagccctctcagaggt

SEQ ID NO: 51226 - DNA, 80 bp, synthetic construct; identical to SEQ ID NO: 16642
  source 1..80: mol_type = other DNA

SEQ ID NO: 51227 - DNA, 80 bp, synthetic construct
  source 1..80: mol_type = other DNA
aaaccactgttttgattcaacaggtttttgtctgcaagctggtgatttttttttatctcatagctaaatttctgaagtaa

SEQ ID NO: 51228 - DNA, 80 bp, synthetic construct
  source 1..80: mol_type = other DNA
tttgattttcacctgaatggtttcttttaatatgcaaatgtaagattatttagctcacaactgcctatggtgatcaagta

SEQ ID NO: 51229 - DNA, 80 bp, synthetic construct
  source 1..80: mol_type = other DNA
taaaagagctctaattaattggcttaagaaaataaaagtgcttgaattaaatactttgccagaaaaaaagactaattaaa

SEQ ID NO: 51230 - DNA, 80 bp, synthetic construct; identical to SEQ ID NO: 16611
  source 1..80: mol_type = other DNA

SEQ ID NO: 51231 - DNA, 80 bp, synthetic construct
  source 1..80: mol_type = other DNA
ctaaactataaactaagttcctccttaagttagtttggcctacacccagaaataaacacggagagcttggaggttaaaag

SEQ ID NO: 51232 - DNA, 80 bp, synthetic construct
  source 1..80: mol_type = other DNA
tcataatttagaatctaaggttatattaaattaaataatagatatttcattgtttgggtatttttaaaaaaaaatttgta

SEQ ID NO: 51233 - DNA, 80 bp, synthetic construct
  source 1..80: mol_type = other DNA
tttttttttgtaaaaagcttgaagagaaataattttatatgagaaagaatcttgtgtggtaaatttagtcctagaataaa

SEQ ID NO: 51234 - DNA, 80 bp, synthetic construct; identical to SEQ ID NO: 16644
  source 1..80: mol_type = other DNA

SEQ ID NO: 51235 - DNA, 80 bp, synthetic construct
  source 1..80: mol_type = other DNA
ttcaactcatgtaagttttttcctcaagttctgtttgttgtggcataatgctaacagtgttttctaaaagctattcaact

SEQ ID NO: 51236 - DNA, 80 bp, synthetic construct
  source 1..80: mol_type = other DNA
ggttttcttgaagcataaactgacttcttaataaagattataaacgttatgaaaggctgaggaaagttatatcttatggt

SEQ ID NO: 51237 - DNA, 80 bp, synthetic construct
  source 1..80: mol_type = other DNA
caaatgaatgctttattttacctgtgatatcaagctttttaatcctttgatatttgacaaattttccaaaattatgtttt

SEQ ID NO: 51238 - DNA, 80 bp, synthetic construct
  source 1..80: mol_type = other DNA
tgttccaaaattatgggaaactcctataattctgatatgacttagtgtgtacattatcagtaataattatatttgttatg

SEQ ID NO: 51239 - DNA, 80 bp, synthetic construct; identical to SEQ ID NO: 16645
  source 1..80: mol_type = other DNA

SEQ ID NO: 51240 - DNA, 80 bp, synthetic construct
  source 1..80: mol_type = other DNA
aacagcttttaacaatttagtatactcctatgaaaaaaatttagaacatatttgtttccctctacctgatttttcagaat

SEQ ID NO: 51241 - DNA, 80 bp, synthetic construct
  source 1..80: mol_type = other DNA
ttaacttatggagccaataaaaccccttgggaaaactggcctcataccttcatctataaggtccctgtacagggttcctg

SEQ ID NO: 51242 - DNA, 80 bp, synthetic construct; identical to SEQ ID NO: 16613
  source 1..80: mol_type = other DNA

SEQ ID NO: 51243 - DNA, 80 bp, synthetic construct
  source 1..80: mol_type = other DNA
tggactgaattctaatttttcatggctacacgtcttcaaaatagtgtcttcaggttttttttcctccccttccacaattt

SEQ ID NO: 51244 - DNA, 80 bp, synthetic construct; identical to SEQ ID NO: 16646
  source 1..80: mol_type = other DNA

SEQ ID NO: 51245 - DNA, 80 bp, synthetic construct
  source 1..80: mol_type = other DNA
ataaacctgggggccccaaagtcactaagcaaatcactgcctcccattctattcaaagacacccctctgctcactgagat

SEQ ID NO: 51246 - DNA, 80 bp, synthetic construct
  source 1..80: mol_type = other DNA
agaattgttaggcagtcttaattctagtaataaaaaagtagcaaattagtaataacctatatatttattttatatacttt

SEQ ID NO: 51247 - DNA, 80 bp, synthetic construct
  source 1..80: mol_type = other DNA
gaaataatgctacatatgtagtaaattcagactattatcagtattgctacttttgtaaatgctaacaatgtaggaaaaag

SEQ ID NO: 51248 - DNA, 80 bp, synthetic construct
  source 1..80: mol_type = other DNA
tagtaccaaactaaggtactgattttagatttcccaagcaatctttataaactggagtagaatttacaagtgttgtcctt

SEQ ID NO: 51249 - DNA, 80 bp, synthetic construct; identical to SEQ ID NO: 16647
  source 1..80: mol_type = other DNA

SEQ ID NO: 51250 - DNA, 80 bp, synthetic construct
  source 1..80: mol_type = other DNA
ggctagtcagactaggacattctttctctgaatggcaccctgaacagaacgctaaatagacctattccaatgcatgggaa

SEQ ID NO: 51251 - DNA, 80 bp, synthetic construct
  source 1..80: mol_type = other DNA
aaaccaaaaggagcaaatgacagggcagaatttagtgatttctatgtacatgctacgataccatgataataccaaacttc

SEQ ID NO: 51252 - DNA, 80 bp, synthetic construct
  source 1..80: mol_type = other DNA
aggcagaacatttctgtaatggactcttgaagagtttaacagattcatttagtagccatccacagttaaggcactttatc

SEQ ID NO: 51253 - DNA, 80 bp, synthetic construct
  source 1..80: mol_type = other DNA
cagaaaagagcaacagcacagaaaacactgttgacaggattgttacaaacatctaagatgagaaagtcaggagctattgg

SEQ ID NO: 51254 - DNA, 80 bp, synthetic construct
  source 1..80: mol_type = other DNA
tgtgtgtaaggaagaaatgaaacaaagctatgacactgcagtaggaggagataatgctagaaaatattacacccagacac

SEQ ID NO: 51255 - DNA, 80 bp, synthetic construct
  source 1..80: mol_type = other DNA
ttatttttttctgttcagttcttttagttaggagtcattggagccattacatgactatgagcaatgaggaaaagttagtt

SEQ ID NO: 51256 - DNA, 80 bp, synthetic construct
  source 1..80: mol_type = other DNA
ccccaaaaaacaccttaaaagctgaagtataagaatcattgacgttcatcagtctggtgttggggcttggaatttccggg

SEQ ID NO: 51257 - DNA, 80 bp, synthetic construct
  source 1..80: mol_type = other DNA
cacactgtgaaattgatgtgctatttataacttaccatgagggaccctcatcctcactttgctgtgtctcacagggggca

SEQ ID NO: 51258 - DNA, 80 bp, synthetic construct
  source 1..80: mol_type = other DNA
tgagaattattctgacttgtgtttcctgatgtgttcctgtttttaaacttaaatccattctctaatgccacatcagtcaa

SEQ ID NO: 51259 - DNA, 80 bp, synthetic construct; identical to SEQ ID NO: 16617
  source 1..80: mol_type = other DNA

SEQ ID NO: 51260 - DNA, 80 bp, synthetic construct
  source 1..80: mol_type = other DNA
tgatgcaatcttggctcattgcgacctctgcctcccaggttcaagcaattctcctgcctcagcctcctgagtagctggga

SEQ ID NO: 51261 - DNA, 80 bp, synthetic construct
  source 1..80: mol_type = other DNA
tgatatcagttttaattggagattcagtgtatggctattagagttaattcatgaggcatccaggaactcagtgtaattgc

SEQ ID NO: 51262 - DNA, 80 bp, synthetic construct
  source 1..80: mol_type = other DNA
cactgatctcattctgtgacgtctttatgaaagcaatggtaatagaagatcaatgtaagtagtcttgtaaaagtatgaaa

SEQ ID NO: 51263 - DNA, 80 bp, synthetic construct
  source 1..80: mol_type = other DNA
ttgtgatcttgttctactcatcattctgttccttagtttccaactatacctgtactacagctgacagtgtaattaaacat

SEQ ID NO: 51264 - DNA, 80 bp, synthetic construct
  source 1..80: mol_type = other DNA
ttgaatcttaccatcatgatttattctctgtacagtttcatgtgaatatattacaaaggcaataactatatgcagttttc

SEQ ID NO: 51265 - DNA, 80 bp, synthetic construct
  source 1..80: mol_type = other DNA
agaattagagaatcggtttcacaattatttacttagattcaagtctaccttttgcaggttaacaacaacagccagtgccg

SEQ ID NO: 51266 - DNA, 80 bp, synthetic construct
  source 1..80: mol_type = other DNA
ccagctacttgggagtctgaggcaggagaatcagaatcacttgaacctagagggtggaggttgcagtgagctgagatcat

SEQ ID NO: 51267 - DNA, 80 bp, synthetic construct
  source 1..80: mol_type = other DNA
taagctaaaatattaatgaagtgcctccacctttgcaatacaactttagctttccagcgtgttcaactgactgcccaaac

SEQ ID NO: 51268 - DNA, 80 bp, synthetic construct
  source 1..80: mol_type = other DNA
caacaatatttttggatcactggctatgtgtcagagacaacttaagtgttttatctgtggtaactacttttttccacaca

SEQ ID NO: 51269 - DNA, 80 bp, synthetic construct; identical to SEQ ID NO: 16619
  source 1..80: mol_type = other DNA

SEQ ID NO: 51270 - DNA, 80 bp, synthetic construct
  source 1..80: mol_type = other DNA
cgagtagctgctattagaggtgcctgccaacatgcctgactaatttttgtatttttagtagagacggggtttcaccatgc

SEQ ID NO: 51271 - DNA, 80 bp, synthetic construct
  source 1..80: mol_type = other DNA
ttcctgtaaactaaatttggagtcctgggaactgcccttactgcttttctacttttctgccttaatgcaagactttactt

SEQ ID NO: 51272 - DNA, 80 bp, synthetic construct
  source 1..80: mol_type = other DNA
acacaccagcatgcctggctattatttttatttttgttagagatgaggttttaccatgttgcccaggctggtctcaaact

SEQ ID NO: 51273 - DNA, 80 bp, synthetic construct
  source 1..80: mol_type = other DNA
tatctctgcacattattgagtactcactttaattgtcaatgagtttgggatctcttctgcatatttctttatcattgtgg

SEQ ID NO: 51274 - DNA, 80 bp, synthetic construct
  source 1..80: mol_type = other DNA
tttgaagaaatgaaccatactatcttgtgggttgcacaatgaaggccttactttaaccaaccctgttttcaaaatctccc

SEQ ID NO: 51275 - DNA, 80 bp, synthetic construct
  source 1..80: mol_type = other DNA
aaaatgtcaagcaaacaaatgaaacaagaatatgttcaccttaggcaagggtttggctggtttacagtgaagtcctccaa

SEQ ID NO: 51276 - DNA, 80 bp, synthetic construct
  source 1..80: mol_type = other DNA
ttttaatattgaatatgcaggtattttcctgaaaggacttggaataacatacctaaaaatatataaaatgtctgcacatt

SEQ ID NO: 51277 - DNA, 80 bp, synthetic construct
  source 1..80: mol_type = other DNA
aatatttaataaagtttaatatttaatattaataaaattttattaattttattttattaataaaacattaataaagttaa

SEQ ID NO: 51278 - DNA, 80 bp, synthetic construct; identical to SEQ ID NO: 16653
  source 1..80: mol_type = other DNA

SEQ ID NO: 51279 - DNA, 80 bp, synthetic construct
  source 1..80: mol_type = other DNA
ttctcatgatattgagtgagctctcatgagatctgatagttttataagtgtctggtatttcccctgcttgcacttctctc

SEQ ID NO: 51280 - DNA, 80 bp, synthetic construct
  source 1..80: mol_type = other DNA
tggactaatgtagccactatgaacttaaatacacatttgtcttccctctgaagctgcaatagtaacaaatatacctttaa

SEQ ID NO: 51281 - DNA, 80 bp, synthetic construct
  source 1..80: mol_type = other DNA
ccatgaaaacagctttccaggaagtactctagtgtctacagtttattaagctagtcccttgatccttggttctcaaagta

SEQ ID NO: 51282 - DNA, 80 bp, synthetic construct; identical to SEQ ID NO: 16654
  source 1..80: mol_type = other DNA

SEQ ID NO: 51283 - DNA, 80 bp, synthetic construct
  source 1..80: mol_type = other DNA
gaaggaatccttcttatatgaaaaacaaaatttaatttctaaatgaggaaactgaggtactcaggtacaagttcctcaat

SEQ ID NO: 51284 - DNA, 80 bp, synthetic construct
  source 1..80: mol_type = other DNA
tgaaggtttatgactctcttggtgtcctatagcagtgatggcaccagggttctaactgattctataaggtcaacattcta

SEQ ID NO: 51285 - DNA, 80 bp, synthetic construct
  source 1..80: mol_type = other DNA
ataaacaccaattggacacacgacttacctagaacttcactataaaactggtcccacttcttcagatcatatgcttgaaa

SEQ ID NO: 51286 - DNA, 80 bp, synthetic construct
  source 1..80: mol_type = other DNA
ctctccatgaaaatcatttgatcacttaattctgacataacaacaggtacataggaaggagggaacagaaatcctccacc

SEQ ID NO: 51287 - DNA, 80 bp, synthetic construct; identical to SEQ ID NO: 16655
  source 1..80: mol_type = other DNA

SEQ ID NO: 51288 - DNA, 80 bp, synthetic construct
  source 1..80: mol_type = other DNA
gataaacttctaatttaatagcagatgatttactggcattgacaagaatagaagccgaagatgtcaacacaatcacctca

SEQ ID NO: 51289 - DNA, 80 bp, synthetic construct
  source 1..80: mol_type = other DNA
agcagaaagactgacatccatttcagagacatcctggtcttatgcagtgcttcttttccagttgttgtttctttctgtca

SEQ ID NO: 51290 - DNA, 80 bp, synthetic construct
  source 1..80: mol_type = other DNA
tgtcttatgtaattattttataatactgttaagaacagtggcaggtgagaggctcctgcctgttcggtgcccttgacata

SEQ ID NO: 51291 - DNA, 80 bp, synthetic construct; identical to SEQ ID NO: 16624
  source 1..80: mol_type = other DNA

SEQ ID NO: 51292 - DNA, 80 bp, synthetic construct
  source 1..80: mol_type = other DNA
tttagctgcaggtcaactgcaaggacagaccagcaattctgagaggatccacacaccctctgcaggaagcgtactgctcc

SEQ ID NO: 51293 - DNA, 80 bp, synthetic construct
  source 1..80: mol_type = other DNA
accaagccaagcaaaatataggggtagaggaagtagcagaaaggtactgggagctctctggatacccaagcagctcattc

SEQ ID NO: 51294 - DNA, 80 bp, synthetic construct
  source 1..80: mol_type = other DNA
gatagcagaagcaggaagagagccggccagaagacacctaccctggctggagacatgaacccttgaagatcaagaggcca

SEQ ID NO: 51295 - DNA, 80 bp, synthetic construct; identical to SEQ ID NO: 16657
  source 1..80: mol_type = other DNA

SEQ ID NO: 51296 - DNA, 80 bp, synthetic construct
  source 1..80: mol_type = other DNA
gacaaaacttctcagacaccaagttgtagaaggaagggctttattcagctgggagcatcggcaagctactgccttaaaat

SEQ ID NO: 51297 - DNA, 80 bp, synthetic construct
  source 1..80: mol_type = other DNA
cagtgttcttctgtacaatgtctggaatctctgaataacatcggtttctaagttatgagttgatttttaactactgggtt

SEQ ID NO: 51298 - DNA, 80 bp, synthetic construct
  source 1..80: mol_type = other DNA
tctcactttttattagtgggagttctcactcatttttttacttatgtctttttgtggaatagactgatagtgattcatat

SEQ ID NO: 51299 - DNA, 80 bp, synthetic construct; identical to SEQ ID NO: 16658
  source 1..80: mol_type = other DNA

SEQ ID NO: 51300 - DNA, 80 bp, synthetic construct
  source 1..80: mol_type = other DNA
aggcttgaccggttttattagtaaaaatttctaaaacagcttgtaaccatatgattcggttgagcatgtagatgggggtc

SEQ ID NO: 51301 - DNA, 80 bp, synthetic construct
  source 1..80: mol_type = other DNA
agtaagaagaaagaaggcttaatggtgcgaattacacagctacctgtctactgatcaggcagcttagcataagctttgtg

SEQ ID NO: 51302 - DNA, 80 bp, synthetic construct; identical to SEQ ID NO: 16659
  source 1..80: mol_type = other DNA

SEQ ID NO: 51303 - DNA, 80 bp, synthetic construct
  source 1..80: mol_type = other DNA
cctccacaaacataatatgaggtgacttgtagagactgggctacgtgttaggctaattgcaaaaagaaatttttagtttt

SEQ ID NO: 51304 - DNA, 80 bp, synthetic construct
  source 1..80: mol_type = other DNA
ttgtagctcctattcatgcaagaggggctgagttttcctttttggagtcaaacacgatcttttttattttccttttaagt

SEQ ID NO: 51305 - DNA, 80 bp, synthetic construct
  source 1..80: mol_type = other DNA
aaggttacattttgaggagctctgtttttttcggttctacctattaccttacttgtgtcacatagaaaaggagcagtcct

SEQ ID NO: 51306 - DNA, 80 bp, synthetic construct; identical to SEQ ID NO: 16660
  source 1..80: mol_type = other DNA

SEQ ID NO: 51307 - DNA, 80 bp, synthetic construct
  source 1..80: mol_type = other DNA
aaggtcagttgaagtccttcctgtacaagtccaaattctgaggaaaatgagtcctgcgatgagtctcctcatgcttcagc

SEQ ID NO: 51308 - DNA, 80 bp, synthetic construct
  source 1..80: mol_type = other DNA
agatagtgagcttagggtgttgcaaacttcaatggttatgtggggattttcacaatgcaagctttggtatctagttagtc

SEQ ID NO: 51309 - DNA, 80 bp, synthetic construct
  source 1..80: mol_type = other DNA
aaccccgtctagttgttttgagagacaggccattggccttggccaggaacctccagtctgggttaaaactccaactgcca

SEQ ID NO: 51310 - DNA, 80 bp, synthetic construct
  source 1..80: mol_type = other DNA
ctgttatctactaaaatattgacttaaatcttgtaactatttgatttcaagctttaaattgatctggtattccttgcagg

SEQ ID NO: 51311 - DNA, 80 bp, synthetic construct; identical to SEQ ID NO: 16661
  source 1..80: mol_type = other DNA

SEQ ID NO: 51312 - DNA, 80 bp, synthetic construct
  source 1..80: mol_type = other DNA
gagagcttggcatgacttattactccaggctgtagaatcctggaaaagagctaccatcaggcccacacctggtgaactgg

SEQ ID NO: 51313 - DNA, 80 bp, synthetic construct
  source 1..80: mol_type = other DNA
gtctttaacttttatgatcctctagtaaaatgaatatttccattagcactaatttttattagtttttagaccaaagaaag

SEQ ID NO: 51314 - DNA, 80 bp, synthetic construct
  source 1..80: mol_type = other DNA
ttatagactctgtttaaccttttacaatttttgttaaagagcaggttgatgctttaaggaaaaaacctgttgcattttta

SEQ ID NO: 51315 - DNA, 80 bp, synthetic construct; identical to SEQ ID NO: 16662
  source 1..80: mol_type = other DNA

SEQ ID NO: 51316 - DNA, 80 bp, synthetic construct
  source 1..80: mol_type = other DNA
tttcaggacaagaatttaccatataacactctttttacataaattttacctcctccccccccttttttttttgaagataa

SEQ ID NO: 51317 - DNA, 80 bp, synthetic construct
  source 1..80: mol_type = other DNA
tgctattaataagaccttgtttagtctaaatttacttagaattggtatagatggccttttttttttttttctctgctggt

SEQ ID NO: 51318 - DNA, 80 bp, synthetic construct
  source 1..80: mol_type = other DNA
aaagacctatctaggcttccttctgatggctaacctacctctaatgctggccaatctatttcacacaaagttctaagttt

SEQ ID NO: 51319 - DNA, 80 bp, synthetic construct; identical to SEQ ID NO: 16663
  source 1..80: mol_type = other DNA

SEQ ID NO: 51320 - DNA, 80 bp, synthetic construct
  source 1..80: mol_type = other DNA
caaaaccagaacaaaggtgccaacacaggcacaccgtgggtgaccaggccatgcttctactcaggtggagtgggacaagt

SEQ ID NO: 51321 - DNA, 80 bp, synthetic construct
  source 1..80: mol_type = other DNA
tctcatcactcaggctgcccggagtaccccacagggatgctccacagggcaggcttaagccacctaaggggctgcctcag

SEQ ID NO: 51322 - DNA, 80 bp, synthetic construct; identical to SEQ ID NO: 16664
  source 1..80: mol_type = other DNA

SEQ ID NO: 51323 - DNA, 80 bp, synthetic construct; identical to SEQ ID NO: 16665
  source 1..80: mol_type = other DNA

SEQ ID NO: 51324 - DNA, 80 bp, synthetic construct
  source 1..80: mol_type = other DNA
gtaagactagtctttggaacttgccccactccacctgagtggaagtgtggcctgatcacccacggtgtgcctgtattggc

SEQ ID NO: 51325 - DNA, 80 bp, synthetic construct
  source 1..80: mol_type = other DNA
tttcggtttttggcctggcttgaatttctgggtatgctgattttggttttgattttggtttggtataaactgcaaaagtg

SEQ ID NO: 51326 - DNA, 80 bp, synthetic construct
  source 1..80: mol_type = other DNA
actatgactccaggaaaacttagagctttgtgtgaaatagactggccagcattagaggtaggttggacatcagaaggaag

SEQ ID NO: 51327 - DNA, 80 bp, synthetic construct; identical to SEQ ID NO: 16666
  source 1..80: mol_type = other DNA

SEQ ID NO: 51328 - DNA, 80 bp, synthetic construct
  source 1..80: mol_type = other DNA
tatcttcaaaaaaaaaaaaaaaaaaaaaaagaaggggaggcaaaatttacgtaaaaagagtgttatatggtaaattcttg

SEQ ID NO: 51329 - DNA, 80 bp, synthetic construct
  source 1..80: mol_type = other DNA
tgaagaaacagtttatgtgcaaagtgtataaaaaagtaaaacatacctttggtaaaaagattataaggaggcataaaaat

SEQ ID NO: 51330 - DNA, 80 bp, synthetic construct
  source 1..80: mol_type = other DNA
aatgcaacaggttttttttcttaaagcatcaacctgctctttaacaaaaattataaaaggttaaaaagagtctataaaat

SEQ ID NO: 51331 - DNA, 80 bp, synthetic construct; identical to SEQ ID NO: 16667
  source 1..80: mol_type = other DNA

SEQ ID NO: 51332 - DNA, 80 bp, synthetic construct
  source 1..80: mol_type = other DNA
ccagttgaccaggcgtaggctgcatggtaactcttttccaggattctacagcctggagtaataagtcatgccaagctctc

SEQ ID NO: 51333 - DNA, 80 bp, synthetic construct
  source 1..80: mol_type = other DNA
caatcagtcagccgttgttcatccccgagcagatgtgtggtggtattgtggtggacctttactaggtactctgctgaata

SEQ ID NO: 51334 - DNA, 80 bp, synthetic construct
  source 1..80: mol_type = other DNA
gcaaggaataccagatcaatttaaagcttgaaatcaaatagctacaggatttaagtcaatattttggtagatgacagtga

SEQ ID NO: 51335 - DNA, 80 bp, synthetic construct
  source 1..80: mol_type = other DNA
ttttaactcagactgtggggcactggccaaggccagtggcctatctctcaaaacaaaaagacagggtttccaaaggctgg

SEQ ID NO: 51336 - DNA, 80 bp, synthetic construct; identical to SEQ ID NO: 16668
  source 1..80: mol_type = other DNA

SEQ ID NO: 51337 - DNA, 80 bp, synthetic construct
  source 1..80: mol_type = other DNA
aagccctgctccagtcacacccagaagctgactggtccacgcacggctgaagcatgaggaaactcatcgcaggactcatt

SEQ ID NO: 51338 - DNA, 80 bp, synthetic construct
  source 1..80: mol_type = other DNA
cttgtttgtacaataacactcagtacaaagtatgtaatccaggaagtgaccagcctgatgcgtgttatgactcactgtaa

SEQ ID NO: 51339 - DNA, 80 bp, synthetic construct
  source 1..80: mol_type = other DNA
aaaagaaaggtccccaaaaacgtaatcttaaaatttggcacttgtgctgctattaatagtaagcagcatgagataagatg

SEQ ID NO: 51340 - DNA, 80 bp, synthetic construct; identical to SEQ ID NO: 16669
  source 1..80: mol_type = other DNA

SEQ ID NO: 51341 - DNA, 80 bp, synthetic construct
  source 1..80: mol_type = other DNA
gaactaaatgtgccagtacccgagattccaggaaaaactaaaaatttgtttttgcaattagccgaacacatagcccagtc

SEQ ID NO: 51342 - DNA, 80 bp, synthetic construct
  source 1..80: mol_type = other DNA
agacagtattgcatatctaaagaaagaaaaggattcgctcatcctgtaaggcagcttagctgtcttagacaaaagctcta

SEQ ID NO: 51343 - DNA, 80 bp, synthetic construct; identical to SEQ ID NO: 16670
  source 1..80: mol_type = other DNA

SEQ ID NO: 51344 - DNA, 80 bp, synthetic construct
  source 1..80: mol_type = other DNA
tagaaattattactaataaaaccgatcaagccttgactgttcttgcccgtcaagagactctgatgagaaatgcgatctat

SEQ ID NO: 51345 - DNA, 80 bp, synthetic construct
  source 1..80: mol_type = other DNA
ggcacggacacaatctggaagccatgtttaaaaattagttcccagcaataggaagatttaaaactcttataataagagta

SEQ ID NO: 51346 - DNA, 80 bp, synthetic construct
  source 1..80: mol_type = other DNA
aaaaataagagtgagaactcccgctaataaaaagtgagagtctcaaaaggggggaatgaaggaagagaaagaccctctca

SEQ ID NO: 51347 - DNA, 80 bp, synthetic construct; identical to SEQ ID NO: 16671
  source 1..80: mol_type = other DNA

SEQ ID NO: 51348 - DNA, 80 bp, synthetic construct
  source 1..80: mol_type = other DNA
actgtgcattaataatagaggaaatgtatcttgtggcacatacctccttccaaaggaactgagtgatgaggtttgtttaa

SEQ ID NO: 51349 - DNA, 80 bp, synthetic construct
  source 1..80: mol_type = other DNA
caaaagctcagaccttgaaacaatcccagcatctatctgagcaaagtgtaggaacaaccgggtccgactggtctaaaatg

SEQ ID NO: 51350 - DNA, 80 bp, synthetic construct
  source 1..80: mol_type = other DNA
tctctgtgaattagaatagccctcttttggtgttggctggctggccaaatgtacttatagatagggacacaattggccct

SEQ ID NO: 51351 - DNA, 80 bp, synthetic construct; identical to SEQ ID NO: 16672
  source 1..80: mol_type = other DNA

SEQ ID NO: 51352 - DNA, 80 bp, synthetic construct
  source 1..80: mol_type = other DNA
tggaaaaatctgagccctcactccaggaagttaaggtgaaatgctaggaaaataaagcaaacttgtctccagtcaggtca

SEQ ID NO: 51353 - DNA, 80 bp, synthetic construct
  source 1..80: mol_type = other DNA
aaggcgggagaaaggcaatcaatatagggaaaaatctcataggtgcttcagggtgcatatgaaagccccagccagtttta

SEQ ID NO: 51354 - DNA, 80 bp, synthetic construct; identical to SEQ ID NO: 16673
  source 1..80: mol_type = other DNA

SEQ ID NO: 51355 - DNA, 80 bp, synthetic construct
  source 1..80: mol_type = other DNA
tggaaagagatcagtgtgcacagtgcaaaagacaaggacactggaaggatgagtgtccagagaataataataaggagaag

SEQ ID NO: 51356 - DNA, 80 bp, synthetic construct
  source 1..80: mol_type = other DNA
aagttagaggccagctaatggactttatggtagacaccagagctaaacactcagtagtgacccaacctatagggccacta

SEQ ID NO: 51357 - DNA, 80 bp, synthetic construct
  source 1..80: mol_type = other DNA
gcaggtacagattacatttgggccacaagggaatgtaactttaaatctacctcacccggaggctatgatgttaacccgta

SEQ ID NO: 51358 - DNA, 80 bp, synthetic construct; identical to SEQ ID NO: 16674
  source 1..80: mol_type = other DNA

SEQ ID NO: 51359 - DNA, 80 bp, synthetic construct
  source 1..80: mol_type = other DNA
attccagcaagtgccacttgatttacagtcctagatttaaaggatacatttttccgtctctggcttgcaccaattaatga

SEQ ID NO: 51360 - DNA, 80 bp, synthetic construct
  source 1..80: mol_type = other DNA
tggacaagactcccacaaggatttaaaaactctcctacaatctttgaagaggcacaggcctcagaccttaaagcatacac

SEQ ID NO: 51361 - DNA, 80 bp, synthetic construct
  source 1..80: mol_type = other DNA
agtgaccagtatttaggcttctatataagccaaaggaaaagatggcttggtagtgaacagaagcagaccatttgtacact

SEQ ID NO: 51362 - DNA, 80 bp, synthetic construct
  source 1..80: mol_type = other DNA
ggactgccagatctaactaagcctttctttttatatgtccatgagcaaaagggaatggccgtaagagttctaactcaagc

SEQ ID NO: 51363 - DNA, 80 bp, synthetic construct; identical to SEQ ID NO: 16675
  source 1..80: mol_type = other DNA

SEQ ID NO: 51364 - DNA, 80 bp, synthetic construct
  source 1..80: mol_type = other DNA
gacctggacattgaatattttactgatgggagcagcttcatactagagggagtccaccaaactgggtatgcagtggtgac

SEQ ID NO: 51365 - DNA, 80 bp, synthetic construct
  source 1..80: mol_type = other DNA
gctatttacaaagaaaaaagactcttaactcctggaggtaaagaaataaagtgtaatgaagaaattctacggctcctgga

SEQ ID NO: 51366 - DNA, 80 bp, synthetic construct
  source 1..80: mol_type = other DNA
tcctggagattccccttccagggaccccaagctacactccaaataaaagggcttgatttgcccaggaaaatgggaattac

SEQ ID NO: 51367 - DNA, 80 bp, synthetic construct; identical to SEQ ID NO: 16676
  source 1..80: mol_type = other DNA

SEQ ID NO: 51368 - DNA, 80 bp, synthetic construct
  source 1..80: mol_type = other DNA
tccgtcaggacagagaaggcatgagagttgatgaaggtattgttaagagacattattcccagatttggactgcccctaac

SEQ ID NO: 51369 - DNA, 80 bp, synthetic construct
  source 1..80: mol_type = other DNA
tgtcaggaaactcatctgaggtgggaccaggtcttgcccatggtctttctccaagtcaggtgcacccccacaaaacaaac

SEQ ID NO: 51370 - DNA, 80 bp, synthetic construct; identical to SEQ ID NO: 16677
  source 1..80: mol_type = other DNA

SEQ ID NO: 51371 - DNA, 80 bp, synthetic construct
  source 1..80: mol_type = other DNA
tgatcctgcaatgagaccacattgccagtggagatgacaacagcactgctctggtcactctggaagatgaccagtctatg

SEQ ID NO: 51372 - DNA, 80 bp, synthetic construct
  source 1..80: mol_type = other DNA
ttgtgctattgtttaaccaaccccctaaatgcctttactgttcatgctggctgtaagaatgctactgtttgctttgtttg

SEQ ID NO: 51373 - DNA, 80 bp, synthetic construct
  source 1..80: mol_type = other DNA
tcccggctaaaacggtgaaaccccgtctctactaaaaatacaaaaaattagccgggcgtagtggcgggcgcctgtagtcc

SEQ ID NO: 51374 - DNA, 80 bp, synthetic construct; identical to SEQ ID NO: 16678
  source 1..80: mol_type = other DNA

SEQ ID NO: 51375 - DNA, 80 bp, synthetic construct
  source 1..80: mol_type = other DNA
aaataaggatcaccatctattagaatagactggcttcagactgcctcctagcccaaaaagaaggattatgtggaaagttg

SEQ ID NO: 51376 - DNA, 80 bp, synthetic construct
  source 1..80: mol_type = other DNA
attccctcttaggaggttggttttcatcctttggtggttttaaaacagtaggggtagtgttggctatattaaaaggttgc

SEQ ID NO: 51377 - DNA, 80 bp, synthetic construct
  source 1..80: mol_type = other DNA
aacagagaagaactgacttgtaatgaggaattaaatgatagtgatgccttctattgaattccatttacaggaggcatcaa

SEQ ID NO: 51378 - DNA, 80 bp, synthetic construct; identical to SEQ ID NO: 16679
  source 1..80: mol_type = other DNA

SEQ ID NO: 51379 - DNA, 80 bp, synthetic construct
  source 1..80: mol_type = other DNA
gaactacagctgtctgggcacctagtgaaggttataaggcaaaccagtgcaaggctcttttgagcaaaacctagataaca

SEQ ID NO: 51380 - DNA, 80 bp, synthetic construct
  source 1..80: mol_type = other DNA
gtctttgttggggcccaatctctggatgttaagtcagctgagtctgagtgcactcaataaagatatcctcctgtatacac

SEQ ID NO: 51381 - DNA, 80 bp, synthetic construct
  source 1..80: mol_type = other DNA
tatggcattttggtattattatgatagtggtggcaggtaacagatatcaccaaattctgccctgccattcaattctatta

SEQ ID NO: 51382 - DNA, 80 bp, synthetic construct; identical to SEQ ID NO: 16680
  source 1..80: mol_type = other DNA

SEQ ID NO: 51383 - DNA, 80 bp, synthetic construct
  source 1..80: mol_type = other DNA
tgtaccatcaaagagttaacagccaacagaacaaaatttagcatcatcacaattttggaagtttttcaacagccctatga

SEQ ID NO: 51384 - DNA, 80 bp, synthetic construct
  source 1..80: mol_type = other DNA
gtagattagtgtatttctcatacatagatgatggcatagatttgcttttttagtaaattgtcagatatcagactctaact

SEQ ID NO: 51385 - DNA, 80 bp, synthetic construct
  source 1..80: mol_type = other DNA
gtctgcctaacaattacttaaatatttgaacttttaatttattatcacaattttctaagtcactatgtatgaaacatcat

SEQ ID NO: 51386 - DNA, 80 bp, synthetic construct; identical to SEQ ID NO: 16681
  source 1..80: mol_type = other DNA

SEQ ID NO: 51387 - DNA, 80 bp, synthetic construct
  source 1..80: mol_type = other DNA
tgttctcatcattaggctcccttgtctatatagttctatggaaatttgatgacaggaaatcagataccttagtaccaata

SEQ ID NO: 51388 - DNA, 80 bp, synthetic construct
  source 1..80: mol_type = other DNA
aaataaaatctaacttctttacatttatcttccagtcctagggaaaatataataaactaaaagaggttgacattttatta

SEQ ID NO: 51389 - DNA, 80 bp, synthetic construct
  source 1..80: mol_type = other DNA
cctacccttcctcctaatgtatagatgttgcaaatgcaactgaaaaatgacagctcattttcatgatgatctcctgcatt

SEQ ID NO: 51390 - DNA, 80 bp, synthetic construct; identical to SEQ ID NO: 16682
  source 1..80: mol_type = other DNA

SEQ ID NO: 51391 - DNA, 80 bp, synthetic construct
  source 1..80: mol_type = other DNA
atgtgtagccttcacttattgccccagaggacttggtgcatcttcctctgtgatctgaaaccaattttaatgcagtttta

SEQ ID NO: 51392 - DNA, 80 bp, synthetic construct
  source 1..80: mol_type = other DNA
caatggaatgtatgagagaatctatcatggaatccctagggtggggcttcctttattgcagatcaacgtgacaactttgc

SEQ ID NO: 51393 - DNA, 80 bp, synthetic construct
  source 1..80: mol_type = other DNA
gagcagcagtgactctgaatatgaacacagtgctgagtacatatattttttgtaacacttaaaggccatgatcaatacac

SEQ ID NO: 51394 - DNA, 80 bp, synthetic construct; identical to SEQ ID NO: 16683
  source 1..80: mol_type = other DNA

SEQ ID NO: 51395 - DNA, 80 bp, synthetic construct
  source 1..80: mol_type = other DNA
ttcccattatatttaatgttctccagatttttacactacattttgatcccatcactgataatttgtaaacagctagagct

SEQ ID NO: 51396 - DNA, 80 bp, synthetic construct
  source 1..80: mol_type = other DNA
aaccaaaatgtattaaaccagaaatatgtagtttaaaaattattttagtgcatacattaatttcagttatgctattacta

SEQ ID NO: 51397 - DNA, 80 bp, synthetic construct
  source 1..80: mol_type = other DNA
gtgccctcttctgaaaaacacagttctccaactgtgtttttttaaataacaaggggagaagttacctccattgctattgc

SEQ ID NO: 51398 - DNA, 80 bp, synthetic construct; identical to SEQ ID NO: 16684
  source 1..80: mol_type = other DNA

SEQ ID NO: 51399 - DNA, 80 bp, synthetic construct
  source 1..80: mol_type = other DNA
ttcatacttttaaccatgaatccattgatgtaatgttaataccaactcttggtcagcgccaacttcttatgagctttgcc

SEQ ID NO: 51400 - DNA, 80 bp, synthetic construct
  source 1..80: mol_type = other DNA
aatttctaggctacaaacacttgttctctcttaaattatctcttcacatcttgaaatcttatgcatgaaacaaattctag

SEQ ID NO: 51401 - DNA, 80 bp, synthetic construct
  source 1..80: mol_type = other DNA
taaaaaaaaaatgtaatgtagttatcaatcatttattatgatcagtctctgaagccattggaccaaaaactctcctggat

SEQ ID NO: 51402 - DNA, 80 bp, synthetic construct; identical to SEQ ID NO: 16685
  source 1..80: mol_type = other DNA

SEQ ID NO: 51403 - DNA, 80 bp, synthetic construct
  source 1..80: mol_type = other DNA
aaaataaaatgagattcactagaaactcagtctgtttacttgagaaaggcagaaagattagctatactgtgcatttcaaa

SEQ ID NO: 51404 - DNA, 80 bp, synthetic construct
  source 1..80: mol_type = other DNA
cgtttgttacctagataaagaaccctcttccatataaacaaatacaattatatggaatatatgtgtccctgtcagaaaaa

SEQ ID NO: 51405 - DNA, 80 bp, synthetic construct
  source 1..80: mol_type = other DNA
aagacaaattttattttgactactgaagtaggggacagacactacagtatgaactgagctcaactccaactaagacaaag

SEQ ID NO: 51406 - DNA, 80 bp, synthetic construct; identical to SEQ ID NO: 16686
  source 1..80: mol_type = other DNA

SEQ ID NO: 51407 - DNA, 80 bp, synthetic construct
  source 1..80: mol_type = other DNA
ggtcataactggcttcctgtgtaaaactatgcaaactagtaaaatctttggttagaaagactaaagatgttttccacatg

SEQ ID NO: 51408 - DNA, 80 bp, synthetic construct
  source 1..80: mol_type = other DNA
atgatttctctcttgaaatatgatctcacctttcttgccctcaccttgtcaagtatgatatttccaaccactttaatatc

SEQ ID NO: 51409 - DNA, 80 bp, synthetic construct
  source 1..80: mol_type = other DNA
ctttggactcagaacaaggtttgaaaagcaaataacagagaagaagggaacaaacttaagagctgttcttccatctgaca

SEQ ID NO: 51410 - DNA, 80 bp, synthetic construct; identical to SEQ ID NO: 16687
  source 1..80: mol_type = other DNA

SEQ ID NO: 51411 - DNA, 80 bp, synthetic construct
  source 1..80: mol_type = other DNA
gaccttgccaaaatagatcttctttgcaattcatagaccatatagctagataaaataatctttgtctattcatgagctat

SEQ ID NO: 51412 - DNA, 80 bp, synthetic construct
  source 1..80: mol_type = other DNA
tgtctgtttctttgagattgattctaaaagcttttaaatatctcagcagttaacaaaatttaaacacagaaactctaagt

SEQ ID NO: 51413 - DNA, 80 bp, synthetic construct
  source 1..80: mol_type = other DNA
tgaagctgagtctatcgatgtcaaggacaaatgctttatgtataagttttctgaattaatatctatgcagaatgcaatgt

SEQ ID NO: 51414 - DNA, 80 bp, synthetic construct
  source 1..80: mol_type = other DNA
gggggttgtgtcttctggcatctaccacctcacaaccactccagtgttctttattgatgaagcttaacattcaactagct

SEQ ID NO: 51415 - DNA, 80 bp, synthetic construct; identical to SEQ ID NO: 16688
  source 1..80: mol_type = other DNA

SEQ ID NO: 51416 - DNA, 80 bp, synthetic construct
  source 1..80: mol_type = other DNA
tgaatacccttagcctatcaccactctattcatactcccaacaaatcaacactggagtagccaggtacttgatgctttac

SEQ ID NO: 51417 - DNA, 80 bp, synthetic construct
  source 1..80: mol_type = other DNA
gtctgattaatcactttttggatttatgatccagtgagaattttgttcatgtcctgcagtgattttttcaagttacattt

SEQ ID NO: 51418 - DNA, 80 bp, synthetic construct; identical to SEQ ID NO: 16689
  source 1..80: mol_type = other DNA

SEQ ID NO: 51419 - DNA, 80 bp, synthetic construct
  source 1..80: mol_type = other DNA
ttaggttttaatctgtttactgacaatttctagagcattagataattcctcttttgggctctatcagtcaagcatttggt

SEQ ID NO: 51420 - DNA, 80 bp, synthetic construct
  source 1..80: mol_type = other DNA
atattagtgactcttccatctctgaacatttgaatcatacttatttaaaaatctcattttgtctaggcatggtggttcac

SEQ ID NO: 51421 - DNA, 80 bp, synthetic construct
  source 1..80: mol_type = other DNA
aggtgagagaatcacttgagcttcagaggttgaggctcaagtgagttgtgatcataccactgcactccagcctggacagc

SEQ ID NO: 51422 - DNA, 80 bp, synthetic construct; identical to SEQ ID NO: 16690
  source 1..80: mol_type = other DNA

SEQ ID NO: 51423 - DNA, 80 bp, synthetic construct
  source 1..80: mol_type = other DNA
tttgttccttgcttcaaggtactatgtctcatttggtttcctcccaaaagtcactttttcatagttttcacaagcatcta

SEQ ID NO: 51424 - DNA, 80 bp, synthetic construct
  source 1..80: mol_type = other DNA
ggaaaaagttgagtcgcttatgatcacctcactatactatgttgtttaatttatttgaggctagtttttaggacacctat

SEQ ID NO: 51425 - DNA, 80 bp, synthetic construct
  source 1..80: mol_type = other DNA
caatagcttaaatttgtggaattttcagacatcactgcaaatactttgacattcttattaaaccgtggtccctccccttg

SEQ ID NO: 51426 - DNA, 80 bp, synthetic construct
  source 1..80: mol_type = other DNA
ctccttctccctctttccctttttctccctctacacactttggagcccagtgtcacacacaaagtcctgacgataaagga

SEQ ID NO: 51427 - DNA, 80 bp, synthetic construct; identical to SEQ ID NO: 16691
  source 1..80: mol_type = other DNA

SEQ ID NO: 51428 - DNA, 80 bp, synthetic construct
  source 1..80: mol_type = other DNA
acctgtcacctatattaggtatttctcctaatgctattccacccctagcccccctccccataacaggccccactgtgtga

SEQ ID NO: 51429 - DNA, 80 bp, synthetic construct
  source 1..80: mol_type = other DNA
gtgtgcatagtattctatgatatatatgtgccacattttctttatccaatctatcactgatggacatttgggttggttcc

SEQ ID NO: 51430 - DNA, 80 bp, synthetic construct
  source 1..80: mol_type = other DNA
cttccacaatggttgaactaatttacactctcaccaacagtgtaaaagcattcctatttctccacatcctctccaacatc

SEQ ID NO: 51431 - DNA, 80 bp, synthetic construct; identical to SEQ ID NO: 16692
  source 1..80: mol_type = other DNA

SEQ ID NO: 51432 - DNA, 80 bp, synthetic construct
  source 1..80: mol_type = other DNA
atgaagtctttgcccatgcctatgtcctaaatagtattgcctaggttttcttctaggatttttatgattttaggtcttat

SEQ ID NO: 51433 - DNA, 80 bp, synthetic construct
  source 1..80: mol_type = other DNA
gtggttgtatatgtgtggtgttatttctgaggtctctgttctgttccattggtctatatatctgttttggtaccagtacc

SEQ ID NO: 51434 - DNA, 80 bp, synthetic construct; identical to SEQ ID NO: 16693
  source 1..80: mol_type = other DNA

SEQ ID NO: 51435 - DNA, 80 bp, synthetic construct
  source 1..80: mol_type = other DNA
actcatgatttggctctctttttttttattggtgtataggaatgcttgtgatttttgcacattgacttcgtatcctgaga

SEQ ID NO: 51436 - DNA, 80 bp, synthetic construct
  source 1..80: mol_type = other DNA
ctccaatactatgttgaatagaagtggtgagagagggcatccttgccttgtgccaattttcaaagggaatgcttccagct

SEQ ID NO: 51437 - DNA, 80 bp, synthetic construct
  source 1..80: mol_type = other DNA
ttttttggtttgttttttgttttttttcattggttctttttatgtcatggattcctttttttgatttttgcatgttgaac

SEQ ID NO: 51438 - DNA, 80 bp, synthetic construct
  source 1..80: mol_type = other DNA
gttttggtatcaggatgatgctagcctcataaaatgagttagggaggactccctctttttctatgtttggaatagtttca

SEQ ID NO: 51439 - DNA, 80 bp, synthetic construct; identical to SEQ ID NO: 16694
  source 1..80: mol_type = other DNA

SEQ ID NO: 51440 - DNA, 80 bp, synthetic construct
  source 1..80: mol_type = other DNA
agctcttgcagatgtgatccatctggctatggaaggtggggacaagtgaagttatttgccatgctgttggtgtgttactg

SEQ ID NO: 51441 - DNA, 80 bp, synthetic construct
  source 1..80: mol_type = other DNA
cctgcctggttaccagtgacaggttcaggtggagcatgctctgctgttcaggtgtttcctgggacaataggaagctgagc

SEQ ID NO: 51442 - DNA, 80 bp, synthetic construct; identical to SEQ ID NO: 16695
  source 1..80: mol_type = other DNA

SEQ ID NO: 51443 - DNA, 80 bp, synthetic construct
  source 1..80: mol_type = other DNA
taaaaaatatatatatacatagtcatattcatttttcacaacatagcatattgtgacaggtctttcttgatttactaagt

SEQ ID NO: 51444 - DNA, 80 bp, synthetic construct
  source 1..80: mol_type = other DNA
cctgcttggcctctccggatagggtcaagtttctcacataagcaaaatttacttatttggcatatacaatgtgaacataa

SEQ ID NO: 51445 - DNA, 80 bp, synthetic construct
  source 1..80: mol_type = other DNA
ttcactttcttctaatatatttattaaccttagcatctttttttgcattttttccctgtgaagtgtcattcactctatca

SEQ ID NO: 51446 - DNA, 80 bp, synthetic construct; identical to SEQ ID NO: 16696
  source 1..80: mol_type = other DNA

SEQ ID NO: 51447 - DNA, 80 bp, synthetic construct
  source 1..80: mol_type = other DNA
gagactaaggcacaagaattgcatgaaccaagaaggcagaagttgcagtgagctgagatcgcagcactacactctggcct

SEQ ID NO: 51448 - DNA, 80 bp, synthetic construct
  source 1..80: mol_type = other DNA
aaagtctcagctgaagcatagcttcatctgaaaaaaattaaatgcaattgactttctgtactaaacattcttctttacac

SEQ ID NO: 51449 - DNA, 80 bp, synthetic construct
  source 1..80: mol_type = other DNA
ctgtaaattgtgcattaaatgtgtaacataaaaaaaacacagaagcatagatagctgagtagatagataaattattatct

SEQ ID NO: 51450 - DNA, 80 bp, synthetic construct
  source 1..80: mol_type = other DNA
atattttacctaatggcattatcaatgttttgaccattcaggtagaaaccatatcagtgtctttgttgatacaacacttt

SEQ ID NO: 51451 - DNA, 80 bp, synthetic construct; identical to SEQ ID NO: 16697
  source 1..80: mol_type = other DNA

SEQ ID NO: 51452 - DNA, 80 bp, synthetic construct
  source 1..80: mol_type = other DNA
cttctgtgatttgtttcctttagccactctgtctagattctaccaaagctttcatctcaccgtattatgtgatctgtcac

SEQ ID NO: 51453 - DNA, 80 bp, synthetic construct
  source 1..80: mol_type = other DNA
tttgtttcttttttacacaaattgtatgcttgtggcaattgcacatcatgcaagtctactgacataatttttaaaatggc

SEQ ID NO: 51454 - DNA, 80 bp, synthetic construct; identical to SEQ ID NO: 16698
  source 1..80: mol_type = other DNA

SEQ ID NO: 51455 - DNA, 80 bp, synthetic construct
  source 1..80: mol_type = other DNA
atgaggaaggcatgttaaaagctcagaaagacttaaagttaagcctcttgcatcaaatagccaagttgtgaattaaaaaa

SEQ ID NO: 51456 - DNA, 80 bp, synthetic construct
  source 1..80: mol_type = other DNA
atccagagcaagaccctacctctttttaatctatgaaggctgaaatacatgagggagccaaagagaaaaatgtggaaagc

SEQ ID NO: 51457 - DNA, 80 bp, synthetic construct
  source 1..80: mol_type = other DNA
ttgaatgttgacaaaacggtcctttattgaaaaaatatgtcatctgagactttgatagctaaagaggggaagtcaatgcc

SEQ ID NO: 51458 - DNA, 80 bp, synthetic construct
  source 1..80: mol_type = other DNA
catttattattttgaaagttctagagtccttgagaattatgagttgagagcccttgagaatctgctttgcctgtgtacta

SEQ ID NO: 51459 - DNA, 80 bp, synthetic construct; identical to SEQ ID NO: 16699
  source 1..80: mol_type = other DNA

SEQ ID NO: 51460 - DNA, 80 bp, synthetic construct
  source 1..80: mol_type = other DNA
ggagcaggtcaacgtataaatattaacaggagtttggaagaacttgattccaatcctcatggatgactttgaggagttca

SEQ ID NO: 51461 - DNA, 80 bp, synthetic construct
  source 1..80: mol_type = other DNA
tttagatattggaatacggaaacacaactgatttttgggtgatgatttagtatcttctgcctttactggatttgttgatc

SEQ ID NO: 51462 - DNA, 80 bp, synthetic construct; identical to SEQ ID NO: 16700
  source 1..80: mol_type = other DNA

SEQ ID NO: 51463 - DNA, 80 bp, synthetic construct
  source 1..80: mol_type = other DNA
taatatatcacatttattgttttgcatatgcttaaccttctctgtatccctgggataaatcccagttcctcatcatgtat

SEQ ID NO: 51464 - DNA, 80 bp, synthetic construct
  source 1..80: mol_type = other DNA
catttacttctctttaatgttttggaaaaaatatttgggaaaaaatggattaattttttaattatactttaagttcttgg

SEQ ID NO: 51465 - DNA, 80 bp, synthetic construct
  source 1..80: mol_type = other DNA
gtgtgtgatgtatccctccatgtgtccatgtgttctcattgttcatcttgcacttagcagtgaaaacatgaagtgtttgg

SEQ ID NO: 51466 - DNA, 80 bp, synthetic construct; identical to SEQ ID NO: 16701
  source 1..80: mol_type = other DNA

SEQ ID NO: 51467 - DNA, 80 bp, synthetic construct
  source 1..80: mol_type = other DNA
cagcatcagttgtttcctcactttttaatgactgcaattctaactggtgggagatggtatctcattttggttttgatttg

SEQ ID NO: 51468 - DNA, 80 bp, synthetic construct
  source 1..80: mol_type = other DNA
agccctttgtcagagggatagattgcaaaaattttctccctttctgtaggtttcctgttcagtctgatgatagtttattt

SEQ ID NO: 51469 - DNA, 80 bp, synthetic construct
  source 1..80: mol_type = other DNA
catataagtctttaatccatcttgagttagtactgaaactatcagttcatggttttttgtttttgtttttgttttgtgag

SEQ ID NO: 51470 - DNA, 80 bp, synthetic construct; identical to SEQ ID NO: 16702
  source 1..80: mol_type = other DNA

SEQ ID NO: 51471 - DNA, 80 bp, synthetic construct
  source 1..80: mol_type = other DNA
ataggttgtttatttaagatatttctgcatttttaatgaagacatttattggcatatatttgttgttttagaacttattt

SEQ ID NO: 51472 - DNA, 80 bp, synthetic construct
  source 1..80: mol_type = other DNA
tttattccattgtggaaaaaaattgacaccattttgattttaaaaaaatttaagacttattttgacctaaaatatggtct

SEQ ID NO: 51473 - DNA, 80 bp, synthetic construct
  source 1..80: mol_type = other DNA
tgtaagtaaagtgctgcactcttctactattatcatatcacagtcaatctctctcttcagctctataaattttgctttat

SEQ ID NO: 51474 - DNA, 80 bp, synthetic construct
  source 1..80: mol_type = other DNA
caatgacatgaaacaaatttttctatttcttttcttttagtctgtgtacaccttcataggtgaagtgagtttcctgtggc

SEQ ID NO: 51475 - DNA, 80 bp, synthetic construct; identical to SEQ ID NO: 16703
  source 1..80: mol_type = other DNA

SEQ ID NO: 51476 - DNA, 80 bp, synthetic construct
  source 1..80: mol_type = other DNA
gtgacaactttgagcacaaagaaaaataaacagaactctgtattttgacataattttgtcttccacatattgactttttc

SEQ ID NO: 51477 - DNA, 80 bp, synthetic construct
  source 1..80: mol_type = other DNA
ctactgctttttatgccttcagatgtattcttattacatgtgagtgtccttttctttccaataaaacaattctcctttgt

SEQ ID NO: 51478 - DNA, 80 bp, synthetic construct; identical to SEQ ID NO: 16704
  source 1..80: mol_type = other DNA

SEQ ID NO: 51479 - DNA, 80 bp, synthetic construct
  source 1..80: mol_type = other DNA
aaatactcttcggattaaatttgattagggtacatggatactgtcatctttctctagatttacaaaatgttccatcatta

SEQ ID NO: 51480 - DNA, 80 bp, synthetic construct
  source 1..80: mol_type = other DNA
tatgttttatctttaggattgctgattccttactctgtttgaccaagtctgctgttgaagttttctactgagtttttcaa

SEQ ID NO: 51481 - DNA, 80 bp, synthetic construct
  source 1..80: mol_type = other DNA
tgtgcactgaatttcttgtcaaaaattttacggagcatctgaaccttaattctgcactgtaacttaaaactagacttgca

SEQ ID NO: 51482 - DNA, 80 bp, synthetic construct; identical to SEQ ID NO: 16705
  source 1..80: mol_type = other DNA

SEQ ID NO: 51483 - DNA, 80 bp, synthetic construct
  source 1..80: mol_type = other DNA
tgaggtaggacaaaagtgggcttcccaaaccaaaaagattcacagatccatgaagaaactgaacattcacttcaaatttc

SEQ ID NO: 51484 - DNA, 80 bp, synthetic construct
  source 1..80: mol_type = other DNA
tctggtgaattcagtgtggctttttgtatttacatagttactagctctatttttgtgtgggaattaatgttgggaggtgt

SEQ ID NO: 51485 - DNA, 80 bp, synthetic construct
  source 1..80: mol_type = other DNA
ttactatgtattgaagctatgtgtttccaacacaaactttcttgtagagactggcagtacatggcagaatatagggacaa

SEQ ID NO: 51486 - DNA, 80 bp, synthetic construct; identical to SEQ ID NO: 16706
  source 1..80: mol_type = other DNA

SEQ ID NO: 51487 - DNA, 80 bp, synthetic construct
  source 1..80: mol_type = other DNA
cattttctgctttgcattaacaggcactacttctacatagaataatttaaagcattatagtagtgtatgtgggctcaact

SEQ ID NO: 51488 - DNA, 80 bp, synthetic construct
  source 1..80: mol_type = other DNA
aaccctgaagtgtactaactccaaggaacataaaaagggagggctgatattacaaagatagagaagaattatgcccaaga

SEQ ID NO: 51489 - DNA, 80 bp, synthetic construct
  source 1..80: mol_type = other DNA
actttcttgttattgcaattctagatttccactatttgggtagtactatttatgcactatccagtgactttttaaaaatg

SEQ ID NO: 51490 - DNA, 80 bp, synthetic construct
  source 1..80: mol_type = other DNA
ttggaatatctatgtattcctatgttttcaaatgcaagattttcacatagctttcccataaaaaacaaattatgtgacaa

SEQ ID NO: 51491 - DNA, 80 bp, synthetic construct; identical to SEQ ID NO: 16707
  source 1..80: mol_type = other DNA

SEQ ID NO: 51492 - DNA, 80 bp, synthetic construct
  source 1..80: mol_type = other DNA
atagtctttctaattttaaggtcttgactttacatgccaatattagtcgacacagttgcttgctaaaggaaaatcttgat

SEQ ID NO: 51493 - DNA, 80 bp, synthetic construct
  source 1..80: mol_type = other DNA
tgggatgctcttcatatatccatgacctttactcattctgttctttattggaaaatcccttctttaccacacactgccta

SEQ ID NO: 51494 - DNA, 80 bp, synthetic construct; identical to SEQ ID NO: 16708
  source 1..80: mol_type = other DNA

SEQ ID NO: 51495 - DNA, 80 bp, synthetic construct
  source 1..80: mol_type = other DNA
ctggatacataattttttgattgccgtaataaacatcaagtttcaaaataaagcgtggccattcatatttaatatttaat

SEQ ID NO: 51496 - DNA, 80 bp, synthetic construct
  source 1..80: mol_type = other DNA
tcctggttggccttgtgacatgagccattagcttaatgtcaaaaacattccagataaactcatagaaaggggccacaaag

SEQ ID NO: 51497 - DNA, 80 bp, synthetic construct
  source 1..80: mol_type = other DNA
gacaaggtcttgctctgtcacccaggctgaagtgcaatcatggcttgcttcagcctcgaactctcaggctcaagtgatcc

SEQ ID NO: 51498 - DNA, 80 bp, synthetic construct; identical to SEQ ID NO: 16709
  source 1..80: mol_type = other DNA

SEQ ID NO: 51499 - DNA, 80 bp, synthetic construct
  source 1..80: mol_type = other DNA
taatggtttactgaccctataattttctctggggagctagtggctgagttgcttgcagtcccttttgtgctcacacttag

SEQ ID NO: 51500 - DNA, 80 bp, synthetic construct
  source 1..80: mol_type = other DNA
ttttgtatccaggattatgactttcatttttggtaatcattttatagtgaggcattagataagtgtcttttattttaaat

SEQ ID NO: 51501 - DNA, 80 bp, synthetic construct
  source 1..80: mol_type = other DNA
ttacactttctttagagtcagttaaccatttttcttgatacttgttaagagtcatgccaaaaacaatacccccaccccag

SEQ ID NO: 51502 - DNA, 80 bp, synthetic construct; identical to SEQ ID NO: 16710
  source 1..80: mol_type = other DNA

SEQ ID NO: 51503 - DNA, 80 bp, synthetic construct
  source 1..80: mol_type = other DNA
ggtcgatttggatgctccaaagctcaaatgccagaacagctaagttgcacaaacagcaaagatggtggcccaccccacgc

SEQ ID NO: 51504 - DNA, 80 bp, synthetic construct
  source 1..80: mol_type = other DNA
tccactttgcaagagctacagctacttttgccaggaagccctgaaagccagagtatctaaaggcatcacgtctctacacg

SEQ ID NO: 51505 - DNA, 80 bp, synthetic construct
  source 1..80: mol_type = other DNA
ggtgaggaaattttccttggttctgtgttgatgccaggttggcagtcatcctgccttacttttcttcattctctgtggat

SEQ ID NO: 51506 - DNA, 80 bp, synthetic construct; identical to SEQ ID NO: 16711
  source 1..80: mol_type = other DNA

SEQ ID NO: 51507 - DNA, 80 bp, synthetic construct
  source 1..80: mol_type = other DNA
gatctcggctcactgcaagctccgcctcccgggttcatgccattctcctgcctcagcctcccgagtagctgggactacag

SEQ ID NO: 51508 - DNA, 80 bp, synthetic construct
  source 1..80: mol_type = other DNA
cggccggtttctaaggcatataaaaagttatgtttacacaatgctatagcatattaagtctgcaataatattaagtctaa

SEQ ID NO: 51509 - DNA, 80 bp, synthetic construct
  source 1..80: mol_type = other DNA
ggcaatttcttaaaaataagacaacaatggcatttgccacatacattaacccaccctttcacaaaagatatttttagcat

SEQ ID NO: 51510 - DNA, 80 bp, synthetic construct
  source 1..80: mol_type = other DNA
ttccatctcaggaaacaagtttctttgcccctccaaaagtagtaactcctcacttatttgttttatcatgagatttcatc

SEQ ID NO: 51511 - DNA, 80 bp, synthetic construct; identical to SEQ ID NO: 16712
  source 1..80: mol_type = other DNA

SEQ ID NO: 51512 - DNA, 80 bp, synthetic construct
  source 1..80: mol_type = other DNA
gtaaagtcatcagaacaagaaactacattatttgctgagtcagttccttgtggggtcctctagatcagctggcatcagtg

SEQ ID NO: 51513 - DNA, 80 bp, synthetic construct
  source 1..80: mol_type = other DNA
tgtaacagggtctgcataattctaggacaacagccaaataactgtgaggaagtgagtcggagaacaagctaacctaatga

SEQ ID NO: 51514 - DNA, 80 bp, synthetic construct
  source 1..80: mol_type = other DNA
aagatagtgtcatcttgaaactctcaatatcttacatgatggttgtaagaatcaacatgtatacgctatatcataaatga

SEQ ID NO: 51515 - DNA, 80 bp, synthetic construct; identical to SEQ ID NO: 16713
  source 1..80: mol_type = other DNA

SEQ ID NO: 51516 - DNA, 80 bp, synthetic construct
  source 1..80: mol_type = other DNA
actgctactgttctggacactcttctaaaatatattgcataagacagatggcatgtccatacaagatccttgatattagc

SEQ ID NO: 51517 - DNA, 80 bp, synthetic construct
  source 1..80: mol_type = other DNA
taatttatctttggacataaccatgagaaatgacagaaaggaacagcaactggaaaacaagcattgcattgcaccaggat

SEQ ID NO: 51518 - DNA, 80 bp, synthetic construct
  source 1..80: mol_type = other DNA
gtactggcatcttcagcttccattctttttgatcccaacaactcatccgctcttaaaattgaaatttatcccacatcttt

SEQ ID NO: 51519 - DNA, 80 bp, synthetic construct; identical to SEQ ID NO: 16714
  source 1..80: mol_type = other DNA

SEQ ID NO: 51520 - DNA, 80 bp, synthetic construct
  source 1..80: mol_type = other DNA
atctatgtgctttactttgacttttggttcgaaatatttgacatgaagaagtgggatcagttttatagtgaagttctagg

SEQ ID NO: 51521 - DNA, 80 bp, synthetic construct
  source 1..80: mol_type = other DNA
ctcacacagaacaccccaggaaatcataaacctatacattagtgcatctaagactttaagcaattacacatctgttttac

SEQ ID NO: 51522 - DNA, 80 bp, synthetic construct; identical to SEQ ID NO: 16715
  source 1..80: mol_type = other DNA

SEQ ID NO: 51523 - DNA, 80 bp, synthetic construct
  source 1..80: mol_type = other DNA
tgaagtgtgaaggttgttatatctacatagttttttgaaactatgtctctttattagaacatatgagacaaattaaggtt

SEQ ID NO: 51524 - DNA, 80 bp, synthetic construct
  source 1..80: mol_type = other DNA
tttcagccatactctcaacatagtccacagttcacttgaaccaaagataaaagaattagcttaatgagttgtgtaaacta

SEQ ID NO: 51525 - DNA, 80 bp, synthetic construct
  source 1..80: mol_type = other DNA
atgagcatactgatgcgacattagagatgtagcttaacctcacaattctcctactactttgtctttcttataaatacaca

SEQ ID NO: 51526 - DNA, 80 bp, synthetic construct
  source 1..80: mol_type = other DNA
ttttctattcctgtcaggaagacccactacattatctgagacaatggggaaagctgacgtatggcttattcgaaactcct

SEQ ID NO: 51527 - DNA, 80 bp, synthetic construct; identical to SEQ ID NO: 16716
  source 1..80: mol_type = other DNA

SEQ ID NO: 51528 - DNA, 80 bp, synthetic construct
  source 1..80: mol_type = other DNA
aaacacaggtaagtgcagaattttcagagaaaaaaatagacacagtttctgtccccacataccttacattctacttcaaa

SEQ ID NO: 51529 - DNA, 80 bp, synthetic construct
  source 1..80: mol_type = other DNA
attatctgaaggaaaaacgcaataccaagaaagcatcagtggagataatagaaagtatcctgcagtcactgattagtaag

SEQ ID NO: 51530 - DNA, 80 bp, synthetic construct; identical to SEQ ID NO: 16717
  source 1..80: mol_type = other DNA

SEQ ID NO: 51531 - DNA, 80 bp, synthetic construct
  source 1..80: mol_type = other DNA
gcagatgatggaaaagtcgactagaaagttgatagaaatcattatgcccacatttacaaaaatagtggcaacttcatatt

SEQ ID NO: 51532 - DNA, 80 bp, synthetic construct
  source 1..80: mol_type = other DNA
tcttcatttaatagaaccagattgttcagtacatcaaaattatattctcttgcagagtcatagttgacagataccctgtg

SEQ ID NO: 51533 - DNA, 80 bp, synthetic construct
  source 1..80: mol_type = other DNA
tgttcacttgatcttactaaagcatttaaatcattcttcattgagaccccagagatttacatattacagcataaacatac

SEQ ID NO: 51534 - DNA, 80 bp, synthetic construct; identical to SEQ ID NO: 16718
  source 1..80: mol_type = other DNA

SEQ ID NO: 51535 - DNA, 80 bp, synthetic construct
  source 1..80: mol_type = other DNA
gctttatatgataactttctcaagagacaaaagctgaggtaagactaatgaaaaatctatgccaccctaccctactcttg

SEQ ID NO: 51536 - DNA, 80 bp, synthetic construct
  source 1..80: mol_type = other DNA
caagtcaatggttgtgaaacccgttcttcgtttattatgtaaaataattgctaacccaggttgctttcatttcaattaaa

SEQ ID NO: 51537 - DNA, 80 bp, synthetic construct
  source 1..80: mol_type = other DNA
atattcataaaattaacattggaagtaatccaacatcttaaatgaaggaatgattaaaaacttatactatgtgcatacaa

SEQ ID NO: 51538 - DNA, 80 bp, synthetic construct
  source 1..80: mol_type = other DNA
atacataataagattaaaattatctaaataagtgtcacatgtgtacattgagctatgtaaataggacaaaagccatgatg

SEQ ID NO: 51539 - DNA, 80 bp, synthetic construct; identical to SEQ ID NO: 16719
  source 1..80: mol_type = other DNA

SEQ ID NO: 51540 - DNA, 80 bp, synthetic construct
  source 1..80: mol_type = other DNA
aatcacacgcaatacctagatgccccaagtattacctggaatagcagtacaatgactctcatgttaagattaaaaatcat

SEQ ID NO: 51541 - DNA, 80 bp, synthetic construct
  source 1..80: mol_type = other DNA
aataattctcaatcgattgcagccaagcacatcttcactaggaatgttacgtggtgtgtgtgagctactcaaaaaagaga

SEQ ID NO: 51542 - DNA, 80 bp, synthetic construct; identical to SEQ ID NO: 16720
  source 1..80: mol_type = other DNA

SEQ ID NO: 51543 - DNA, 80 bp, synthetic construct
  source 1..80: mol_type = other DNA
taaaattatcccaactgtgagtagcttatcctcagagctcatagttagggaagtaaaccactaactgtttccaactaaga

SEQ ID NO: 51544 - DNA, 80 bp, synthetic construct
  source 1..80: mol_type = other DNA
agaagagtctgtgtataatatttttaacattatctccctgacaacaatgtaatagctccatttcttttctcccttacaca

SEQ ID NO: 51545 - DNA, 80 bp, synthetic construct
  source 1..80: mol_type = other DNA
ctctttagtaatttgcaccaattcttttggtagtgcccgctgtgctaatactcttttgtgatgaagcaaattctttcttc

SEQ ID NO: 51546 - DNA, 80 bp, synthetic construct; identical to SEQ ID NO: 16721
  source 1..80: mol_type = other DNA

SEQ ID NO: 51547 - DNA, 80 bp, synthetic construct
  source 1..80: mol_type = other DNA
cttctcacctcctgtccataaaattttgaattgtgtatgtgatctacatagaaagaatattaaagagtagattgaactct

SEQ ID NO: 51548 - DNA, 80 bp, synthetic construct
  source 1..80: mol_type = other DNA
atgtattcacaaaaggcaacttgagacccacagttatttttaatttctgatattaacactcatacatactgctgaattta

SEQ ID NO: 51549 - DNA, 80 bp, synthetic construct
  source 1..80: mol_type = other DNA
gtatccaatgagtgaagaacacttgactgactcttgggtcacctctattacttattgtactctggaagctcttggtgaat

SEQ ID NO: 51550 - DNA, 80 bp, synthetic construct; identical to SEQ ID NO: 16722
  source 1..80: mol_type = other DNA

SEQ ID NO: 51551 - DNA, 80 bp, synthetic construct
  source 1..80: mol_type = other DNA
tgtgatcacagctactcgggaggctggggcaggagaatcacttgaacctgggaggcagaggttgcagtgagccaagatca

SEQ ID NO: 51552 - DNA, 80 bp, synthetic construct
  source 1..80: mol_type = other DNA
aagtatattaataaatattcccgtatggttagttttttacatttttaaaaataaactttatggatatgacaaattaaaaa

SEQ ID NO: 51553 - DNA, 80 bp, synthetic construct
  source 1..80: mol_type = other DNA
tattcaagaaatgtaggtgaagttttggtattgccatgatattggggtcaggtaagagatatcaccaaattctgcccctg

SEQ ID NO: 51554 - DNA, 80 bp, synthetic construct; identical to SEQ ID NO: 16723
  source 1..80: mol_type = other DNA

SEQ ID NO: 51555 - DNA, 80 bp, synthetic construct
  source 1..80: mol_type = other DNA
taaaatgtggccccacaaggactctgcactatcagattaacaactcctcccaatggaggaagcagaaggaaatatagaag

SEQ ID NO: 51556 - DNA, 80 bp, synthetic construct
  source 1..80: mol_type = other DNA
tactttttaatttcctgcctgataaagctttcttgtaatgacctcttccaacttttgctgaaacctgagttactttaaca

SEQ ID NO: 51557 - DNA, 80 bp, synthetic construct
  source 1..80: mol_type = other DNA
aataatcagttaaccaaattcagcaagatacaattttgagttttttcaacagctgtgtttttattcatgacaccaacaga

SEQ ID NO: 51558 - DNA, 80 bp, synthetic construct; identical to SEQ ID NO: 16724
  source 1..80: mol_type = other DNA

SEQ ID NO: 51559 - DNA, 80 bp, synthetic construct
  source 1..80: mol_type = other DNA
aaaaattaaattaatttaacttttatttgtaacttttattttaagttcaaggggacatgtgtagtttttttacataggta

SEQ ID NO: 51560 - DNA, 80 bp, synthetic construct
  source 1..80: mol_type = other DNA
cttccacttataagtgaggacatgccatatttatatttccatccctttgttagtttgctaaggataatggcctccagctc

SEQ ID NO: 51561 - DNA, 80 bp, synthetic construct
  source 1..80: mol_type = other DNA
cctgtgcatgggtctttataaaagaaccatttatagtccgttggttatatacccagtaatgggattgctgggtttcatgg

SEQ ID NO: 51562 - DNA, 80 bp, synthetic construct; identical to SEQ ID NO: 16725
  source 1..80: mol_type = other DNA

SEQ ID NO: 51563 - DNA, 80 bp, synthetic construct
  source 1..80: mol_type = other DNA
atttacattagtctttgagtagttcttatttactaacatcccttgatctcattcctactctttatacagttctcacattc

SEQ ID NO: 51564 - DNA, 80 bp, synthetic construct
  source 1..80: mol_type = other DNA
accccagaatgaccttctaggtaagactctggtgaacaaatactgaatatattagtaacagcacattagagtgttaatag

SEQ ID NO: 51565 - DNA, 80 bp, synthetic construct
  source 1..80: mol_type = other DNA
ttcctgggctgtctctctgtctcctatttctacaactttacacctgtttttttcctctcccgcagggttatttgaaatgc

SEQ ID NO: 51566 - DNA, 80 bp, synthetic construct; identical to SEQ ID NO: 16726
  source 1..80: mol_type = other DNA

SEQ ID NO: 51567 - DNA, 80 bp, synthetic construct
  source 1..80: mol_type = other DNA
gttttttcctccgaagtctgaaacacaattttaatttagttcagtgttttagctggaaaacactgtcactttcagagcct

SEQ ID NO: 51568 - DNA, 80 bp, synthetic construct
  source 1..80: mol_type = other DNA
tctaccatgggatccctatggtggggattccattgtttgccgatcaacctgataacattgctcacatgaaggccagggga

SEQ ID NO: 51569 - DNA, 80 bp, synthetic construct
  source 1..80: mol_type = other DNA
ttataagagactaattttgaaagaatttaaatgatttaaccaatctgaaatctgcttttatttttataagttatttaaaa

SEQ ID NO: 51570 - DNA, 80 bp, synthetic construct
  source 1..80: mol_type = other DNA
ataataaaatattttaattagatatctaaaacacctcagagtataaccattttcttgctgaaaaattaacttttattatt

SEQ ID NO: 51571 - DNA, 80 bp, synthetic construct; identical to SEQ ID NO: 16727
  source 1..80: mol_type = other DNA

SEQ ID NO: 51572 - DNA, 80 bp, synthetic construct
  source 1..80: mol_type = other DNA
tagtaaagatatgtcatattttagttgttcacttatcagttcattggccttttgattgttttcaattgtggctattagga

SEQ ID NO: 51573 - DNA, 80 bp, synthetic construct
  source 1..80: mol_type = other DNA
catggttccaattcctccatacttttgccaaacctgttattccctgactttttgttacagccttcttagtgggtgtaaaa

SEQ ID NO: 51574 - DNA, 80 bp, synthetic construct
  source 1..80: mol_type = other DNA
ctaaaggtgttgagaatcttcatacgtgcctactgatcattcatatatcttctttgaaaacagtctatccaatccttgga

SEQ ID NO: 51575 - DNA, 80 bp, synthetic construct; identical to SEQ ID NO: 16728
  source 1..80: mol_type = other DNA

SEQ ID NO: 51576 - DNA, 80 bp, synthetic construct
  source 1..80: mol_type = other DNA
cagcttggacaaatagaaaaaaaatatataaagcaaattggtagatttaaatatgattatacaaatactttcactcaatc

SEQ ID NO: 51577 - DNA, 80 bp, synthetic construct
  source 1..80: mol_type = other DNA
ttcctagagcatgtcgaatagttatctgaagtgatatgtggtgggcaataaatcaagatttagtacatataataaggttc

SEQ ID NO: 51578 - DNA, 80 bp, synthetic construct
  source 1..80: mol_type = other DNA
ttagagatcaagaggtgaatcacaactatgtctccacttttatctcaacaattctactcccagttatatacccaacagat

SEQ ID NO: 51579 - DNA, 80 bp, synthetic construct
  source 1..80: mol_type = other DNA
ttatcaatcaacagaatactacacagcaatggaattacccaacaactgctacattaaaaaaagacactaatgagtacgta

SEQ ID NO: 51580 - DNA, 80 bp, synthetic construct; identical to SEQ ID NO: 16729
  source 1..80: mol_type = other DNA

SEQ ID NO: 51581 - DNA, 80 bp, synthetic construct
  source 1..80: mol_type = other DNA
tggccagtaaaagcctctcttagaggtaacattagaaggaagccacaagaagggagagaagcattccttgggttgtagca

SEQ ID NO: 51582 - DNA, 80 bp, synthetic construct
  source 1..80: mol_type = other DNA
gggttctgtagaccaaataacagagttggattttattctaaaaataatgagaagccaggcaaaagtcttaatcaggggag

SEQ ID NO: 51583 - DNA, 80 bp, synthetic construct; identical to SEQ ID NO: 16730
  source 1..80: mol_type = other DNA

SEQ ID NO: 51584 - DNA, 80 bp, synthetic construct
  source 1..80: mol_type = other DNA
acaaattaaaaatgccttatattttctctgcttcaaaaaaaattaactttctcagctaacattcaatttctactttaaaa

SEQ ID NO: 51585 - DNA, 80 bp, synthetic construct
  source 1..80: mol_type = other DNA
agcctttcgtaaacttgatatggacaggcaaattaacttactttcagtattagggaggagaccatgcttcatatcgtctt

SEQ ID NO: 51586 - DNA, 80 bp, synthetic construct
  source 1..80: mol_type = other DNA
agcattgtaaaaatccctgtcctgttctgttccattctgattactggtgcatgcagcccccagttatgtacccactgctt

SEQ ID NO: 51587 - DNA, 80 bp, synthetic construct; identical to SEQ ID NO: 16731
  source 1..80: mol_type = other DNA

SEQ ID NO: 51588 - DNA, 80 bp, synthetic construct
  source 1..80: mol_type = other DNA
ctgtgtggcaactgtgatatttatcgtcacaaaatgttgtctgttttgtttctggaagtttgctagaaaagcaaagaagg

SEQ ID NO: 51589 - DNA, 80 bp, synthetic construct
  source 1..80: mol_type = other DNA
aataaaaatttgtttttcagagatttaccacccagttcatggttagaaatattttgtggcaatgaagaaaacactacgga

SEQ ID NO: 51590 - DNA, 80 bp, synthetic construct
  source 1..80: mol_type = other DNA
ttggtttgcataaagcatttatttacagcagtacttgcaacaaagtaagtgctatataagtatgagccatttttattacc

SEQ ID NO: 51591 - DNA, 80 bp, synthetic construct; identical to SEQ ID NO: 16732
  source 1..80: mol_type = other DNA

SEQ ID NO: 51592 - DNA, 80 bp, synthetic construct
  source 1..80: mol_type = other DNA
gttttacatttacaaatgtctatttcacactctcattctaaagtagaatcgatgatgaccttttctccccgttcagcccc

SEQ ID NO: 51593 - DNA, 80 bp, synthetic construct
  source 1..80: mol_type = other DNA
caaagacaaatgcatgttatagatgaggcaacagcattatccaaggctgaggtggagagcccagcaggccagggccacat

SEQ ID NO: 51594 - DNA, 80 bp, synthetic construct
  source 1..80: mol_type = other DNA
gccacctggggaatgagagtgggggtctgagctcaaacatggtgtagtgaaaaggacaccggaccatgactccaaaatct

SEQ ID NO: 51595 - DNA, 80 bp, synthetic construct
  source 1..80: mol_type = other DNA
ccggctattttttttttttttttttttgtatttttaatagagacagggtttctccatgttggtcaggttggtctcgaact

SEQ ID NO: 51596 - DNA, 80 bp, synthetic construct; identical to SEQ ID NO: 16733
  source 1..80: mol_type = other DNA

SEQ ID NO: 51597 - DNA, 80 bp, synthetic construct
  source 1..80: mol_type = other DNA
catatctaataaatttaagattaagcgatatatatgctattctgcagtaaggaacgtggctttcagatgtttttccacct

SEQ ID NO: 51598 - DNA, 80 bp, synthetic construct
  source 1..80: mol_type = other DNA
gactcagggaatgcggccgcattccccaaactcaagcactgatctgaagaagcctctgtgatccacctcgaagaacgcct

SEQ ID NO: 51599 - DNA, 80 bp, synthetic construct
  source 1..80: mol_type = other DNA
tgggtggtggagtgagaataagaaggcaccttaccctacatcacggaacccccaaacactctctctgactagccacccga

SEQ ID NO: 51600 - DNA, 80 bp, synthetic construct
  source 1..80: mol_type = other DNA
ggagaagatgcggctcactgcttctccagaccctctcccctggggagggggtgggggagcaggctctcggctactctcgg

SEQ ID NO: 51601 - DNA, 80 bp, synthetic construct; identical to SEQ ID NO: 16734
  source 1..80: mol_type = other DNA

SEQ ID NO: 51602 - DNA, 80 bp, synthetic construct
  source 1..80: mol_type = other DNA
ctgaagggggtggggtgggagctgtgggccgattatttatcgtgagtaggcaggagagggagaccccactaggcgctgga

SEQ ID NO: 51603 - DNA, 80 bp, synthetic construct
  source 1..80: mol_type = other DNA
acttgggtttctttgtcaaacaaacagcaactcctcatggctgaggtctcaagggaccggggaaaagcccgcaggaaagg

SEQ ID NO: 51604 - DNA, 80 bp, synthetic construct; identical to SEQ ID NO: 16735
  source 1..80: mol_type = other DNA

SEQ ID NO: 51605 - DNA, 80 bp, synthetic construct
  source 1..80: mol_type = other DNA
cagcgcggcgtcctgcaccccaggacgatctgtgggcacggggatagagaagaaggcacaggagctctcagctgggcccc

SEQ ID NO: 51606 - DNA, 80 bp, synthetic construct
  source 1..80: mol_type = other DNA
gggcgcacctggccctgtccctgcctggccttgctccctgtccatgctctgtccatccctcagcgtcccgatgcgccatg

SEQ ID NO: 51607 - DNA, 80 bp, synthetic construct
  source 1..80: mol_type = other DNA
agcttccctccttctattctacccttctgtagcatcacttactttatttttaaaactcttgccttgttaggaattaataa

SEQ ID NO: 51608 - DNA, 80 bp, synthetic construct
  source 1..80: mol_type = other DNA
tgttgctaagtggatgaatgaatgagagaaggctggctgggcaggggtagaggagcccatctccattccttgagcctcca

SEQ ID NO: 51609 - DNA, 80 bp, synthetic construct; identical to SEQ ID NO: 16736
  source 1..80: mol_type = other DNA

SEQ ID NO: 51610 - DNA, 80 bp, synthetic construct
  source 1..80: mol_type = other DNA
agagctaagggcagtgaggggcacctcagcgtccacacaccacaggggctctgcaaaccagcaaagtaggtatttcctta

SEQ ID NO: 51611 - DNA, 80 bp, synthetic construct
  source 1..80: mol_type = other DNA
cctcatgcaagttcagcttcttcagtcccacctggaacttgatgaggggctcaatcagctccaggctgtgtccggctgtg

SEQ ID NO: 51612 - DNA, 80 bp, synthetic construct
  source 1..80: mol_type = other DNA
agctgaaaaagactccccaggaggtggagtctaggcatacctttggtcacgtcactgacgcggtacttgtagtcttggtt

SEQ ID NO: 51613 - DNA, 80 bp, synthetic construct; identical to SEQ ID NO: 16737
  source 1..80: mol_type = other DNA

SEQ ID NO: 51614 - DNA, 80 bp, synthetic construct
  source 1..80: mol_type = other DNA
agggaagttcccagcattgaggcatgaatatggtggtctgcaaaaggtagggccatggtatcttcaacaacacccaagtt

SEQ ID NO: 51615 - DNA, 80 bp, synthetic construct
  source 1..80: mol_type = other DNA
gttcagagctccagcgtcttttccaatagcctcttacaggaatcccagacttgtgtctctccagtctctcattcatcttt

SEQ ID NO: 51616 - DNA, 80 bp, synthetic construct
  source 1..80: mol_type = other DNA
cccatggtaaactccaccaaccttccattctagcagcatcatgccactccacattcagatgctgtgtgttctcactgtgc

SEQ ID NO: 51617 - DNA, 80 bp, synthetic construct; identical to SEQ ID NO: 16738
  source 1..80: mol_type = other DNA

SEQ ID NO: 51618 - DNA, 80 bp, synthetic construct
  source 1..80: mol_type = other DNA
gcaagcttcgcctcccaggttcacgccattctcctgcctcagcctcccgagtagctgggactacaggtgcccgccaccat

SEQ ID NO: 51619 - DNA, 80 bp, synthetic construct
  source 1..80: mol_type = other DNA
gatggtgtctcactatgtggcccaggctggtctcaaattcctggcctcaagtgatcctctcatcttggcctctcaaagaa

SEQ ID NO: 51620 - DNA, 80 bp, synthetic construct; identical to SEQ ID NO: 16739
  source 1..80: mol_type = other DNA

SEQ ID NO: 51621 - DNA, 80 bp, synthetic construct
  source 1..80: mol_type = other DNA
gctgggattagaggcacctgccaccacactcagctaatttttgtatttttagtagagacggggtttcgccatgttggcca

SEQ ID NO: 51622 - DNA, 80 bp, synthetic construct
  source 1..80: mol_type = other DNA
acacactgaccattgagccgtcagcacaagatgatcaatagagatgcgttgatgatttgagaggccaatgactagttcca

SEQ ID NO: 51623 - DNA, 80 bp, synthetic construct
  source 1..80: mol_type = other DNA
ttatatataaagatgggaagctgatattaactgatgagagtgttgtatcaatgggtgatagatggtgggaaatgagaagg

SEQ ID NO: 51624 - DNA, 80 bp, synthetic construct; identical to SEQ ID NO: 16740
  source 1..80: mol_type = other DNA

SEQ ID NO: 51625 - DNA, 80 bp, synthetic construct
  source 1..80: mol_type = other DNA
taaaaaggaaaactgccgtgtcctccttcagatagtctaatgacacaatgtctaacatctcaccatccttgtcacttttc

SEQ ID NO: 51626 - DNA, 80 bp, synthetic construct
  source 1..80: mol_type = other DNA
ggcgtattttcttcctatctttttttcttatttatttattttaattttttttttgagacagtcttgctctgtcacccagg

SEQ ID NO: 51627 - DNA, 80 bp, synthetic construct
  source 1..80: mol_type = other DNA
gccaggctgctcttgaatcctgacctcaagtgagtcctgcccaccttggcctcccaaagttctgggattataggtgtgag

SEQ ID NO: 51628 - DNA, 80 bp, synthetic construct
  source 1..80: mol_type = other DNA
gggttgcatgatgttacatcataacagtatactctaagttattgagccagtcttccatttatctatttttgaacattttg

SEQ ID NO: 51629 - DNA, 80 bp, synthetic construct; identical to SEQ ID NO: 16741
  source 1..80: mol_type = other DNA

SEQ ID NO: 51630 - DNA, 80 bp, synthetic construct
  source 1..80: mol_type = other DNA
cctgcagccgcttctgggcacccgagatgtgactggaattgtgttgctgtttcgtctttcccacccccacaggcagagcc

SEQ ID NO: 51631 - DNA, 80 bp, synthetic construct
  source 1..80: mol_type = other DNA
agtttatgtaagaaagctatttgttggatggatgaagaaatgaatgtggagaaagggcacagcacgaaggaagcatgata

SEQ ID NO: 51632 - DNA, 80 bp, synthetic construct; identical to SEQ ID NO: 16742
  source 1..80: mol_type = other DNA

SEQ ID NO: 51633 - DNA, 80 bp, synthetic construct
  source 1..80: mol_type = other DNA
tcatcctgccttccccacaccctccgcccctgcctgcaggcagcaagatcaaagccaccagggatgcagccactgttctt

SEQ ID NO: 51634 - DNA, 80 bp, synthetic construct
  source 1..80: mol_type = other DNA
ctgcaagctctcttagcaaggcctgctccattttcattggcataccttctgctctgggacttctcaagtcatactgaaga

SEQ ID NO: 51635 - DNA, 80 bp, synthetic construct
  source 1..80: mol_type = other DNA
gggacagaggagaacatgatgaaaggaagagggcagacttcaacttaacctcgggaagagaaactgagagtagtgctatt

SEQ ID NO: 51636 - DNA, 80 bp, synthetic construct; identical to SEQ ID NO: 16743
  source 1..80: mol_type = other DNA

SEQ ID NO: 51637 - DNA, 80 bp, synthetic construct
  source 1..80: mol_type = other DNA
aaacagtaacgtgaagcgtggaggagggagttggaacttgtgctctacggaatgtgttgtcagttccaaagaaagcctct

SEQ ID NO: 51638 - DNA, 80 bp, synthetic construct
  source 1..80: mol_type = other DNA
caccattttcacattaattccaggggaagagcatcgaaaaatttctgttatttgggttggtgagaggcataaaataacac

SEQ ID NO: 51639 - DNA, 80 bp, synthetic construct
  source 1..80: mol_type = other DNA
tttccatccagagccggcaatgttaactcattttccagctccccatattccagcactgaatctgagcattagtatctagg

SEQ ID NO: 51640 - DNA, 80 bp, synthetic construct; identical to SEQ ID NO: 16744
  source 1..80: mol_type = other DNA

SEQ ID NO: 51641 - DNA, 80 bp, synthetic construct
  source 1..80: mol_type = other DNA
ggagactgaggcaggagagtggcgtgaacccgggaggcggagcttgcagtgagccgagatcatgccactgcactccagcc

SEQ ID NO: 51642 - DNA, 80 bp, synthetic construct
  source 1..80: mol_type = other DNA
accccaactctactactaaaaatacaaaactagccaggcgtggtggtgcgtgcctgtaatttctgctactcaggaggctg

SEQ ID NO: 51643 - DNA, 80 bp, synthetic construct
  source 1..80: mol_type = other DNA
gaggctgaagcaggagaattgcttgaacctggaaggcggaggttgcagtgagctgagatcgcgccattgcactccagcct

SEQ ID NO: 51644 - DNA, 80 bp, synthetic construct; identical to SEQ ID NO: 16745
  source 1..80: mol_type = other DNA

SEQ ID NO: 51645 - DNA, 80 bp, synthetic construct
  source 1..80: mol_type = other DNA
tttttttttttgtagagaagaggtctcactatgttgatcaggctggtctggaactcctgggctgaagcaatcctcctacc

SEQ ID NO: 51646 - DNA, 80 bp, synthetic construct
  source 1..80: mol_type = other DNA
ccttctctctatcacttcattctgctctcagagttggggtgtggaggaatcatatcgttgaatttaaagagataatatga

SEQ ID NO: 51647 - DNA, 80 bp, synthetic construct
  source 1..80: mol_type = other DNA
actttctaaatacagatttctgggcctacgccagagattctgatttcgcaggtctagggtagggtctgaatctctatttt

SEQ ID NO: 51648 - DNA, 80 bp, synthetic construct; identical to SEQ ID NO: 16746
  source 1..80: mol_type = other DNA

SEQ ID NO: 51649 - DNA, 80 bp, synthetic construct
  source 1..80: mol_type = other DNA
cagcctgggcatcagagcgagaatctgtctggaaaaaaaataaaaataaataaataaataaataaataaataaattagcc

SEQ ID NO: 51650 - DNA, 80 bp, synthetic construct
  source 1..80: mol_type = other DNA
aaaaagaagtggtggatgagtgatctccaacccttcttgtagctcagtctaggactctgactctgttccccagagattgc

SEQ ID NO: 51651 - DNA, 80 bp, synthetic construct
  source 1..80: mol_type = other DNA
gagaagctggacgagtccatcatgtctgggagagatgagggaagagaaggagctatttaaggatacttggaccaggcccc

SEQ ID NO: 51652 - DNA, 80 bp, synthetic construct; identical to SEQ ID NO: 16747
  source 1..80: mol_type = other DNA

SEQ ID NO: 51653 - DNA, 80 bp, synthetic construct
  source 1..80: mol_type = other DNA
gctaaaggaggtgcacattactgaaggtactctagaaagctatttgacattagtcaaataattgtgtgtactctttgacc

SEQ ID NO: 51654 - DNA, 80 bp, synthetic construct
  source 1..80: mol_type = other DNA
cccttaaaaattatattctggatgcgtactaactggtatggaaaaacaatgccatataaaaaaaagcaagtcatcagatt

SEQ ID NO: 51655 - DNA, 80 bp, synthetic construct
  source 1..80: mol_type = other DNA
tggacctcaataggaccaacacgttcaccttcccactccaaatttcaccttctgaagggcccaggattaaaatatcacgt

SEQ ID NO: 51656 - DNA, 80 bp, synthetic construct; identical to SEQ ID NO: 16748
  source 1..80: mol_type = other DNA

SEQ ID NO: 51657 - DNA, 80 bp, synthetic construct
  source 1..80: mol_type = other DNA
gctccctccaccatcattcacacgaactggaggctggaagggaaagatggggtctcagacccacattttggggttgcctt

SEQ ID NO: 51658 - DNA, 80 bp, synthetic construct
  source 1..80: mol_type = other DNA
agtgcttctcctctggaccggctcatcctcccagcaggcagacatacccggaactggcagaagtcggagtaggtggggtc

SEQ ID NO: 51659 - DNA, 80 bp, synthetic construct
  source 1..80: mol_type = other DNA
tgggaaggggagtcaggagggctggccagcagctcctccaggaaaccttcctcctgcggttgggggtaaaggtccaagat

SEQ ID NO: 51660 - DNA, 80 bp, synthetic construct
  source 1..80: mol_type = other DNA
ggagtcggggttctcaagaacaagttgtgggaccttgggcaaactctctgggcttttgttcttttgtttgtaaaatgaga

SEQ ID NO: 51661 - DNA, 80 bp, synthetic construct; identical to SEQ ID NO: 16749
  source 1..80: mol_type = other DNA

SEQ ID NO: 51662 - DNA, 80 bp, synthetic construct
  source 1..80: mol_type = other DNA
agccttgacatttctgtccatggaagttttcaagtcctcttgaaggccccaaagggtgaggccttgcagctctaatctta

SEQ ID NO: 51663 - DNA, 80 bp, synthetic construct
  source 1..80: mol_type = other DNA
gctgtggcttgctgagtgctgacggcaggagtgggcaccagggcctttggcctgtagctacttgcttggtgctgctgctg

SEQ ID NO: 51664 - DNA, 80 bp, synthetic construct
  source 1..80: mol_type = other DNA
tgctgggagggagtggacagccaatgccacaggcatggcaggaaagcgagcgctactgcaagagatggtgcttccctcca

SEQ ID NO: 51665 - DNA, 80 bp, synthetic construct; identical to SEQ ID NO: 16750
  source 1..80: mol_type = other DNA

SEQ ID NO: 51666 - DNA, 80 bp, synthetic construct
  source 1..80: mol_type = other DNA
acgtccaaactaaagttggcctcttcctaactttcagacttcatgtcttagtgcttctggacacagcctctgttctgggc

SEQ ID NO: 51667 - DNA, 80 bp, synthetic construct
  source 1..80: mol_type = other DNA
agttcttcagtgcctacatcatagccatctttttccatgaagcatttcttgattgccctgatctgcatcaagccttgttt

SEQ ID NO: 51668 - DNA, 80 bp, synthetic construct; identical to SEQ ID NO: 16751
  source 1..80: mol_type = other DNA

SEQ ID NO: 51669 - DNA, 80 bp, synthetic construct
  source 1..80: mol_type = other DNA
ttctttcacagactctcgctctattatccaggctggagtgcagtggcaccacctcggctcactgcaacctccacctcccg

SEQ ID NO: 51670 - DNA, 80 bp, synthetic construct
  source 1..80: mol_type = other DNA
tggcctcccaaagtgctgggattacaggcgtgagctaccatgcccggcctttgtcttacaattcttatatttcccccata

SEQ ID NO: 51671 - DNA, 80 bp, synthetic construct
  source 1..80: mol_type = other DNA
agtgaatggcacctggcacaccagagagctgagaaagctgacctcttttattgaaacaattgttatggaaagattttcaa

SEQ ID NO: 51672 - DNA, 80 bp, synthetic construct; identical to SEQ ID NO: 16752
  source 1..80: mol_type = other DNA

SEQ ID NO: 51673 - DNA, 80 bp, synthetic construct
  source 1..80: mol_type = other DNA
ccttttgtatattaactcatatatttagccctcatgacaaccctttaaggcaggtgctgttgttattcccatttagcaga

SEQ ID NO: 51674 - DNA, 80 bp, synthetic construct
  source 1..80: mol_type = other DNA
tggctttcagccatggagttttgacaggcattgtgttccaatccatctgaagagtgtgaaaataaaattaagtcacaaag

SEQ ID NO: 51675 - DNA, 80 bp, synthetic construct
  source 1..80: mol_type = other DNA
gagccttctgcaaggcaacattgcttgaggactgaataagtctaaagtctttcacatatgcaaatgcactgtgatttacg

SEQ ID NO: 51676 - DNA, 80 bp, synthetic construct; identical to SEQ ID NO: 16753
  source 1..80: mol_type = other DNA

SEQ ID NO: 51677 - DNA, 80 bp, synthetic construct
  source 1..80: mol_type = other DNA
atgatcaggtttgggagaatcttactgatctatagacctgtggaagatatacagagagaaagaagcataatgaggagcta

SEQ ID NO: 51678 - DNA, 80 bp, synthetic construct
  source 1..80: mol_type = other DNA
cagttataaaatttcttgggttcccagggtataaagtcaactaagaatggaaaagagagaaaatgagtctttggtgggac

SEQ ID NO: 51679 - DNA, 80 bp, synthetic construct
  source 1..80: mol_type = other DNA
ccatcatcttattagctgagagccatgatattttaattcctctgagcttcctcagctattgaaaaaataaaagtatttac

SEQ ID NO: 51680 - DNA, 80 bp, synthetic construct; identical to SEQ ID NO: 16754
  source 1..80: mol_type = other DNA

SEQ ID NO: 51681 - DNA, 80 bp, synthetic construct
  source 1..80: mol_type = other DNA
tattttaactggatccccgctccaccagcccatctagaactgagtactgctccctgcactgggatgaggagggtggtgtg

SEQ ID NO: 51682 - DNA, 80 bp, synthetic construct
  source 1..80: mol_type = other DNA
taccccaggctggtgctgctcttcaccatggatgcagcgctgtttatggggaccaggaggcaggtaggaggggacatgaa

SEQ ID NO: 51683 - DNA, 80 bp, synthetic construct
  source 1..80: mol_type = other DNA
tcctgaggggaactcctgtggcagtgccttacgaaccactgcagtggaacctcgtgccagtcttggttagctggagcttt

SEQ ID NO: 51684 - DNA, 80 bp, synthetic construct
  source 1..80: mol_type = other DNA
tcttattctctccaggataaacacaggagccagggcgtggcagggactagggtaggagcgaccagcgtgcccaggcctgc

SEQ ID NO: 51685 - DNA, 80 bp, synthetic construct; identical to SEQ ID NO: 16755
  source 1..80: mol_type = other DNA

SEQ ID NO: 51686 - DNA, 80 bp, synthetic construct
  source 1..80: mol_type = other DNA
tcctagggccgggtgggggtctggatgcagatggcagacaggagtgagcaagagaaggagaaaaaggaatgagtgtacag

SEQ ID NO: 51687 - DNA, 80 bp, synthetic construct
  source 1..80: mol_type = other DNA
catgtaaatatgccatgttggtcttctccaaccccagagagggacaggaagtcctatagaatcactcctctttctccatc

SEQ ID NO: 51688 - DNA, 80 bp, synthetic construct; identical to SEQ ID NO: 16756
  source 1..80: mol_type = other DNA

SEQ ID NO: 51689 - DNA, 80 bp, synthetic construct
  source 1..80: mol_type = other DNA
agtgcatctgaccctggacttccagctgccctgtcaccagctgctggtcccactgaggccctggccccagatgctggcag

SEQ ID NO: 51690 - DNA, 80 bp, synthetic construct
  source 1..80: mol_type = other DNA
cagtggcgtcggttgtccttggtgatgcggcagtccccgttgaaggggcaggtgaatagtgccttccgcttcatgcttcg

SEQ ID NO: 51691 - DNA, 80 bp, synthetic construct
  source 1..80: mol_type = other DNA
accaaacgattcctacttctcctttcattgcctgcccagctccaatcatggcttgtacttaccttttttcttttaatttt

SEQ ID NO: 51692 - DNA, 80 bp, synthetic construct; identical to SEQ ID NO: 16757
  source 1..80: mol_type = other DNA

SEQ ID NO: 51693 - DNA, 80 bp, synthetic construct
  source 1..80: mol_type = other DNA
attctcctgcctcagcctccagagtagctgggactacaggcgcccgccaccactcctggctaatttttttttgtattttt

SEQ ID NO: 51694 - DNA, 80 bp, synthetic construct
  source 1..80: mol_type = other DNA
gccccgactcttatacttattttacagtactctgttccccttcccattttaaaaaattaaacaggaaataacaaaagtgc

SEQ ID NO: 51695 - DNA, 80 bp, synthetic construct
  source 1..80: mol_type = other DNA
cctgcctcagcctcccgagtagctgggactacaggcgcccaccaccgcacccggctaattctttgtattttcagtagaga

SEQ ID NO: 51696 - DNA, 80 bp, synthetic construct; identical to SEQ ID NO: 16758
  source 1..80: mol_type = other DNA

SEQ ID NO: 51697 - DNA, 80 bp, synthetic construct
  source 1..80: mol_type = other DNA
ggttttttgaaaggaagaggaagcaggagctctgtaggaacagaaaactagagctgggcacagtggctcaggcctgtaat

SEQ ID NO: 51698 - DNA, 80 bp, synthetic construct
  source 1..80: mol_type = other DNA
gaggcaggagagtcgtttgaacccaggaggtagaggttgcagtaggccaagatcatgccactgcactccagcctgggcaa

SEQ ID NO: 51699 - DNA, 80 bp, synthetic construct
  source 1..80: mol_type = other DNA
tgaggtcaggagtttgagaccagcctgaccaacatagtgaaaccccatctctactaaaaatacaaaaattagccgggcac

SEQ ID NO: 51700 - DNA, 80 bp, synthetic construct
  source 1..80: mol_type = other DNA
aagaaaagtggcacccttgtagcctatgtaagttgtgtgtgtgtgtgtgtgtgtgcacaagtgtgcacatttaagggctc

SEQ ID NO: 51701 - DNA, 80 bp, synthetic construct; identical to SEQ ID NO: 16759
  source 1..80: mol_type = other DNA

SEQ ID NO: 51702 - DNA, 80 bp, synthetic construct
  source 1..80: mol_type = other DNA
aacatgactcactgttcacattcactagaacatacatggggttgaggggaatcgcactcatcaattgtcaagcttgctct

SEQ ID NO: 51703 - DNA, 80 bp, synthetic construct
  source 1..80: mol_type = other DNA
gaccgtcagtgtaactccctccctttatacgtgggaccactgaggttaagaaacttacaggtgaggatattcagcaagaa

SEQ ID NO: 51704 - DNA, 80 bp, synthetic construct
  source 1..80: mol_type = other DNA
ttaaagtgctcagtgaagttgatgccccaaacagccccaggtggctcaatgccaagaatgacccaacagtcaaggaagca

SEQ ID NO: 51705 - DNA, 80 bp, synthetic construct; identical to SEQ ID NO: 16760
  source 1..80: mol_type = other DNA

SEQ ID NO: 51706 - DNA, 80 bp, synthetic construct
  source 1..80: mol_type = other DNA
tcttgaggcttcatccgtcaccacaaatgctcaggcctcagaatgcccgtaattctctaaacttactcaaggaccagaag

SEQ ID NO: 51707 - DNA, 80 bp, synthetic construct
  source 1..80: mol_type = other DNA
agagctcttcctgttaagcctgcaaggccatgggcaccaagaagacagcacatcgtcagcctagcccagccaccacctac

SEQ ID NO: 51708 - DNA, 80 bp, synthetic construct; identical to SEQ ID NO: 16761
  source 1..80: mol_type = other DNA

SEQ ID NO: 51709 - DNA, 80 bp, synthetic construct
  source 1..80: mol_type = other DNA
ccattgtggctaacacggtgaaaccccatctctactaaaaatgcaaaacattagccgggcgtgttggcgggcgcctgtag

SEQ ID NO: 51710 - DNA, 80 bp, synthetic construct
  source 1..80: mol_type = other DNA
tagtgcagagctgaattaagagaaagtactgggactgggtgcagtggcgtgagcacgcctgtaagcccagcactttggga

SEQ ID NO: 51711 - DNA, 80 bp, synthetic construct
  source 1..80: mol_type = other DNA
agctggtgaggtcaaggctgcagtgaaccaagattgtgccactgcacttcagtgtgggtgacaaagtgagatcctgtctc

SEQ ID NO: 51712 - DNA, 80 bp, synthetic construct
  source 1..80: mol_type = other DNA
tgctccccagctccaactgccagacccagaggctctctggaactcagatcccagagctggcctttcaggtgtgtctggcc

SEQ ID NO: 51713 - DNA, 80 bp, synthetic construct; identical to SEQ ID NO: 16762
  source 1..80: mol_type = other DNA

SEQ ID NO: 51714 - DNA, 80 bp, synthetic construct
  source 1..80: mol_type = other DNA
agagaggacattgaccgattctcatgccagagaccagtttatcaaaacagaaagagacaaaaacctcacaaaagcatcaa

SEQ ID NO: 51715 - DNA, 80 bp, synthetic construct
  source 1..80: mol_type = other DNA
aggatacaggaactagcgagagctcctgatctgaaagctatgtgaggtgctgggaatgcttactagtttgattatggtga

SEQ ID NO: 51716 - DNA, 80 bp, synthetic construct; identical to SEQ ID NO: 16763
  source 1..80: mol_type = other DNA

SEQ ID NO: 51717 - DNA, 80 bp, synthetic construct
  source 1..80: mol_type = other DNA
tctttctttctttctttctttctttctttctttctttctttctttctttctttctttctttcctttctctctctctctct

SEQ ID NO: 51718 - DNA, 80 bp, synthetic construct
  source 1..80: mol_type = other DNA
cactgcaacctctggctcccaggttcaatcgattctcttgcttcagcctcccgagtagctggaattacaggcatgtgcca

SEQ ID NO: 51719 - DNA, 80 bp, synthetic construct
  source 1..80: mol_type = other DNA
cttatctcacagaacctccatataatactctgtgactatgaaaaagaaagaggaagaatgctgaaatgggaatgagcttg

SEQ ID NO: 51720 - DNA, 80 bp, synthetic construct
  source 1..80: mol_type = other DNA
aattgggttgaataggtgatttacttttcacttacatatcctcttaaactgttggctttttaaaaagccatattatgacg

SEQ ID NO: 51721 - DNA, 80 bp, synthetic construct; identical to SEQ ID NO: 16764
  source 1..80: mol_type = other DNA

SEQ ID NO: 51722 - DNA, 80 bp, synthetic construct
  source 1..80: mol_type = other DNA
ctgcaggcagcagagtttgaaaccatatttctgtttcatgtgctgtagctcctgatgtctagagccacagcccctgtgct

SEQ ID NO: 51723 - DNA, 80 bp, synthetic construct
  source 1..80: mol_type = other DNA
aacacatcacatagttatactttccaagttccatggtagagaaaaggaagaaaggaccatctgtcctcaaaactaagaca

SEQ ID NO: 51724 - DNA, 80 bp, synthetic construct; identical to SEQ ID NO: 16765
  source 1..80: mol_type = other DNA

SEQ ID NO: 51725 - DNA, 80 bp, synthetic construct
  source 1..80: mol_type = other DNA
gacaggccttgcttcccctttaccttccgccatgattgtaagtttctgaggcctccccatccatgcagaaccatgagtca

SEQ ID NO: 51726 - DNA, 80 bp, synthetic construct
  source 1..80: mol_type = other DNA
gactacaggcgcccgccacctcgcccggctaattttttgtatttttagtagagacggggtttcaccgtgttagccaggat

SEQ ID NO: 51727 - DNA, 80 bp, synthetic construct
  source 1..80: mol_type = other DNA
tcatatatactatggttctcatcaggaatgtaccatctctcaatccaagctagagcagcagtcaaaaacatgctttccca

SEQ ID NO: 51728 - DNA, 80 bp, synthetic construct; identical to SEQ ID NO: 16766
  source 1..80: mol_type = other DNA

SEQ ID NO: 51729 - DNA, 80 bp, synthetic construct
  source 1..80: mol_type = other DNA
tctacccaagcttctgaacattactcttggaacatccatagataaccccactcattctctttcattcacatccttgaata

SEQ ID NO: 51730 - DNA, 80 bp, synthetic construct
  source 1..80: mol_type = other DNA
ttcctggacatctgccctatttctctgcttcctttcacatcaggttgctagaagagctacaaatatcagtggggtgacct

SEQ ID NO: 51731 - DNA, 80 bp, synthetic construct
  source 1..80: mol_type = other DNA
acagagtccttatttaagcatcccaacagggaggaagaagacaagataagcaggcaaacgatgacctgtttctcatcttg

SEQ ID NO: 51732 - DNA, 80 bp, synthetic construct
  source 1..80: mol_type = other DNA
gatcatccactatatatgtcatttggaatagacctattccaaatgtttttcctcctctggctcttacttatgctttagtt

SEQ ID NO: 51733 - DNA, 80 bp, synthetic construct; identical to SEQ ID NO: 16767
  source 1..80: mol_type = other DNA

SEQ ID NO: 51734 - DNA, 80 bp, synthetic construct
  source 1..80: mol_type = other DNA
ctgtctgtcaataactatcaggaaatggtcaagcaagcttcttgagagcaaggacttggttcctgtcatctctgtgttcc

SEQ ID NO: 51735 - DNA, 80 bp, synthetic construct
  source 1..80: mol_type = other DNA
tggatgaagcaaagaaggagaagcaggcatcaggggtggaagaagaggagaaatgatgtatgtatagctgattctcatta

SEQ ID NO: 51736 - DNA, 80 bp, synthetic construct
  source 1..80: mol_type = other DNA
ttaaagatatcttattcaatagatattgttggttgagttattaacattgatcaaacagccagcagcactgttgtcctcag

SEQ ID NO: 51737 - DNA, 80 bp, synthetic construct; identical to SEQ ID NO: 16768
  source 1..80: mol_type = other DNA

SEQ ID NO: 51738 - DNA, 80 bp, synthetic construct
  source 1..80: mol_type = other DNA
atgtacatatcaaacaaaattcagaaccttgcagctgtctttcttgacagcttcagtgaccttccctcaagtttctgaac

SEQ ID NO: 51739 - DNA, 80 bp, synthetic construct
  source 1..80: mol_type = other DNA
ctttagaatgtagcagcctagcttagtcatcaagacagagacagtaaagatctaagtaaggtagactgaggacagggtaa

SEQ ID NO: 51740 - DNA, 80 bp, synthetic construct
  source 1..80: mol_type = other DNA
atcatgtgcccacaagcaacacagccactctgtcagtctgtggtgacacagattacaaacataccatccttgttcattct

SEQ ID NO: 51741 - DNA, 80 bp, synthetic construct
  source 1..80: mol_type = other DNA
gatgcatagcagtcagagccactccagtgaggaactggcctccaatgtgtcaccacccaaccagctgccacctaagattc

SEQ ID NO: 51742 - DNA, 80 bp, synthetic construct; identical to SEQ ID NO: 16769
  source 1..80: mol_type = other DNA

SEQ ID NO: 51743 - DNA, 80 bp, synthetic construct
  source 1..80: mol_type = other DNA
aagtggctggctggctggctgcgaggcttttgtttattttatgagagcatggttccatgaagggcagcagtggtgaccca

SEQ ID NO: 51744 - DNA, 80 bp, synthetic construct; identical to SEQ ID NO: 16770
  source 1..80: mol_type = other DNA

SEQ ID NO: 51745 - DNA, 80 bp, synthetic construct
  source 1..80: mol_type = other DNA
acaactggggctctagaaggcccaccctgcaggatgtgtggacctcaggcccaaggattggcaaatgcagcaacacgact

SEQ ID NO: 51746 - DNA, 80 bp, synthetic construct
  source 1..80: mol_type = other DNA
cctgaggcagagggcaggtgaatcaggagcttgtgttgacagagagaccccaagtccttgagtaagagtcccacacaagc

SEQ ID NO: 51747 - DNA, 80 bp, synthetic construct
  source 1..80: mol_type = other DNA
gaagatctgttttggctgccttctttcaggctattctctctctctctctccaatacatgccaaatgctaatttctcatga

SEQ ID NO: 51748 - DNA, 80 bp, synthetic construct; identical to SEQ ID NO: 16771
  source 1..80: mol_type = other DNA

SEQ ID NO: 51749 - DNA, 80 bp, synthetic construct
  source 1..80: mol_type = other DNA
tcttgggtgaggaagctgtgatcatcaacagggaggaggttcactctggaaggatggacacgtgggttggtgtaggaggc

SEQ ID NO: 51750 - DNA, 80 bp, synthetic construct
  source 1..80: mol_type = other DNA
catggacattgtaaggaaggagatgtgaaaaatgcaagggctcccttcatggaaacaccttgcttcttctccctcccttt

SEQ ID NO: 51751 - DNA, 80 bp, synthetic construct
  source 1..80: mol_type = other DNA
gccgccattgcctccatccctgtaagaacagcaagcaggccacggtcagagccagagtcagtgccagggccagctggcat

SEQ ID NO: 51752 - DNA, 80 bp, synthetic construct; identical to SEQ ID NO: 16772
  source 1..80: mol_type = other DNA

SEQ ID NO: 51753 - DNA, 80 bp, synthetic construct
  source 1..80: mol_type = other DNA
ctcctcctcttgagggtggggggaattgaggatttaggtgccctggtcattccagccccagctcctcacaaccataaagc

SEQ ID NO: 51754 - DNA, 80 bp, synthetic construct
  source 1..80: mol_type = other DNA
ggtttttctaaacaggcattatcatctagagatggatttcatacttgaggaaaaggagaagagacagacggaacgaaagc

SEQ ID NO: 51755 - DNA, 80 bp, synthetic construct
  source 1..80: mol_type = other DNA
tactgcctcccagttctcccaattttatctgaatcctcaaaagggtcattacaggtttcagtgacccctttgaccctagg

SEQ ID NO: 51756 - DNA, 80 bp, synthetic construct; identical to SEQ ID NO: 16773
  source 1..80: mol_type = other DNA

SEQ ID NO: 51757 - DNA, 80 bp, synthetic construct
  source 1..80: mol_type = other DNA
tatgttatcatcagtcccaaagggacagagggaatcccggtcacagacctcggagattccctaacctcatttagcttttc

SEQ ID NO: 51758 - DNA, 80 bp, synthetic construct
  source 1..80: mol_type = other DNA
ctaatgtatatataatatatacattaaatatataaatacatattaatatatattatatattaatatatattaaatatata

SEQ ID NO: 51759 - DNA, 80 bp, synthetic construct
  source 1..80: mol_type = other DNA
tcaactctggactagataaagaaaatacagtatatgtgtgtgtgtgtgtatatatatatatatacacacacatatactgt

SEQ ID NO: 51760 - DNA, 80 bp, synthetic construct; identical to SEQ ID NO: 16774
  source 1..80: mol_type = other DNA

SEQ ID NO: 51761 - DNA, 80 bp, synthetic construct
  source 1..80: mol_type = other DNA
agatgagatcggggaggggtgtgcattatatagtagcagtattctattttttgagtagtgagcatatggtatcttcttct

SEQ ID NO: 51762 - DNA, 80 bp, synthetic construct
  source 1..80: mol_type = other DNA
tgatgcctgcaggttttagaacatagcacacattcaagatgtggccagcatcccggaggcccaatatcattgtggggtaa

SEQ ID NO: 51763 - DNA, 80 bp, synthetic construct
  source 1..80: mol_type = other DNA
gaatatctgttaaatcagtcaacacatgttcagcatcacatggactcatttggagatgctatgatgcaagcgagtggaac

SEQ ID NO: 51764 - DNA, 80 bp, synthetic construct; identical to SEQ ID NO: 16775
  source 1..80: mol_type = other DNA

SEQ ID NO: 51765 - DNA, 80 bp, synthetic construct
  source 1..80: mol_type = other DNA
cttctctgaactcccacccgcaccccacacactcatgcatctcagttgcagactctgctggcccgggacccaccttgcaa

SEQ ID NO: 51766 - DNA, 80 bp, synthetic construct
  source 1..80: mol_type = other DNA
tctgtgaggtctcacagacacttcagacccaaaggcttctgaaatgaagaaggggaaaccttttatctaaggcggagcgc

SEQ ID NO: 51767 - DNA, 80 bp, synthetic construct
  source 1..80: mol_type = other DNA
atggccctccctcgaggcagggagtagcaggagcagtgggaagcggtggcggcaaccagccccaggcagaaggaaacagc

SEQ ID NO: 51768 - DNA, 80 bp, synthetic construct
  source 1..80: mol_type = other DNA
gcgggaagacggctgccccaggcagggcagaggaggtgccgcacaggagctgggaatggggcaggcttggatggcagccc

SEQ ID NO: 51769 - DNA, 80 bp, synthetic construct; identical to SEQ ID NO: 16776
  source 1..80: mol_type = other DNA

SEQ ID NO: 51770 - DNA, 80 bp, synthetic construct
  source 1..80: mol_type = other DNA
cctttaagtcagaccccagatggggtatgtctagaccccagcttttgtctttctttggagacctctgtcttccagtggcc

SEQ ID NO: 51771 - DNA, 80 bp, synthetic construct
  source 1..80: mol_type = other DNA
tgggctggcccacccccacaagaagcatgggcagtgggaggtgtctgctgaggacaggcatgctgccacgtacccccaac

SEQ ID NO: 51772 - DNA, 80 bp, synthetic construct; identical to SEQ ID NO: 16777
  source 1..80: mol_type = other DNA

SEQ ID NO: 51773 - DNA, 80 bp, synthetic construct
  source 1..80: mol_type = other DNA
caagtggtggttcctggggccaaatgaggacaggctgattgtagtgcccaactgggtccttttgcaatgacaatcatcag

SEQ ID NO: 51774 - DNA, 80 bp, synthetic construct
  source 1..80: mol_type = other DNA
ttgaatctaggtagcttagctctgagtcatttctgcaaccctaagccgtggacacctttcacttccactaagtcaggagc

SEQ ID NO: 51775 - DNA, 80 bp, synthetic construct
  source 1..80: mol_type = other DNA
cctctcctcctcactcgactttccaatagtggacggtccttttaggagagatatcctagattcagcctctaagtccaagt

SEQ ID NO: 51776 - DNA, 80 bp, synthetic construct; identical to SEQ ID NO: 16778
  source 1..80: mol_type = other DNA

SEQ ID NO: 51777 - DNA, 80 bp, synthetic construct
  source 1..80: mol_type = other DNA
acacgtctgcctgtcagcccacaccacaggcggccccatcttgcggcagcttctgttaaatgggcatccccggggccatc

SEQ ID NO: 51778 - DNA, 80 bp, synthetic construct
  source 1..80: mol_type = other DNA
caagaagtctgaccgctaatgtcttttctagctctgagagcatgcaactccaagactggaattcccatcatgagaagcac

SEQ ID NO: 51779 - DNA, 80 bp, synthetic construct
  source 1..80: mol_type = other DNA
aagaagaccttaaatgagatgaagctttctccctgatccctcattagccagatgaaccacaacattcatgcctcagtgag

SEQ ID NO: 51780 - DNA, 80 bp, synthetic construct
  source 1..80: mol_type = other DNA
tctagaaagaaatggaaagctaagctatttccccacagagtgggagacaattcttcttcttcctaaaattgccacacaca

SEQ ID NO: 51781 - DNA, 80 bp, synthetic construct; identical to SEQ ID NO: 16779
  source 1..80: mol_type = other DNA

SEQ ID NO: 51782 - DNA, 80 bp, synthetic construct
  source 1..80: mol_type = other DNA
tataaatagaacatatccaaactacttcctgccccgactgtctccccagctccttcatacacacatcttttaaatatgtg

SEQ ID NO: 51783 - DNA, 80 bp, synthetic construct
  source 1..80: mol_type = other DNA
cacagtaaaacccaagagataacattcagctctgaaaatctcaagattggaaggcaacagcaccacctagtccaatcatc

SEQ ID NO: 51784 - DNA, 80 bp, synthetic construct; identical to SEQ ID NO: 16780
  source 1..80: mol_type = other DNA

SEQ ID NO: 51785 - DNA, 80 bp, synthetic construct
  source 1..80: mol_type = other DNA
ccctgtctctactaaaaaaaagaaaaaatacaaaaattagccggctttggtggcgggtgcctgtaatcccagctactcag

SEQ ID NO: 51786 - DNA, 80 bp, synthetic construct
  source 1..80: mol_type = other DNA
gatccctttttctaagactcttagacttttctaagacactaagccctaagacacttcacttccatcagtcagaaaattat

SEQ ID NO: 51787 - DNA, 80 bp, synthetic construct
  source 1..80: mol_type = other DNA
taattttgatttagactccatcaaattcccaggtttgatcatgatccccacaagaagagtgagtaaggtggtagcacaga

SEQ ID NO: 51788 - DNA, 80 bp, synthetic construct; identical to SEQ ID NO: 16781
  source 1..80: mol_type = other DNA

SEQ ID NO: 51789 - DNA, 80 bp, synthetic construct
  source 1..80: mol_type = other DNA
gtgtattagtctgttttcacgatgctgataaagacatacctgagactgggaagagaaagaggtttaactggaattacaat

SEQ ID NO: 51790 - DNA, 80 bp, synthetic construct
  source 1..80: mol_type = other DNA
aaaactggcccccatgattcaattacctccccctgggtccctcccacaacacgtgggaattctgagggatacaattcaag

SEQ ID NO: 51791 - DNA, 80 bp, synthetic construct
  source 1..80: mol_type = other DNA
ggcagtggagcaggagatatatggcttacttagatagatttccacttcttatcaacaatttttcctgcaagctgcttttt

SEQ ID NO: 51792 - DNA, 80 bp, synthetic construct
  source 1..80: mol_type = other DNA
tggcccatttagaagctgcagttcaatctctctggttttacaactgaagaaacggaggccgtgaaagtagaaccatgggt

SEQ ID NO: 51793 - DNA, 80 bp, synthetic construct; identical to SEQ ID NO: 16782
  source 1..80: mol_type = other DNA

SEQ ID NO: 51794 - DNA, 80 bp, synthetic construct
  source 1..80: mol_type = other DNA
aagaaaaaattctaagaaagtcaataaaaacaagagaggagaagtatactcccttactgcgtggccttggacatgtcact

SEQ ID NO: 51795 - DNA, 80 bp, synthetic construct
  source 1..80: mol_type = other DNA
atgcagactgcagcaggtcctcccagcattgactacattcttacaatcaacacagagaaacaaaaatgttgctaggatca

SEQ ID NO: 51796 - DNA, 80 bp, synthetic construct; identical to SEQ ID NO: 16783
  source 1..80: mol_type = other DNA

SEQ ID NO: 51797 - DNA, 80 bp, synthetic construct
  source 1..80: mol_type = other DNA
aaacaaaaacaaaaaagcagctcaagacagcgggagaaagctgcttccaagccactcccaagcccagcttccagtgtgcc

SEQ ID NO: 51798 - DNA, 80 bp, synthetic construct
  source 1..80: mol_type = other DNA
aacactggacccatgtggcaggaccaagcaactagaacatgattcaaaaaatcagtgaaagacacatttggacaggacca

SEQ ID NO: 51799 - DNA, 80 bp, synthetic construct
  source 1..80: mol_type = other DNA
ttctgacgaccacatgagggactatttcaactgccacgagaaaccccagaaaggttattgttttgtattttacatatatg

SEQ ID NO: 51800 - DNA, 80 bp, synthetic construct; identical to SEQ ID NO: 16784
  source 1..80: mol_type = other DNA

SEQ ID NO: 51801 - DNA, 80 bp, synthetic construct
  source 1..80: mol_type = other DNA
ggtccccatctgcagctacaactcaagatgtctacagatgtggtcagtgtgacatgtgcaggagggaggggcagagggac

SEQ ID NO: 51802 - DNA, 80 bp, synthetic construct
  source 1..80: mol_type = other DNA
acgtagactcttccgcattgtgtcaaaggtcagtattcaaaccccaggtcctaccagctctgagatatttgggatccttg

SEQ ID NO: 51803 - DNA, 80 bp, synthetic construct
  source 1..80: mol_type = other DNA
gctgatctctgagtagccctcagaagggtgcctggcacaccataagctttatgtgttaactattattattataactgtac

SEQ ID NO: 51804 - DNA, 80 bp, synthetic construct; identical to SEQ ID NO: 16785
  source 1..80: mol_type = other DNA

SEQ ID NO: 51805 - DNA, 80 bp, synthetic construct
  source 1..80: mol_type = other DNA
cccatcatcaagtgctgatcctgtacctgcatctgttctcactctagtgggacctgaagcttgactacctccaggatgcc

SEQ ID NO: 51806 - DNA, 80 bp, synthetic construct
  source 1..80: mol_type = other DNA
aatggccctgccatgccccttcacctagacatggggtgggctctggctcagtgggcctggacttctggctgccccagctc

SEQ ID NO: 51807 - DNA, 80 bp, synthetic construct
  source 1..80: mol_type = other DNA
cgtctccatcttctaggttattagtgagggtggacacttcccctgtactgtgttcatgcagcttctcaggacctgggcca

SEQ ID NO: 51808 - DNA, 80 bp, synthetic construct
  source 1..80: mol_type = other DNA
gacacccctggagggccagggataggatgtggcggcatttcttcttggcctcacactgtggtggacattgactctggcct

SEQ ID NO: 51809 - DNA, 80 bp, synthetic construct; identical to SEQ ID NO: 16786
  source 1..80: mol_type = other DNA

SEQ ID NO: 51810 - DNA, 80 bp, synthetic construct
  source 1..80: mol_type = other DNA
agcactccaggcagaggatactgcacatgcaaaagctgagagcgaaagggaaagaacatgtttgggacagagaaactcat

SEQ ID NO: 51811 - DNA, 80 bp, synthetic construct
  source 1..80: mol_type = other DNA
atttattgaaactgaagagtttcagaccccattcagatccccattccaacctgaatccaccttgagtgttgtgacaacag

SEQ ID NO: 51812 - DNA, 80 bp, synthetic construct; identical to SEQ ID NO: 16787
  source 1..80: mol_type = other DNA

SEQ ID NO: 51813 - DNA, 80 bp, synthetic construct
  source 1..80: mol_type = other DNA
gatccccaaacctgcctccaccagtccactcagcccactcagcctactctgttctggtcaacaaggtcacttgctcattg

SEQ ID NO: 51814 - DNA, 80 bp, synthetic construct
  source 1..80: mol_type = other DNA
ccttgccttaccctcagagctataattgaagataaccctcttggttcaacgtttcaggccaaatatcagaatctgtctgg

SEQ ID NO: 51815 - DNA, 80 bp, synthetic construct
  source 1..80: mol_type = other DNA
ttgtttttctttggtagccagggggcaaagacagaacagatttaaaccacagggtactttccataaatgctgccccagga

SEQ ID NO: 51816 - DNA, 80 bp, synthetic construct; identical to SEQ ID NO: 16788
  source 1..80: mol_type = other DNA

SEQ ID NO: 51817 - DNA, 80 bp, synthetic construct
  source 1..80: mol_type = other DNA
actttttccagaactccccctgacctgaaaaataattctgcagctaggctggtcagtagcccaggattgaagtttaacag

SEQ ID NO: 51818 - DNA, 80 bp, synthetic construct
  source 1..80: mol_type = other DNA
catttagggcccttcccatgtccactcccttactcttgctggcaccagattttatagaggtgggaccctagtcaaggact

SEQ ID NO: 51819 - DNA, 80 bp, synthetic construct
  source 1..80: mol_type = other DNA
agaatgcaaggaagaaggagaaaacactgcgactttaccaagcctccaaaaggagattctataagactgttgtgtcagct

SEQ ID NO: 51820 - DNA, 80 bp, synthetic construct; identical to SEQ ID NO: 16789
  source 1..80: mol_type = other DNA

SEQ ID NO: 51821 - DNA, 80 bp, synthetic construct
  source 1..80: mol_type = other DNA
gagaaaggaaaggaggggaaggtattcttggaatatcttactctgaaagctttctttctaactcacaaggaagaaacact

SEQ ID NO: 51822 - DNA, 80 bp, synthetic construct
  source 1..80: mol_type = other DNA
tgtgatgtttgctgtttgccacccgtccttccccaacaccaacagtgattacacatttcattttttttaaattggctgtc

SEQ ID NO: 51823 - DNA, 80 bp, synthetic construct
  source 1..80: mol_type = other DNA
cgagaggggctgctcccatcaaccagcgtgtgctctccagtccatctcaccgggtctgcatccctccagcctcactcatg

SEQ ID NO: 51824 - DNA, 80 bp, synthetic construct; identical to SEQ ID NO: 16790
  source 1..80: mol_type = other DNA

SEQ ID NO: 51825 - DNA, 80 bp, synthetic construct
  source 1..80: mol_type = other DNA
tcttgctcaggcacctggtctacagacaaaaccatctagtgagtatatctgtgacatgttagttattgtgtggagcaggg

SEQ ID NO: 51826 - DNA, 80 bp, synthetic construct
  source 1..80: mol_type = other DNA
ggtctgactcttttctccttctccttctaggctccaaaccttcggggggctttgctaaaagacacccaacctcgaattag

SEQ ID NO: 51827 - DNA, 80 bp, synthetic construct
  source 1..80: mol_type = other DNA
tgggcagaagtcacttcctgcccctggcagaagtccggaaattcagagccgtttggaacaaagaactctgccccgaaggt

SEQ ID NO: 51828 - DNA, 80 bp, synthetic construct
  source 1..80: mol_type = other DNA
catgcactctggacttaagcctgaatttaaattctggttctgatttagtagctcaatgtctttgggcaaggaatttagcc

SEQ ID NO: 51829 - DNA, 80 bp, synthetic construct; identical to SEQ ID NO: 16791
  source 1..80: mol_type = other DNA

SEQ ID NO: 51830 - DNA, 80 bp, synthetic construct
  source 1..80: mol_type = other DNA
agccagccacattcctttgtcccatgggtggatgggtggtgaatatctggctgtttatgtggctaccaggatggtgagtg

SEQ ID NO: 51831 - DNA, 80 bp, synthetic construct
  source 1..80: mol_type = other DNA
atcctccagctaccccttgcttctcaggttaaacaagtcaaaaggccaaagaacaaggccagactctgaagagatggcca

SEQ ID NO: 51832 - DNA, 80 bp, synthetic construct; identical to SEQ ID NO: 16792
  source 1..80: mol_type = other DNA

SEQ ID NO: 51833 - DNA, 80 bp, synthetic construct
  source 1..80: mol_type = other DNA
tgtacagagtgcagcagacaggcacacacatgagccagaaattgggtccctaggtcatgaataatacaactattatagct

SEQ ID NO: 51834 - DNA, 80 bp, synthetic construct
  source 1..80: mol_type = other DNA
gcaatgctgaacatagaattccatgggaggcagcaattccaaccctaggtatgtgccctacagaaattcttgtgagtttc

SEQ ID NO: 51835 - DNA, 80 bp, synthetic construct
  source 1..80: mol_type = other DNA
aactgcagtggtgtgcatcgacatggatgaacctcagaaaactcatattgactcaaagaagagtgcatcacagagaacac

SEQ ID NO: 51836 - DNA, 80 bp, synthetic construct; identical to SEQ ID NO: 16793
  source 1..80: mol_type = other DNA

SEQ ID NO: 51837 - DNA, 80 bp, synthetic construct
  source 1..80: mol_type = other DNA
aagctaagtaaccttcacaagctcatcagctaacaaatgacagagaaaccaatttgccaaatctgagtttagtcaggtgc

SEQ ID NO: 51838 - DNA, 80 bp, synthetic construct
  source 1..80: mol_type = other DNA
ctgaatacacatgcctttcaagggcctactgtgtgccaggcacttgacttacatcatctaatcctcacacagtcctacaa

SEQ ID NO: 51839 - DNA, 80 bp, synthetic construct
  source 1..80: mol_type = other DNA
ctcagaccctgtgtttctcctgttctgccaggccactagcttctaacagcactacctaaaattttagtcatctaccaagg

SEQ ID NO: 51840 - DNA, 80 bp, synthetic construct; identical to SEQ ID NO: 16794
  source 1..80: mol_type = other DNA

SEQ ID NO: 51841 - DNA, 80 bp, synthetic construct
  source 1..80: mol_type = other DNA
ccaatgggacaatcagcacatagtaggttttcaataaagatgcctgtttgaaagattgtttcctatttgccttccagact

SEQ ID NO: 51842 - DNA, 80 bp, synthetic construct
  source 1..80: mol_type = other DNA
agtaacctttgggcagtccaagcctgttctcaggtcaacttgttcaaactagttagtacatctaacctctcagctcataa

SEQ ID NO: 51843 - DNA, 80 bp, synthetic construct
  source 1..80: mol_type = other DNA
ggcatgttgattaacctcacagagactccatttcctcatttgtaaagggaacataactggttcctacctcacaagaccta

SEQ ID NO: 51844 - DNA, 80 bp, synthetic construct
  source 1..80: mol_type = other DNA
ctcgggcctcatgggtattccacagtgcctggaatgtcccaccttgcataacacctccaagctccaggttgtcatcagaa

SEQ ID NO: 51845 - DNA, 80 bp, synthetic construct; identical to SEQ ID NO: 16795
  source 1..80: mol_type = other DNA

SEQ ID NO: 51846 - DNA, 80 bp, synthetic construct
  source 1..80: mol_type = other DNA
cccaagagatcttcacttgcacttttcatttgttggcagtgagaatgacttccttcctggcagagtaactgagagtcact

SEQ ID NO: 51847 - DNA, 80 bp, synthetic construct
  source 1..80: mol_type = other DNA
acagtttctcttccacatgtcgccacagcgggatgcaggcactgccatcaacgcctgtcacttggattgagcaagaacag

SEQ ID NO: 51848 - DNA, 80 bp, synthetic construct; identical to SEQ ID NO: 16796
  source 1..80: mol_type = other DNA

SEQ ID NO: 51849 - DNA, 80 bp, synthetic construct
  source 1..80: mol_type = other DNA
ctgtccctgtctgaggttggggtggggcaggaaaaccaaaggtgaggccagtcacaagtcaagggtgaagggaagtcaca

SEQ ID NO: 51850 - DNA, 80 bp, synthetic construct
  source 1..80: mol_type = other DNA
aaccttatcatcccctcatcactgctgtgacctctgctgagtttggagtgatgatcactagggtgattaatattccattt

SEQ ID NO: 51851 - DNA, 80 bp, synthetic construct
  source 1..80: mol_type = other DNA
tctaggagggcactgacacaggaaaaggttagggacaaatcagagggaagcaaaatgacaagcaaggccttggtggccca

SEQ ID NO: 51852 - DNA, 80 bp, synthetic construct; identical to SEQ ID NO: 16797
  source 1..80: mol_type = other DNA

SEQ ID NO: 51853 - DNA, 80 bp, synthetic construct
  source 1..80: mol_type = other DNA
attccagccaggacagcggtgcctccttaggatgtggggtaaggaatgaaacaatgggaactccctttcgtgtcttagat

SEQ ID NO: 51854 - DNA, 80 bp, synthetic construct
  source 1..80: mol_type = other DNA
gtcctctcggagcttcctctggggcttagttacaaaagagatcagttttgaggtcaaataggggaagaatactgagaaac

SEQ ID NO: 51855 - DNA, 80 bp, synthetic construct
  source 1..80: mol_type = other DNA
cattttttcccctcctttcttaccccattttctagtccctcctttagcttggtaagggtccaagtcacagctgatcaaga

SEQ ID NO: 51856 - DNA, 80 bp, synthetic construct
  source 1..80: mol_type = other DNA
gggctacttctgttcaacgatctctagcacccaaaacaaaagccagggagaaatgtgcagtcttactaccttctggtctg

SEQ ID NO: 51857 - DNA, 80 bp, synthetic construct; identical to SEQ ID NO: 16798
  source 1..80: mol_type = other DNA

SEQ ID NO: 51858 - DNA, 80 bp, synthetic construct
  source 1..80: mol_type = other DNA
agatttatcataaagccactatcccttcacggtcacctcctgctagaatcatctcatagccattccataagcactgctgt

SEQ ID NO: 51859 - DNA, 80 bp, synthetic construct
  source 1..80: mol_type = other DNA
ggaggctgactcactcaccgcacgcatagaggaggaggaggaacaagaggaggaggaggaggaggaggagaaggaggagg

SEQ ID NO: 51860 - DNA, 80 bp, synthetic construct
  source 1..80: mol_type = other DNA
cacccacagatccagggcacctcacttttcaaacagaaactactccttgagccccttcctcatttaaatgcttgcccctg

SEQ ID NO: 51861 - DNA, 80 bp, synthetic construct; identical to SEQ ID NO: 16799
  source 1..80: mol_type = other DNA

SEQ ID NO: 51862 - DNA, 80 bp, synthetic construct
  source 1..80: mol_type = other DNA
cagtgccccttagtgtcccagcctcatggcacgacagcccggacctcagtagccaagtttaccgctgagacttagactct

SEQ ID NO: 51863 - DNA, 80 bp, synthetic construct
  source 1..80: mol_type = other DNA
ccttttgacaagcagagacagcccagcacctggccccgcctctcggtcaggccccgccccggccccgccccgcccctccg

SEQ ID NO: 51864 - DNA, 80 bp, synthetic construct
  source 1..80: mol_type = other DNA
cctctgtgggacagagttgtcgatgattataggtgcggatacccgcttcagcctgtgttaatcggggatgcagcccccca

SEQ ID NO: 51865 - DNA, 80 bp, synthetic construct; identical to SEQ ID NO: 16800
  source 1..80: mol_type = other DNA

SEQ ID NO: 51866 - DNA, 80 bp, synthetic construct
  source 1..80: mol_type = other DNA
cgccccgtggcatcggcgtgaggggaaaagataaagactacctcctgagacctggaattgtggatggctgcggaaaactc

SEQ ID NO: 51867 - DNA, 80 bp, synthetic construct
  source 1..80: mol_type = other DNA
atcttctggaatagaaatgctcacaaaatcatccagcagtcgatgacctcctttagccagggaagatattgctattcgcc

SEQ ID NO: 51868 - DNA, 80 bp, synthetic construct
  source 1..80: mol_type = other DNA
ttctgagacagctatgctggactacatcataaccagcccctcacaactcaataatagggttaaaagaaatagactgagat

SEQ ID NO: 51869 - DNA, 80 bp, synthetic construct; identical to SEQ ID NO: 16801
  source 1..80: mol_type = other DNA

SEQ ID NO: 51870 - DNA, 80 bp, synthetic construct
  source 1..80: mol_type = other DNA
aggttgaacactcagaagtcacttttgtggtgcttgactggcctgacatcttgcaaataaaccttatcaaaagatggtgg

SEQ ID NO: 51871 - DNA, 80 bp, synthetic construct
  source 1..80: mol_type = other DNA
aagagtaaaaaataccgttccattgtacaactgatgtgcagagttgtcaaggtttctacagctgaggagtgtcagagcta

SEQ ID NO: 51872 - DNA, 80 bp, synthetic construct
  source 1..80: mol_type = other DNA
cttttcacagagttgaagaactcagaggttctgcgtttggcagatgggcaagattatagatgtcatcacggtccccagca

SEQ ID NO: 51873 - DNA, 80 bp, synthetic construct; identical to SEQ ID NO: 16802
  source 1..80: mol_type = other DNA

SEQ ID NO: 51874 - DNA, 80 bp, synthetic construct
  source 1..80: mol_type = other DNA
atgagattcacttctcctgtgttctgttgtaatccctaattgtctctggaccctacttctccctagccaggtacacaact

SEQ ID NO: 51875 - DNA, 80 bp, synthetic construct
  source 1..80: mol_type = other DNA
gaagttaacatttctcatattctcacttatccctgggatgggtagtggtctttattgggatgtacagattgttttttgtc

SEQ ID NO: 51876 - DNA, 80 bp, synthetic construct; identical to SEQ ID NO: 16803
  source 1..80: mol_type = other DNA

SEQ ID NO: 51877 - DNA, 80 bp, synthetic construct
  source 1..80: mol_type = other DNA
cctttttctgcagcctggccactgtcctcgaggctggctgatgctctctgcacttcttgctgtggtgtcagagctagagt

SEQ ID NO: 51878 - DNA, 80 bp, synthetic construct
  source 1..80: mol_type = other DNA
cccatctgactgtttgtttttcccttttttagggccattttccccccttaaatattttatggttatgagcacggtaggac

SEQ ID NO: 51879 - DNA, 80 bp, synthetic construct
  source 1..80: mol_type = other DNA
tatatttcctaacccaagttaagacaaaaaggatcagggatgactctccttatttatgttccagatggtaaaaatagaat

SEQ ID NO: 51880 - DNA, 80 bp, synthetic construct
  source 1..80: mol_type = other DNA
ctcaggaatatatataagttcctgatacaaaagatgttctacaatgttttctattattttctctatcctcttttccttcc

SEQ ID NO: 51881 - DNA, 80 bp, synthetic construct; identical to SEQ ID NO: 16804
  source 1..80: mol_type = other DNA

SEQ ID NO: 51882 - DNA, 80 bp, synthetic construct
  source 1..80: mol_type = other DNA
agctgcttgagaggctgaagtgggaggatcgcttgagcctaggaggtcaaggctgcagtgagctatgatcatgccactat

SEQ ID NO: 51883 - DNA, 80 bp, synthetic construct
  source 1..80: mol_type = other DNA
gaacaagtccctctcaccataggaccccctcatttagaatctggaacatgagattcacagaaatacatttgcgagaccat

SEQ ID NO: 51884 - DNA, 80 bp, synthetic construct; identical to SEQ ID NO: 16805
  source 1..80: mol_type = other DNA

SEQ ID NO: 51885 - DNA, 80 bp, synthetic construct
  source 1..80: mol_type = other DNA
ctcggggcttttggtatttgtctttcccacctgctcccacatcctcaagccccaggctgccagcctgctggcctgcacac

SEQ ID NO: 51886 - DNA, 80 bp, synthetic construct
  source 1..80: mol_type = other DNA
caagccccaaccccaaccattgagaccagcaaaatagactagaggttcagggtcctttcccatctatgattaactatggc

SEQ ID NO: 51887 - DNA, 80 bp, synthetic construct
  source 1..80: mol_type = other DNA
agtatcttgggagcaggtgaaaatggagttagtgtcacattgcagctgaagaggtcagtagagaaaagctgattattttg

SEQ ID NO: 51888 - DNA, 80 bp, synthetic construct
  source 1..80: mol_type = other DNA
agaagaacaggaaggacattccataagcagcccaggaatgcattaaacaactctcccctggggccccaactccagaaaga

SEQ ID NO: 51889 - DNA, 80 bp, synthetic construct; identical to SEQ ID NO: 16806
  source 1..80: mol_type = other DNA

SEQ ID NO: 51890 - DNA, 80 bp, synthetic construct
  source 1..80: mol_type = other DNA
tactatcattagttactatttgaagccacactacacagggtgagattcatcatcaacagtaatgagtggcttccatttca

SEQ ID NO: 51891 - DNA, 80 bp, synthetic construct
  source 1..80: mol_type = other DNA
gggtttgaaatacccctacctttgaaatataaaggaattggattggtaatctccatgtacctgacaatgtccctgtccac

SEQ ID NO: 51892 - DNA, 80 bp, synthetic construct
  source 1..80: mol_type = other DNA
caggtaattttttttgtgtgtgtgtttttagtagagatggggtttcaccatgttggccaggctggtctcaaactcctgac

SEQ ID NO: 51893 - DNA, 80 bp, synthetic construct; identical to SEQ ID NO: 16807
  source 1..80: mol_type = other DNA

SEQ ID NO: 51894 - DNA, 80 bp, synthetic construct
  source 1..80: mol_type = other DNA
tagcaaagccccttaaaactctcatggcccctggagtttcaacaagatattacttcacatctctctgattagggtggaag

SEQ ID NO: 51895 - DNA, 80 bp, synthetic construct
  source 1..80: mol_type = other DNA
tgcctctgatacacaaagccaatttatttttgcccttggcccaaaatattttagatgtagcctaatttcttggaggtcct

SEQ ID NO: 51896 - DNA, 80 bp, synthetic construct; identical to SEQ ID NO: 16808
  source 1..80: mol_type = other DNA

SEQ ID NO: 51897 - DNA, 80 bp, synthetic construct
  source 1..80: mol_type = other DNA
aactttggactgatatggtctacactttcggttgtagcagtgcaatctgggccaatagagaggctgatttgatgcctaca

SEQ ID NO: 51898 - DNA, 80 bp, synthetic construct
  source 1..80: mol_type = other DNA
tcccaaacagtatacaccctttaagtagagggcatttagagtcaagtggtgttggaaccagaacaactgacaaagatgtg

SEQ ID NO: 51899 - DNA, 80 bp, synthetic construct
  source 1..80: mol_type = other DNA
ttaaatttatcaccaggctggcaccaaagaaagaaatctgcagaactcaaaatgaagcaaaaataggaacacaggttggt

SEQ ID NO: 51900 - DNA, 80 bp, synthetic construct; identical to SEQ ID NO: 16809
  source 1..80: mol_type = other DNA

SEQ ID NO: 51901 - DNA, 80 bp, synthetic construct
  source 1..80: mol_type = other DNA
aaaaaaaaattctcaaacataaaatttaatttaaaatgatcccaggctattcctactcagataactagtggaatcaaata

SEQ ID NO: 51902 - DNA, 80 bp, synthetic construct
  source 1..80: mol_type = other DNA
gacatcaccccagtattcaaagatttgccacagatgaaatttcacagataattacagctcacagtcaaagtcacaaaaca

SEQ ID NO: 51903 - DNA, 80 bp, synthetic construct
  source 1..80: mol_type = other DNA
agaagttccaaaaatgggcaggtaacaagagactatatagatcaccaagaagactcagaaaagaaccagaagggatttct

SEQ ID NO: 51904 - DNA, 80 bp, synthetic construct
  source 1..80: mol_type = other DNA
ctacaggctcccaccaccatgcccagctaattttttggtatttttagtagagacagggtttcaccatttagccgggatgg

SEQ ID NO: 51905 - DNA, 80 bp, synthetic construct; identical to SEQ ID NO: 16810
  source 1..80: mol_type = other DNA

SEQ ID NO: 51906 - DNA, 80 bp, synthetic construct
  source 1..80: mol_type = other DNA
tgagctgcgggaagcacagtgaatccaaaaaaatgaataaagagaaattcaaatctaggaacatcataagaaacaaaaca

SEQ ID NO: 51907 - DNA, 80 bp, synthetic construct
  source 1..80: mol_type = other DNA
tacaaaaattagctgggcatggtggtgtgcgcctgtagtcccagctactctggagactgaggcaggagaatcgcttgaac

SEQ ID NO: 51908 - DNA, 80 bp, synthetic construct; identical to SEQ ID NO: 16811
  source 1..80: mol_type = other DNA

SEQ ID NO: 51909 - DNA, 80 bp, synthetic construct
  source 1..80: mol_type = other DNA
taatttaagcagaaggaaaatgatcttagattggccatctgacatgcaagaagcaatgatgaatatctttattctaagat

SEQ ID NO: 51910 - DNA, 80 bp, synthetic construct
  source 1..80: mol_type = other DNA
aatcatctgggttgtacagattggtgttaaagtattctaaaatttttgtattgtttaggaggcaggtgcaggtattgatt

SEQ ID NO: 51911 - DNA, 80 bp, synthetic construct
  source 1..80: mol_type = other DNA
tggccaatatggcaaagccccatctctactaaaaaatacaaaaattagccaggtttggtggtgcacacctgtaatcccaa

SEQ ID NO: 51912 - DNA, 80 bp, synthetic construct
  source 1..80: mol_type = other DNA
aggtcaataaaagtaaatttaaagaaaaatagaaaaatagagacccagcacttaagatggtggtagcaataaatcaaaat

SEQ ID NO: 51913 - DNA, 80 bp, synthetic construct; identical to SEQ ID NO: 16812
  source 1..80: mol_type = other DNA

SEQ ID NO: 51914 - DNA, 80 bp, synthetic construct
  source 1..80: mol_type = other DNA
catcctgattgtatccttagaccccaatttacctaaaaagaaataatgtcaaacaggataggctagatgatgctgtggta

SEQ ID NO: 51915 - DNA, 80 bp, synthetic construct
  source 1..80: mol_type = other DNA
cctgtggaaagggaaagagcatggaagatcgcatgctgcagtgaaagcatttaattgtatgtatttaattgatcagagta

SEQ ID NO: 51916 - DNA, 80 bp, synthetic construct; identical to SEQ ID NO: 16813
  source 1..80: mol_type = other DNA

SEQ ID NO: 51917 - DNA, 80 bp, synthetic construct
  source 1..80: mol_type = other DNA
gcatttactatgtggtggacattgttttatgtactctacatgtgttactcatttaagttttctgttttgaaatggggtct

SEQ ID NO: 51918 - DNA, 80 bp, synthetic construct
  source 1..80: mol_type = other DNA
gctggtcttcagcttctgagctcaagtgatccacccacctaagcctccaaaagtgctgggaccactggcatgagccaccg

SEQ ID NO: 51919 - DNA, 80 bp, synthetic construct
  source 1..80: mol_type = other DNA
cgaatgtttacattaattttttttaaagctcaaaattaatgtgctaagcatcctatttaaaaagttagggccaggtgcag

SEQ ID NO: 51920 - DNA, 80 bp, synthetic construct
  source 1..80: mol_type = other DNA
cttgggaagctgaggtgggaggataacttgagcttgggaggttgaggctgcagtgagccaaaatcatgccactgcactac

SEQ ID NO: 51921 - DNA, 80 bp, synthetic construct; identical to SEQ ID NO: 16814
  source 1..80: mol_type = other DNA

SEQ ID NO: 51922 - DNA, 80 bp, synthetic construct
  source 1..80: mol_type = other DNA
aaatcccctctataagagaattccaaatagcttacatagataccacccactcaaggaggtgaagcatcattccctactca

SEQ ID NO: 51923 - DNA, 80 bp, synthetic construct
  source 1..80: mol_type = other DNA
tgataggatatgatgaaaatgacagtctacctctatggtcttcttccctaaaacacatacttcctgtgtaactatgaaac

SEQ ID NO: 51924 - DNA, 80 bp, synthetic construct; identical to SEQ ID NO: 16815
  source 1..80: mol_type = other DNA

SEQ ID NO: 51925 - DNA, 80 bp, synthetic construct
  source 1..80: mol_type = other DNA
aacagtgtctttctatgttgcccaggctgatctcaaactcctgggctcacacagtccacctactttggcttcccaaagtg

SEQ ID NO: 51926 - DNA, 80 bp, synthetic construct
  source 1..80: mol_type = other DNA
gaaaaggggtaaactaaatgactaaccaatttgactatgtcacagtggagaatctctgctataaaaagacaatggccagg

SEQ ID NO: 51927 - DNA, 80 bp, synthetic construct
  source 1..80: mol_type = other DNA
cagatattcacaaggctgaggcaggagaatcgtttgaaccgggaggcagaggtttcagtgagctgagatcgtgaccgcaa

SEQ ID NO: 51928 - DNA, 80 bp, synthetic construct
  source 1..80: mol_type = other DNA
tagaaagatgagcagaagatttgagtaggcatttcacagtaaaggaaacacaaattatccgtaaacatatgaggggaaaa

SEQ ID NO: 51929 - DNA, 80 bp, synthetic construct; identical to SEQ ID NO: 16816
  source 1..80: mol_type = other DNA

SEQ ID NO: 51930 - DNA, 80 bp, synthetic construct
  source 1..80: mol_type = other DNA
actacaacaactcacatccacatgggtgagtctcacaaacataaaactgagaaaagaggtaagtgatggactatatacag

SEQ ID NO: 51931 - DNA, 80 bp, synthetic construct
  source 1..80: mol_type = other DNA
tgcatccccagagaccatagacagttttagggctggataagtacaagttcaaagacactgaggaaatttactagtctaaa

SEQ ID NO: 51932 - DNA, 80 bp, synthetic construct
  source 1..80: mol_type = other DNA
tatttaactgtgtgtgcaatcatagtatacctgtttgtgtatcatgtgtgtgcctcaatattcaatgataacaaacttgc

SEQ ID NO: 51933 - DNA, 80 bp, synthetic construct; identical to SEQ ID NO: 16817
  source 1..80: mol_type = other DNA

SEQ ID NO: 51934 - DNA, 80 bp, synthetic construct
  source 1..80: mol_type = other DNA
gaatcttgcccactcacaagcacccgagtcttcttattgctctgctgtttgtgttcttttcatctcaagacaagaaaaaa

SEQ ID NO: 51935 - DNA, 80 bp, synthetic construct
  source 1..80: mol_type = other DNA
ggtttaaatcttaggcctgccatttaacaactatagaacttgagctagttattaagccacttgaatctccaactttacct

SEQ ID NO: 51936 - DNA, 80 bp, synthetic construct
  source 1..80: mol_type = other DNA
gagctgagttctccctcatagtgaaatgatttcttgttaactttcctagcatgaaatggtcctttacccagatttcttac

SEQ ID NO: 51937 - DNA, 80 bp, synthetic construct; identical to SEQ ID NO: 16818
  source 1..80: mol_type = other DNA

SEQ ID NO: 51938 - DNA, 80 bp, synthetic construct
  source 1..80: mol_type = other DNA
ttcctctttttctgtcattcagccatactgactagggaacttatgtaataaaaaagccaatagtcaagaagcagattggc

SEQ ID NO: 51939 - DNA, 80 bp, synthetic construct
  source 1..80: mol_type = other DNA
tgcaatttggcttcagagctttactctgttagaacagaaattccttcaagaggatacgaacatttggagagggataatac

SEQ ID NO: 51940 - DNA, 80 bp, synthetic construct; identical to SEQ ID NO: 16819
  source 1..80: mol_type = other DNA

SEQ ID NO: 51941 - DNA, 80 bp, synthetic construct
  source 1..80: mol_type = other DNA
cacccttaccacatcactctttatggcagtctttatcactatttgaaactgtgagttttaattgtgcattatccgctctt

SEQ ID NO: 51942 - DNA, 80 bp, synthetic construct
  source 1..80: mol_type = other DNA
agcaaatctgtatcggaaccttcaagcaagagacatagtatgtggggttttccaaacctattggaactattccttgaagc

SEQ ID NO: 51943 - DNA, 80 bp, synthetic construct
  source 1..80: mol_type = other DNA
agtcgggaggacccaggaggctataaacagagcaaagatatatagataatgagagtgggaatggaaaagatcctataagt

SEQ ID NO: 51944 - DNA, 80 bp, synthetic construct
  source 1..80: mol_type = other DNA
gttcgagaccagcctggacaatatagtgggacactatctctacgaaaaatacagaaattagccgggcatggtggtgcaca

SEQ ID NO: 51945 - DNA, 80 bp, synthetic construct; identical to SEQ ID NO: 16820
  source 1..80: mol_type = other DNA

SEQ ID NO: 51946 - DNA, 80 bp, synthetic construct
  source 1..80: mol_type = other DNA
atgtctttgcaaatatgtctttttaaatgtcttaactgcttttacctgggcaggagaaaggtgaactgggaattgagaaa

SEQ ID NO: 51947 - DNA, 80 bp, synthetic construct
  source 1..80: mol_type = other DNA
aacatgatctttgcggaaataagtctccaattaaaccatgtactagctgcggaggtattatgattgagtttaaaatgcag

SEQ ID NO: 51948 - DNA, 80 bp, synthetic construct
  source 1..80: mol_type = other DNA
ttacttttttaaaaatgttaatgcatgaaaagaatgtacttccctatgtaggtcacccatctccattttcgtacctgggt

SEQ ID NO: 51949 - DNA, 80 bp, synthetic construct; identical to SEQ ID NO: 16821
  source 1..80: mol_type = other DNA

SEQ ID NO: 51950 - DNA, 80 bp, synthetic construct
  source 1..80: mol_type = other DNA
ggaattttctcatccccatcaaaaccttggtgctaaactcagggatcttgcctggttcatatctgtctgaaactgaaaac

SEQ ID NO: 51951 - DNA, 80 bp, synthetic construct
  source 1..80: mol_type = other DNA
ttagttcttgggagtagtactacctctgggagtggtgagtaataagtgcagagtctgaaactttttcaaatcaagtttga

SEQ ID NO: 51952 - DNA, 80 bp, synthetic construct
  source 1..80: mol_type = other DNA
ccctgtctccactaaatacaaaaaattagccaggcatggtggtgggtgcctgtaatcccagcttaggaggctgaggcagg

SEQ ID NO: 51953 - DNA, 80 bp, synthetic construct; identical to SEQ ID NO: 16822
  source 1..80: mol_type = other DNA

SEQ ID NO: 51954 - DNA, 80 bp, synthetic construct
  source 1..80: mol_type = other DNA
agtgcctactctcaaatacctcattaatacatcataagaggtctagtcaagagtcagtaaagctctaggacagctgttga

SEQ ID NO: 51955 - DNA, 80 bp, synthetic construct
  source 1..80: mol_type = other DNA
ctaatcacatgagccctgtaaaaccagggcattgtatctggctggtgatagaagaataagtgagagacttgaggcatgag

SEQ ID NO: 51956 - DNA, 80 bp, synthetic construct; identical to SEQ ID NO: 16823
  source 1..80: mol_type = other DNA

SEQ ID NO: 51957 - DNA, 80 bp, synthetic construct
  source 1..80: mol_type = other DNA
gatatggagcactcagagactttaggggagagcaaggggctcagtatcttcagatatatcagtgggaaaggagtggcatg

SEQ ID NO: 51958 - DNA, 80 bp, synthetic construct
  source 1..80: mol_type = other DNA
ctttttttcctttctgtttatatctacctgtatcatcttgcccttcactctttgcactgttccccttgaggtaagagaat

SEQ ID NO: 51959 - DNA, 80 bp, synthetic construct
  source 1..80: mol_type = other DNA
tcaatgtctacaaatgggaggaatggagtggaccagagcctggatgtctcatttagacagcaatggtagtgaaactctga

SEQ ID NO: 51960 - DNA, 80 bp, synthetic construct; identical to SEQ ID NO: 16824
  source 1..80: mol_type = other DNA

SEQ ID NO: 51961 - DNA, 80 bp, synthetic construct
  source 1..80: mol_type = other DNA
ggagcaaggagaaggagggagaaatacttggcctccctctcctctggccctcagatcccctgaaagtgcctcccctgctg

SEQ ID NO: 51962 - DNA, 80 bp, synthetic construct
  source 1..80: mol_type = other DNA
tcattggctttgccatgatgttgactttgccatgacctgagccatgtatgaactcaaacaagaccacttttgaccctggc

SEQ ID NO: 51963 - DNA, 80 bp, synthetic construct
  source 1..80: mol_type = other DNA
gtacagccacctcccatgacaggagaaggtttggaggaataaatgagggtatcatatgtcattgtgggagcttctggcca

SEQ ID NO: 51964 - DNA, 80 bp, synthetic construct; identical to SEQ ID NO: 16825
  source 1..80: mol_type = other DNA

SEQ ID NO: 51965 - DNA, 80 bp, synthetic construct
  source 1..80: mol_type = other DNA
ggacagagaaaggtgagaatggatccgagtgggagatgggagtgaggaacagagaataacctgaggtaagggaaccaaga

SEQ ID NO: 51966 - DNA, 80 bp, synthetic construct
  source 1..80: mol_type = other DNA
aaaaattaattttggtgaagagctgcagttagtgctattagggcagatggagcccttcagtgacccaaatcctgctacag

SEQ ID NO: 51967 - DNA, 80 bp, synthetic construct
  source 1..80: mol_type = other DNA
ttaaggaccaggtctatgactgggggcagagatgaagcagactgaagtcctcaataaagagccagaggatgtgttagcca

SEQ ID NO: 51968 - DNA, 80 bp, synthetic construct; identical to SEQ ID NO: 16826
  source 1..80: mol_type = other DNA

SEQ ID NO: 51969 - DNA, 80 bp, synthetic construct
  source 1..80: mol_type = other DNA
accacaggcgagacgcacacataggcatcattgcccaggccatccacttcctccatggctccccagggctctcagacctc

SEQ ID NO: 51970 - DNA, 80 bp, synthetic construct
  source 1..80: mol_type = other DNA
atgtccaaagacaaaccaagggctagatgtgacttagagtttattagcatcattgtcagcaagacaaagcactgtgtaca

SEQ ID NO: 51971 - DNA, 80 bp, synthetic construct
  source 1..80: mol_type = other DNA
aggagctttccctatcaacaagccagctttcagtttcctaaacccacttcattaggttcaggtgtgcccacccgccccca

SEQ ID NO: 51972 - DNA, 80 bp, synthetic construct
  source 1..80: mol_type = other DNA
ttccagagctctgtttgcctactctgagtgggactgatatctaggtgctctctgagaactcaatgtaccttctgctcccg

SEQ ID NO: 51973 - DNA, 80 bp, synthetic construct; identical to SEQ ID NO: 16827
  source 1..80: mol_type = other DNA

SEQ ID NO: 51974 - DNA, 80 bp, synthetic construct
  source 1..80: mol_type = other DNA
gaaccaaagtgaaggaagacattaccaagtgaaaagatgcctcagttcctgttttaggtgagaaggctaaagagctcctg

SEQ ID NO: 51975 - DNA, 80 bp, synthetic construct
  source 1..80: mol_type = other DNA
gggtatcattttcagtcaatgatttgtgaacatatatttttaatggggttgtctggttcctaagcacaggttatagtttc

SEQ ID NO: 51976 - DNA, 80 bp, synthetic construct; identical to SEQ ID NO: 16828
  source 1..80: mol_type = other DNA

SEQ ID NO: 51977 - DNA, 80 bp, synthetic construct
  source 1..80: mol_type = other DNA
ctgttgatgtgcctgtattgtactccctgcagactcctcaggtgctgcacaaataccagggcccttgcctcctaaccatt

SEQ ID NO: 51978 - DNA, 80 bp, synthetic construct
  source 1..80: mol_type = other DNA
aagcttacccttctgaggtgtaagctcaggctggatgggaagagagctggagactctaaacccaaccctgctatgggcag

SEQ ID NO: 51979 - DNA, 80 bp, synthetic construct
  source 1..80: mol_type = other DNA
gacattcctgccaatgagactcttcaaagcaaattcctccctagccagttatactgaagccagcataggaatctgcatat

SEQ ID NO: 51980 - DNA, 80 bp, synthetic construct; identical to SEQ ID NO: 16829
  source 1..80: mol_type = other DNA

SEQ ID NO: 51981 - DNA, 80 bp, synthetic construct
  source 1..80: mol_type = other DNA
aaccccatctctactaaaattataaaaattagccgggcatggcagtgtgtgcctgtaatcccagcaactcgggaggctaa

SEQ ID NO: 51982 - DNA, 80 bp, synthetic construct
  source 1..80: mol_type = other DNA
tacgggacacatctagggctaatagatgctggtggcagactggatgactgtacttgaagtggaagagaaaggtaaaataa

SEQ ID NO: 51983 - DNA, 80 bp, synthetic construct
  source 1..80: mol_type = other DNA
gagattcactgtgtataatgttattggatataacgtatctgctaaaggatagagattctcagactggatttcaaaagttc

SEQ ID NO: 51984 - DNA, 80 bp, synthetic construct
  source 1..80: mol_type = other DNA
aagatattatatcaggaagatataataagactaaatctgcacgcatttagcaatataggcttgaaatacactaagcaaaa

SEQ ID NO: 51985 - DNA, 80 bp, synthetic construct; identical to SEQ ID NO: 16830
  source 1..80: mol_type = other DNA

SEQ ID NO: 51986 - DNA, 80 bp, synthetic construct
  source 1..80: mol_type = other DNA
caaccaaataataatgaaaacaatacacatcaaaatttgtggatgcagtgaaaatagtttttttttttttttcctgagat

SEQ ID NO: 51987 - DNA, 80 bp, synthetic construct
  source 1..80: mol_type = other DNA
tagaaacgaggtttcactgtgttagccaggatgatctggatctcctgaccgcatgatccgcccgcctcggcctcccaaag

SEQ ID NO: 51988 - DNA, 80 bp, synthetic construct; identical to SEQ ID NO: 16831
  source 1..80: mol_type = other DNA

SEQ ID NO: 51989 - DNA, 80 bp, synthetic construct
  source 1..80: mol_type = other DNA
gctgtagcctcaacctcctaggctcaatcaatgatcctgcctcagcctcccgaggagctgggaccacaggcacaggccac

SEQ ID NO: 51990 - DNA, 80 bp, synthetic construct
  source 1..80: mol_type = other DNA
atatgatgaaagcctagaggatattaagtccataggagacaagtccccctctcccttttctgttggcgatgtggtgccca

SEQ ID NO: 51991 - DNA, 80 bp, synthetic construct
  source 1..80: mol_type = other DNA
aagtgaacagagagtcaagaattaaatgctgctatttgtcactgacgttaagaaaagaacaaaagttggctgggcacggt

SEQ ID NO: 51992 - DNA, 80 bp, synthetic construct
  source 1..80: mol_type = other DNA
aaagaattagctgggcatggtggcacatgactgtaatcccagctactggagaggctgaggcatgagaatcacttgaaccc

SEQ ID NO: 51993 - DNA, 80 bp, synthetic construct; identical to SEQ ID NO: 16832
  source 1..80: mol_type = other DNA

SEQ ID NO: 51994 - DNA, 80 bp, synthetic construct
  source 1..80: mol_type = other DNA
ttaatcttggctttcacagacacactcatacgagtcaggagcaagatcaggaacacagcaaagtttgagcatttctggct

SEQ ID NO: 51995 - DNA, 80 bp, synthetic construct
  source 1..80: mol_type = other DNA
ggcattgccaactcgatgtgaattcatatatcagatgatttcctgacatgagcatttgatgggggcgggttgggtggagt

SEQ ID NO: 51996 - DNA, 80 bp, synthetic construct
  source 1..80: mol_type = other DNA
tctggatgccccagcacagctgaaagccatgtggcctctctgggtcagggccaggagcacaagcagactagcaatcagac

SEQ ID NO: 51997 - DNA, 80 bp, synthetic construct; identical to SEQ ID NO: 16833
  source 1..80: mol_type = other DNA

SEQ ID NO: 51998 - DNA, 80 bp, synthetic construct
  source 1..80: mol_type = other DNA
gaaactgaggctcagcaaagataagaaactagggacaggcctgggacttctaactccagacctaatatgtttcatgcctt

SEQ ID NO: 51999 - DNA, 80 bp, synthetic construct
  source 1..80: mol_type = other DNA
ggcgattcacattttacatacacattaaagcttgagaagcattatttctaccacatcagaccactcctcataagcaccgg

SEQ ID NO: 52000 - DNA, 80 bp, synthetic construct
  source 1..80: mol_type = other DNA
aagcaagtccctagcagaacaaaggtaaaacccaaaatctctcttttgactcaaaactcttccattgtaactgtcctctt

SEQ ID NO: 52001 - DNA, 80 bp, synthetic construct; identical to SEQ ID NO: 16834
  source 1..80: mol_type = other DNA

SEQ ID NO: 52002 - DNA, 80 bp, synthetic construct
  source 1..80: mol_type = other DNA
agtgcacctggcaagcacaagtgcaggactttggcacttttctagttaacttgctaaatatacgtggccaaaccagatca

SEQ ID NO: 52003 - DNA, 80 bp, synthetic construct
  source 1..80: mol_type = other DNA
tttacatgtaactcagctttgttgaaatggtatgtactcagacattcatcccacaaatggtgggaaatccaggtatctaa

SEQ ID NO: 52004 - DNA, 80 bp, synthetic construct
  source 1..80: mol_type = other DNA
atgtaattcagcccatatttcttaatttctctaagatgttaccacaaaggccaggcggtgtctactgtatgtggactact

SEQ ID NO: 52005 - DNA, 80 bp, synthetic construct; identical to SEQ ID NO: 16835
  source 1..80: mol_type = other DNA

SEQ ID NO: 52006 - DNA, 80 bp, synthetic construct
  source 1..80: mol_type = other DNA
tgtgctagtgtgtacatgtgaatgtgtgtgcaagtatgggtgagagcatatgtatgtacaagtatgtgtatgtgtgactg

SEQ ID NO: 52007 - DNA, 80 bp, synthetic construct
  source 1..80: mol_type = other DNA
gtcagtcttatgagggccccaaggaggggattccctatacccagactgcatctgcttgaaaattaattaattaattgtga

SEQ ID NO: 52008 - DNA, 80 bp, synthetic construct
  source 1..80: mol_type = other DNA
ctacagtgatttgccatacatgccactgggagggacaaagttaggtaggagtttctacttcttgggcatgaaagaccgtg

SEQ ID NO: 52009 - DNA, 80 bp, synthetic construct; identical to SEQ ID NO: 16836
  source 1..80: mol_type = other DNA

SEQ ID NO: 52010 - DNA, 80 bp, synthetic construct
  source 1..80: mol_type = other DNA
tcctcctgccttacccttccaaataactgggactacaggcagcactccccaacatgcctggctatttttttttttatgtt

SEQ ID NO: 52011 - DNA, 80 bp, synthetic construct
  source 1..80: mol_type = other DNA
tgttctccagggtttagagcctccagaggagtgagggctgtagacaatgtgttcaatgtcacacatgtcacagggagacg

SEQ ID NO: 52012 - DNA, 80 bp, synthetic construct
  source 1..80: mol_type = other DNA
gggcagcactgccaagcccaggagaatcctctctctacttacctcctccagccccactagattctgacctggcttgaaca

SEQ ID NO: 52013 - DNA, 80 bp, synthetic construct; identical to SEQ ID NO: 16837
  source 1..80: mol_type = other DNA

SEQ ID NO: 52014 - DNA, 80 bp, synthetic construct
  source 1..80: mol_type = other DNA
gtgttgagctaaagttggcaagtcagaaggtcatggagaaggaagcatctgacaggttctgtctgtcaccttcaaagggc

SEQ ID NO: 52015 - DNA, 80 bp, synthetic construct
  source 1..80: mol_type = other DNA
gcctggaccccctcccaccacaccctcctcactcacctagtccagataaaatataggatacccaattgaatttgaatgtc

SEQ ID NO: 52016 - DNA, 80 bp, synthetic construct; identical to SEQ ID NO: 16838
  source 1..80: mol_type = other DNA

SEQ ID NO: 52017 - DNA, 80 bp, synthetic construct
  source 1..80: mol_type = other DNA
aagaaatcaaatagaggactgaaatagaaattagaagaggagggctggtttggacagggcagtgaggaaaacttctctgc

SEQ ID NO: 52018 - DNA, 80 bp, synthetic construct
  source 1..80: mol_type = other DNA
ggaaaagaagtttgactagtgggagctgaaagactcaagcacctggccaaggataaggggtatgagataaggctgggaaa

SEQ ID NO: 52019 - DNA, 80 bp, synthetic construct
  source 1..80: mol_type = other DNA
tgcacacacacagcacacacgcatgggcacactgaaagcttctggagaaaagatatcatgaaccgaatgctattaaaaga

SEQ ID NO: 52020 - DNA, 80 bp, synthetic construct; identical to SEQ ID NO: 16839
  source 1..80: mol_type = other DNA

SEQ ID NO: 52021 - DNA, 80 bp, synthetic construct
  source 1..80: mol_type = other DNA
ttcatggatgcattaagtcgaaatgtccgcgaggcctccaacagaagtctccaagggaactgcttctgggggtcagaact

SEQ ID NO: 52022 - DNA, 80 bp, synthetic construct
  source 1..80: mol_type = other DNA
aagcaagtgcattttttgtgggatctggtggactggacgatatattggatgtgaaaggtaaggcagcaccaaggactgca

SEQ ID NO: 52023 - DNA, 80 bp, synthetic construct
  source 1..80: mol_type = other DNA
ttcaagggaactgcttctgggggtcagaactcagaggaagaatggggtttgccaccatacagatggtgtctaaaccacag

SEQ ID NO: 52024 - DNA, 80 bp, synthetic construct
  source 1..80: mol_type = other DNA
gaagcagaagggagaagagagggcctccggagggtagtcagctgaggccgggctgctgggagaggacatgggaggcacag

SEQ ID NO: 52025 - DNA, 80 bp, synthetic construct; identical to SEQ ID NO: 16840
  source 1..80: mol_type = other DNA

SEQ ID NO: 52026 - DNA, 80 bp, synthetic construct
  source 1..80: mol_type = other DNA
gctctggaaatagaaaaccaacattggtaactgagtaactcccggagaggggtgcaaaggcactggcaaaatctgaagga

SEQ ID NO: 52027 - DNA, 80 bp, synthetic construct
  source 1..80: mol_type = other DNA
ggtccctgggaggcagagcatcgccaagaaaaggtcaggtgctcagccccaggccggcaaagtcccatttcctctaccca

SEQ ID NO: 52028 - DNA, 80 bp, synthetic construct
  source 1..80: mol_type = other DNA
ccacccttctctgaccgcgccagctgcgggtcccagctcccctcccacacccctcccgcctgcagggggcagccttgact

SEQ ID NO: 52029 - DNA, 80 bp, synthetic construct; identical to SEQ ID NO: 16841
  source 1..80: mol_type = other DNA

SEQ ID NO: 52030 - DNA, 80 bp, synthetic construct
  source 1..80: mol_type = other DNA
tgggctgcgggtgaacacaccgccctcttcctttctgcctcagtgccgctgttctccctcgccttgggccgggcccctgc

SEQ ID NO: 52031 - DNA, 80 bp, synthetic construct
  source 1..80: mol_type = other DNA
ttcagacttggctgattgatctaagaaactttattgctcagaaccttccctccctgggcaatggaaagagctttggagac

SEQ ID NO: 52032 - DNA, 80 bp, synthetic construct; identical to SEQ ID NO: 16842
  source 1..80: mol_type = other DNA

SEQ ID NO: 52033 - DNA, 80 bp, synthetic construct
  source 1..80: mol_type = other DNA
catgatgtcactgcactacctagatgccaggagctgctgggaagggtctctaaaacaagaggctccagggcagatgtggt

SEQ ID NO: 52034 - DNA, 80 bp, synthetic construct
  source 1..80: mol_type = other DNA
caatgggggtggatcacctgaggttaggagttcgagagcagcctggccaacatggcaaaaccccatctctaataaaaata

SEQ ID NO: 52035 - DNA, 80 bp, synthetic construct
  source 1..80: mol_type = other DNA
aaaaatgcccggtgaggttgactcacgcctgtaatcctagcactttgggaggccaaggcggatggatcaccaggtcaaga

SEQ ID NO: 52036 - DNA, 80 bp, synthetic construct; identical to SEQ ID NO: 16843
  source 1..80: mol_type = other DNA

SEQ ID NO: 52037 - DNA, 80 bp, synthetic construct
  source 1..80: mol_type = other DNA
gaagctcttgccattgcccagggagggaaagttctgagcaataaaatttcttaaataaatcggccaagtctgaaccatgt

SEQ ID NO: 52038 - DNA, 80 bp, synthetic construct
  source 1..80: mol_type = other DNA
cactcccttggttcctctctctgttcttatgggactagatacaaattttcctgctgagcactaaatgagacaaaagatag

SEQ ID NO: 52039 - DNA, 80 bp, synthetic construct
  source 1..80: mol_type = other DNA
cagattgcttgagaccagcctgggcaacatggcgagacaccatctctaccaaaaaaaaacaaaaacaaaaattagctggg

SEQ ID NO: 52040 - DNA, 80 bp, synthetic construct; identical to SEQ ID NO: 16844
  source 1..80: mol_type = other DNA

SEQ ID NO: 52041 - DNA, 80 bp, synthetic construct
  source 1..80: mol_type = other DNA
agccactcacctaacaatagctgtagtgtgtagaagatgcaaccgaatatgctgttggattgattgaggatgctgtcctg

SEQ ID NO: 52042 - DNA, 80 bp, synthetic construct
  source 1..80: mol_type = other DNA
ccatcctagtccaagggtcgatgatctcctggcaccgggcacctttggccacgtcaggattccatgtcactgaccctatc

SEQ ID NO: 52043 - DNA, 80 bp, synthetic construct
  source 1..80: mol_type = other DNA
tctcggctcactgaaacctccgcctcccgggttcaagcgattctcctgccttagcccccccgagtagctgggattaaggc

SEQ ID NO: 52044 - DNA, 80 bp, synthetic construct; identical to SEQ ID NO: 16845
  source 1..80: mol_type = other DNA

SEQ ID NO: 52045 - DNA, 80 bp, synthetic construct
  source 1..80: mol_type = other DNA
gaccatcgtcaatctctaccgccatcctgcctccccgcctttcctggtcaccgttattccttggcatccaattcacgtgc

SEQ ID NO: 52046 - DNA, 80 bp, synthetic construct
  source 1..80: mol_type = other DNA
gaataatcatctggcatcctggccgccctgctccgaggccccacgcctcccactcccgtgcacacctggaggagaagacg

SEQ ID NO: 52047 - DNA, 80 bp, synthetic construct
  source 1..80: mol_type = other DNA
tctccaggttccgcccgaggcgcccgcggagaaaaccagccacggagcaggggccgggcggcgaatggccgcgcccctcc

SEQ ID NO: 52048 - DNA, 80 bp, synthetic construct; identical to SEQ ID NO: 16846
  source 1..80: mol_type = other DNA

SEQ ID NO: 52049 - DNA, 80 bp, synthetic construct
  source 1..80: mol_type = other DNA
ctggcggattacctgaggtcaggagttcaagaccagcctcgccaacatggtgaaaccccatctcaactaaaaatacaaaa

SEQ ID NO: 52050 - DNA, 80 bp, synthetic construct
  source 1..80: mol_type = other DNA
aagaaaaaaaaaagtgtgttagtgtggttaacagcatttgcgcttaccctatgccaagtcctgttgtaagaattgcagca

SEQ ID NO: 52051 - DNA, 80 bp, synthetic construct
  source 1..80: mol_type = other DNA
ctttctcccatacattcacagaaccactcctttggccacacacacccttgacagtatcctaacctctctactatcatggc

SEQ ID NO: 52052 - DNA, 80 bp, synthetic construct; identical to SEQ ID NO: 16847
  source 1..80: mol_type = other DNA

SEQ ID NO: 52053 - DNA, 80 bp, synthetic construct; identical to SEQ ID NO: 16848
  source 1..80: mol_type = other DNA

SEQ ID NO: 52054 - DNA, 80 bp, synthetic construct; identical to SEQ ID NO: 16849
  source 1..80: mol_type = other DNA

SEQ ID NO: 52055 - DNA, 80 bp, synthetic construct; identical to SEQ ID NO: 8155
  source 1..80: mol_type = other DNA

SEQ ID NO: 52056 - DNA, 80 bp, synthetic construct; identical to SEQ ID NO: 16851
  source 1..80: mol_type = other DNA

SEQ ID NO: 52057 - DNA, 80 bp, synthetic construct; identical to SEQ ID NO: 16852
  source 1..80: mol_type = other DNA

SEQ ID NO: 52058 - DNA, 80 bp, synthetic construct; identical to SEQ ID NO: 8156
  source 1..80: mol_type = other DNA

SEQ ID NO: 52059 - DNA, 80 bp, synthetic construct; identical to SEQ ID NO: 16854
  source 1..80: mol_type = other DNA

SEQ ID NO: 52060 - DNA, 80 bp, synthetic construct; identical to SEQ ID NO: 16856
  source 1..80: mol_type = other DNA

SEQ ID NO: 52061 - DNA, 80 bp, synthetic construct; identical to SEQ ID NO: 16857
  source 1..80: mol_type = other DNA

SEQ ID NO: 52062 - DNA, 80 bp, synthetic construct; identical to SEQ ID NO: 8157
  source 1..80: mol_type = other DNA

SEQ ID NO: 52063 - DNA, 80 bp, synthetic construct; identical to SEQ ID NO: 16859
  source 1..80: mol_type = other DNA

SEQ ID NO: 52064 - DNA, 80 bp, synthetic construct; identical to SEQ ID NO: 16860
  source 1..80: mol_type = other DNA

SEQ ID NO: 52065 - DNA, 80 bp, synthetic construct; identical to SEQ ID NO: 8158
  source 1..80: mol_type = other DNA

SEQ ID NO: 52066 - DNA, 80 bp, synthetic construct; identical to SEQ ID NO: 16862
  source 1..80: mol_type = other DNA

SEQ ID NO: 52067 - DNA, 80 bp, synthetic construct; identical to SEQ ID NO: 16863
  source 1..80: mol_type = other DNA

SEQ ID NO: 52068 - DNA, 80 bp, synthetic construct; identical to SEQ ID NO: 16864
  source 1..80: mol_type = other DNA

SEQ ID NO: 52069 - DNA, 80 bp, synthetic construct; identical to SEQ ID NO: 16865
  source 1..80: mol_type = other DNA

SEQ ID NO: 52070 - DNA, 80 bp, synthetic construct; identical to SEQ ID NO: 8159
  source 1..80: mol_type = other DNA

SEQ ID NO: 52071 - DNA, 80 bp, synthetic construct; identical to SEQ ID NO: 16867
  source 1..80: mol_type = other DNA

SEQ ID NO: 52072 - DNA, 80 bp, synthetic construct; identical to SEQ ID NO: 16868
  source 1..80: mol_type = other DNA

SEQ ID NO: 52073 - DNA, 80 bp, synthetic construct; identical to SEQ ID NO: 16869
  source 1..80: mol_type = other DNA

SEQ ID NO: 52074 - DNA, 80 bp, synthetic construct; identical to SEQ ID NO: 8160
  source 1..80: mol_type = other DNA

SEQ ID NO: 52075 - DNA, 80 bp, synthetic construct; identical to SEQ ID NO: 16871
  source 1..80: mol_type = other DNA

SEQ ID NO: 52076 - DNA, 80 bp, synthetic construct; identical to SEQ ID NO: 16872
  source 1..80: mol_type = other DNA

SEQ ID NO: 52077 - DNA, 80 bp, synthetic construct; identical to SEQ ID NO: 8161
  source 1..80: mol_type = other DNA

SEQ ID NO: 52078 - DNA, 80 bp, synthetic construct; identical to SEQ ID NO: 16874
  source 1..80: mol_type = other DNA

SEQ ID NO: 52079 - DNA, 80 bp, synthetic construct; identical to SEQ ID NO: 16875
  source 1..80: mol_type = other DNA

SEQ ID NO: 52080 - DNA, 80 bp, synthetic construct; identical to SEQ ID NO: 16876
  source 1..80: mol_type = other DNA

SEQ ID NO: 52081 - DNA, 80 bp, synthetic construct; identical to SEQ ID NO: 8162
  source 1..80: mol_type = other DNA

SEQ ID NO: 52082 - DNA, 80 bp, synthetic construct; identical to SEQ ID NO: 16878
  source 1..80: mol_type = other DNA

SEQ ID NO: 52083 - DNA, 80 bp, synthetic construct; identical to SEQ ID NO: 16879
  source 1..80: mol_type = other DNA

SEQ ID NO: 52084 - DNA, 80 bp, synthetic construct; identical to SEQ ID NO: 16880
  source 1..80: mol_type = other DNA

SEQ ID NO: 52085 - DNA, 80 bp, synthetic construct; identical to SEQ ID NO: 16881
  source 1..80: mol_type = other DNA

SEQ ID NO: 52086 - DNA, 80 bp, synthetic construct; identical to SEQ ID NO: 8163
  source 1..80: mol_type = other DNA

SEQ ID NO: 52087 - DNA, 80 bp, synthetic construct; identical to SEQ ID NO: 16883
  source 1..80: mol_type = other DNA

SEQ ID NO: 52088 - DNA, 80 bp, synthetic construct; identical to SEQ ID NO: 16884
  source 1..80: mol_type = other DNA

SEQ ID NO: 52089 - DNA, 80 bp, synthetic construct; identical to SEQ ID NO: 8164
  source 1..80: mol_type = other DNA

SEQ ID NO: 52090 - DNA, 80 bp, synthetic construct; identical to SEQ ID NO: 16886
  source 1..80: mol_type = other DNA

SEQ ID NO: 52091 - DNA, 80 bp, synthetic construct; identical to SEQ ID NO: 16887
  source 1..80: mol_type = other DNA

SEQ ID NO: 52092 - DNA, 80 bp, synthetic construct; identical to SEQ ID NO: 16888
  source 1..80: mol_type = other DNA

SEQ ID NO: 52093 - DNA, 80 bp, synthetic construct; identical to SEQ ID NO: 16889
  source 1..80: mol_type = other DNA

SEQ ID NO: 52094 - DNA, 80 bp, synthetic construct; identical to SEQ ID NO: 8165
  source 1..80: mol_type = other DNA

SEQ ID NO: 52095 - DNA, 80 bp, synthetic construct; identical to SEQ ID NO: 16891
  source 1..80: mol_type = other DNA

SEQ ID NO: 52096 - DNA, 80 bp, synthetic construct; identical to SEQ ID NO: 16892
  source 1..80: mol_type = other DNA

SEQ ID NO: 52097 - DNA, 80 bp, synthetic construct; identical to SEQ ID NO: 8166
  source 1..80: mol_type = other DNA

SEQ ID NO: 52098 - DNA, 80 bp, synthetic construct; identical to SEQ ID NO: 16894
  source 1..80: mol_type = other DNA

SEQ ID NO: 52099 - DNA, 80 bp, synthetic construct; identical to SEQ ID NO: 16895
  source 1..80: mol_type = other DNA

SEQ ID NO: 52100 - DNA, 80 bp, synthetic construct; identical to SEQ ID NO: 16896
  source 1..80: mol_type = other DNA

SEQ ID NO: 52101 - DNA, 80 bp, synthetic construct; identical to SEQ ID NO: 16897
  source 1..80: mol_type = other DNA

SEQ ID NO: 52102 - DNA, 80 bp, synthetic construct; identical to SEQ ID NO: 8167
  source 1..80: mol_type = other DNA

SEQ ID NO: 52103 - DNA, 80 bp, synthetic construct; identical to SEQ ID NO: 16899
  source 1..80: mol_type = other DNA

SEQ ID NO: 52104 - DNA, 80 bp, synthetic construct; identical to SEQ ID NO: 16900
  source 1..80: mol_type = other DNA

SEQ ID NO: 52105 - DNA, 80 bp, synthetic construct; identical to SEQ ID NO: 8168
  source 1..80: mol_type = other DNA

SEQ ID NO: 52106 - DNA, 80 bp, synthetic construct; identical to SEQ ID NO: 16902
  source 1..80: mol_type = other DNA

SEQ ID NO: 52107 - DNA, 80 bp, synthetic construct; identical to SEQ ID NO: 16903
  source 1..80: mol_type = other DNA

SEQ ID NO: 52108 - DNA, 80 bp, synthetic construct; identical to SEQ ID NO: 8169
  source 1..80: mol_type = other DNA

SEQ ID NO: 52109 - DNA, 80 bp, synthetic construct; identical to SEQ ID NO: 16905
  source 1..80: mol_type = other DNA

SEQ ID NO: 52110 - DNA, 80 bp, synthetic construct; identical to SEQ ID NO: 16906
  source 1..80: mol_type = other DNA

SEQ ID NO: 52111 - DNA, 80 bp, synthetic construct; identical to SEQ ID NO: 16907
  source 1..80: mol_type = other DNA

SEQ ID NO: 52112 - DNA, 80 bp, synthetic construct; identical to SEQ ID NO: 8170
  source 1..80: mol_type = other DNA

SEQ ID NO: 52113 - DNA, 80 bp, synthetic construct; identical to SEQ ID NO: 16909
  source 1..80: mol_type = other DNA

SEQ ID NO: 52114 - DNA, 80 bp, synthetic construct; identical to SEQ ID NO: 16910
  source 1..80: mol_type = other DNA

SEQ ID NO: 52115 - DNA, 80 bp, synthetic construct; identical to SEQ ID NO: 16911
  source 1..80: mol_type = other DNA

SEQ ID NO: 52116 - DNA, 80 bp, synthetic construct; identical to SEQ ID NO: 16912
  source 1..80: mol_type = other DNA

SEQ ID NO: 52117 - DNA, 80 bp, synthetic construct; identical to SEQ ID NO: 8171
  source 1..80: mol_type = other DNA

SEQ ID NO: 52118 - DNA, 80 bp, synthetic construct; identical to SEQ ID NO: 16914
  source 1..80: mol_type = other DNA

SEQ ID NO: 52119 - DNA, 80 bp, synthetic construct; identical to SEQ ID NO: 16915
  source 1..80: mol_type = other DNA

SEQ ID NO: 52120 - DNA, 80 bp, synthetic construct; identical to SEQ ID NO: 16916
  source 1..80: mol_type = other DNA

SEQ ID NO: 52121 - DNA, 80 bp, synthetic construct; identical to SEQ ID NO: 8172
  source 1..80: mol_type = other DNA

SEQ ID NO: 52122 - DNA, 80 bp, synthetic construct; identical to SEQ ID NO: 16918
  source 1..80: mol_type = other DNA

SEQ ID NO: 52123 - DNA, 80 bp, synthetic construct; identical to SEQ ID NO: 16919
  source 1..80: mol_type = other DNA

SEQ ID NO: 52124 - DNA, 80 bp, synthetic construct; identical to SEQ ID NO: 16920
  source 1..80: mol_type = other DNA

SEQ ID NO: 52125 - DNA, 80 bp, synthetic construct; identical to SEQ ID NO: 8173
  source 1..80: mol_type = other DNA

SEQ ID NO: 52126 - DNA, 80 bp, synthetic construct; identical to SEQ ID NO: 16922
  source 1..80: mol_type = other DNA

SEQ ID NO: 52127 - DNA, 80 bp, synthetic construct; identical to SEQ ID NO: 16923
  source 1..80: mol_type = other DNA

SEQ ID NO: 52128 - DNA, 80 bp, synthetic construct; identical to SEQ ID NO: 8174
  source 1..80: mol_type = other DNA

SEQ ID NO: 52129 - DNA, 80 bp, synthetic construct; identical to SEQ ID NO: 16925
  source 1..80: mol_type = other DNA

SEQ ID NO: 52130 - DNA, 80 bp, synthetic construct; identical to SEQ ID NO: 16926
  source 1..80: mol_type = other DNA

SEQ ID NO: 52131 - DNA, 80 bp, synthetic construct; identical to SEQ ID NO: 16927
  source 1..80: mol_type = other DNA

SEQ ID NO: 52132 - DNA, 80 bp, synthetic construct; identical to SEQ ID NO: 16928
  source 1..80: mol_type = other DNA

SEQ ID NO: 52133 - DNA, 80 bp, synthetic construct; identical to SEQ ID NO: 8175
  source 1..80: mol_type = other DNA

SEQ ID NO: 52134 - DNA, 80 bp, synthetic construct; identical to SEQ ID NO: 16930
  source 1..80: mol_type = other DNA

SEQ ID NO: 52135 - DNA, 80 bp, synthetic construct; identical to SEQ ID NO: 16931
  source 1..80: mol_type = other DNA

SEQ ID NO: 52136 - DNA, 80 bp, synthetic construct; identical to SEQ ID NO: 16932
  source 1..80: mol_type = other DNA

SEQ ID NO: 52137 - DNA, 80 bp, synthetic construct; identical to SEQ ID NO: 8176
  source 1..80: mol_type = other DNA

SEQ ID NO: 52138 - DNA, 80 bp, synthetic construct; identical to SEQ ID NO: 16934
  source 1..80: mol_type = other DNA

SEQ ID NO: 52139 - DNA, 80 bp, synthetic construct; identical to SEQ ID NO: 16935
  source 1..80: mol_type = other DNA

SEQ ID NO: 52140 - DNA, 80 bp, synthetic construct; identical to SEQ ID NO: 16936
  source 1..80: mol_type = other DNA

SEQ ID NO: 52141 - DNA, 80 bp, synthetic construct; identical to SEQ ID NO: 8177
  source 1..80: mol_type = other DNA

SEQ ID NO: 52142 - DNA, 80 bp, synthetic construct; identical to SEQ ID NO: 16939
  source 1..80: mol_type = other DNA

SEQ ID NO: 52143 - DNA, 80 bp, synthetic construct; identical to SEQ ID NO: 8178
  source 1..80: mol_type = other DNA

SEQ ID NO: 52144 - DNA, 80 bp, synthetic construct; identical to SEQ ID NO: 16941
  source 1..80: mol_type = other DNA

SEQ ID NO: 52145 - DNA, 80 bp, synthetic construct; identical to SEQ ID NO: 16942
  source 1..80: mol_type = other DNA

SEQ ID NO: 52146 - DNA, 80 bp, synthetic construct; identical to SEQ ID NO: 16944
  source 1..80: mol_type = other DNA

SEQ ID NO: 52147 - DNA, 80 bp, synthetic construct; identical to SEQ ID NO: 8179
  source 1..80: mol_type = other DNA

SEQ ID NO: 52148 - DNA, 80 bp, synthetic construct; identical to SEQ ID NO: 16946
  source 1..80: mol_type = other DNA

SEQ ID NO: 52149 - DNA, 80 bp, synthetic construct; identical to SEQ ID NO: 16948
  source 1..80: mol_type = other DNA

SEQ ID NO: 52150 - DNA, 80 bp, synthetic construct; identical to SEQ ID NO: 8180
  source 1..80: mol_type = other DNA

SEQ ID NO: 52151 - DNA, 80 bp, synthetic construct; identical to SEQ ID NO: 16950
  source 1..80: mol_type = other DNA

SEQ ID NO: 52152 - DNA, 80 bp, synthetic construct; identical to SEQ ID NO: 16951
  source 1..80: mol_type = other DNA

SEQ ID NO: 52153 - DNA, 80 bp, synthetic construct; identical to SEQ ID NO: 16952
  source 1..80: mol_type = other DNA

SEQ ID NO: 52154 - DNA, 80 bp, synthetic construct; identical to SEQ ID NO: 8181
  source 1..80: mol_type = other DNA

SEQ ID NO: 52155 - DNA, 80 bp, synthetic construct; identical to SEQ ID NO: 16954
  source 1..80: mol_type = other DNA

SEQ ID NO: 52156 - DNA, 80 bp, synthetic construct; identical to SEQ ID NO: 16955
  source 1..80: mol_type = other DNA

SEQ ID NO: 52157 - DNA, 80 bp, synthetic construct; identical to SEQ ID NO: 16956
  source 1..80: mol_type = other DNA

SEQ ID NO: 52158 - DNA, 80 bp, synthetic construct; identical to SEQ ID NO: 8182
  source 1..80: mol_type = other DNA

SEQ ID NO: 52159 - DNA, 80 bp, synthetic construct; identical to SEQ ID NO: 16958
  source 1..80: mol_type = other DNA

SEQ ID NO: 52160 - DNA, 80 bp, synthetic construct; identical to SEQ ID NO: 16959
  source 1..80: mol_type = other DNA

SEQ ID NO: 52161 - DNA, 80 bp, synthetic construct; identical to SEQ ID NO: 8183
  source 1..80: mol_type = other DNA

SEQ ID NO: 52162 - DNA, 80 bp, synthetic construct; identical to SEQ ID NO: 16961
  source 1..80: mol_type = other DNA

SEQ ID NO: 52163 - DNA, 80 bp, synthetic construct; identical to SEQ ID NO: 16962
  source 1..80: mol_type = other DNA

SEQ ID NO: 52164 - DNA, 80 bp, synthetic construct; identical to SEQ ID NO: 16963
  source 1..80: mol_type = other DNA

SEQ ID NO: 52165 - DNA, 80 bp, synthetic construct; identical to SEQ ID NO: 8184
  source 1..80: mol_type = other DNA

SEQ ID NO: 52166 - DNA, 80 bp, synthetic construct; identical to SEQ ID NO: 16965
  source 1..80: mol_type = other DNA

SEQ ID NO: 52167 - DNA, 80 bp, synthetic construct; identical to SEQ ID NO: 16966
  source 1..80: mol_type = other DNA

SEQ ID NO: 52168 - DNA, 80 bp, synthetic construct; identical to SEQ ID NO: 16967
  source 1..80: mol_type = other DNA

SEQ ID NO: 52169 - DNA, 80 bp, synthetic construct; identical to SEQ ID NO: 8185
  source 1..80: mol_type = other DNA

SEQ ID NO: 52170 - DNA, 80 bp, synthetic construct; identical to SEQ ID NO: 16969
  source 1..80: mol_type = other DNA

SEQ ID NO: 52171 - DNA, 80 bp, synthetic construct; identical to SEQ ID NO: 16970
  source 1..80: mol_type = other DNA

SEQ ID NO: 52172 - DNA, 80 bp, synthetic construct; identical to SEQ ID NO: 16971
  source 1..80: mol_type = other DNA

SEQ ID NO: 52173 - DNA, 80 bp, synthetic construct; identical to SEQ ID NO: 16972
  source 1..80: mol_type = other DNA

SEQ ID NO: 52174 - DNA, 80 bp, synthetic construct; identical to SEQ ID NO: 8186
  source 1..80: mol_type = other DNA

SEQ ID NO: 52175 - DNA, 80 bp, synthetic construct; identical to SEQ ID NO: 16974
  source 1..80: mol_type = other DNA

SEQ ID NO: 52176 - DNA, 80 bp, synthetic construct; identical to SEQ ID NO: 16975
  source 1..80: mol_type = other DNA

SEQ ID NO: 52177 - DNA, 80 bp, synthetic construct; identical to SEQ ID NO: 8187
  source 1..80: mol_type = other DNA

SEQ ID NO: 52178 - DNA, 80 bp, synthetic construct; identical to SEQ ID NO: 16977
  source 1..80: mol_type = other DNA

SEQ ID NO: 52179 - DNA, 80 bp, synthetic construct; identical to SEQ ID NO: 16978
  source 1..80: mol_type = other DNA

SEQ ID NO: 52180 - DNA, 80 bp, synthetic construct; identical to SEQ ID NO: 16979
  source 1..80: mol_type = other DNA

SEQ ID NO: 52181 - DNA, 80 bp, synthetic construct; identical to SEQ ID NO: 16980
  source 1..80: mol_type = other DNA

SEQ ID NO: 52182 - DNA, 80 bp, synthetic construct; identical to SEQ ID NO: 8188
  source 1..80: mol_type = other DNA

SEQ ID NO: 52183 - DNA, 80 bp, synthetic construct; identical to SEQ ID NO: 16982
  source 1..80: mol_type = other DNA

SEQ ID NO: 52184 - DNA, 80 bp, synthetic construct; identical to SEQ ID NO: 16983
  source 1..80: mol_type = other DNA

SEQ ID NO: 52185 - DNA, 80 bp, synthetic construct; identical to SEQ ID NO: 16984
  source 1..80: mol_type = other DNA

SEQ ID NO: 52186 - DNA, 80 bp, synthetic construct; identical to SEQ ID NO: 8189
  source 1..80: mol_type = other DNA

SEQ ID NO: 52187 - DNA, 80 bp, synthetic construct; identical to SEQ ID NO: 16986
  source 1..80: mol_type = other DNA

SEQ ID NO: 52188 - DNA, 80 bp, synthetic construct; identical to SEQ ID NO: 16987
  source 1..80: mol_type = other DNA

SEQ ID NO: 52189 - DNA, 80 bp, synthetic construct; identical to SEQ ID NO: 16988
  source 1..80: mol_type = other DNA

SEQ ID NO: 52190 - DNA, 80 bp, synthetic construct; identical to SEQ ID NO: 8190
  source 1..80: mol_type = other DNA

SEQ ID NO: 52191 - DNA, 80 bp, synthetic construct; identical to SEQ ID NO: 16990
  source 1..80: mol_type = other DNA

SEQ ID NO: 52192 - DNA, 80 bp, synthetic construct; identical to SEQ ID NO: 16991
  source 1..80: mol_type = other DNA

SEQ ID NO: 52193 - DNA, 80 bp, synthetic construct; identical to SEQ ID NO: 8191
  source 1..80: mol_type = other DNA

SEQ ID NO: 52194 - DNA, 80 bp, synthetic construct; identical to SEQ ID NO: 16993
  source 1..80: mol_type = other DNA

SEQ ID NO: 52195 - DNA, 80 bp, synthetic construct; identical to SEQ ID NO: 16994
  source 1..80: mol_type = other DNA

SEQ ID NO: 52196 - DNA, 80 bp, synthetic construct; identical to SEQ ID NO: 16995
  source 1..80: mol_type = other DNA

SEQ ID NO: 52197 - DNA, 80 bp, synthetic construct; identical to SEQ ID NO: 8192
  source 1..80: mol_type = other DNA

SEQ ID NO: 52198 - DNA, 80 bp, synthetic construct; identical to SEQ ID NO: 16997
  source 1..80: mol_type = other DNA

SEQ ID NO: 52199 - DNA, 80 bp, synthetic construct; identical to SEQ ID NO: 16998
  source 1..80: mol_type = other DNA

SEQ ID NO: 52200 - DNA, 80 bp, synthetic construct; identical to SEQ ID NO: 16999
  source 1..80: mol_type = other DNA

SEQ ID NO: 52201 - DNA, 80 bp, synthetic construct; identical to SEQ ID NO: 8193
  source 1..80: mol_type = other DNA

SEQ ID NO: 52202 - DNA, 80 bp, synthetic construct; identical to SEQ ID NO: 17001
  source 1..80: mol_type = other DNA

SEQ ID NO: 52203 - DNA, 80 bp, synthetic construct; identical to SEQ ID NO: 17002
  source 1..80: mol_type = other DNA

SEQ ID NO: 52204 - DNA, 80 bp, synthetic construct; identical to SEQ ID NO: 17003
  source 1..80: mol_type = other DNA

SEQ ID NO: 52205 - DNA, 80 bp, synthetic construct; identical to SEQ ID NO: 17004
  source 1..80: mol_type = other DNA

SEQ ID NO: 52206 - DNA, 80 bp, synthetic construct; identical to SEQ ID NO: 8194
  source 1..80: mol_type = other DNA

SEQ ID NO: 52207 - DNA, 80 bp, synthetic construct; identical to SEQ ID NO: 17006
  source 1..80: mol_type = other DNA

SEQ ID NO: 52208 - DNA, 80 bp, synthetic construct; identical to SEQ ID NO: 17007
  source 1..80: mol_type = other DNA

SEQ ID NO: 52209 - DNA, 80 bp, synthetic construct; identical to SEQ ID NO: 8195
  source 1..80: mol_type = other DNA

SEQ ID NO: 52210 - DNA, 80 bp, synthetic construct; identical to SEQ ID NO: 17009
  source 1..80: mol_type = other DNA

SEQ ID NO: 52211 - DNA, 80 bp, synthetic construct; identical to SEQ ID NO: 17010
  source 1..80: mol_type = other DNA

SEQ ID NO: 52212 - DNA, 80 bp, synthetic construct; identical to SEQ ID NO: 17011
  source 1..80: mol_type = other DNA

SEQ ID NO: 52213 - DNA, 80 bp, synthetic construct; identical to SEQ ID NO: 17012
  source 1..80: mol_type = other DNA

SEQ ID NO: 52214 - DNA, 80 bp, synthetic construct; identical to SEQ ID NO: 8196
  source 1..80: mol_type = other DNA

SEQ ID NO: 52215 - DNA, 80 bp, synthetic construct; identical to SEQ ID NO: 17014
  source 1..80: mol_type = other DNA

SEQ ID NO: 52216 - DNA, 80 bp, synthetic construct; identical to SEQ ID NO: 17015
  source 1..80: mol_type = other DNA

SEQ ID NO: 52217 - DNA, 80 bp, synthetic construct; identical to SEQ ID NO: 17016
  source 1..80: mol_type = other DNA

SEQ ID NO: 52218 - DNA, 80 bp, synthetic construct; identical to SEQ ID NO: 8197
  source 1..80: mol_type = other DNA

SEQ ID NO: 52219 - DNA, 80 bp, synthetic construct; identical to SEQ ID NO: 17018
  source 1..80: mol_type = other DNA

SEQ ID NO: 52220 - DNA, 80 bp, synthetic construct; identical to SEQ ID NO: 17019
  source 1..80: mol_type = other DNA

SEQ ID NO: 52221 - DNA, 80 bp, synthetic construct; identical to SEQ ID NO: 17020
  source 1..80: mol_type = other DNA

SEQ ID NO: 52222 - DNA, 80 bp, synthetic construct; identical to SEQ ID NO: 8198
  source 1..80: mol_type = other DNA

SEQ ID NO: 52223 - DNA, 80 bp, synthetic construct; identical to SEQ ID NO: 17022
  source 1..80: mol_type = other DNA

SEQ ID NO: 52224 - DNA, 80 bp, synthetic construct; identical to SEQ ID NO: 17023
  source 1..80: mol_type = other DNA

SEQ ID NO: 52225 - DNA, 80 bp, synthetic construct; identical to SEQ ID NO: 17024
  source 1..80: mol_type = other DNA

SEQ ID NO: 52226 - DNA, 80 bp, synthetic construct; identical to SEQ ID NO: 8199
  source 1..80: mol_type = other DNA

SEQ ID NO: 52227 - DNA, 80 bp, synthetic construct; identical to SEQ ID NO: 17026
  source 1..80: mol_type = other DNA

SEQ ID NO: 52228 - DNA, 80 bp, synthetic construct; identical to SEQ ID NO: 17027
  source 1..80: mol_type = other DNA

SEQ ID NO: 52229 - DNA, 80 bp, synthetic construct; identical to SEQ ID NO: 8200
  source 1..80: mol_type = other DNA

SEQ ID NO: 52230 - DNA, 80 bp, synthetic construct; identical to SEQ ID NO: 17029
  source 1..80: mol_type = other DNA

SEQ ID NO: 52231 - DNA, 80 bp, synthetic construct; identical to SEQ ID NO: 17030
  source 1..80: mol_type = other DNA

SEQ ID NO: 52232 - DNA, 80 bp, synthetic construct; identical to SEQ ID NO: 17031
  source 1..80: mol_type = other DNA

SEQ ID NO: 52233 - DNA, 80 bp, synthetic construct; identical to SEQ ID NO: 8201
  source 1..80: mol_type = other DNA

SEQ ID NO: 52234 - DNA, 80 bp, synthetic construct; identical to SEQ ID NO: 17033
  source 1..80: mol_type = other DNA

SEQ ID NO: 52235 - DNA, 80 bp, synthetic construct; identical to SEQ ID NO: 17034
  source 1..80: mol_type = other DNA

SEQ ID NO: 52236 - DNA, 80 bp, synthetic construct; identical to SEQ ID NO: 17035
  source 1..80: mol_type = other DNA

SEQ ID NO: 52237 - DNA, 80 bp, synthetic construct; identical to SEQ ID NO: 8202
  source 1..80: mol_type = other DNA

SEQ ID NO: 52238 - DNA, 80 bp, synthetic construct; identical to SEQ ID NO: 17037
  source 1..80: mol_type = other DNA

SEQ ID NO: 52239 - DNA, 80 bp, synthetic construct; identical to SEQ ID NO: 17039
  source 1..80: mol_type = other DNA

SEQ ID NO: 52240 - DNA, 80 bp, synthetic construct; identical to SEQ ID NO: 17040
  source 1..80: mol_type = other DNA

SEQ ID NO: 52241 - DNA, 80 bp, synthetic construct; identical to SEQ ID NO: 8203
  source 1..80: mol_type = other DNA

SEQ ID NO: 52242 - DNA, 80 bp, synthetic construct; identical to SEQ ID NO: 17042
  source 1..80: mol_type = other DNA

SEQ ID NO: 52243 - DNA, 80 bp, synthetic construct; identical to SEQ ID NO: 17043
  source 1..80: mol_type = other DNA

SEQ ID NO: 52244 - DNA, 80 bp, synthetic construct; identical to SEQ ID NO: 17044
  source 1..80: mol_type = other DNA

SEQ ID NO: 52245 - DNA, 80 bp, synthetic construct; identical to SEQ ID NO: 8204
  source 1..80: mol_type = other DNA

SEQ ID NO: 52246 - DNA, 80 bp, synthetic construct; identical to SEQ ID NO: 17046
  source 1..80: mol_type = other DNA

SEQ ID NO: 52247 - DNA, 80 bp, synthetic construct; identical to SEQ ID NO: 17047
  source 1..80: mol_type = other DNA

SEQ ID NO: 52248 - DNA, 80 bp, synthetic construct; identical to SEQ ID NO: 17048
  source 1..80: mol_type = other DNA

SEQ ID NO: 52249 - DNA, 80 bp, synthetic construct; identical to SEQ ID NO: 8205
  source 1..80: mol_type = other DNA

SEQ ID NO: 52250 - DNA, 80 bp, synthetic construct; identical to SEQ ID NO: 17050
  source 1..80: mol_type = other DNA

SEQ ID NO: 52251 - DNA, 80 bp, synthetic construct; identical to SEQ ID NO: 17051
  source 1..80: mol_type = other DNA

SEQ ID NO: 52252 - DNA, 80 bp, synthetic construct; identical to SEQ ID NO: 8206
  source 1..80: mol_type = other DNA

SEQ ID NO: 52253 - DNA, 80 bp, synthetic construct; identical to SEQ ID NO: 17053
  source 1..80: mol_type = other DNA

SEQ ID NO: 52254 - DNA, 80 bp, synthetic construct; identical to SEQ ID NO: 17054
  source 1..80: mol_type = other DNA

SEQ ID NO: 52255 - DNA, 80 bp, synthetic construct; identical to SEQ ID NO: 17055
  source 1..80: mol_type = other DNA

SEQ ID NO: 52256 - DNA, 80 bp, synthetic construct; identical to SEQ ID NO: 8207
  source 1..80: mol_type = other DNA

SEQ ID NO: 52257 - DNA, 80 bp, synthetic construct; identical to SEQ ID NO: 17057
  source 1..80: mol_type = other DNA

SEQ ID NO: 52258 - DNA, 80 bp, synthetic construct; identical to SEQ ID NO: 17058
  source 1..80: mol_type = other DNA

SEQ ID NO: 52259 - DNA, 80 bp, synthetic construct; identical to SEQ ID NO: 17059
  source 1..80: mol_type = other DNA

SEQ ID NO: 52260 - DNA, 80 bp, synthetic construct; identical to SEQ ID NO: 8208
  source 1..80: mol_type = other DNA

SEQ ID NO: 52261 - DNA, 80 bp, synthetic construct; identical to SEQ ID NO: 17061
  source 1..80: mol_type = other DNA

SEQ ID NO: 52262 - DNA, 80 bp, synthetic construct; identical to SEQ ID NO: 17062
  source 1..80: mol_type = other DNA

SEQ ID NO: 52263 - DNA, 80 bp, synthetic construct; identical to SEQ ID NO: 17063
  source 1..80: mol_type = other DNA

SEQ ID NO: 52264 - DNA, 80 bp, synthetic construct; identical to SEQ ID NO: 17064
  source 1..80: mol_type = other DNA

SEQ ID NO: 52265 - DNA, 80 bp, synthetic construct; identical to SEQ ID NO: 8209
  source 1..80: mol_type = other DNA

SEQ ID NO: 52266 - DNA, 80 bp, synthetic construct; identical to SEQ ID NO: 17066
  source 1..80: mol_type = other DNA

SEQ ID NO: 52267 - DNA, 80 bp, synthetic construct; identical to SEQ ID NO: 17067
  source 1..80: mol_type = other DNA

SEQ ID NO: 52268 - DNA, 80 bp, synthetic construct; identical to SEQ ID NO: 8210
  source 1..80: mol_type = other DNA

SEQ ID NO: 52269 - DNA, 80 bp, synthetic construct; identical to SEQ ID NO: 17069
  source 1..80: mol_type = other DNA

SEQ ID NO: 52270 - DNA, 80 bp, synthetic construct; identical to SEQ ID NO: 17071
  source 1..80: mol_type = other DNA

SEQ ID NO: 52271 - DNA, 80 bp, synthetic construct; identical to SEQ ID NO: 8211
  source 1..80: mol_type = other DNA

SEQ ID NO: 52272 - DNA, 80 bp, synthetic construct; identical to SEQ ID NO: 17073
  source 1..80: mol_type = other DNA

SEQ ID NO: 52273 - DNA, 80 bp, synthetic construct; identical to SEQ ID NO: 17074
  source 1..80: mol_type = other DNA

SEQ ID NO: 52274 - DNA, 80 bp, synthetic construct; identical to SEQ ID NO: 17075
  source 1..80: mol_type = other DNA

SEQ ID NO: 52275 - DNA, 80 bp, synthetic construct; identical to SEQ ID NO: 8212
  source 1..80: mol_type = other DNA

SEQ ID NO: 52276 - DNA, 80 bp, synthetic construct; identical to SEQ ID NO: 17077
  source 1..80: mol_type = other DNA

SEQ ID NO: 52277 - DNA, 80 bp, synthetic construct; identical to SEQ ID NO: 17078
  source 1..80: mol_type = other DNA

SEQ ID NO: 52278 - DNA, 80 bp, synthetic construct; identical to SEQ ID NO: 17079
  source 1..80: mol_type = other DNA

SEQ ID NO: 52279 - DNA, 80 bp, synthetic construct; identical to SEQ ID NO: 8213
  source 1..80: mol_type = other DNA

SEQ ID NO: 52280 - DNA, 80 bp, synthetic construct; identical to SEQ ID NO: 17081
  source 1..80: mol_type = other DNA

SEQ ID NO: 52281 - DNA, 80 bp, synthetic construct; identical to SEQ ID NO: 17082
  source 1..80: mol_type = other DNA

SEQ ID NO: 52282 - DNA, 80 bp, synthetic construct; identical to SEQ ID NO: 17083
  source 1..80: mol_type = other DNA

SEQ ID NO: 52283 - DNA, 80 bp, synthetic construct; identical to SEQ ID NO: 17084
  source 1..80: mol_type = other DNA

SEQ ID NO: 52284 - DNA, 80 bp, synthetic construct; identical to SEQ ID NO: 8214
  source 1..80: mol_type = other DNA

SEQ ID NO: 52285 - DNA, 80 bp, synthetic construct; identical to SEQ ID NO: 17086
  source 1..80: mol_type = other DNA

SEQ ID NO: 52286 - DNA, 80 bp, synthetic construct; identical to SEQ ID NO: 17087
  source 1..80: mol_type = other DNA

SEQ ID NO: 52287 - DNA, 80 bp, synthetic construct; identical to SEQ ID NO: 17088
  source 1..80: mol_type = other DNA

SEQ ID NO: 52288 - DNA, 80 bp, synthetic construct; identical to SEQ ID NO: 8215
  source 1..80: mol_type = other DNA

SEQ ID NO: 52289 - DNA, 80 bp, synthetic construct; identical to SEQ ID NO: 17090
  source 1..80: mol_type = other DNA

SEQ ID NO: 52290 - DNA, 80 bp, synthetic construct; identical to SEQ ID NO: 17091
  source 1..80: mol_type = other DNA

SEQ ID NO: 52291 - DNA, 80 bp, synthetic construct; identical to SEQ ID NO: 17092
  source 1..80: mol_type = other DNA

SEQ ID NO: 52292 - DNA, 80 bp, synthetic construct; identical to SEQ ID NO: 17093
  source 1..80: mol_type = other DNA

SEQ ID NO: 52293 - DNA, 80 bp, synthetic construct; identical to SEQ ID NO: 8216
  source 1..80: mol_type = other DNA

SEQ ID NO: 52294 - DNA, 80 bp, synthetic construct; identical to SEQ ID NO: 17095
  source 1..80: mol_type = other DNA

SEQ ID NO: 52295 - DNA, 80 bp, synthetic construct; identical to SEQ ID NO: 17096
  source 1..80: mol_type = other DNA

SEQ ID NO: 52296 - DNA, 80 bp, synthetic construct; identical to SEQ ID NO: 8217
  source 1..80: mol_type = other DNA

SEQ ID NO: 52297 - DNA, 80 bp, synthetic construct; identical to SEQ ID NO: 17098
  source 1..80: mol_type = other DNA

SEQ ID NO: 52298 - DNA, 80 bp, synthetic construct; identical to SEQ ID NO: 17099
  source 1..80: mol_type = other DNA

SEQ ID NO: 52299 - DNA, 80 bp, synthetic construct; identical to SEQ ID NO: 17100
  source 1..80: mol_type = other DNA

SEQ ID NO: 52300 - DNA, 80 bp, synthetic construct; identical to SEQ ID NO: 17101
  source 1..80: mol_type = other DNA

SEQ ID NO: 52301 - DNA, 80 bp, synthetic construct; identical to SEQ ID NO: 8218
  source 1..80: mol_type = other DNA

SEQ ID NO: 52302 - DNA, 80 bp, synthetic construct; identical to SEQ ID NO: 17103
  source 1..80: mol_type = other DNA

SEQ ID NO: 52303 - DNA, 80 bp, synthetic construct; identical to SEQ ID NO: 17104
  source 1..80: mol_type = other DNA

SEQ ID NO: 52304 - DNA, 80 bp, synthetic construct; identical to SEQ ID NO: 17105
  source 1..80: mol_type = other DNA

SEQ ID NO: 52305 - DNA, 80 bp, synthetic construct; identical to SEQ ID NO: 8219
  source 1..80: mol_type = other DNA

SEQ ID NO: 52306 - DNA, 80 bp, synthetic construct; identical to SEQ ID NO: 17107
  source 1..80: mol_type = other DNA

SEQ ID NO: 52307 - DNA, 80 bp, synthetic construct; identical to SEQ ID NO: 17108
  source 1..80: mol_type = other DNA

SEQ ID NO: 52308 - DNA, 80 bp, synthetic construct; identical to SEQ ID NO: 17109
  source 1..80: mol_type = other DNA

SEQ ID NO: 52309 - DNA, 80 bp, synthetic construct; identical to SEQ ID NO: 8220
  source 1..80: mol_type = other DNA

SEQ ID NO: 52310 - DNA, 80 bp, synthetic construct; identical to SEQ ID NO: 17111
  source 1..80: mol_type = other DNA

SEQ ID NO: 52311 - DNA, 80 bp, synthetic construct; identical to SEQ ID NO: 17112
  source 1..80: mol_type = other DNA

SEQ ID NO: 52312 - DNA, 80 bp, synthetic construct; identical to SEQ ID NO: 17113
  source 1..80: mol_type = other DNA

SEQ ID NO: 52313 - DNA, 80 bp, synthetic construct; identical to SEQ ID NO: 8221
  source 1..80: mol_type = other DNA

SEQ ID NO: 52314 - DNA, 80 bp, synthetic construct; identical to SEQ ID NO: 17116
  source 1..80: mol_type = other DNA

SEQ ID NO: 52315 - DNA, 80 bp, synthetic construct; identical to SEQ ID NO: 17117
  source 1..80: mol_type = other DNA

SEQ ID NO: 52316 - DNA, 80 bp, synthetic construct; identical to SEQ ID NO: 17118
  source 1..80: mol_type = other DNA

SEQ ID NO: 52317 - DNA, 80 bp, synthetic construct; identical to SEQ ID NO: 8222
  source 1..80: mol_type = other DNA

SEQ ID NO: 52318 - DNA, 80 bp, synthetic construct; identical to SEQ ID NO: 17120
  source 1..80: mol_type = other DNA

SEQ ID NO: 52319 - DNA, 80 bp, synthetic construct; identical to SEQ ID NO: 17121
  source 1..80: mol_type = other DNA

SEQ ID NO: 52320 - DNA, 80 bp, synthetic construct; identical to SEQ ID NO: 8223
  source 1..80: mol_type = other DNA

SEQ ID NO: 52321 - DNA, 80 bp, synthetic construct; identical to SEQ ID NO: 17123
  source 1..80: mol_type = other DNA

SEQ ID NO: 52322 - DNA, 80 bp, synthetic construct; identical to SEQ ID NO: 17124
  source 1..80: mol_type = other DNA

SEQ ID NO: 52323 - DNA, 80 bp, synthetic construct; identical to SEQ ID NO: 17125
  source 1..80: mol_type = other DNA

SEQ ID NO: 52324 - DNA, 80 bp, synthetic construct; identical to SEQ ID NO: 17126
  source 1..80: mol_type = other DNA

SEQ ID NO: 52325 - DNA, 80 bp, synthetic construct; identical to SEQ ID NO: 8224
  source 1..80: mol_type = other DNA

SEQ ID NO: 52326 - DNA, 80 bp, synthetic construct; identical to SEQ ID NO: 17128
  source 1..80: mol_type = other DNA

SEQ ID NO: 52327 - DNA, 80 bp, synthetic construct; identical to SEQ ID NO: 17129
  source 1..80: mol_type = other DNA

SEQ ID NO: 52328 - DNA, 80 bp, synthetic construct; identical to SEQ ID NO: 8225
  source 1..80: mol_type = other DNA

SEQ ID NO: 52329 - DNA, 80 bp, synthetic construct; identical to SEQ ID NO: 17131
  source 1..80: mol_type = other DNA

SEQ ID NO: 52330 - DNA, 80 bp, synthetic construct; identical to SEQ ID NO: 17132
  source 1..80: mol_type = other DNA

SEQ ID NO: 52331 - DNA, 80 bp, synthetic construct; identical to SEQ ID NO: 17134
  source 1..80: mol_type = other DNA

SEQ ID NO: 52332 - DNA, 80 bp, synthetic construct; identical to SEQ ID NO: 8226
  source 1..80: mol_type = other DNA

SEQ ID NO: 52333 - DNA, 80 bp, synthetic construct; identical to SEQ ID NO: 17136
  source 1..80: mol_type = other DNA

SEQ ID NO: 52334 - DNA, 80 bp, synthetic construct; identical to SEQ ID NO: 17137
  source 1..80: mol_type = other DNA

SEQ ID NO: 52335 - DNA, 80 bp, synthetic construct; identical to SEQ ID NO: 8227
  source 1..80: mol_type = other DNA

SEQ ID NO: 52336 - DNA, 80 bp, synthetic construct; identical to SEQ ID NO: 17139
  source 1..80: mol_type = other DNA

SEQ ID NO: 52337 - DNA, 80 bp, synthetic construct; identical to SEQ ID NO: 17140
  source 1..80: mol_type = other DNA

SEQ ID NO: 52338 - DNA, 80 bp, synthetic construct; identical to SEQ ID NO: 17141
  source 1..80: mol_type = other DNA

SEQ ID NO: 52339 - DNA, 80 bp, synthetic construct; identical to SEQ ID NO: 17142
  source 1..80: mol_type = other DNA

SEQ ID NO: 52340 - DNA, 80 bp, synthetic construct; identical to SEQ ID NO: 8228
  source 1..80: mol_type = other DNA

SEQ ID NO: 52341 - DNA, 80 bp, synthetic construct; identical to SEQ ID NO: 17144
  source 1..80: mol_type = other DNA

SEQ ID NO: 52342 - DNA, 80 bp, synthetic construct; identical to SEQ ID NO: 17145
  source 1..80: mol_type = other DNA

SEQ ID NO: 52343 - DNA, 80 bp, synthetic construct; identical to SEQ ID NO: 17146
  source 1..80: mol_type = other DNA

SEQ ID NO: 52344 - DNA, 80 bp, synthetic construct; identical to SEQ ID NO: 8229
  source 1..80: mol_type = other DNA

SEQ ID NO: 52345 - DNA, 80 bp, synthetic construct; identical to SEQ ID NO: 17148
  source 1..80: mol_type = other DNA

SEQ ID NO: 52346 - DNA, 80 bp, synthetic construct; identical to SEQ ID NO: 17149
  source 1..80: mol_type = other DNA

SEQ ID NO: 52347 - DNA, 80 bp, synthetic construct; identical to SEQ ID NO: 17150
  source 1..80: mol_type = other DNA

SEQ ID NO: 52348 - DNA, 80 bp, synthetic construct; identical to SEQ ID NO: 8230
  source 1..80: mol_type = other DNA

SEQ ID NO: 52349 - DNA, 80 bp, synthetic construct; identical to SEQ ID NO: 17152
  source 1..80: mol_type = other DNA

SEQ ID NO: 52350 - DNA, 80 bp, synthetic construct; identical to SEQ ID NO: 17153
  source 1..80: mol_type = other DNA

SEQ ID NO: 52351 - DNA, 80 bp, synthetic construct; identical to SEQ ID NO: 17154
  source 1..80: mol_type = other DNA

SEQ ID NO: 52352 - DNA, 80 bp, synthetic construct; identical to SEQ ID NO: 8231
  source 1..80: mol_type = other DNA

SEQ ID NO: 52353 - DNA, 80 bp, synthetic construct; identical to SEQ ID NO: 17156
  source 1..80: mol_type = other DNA

SEQ ID NO: 52354 - DNA, 80 bp, synthetic construct; identical to SEQ ID NO: 17157
  source 1..80: mol_type = other DNA

SEQ ID NO: 52355 - DNA, 80 bp, synthetic construct; identical to SEQ ID NO: 8232
  source 1..80: mol_type = other DNA

SEQ ID NO: 52356 - DNA, 80 bp, synthetic construct; identical to SEQ ID NO: 17159
  source 1..80: mol_type = other DNA

SEQ ID NO: 52357 - DNA, 80 bp, synthetic construct; identical to SEQ ID NO: 17160
  source 1..80: mol_type = other DNA

SEQ ID NO: 52358 - DNA, 80 bp, synthetic construct; identical to SEQ ID NO: 17161
  source 1..80: mol_type = other DNA

SEQ ID NO: 52359 - DNA, 80 bp, synthetic construct; identical to SEQ ID NO: 8233
  source 1..80: mol_type = other DNA

SEQ ID NO: 52360 - DNA, 80 bp, synthetic construct; identical to SEQ ID NO: 17163
  source 1..80: mol_type = other DNA

SEQ ID NO: 52361 - DNA, 80 bp, synthetic construct; identical to SEQ ID NO: 17164
  source 1..80: mol_type = other DNA

SEQ ID NO: 52362 - DNA, 80 bp, synthetic construct; identical to SEQ ID NO: 17165
  source 1..80: mol_type = other DNA

SEQ ID NO: 52363 - DNA, 80 bp, synthetic construct; identical to SEQ ID NO: 17166
  source 1..80: mol_type = other DNA

SEQ ID NO: 52364 - DNA, 80 bp, synthetic construct; identical to SEQ ID NO: 8234
  source 1..80: mol_type = other DNA

SEQ ID NO: 52365 - DNA, 80 bp, synthetic construct; identical to SEQ ID NO: 17168
  source 1..80: mol_type = other DNA

SEQ ID NO: 52366 - DNA, 80 bp, synthetic construct; identical to SEQ ID NO: 17169
  source 1..80: mol_type = other DNA

SEQ ID NO: 52367 - DNA, 80 bp, synthetic construct; identical to SEQ ID NO: 8235
  source 1..80: mol_type = other DNA

SEQ ID NO: 52368 - DNA, 80 bp, synthetic construct; identical to SEQ ID NO: 17171
  source 1..80: mol_type = other DNA

SEQ ID NO: 52369 - DNA, 80 bp, synthetic construct; identical to SEQ ID NO: 17172
  source 1..80: mol_type = other DNA

SEQ ID NO: 52370 - DNA, 80 bp, synthetic construct; identical to SEQ ID NO: 17173
  source 1..80: mol_type = other DNA

SEQ ID NO: 52371 - DNA, 80 bp, synthetic construct; identical to SEQ ID NO: 8236
  source 1..80: mol_type = other DNA

SEQ ID NO: 52372 - DNA, 80 bp, synthetic construct; identical to SEQ ID NO: 17176
  source 1..80: mol_type = other DNA

SEQ ID NO: 52373 - DNA, 80 bp, synthetic construct; identical to SEQ ID NO: 17177
  source 1..80: mol_type = other DNA

SEQ ID NO: 52374 - DNA, 80 bp, synthetic construct; identical to SEQ ID NO: 17178
  source 1..80: mol_type = other DNA

SEQ ID NO: 52375 - DNA, 80 bp, synthetic construct; identical to SEQ ID NO: 8237
  source 1..80: mol_type = other DNA

SEQ ID NO: 52376 - DNA, 80 bp, synthetic construct; identical to SEQ ID NO: 17181
  source 1..80: mol_type = other DNA

SEQ ID NO: 52377 - DNA, 80 bp, synthetic construct; identical to SEQ ID NO: 8238
  source 1..80: mol_type = other DNA

SEQ ID NO: 52378 - DNA, 80 bp, synthetic construct; identical to SEQ ID NO: 17183
  source 1..80: mol_type = other DNA

SEQ ID NO: 52379 - DNA, 80 bp, synthetic construct; identical to SEQ ID NO: 17184
  source 1..80: mol_type = other DNA

SEQ ID NO: 52380 - DNA, 80 bp, synthetic construct; identical to SEQ ID NO: 17185
  source 1..80: mol_type = other DNA

SEQ ID NO: 52381 - DNA, 80 bp, synthetic construct; identical to SEQ ID NO: 17186
  source 1..80: mol_type = other DNA

SEQ ID NO: 52382 - DNA, 80 bp, synthetic construct; identical to SEQ ID NO: 8239
  source 1..80: mol_type = other DNA

SEQ ID NO: 52383 - DNA, 80 bp, synthetic construct; identical to SEQ ID NO: 17188
  source 1..80: mol_type = other DNA

SEQ ID NO: 52384 - DNA, 80 bp, synthetic construct; identical to SEQ ID NO: 17189
  source 1..80: mol_type = other DNA

SEQ ID NO: 52385 - DNA, 80 bp, synthetic construct; identical to SEQ ID NO: 17190
  source 1..80: mol_type = other DNA

SEQ ID NO: 52386 - DNA, 80 bp, synthetic construct; identical to SEQ ID NO: 8240
  source 1..80: mol_type = other DNA

SEQ ID NO: 52387 - DNA, 80 bp, synthetic construct; identical to SEQ ID NO: 17192
  source 1..80: mol_type = other DNA

SEQ ID NO: 52388 - DNA, 80 bp, synthetic construct; identical to SEQ ID NO: 17193
  source 1..80: mol_type = other DNA

SEQ ID NO: 52389 - DNA, 80 bp, synthetic construct; identical to SEQ ID NO: 17194
  source 1..80: mol_type = other DNA

SEQ ID NO: 52390 - DNA, 80 bp, synthetic construct; identical to SEQ ID NO: 8241
  source 1..80: mol_type = other DNA

SEQ ID NO: 52391 - DNA, 80 bp, synthetic construct; identical to SEQ ID NO: 17196
  source 1..80: mol_type = other DNA

SEQ ID NO: 52392 - DNA, 80 bp, synthetic construct; identical to SEQ ID NO: 17197
  source 1..80: mol_type = other DNA

SEQ ID NO: 52393 - DNA, 80 bp, synthetic construct; identical to SEQ ID NO: 17198
  source 1..80: mol_type = other DNA

SEQ ID NO: 52394 - DNA, 80 bp, synthetic construct; identical to SEQ ID NO: 8242
  source 1..80: mol_type = other DNA

SEQ ID NO: 52395 - DNA, 80 bp, synthetic construct; identical to SEQ ID NO: 17200
  source 1..80: mol_type = other DNA

SEQ ID NO: 52396 - DNA, 80 bp, synthetic construct; identical to SEQ ID NO: 17201
  source 1..80: mol_type = other DNA

SEQ ID NO: 52397 - DNA, 80 bp, synthetic construct; identical to SEQ ID NO: 8243
  source 1..80: mol_type = other DNA

SEQ ID NO: 52398 - DNA, 80 bp, synthetic construct; identical to SEQ ID NO: 17203
  source 1..80: mol_type = other DNA

SEQ ID NO: 52399 - DNA, 80 bp, synthetic construct; identical to SEQ ID NO: 17204
  source 1..80: mol_type = other DNA

SEQ ID NO: 52400 - DNA, 80 bp, synthetic construct; identical to SEQ ID NO: 17205
  source 1..80: mol_type = other DNA

SEQ ID NO: 52401 - DNA, 80 bp, synthetic construct; identical to SEQ ID NO: 8244
  source 1..80: mol_type = other DNA

SEQ ID NO: 52402 - DNA, 80 bp, synthetic construct; identical to SEQ ID NO: 17207
  source 1..80: mol_type = other DNA

SEQ ID NO: 52403 - DNA, 80 bp, synthetic construct; identical to SEQ ID NO: 17208
  source 1..80: mol_type = other DNA

SEQ ID NO: 52404 - DNA, 80 bp, synthetic construct; identical to SEQ ID NO: 17209
  source 1..80: mol_type = other DNA

SEQ ID NO: 52405 - DNA, 80 bp, synthetic construct; identical to SEQ ID NO: 8245
  source 1..80: mol_type = other DNA

SEQ ID NO: 52406 - DNA, 80 bp, synthetic construct; identical to SEQ ID NO: 17211
  source 1..80: mol_type = other DNA

SEQ ID NO: 52407 - DNA, 80 bp, synthetic construct; identical to SEQ ID NO: 17212
  source 1..80: mol_type = other DNA

SEQ ID NO: 52408 - DNA, 80 bp, synthetic construct; identical to SEQ ID NO: 17213
  source 1..80: mol_type = other DNA

SEQ ID NO: 52409 - DNA, 80 bp, synthetic construct; identical to SEQ ID NO: 17214
  source 1..80: mol_type = other DNA

SEQ ID NO: 52410 - DNA, 80 bp, synthetic construct; identical to SEQ ID NO: 8246
  source 1..80: mol_type = other DNA

SEQ ID NO: 52411 - DNA, 80 bp, synthetic construct; identical to SEQ ID NO: 17216
  source 1..80: mol_type = other DNA

SEQ ID NO: 52412 - DNA, 80 bp, synthetic construct; identical to SEQ ID NO: 17217
  source 1..80: mol_type = other DNA

SEQ ID NO: 52413 - DNA, 80 bp, synthetic construct; identical to SEQ ID NO: 8247
  source 1..80: mol_type = other DNA

SEQ ID NO: 52414 - DNA, 80 bp, synthetic construct; identical to SEQ ID NO: 17219
  source 1..80: mol_type = other DNA

SEQ ID NO: 52415 - DNA, 80 bp, synthetic construct; identical to SEQ ID NO: 17220
  source 1..80: mol_type = other DNA

SEQ ID NO: 52416 - DNA, 80 bp, synthetic construct; identical to SEQ ID NO: 17221
  source 1..80: mol_type = other DNA

SEQ ID NO: 52417 - DNA, 80 bp, synthetic construct; identical to SEQ ID NO: 17222
  source 1..80: mol_type = other DNA

SEQ ID NO: 52418 - DNA, 80 bp, synthetic construct; identical to SEQ ID NO: 8248
  source 1..80: mol_type = other DNA

SEQ ID NO: 52419 - DNA, 80 bp, synthetic construct; identical to SEQ ID NO: 17224
  source 1..80: mol_type = other DNA

SEQ ID NO: 52420 - DNA, 80 bp, synthetic construct; identical to SEQ ID NO: 17225
  source 1..80: mol_type = other DNA

SEQ ID NO: 52421 - DNA, 80 bp, synthetic construct; identical to SEQ ID NO: 17226
  source 1..80: mol_type = other DNA

SEQ ID NO: 52422 - DNA, 80 bp, synthetic construct; identical to SEQ ID NO: 8249
  source 1..80: mol_type = other DNA

SEQ ID NO: 52423 - DNA, 80 bp, synthetic construct; identical to SEQ ID NO: 17228
  source 1..80: mol_type = other DNA

SEQ ID NO: 52424 - DNA, 80 bp, synthetic construct; identical to SEQ ID NO: 17229
  source 1..80: mol_type = other DNA

SEQ ID NO: 52425 - DNA, 80 bp, synthetic construct; identical to SEQ ID NO: 8250
  source 1..80: mol_type = other DNA

SEQ ID NO: 52426 - DNA, 80 bp, synthetic construct; identical to SEQ ID NO: 17231
  source 1..80: mol_type = other DNA

SEQ ID NO: 52427 - DNA, 80 bp, synthetic construct; identical to SEQ ID NO: 17232
  source 1..80: mol_type = other DNA

SEQ ID NO: 52428 - DNA, 80 bp, synthetic construct; identical to SEQ ID NO: 17233
  source 1..80: mol_type = other DNA

SEQ ID NO: 52429 - DNA, 80 bp, synthetic construct; identical to SEQ ID NO: 17234
  source 1..80: mol_type = other DNA

SEQ ID NO: 52430 - DNA, 80 bp, synthetic construct; identical to SEQ ID NO: 8251
  source 1..80: mol_type = other DNA

SEQ ID NO: 52431 - DNA, 80 bp, synthetic construct; identical to SEQ ID NO: 17236
  source 1..80: mol_type = other DNA

SEQ ID NO: 52432 - DNA, 80 bp, synthetic construct; identical to SEQ ID NO: 17237
  source 1..80: mol_type = other DNA

SEQ ID NO: 52433 - DNA, 80 bp, synthetic construct; identical to SEQ ID NO: 17238
  source 1..80: mol_type = other DNA

SEQ ID NO: 52434 - DNA, 80 bp, synthetic construct; identical to SEQ ID NO: 8252
  source 1..80: mol_type = other DNA

SEQ ID NO: 52435 - DNA, 80 bp, synthetic construct; identical to SEQ ID NO: 17241
  source 1..80: mol_type = other DNA

SEQ ID NO: 52436 - DNA, 80 bp, synthetic construct; identical to SEQ ID NO: 17242
  source 1..80: mol_type = other DNA

SEQ ID NO: 52437 - DNA, 80 bp, synthetic construct; identical to SEQ ID NO: 8253
  source 1..80: mol_type = other DNA

SEQ ID NO: 52438 - DNA, 80 bp, synthetic construct; identical to SEQ ID NO: 17244
  source 1..80: mol_type = other DNA

SEQ ID NO: 52439 - DNA, 80 bp, synthetic construct; identical to SEQ ID NO: 17245
  source 1..80: mol_type = other DNA

SEQ ID NO: 52440 - DNA, 80 bp, synthetic construct; identical to SEQ ID NO: 17246
  source 1..80: mol_type = other DNA

SEQ ID NO: 52441 - DNA, 80 bp, synthetic construct; identical to SEQ ID NO: 8254
  source 1..80: mol_type = other DNA

SEQ ID NO: 52442 - DNA, 80 bp, synthetic construct; identical to SEQ ID NO: 17248
  source 1..80: mol_type = other DNA

SEQ ID NO: 52443 - DNA, 80 bp, synthetic construct; identical to SEQ ID NO: 17249
  source 1..80: mol_type = other DNA

SEQ ID NO: 52444 - DNA, 80 bp, synthetic construct; identical to SEQ ID NO: 17250
  source 1..80: mol_type = other DNA

SEQ ID NO: 52445 - DNA, 80 bp, synthetic construct; identical to SEQ ID NO: 8255
  source 1..80: mol_type = other DNA

SEQ ID NO: 52446 - DNA, 80 bp, synthetic construct; identical to SEQ ID NO: 17252
  source 1..80: mol_type = other DNA

SEQ ID NO: 52447 - DNA, 80 bp, synthetic construct; identical to SEQ ID NO: 17253
  source 1..80: mol_type = other DNA

SEQ ID NO: 52448 - DNA, 80 bp, synthetic construct; identical to SEQ ID NO: 17254
  source 1..80: mol_type = other DNA

SEQ ID NO: 52449 - DNA, 80 bp, synthetic construct; identical to SEQ ID NO: 8256
  source 1..80: mol_type = other DNA

SEQ ID NO: 52450 - DNA, 80 bp, synthetic construct; identical to SEQ ID NO: 17256
  source 1..80: mol_type = other DNA

SEQ ID NO: 52451 - DNA, 80 bp, synthetic construct; identical to SEQ ID NO: 17257
  source 1..80: mol_type = other DNA

SEQ ID NO: 52452 - DNA, 80 bp, synthetic construct; identical to SEQ ID NO: 17258
  source 1..80: mol_type = other DNA

SEQ ID NO: 52453 - DNA, 80 bp, synthetic construct; identical to SEQ ID NO: 8257
  source 1..80: mol_type = other DNA

SEQ ID NO: 52454 - DNA, 80 bp, synthetic construct; identical to SEQ ID NO: 17260
  source 1..80: mol_type = other DNA

SEQ ID NO: 52455 - DNA, 80 bp, synthetic construct; identical to SEQ ID NO: 17261
  source 1..80: mol_type = other DNA

SEQ ID NO: 52456 - DNA, 80 bp, synthetic construct; identical to SEQ ID NO: 17262
  source 1..80: mol_type = other DNA

SEQ ID NO: 52457 - DNA, 80 bp, synthetic construct; identical to SEQ ID NO: 8258
  source 1..80: mol_type = other DNA

SEQ ID NO: 52458 - DNA, 80 bp, synthetic construct; identical to SEQ ID NO: 17264
  source 1..80: mol_type = other DNA

SEQ ID NO: 52459 - DNA, 80 bp, synthetic construct; identical to SEQ ID NO: 17265
  source 1..80: mol_type = other DNA

SEQ ID NO: 52460 - DNA, 80 bp, synthetic construct; identical to SEQ ID NO: 17266
  source 1..80: mol_type = other DNA

SEQ ID NO: 52461 - DNA, 80 bp, synthetic construct; identical to SEQ ID NO: 8259
  source 1..80: mol_type = other DNA

SEQ ID NO: 52462 - DNA, 80 bp, synthetic construct; identical to SEQ ID NO: 17268
  source 1..80: mol_type = other DNA

SEQ ID NO: 52463 - DNA, 80 bp, synthetic construct; identical to SEQ ID NO: 17269
  source 1..80: mol_type = other DNA

SEQ ID NO: 52464 - DNA, 80 bp, synthetic construct; identical to SEQ ID NO: 17270
  source 1..80: mol_type = other DNA

SEQ ID NO: 52465 - DNA, 80 bp, synthetic construct; identical to SEQ ID NO: 8260
  source 1..80: mol_type = other DNA

SEQ ID NO: 52466 - DNA, 80 bp, synthetic construct; identical to SEQ ID NO: 17272
  source 1..80: mol_type = other DNA

SEQ ID NO: 52467 - DNA, 80 bp, synthetic construct; identical to SEQ ID NO: 17273
  source 1..80: mol_type = other DNA

SEQ ID NO: 52468 - DNA, 80 bp, synthetic construct; identical to SEQ ID NO: 17274
  source 1..80: mol_type = other DNA

SEQ ID NO: 52469 - DNA, 80 bp, synthetic construct; identical to SEQ ID NO: 8261
  source 1..80: mol_type = other DNA

SEQ ID NO: 52470 - DNA, 80 bp, synthetic construct; identical to SEQ ID NO: 17276
  source 1..80: mol_type = other DNA

SEQ ID NO: 52471 - DNA, 80 bp, synthetic construct; identical to SEQ ID NO: 17277
  source 1..80: mol_type = other DNA

SEQ ID NO: 52472 - DNA, 80 bp, synthetic construct; identical to SEQ ID NO: 17278
  source 1..80: mol_type = other DNA

SEQ ID NO: 52473 - DNA, 80 bp, synthetic construct; identical to SEQ ID NO: 8262
  source 1..80: mol_type = other DNA

SEQ ID NO: 52474 - DNA, 80 bp, synthetic construct; identical to SEQ ID NO: 17280
  source 1..80: mol_type = other DNA

SEQ ID NO: 52475 - DNA, 80 bp, synthetic construct; identical to SEQ ID NO: 17282
  source 1..80: mol_type = other DNA

SEQ ID NO: 52476 - DNA, 80 bp, synthetic construct; identical to SEQ ID NO: 17283
  source 1..80: mol_type = other DNA

SEQ ID NO: 52477 - DNA, 80 bp, synthetic construct; identical to SEQ ID NO: 8263
  source 1..80: mol_type = other DNA

SEQ ID NO: 52478 - DNA, 80 bp, synthetic construct; identical to SEQ ID NO: 17285
  source 1..80: mol_type = other DNA

SEQ ID NO: 52479 - DNA, 80 bp, synthetic construct; identical to SEQ ID NO: 17286
  source 1..80: mol_type = other DNA

SEQ ID NO: 52480 - DNA, 80 bp, synthetic construct; identical to SEQ ID NO: 17287
  source 1..80: mol_type = other DNA

SEQ ID NO: 52481 - DNA, 80 bp, synthetic construct; identical to SEQ ID NO: 8264
  source 1..80: mol_type = other DNA

SEQ ID NO: 52482 - DNA, 80 bp, synthetic construct; identical to SEQ ID NO: 17289
  source 1..80: mol_type = other DNA

SEQ ID NO: 52483 - DNA, 80 bp, synthetic construct; identical to SEQ ID NO: 17290
  source 1..80: mol_type = other DNA

SEQ ID NO: 52484 - DNA, 80 bp, synthetic construct; identical to SEQ ID NO: 17291
  source 1..80: mol_type = other DNA

SEQ ID NO: 52485 - DNA, 80 bp, synthetic construct; identical to SEQ ID NO: 8265
  source 1..80: mol_type = other DNA

SEQ ID NO: 52486 - DNA, 80 bp, synthetic construct; identical to SEQ ID NO: 17293
  source 1..80: mol_type = other DNA

SEQ ID NO: 52487 - DNA, 80 bp, synthetic construct; identical to SEQ ID NO: 17294
  source 1..80: mol_type = other DNA

SEQ ID NO: 52488 - DNA, 80 bp, synthetic construct; identical to SEQ ID NO: 17295
  source 1..80: mol_type = other DNA

SEQ ID NO: 52489 - DNA, 80 bp, synthetic construct; identical to SEQ ID NO: 8266
  source 1..80: mol_type = other DNA

SEQ ID NO: 52490 - DNA, 80 bp, synthetic construct; identical to SEQ ID NO: 17297
  source 1..80: mol_type = other DNA

SEQ ID NO: 52491 - DNA, 80 bp, synthetic construct; identical to SEQ ID NO: 17298
  source 1..80: mol_type = other DNA

SEQ ID NO: 52492 - DNA, 80 bp, synthetic construct; identical to SEQ ID NO: 17299
  source 1..80: mol_type = other DNA

SEQ ID NO: 52493 - DNA, 80 bp, synthetic construct; identical to SEQ ID NO: 17300
  source 1..80: mol_type = other DNA

SEQ ID NO: 52494 - DNA, 80 bp, synthetic construct; identical to SEQ ID NO: 8267
  source 1..80: mol_type = other DNA

SEQ ID NO: 52495 - DNA, 80 bp, synthetic construct; identical to SEQ ID NO: 17302
  source 1..80: mol_type = other DNA

SEQ ID NO: 52496 - DNA, 80 bp, synthetic construct; identical to SEQ ID NO: 17303
  source 1..80: mol_type = other DNA

SEQ ID NO: 52497 - DNA, 80 bp, synthetic construct; identical to SEQ ID NO: 17304
  source 1..80: mol_type = other DNA

SEQ ID NO: 52498 - DNA, 80 bp, synthetic construct; identical to SEQ ID NO: 8268
  source 1..80: mol_type = other DNA

SEQ ID NO: 52499 - DNA, 80 bp, synthetic construct; identical to SEQ ID NO: 17306
  source 1..80: mol_type = other DNA

SEQ ID NO: 52500 - DNA, 80 bp, synthetic construct; identical to SEQ ID NO: 17307
  source 1..80: mol_type = other DNA

SEQ ID NO: 52501 - DNA, 80 bp, synthetic construct; identical to SEQ ID NO: 17308
  source 1..80: mol_type = other DNA

SEQ ID NO: 52502 - DNA, 80 bp, synthetic construct; identical to SEQ ID NO: 8269
  source 1..80: mol_type = other DNA

SEQ ID NO: 52503 - DNA, 80 bp, synthetic construct; identical to SEQ ID NO: 17310
  source 1..80: mol_type = other DNA

SEQ ID NO: 52504 - DNA, 80 bp, synthetic construct; identical to SEQ ID NO: 17311
  source 1..80: mol_type = other DNA

SEQ ID NO: 52505 - DNA, 80 bp, synthetic construct; identical to SEQ ID NO: 17312
  source 1..80: mol_type = other DNA

SEQ ID NO: 52506 - DNA, 80 bp, synthetic construct; identical to SEQ ID NO: 8270
  source 1..80: mol_type = other DNA

SEQ ID NO: 52507 - DNA, 80 bp, synthetic construct; identical to SEQ ID NO: 17314
  source 1..80: mol_type = other DNA

SEQ ID NO: 52508 - DNA, 80 bp, synthetic construct; identical to SEQ ID NO: 17315
  source 1..80: mol_type = other DNA

SEQ ID NO: 52509 - DNA, 80 bp, synthetic construct; identical to SEQ ID NO: 17316
  source 1..80: mol_type = other DNA

SEQ ID NO: 52510 - DNA, 80 bp, synthetic construct; identical to SEQ ID NO: 17317
  source 1..80: mol_type = other DNA

SEQ ID NO: 52511 - DNA, 80 bp, synthetic construct; identical to SEQ ID NO: 8271
  source 1..80: mol_type = other DNA

SEQ ID NO: 52512 - DNA, 80 bp, synthetic construct; identical to SEQ ID NO: 17319
  source 1..80: mol_type = other DNA

SEQ ID NO: 52513 - DNA, 80 bp, synthetic construct; identical to SEQ ID NO: 17320
  source 1..80: mol_type = other DNA

SEQ ID NO: 52514 - DNA, 80 bp, synthetic construct; identical to SEQ ID NO: 17321
  source 1..80: mol_type = other DNA

SEQ ID NO: 52515 - DNA, 80 bp, synthetic construct; identical to SEQ ID NO: 8272
  source 1..80: mol_type = other DNA

SEQ ID NO: 52516 - DNA, 80 bp, synthetic construct; identical to SEQ ID NO: 17323
  source 1..80: mol_type = other DNA

SEQ ID NO: 52517 - DNA, 80 bp, synthetic construct; identical to SEQ ID NO: 17324
  source 1..80: mol_type = other DNA

SEQ ID NO: 52518 - DNA, 80 bp, synthetic construct; identical to SEQ ID NO: 8273
  source 1..80: mol_type = other DNA

SEQ ID NO: 52519 - DNA, 80 bp, synthetic construct; identical to SEQ ID NO: 17326
  source 1..80: mol_type = other DNA

SEQ ID NO: 52520 - DNA, 80 bp, synthetic construct; identical to SEQ ID NO: 17328
  source 1..80: mol_type = other DNA

SEQ ID NO: 52521 - DNA, 80 bp, synthetic construct; identical to SEQ ID NO: 8274
  source 1..80: mol_type = other DNA

SEQ ID NO: 52522 - DNA, 80 bp, synthetic construct; identical to SEQ ID NO: 17330
  source 1..80: mol_type = other DNA

SEQ ID NO: 52523 - DNA, 80 bp, synthetic construct; identical to SEQ ID NO: 17331
  source 1..80: mol_type = other DNA

SEQ ID NO: 52524 - DNA, 80 bp, synthetic construct; identical to SEQ ID NO: 17332
  source 1..80: mol_type = other DNA

SEQ ID NO: 52525 - DNA, 80 bp, synthetic construct; identical to SEQ ID NO: 17333
  source 1..80: mol_type = other DNA

SEQ ID NO: 52526 - DNA, 80 bp, synthetic construct; identical to SEQ ID NO: 8275
  source 1..80: mol_type = other DNA

SEQ ID NO: 52527 - DNA, 80 bp, synthetic construct; identical to SEQ ID NO: 17335
  source 1..80: mol_type = other DNA

SEQ ID NO: 52528 - DNA, 80 bp, synthetic construct; identical to SEQ ID NO: 17336
  source 1..80: mol_type = other DNA

SEQ ID NO: 52529 - DNA, 80 bp, synthetic construct; identical to SEQ ID NO: 8276
  source 1..80: mol_type = other DNA

SEQ ID NO: 52530 - DNA, 80 bp, synthetic construct; identical to SEQ ID NO: 17339
  source 1..80: mol_type = other DNA

SEQ ID NO: 52531 - DNA, 80 bp, synthetic construct; identical to SEQ ID NO: 17340
  source 1..80: mol_type = other DNA

SEQ ID NO: 52532 - DNA, 80 bp, synthetic construct; identical to SEQ ID NO: 17341
  source 1..80: mol_type = other DNA

SEQ ID NO: 52533 - DNA, 80 bp, synthetic construct; identical to SEQ ID NO: 17342
  source 1..80: mol_type = other DNA

SEQ ID NO: 52534 - DNA, 80 bp, synthetic construct; identical to SEQ ID NO: 8277
  source 1..80: mol_type = other DNA

SEQ ID NO: 52535 - DNA, 80 bp, synthetic construct; identical to SEQ ID NO: 17344
  source 1..80: mol_type = other DNA

SEQ ID NO: 52536 - DNA, 80 bp, synthetic construct; identical to SEQ ID NO: 17345
  source 1..80: mol_type = other DNA

SEQ ID NO: 52537 - DNA, 80 bp, synthetic construct; identical to SEQ ID NO: 8278
  source 1..80: mol_type = other DNA

SEQ ID NO: 52538 - DNA, 80 bp, synthetic construct; identical to SEQ ID NO: 17347
  source 1..80: mol_type = other DNA

SEQ ID NO: 52539 - DNA, 80 bp, synthetic construct; identical to SEQ ID NO: 17348
  source 1..80: mol_type = other DNA

SEQ ID NO: 52540 - DNA, 80 bp, synthetic construct; identical to SEQ ID NO: 17349
  source 1..80: mol_type = other DNA

SEQ ID NO: 52541 - DNA, 80 bp, synthetic construct; identical to SEQ ID NO: 17350
  source 1..80: mol_type = other DNA

SEQ ID NO: 52542 - DNA, 80 bp, synthetic construct; identical to SEQ ID NO: 8279
  source 1..80: mol_type = other DNA

SEQ ID NO: 52543 - DNA, 80 bp, synthetic construct; identical to SEQ ID NO: 17352
  source 1..80: mol_type = other DNA

SEQ ID NO: 52544 - DNA, 80 bp, synthetic construct; identical to SEQ ID NO: 17353
  source 1..80: mol_type = other DNA

SEQ ID NO: 52545 - DNA, 80 bp, synthetic construct; identical to SEQ ID NO: 8280
  source 1..80: mol_type = other DNA

SEQ ID NO: 52546 - DNA, 80 bp, synthetic construct; identical to SEQ ID NO: 17355
  source 1..80: mol_type = other DNA

SEQ ID NO: 52547 - DNA, 80 bp, synthetic construct; identical to SEQ ID NO: 17356
  source 1..80: mol_type = other DNA

SEQ ID NO: 52548 - DNA, 80 bp, synthetic construct; identical to SEQ ID NO: 8281
  source 1..80: mol_type = other DNA

SEQ ID NO: 52549 - DNA, 80 bp, synthetic construct; identical to SEQ ID NO: 17359
  source 1..80: mol_type = other DNA

SEQ ID NO: 52550 - DNA, 80 bp, synthetic construct; identical to SEQ ID NO: 17360
  source 1..80: mol_type = other DNA

SEQ ID NO: 52551 - DNA, 80 bp, synthetic construct; identical to SEQ ID NO: 17362
  source 1..80: mol_type = other DNA

SEQ ID NO: 52552 - DNA, 80 bp, synthetic construct; identical to SEQ ID NO: 8282
  source 1..80: mol_type = other DNA

SEQ ID NO: 52553 - DNA, 80 bp, synthetic construct; identical to SEQ ID NO: 17364
  source 1..80: mol_type = other DNA

SEQ ID NO: 52554 - DNA, 80 bp, synthetic construct; identical to SEQ ID NO: 17365
  source 1..80: mol_type = other DNA

SEQ ID NO: 52555 - DNA, 80 bp, synthetic construct; identical to SEQ ID NO: 8283
  source 1..80: mol_type = other DNA

SEQ ID NO: 52556 - DNA, 80 bp, synthetic construct; identical to SEQ ID NO: 17367
  source 1..80: mol_type = other DNA

SEQ ID NO: 52557 - DNA, 80 bp, synthetic construct; identical to SEQ ID NO: 17368
  source 1..80: mol_type = other DNA

SEQ ID NO: 52558 - DNA, 80 bp, synthetic construct; identical to SEQ ID NO: 17369
  source 1..80: mol_type = other DNA

SEQ ID NO: 52559 - DNA, 80 bp, synthetic construct; identical to SEQ ID NO: 17370
  source 1..80: mol_type = other DNA

SEQ ID NO: 52560 - DNA, 80 bp, synthetic construct; identical to SEQ ID NO: 8284
  source 1..80: mol_type = other DNA

SEQ ID NO: 52561 - DNA, 80 bp, synthetic construct; identical to SEQ ID NO: 17372
  source 1..80: mol_type = other DNA

SEQ ID NO: 52562 - DNA, 80 bp, synthetic construct; identical to SEQ ID NO: 17373
  source 1..80: mol_type = other DNA

SEQ ID NO: 52563 - DNA, 80 bp, synthetic construct; identical to SEQ ID NO: 17374
  source 1..80: mol_type = other DNA

SEQ ID NO: 52564 - DNA, 80 bp, synthetic construct; identical to SEQ ID NO: 8285
  source 1..80: mol_type = other DNA

SEQ ID NO: 52565 - DNA, 80 bp, synthetic construct; identical to SEQ ID NO: 17376
  source 1..80: mol_type = other DNA

SEQ ID NO: 52566 - DNA, 80 bp, synthetic construct; identical to SEQ ID NO: 17377
  source 1..80: mol_type = other DNA

SEQ ID NO: 52567 - DNA, 80 bp, synthetic construct; identical to SEQ ID NO: 17378
  source 1..80: mol_type = other DNA

SEQ ID NO: 52568 - DNA, 80 bp, synthetic construct; identical to SEQ ID NO: 8286
  source 1..80: mol_type = other DNA

SEQ ID NO: 52569 - DNA, 80 bp, synthetic construct; identical to SEQ ID NO: 17380
  source 1..80: mol_type = other DNA

SEQ ID NO: 52570 - DNA, 80 bp, synthetic construct; identical to SEQ ID NO: 17381
  source 1..80: mol_type = other DNA

SEQ ID NO: 52571 - DNA, 80 bp, synthetic construct; identical to SEQ ID NO: 8287
  source 1..80: mol_type = other DNA

SEQ ID NO: 52572 - DNA, 80 bp, synthetic construct; identical to SEQ ID NO: 17384
  source 1..80: mol_type = other DNA

SEQ ID NO: 52573 - DNA, 80 bp, synthetic construct; identical to SEQ ID NO: 17385
  source 1..80: mol_type = other DNA

SEQ ID NO: 52574 - DNA, 80 bp, synthetic construct; identical to SEQ ID NO: 8288
  source 1..80: mol_type = other DNA

SEQ ID NO: 52575 - DNA, 80 bp, synthetic construct; identical to SEQ ID NO: 17387
  source 1..80: mol_type = other DNA

SEQ ID NO: 52576 - DNA, 80 bp, synthetic construct; identical to SEQ ID NO: 17388
  source 1..80: mol_type = other DNA

SEQ ID NO: 52577 - DNA, 80 bp, synthetic construct; identical to SEQ ID NO: 17389
  source 1..80: mol_type = other DNA

SEQ ID NO: 52578 - DNA, 80 bp, synthetic construct; identical to SEQ ID NO: 8289
  source 1..80: mol_type = other DNA

SEQ ID NO: 52579 - DNA, 80 bp, synthetic construct; identical to SEQ ID NO: 17392
  source 1..80: mol_type = other DNA

SEQ ID NO: 52580 - DNA, 80 bp, synthetic construct; identical to SEQ ID NO: 17393
  source 1..80: mol_type = other DNA

SEQ ID NO: 52581 - DNA, 80 bp, synthetic construct; identical to SEQ ID NO: 8290
  source 1..80: mol_type = other DNA

SEQ ID NO: 52582 - DNA, 80 bp, synthetic construct; identical to SEQ ID NO: 17395
  source 1..80: mol_type = other DNA

SEQ ID NO: 52583 - DNA, 80 bp, synthetic construct; identical to SEQ ID NO: 17396
  source 1..80: mol_type = other DNA

SEQ ID NO: 52584 - DNA, 80 bp, synthetic construct; identical to SEQ ID NO: 17397
  source 1..80: mol_type = other DNA

SEQ ID NO: 52585 - DNA, 80 bp, synthetic construct; identical to SEQ ID NO: 17398
  source 1..80: mol_type = other DNA

SEQ ID NO: 52586 - DNA, 80 bp, synthetic construct; identical to SEQ ID NO: 8291
  source 1..80: mol_type = other DNA

SEQ ID NO: 52587 - DNA, 80 bp, synthetic construct; identical to SEQ ID NO: 17400
  source 1..80: mol_type = other DNA

SEQ ID NO: 52588 - DNA, 80 bp, synthetic construct; identical to SEQ ID NO: 17401
  source 1..80: mol_type = other DNA

SEQ ID NO: 52589 - DNA, 80 bp, synthetic construct; identical to SEQ ID NO: 17402
  source 1..80: mol_type = other DNA

SEQ ID NO: 52590 - DNA, 80 bp, synthetic construct; identical to SEQ ID NO: 8292
  source 1..80: mol_type = other DNA

SEQ ID NO: 52591 - DNA, 80 bp, synthetic construct; identical to SEQ ID NO: 17404
  source 1..80: mol_type = other DNA

SEQ ID NO: 52592 - DNA, 80 bp, synthetic construct; identical to SEQ ID NO: 17405
  source 1..80: mol_type = other DNA

SEQ ID NO: 52593 - DNA, 80 bp, synthetic construct; identical to SEQ ID NO: 8293
  source 1..80: mol_type = other DNA

SEQ ID NO: 52594 - DNA, 80 bp, synthetic construct; identical to SEQ ID NO: 17407
  source 1..80: mol_type = other DNA

SEQ ID NO: 52595 - DNA, 80 bp, synthetic construct; identical to SEQ ID NO: 17408
  source 1..80: mol_type = other DNA

SEQ ID NO: 52596 - DNA, 80 bp, synthetic construct; identical to SEQ ID NO: 8294
  source 1..80: mol_type = other DNA

SEQ ID NO: 52597 - DNA, 80 bp, synthetic construct; identical to SEQ ID NO: 17411
  source 1..80: mol_type = other DNA

SEQ ID NO: 52598 - DNA, 80 bp, synthetic construct; identical to SEQ ID NO: 17412
  source 1..80: mol_type = other DNA

SEQ ID NO: 52599 - DNA, 80 bp, synthetic construct; identical to SEQ ID NO: 17413
  source 1..80: mol_type = other DNA

SEQ ID NO: 52600 - DNA, 80 bp, synthetic construct; identical to SEQ ID NO: 17414
  source 1..80: mol_type = other DNA

SEQ ID NO: 52601 - DNA, 80 bp, synthetic construct; identical to SEQ ID NO: 8295
  source 1..80: mol_type = other DNA

SEQ ID NO: 52602 - DNA, 80 bp, synthetic construct; identical to SEQ ID NO: 17416
  source 1..80: mol_type = other DNA

SEQ ID NO: 52603 - DNA, 80 bp, synthetic construct; identical to SEQ ID NO: 17417
  source 1..80: mol_type = other DNA

SEQ ID NO: 52604 - DNA, 80 bp, synthetic construct; identical to SEQ ID NO: 8296
  source 1..80: mol_type = other DNA

SEQ ID NO: 52605 - DNA, 80 bp, synthetic construct; identical to SEQ ID NO: 17419
  source 1..80: mol_type = other DNA

SEQ ID NO: 52606 - DNA, 80 bp, synthetic construct; identical to SEQ ID NO: 17420
  source 1..80: mol_type = other DNA

SEQ ID NO: 52607 - DNA, 80 bp, synthetic construct; identical to SEQ ID NO: 17421
  source 1..80: mol_type = other DNA

SEQ ID NO: 52608 - DNA, 80 bp, synthetic construct; identical to SEQ ID NO: 17422
  source 1..80: mol_type = other DNA

SEQ ID NO: 52609 - DNA, 80 bp, synthetic construct; identical to SEQ ID NO: 8297
  source 1..80: mol_type = other DNA

SEQ ID NO: 52610 - DNA, 80 bp, synthetic construct; identical to SEQ ID NO: 17424
  source 1..80: mol_type = other DNA

SEQ ID NO: 52611 - DNA, 80 bp, synthetic construct; identical to SEQ ID NO: 17425
  source 1..80: mol_type = other DNA

SEQ ID NO: 52612 - DNA, 80 bp, synthetic construct; identical to SEQ ID NO: 8298
  source 1..80: mol_type = other DNA

SEQ ID NO: 52613 - DNA, 80 bp, synthetic construct; identical to SEQ ID NO: 17427
  source 1..80: mol_type = other DNA

SEQ ID NO: 52614 - DNA, 80 bp, synthetic construct; identical to SEQ ID NO: 17428
  source 1..80: mol_type = other DNA

SEQ ID NO: 52615 - DNA, 80 bp, synthetic construct; identical to SEQ ID NO: 17429
  source 1..80: mol_type = other DNA

SEQ ID NO: 52616 - DNA, 80 bp, synthetic construct; identical to SEQ ID NO: 8299
  source 1..80: mol_type = other DNA

SEQ ID NO: 52617 - DNA, 80 bp, synthetic construct; identical to SEQ ID NO: 17431
  source 1..80: mol_type = other DNA

SEQ ID NO: 52618 - DNA, 80 bp, synthetic construct; identical to SEQ ID NO: 17432
  source 1..80: mol_type = other DNA

SEQ ID NO: 52619 - DNA, 80 bp, synthetic construct; identical to SEQ ID NO: 17433
  source 1..80: mol_type = other DNA

SEQ ID NO: 52620 - DNA, 80 bp, synthetic construct; identical to SEQ ID NO: 8300
  source 1..80: mol_type = other DNA

SEQ ID NO: 52621 - DNA, 80 bp, synthetic construct; identical to SEQ ID NO: 17435
  source 1..80: mol_type = other DNA

SEQ ID NO: 52622 - DNA, 80 bp, synthetic construct; identical to SEQ ID NO: 17436
  source 1..80: mol_type = other DNA

SEQ ID NO: 52623 - DNA, 80 bp, synthetic construct; identical to SEQ ID NO: 17437
  source 1..80: mol_type = other DNA

SEQ ID NO: 52624 - DNA, 80 bp, synthetic construct; identical to SEQ ID NO: 8301
  source 1..80: mol_type = other DNA

SEQ ID NO: 52625 - DNA, 80 bp, synthetic construct; identical to SEQ ID NO: 17439
  source 1..80: mol_type = other DNA

SEQ ID NO: 52626 - DNA, 80 bp, synthetic construct; identical to SEQ ID NO: 17440
  source 1..80: mol_type = other DNA

SEQ ID NO: 52627 - DNA, 80 bp, synthetic construct; identical to SEQ ID NO: 17441
  source 1..80: mol_type = other DNA

SEQ ID NO: 52628 - DNA, 80 bp, synthetic construct; identical to SEQ ID NO: 8302
  source 1..80: mol_type = other DNA

SEQ ID NO: 52629 - DNA, 80 bp, synthetic construct; identical to SEQ ID NO: 17444
  source 1..80: mol_type = other DNA

SEQ ID NO: 52630 - DNA, 80 bp, synthetic construct; identical to SEQ ID NO: 17445
  source 1..80: mol_type = other DNA

SEQ ID NO: 52631 - DNA, 80 bp, synthetic construct; identical to SEQ ID NO: 17446
  source 1..80: mol_type = other DNA

SEQ ID NO: 52632 - DNA, 80 bp, synthetic construct; identical to SEQ ID NO: 8303
  source 1..80: mol_type = other DNA

SEQ ID NO: 52633 - DNA, 80 bp, synthetic construct; identical to SEQ ID NO: 17448
  source 1..80: mol_type = other DNA

SEQ ID NO: 52634 - DNA, 80 bp, synthetic construct; identical to SEQ ID NO: 17449
  source 1..80: mol_type = other DNA

SEQ ID NO: 52635 - DNA, 80 bp, synthetic construct; identical to SEQ ID NO: 17450
  source 1..80: mol_type = other DNA

SEQ ID NO: 52636 - DNA, 80 bp, synthetic construct; identical to SEQ ID NO: 17451
  source 1..80: mol_type = other DNA

SEQ ID NO: 52637 - DNA, 80 bp, synthetic construct; identical to SEQ ID NO: 8304
  source 1..80: mol_type = other DNA

SEQ ID NO: 52638 - DNA, 80 bp, synthetic construct; identical to SEQ ID NO: 17453
  source 1..80: mol_type = other DNA

SEQ ID NO: 52639 - DNA, 80 bp, synthetic construct; identical to SEQ ID NO: 17454
  source 1..80: mol_type = other DNA

SEQ ID NO: 52640 - DNA, 80 bp, synthetic construct; identical to SEQ ID NO: 17455
  source 1..80: mol_type = other DNA

SEQ ID NO: 52641 - DNA, 80 bp, synthetic construct; identical to SEQ ID NO: 8305
  source 1..80: mol_type = other DNA

SEQ ID NO: 52642 - DNA, 80 bp, synthetic construct; identical to SEQ ID NO: 17457
  source 1..80: mol_type = other DNA

SEQ ID NO: 52643 - DNA, 80 bp, synthetic construct; identical to SEQ ID NO: 17458
  source 1..80: mol_type = other DNA

SEQ ID NO: 52644 - DNA, 80 bp, synthetic construct; identical to SEQ ID NO: 17459
  source 1..80: mol_type = other DNA

SEQ ID NO: 52645 - DNA, 80 bp, synthetic construct; identical to SEQ ID NO: 8306
  source 1..80: mol_type = other DNA

SEQ ID NO: 52646 - DNA, 80 bp, synthetic construct; identical to SEQ ID NO: 17461
  source 1..80: mol_type = other DNA

SEQ ID NO: 52647 - DNA, 80 bp, synthetic construct; identical to SEQ ID NO: 8307
  source 1..80: mol_type = other DNA

SEQ ID NO: 52648 - DNA, 80 bp, synthetic construct; identical to SEQ ID NO: 17465
  source 1..80: mol_type = other DNA

SEQ ID NO: 52649 - DNA, 80 bp, synthetic construct; identical to SEQ ID NO: 17466
  source 1..80: mol_type = other DNA

SEQ ID NO: 52650 - DNA, 80 bp, synthetic construct; identical to SEQ ID NO: 17467
  source 1..80: mol_type = other DNA

SEQ ID NO: 52651 - DNA, 80 bp, synthetic construct; identical to SEQ ID NO: 8308
  source 1..80: mol_type = other DNA

SEQ ID NO: 52652 - DNA, 80 bp, synthetic construct; identical to SEQ ID NO: 17470
  source 1..80: mol_type = other DNA

SEQ ID NO: 52653 - DNA, 80 bp, synthetic construct; identical to SEQ ID NO: 17471
  source 1..80: mol_type = other DNA

SEQ ID NO: 52654 - DNA, 80 bp, synthetic construct; identical to SEQ ID NO: 8309
  source 1..80: mol_type = other DNA

SEQ ID NO: 52655 - DNA, 80 bp, synthetic construct; identical to SEQ ID NO: 17473
  source 1..80: mol_type = other DNA

SEQ ID NO: 52656 - DNA, 80 bp, synthetic construct; identical to SEQ ID NO: 17474
  source 1..80: mol_type = other DNA

SEQ ID NO: 52657 - DNA, 80 bp, synthetic construct; identical to SEQ ID NO: 17475
  source 1..80: mol_type = other DNA

SEQ ID NO: 52658 - DNA, 80 bp, synthetic construct; identical to SEQ ID NO: 8310
  source 1..80: mol_type = other DNA

SEQ ID NO: 52659 - DNA, 80 bp, synthetic construct; identical to SEQ ID NO: 17477
  source 1..80: mol_type = other DNA

SEQ ID NO: 52660 - DNA, 80 bp, synthetic construct; identical to SEQ ID NO: 17478
  source 1..80: mol_type = other DNA

SEQ ID NO: 52661 - DNA, 80 bp, synthetic construct; identical to SEQ ID NO: 17479
  source 1..80: mol_type = other DNA

SEQ ID NO: 52662 - DNA, 80 bp, synthetic construct; identical to SEQ ID NO: 8311
  source 1..80: mol_type = other DNA

SEQ ID NO: 52663 - DNA, 80 bp, synthetic construct; identical to SEQ ID NO: 17481
  source 1..80: mol_type = other DNA

SEQ ID NO: 52664 - DNA, 80 bp, synthetic construct; identical to SEQ ID NO: 17483
  source 1..80: mol_type = other DNA

SEQ ID NO: 52665 - DNA, 80 bp, synthetic construct; identical to SEQ ID NO: 8312
  source 1..80: mol_type = other DNA

SEQ ID NO: 52666 - DNA, 80 bp, synthetic construct; identical to SEQ ID NO: 17485
  source 1..80: mol_type = other DNA

SEQ ID NO: 52667 - DNA, 80 bp, synthetic construct; identical to SEQ ID NO: 17486
  source 1..80: mol_type = other DNA

SEQ ID NO: 52668 - DNA, 80 bp, synthetic construct; identical to SEQ ID NO: 17487
  source 1..80: mol_type = other DNA

SEQ ID NO: 52669 - DNA, 80 bp, synthetic construct; identical to SEQ ID NO: 8313
  source 1..80: mol_type = other DNA

SEQ ID NO: 52670 - DNA, 80 bp, synthetic construct; identical to SEQ ID NO: 17489
  source 1..80: mol_type = other DNA

SEQ ID NO: 52671 - DNA, 80 bp, synthetic construct; identical to SEQ ID NO: 17491
  source 1..80: mol_type = other DNA

SEQ ID NO: 52672 - DNA, 80 bp, synthetic construct; identical to SEQ ID NO: 8314
  source 1..80: mol_type = other DNA

SEQ ID NO: 52673 - DNA, 80 bp, synthetic construct; identical to SEQ ID NO: 17493
  source 1..80: mol_type = other DNA

SEQ ID NO: 52674 - DNA, 80 bp, synthetic construct; identical to SEQ ID NO: 17494
  source 1..80: mol_type = other DNA

SEQ ID NO: 52675 - DNA, 80 bp, synthetic construct; identical to SEQ ID NO: 17495
  source 1..80: mol_type = other DNA

SEQ ID NO: 52676 - DNA, 80 bp, synthetic construct; identical to SEQ ID NO: 8315
  source 1..80: mol_type = other DNA

SEQ ID NO: 52677 - DNA, 80 bp, synthetic construct; identical to SEQ ID NO: 17497
  source 1..80: mol_type = other DNA

SEQ ID NO: 52678 - DNA, 80 bp, synthetic construct; identical to SEQ ID NO: 17498
  source 1..80: mol_type = other DNA

SEQ ID NO: 52679 - DNA, 80 bp, synthetic construct; identical to SEQ ID NO: 17499
  source 1..80: mol_type = other DNA

SEQ ID NO: 52680 - DNA, 80 bp, synthetic construct; identical to SEQ ID NO: 8316
  source 1..80: mol_type = other DNA

SEQ ID NO: 52681 - DNA, 80 bp, synthetic construct; identical to SEQ ID NO: 17501
  source 1..80: mol_type = other DNA

SEQ ID NO: 52682 - DNA, 80 bp, synthetic construct; identical to SEQ ID NO: 17502
  source 1..80: mol_type = other DNA

SEQ ID NO: 52683 - DNA, 80 bp, synthetic construct; identical to SEQ ID NO: 17503
  source 1..80: mol_type = other DNA

SEQ ID NO: 52684 - DNA, 80 bp, synthetic construct; identical to SEQ ID NO: 8317
  source 1..80: mol_type = other DNA

SEQ ID NO: 52685 - DNA, 80 bp, synthetic construct; identical to SEQ ID NO: 17505
  source 1..80: mol_type = other DNA

SEQ ID NO: 52686 - DNA, 80 bp, synthetic construct; identical to SEQ ID NO: 17506
  source 1..80: mol_type = other DNA

SEQ ID NO: 52687 - DNA, 80 bp, synthetic construct; identical to SEQ ID NO: 17507
  source 1..80: mol_type = other DNA

SEQ ID NO: 52688 - DNA, 80 bp, synthetic construct; identical to SEQ ID NO: 17508
  source 1..80: mol_type = other DNA

SEQ ID NO: 52689 - DNA, 80 bp, synthetic construct; identical to SEQ ID NO: 8318
  source 1..80: mol_type = other DNA

SEQ ID NO: 52690 - DNA, 80 bp, synthetic construct; identical to SEQ ID NO: 17510
  source 1..80: mol_type = other DNA

SEQ ID NO: 52691 - DNA, 80 bp, synthetic construct; identical to SEQ ID NO: 17511
  source 1..80: mol_type = other DNA

SEQ ID NO: 52692 - DNA, 80 bp, synthetic construct; identical to SEQ ID NO: 8319
  source 1..80: mol_type = other DNA

SEQ ID NO: 52693 - DNA, 80 bp, synthetic construct; identical to SEQ ID NO: 17513
  source 1..80: mol_type = other DNA

SEQ ID NO: 52694 - DNA, 80 bp, synthetic construct; identical to SEQ ID NO: 17514
  source 1..80: mol_type = other DNA

SEQ ID NO: 52695 - DNA, 80 bp, synthetic construct; identical to SEQ ID NO: 17515
  source 1..80: mol_type = other DNA

SEQ ID NO: 52696 - DNA, 80 bp, synthetic construct; identical to SEQ ID NO: 17516
  source 1..80: mol_type = other DNA

SEQ ID NO: 52697 - DNA, 80 bp, synthetic construct; identical to SEQ ID NO: 8320
  source 1..80: mol_type = other DNA

SEQ ID NO: 52698 - DNA, 80 bp, synthetic construct; identical to SEQ ID NO: 17518
  source 1..80: mol_type = other DNA

SEQ ID NO: 52699 - DNA, 80 bp, synthetic construct; identical to SEQ ID NO: 17519
  source 1..80: mol_type = other DNA

SEQ ID NO: 52700 - DNA, 80 bp, synthetic construct; identical to SEQ ID NO: 8321
  source 1..80: mol_type = other DNA

SEQ ID NO: 52701 - DNA, 80 bp, synthetic construct; identical to SEQ ID NO: 17521
  source 1..80: mol_type = other DNA

SEQ ID NO: 52702 - DNA, 80 bp, synthetic construct; identical to SEQ ID NO: 17522
  source 1..80: mol_type = other DNA

SEQ ID NO: 52703 - DNA, 80 bp, synthetic construct; identical to SEQ ID NO: 17523
  source 1..80: mol_type = other DNA

SEQ ID NO: 52704 - DNA, 80 bp, synthetic construct; identical to SEQ ID NO: 17524
  source 1..80: mol_type = other DNA

SEQ ID NO: 52705 - DNA, 80 bp, synthetic construct; identical to SEQ ID NO: 8322
  source 1..80: mol_type = other DNA

SEQ ID NO: 52706 - DNA, 80 bp, synthetic construct; identical to SEQ ID NO: 17526
  source 1..80: mol_type = other DNA

SEQ ID NO: 52707 - DNA, 80 bp, synthetic construct; identical to SEQ ID NO: 17527
  source 1..80: mol_type = other DNA

SEQ ID NO: 52708 - DNA, 80 bp, synthetic construct; identical to SEQ ID NO: 17528
  source 1..80: mol_type = other DNA

SEQ ID NO: 52709 - DNA, 80 bp, synthetic construct; identical to SEQ ID NO: 8323
  source 1..80: mol_type = other DNA

SEQ ID NO: 52710 - DNA, 80 bp, synthetic construct; identical to SEQ ID NO: 17530
  source 1..80: mol_type = other DNA

SEQ ID NO: 52711 - DNA, 80 bp, synthetic construct; identical to SEQ ID NO: 17531
  source 1..80: mol_type = other DNA

SEQ ID NO: 52712 - DNA, 80 bp, synthetic construct; identical to SEQ ID NO: 8324
  source 1..80: mol_type = other DNA

SEQ ID NO: 52713 - DNA, 80 bp, synthetic construct; identical to SEQ ID NO: 17533
  source 1..80: mol_type = other DNA

SEQ ID NO: 52714 - DNA, 80 bp, synthetic construct; identical to SEQ ID NO: 17534
  source 1..80: mol_type = other DNA

SEQ ID NO: 52715 - DNA, 80 bp, synthetic construct; identical to SEQ ID NO: 17535
  source 1..80: mol_type = other DNA

SEQ ID NO: 52716 - DNA, 80 bp, synthetic construct; identical to SEQ ID NO: 17536
  source 1..80: mol_type = other DNA

SEQ ID NO: 52717 - DNA, 80 bp, synthetic construct; identical to SEQ ID NO: 8325
  source 1..80: mol_type = other DNA

SEQ ID NO: 52718 - DNA, 80 bp, synthetic construct; identical to SEQ ID NO: 17538
  source 1..80: mol_type = other DNA

SEQ ID NO: 52719 - DNA, 80 bp, synthetic construct; identical to SEQ ID NO: 17539
  source 1..80: mol_type = other DNA

SEQ ID NO: 52720 - DNA, 80 bp, synthetic construct; identical to SEQ ID NO: 8326
  source 1..80: mol_type = other DNA

SEQ ID NO: 52721 - DNA, 80 bp, synthetic construct; identical to SEQ ID NO: 17542
  source 1..80: mol_type = other DNA

SEQ ID NO: 52722 - DNA, 80 bp, synthetic construct; identical to SEQ ID NO: 17543
  source 1..80: mol_type = other DNA

SEQ ID NO: 52723 - DNA, 80 bp, synthetic construct; identical to SEQ ID NO: 8327
  source 1..80: mol_type = other DNA

SEQ ID NO: 52724 - DNA, 80 bp, synthetic construct; identical to SEQ ID NO: 17545
  source 1..80: mol_type = other DNA

SEQ ID NO: 52725 - DNA, 80 bp, synthetic construct; identical to SEQ ID NO: 17546
  source 1..80: mol_type = other DNA

SEQ ID NO: 52726 - DNA, 80 bp, synthetic construct; identical to SEQ ID NO: 17547
  source 1..80: mol_type = other DNA

SEQ ID NO: 52727 - DNA, 80 bp, synthetic construct; identical to SEQ ID NO: 17548
  source 1..80: mol_type = other DNA

SEQ ID NO: 52728 - DNA, 80 bp, synthetic construct; identical to SEQ ID NO: 8328
  source 1..80: mol_type = other DNA

SEQ ID NO: 52729 - DNA, 80 bp, synthetic construct; identical to SEQ ID NO: 17550
  source 1..80: mol_type = other DNA

SEQ ID NO: 52730 - DNA, 80 bp, synthetic construct; identical to SEQ ID NO: 17551
  source 1..80: mol_type = other DNA

SEQ ID NO: 52731 - DNA, 80 bp, synthetic construct; identical to SEQ ID NO: 8329
  source 1..80: mol_type = other DNA

SEQ ID NO: 52732 - DNA, 80 bp, synthetic construct; identical to SEQ ID NO: 17553
  source 1..80: mol_type = other DNA

SEQ ID NO: 52733 - DNA, 80 bp, synthetic construct; identical to SEQ ID NO: 17554
  source 1..80: mol_type = other DNA

SEQ ID NO: 52734 - DNA, 80 bp, synthetic construct; identical to SEQ ID NO: 17555
  source 1..80: mol_type = other DNA

SEQ ID NO: 52735 - DNA, 80 bp, synthetic construct; identical to SEQ ID NO: 17556
  source 1..80: mol_type = other DNA

SEQ ID NO: 52736 - DNA, 80 bp, synthetic construct; identical to SEQ ID NO: 8330
  source 1..80: mol_type = other DNA

SEQ ID NO: 52737 - DNA, 80 bp, synthetic construct; identical to SEQ ID NO: 17558
  source 1..80: mol_type = other DNA

SEQ ID NO: 52738 - DNA, 80 bp, synthetic construct; identical to SEQ ID NO: 8331
  source 1..80: mol_type = other DNA

SEQ ID NO: 52739 - DNA, 80 bp, synthetic construct; identical to SEQ ID NO: 17562
  source 1..80: mol_type = other DNA

SEQ ID NO: 52740 - DNA, 80 bp, synthetic construct; identical to SEQ ID NO: 17563
  source 1..80: mol_type = other DNA

SEQ ID NO: 52741 - DNA, 80 bp, synthetic construct; identical to SEQ ID NO: 17564
  source 1..80: mol_type = other DNA

SEQ ID NO: 52742 - DNA, 80 bp, synthetic construct; identical to SEQ ID NO: 17566
  source 1..80: mol_type = other DNA

SEQ ID NO: 52743 - DNA, 80 bp, synthetic construct; identical to SEQ ID NO: 17567
  source 1..80: mol_type = other DNA

SEQ ID NO: 52744 - DNA, 80 bp, synthetic construct; identical to SEQ ID NO: 17568
  source 1..80: mol_type = other DNA

SEQ ID NO: 52745 - DNA, 80 bp, synthetic construct; identical to SEQ ID NO: 8333
  source 1..80: mol_type = other DNA

SEQ ID NO: 52746 - DNA, 80 bp, synthetic construct; identical to SEQ ID NO: 17570
  source 1..80: mol_type = other DNA

SEQ ID NO: 52747 - DNA, 80 bp, synthetic construct; identical to SEQ ID NO: 17571
  source 1..80: mol_type = other DNA

SEQ ID NO: 52748 - DNA, 80 bp, synthetic construct; identical to SEQ ID NO: 8334
  source 1..80: mol_type = other DNA

SEQ ID NO: 52749 - DNA, 80 bp, synthetic construct; identical to SEQ ID NO: 17573
  source 1..80: mol_type = other DNA

SEQ ID NO: 52750 - DNA, 80 bp, synthetic construct; identical to SEQ ID NO: 17574
  source 1..80: mol_type = other DNA

SEQ ID NO: 52751 - DNA, 80 bp, synthetic construct; identical to SEQ ID NO: 17575
  source 1..80: mol_type = other DNA

SEQ ID NO: 52752 - DNA, 80 bp, synthetic construct; identical to SEQ ID NO: 17576
  source 1..80: mol_type = other DNA

SEQ ID NO: 52753 - DNA, 80 bp, synthetic construct; identical to SEQ ID NO: 8335
  source 1..80: mol_type = other DNA

SEQ ID NO: 52754 - DNA, 80 bp, synthetic construct; identical to SEQ ID NO: 17578
  source 1..80: mol_type = other DNA

SEQ ID NO: 52755 - DNA, 80 bp, synthetic construct; identical to SEQ ID NO: 17579
  source 1..80: mol_type = other DNA

SEQ ID NO: 52756 - DNA, 80 bp, synthetic construct; identical to SEQ ID NO: 17580
  source 1..80: mol_type = other DNA

SEQ ID NO: 52757 - DNA, 80 bp, synthetic construct; identical to SEQ ID NO: 8336
  source 1..80: mol_type = other DNA

SEQ ID NO: 52758 - DNA, 80 bp, synthetic construct; identical to SEQ ID NO: 17582
  source 1..80: mol_type = other DNA

SEQ ID NO: 52759 - DNA, 80 bp, synthetic construct; identical to SEQ ID NO: 17583
  source 1..80: mol_type = other DNA

SEQ ID NO: 52760 - DNA, 80 bp, synthetic construct; identical to SEQ ID NO: 8337
  source 1..80: mol_type = other DNA

SEQ ID NO: 52761 - DNA, 80 bp, synthetic construct; identical to SEQ ID NO: 17585
  source 1..80: mol_type = other DNA

SEQ ID NO: 52762 - DNA, 80 bp, synthetic construct; identical to SEQ ID NO: 17586
  source 1..80: mol_type = other DNA

SEQ ID NO: 52763 - DNA, 80 bp, synthetic construct; identical to SEQ ID NO: 17587
  source 1..80: mol_type = other DNA

SEQ ID NO: 52764 - DNA, 80 bp, synthetic construct; identical to SEQ ID NO: 8338
  source 1..80: mol_type = other DNA

SEQ ID NO: 52765 - DNA, 80 bp, synthetic construct; identical to SEQ ID NO: 17589
  source 1..80: mol_type = other DNA

SEQ ID NO: 52766 - DNA, 80 bp, synthetic construct; identical to SEQ ID NO: 17590
  source 1..80: mol_type = other DNA

SEQ ID NO: 52767 - DNA, 80 bp, synthetic construct; identical to SEQ ID NO: 17591
  source 1..80: mol_type = other DNA

SEQ ID NO: 52768 - DNA, 80 bp, synthetic construct; identical to SEQ ID NO: 17592
  source 1..80: mol_type = other DNA

SEQ ID NO: 52769 - DNA, 80 bp, synthetic construct; identical to SEQ ID NO: 8339
  source 1..80: mol_type = other DNA

SEQ ID NO: 52770 - DNA, 80 bp, synthetic construct; identical to SEQ ID NO: 17594
  source 1..80: mol_type = other DNA

SEQ ID NO: 52771 - DNA, 80 bp, synthetic construct; identical to SEQ ID NO: 17595
  source 1..80: mol_type = other DNA

SEQ ID NO: 52772 - DNA, 80 bp, synthetic construct; identical to SEQ ID NO: 17596
  source 1..80: mol_type = other DNA

SEQ ID NO: 52773 - DNA, 80 bp, synthetic construct; identical to SEQ ID NO: 8340
  source 1..80: mol_type = other DNA

SEQ ID NO: 52774 - DNA, 80 bp, synthetic construct; identical to SEQ ID NO: 17598
  source 1..80: mol_type = other DNA

SEQ ID NO: 52775 - DNA, 80 bp, synthetic construct; identical to SEQ ID NO: 17599
  source 1..80: mol_type = other DNA

SEQ ID NO: 52776 - DNA, 80 bp, synthetic construct; identical to SEQ ID NO: 8341
  source 1..80: mol_type = other DNA

SEQ ID NO: 52777 - DNA, 80 bp, synthetic construct; identical to SEQ ID NO: 17601
  source 1..80: mol_type = other DNA

SEQ ID NO: 52778 - DNA, 80 bp, synthetic construct; identical to SEQ ID NO: 17602
  source 1..80: mol_type = other DNA

SEQ ID NO: 52779 - DNA, 80 bp, synthetic construct; identical to SEQ ID NO: 17603
  source 1..80: mol_type = other DNA

SEQ ID NO: 52780 - DNA, 80 bp, synthetic construct; identical to SEQ ID NO: 17604
  source 1..80: mol_type = other DNA

SEQ ID NO: 52781 - DNA, 80 bp, synthetic construct; identical to SEQ ID NO: 8342
  source 1..80: mol_type = other DNA

SEQ ID NO: 52782 - DNA, 80 bp, synthetic construct; identical to SEQ ID NO: 17606
  source 1..80: mol_type = other DNA

SEQ ID NO: 52783 - DNA, 80 bp, synthetic construct; identical to SEQ ID NO: 17607
  source 1..80: mol_type = other DNA

SEQ ID NO: 52784 - DNA, 80 bp, synthetic construct; identical to SEQ ID NO: 8343
  source 1..80: mol_type = other DNA

SEQ ID NO: 52785 - DNA, 80 bp, synthetic construct; identical to SEQ ID NO: 17609
  source 1..80: mol_type = other DNA

SEQ ID NO: 52786 - DNA, 80 bp, synthetic construct; identical to SEQ ID NO: 17610
  source 1..80: mol_type = other DNA

SEQ ID NO: 52787 - DNA, 80 bp, synthetic construct; identical to SEQ ID NO: 17611
  source 1..80: mol_type = other DNA

SEQ ID NO: 52788 - DNA, 80 bp, synthetic construct; identical to SEQ ID NO: 8344
  source 1..80: mol_type = other DNA

SEQ ID NO: 52789 - DNA, 80 bp, synthetic construct; identical to SEQ ID NO: 17614
  source 1..80: mol_type = other DNA

SEQ ID NO: 52790 - DNA, 80 bp, synthetic construct; identical to SEQ ID NO: 8345
  source 1..80: mol_type = other DNA

SEQ ID NO: 52791 - DNA, 80 bp, synthetic construct; identical to SEQ ID NO: 17616
  source 1..80: mol_type = other DNA

SEQ ID NO: 52792 - DNA, 80 bp, synthetic construct; identical to SEQ ID NO: 17618
  source 1..80: mol_type = other DNA

SEQ ID NO: 52793 - DNA, 80 bp, synthetic construct; identical to SEQ ID NO: 17620
  source 1..80: mol_type = other DNA

SEQ ID NO: 52794 - DNA, 80 bp, synthetic construct; identical to SEQ ID NO: 17621
  source 1..80: mol_type = other DNA

SEQ ID NO: 52795 - DNA, 80 bp, synthetic construct; identical to SEQ ID NO: 17622
  source 1..80: mol_type = other DNA

SEQ ID NO: 52796 - DNA, 80 bp, synthetic construct; identical to SEQ ID NO: 17623
  source 1..80: mol_type = other DNA

SEQ ID NO: 52797 - DNA, 80 bp, synthetic construct; identical to SEQ ID NO: 8347
  source 1..80: mol_type = other DNA

SEQ ID NO: 52798 - DNA, 80 bp, synthetic construct; identical to SEQ ID NO: 17625
  source 1..80: mol_type = other DNA

SEQ ID NO: 52799 - DNA, 80 bp, synthetic construct; identical to SEQ ID NO: 17626
  source 1..80: mol_type = other DNA

SEQ ID NO: 52800 - DNA, 80 bp, synthetic construct; identical to SEQ ID NO: 8348
  source 1..80: mol_type = other DNA

SEQ ID NO: 52801 - DNA, 80 bp, synthetic construct; identical to SEQ ID NO: 17628
  source 1..80: mol_type = other DNA

SEQ ID NO: 52802 - DNA, 80 bp, synthetic construct; identical to SEQ ID NO: 17629
  source 1..80: mol_type = other DNA

SEQ ID NO: 52803 - DNA, 80 bp, synthetic construct; identical to SEQ ID NO: 17630
  source 1..80: mol_type = other DNA

SEQ ID NO: 52804 - DNA, 80 bp, synthetic construct; identical to SEQ ID NO: 8349
  source 1..80: mol_type = other DNA

SEQ ID NO: 52805 - DNA, 80 bp, synthetic construct; identical to SEQ ID NO: 17632
  source 1..80: mol_type = other DNA

SEQ ID NO: 52806 - DNA, 80 bp, synthetic construct; identical to SEQ ID NO: 17633
  source 1..80: mol_type = other DNA

SEQ ID NO: 52807 - DNA, 80 bp, synthetic construct; identical to SEQ ID NO: 8350
  source 1..80: mol_type = other DNA

SEQ ID NO: 52808 - DNA, 80 bp, synthetic construct; identical to SEQ ID NO: 17635
  source 1..80: mol_type = other DNA

SEQ ID NO: 52809 - DNA, 80 bp, synthetic construct; identical to SEQ ID NO: 17636
  source 1..80: mol_type = other DNA

SEQ ID NO: 52810 - DNA, 80 bp, synthetic construct; identical to SEQ ID NO: 17637
  source 1..80: mol_type = other DNA

SEQ ID NO: 52811 - DNA, 80 bp, synthetic construct; identical to SEQ ID NO: 8351
  source 1..80: mol_type = other DNA

SEQ ID NO: 52812 - DNA, 80 bp, synthetic construct; identical to SEQ ID NO: 17639
  source 1..80: mol_type = other DNA

SEQ ID NO: 52813 - DNA, 80 bp, synthetic construct; identical to SEQ ID NO: 17640
  source 1..80: mol_type = other DNA

SEQ ID NO: 52814 - DNA, 80 bp, synthetic construct; identical to SEQ ID NO: 17641
  source 1..80: mol_type = other DNA

SEQ ID NO: 52815 - DNA, 80 bp, synthetic construct; identical to SEQ ID NO: 17642
  source 1..80: mol_type = other DNA

SEQ ID NO: 52816 - DNA, 80 bp, synthetic construct; identical to SEQ ID NO: 8352
  source 1..80: mol_type = other DNA

SEQ ID NO: 52817 - DNA, 80 bp, synthetic construct; identical to SEQ ID NO: 17644
  source 1..80: mol_type = other DNA

SEQ ID NO: 52818 - DNA, 80 bp, synthetic construct; identical to SEQ ID NO: 17645
  source 1..80: mol_type = other DNA

SEQ ID NO: 52819 - DNA, 80 bp, synthetic construct; identical to SEQ ID NO: 17646
  source 1..80: mol_type = other DNA

SEQ ID NO: 52820 - DNA, 80 bp, synthetic construct; identical to SEQ ID NO: 8353
  source 1..80: mol_type = other DNA

SEQ ID NO: 52821 - DNA, 80 bp, synthetic construct; identical to SEQ ID NO: 17648
  source 1..80: mol_type = other DNA

SEQ ID NO: 52822 - DNA, 80 bp, synthetic construct; identical to SEQ ID NO: 17649
  source 1..80: mol_type = other DNA

SEQ ID NO: 52823 - DNA, 80 bp, synthetic construct; identical to SEQ ID NO: 17650
  source 1..80: mol_type = other DNA

SEQ ID NO: 52824 - DNA, 80 bp, synthetic construct; identical to SEQ ID NO: 8354
  source 1..80: mol_type = other DNA

SEQ ID NO: 52825 - DNA, 80 bp, synthetic construct; identical to SEQ ID NO: 17652
  source 1..80: mol_type = other DNA

SEQ ID NO: 52826 - DNA, 80 bp, synthetic construct; identical to SEQ ID NO: 17653
  source 1..80: mol_type = other DNA

SEQ ID NO: 52827 - DNA, 80 bp, synthetic construct; identical to SEQ ID NO: 17654
  source 1..80: mol_type = other DNA

SEQ ID NO: 52828 - DNA, 80 bp, synthetic construct; identical to SEQ ID NO: 8355
  source 1..80: mol_type = other DNA

SEQ ID NO: 52829 - DNA, 80 bp, synthetic construct; identical to SEQ ID NO: 17656
  source 1..80: mol_type = other DNA

SEQ ID NO: 52830 - DNA, 80 bp, synthetic construct; identical to SEQ ID NO: 8356
  source 1..80: mol_type = other DNA

SEQ ID NO: 52831 - DNA, 80 bp, synthetic construct; identical to SEQ ID NO: 17658
  source 1..80: mol_type = other DNA

SEQ ID NO: 52832 - DNA, 80 bp, synthetic construct; identical to SEQ ID NO: 17659
  source 1..80: mol_type = other DNA

SEQ ID NO: 52833 - DNA, 80 bp, synthetic construct; identical to SEQ ID NO: 17660
  source 1..80: mol_type = other DNA

SEQ ID NO: 52834 - DNA, 80 bp, synthetic construct; identical to SEQ ID NO: 8357
  source 1..80: mol_type = other DNA

SEQ ID NO: 52835 - DNA, 80 bp, synthetic construct; identical to SEQ ID NO: 17662
  source 1..80: mol_type = other DNA

SEQ ID NO: 52836 - DNA, 80 bp, synthetic construct; identical to SEQ ID NO: 17663
  source 1..80: mol_type = other DNA

SEQ ID NO: 52837 - DNA, 80 bp, synthetic construct; identical to SEQ ID NO: 17664
  source 1..80: mol_type = other DNA

SEQ ID NO: 52838 - DNA, 80 bp, synthetic construct; identical to SEQ ID NO: 17665
  source 1..80: mol_type = other DNA

SEQ ID NO: 52839 - DNA, 80 bp, synthetic construct; identical to SEQ ID NO: 8358
  source 1..80: mol_type = other DNA

SEQ ID NO: 52840 - DNA, 80 bp, synthetic construct; identical to SEQ ID NO: 17667
  source 1..80: mol_type = other DNA

SEQ ID NO: 52841 - DNA, 80 bp, synthetic construct; identical to SEQ ID NO: 17668
  source 1..80: mol_type = other DNA

SEQ ID NO: 52842 - DNA, 80 bp, synthetic construct; identical to SEQ ID NO: 8359
  source 1..80: mol_type = other DNA

SEQ ID NO: 52843 - DNA, 80 bp, synthetic construct; identical to SEQ ID NO: 17670
  source 1..80: mol_type = other DNA

SEQ ID NO: 52844 - DNA, 80 bp, synthetic construct; identical to SEQ ID NO: 17671
  source 1..80: mol_type = other DNA

SEQ ID NO: 52845 - DNA, 80 bp, synthetic construct; identical to SEQ ID NO: 17672
  source 1..80: mol_type = other DNA

SEQ ID NO: 52846 - DNA, 80 bp, synthetic construct; identical to SEQ ID NO: 17673
  source 1..80: mol_type = other DNA

SEQ ID NO: 52847 - DNA, 80 bp, synthetic construct; identical to SEQ ID NO: 8360
  source 1..80: mol_type = other DNA

SEQ ID NO: 52848 - DNA, 80 bp, synthetic construct; identical to SEQ ID NO: 17675
  source 1..80: mol_type = other DNA

SEQ ID NO: 52849 - DNA, 80 bp, synthetic construct; identical to SEQ ID NO: 17676
  source 1..80: mol_type = other DNA

SEQ ID NO: 52850 - DNA, 80 bp, synthetic construct; identical to SEQ ID NO: 17677
  source 1..80: mol_type = other DNA

SEQ ID NO: 52851 - DNA, 80 bp, synthetic construct; identical to SEQ ID NO: 8361
  source 1..80: mol_type = other DNA

SEQ ID NO: 52852 - DNA, 80 bp, synthetic construct; identical to SEQ ID NO: 17679
  source 1..80: mol_type = other DNA

SEQ ID NO: 52853 - DNA, 80 bp, synthetic construct; identical to SEQ ID NO: 17680
  source 1..80: mol_type = other DNA

SEQ ID NO: 52854 - DNA, 80 bp, synthetic construct; identical to SEQ ID NO: 17681
  source 1..80: mol_type = other DNA

SEQ ID NO: 52855 - DNA, 80 bp, synthetic construct; identical to SEQ ID NO: 8362
  source 1..80: mol_type = other DNA

SEQ ID NO: 52856 - DNA, 80 bp, synthetic construct; identical to SEQ ID NO: 17683
  source 1..80: mol_type = other DNA

SEQ ID NO: 52857 - DNA, 80 bp, synthetic construct; identical to SEQ ID NO: 17684
  source 1..80: mol_type = other DNA

SEQ ID NO: 52858 - DNA, 80 bp, synthetic construct; identical to SEQ ID NO: 17685
  source 1..80: mol_type = other DNA

SEQ ID NO: 52859 - DNA, 80 bp, synthetic construct; identical to SEQ ID NO: 8363
  source 1..80: mol_type = other DNA

SEQ ID NO: 52860 - DNA, 80 bp, synthetic construct; identical to SEQ ID NO: 17687
  source 1..80: mol_type = other DNA

SEQ ID NO: 52861 - DNA, 80 bp, synthetic construct; identical to SEQ ID NO: 17688
  source 1..80: mol_type = other DNA

SEQ ID NO: 52862 - DNA, 80 bp, synthetic construct; identical to SEQ ID NO: 17689
  source 1..80: mol_type = other DNA

SEQ ID NO: 52863 - DNA, 80 bp, synthetic construct; identical to SEQ ID NO: 17690
  source 1..80: mol_type = other DNA

SEQ ID NO: 52864 - DNA, 80 bp, synthetic construct; identical to SEQ ID NO: 8364
  source 1..80: mol_type = other DNA

SEQ ID NO: 52865 - DNA, 80 bp, synthetic construct; identical to SEQ ID NO: 17692
  source 1..80: mol_type = other DNA

SEQ ID NO: 52866 - DNA, 80 bp, synthetic construct; identical to SEQ ID NO: 17693
  source 1..80: mol_type = other DNA

SEQ ID NO: 52867 - DNA, 80 bp, synthetic construct; identical to SEQ ID NO: 8365
  source 1..80: mol_type = other DNA

SEQ ID NO: 52868 - DNA, 80 bp, synthetic construct; identical to SEQ ID NO: 17695
  source 1..80: mol_type = other DNA

SEQ ID NO: 52869 - DNA, 80 bp, synthetic construct; identical to SEQ ID NO: 17697
  source 1..80: mol_type = other DNA

SEQ ID NO: 52870 - DNA, 80 bp, synthetic construct; identical to SEQ ID NO: 17698
  source 1..80: mol_type = other DNA

SEQ ID NO: 52871 - DNA, 80 bp, synthetic construct; identical to SEQ ID NO: 8366
  source 1..80: mol_type = other DNA

SEQ ID NO: 52872 - DNA, 80 bp, synthetic construct; identical to SEQ ID NO: 17700
  source 1..80: mol_type = other DNA

SEQ ID NO: 52873 - DNA, 80 bp, synthetic construct; identical to SEQ ID NO: 17701
  source 1..80: mol_type = other DNA

SEQ ID NO: 52874 - DNA, 80 bp, synthetic construct; identical to SEQ ID NO: 8367
  source 1..80: mol_type = other DNA

SEQ ID NO: 52875 - DNA, 80 bp, synthetic construct; identical to SEQ ID NO: 17704
  source 1..80: mol_type = other DNA

SEQ ID NO: 52876 - DNA, 80 bp, synthetic construct; identical to SEQ ID NO: 17705
  source 1..80: mol_type = other DNA

SEQ ID NO: 52877 - DNA, 80 bp, synthetic construct; identical to SEQ ID NO: 8368
  source 1..80: mol_type = other DNA

SEQ ID NO: 52878 - DNA, 80 bp, synthetic construct; identical to SEQ ID NO: 17707
  source 1..80: mol_type = other DNA

SEQ ID NO: 52879 - DNA, 80 bp, synthetic construct; identical to SEQ ID NO: 17708
  source 1..80: mol_type = other DNA

SEQ ID NO: 52880 - DNA, 80 bp, synthetic construct; identical to SEQ ID NO: 17709
  source 1..80: mol_type = other DNA

SEQ ID NO: 52881 - DNA, 80 bp, synthetic construct; identical to SEQ ID NO: 8369
  source 1..80: mol_type = other DNA

SEQ ID NO: 52882 - DNA, 80 bp, synthetic construct; identical to SEQ ID NO: 17711
  source 1..80: mol_type = other DNA

SEQ ID NO: 52883 - DNA, 80 bp, synthetic construct; identical to SEQ ID NO: 17712
  source 1..80: mol_type = other DNA

SEQ ID NO: 52884 - DNA, 80 bp, synthetic construct; identical to SEQ ID NO: 17714
  source 1..80: mol_type = other DNA

SEQ ID NO: 52885 - DNA, 80 bp, synthetic construct; identical to SEQ ID NO: 8370
  source 1..80: mol_type = other DNA

SEQ ID NO: 52886 - DNA, 80 bp, synthetic construct; identical to SEQ ID NO: 17716
  source 1..80: mol_type = other DNA

SEQ ID NO: 52887 - DNA, 80 bp, synthetic construct; identical to SEQ ID NO: 17717
  source 1..80: mol_type = other DNA

SEQ ID NO: 52888 - DNA, 80 bp, synthetic construct; identical to SEQ ID NO: 17718
  source 1..80: mol_type = other DNA

SEQ ID NO: 52889 - DNA, 80 bp, synthetic construct; identical to SEQ ID NO: 8371
  source 1..80: mol_type = other DNA

SEQ ID NO: 52890 - DNA, 80 bp, synthetic construct; identical to SEQ ID NO: 17720
  source 1..80: mol_type = other DNA

SEQ ID NO: 52891 - DNA, 80 bp, synthetic construct; identical to SEQ ID NO: 8372
  source 1..80: mol_type = other DNA

SEQ ID NO: 52892 - DNA, 80 bp, synthetic construct; identical to SEQ ID NO: 17723
  source 1..80: mol_type = other DNA

SEQ ID NO: 52893 - DNA, 80 bp, synthetic construct; identical to SEQ ID NO: 17724
  source 1..80: mol_type = other DNA

SEQ ID NO: 52894 - DNA, 80 bp, synthetic construct; identical to SEQ ID NO: 17725
  source 1..80: mol_type = other DNA

SEQ ID NO: 52895 - DNA, 80 bp, synthetic construct; identical to SEQ ID NO: 8373
  source 1..80: mol_type = other DNA

SEQ ID NO: 52896 - DNA, 80 bp, synthetic construct; identical to SEQ ID NO: 17728
  source 1..80: mol_type = other DNA

SEQ ID NO: 52897 - DNA, 80 bp, synthetic construct; identical to SEQ ID NO: 17729
  source 1..80: mol_type = other DNA

SEQ ID NO: 52898 - DNA, 80 bp, synthetic construct; identical to SEQ ID NO: 17730
  source 1..80: mol_type = other DNA

SEQ ID NO: 52899 - DNA, 80 bp, synthetic construct; identical to SEQ ID NO: 8374
  source 1..80: mol_type = other DNA

SEQ ID NO: 52900 - DNA, 80 bp, synthetic construct; identical to SEQ ID NO: 17732
  source 1..80: mol_type = other DNA

SEQ ID NO: 52901 - DNA, 80 bp, synthetic construct; identical to SEQ ID NO: 17733
  source 1..80: mol_type = other DNA

SEQ ID NO: 52902 - DNA, 80 bp, synthetic construct; identical to SEQ ID NO: 8375
  source 1..80: mol_type = other DNA

SEQ ID NO: 52903 - DNA, 80 bp, synthetic construct; identical to SEQ ID NO: 17735
  source 1..80: mol_type = other DNA

SEQ ID NO: 52904 - DNA, 80 bp, synthetic construct; identical to SEQ ID NO: 17736
  source 1..80: mol_type = other DNA

SEQ ID NO: 52905 - DNA, 80 bp, synthetic construct; identical to SEQ ID NO: 17737
  source 1..80: mol_type = other DNA

SEQ ID NO: 52906 - DNA, 80 bp, synthetic construct; identical to SEQ ID NO: 17738
  source 1..80: mol_type = other DNA

SEQ ID NO: 52907 - DNA, 80 bp, synthetic construct; identical to SEQ ID NO: 8376
  source 1..80: mol_type = other DNA

SEQ ID NO: 52908 - DNA, 80 bp, synthetic construct; identical to SEQ ID NO: 17740
  source 1..80: mol_type = other DNA

SEQ ID NO: 52909 - DNA, 80 bp, synthetic construct; identical to SEQ ID NO: 17741
  source 1..80: mol_type = other DNA

SEQ ID NO: 52910 - DNA, 80 bp, synthetic construct; identical to SEQ ID NO: 8377
  source 1..80: mol_type = other DNA

SEQ ID NO: 52911 - DNA, 80 bp, synthetic construct; identical to SEQ ID NO: 17743
  source 1..80: mol_type = other DNA

SEQ ID NO: 52912 - DNA, 80 bp, synthetic construct; identical to SEQ ID NO: 17744
  source 1..80: mol_type = other DNA

SEQ ID NO: 52913 - DNA, 80 bp, synthetic construct; identical to SEQ ID NO: 17745
  source 1..80: mol_type = other DNA

SEQ ID NO: 52914 - DNA, 80 bp, synthetic construct; identical to SEQ ID NO: 8378
  source 1..80: mol_type = other DNA

SEQ ID NO: 52915 - DNA, 80 bp, synthetic construct; identical to SEQ ID NO: 17747
  source 1..80: mol_type = other DNA

SEQ ID NO: 52916 - DNA, 80 bp, synthetic construct; identical to SEQ ID NO: 17748
  source 1..80: mol_type = other DNA

SEQ ID NO: 52917 - DNA, 80 bp, synthetic construct; identical to SEQ ID NO: 17749
  source 1..80: mol_type = other DNA

SEQ ID NO: 52918 - DNA, 80 bp, synthetic construct; identical to SEQ ID NO: 8379
  source 1..80: mol_type = other DNA

SEQ ID NO: 52919 - DNA, 80 bp, synthetic construct; identical to SEQ ID NO: 17751
  source 1..80: mol_type = other DNA

SEQ ID NO: 52920 - DNA, 80 bp, synthetic construct; identical to SEQ ID NO: 17752
  source 1..80: mol_type = other DNA

SEQ ID NO: 52921 - DNA, 80 bp, synthetic construct; identical to SEQ ID NO: 17753
  source 1..80: mol_type = other DNA

SEQ ID NO: 52922 - DNA, 80 bp, synthetic construct; identical to SEQ ID NO: 17754
  source 1..80: mol_type = other DNA

SEQ ID NO: 52923 - DNA, 80 bp, synthetic construct; identical to SEQ ID NO: 8380
  source 1..80: mol_type = other DNA

SEQ ID NO: 52924 - DNA, 80 bp, synthetic construct; identical to SEQ ID NO: 17756
  source 1..80: mol_type = other DNA

SEQ ID NO: 52925 - DNA, 80 bp, synthetic construct; identical to SEQ ID NO: 17757
  source 1..80: mol_type = other DNA

SEQ ID NO: 52926 - DNA, 80 bp, synthetic construct; identical to SEQ ID NO: 17758
  source 1..80: mol_type = other DNA

SEQ ID NO: 52927 - DNA, 80 bp, synthetic construct; identical to SEQ ID NO: 8381
  source 1..80: mol_type = other DNA

SEQ ID NO: 52928 - DNA, 80 bp, synthetic construct; identical to SEQ ID NO: 17760
  source 1..80: mol_type = other DNA

SEQ ID NO: 52929 - DNA, 80 bp, synthetic construct; identical to SEQ ID NO: 17761
  source 1..80: mol_type = other DNA

SEQ ID NO: 52930 - DNA, 80 bp, synthetic construct; identical to SEQ ID NO: 17762
  source 1..80: mol_type = other DNA

SEQ ID NO: 52931 - DNA, 80 bp, synthetic construct; identical to SEQ ID NO: 17763
  source 1..80: mol_type = other DNA

SEQ ID NO: 52932 - DNA, 80 bp, synthetic construct; identical to SEQ ID NO: 17764
  source 1..80: mol_type = other DNA

SEQ ID NO: 52933 - DNA, 80 bp, synthetic construct; identical to SEQ ID NO: 17765
  source 1..80: mol_type = other DNA

SEQ ID NO: 52934 - DNA, 80 bp, synthetic construct; identical to SEQ ID NO: 8382
  source 1..80: mol_type = other DNA

SEQ ID NO: 52935 - DNA, 80 bp, synthetic construct; identical to SEQ ID NO: 17767
  source 1..80: mol_type = other DNA

SEQ ID NO: 52936 - DNA, 80 bp, synthetic construct; identical to SEQ ID NO: 17768
  source 1..80: mol_type = other DNA

SEQ ID NO: 52937 - DNA, 80 bp, synthetic construct; identical to SEQ ID NO: 8383
  source 1..80: mol_type = other DNA

SEQ ID NO: 52938 - DNA, 80 bp, synthetic construct; identical to SEQ ID NO: 17770
  source 1..80: mol_type = other DNA

SEQ ID NO: 52939 - DNA, 80 bp, synthetic construct; identical to SEQ ID NO: 17771
  source 1..80: mol_type = other DNA

SEQ ID NO: 52940 - DNA, 80 bp, synthetic construct; identical to SEQ ID NO: 17772
  source 1..80: mol_type = other DNA

SEQ ID NO: 52941 - DNA, 80 bp, synthetic construct; identical to SEQ ID NO: 8384
  source 1..80: mol_type = other DNA

SEQ ID NO: 52942 - DNA, 80 bp, synthetic construct; identical to SEQ ID NO: 17774
  source 1..80: mol_type = other DNA

SEQ ID NO: 52943 - DNA, 80 bp, synthetic construct; identical to SEQ ID NO: 17775
  source 1..80: mol_type = other DNA

SEQ ID NO: 52944 - DNA, 80 bp, synthetic construct; identical to SEQ ID NO: 8385
  source 1..80: mol_type = other DNA

SEQ ID NO: 52945 - DNA, 80 bp, synthetic construct; identical to SEQ ID NO: 17778
  source 1..80: mol_type = other DNA

SEQ ID NO: 52946 - DNA, 80 bp, synthetic construct; identical to SEQ ID NO: 17779
  source 1..80: mol_type = other DNA

SEQ ID NO: 52947 - DNA, 80 bp, synthetic construct; identical to SEQ ID NO: 17780
  source 1..80: mol_type = other DNA

SEQ ID NO: 52948 - DNA, 80 bp, synthetic construct; identical to SEQ ID NO: 8386
  source 1..80: mol_type = other DNA

SEQ ID NO: 52949 - DNA, 80 bp, synthetic construct; identical to SEQ ID NO: 17782
  source 1..80: mol_type = other DNA

SEQ ID NO: 52950 - DNA, 80 bp, synthetic construct; identical to SEQ ID NO: 17783
  source 1..80: mol_type = other DNA

SEQ ID NO: 52951 - DNA, 80 bp, synthetic construct; identical to SEQ ID NO: 17784
  source 1..80: mol_type = other DNA

SEQ ID NO: 52952 - DNA, 80 bp, synthetic construct; identical to SEQ ID NO: 8387
  source 1..80: mol_type = other DNA

SEQ ID NO: 52953 - DNA, 80 bp, synthetic construct; identical to SEQ ID NO: 17786
  source 1..80: mol_type = other DNA

SEQ ID NO: 52954 - DNA, 80 bp, synthetic construct; identical to SEQ ID NO: 17787
  source 1..80: mol_type = other DNA

SEQ ID NO: 52955 - DNA, 80 bp, synthetic construct; identical to SEQ ID NO: 17788
  source 1..80: mol_type = other DNA

SEQ ID NO: 52956 - DNA, 80 bp, synthetic construct; identical to SEQ ID NO: 8388
  source 1..80: mol_type = other DNA

SEQ ID NO: 52957 - DNA, 80 bp, synthetic construct; identical to SEQ ID NO: 17790
  source 1..80: mol_type = other DNA

SEQ ID NO: 52958 - DNA, 80 bp, synthetic construct; identical to SEQ ID NO: 17791
  source 1..80: mol_type = other DNA

SEQ ID NO: 52959 - DNA, 80 bp, synthetic construct; identical to SEQ ID NO: 17792
  source 1..80: mol_type = other DNA

SEQ ID NO: 52960 - DNA, 80 bp, synthetic construct; identical to SEQ ID NO: 17793
  source 1..80: mol_type = other DNA

SEQ ID NO: 52961 - DNA, 80 bp, synthetic construct; identical to SEQ ID NO: 8389
  source 1..80: mol_type = other DNA

SEQ ID NO: 52962 - DNA, 80 bp, synthetic construct; identical to SEQ ID NO: 17795
  source 1..80: mol_type = other DNA

SEQ ID NO: 52963 - DNA, 80 bp, synthetic construct; identical to SEQ ID NO: 17796
  source 1..80: mol_type = other DNA

SEQ ID NO: 52964 - DNA, 80 bp, synthetic construct; identical to SEQ ID NO: 17797
  source 1..80: mol_type = other DNA

SEQ ID NO: 52965 - DNA, 80 bp, synthetic construct; identical to SEQ ID NO: 8390
  source 1..80: mol_type = other DNA

SEQ ID NO: 52966 - DNA, 80 bp, synthetic construct; identical to SEQ ID NO: 17799
  source 1..80: mol_type = other DNA

SEQ ID NO: 52967 - DNA, 80 bp, synthetic construct; identical to SEQ ID NO: 17800
  source 1..80: mol_type = other DNA

SEQ ID NO: 52968 - DNA, 80 bp, synthetic construct; identical to SEQ ID NO: 8391
  source 1..80: mol_type = other DNA

SEQ ID NO: 52969 - DNA, 80 bp, synthetic construct; identical to SEQ ID NO: 17802
  source 1..80: mol_type = other DNA

SEQ ID NO: 52970 - DNA, 80 bp, synthetic construct; identical to SEQ ID NO: 17803
  source 1..80: mol_type = other DNA

SEQ ID NO: 52971 - DNA, 80 bp, synthetic construct; identical to SEQ ID NO: 17804
  source 1..80: mol_type = other DNA

SEQ ID NO: 52972 - DNA, 80 bp, synthetic construct; identical to SEQ ID NO: 8392
  source 1..80: mol_type = other DNA

SEQ ID NO: 52973 - DNA, 80 bp, synthetic construct; identical to SEQ ID NO: 17806
  source 1..80: mol_type = other DNA

SEQ ID NO: 52974 - DNA, 80 bp, synthetic construct; identical to SEQ ID NO: 17807
  source 1..80: mol_type = other DNA

SEQ ID NO: 52975 - DNA, 80 bp, synthetic construct; identical to SEQ ID NO: 17808
  source 1..80: mol_type = other DNA

SEQ ID NO: 52976 - DNA, 80 bp, synthetic construct; identical to SEQ ID NO: 8393
  source 1..80: mol_type = other DNA

SEQ ID NO: 52977 - DNA, 80 bp, synthetic construct; identical to SEQ ID NO: 17810
  source 1..80: mol_type = other DNA

SEQ ID NO: 52978 - DNA, 80 bp, synthetic construct; identical to SEQ ID NO: 17811
  source 1..80: mol_type = other DNA

SEQ ID NO: 52979 - DNA, 80 bp, synthetic construct; identical to SEQ ID NO: 17812
  source 1..80: mol_type = other DNA

SEQ ID NO: 52980 - DNA, 80 bp, synthetic construct; identical to SEQ ID NO: 8394
  source 1..80: mol_type = other DNA

SEQ ID NO: 52981 - DNA, 80 bp, synthetic construct; identical to SEQ ID NO: 17814
  source 1..80: mol_type = other DNA

SEQ ID NO: 52982 - DNA, 80 bp, synthetic construct; identical to SEQ ID NO: 17816
  source 1..80: mol_type = other DNA

SEQ ID NO: 52983 - DNA, 80 bp, synthetic construct; identical to SEQ ID NO: 17817
  source 1..80: mol_type = other DNA

SEQ ID NO: 52984 - DNA, 80 bp, synthetic construct; identical to SEQ ID NO: 8395
  source 1..80: mol_type = other DNA

SEQ ID NO: 52985 - DNA, 80 bp, synthetic construct; identical to SEQ ID NO: 17819
  source 1..80: mol_type = other DNA

SEQ ID NO: 52986 - DNA, 80 bp, synthetic construct; identical to SEQ ID NO: 17820
  source 1..80: mol_type = other DNA

SEQ ID NO: 52987 - DNA, 80 bp, synthetic construct; identical to SEQ ID NO: 8396
  source 1..80: mol_type = other DNA

SEQ ID NO: 52988 - DNA, 80 bp, synthetic construct; identical to SEQ ID NO: 17822
  source 1..80: mol_type = other DNA

SEQ ID NO: 52989 - DNA, 80 bp, synthetic construct; identical to SEQ ID NO: 17823
  source 1..80: mol_type = other DNA

SEQ ID NO: 52990 - DNA, 80 bp, synthetic construct; identical to SEQ ID NO: 17824
  source 1..80: mol_type = other DNA

SEQ ID NO: 52991 - DNA, 80 bp, synthetic construct; identical to SEQ ID NO: 17825
  source 1..80: mol_type = other DNA

SEQ ID NO: 52992 - DNA, 80 bp, synthetic construct; identical to SEQ ID NO: 8397
  source 1..80: mol_type = other DNA

SEQ ID NO: 52993 - DNA, 80 bp, synthetic construct; identical to SEQ ID NO: 17827
  source 1..80: mol_type = other DNA

SEQ ID NO: 52994 - DNA, 80 bp, synthetic construct; identical to SEQ ID NO: 17828
  source 1..80: mol_type = other DNA

SEQ ID NO: 52995 - DNA, 80 bp, synthetic construct; identical to SEQ ID NO: 8398
  source 1..80: mol_type = other DNA

SEQ ID NO: 52996 - DNA, 80 bp, synthetic construct; identical to SEQ ID NO: 17830
  source 1..80: mol_type = other DNA

SEQ ID NO: 52997 - DNA, 80 bp, synthetic construct; identical to SEQ ID NO: 17831
  source 1..80: mol_type = other DNA

SEQ ID NO: 52998 - DNA, 80 bp, synthetic construct; identical to SEQ ID NO: 8399
  source 1..80: mol_type = other DNA

SEQ ID NO: 52999 - DNA, 80 bp, synthetic construct; identical to SEQ ID NO: 17834
  source 1..80: mol_type = other DNA

SEQ ID NO: 53000 - DNA, 80 bp, synthetic construct; identical to SEQ ID NO: 17835
  source 1..80: mol_type = other DNA

SEQ ID NO: 53001 - DNA, 80 bp, synthetic construct; identical to SEQ ID NO: 17836
  source 1..80: mol_type = other DNA

SEQ ID NO: 53002 - DNA, 80 bp, synthetic construct; identical to SEQ ID NO: 8400
  source 1..80: mol_type = other DNA

SEQ ID NO: 53003 - DNA, 80 bp, synthetic construct; identical to SEQ ID NO: 17838
  source 1..80: mol_type = other DNA

SEQ ID NO: 53004 - DNA, 80 bp, synthetic construct; identical to SEQ ID NO: 17839
  source 1..80: mol_type = other DNA

SEQ ID NO: 53005 - DNA, 80 bp, synthetic construct; identical to SEQ ID NO: 17840
  source 1..80: mol_type = other DNA

SEQ ID NO: 53006 - DNA, 80 bp, synthetic construct; identical to SEQ ID NO: 8401
  source 1..80: mol_type = other DNA

SEQ ID NO: 53007 - DNA, 80 bp, synthetic construct; identical to SEQ ID NO: 17842
  source 1..80: mol_type = other DNA

SEQ ID NO: 53008 - DNA, 80 bp, synthetic construct; identical to SEQ ID NO: 17843
  source 1..80: mol_type = other DNA

SEQ ID NO: 53009 - DNA, 80 bp, synthetic construct; identical to SEQ ID NO: 17844
  source 1..80: mol_type = other DNA

SEQ ID NO: 53010 - DNA, 80 bp, synthetic construct; identical to SEQ ID NO: 8402
  source 1..80: mol_type = other DNA

SEQ ID NO: 53011 - DNA, 80 bp, synthetic construct; identical to SEQ ID NO: 17847
  source 1..80: mol_type = other DNA

SEQ ID NO: 53012 - DNA, 80 bp, synthetic construct; identical to SEQ ID NO: 17848
  source 1..80: mol_type = other DNA

SEQ ID NO: 53013 - DNA, 80 bp, synthetic construct; identical to SEQ ID NO: 8403
  source 1..80: mol_type = other DNA

SEQ ID NO: 53014 - DNA, 80 bp, synthetic construct; identical to SEQ ID NO: 17851
  source 1..80: mol_type = other DNA

SEQ ID NO: 53015 - DNA, 80 bp, synthetic construct; identical to SEQ ID NO: 17852
  source 1..80: mol_type = other DNA

SEQ ID NO: 53016 - DNA, 80 bp, synthetic construct; identical to SEQ ID NO: 8404
  source 1..80: mol_type = other DNA

SEQ ID NO: 53017 - DNA, 80 bp, synthetic construct; identical to SEQ ID NO: 17854
  source 1..80: mol_type = other DNA

SEQ ID NO: 53018 - DNA, 80 bp, synthetic construct; identical to SEQ ID NO: 17855
  source 1..80: mol_type = other DNA

SEQ ID NO: 53019 - DNA, 80 bp, synthetic construct; identical to SEQ ID NO: 17856
  source 1..80: mol_type = other DNA

SEQ ID NO: 53020 - DNA, 80 bp, synthetic construct; identical to SEQ ID NO: 17857
  source 1..80: mol_type = other DNA

SEQ ID NO: 53021 - DNA, 80 bp, synthetic construct; identical to SEQ ID NO: 8405
  source 1..80: mol_type = other DNA

SEQ ID NO: 53022 - DNA, 80 bp, synthetic construct; identical to SEQ ID NO: 17859
  source 1..80: mol_type = other DNA

SEQ ID NO: 53023 - DNA, 80 bp, synthetic construct; identical to SEQ ID NO: 17860
  source 1..80: mol_type = other DNA

SEQ ID NO: 53024 - DNA, 80 bp, synthetic construct; identical to SEQ ID NO: 17861
  source 1..80: mol_type = other DNA

SEQ ID NO: 53025 - DNA, 80 bp, synthetic construct; identical to SEQ ID NO: 8406
  source 1..80: mol_type = other DNA

SEQ ID NO: 53026 - DNA, 80 bp, synthetic construct; identical to SEQ ID NO: 17863
  source 1..80: mol_type = other DNA

SEQ ID NO: 53027 - DNA, 80 bp, synthetic construct; identical to SEQ ID NO: 17864
  source 1..80: mol_type = other DNA

SEQ ID NO: 53028 - DNA, 80 bp, synthetic construct; identical to SEQ ID NO: 8407
  source 1..80: mol_type = other DNA

SEQ ID NO: 53029 - DNA, 80 bp, synthetic construct; identical to SEQ ID NO: 17867
  source 1..80: mol_type = other DNA

SEQ ID NO: 53030 - DNA, 80 bp, synthetic construct; identical to SEQ ID NO: 17868
  source 1..80: mol_type = other DNA

SEQ ID NO: 53031 - DNA, 80 bp, synthetic construct; identical to SEQ ID NO: 17869
  source 1..80: mol_type = other DNA

SEQ ID NO: 53032 - DNA, 80 bp, synthetic construct; identical to SEQ ID NO: 8408
  source 1..80: mol_type = other DNA

SEQ ID NO: 53033 - DNA, 80 bp, synthetic construct; identical to SEQ ID NO: 17871
  source 1..80: mol_type = other DNA

SEQ ID NO: 53034 - DNA, 80 bp, synthetic construct; identical to SEQ ID NO: 17872
  source 1..80: mol_type = other DNA

SEQ ID NO: 53035 - DNA, 80 bp, synthetic construct; identical to SEQ ID NO: 8409
  source 1..80: mol_type = other DNA

SEQ ID NO: 53036 - DNA, 80 bp, synthetic construct; identical to SEQ ID NO: 17874
  source 1..80: mol_type = other DNA

SEQ ID NO: 53037 - DNA, 80 bp, synthetic construct; identical to SEQ ID NO: 17875
  source 1..80: mol_type = other DNA

SEQ ID NO: 53038 - DNA, 80 bp, synthetic construct; identical to SEQ ID NO: 17876
  source 1..80: mol_type = other DNA

SEQ ID NO: 53039 - DNA, 80 bp, synthetic construct; identical to SEQ ID NO: 8410
  source 1..80: mol_type = other DNA

SEQ ID NO: 53040 - DNA, 80 bp, synthetic construct; identical to SEQ ID NO: 17879
  source 1..80: mol_type = other DNA

SEQ ID NO: 53041 - DNA, 80 bp, synthetic construct; identical to SEQ ID NO: 17880
  source 1..80: mol_type = other DNA

SEQ ID NO: 53042 - DNA, 80 bp, synthetic construct; identical to SEQ ID NO: 17881
  source 1..80: mol_type = other DNA

SEQ ID NO: 53043 - DNA, 80 bp, synthetic construct; identical to SEQ ID NO: 17882
  source 1..80: mol_type = other DNA

SEQ ID NO: 53044 - DNA, 80 bp, synthetic construct; identical to SEQ ID NO: 8411
  source 1..80: mol_type = other DNA

SEQ ID NO: 53045 - DNA, 80 bp, synthetic construct; identical to SEQ ID NO: 17884
  source 1..80: mol_type = other DNA

SEQ ID NO: 53046 - DNA, 80 bp, synthetic construct; identical to SEQ ID NO: 17885
  source 1..80: mol_type = other DNA

SEQ ID NO: 53047 - DNA, 80 bp, synthetic construct; identical to SEQ ID NO: 17886
  source 1..80: mol_type = other DNA

SEQ ID NO: 53048 - DNA, 80 bp, synthetic construct; identical to SEQ ID NO: 8412
  source 1..80: mol_type = other DNA

SEQ ID NO: 53049 - DNA, 80 bp, synthetic construct; identical to SEQ ID NO: 17888
  source 1..80: mol_type = other DNA

SEQ ID NO: 53050 - DNA, 80 bp, synthetic construct; identical to SEQ ID NO: 17890
  source 1..80: mol_type = other DNA

SEQ ID NO: 53051 - DNA, 80 bp, synthetic construct; identical to SEQ ID NO: 17892
  source 1..80: mol_type = other DNA

SEQ ID NO: 53052 - DNA, 80 bp, synthetic construct; identical to SEQ ID NO: 17893
  source 1..80: mol_type = other DNA

SEQ ID NO: 53053 - DNA, 80 bp, synthetic construct; identical to SEQ ID NO: 17895
  source 1..80: mol_type = other DNA

SEQ ID NO: 53054 - DNA, 80 bp, synthetic construct; identical to SEQ ID NO: 17896
  source 1..80: mol_type = other DNA

SEQ ID NO: 53055 - DNA, 80 bp, synthetic construct; identical to SEQ ID NO: 17897
  source 1..80: mol_type = other DNA

SEQ ID NO: 53056 - DNA, 80 bp, synthetic construct; identical to SEQ ID NO: 8415
  source 1..80: mol_type = other DNA

SEQ ID NO: 53057 - DNA, 80 bp, synthetic construct; identical to SEQ ID NO: 17899
  source 1..80: mol_type = other DNA

SEQ ID NO: 53058 - DNA, 80 bp, synthetic construct; identical to SEQ ID NO: 17900
  source 1..80: mol_type = other DNA

SEQ ID NO: 53059 - DNA, 80 bp, synthetic construct; identical to SEQ ID NO: 8416
  source 1..80: mol_type = other DNA

SEQ ID NO: 53060 - DNA, 80 bp, synthetic construct; identical to SEQ ID NO: 17903
  source 1..80: mol_type = other DNA

SEQ ID NO: 53061 - DNA, 80 bp, synthetic construct; identical to SEQ ID NO: 17904
  source 1..80: mol_type = other DNA

SEQ ID NO: 53062 - DNA, 80 bp, synthetic construct; identical to SEQ ID NO: 17905
  source 1..80: mol_type = other DNA

SEQ ID NO: 53063 - DNA, 80 bp, synthetic construct; identical to SEQ ID NO: 17907
  source 1..80: mol_type = other DNA

SEQ ID NO: 53064 - DNA, 80 bp, synthetic construct; identical to SEQ ID NO: 17908
  source 1..80: mol_type = other DNA

SEQ ID NO: 53065 - DNA, 80 bp, synthetic construct; identical to SEQ ID NO: 8418
  source 1..80: mol_type = other DNA

SEQ ID NO: 53066 - DNA, 80 bp, synthetic construct; identical to SEQ ID NO: 17912
  source 1..80: mol_type = other DNA

SEQ ID NO: 53067 - DNA, 80 bp, synthetic construct; identical to SEQ ID NO: 8419
  source 1..80: mol_type = other DNA

SEQ ID NO: 53068 - DNA, 80 bp, synthetic construct; identical to SEQ ID NO: 17916
  source 1..80: mol_type = other DNA

SEQ ID NO: 53069 - DNA, 80 bp, synthetic construct; identical to SEQ ID NO: 17917
  source 1..80: mol_type = other DNA

SEQ ID NO: 53070 - DNA, 80 bp, synthetic construct; identical to SEQ ID NO: 8420
  source 1..80: mol_type = other DNA

SEQ ID NO: 53071 - DNA, 80 bp, synthetic construct; identical to SEQ ID NO: 17921
  source 1..80: mol_type = other DNA

SEQ ID NO: 53072 - DNA, 80 bp, synthetic construct; identical to SEQ ID NO: 8421
  source 1..80: mol_type = other DNA

SEQ ID NO: 53073 - DNA, 80 bp, synthetic construct; identical to SEQ ID NO: 17924
  source 1..80: mol_type = other DNA

SEQ ID NO: 53074 - DNA, 80 bp, synthetic construct; identical to SEQ ID NO: 17925
  source 1..80: mol_type = other DNA

SEQ ID NO: 53075 - DNA, 80 bp, synthetic construct; identical to SEQ ID NO: 8422
  source 1..80: mol_type = other DNA

SEQ ID NO: 53076 - DNA, 80 bp, synthetic construct; identical to SEQ ID NO: 17929
  source 1..80: mol_type = other DNA

SEQ ID NO: 53077 - DNA, 80 bp, synthetic construct; identical to SEQ ID NO: 17930
  source 1..80: mol_type = other DNA

SEQ ID NO: 53078 - DNA, 80 bp, synthetic construct; identical to SEQ ID NO: 8423
  source 1..80: mol_type = other DNA

SEQ ID NO: 53079 - DNA, 80 bp, synthetic construct; identical to SEQ ID NO: 17932
  source 1..80: mol_type = other DNA

SEQ ID NO: 53080 - DNA, 80 bp, synthetic construct; identical to SEQ ID NO: 17933
  source 1..80: mol_type = other DNA

SEQ ID NO: 53081 - DNA, 80 bp, synthetic construct; identical to SEQ ID NO: 8424
  source 1..80: mol_type = other DNA

SEQ ID NO: 53082 - DNA, 80 bp, synthetic construct; identical to SEQ ID NO: 17936
  source 1..80: mol_type = other DNA

SEQ ID NO: 53083 - DNA, 80 bp, synthetic construct; identical to SEQ ID NO: 17937
  source 1..80: mol_type = other DNA

SEQ ID NO: 53084 - DNA, 80 bp, synthetic construct; identical to SEQ ID NO: 8425
  source 1..80: mol_type = other DNA

SEQ ID NO: 53085 - DNA, 80 bp, synthetic construct; identical to SEQ ID NO: 17939
  source 1..80: mol_type = other DNA

SEQ ID NO: 53086 - DNA, 80 bp, synthetic construct; identical to SEQ ID NO: 17940
  source 1..80: mol_type = other DNA

SEQ ID NO: 53087 - DNA, 80 bp, synthetic construct; identical to SEQ ID NO: 17941
  source 1..80: mol_type = other DNA

SEQ ID NO: 53088 - DNA, 80 bp, synthetic construct; identical to SEQ ID NO: 17942
  source 1..80: mol_type = other DNA

SEQ ID NO: 53089 - DNA, 80 bp, synthetic construct; identical to SEQ ID NO: 8426
  source 1..80: mol_type = other DNA

SEQ ID NO: 53090 - DNA, 80 bp, synthetic construct; identical to SEQ ID NO: 17944
  source 1..80: mol_type = other DNA

SEQ ID NO: 53091 - DNA, 80 bp, synthetic construct; identical to SEQ ID NO: 17945
  source 1..80: mol_type = other DNA

SEQ ID NO: 53092 - DNA, 80 bp, synthetic construct; identical to SEQ ID NO: 17946
  source 1..80: mol_type = other DNA

SEQ ID NO: 53093 - DNA, 80 bp, synthetic construct; identical to SEQ ID NO: 8427
  source 1..80: mol_type = other DNA

SEQ ID NO: 53094 - DNA, 80 bp, synthetic construct; identical to SEQ ID NO: 17948
  source 1..80: mol_type = other DNA

SEQ ID NO: 53095 - DNA, 80 bp, synthetic construct; identical to SEQ ID NO: 17949
  source 1..80: mol_type = other DNA

SEQ ID NO: 53096 - DNA, 80 bp, synthetic construct; identical to SEQ ID NO: 8428
  source 1..80: mol_type = other DNA

SEQ ID NO: 53097 - DNA, 80 bp, synthetic construct; identical to SEQ ID NO: 17952
  source 1..80: mol_type = other DNA

SEQ ID NO: 53098 - DNA, 80 bp, synthetic construct; identical to SEQ ID NO: 17953
  source 1..80: mol_type = other DNA

SEQ ID NO: 53099 - DNA, 80 bp, synthetic construct; identical to SEQ ID NO: 8429
  source 1..80: mol_type = other DNA

SEQ ID NO: 53100 - DNA, 80 bp, synthetic construct; identical to SEQ ID NO: 17955
  source 1..80: mol_type = other DNA

SEQ ID NO: 53101 - DNA, 80 bp, synthetic construct; identical to SEQ ID NO: 17956
  source 1..80: mol_type = other DNA

SEQ ID NO: 53102 - DNA, 80 bp, synthetic construct; identical to SEQ ID NO: 17957
  source 1..80: mol_type = other DNA

SEQ ID NO: 53103 - DNA, 80 bp, synthetic construct; identical to SEQ ID NO: 8430
  source 1..80: mol_type = other DNA

SEQ ID NO: 53104 - DNA, 80 bp, synthetic construct; identical to SEQ ID NO: 17959
  source 1..80: mol_type = other DNA

SEQ ID NO: 53105 - DNA, 80 bp, synthetic construct; identical to SEQ ID NO: 17960
  source 1..80: mol_type = other DNA

SEQ ID NO: 53106 - DNA, 80 bp, synthetic construct; identical to SEQ ID NO: 17961
  source 1..80: mol_type = other DNA

SEQ ID NO: 53107 - DNA, 80 bp, synthetic construct; identical to SEQ ID NO: 17963
  source 1..80: mol_type = other DNA

SEQ ID NO: 53108 - DNA, 80 bp, synthetic construct; identical to SEQ ID NO: 17964
  source 1..80: mol_type = other DNA

SEQ ID NO: 53109 - DNA, 80 bp, synthetic construct; identical to SEQ ID NO: 17965
  source 1..80: mol_type = other DNA

SEQ ID NO: 53110 - DNA, 80 bp, synthetic construct; identical to SEQ ID NO: 17966
  source 1..80: mol_type = other DNA

SEQ ID NO: 53111 - DNA, 80 bp, synthetic construct; identical to SEQ ID NO: 8432
  source 1..80: mol_type = other DNA

SEQ ID NO: 53112 - DNA, 80 bp, synthetic construct; identical to SEQ ID NO: 17968
  source 1..80: mol_type = other DNA

SEQ ID NO: 53113 - DNA, 80 bp, synthetic construct; identical to SEQ ID NO: 17969
  source 1..80: mol_type = other DNA

SEQ ID NO: 53114 - DNA, 80 bp, synthetic construct; identical to SEQ ID NO: 17970
  source 1..80: mol_type = other DNA

SEQ ID NO: 53115 - DNA, 80 bp, synthetic construct; identical to SEQ ID NO: 8433
  source 1..80: mol_type = other DNA

SEQ ID NO: 53116 - DNA, 80 bp, synthetic construct; identical to SEQ ID NO: 17973
  source 1..80: mol_type = other DNA

SEQ ID NO: 53117 - DNA, 80 bp, synthetic construct; identical to SEQ ID NO: 17974
  source 1..80: mol_type = other DNA

SEQ ID NO: 53118 - DNA, 80 bp, synthetic construct; identical to SEQ ID NO: 8434
  source 1..80: mol_type = other DNA

SEQ ID NO: 53119 - DNA, 80 bp, synthetic construct; identical to SEQ ID NO: 17976
  source 1..80: mol_type = other DNA

SEQ ID NO: 53120 - DNA, 80 bp, synthetic construct; identical to SEQ ID NO: 17977
  source 1..80: mol_type = other DNA

SEQ ID NO: 53121 - DNA, 80 bp, synthetic construct; identical to SEQ ID NO: 8435
  source 1..80: mol_type = other DNA

SEQ ID NO: 53122 - DNA, 80 bp, synthetic construct; identical to SEQ ID NO: 17980
  source 1..80: mol_type = other DNA

SEQ ID NO: 53123 - DNA, 80 bp, synthetic construct; identical to SEQ ID NO: 17981
  source 1..80: mol_type = other DNA

SEQ ID NO: 53124 - DNA, 80 bp, synthetic construct; identical to SEQ ID NO: 17982
  source 1..80: mol_type = other DNA

SEQ ID NO: 53125 - DNA, 80 bp, synthetic construct; identical to SEQ ID NO: 8436
  source 1..80: mol_type = other DNA

SEQ ID NO: 53126 - DNA, 80 bp, synthetic construct; identical to SEQ ID NO: 17984
  source 1..80: mol_type = other DNA

SEQ ID NO: 53127 - DNA, 80 bp, synthetic construct; identical to SEQ ID NO: 17985
  source 1..80: mol_type = other DNA

SEQ ID NO: 53128 - DNA, 80 bp, synthetic construct; identical to SEQ ID NO: 17986
  source 1..80: mol_type = other DNA

SEQ ID NO: 53129 - DNA, 80 bp, synthetic construct; identical to SEQ ID NO: 8437
  source 1..80: mol_type = other DNA

SEQ ID NO: 53130 - DNA, 80 bp, synthetic construct; identical to SEQ ID NO: 17988
  source 1..80: mol_type = other DNA

SEQ ID NO: 53131 - DNA, 80 bp, synthetic construct; identical to SEQ ID NO: 17989
  source 1..80: mol_type = other DNA

SEQ ID NO: 53132 - DNA, 80 bp, synthetic construct; identical to SEQ ID NO: 17990
  source 1..80: mol_type = other DNA

SEQ ID NO: 53133 - DNA, 80 bp, synthetic construct; identical to SEQ ID NO: 17991
  source 1..80: mol_type = other DNA

SEQ ID NO: 53134 - DNA, 80 bp, synthetic construct; identical to SEQ ID NO: 8438
  source 1..80: mol_type = other DNA

SEQ ID NO: 53135 - DNA, 80 bp, synthetic construct; identical to SEQ ID NO: 17993
  source 1..80: mol_type = other DNA

SEQ ID NO: 53136 - DNA, 80 bp, synthetic construct; identical to SEQ ID NO: 17994
  source 1..80: mol_type = other DNA

SEQ ID NO: 53137 - DNA, 80 bp, synthetic construct; identical to SEQ ID NO: 8439
  source 1..80: mol_type = other DNA

SEQ ID NO: 53138 - DNA, 80 bp, synthetic construct; identical to SEQ ID NO: 17996
  source 1..80: mol_type = other DNA

SEQ ID NO: 53139 - DNA, 80 bp, synthetic construct; identical to SEQ ID NO: 17998
  source 1..80: mol_type = other DNA

SEQ ID NO: 53140 - DNA, 80 bp, synthetic construct; identical to SEQ ID NO: 8440
  source 1..80: mol_type = other DNA

SEQ ID NO: 53141 - DNA, 80 bp, synthetic construct; identical to SEQ ID NO: 18000
  source 1..80: mol_type = other DNA

SEQ ID NO: 53142 - DNA, 80 bp, synthetic construct; identical to SEQ ID NO: 18001
  source 1..80: mol_type = other DNA

SEQ ID NO: 53143 - DNA, 80 bp, synthetic construct; identical to SEQ ID NO: 18002
  source 1..80: mol_type = other DNA

SEQ ID NO: 53144 - DNA, 80 bp, synthetic construct; identical to SEQ ID NO: 18003
  source 1..80: mol_type = other DNA

SEQ ID NO: 53145 - DNA, 80 bp, synthetic construct; identical to SEQ ID NO: 8441
  source 1..80: mol_type = other DNA

SEQ ID NO: 53146 - DNA, 80 bp, synthetic construct; identical to SEQ ID NO: 18005
  source 1..80: mol_type = other DNA

SEQ ID NO: 53147 - DNA, 80 bp, synthetic construct; identical to SEQ ID NO: 18006
  source 1..80: mol_type = other DNA

SEQ ID NO: 53148 - DNA, 80 bp, synthetic construct; identical to SEQ ID NO: 18007
  source 1..80: mol_type = other DNA

SEQ ID NO: 53149 - DNA, 80 bp, synthetic construct; identical to SEQ ID NO: 18009
  source 1..80: mol_type = other DNA

SEQ ID NO: 53150 - DNA, 80 bp, synthetic construct; identical to SEQ ID NO: 18010
  source 1..80: mol_type = other DNA

SEQ ID NO: 53151 - DNA, 80 bp, synthetic construct; identical to SEQ ID NO: 18011
  source 1..80: mol_type = other DNA

SEQ ID NO: 53152 - DNA, 80 bp, synthetic construct; identical to SEQ ID NO: 8443
  source 1..80: mol_type = other DNA

SEQ ID NO: 53153 - DNA, 80 bp, synthetic construct; identical to SEQ ID NO: 18013
  source 1..80: mol_type = other DNA

SEQ ID NO: 53154 - DNA, 80 bp, synthetic construct; identical to SEQ ID NO: 18014
  source 1..80: mol_type = other DNA

SEQ ID NO: 53155 - DNA, 80 bp, synthetic construct; identical to SEQ ID NO: 18015
  source 1..80: mol_type = other DNA

SEQ ID NO: 53156 - DNA, 80 bp, synthetic construct; identical to SEQ ID NO: 8444
  source 1..80: mol_type = other DNA

SEQ ID NO: 53157 - DNA, 80 bp, synthetic construct; identical to SEQ ID NO: 18017
  source 1..80: mol_type = other DNA

SEQ ID NO: 53158 - DNA, 80 bp, synthetic construct; identical to SEQ ID NO: 18018
  source 1..80: mol_type = other DNA

SEQ ID NO: 53159 - DNA, 80 bp, synthetic construct; identical to SEQ ID NO: 8445
  source 1..80: mol_type = other DNA

SEQ ID NO: 53160 - DNA, 80 bp, synthetic construct; identical to SEQ ID NO: 18021
  source 1..80: mol_type = other DNA

SEQ ID NO: 53161 - DNA, 80 bp, synthetic construct; identical to SEQ ID NO: 18022
  source 1..80: mol_type = other DNA

SEQ ID NO: 53162 - DNA, 80 bp, synthetic construct; identical to SEQ ID NO: 8446
  source 1..80: mol_type = other DNA

SEQ ID NO: 53163 - DNA, 80 bp, synthetic construct; identical to SEQ ID NO: 18024
  source 1..80: mol_type = other DNA

SEQ ID NO: 53164 - DNA, 80 bp, synthetic construct; identical to SEQ ID NO: 18025
  source 1..80: mol_type = other DNA

SEQ ID NO: 53165 - DNA, 80 bp, synthetic construct; identical to SEQ ID NO: 18026
  source 1..80: mol_type = other DNA

SEQ ID NO: 53166 - DNA, 80 bp, synthetic construct; identical to SEQ ID NO: 8447
  source 1..80: mol_type = other DNA

SEQ ID NO: 53167 - DNA, 80 bp, synthetic construct; identical to SEQ ID NO: 18029
  source 1..80: mol_type = other DNA

SEQ ID NO: 53168 - DNA, 80 bp, synthetic construct; identical to SEQ ID NO: 18030
  source 1..80: mol_type = other DNA

SEQ ID NO: 53169 - DNA, 80 bp, synthetic construct; identical to SEQ ID NO: 8448
  source 1..80: mol_type = other DNA

SEQ ID NO: 53170 - DNA, 80 bp, synthetic construct; identical to SEQ ID NO: 18033
  source 1..80: mol_type = other DNA

SEQ ID NO: 53171 - DNA, 80 bp, synthetic construct; identical to SEQ ID NO: 18035
  source 1..80: mol_type = other DNA

SEQ ID NO: 53172 - DNA, 80 bp, synthetic construct; identical to SEQ ID NO: 8449
  source 1..80: mol_type = other DNA

SEQ ID NO: 53173 - DNA, 80 bp, synthetic construct; identical to SEQ ID NO: 18037
  source 1..80: mol_type = other DNA

SEQ ID NO: 53174 - DNA, 80 bp, synthetic construct; identical to SEQ ID NO: 18038
  source 1..80: mol_type = other DNA

SEQ ID NO: 53175 - DNA, 80 bp, synthetic construct; identical to SEQ ID NO: 18040
  source 1..80: mol_type = other DNA

SEQ ID NO: 53176 - DNA, 80 bp, synthetic construct; identical to SEQ ID NO: 18042
  source 1..80: mol_type = other DNA

SEQ ID NO: 53177 - DNA, 80 bp, synthetic construct; identical to SEQ ID NO: 8451
  source 1..80: mol_type = other DNA

SEQ ID NO: 53178 - DNA, 80 bp, synthetic construct; identical to SEQ ID NO: 18046
  source 1..80: mol_type = other DNA

SEQ ID NO: 53179 - DNA, 80 bp, synthetic construct; identical to SEQ ID NO: 18047
  source 1..80: mol_type = other DNA

SEQ ID NO: 53180 - DNA, 80 bp, synthetic construct; identical to SEQ ID NO: 8452
  source 1..80: mol_type = other DNA

SEQ ID NO: 53181 - DNA, 80 bp, synthetic construct; identical to SEQ ID NO: 18049
  source 1..80: mol_type = other DNA

SEQ ID NO: 53182 - DNA, 80 bp, synthetic construct; identical to SEQ ID NO: 18051
  source 1..80: mol_type = other DNA

SEQ ID NO: 53183 - DNA, 80 bp, synthetic construct; identical to SEQ ID NO: 8453
  source 1..80: mol_type = other DNA

SEQ ID NO: 53184 - DNA, 80 bp, synthetic construct; identical to SEQ ID NO: 18053
  source 1..80: mol_type = other DNA

SEQ ID NO: 53185 - DNA, 80 bp, synthetic construct; identical to SEQ ID NO: 18054
  source 1..80: mol_type = other DNA

SEQ ID NO: 53186 - DNA, 80 bp, synthetic construct; identical to SEQ ID NO: 18055
  source 1..80: mol_type = other DNA

SEQ ID NO: 53187 - DNA, 80 bp, synthetic construct; identical to SEQ ID NO: 8454
  source 1..80: mol_type = other DNA

SEQ ID NO: 53188 - DNA, 80 bp, synthetic construct; identical to SEQ ID NO: 18057
  source 1..80: mol_type = other DNA

SEQ ID NO: 53189 - DNA, 80 bp, synthetic construct; identical to SEQ ID NO: 18058
  source 1..80: mol_type = other DNA

SEQ ID NO: 53190 - DNA, 80 bp, synthetic construct; identical to SEQ ID NO: 18059
  source 1..80: mol_type = other DNA

SEQ ID NO: 53191 - DNA, 80 bp, synthetic construct; identical to SEQ ID NO: 8455
  source 1..80: mol_type = other DNA

SEQ ID NO: 53192 - DNA, 80 bp, synthetic construct; identical to SEQ ID NO: 18061
  source 1..80: mol_type = other DNA

SEQ ID NO: 53193 - DNA, 80 bp, synthetic construct; identical to SEQ ID NO: 18062
  source 1..80: mol_type = other DNA

SEQ ID NO: 53194 - DNA, 80 bp, synthetic construct; identical to SEQ ID NO: 8456
  source 1..80: mol_type = other DNA

SEQ ID NO: 53195 - DNA, 80 bp, synthetic construct; identical to SEQ ID NO: 18064
  source 1..80: mol_type = other DNA

SEQ ID NO: 53196 - DNA, 80 bp, synthetic construct; identical to SEQ ID NO: 18065
  source 1..80: mol_type = other DNA

SEQ ID NO: 53197 - DNA, 80 bp, synthetic construct; identical to SEQ ID NO: 8457
  source 1..80: mol_type = other DNA

SEQ ID NO: 53198 - DNA, 80 bp, synthetic construct; identical to SEQ ID NO: 18068
  source 1..80: mol_type = other DNA

SEQ ID NO: 53199 - DNA, 80 bp, synthetic construct; identical to SEQ ID NO: 14731
  source 1..80: mol_type = other DNA

SEQ ID NO: 53200 - DNA, 80 bp, synthetic construct; identical to SEQ ID NO: 8458
  source 1..80: mol_type = other DNA

SEQ ID NO: 53201 - DNA, 80 bp, synthetic construct; identical to SEQ ID NO: 18073
  source 1..80: mol_type = other DNA

SEQ ID NO: 53202 - DNA, 80 bp, synthetic construct; identical to SEQ ID NO: 18074
  source 1..80: mol_type = other DNA

SEQ ID NO: 53203 - DNA, 80 bp, synthetic construct; identical to SEQ ID NO: 18075
  source 1..80: mol_type = other DNA

SEQ ID NO: 53204 - DNA, 80 bp, synthetic construct; identical to SEQ ID NO: 8459
  source 1..80: mol_type = other DNA

SEQ ID NO: 53205 - DNA, 80 bp, synthetic construct; identical to SEQ ID NO: 18077
  source 1..80: mol_type = other DNA

SEQ ID NO: 53206 - DNA, 80 bp, synthetic construct; identical to SEQ ID NO: 18078
  source 1..80: mol_type = other DNA

SEQ ID NO: 53207 - DNA, 80 bp, synthetic construct; identical to SEQ ID NO: 18079
  source 1..80: mol_type = other DNA

SEQ ID NO: 53208 - DNA, 80 bp, synthetic construct; identical to SEQ ID NO: 8460
  source 1..80: mol_type = other DNA

SEQ ID NO: 53209 - DNA, 80 bp, synthetic construct; identical to SEQ ID NO: 18082
  source 1..80: mol_type = other DNA

SEQ ID NO: 53210 - DNA, 80 bp, synthetic construct; identical to SEQ ID NO: 18083
  source 1..80: mol_type = other DNA

SEQ ID NO: 53211 - DNA, 80 bp, synthetic construct; identical to SEQ ID NO: 8461
  source 1..80: mol_type = other DNA

SEQ ID NO: 53212 - DNA, 80 bp, synthetic construct; identical to SEQ ID NO: 18086
  source 1..80: mol_type = other DNA

SEQ ID NO: 53213 - DNA, 80 bp, synthetic construct; identical to SEQ ID NO: 18087
  source 1..80: mol_type = other DNA

SEQ ID NO: 53214 - DNA, 80 bp, synthetic construct; identical to SEQ ID NO: 18088
  source 1..80: mol_type = other DNA

SEQ ID NO: 53215 - DNA, 80 bp, synthetic construct; identical to SEQ ID NO: 8462
  source 1..80: mol_type = other DNA

SEQ ID NO: 53216 - DNA, 80 bp, synthetic construct; identical to SEQ ID NO: 18090
  source 1..80: mol_type = other DNA

SEQ ID NO: 53217 - DNA, 80 bp, synthetic construct; identical to SEQ ID NO: 18091
  source 1..80: mol_type = other DNA

SEQ ID NO: 53218 - DNA, 80 bp, synthetic construct; identical to SEQ ID NO: 8463
  source 1..80: mol_type = other DNA

SEQ ID NO: 53219 - DNA, 80 bp, synthetic construct; identical to SEQ ID NO: 18093
  source 1..80: mol_type = other DNA

SEQ ID NO: 53220 - DNA, 80 bp, synthetic construct; identical to SEQ ID NO: 18094
  source 1..80: mol_type = other DNA

SEQ ID NO: 53221 - DNA, 80 bp, synthetic construct; identical to SEQ ID NO: 8464
  source 1..80: mol_type = other DNA

SEQ ID NO: 53222 - DNA, 80 bp, synthetic construct; identical to SEQ ID NO: 18097
  source 1..80: mol_type = other DNA

SEQ ID NO: 53223 - DNA, 80 bp, synthetic construct; identical to SEQ ID NO: 18098
  source 1..80: mol_type = other DNA

SEQ ID NO: 53224 - DNA, 80 bp, synthetic construct; identical to SEQ ID NO: 18100
  source 1..80: mol_type = other DNA

SEQ ID NO: 53225 - DNA, 80 bp, synthetic construct; identical to SEQ ID NO: 18101
  source 1..80: mol_type = other DNA

SEQ ID NO: 53226 - DNA, 80 bp, synthetic construct; identical to SEQ ID NO: 8465
  source 1..80: mol_type = other DNA

SEQ ID NO: 53227 - DNA, 80 bp, synthetic construct; identical to SEQ ID NO: 18104
  source 1..80: mol_type = other DNA

SEQ ID NO: 53228 - DNA, 80 bp, synthetic construct; identical to SEQ ID NO: 18105
  source 1..80: mol_type = other DNA

SEQ ID NO: 53229 - DNA, 80 bp, synthetic construct; identical to SEQ ID NO: 8466
  source 1..80: mol_type = other DNA

SEQ ID NO: 53230 - DNA, 80 bp, synthetic construct; identical to SEQ ID NO: 18108
  source 1..80: mol_type = other DNA

SEQ ID NO: 53231 - DNA, 80 bp, synthetic construct; identical to SEQ ID NO: 18109
  source 1..80: mol_type = other DNA

SEQ ID NO: 53232 - DNA, 80 bp, synthetic construct; identical to SEQ ID NO: 8467
  source 1..80: mol_type = other DNA

SEQ ID NO: 53233 - DNA, 80 bp, synthetic construct; identical to SEQ ID NO: 18111
  source 1..80: mol_type = other DNA

SEQ ID NO: 53234 - DNA, 80 bp, synthetic construct; identical to SEQ ID NO: 18112
  source 1..80: mol_type = other DNA

SEQ ID NO: 53235 - DNA, 80 bp, synthetic construct; identical to SEQ ID NO: 18113
  source 1..80: mol_type = other DNA

SEQ ID NO: 53236 - DNA, 80 bp, synthetic construct; identical to SEQ ID NO: 18114
  source 1..80: mol_type = other DNA

SEQ ID NO: 53237 - DNA, 80 bp, synthetic construct; identical to SEQ ID NO: 8468
  source 1..80: mol_type = other DNA

SEQ ID NO: 53238 - DNA, 80 bp, synthetic construct; identical to SEQ ID NO: 18116
  source 1..80: mol_type = other DNA

SEQ ID NO: 53239 - DNA, 80 bp, synthetic construct; identical to SEQ ID NO: 18117
  source 1..80: mol_type = other DNA

SEQ ID NO: 53240 - DNA, 80 bp, synthetic construct; identical to SEQ ID NO: 8469
  source 1..80: mol_type = other DNA

SEQ ID NO: 53241 - DNA, 80 bp, synthetic construct; identical to SEQ ID NO: 18120
  source 1..80: mol_type = other DNA

SEQ ID NO: 53242 - DNA, 80 bp, synthetic construct; identical to SEQ ID NO: 18121
  source 1..80: mol_type = other DNA

SEQ ID NO: 53243 - DNA, 80 bp, synthetic construct; identical to SEQ ID NO: 18122
  source 1..80: mol_type = other DNA

SEQ ID NO: 53244 - DNA, 80 bp, synthetic construct; identical to SEQ ID NO: 8470
  source 1..80: mol_type = other DNA

SEQ ID NO: 53245 - DNA, 80 bp, synthetic construct; identical to SEQ ID NO: 18124
  source 1..80: mol_type = other DNA

SEQ ID NO: 53246 - DNA, 80 bp, synthetic construct; identical to SEQ ID NO: 18125
  source 1..80: mol_type = other DNA

SEQ ID NO: 53247 - DNA, 80 bp, synthetic construct; identical to SEQ ID NO: 8471
  source 1..80: mol_type = other DNA

SEQ ID NO: 53248 - DNA, 80 bp, synthetic construct; identical to SEQ ID NO: 18129
  source 1..80: mol_type = other DNA

SEQ ID NO: 53249 - DNA, 80 bp, synthetic construct; identical to SEQ ID NO: 18130
  source 1..80: mol_type = other DNA

SEQ ID NO: 53250 - DNA, 80 bp, synthetic construct; identical to SEQ ID NO: 8472
  source 1..80: mol_type = other DNA

SEQ ID NO: 53251 - DNA, 80 bp, synthetic construct; identical to SEQ ID NO: 18132
  source 1..80: mol_type = other DNA

SEQ ID NO: 53252 - DNA, 80 bp, synthetic construct; identical to SEQ ID NO: 18133
  source 1..80: mol_type = other DNA

SEQ ID NO: 53253 - DNA, 80 bp, synthetic construct; identical to SEQ ID NO: 18134
  source 1..80: mol_type = other DNA

SEQ ID NO: 53254 - DNA, 80 bp, synthetic construct; identical to SEQ ID NO: 8473
  source 1..80: mol_type = other DNA

SEQ ID NO: 53255 - DNA, 80 bp, synthetic construct; identical to SEQ ID NO: 18136
  source 1..80: mol_type = other DNA

SEQ ID NO: 53256 - DNA, 80 bp, synthetic construct; identical to SEQ ID NO: 18137
  source 1..80: mol_type = other DNA

SEQ ID NO: 53257 - DNA, 80 bp, synthetic construct; identical to SEQ ID NO: 8474
  source 1..80: mol_type = other DNA

SEQ ID NO: 53258 - DNA, 80 bp, synthetic construct; identical to SEQ ID NO: 18140
  source 1..80: mol_type = other DNA

SEQ ID NO: 53259 - DNA, 80 bp, synthetic construct; identical to SEQ ID NO: 18141
  source 1..80: mol_type = other DNA

SEQ ID NO: 53260 - DNA, 80 bp, synthetic construct; identical to SEQ ID NO: 8475
  source 1..80: mol_type = other DNA

SEQ ID NO: 53261 - DNA, 80 bp, synthetic construct; identical to SEQ ID NO: 18143
  source 1..80: mol_type = other DNA

SEQ ID NO: 53262 - DNA, 80 bp, synthetic construct; identical to SEQ ID NO: 18144
  source 1..80: mol_type = other DNA

SEQ ID NO: 53263 - DNA, 80 bp, synthetic construct; identical to SEQ ID NO: 18145
  source 1..80: mol_type = other DNA

SEQ ID NO: 53264 - DNA, 80 bp, synthetic construct; identical to SEQ ID NO: 8476
  source 1..80: mol_type = other DNA

SEQ ID NO: 53265 - DNA, 80 bp, synthetic construct; identical to SEQ ID NO: 18147
  source 1..80: mol_type = other DNA

SEQ ID NO: 53266 - DNA, 80 bp, synthetic construct; identical to SEQ ID NO: 18148
  source 1..80: mol_type = other DNA

SEQ ID NO: 53267 - DNA, 80 bp, synthetic construct; identical to SEQ ID NO: 18149
  source 1..80: mol_type = other DNA

SEQ ID NO: 53268 - DNA, 80 bp, synthetic construct; identical to SEQ ID NO: 8477
  source 1..80: mol_type = other DNA

SEQ ID NO: 53269 - DNA, 80 bp, synthetic construct; identical to SEQ ID NO: 18151
  source 1..80: mol_type = other DNA

SEQ ID NO: 53270 - DNA, 80 bp, synthetic construct; identical to SEQ ID NO: 18152
  source 1..80: mol_type = other DNA

SEQ ID NO: 53271 - DNA, 80 bp, synthetic construct; identical to SEQ ID NO: 18153
  source 1..80: mol_type = other DNA

SEQ ID NO: 53272 - DNA, 80 bp, synthetic construct; identical to SEQ ID NO: 8478
  source 1..80: mol_type = other DNA

SEQ ID NO: 53273 - DNA, 80 bp, synthetic construct; identical to SEQ ID NO: 18155
  source 1..80: mol_type = other DNA

SEQ ID NO: 53274 - DNA, 80 bp, synthetic construct; identical to SEQ ID NO: 18157
  source 1..80: mol_type = other DNA

SEQ ID NO: 53275 - DNA, 80 bp, synthetic construct; identical to SEQ ID NO: 8479
  source 1..80: mol_type = other DNA

SEQ ID NO: 53276 - DNA, 80 bp, synthetic construct; identical to SEQ ID NO: 18159
  source 1..80: mol_type = other DNA

SEQ ID NO: 53277 - DNA, 80 bp, synthetic construct; identical to SEQ ID NO: 18160
  source 1..80: mol_type = other DNA

SEQ ID NO: 53278 - DNA, 80 bp, synthetic construct; identical to SEQ ID NO: 8480
  source 1..80: mol_type = other DNA

SEQ ID NO: 53279 - DNA, 80 bp, synthetic construct; identical to SEQ ID NO: 18164
  source 1..80: mol_type = other DNA

SEQ ID NO: 53280 - DNA, 80 bp, synthetic construct; identical to SEQ ID NO: 18165
  source 1..80: mol_type = other DNA

SEQ ID NO: 53281 - DNA, 80 bp, synthetic construct; identical to SEQ ID NO: 18166
  source 1..80: mol_type = other DNA

SEQ ID NO: 53282 - DNA, 80 bp, synthetic construct; identical to SEQ ID NO: 8481
  source 1..80: mol_type = other DNA

SEQ ID NO: 53283 - DNA, 80 bp, synthetic construct; identical to SEQ ID NO: 18168
  source 1..80: mol_type = other DNA

SEQ ID NO: 53284 - DNA, 80 bp, synthetic construct; identical to SEQ ID NO: 18169
  source 1..80: mol_type = other DNA

SEQ ID NO: 53285 - DNA, 80 bp, synthetic construct; identical to SEQ ID NO: 18170
  source 1..80: mol_type = other DNA

SEQ ID NO: 53286 - DNA, 80 bp, synthetic construct; identical to SEQ ID NO: 8482
  source 1..80: mol_type = other DNA

SEQ ID NO: 53287 - DNA, 80 bp, synthetic construct; identical to SEQ ID NO: 18173
  source 1..80: mol_type = other DNA

SEQ ID NO: 53288 - DNA, 80 bp, synthetic construct; identical to SEQ ID NO: 18174
  source 1..80: mol_type = other DNA

SEQ ID NO: 53289 - DNA, 80 bp, synthetic construct; identical to SEQ ID NO: 8483
  source 1..80: mol_type = other DNA

SEQ ID NO: 53290 - DNA, 80 bp, synthetic construct; identical to SEQ ID NO: 18176
  source 1..80: mol_type = other DNA

SEQ ID NO: 53291 - DNA, 80 bp, synthetic construct; identical to SEQ ID NO: 18177
  source 1..80: mol_type = other DNA

SEQ ID NO: 53292 - DNA, 80 bp, synthetic construct; identical to SEQ ID NO: 18178
  source 1..80: mol_type = other DNA

SEQ ID NO: 53293 - DNA, 80 bp, synthetic construct; identical to SEQ ID NO: 8484
  source 1..80: mol_type = other DNA

SEQ ID NO: 53294 - DNA, 80 bp, synthetic construct; identical to SEQ ID NO: 18181
  source 1..80: mol_type = other DNA

SEQ ID NO: 53295 - DNA, 80 bp, synthetic construct; identical to SEQ ID NO: 18182
  source 1..80: mol_type = other DNA

SEQ ID NO: 53296 - DNA, 80 bp, synthetic construct; identical to SEQ ID NO: 18183
  source 1..80: mol_type = other DNA

SEQ ID NO: 53297 - DNA, 80 bp, synthetic construct; identical to SEQ ID NO: 8485
  source 1..80: mol_type = other DNA

SEQ ID NO: 53298 - DNA, 80 bp, synthetic construct; identical to SEQ ID NO: 18185
  source 1..80: mol_type = other DNA

SEQ ID NO: 53299 - DNA, 80 bp, synthetic construct; identical to SEQ ID NO: 18186
  source 1..80: mol_type = other DNA

SEQ ID NO: 53300 - DNA, 80 bp, synthetic construct; identical to SEQ ID NO: 8486
  source 1..80: mol_type = other DNA

SEQ ID NO: 53301 - DNA, 80 bp, synthetic construct; identical to SEQ ID NO: 18189
  source 1..80: mol_type = other DNA

SEQ ID NO: 53302 - DNA, 80 bp, synthetic construct; identical to SEQ ID NO: 18190
  source 1..80: mol_type = other DNA

SEQ ID NO: 53303 - DNA, 80 bp, synthetic construct; identical to SEQ ID NO: 18191
  source 1..80: mol_type = other DNA

SEQ ID NO: 53304 - DNA, 80 bp, synthetic construct; identical to SEQ ID NO: 8487
  source 1..80: mol_type = other DNA

SEQ ID NO: 53305 - DNA, 80 bp, synthetic construct; identical to SEQ ID NO: 18193
  source 1..80: mol_type = other DNA

SEQ ID NO: 53306 - DNA, 80 bp, synthetic construct; identical to SEQ ID NO: 18194
  source 1..80: mol_type = other DNA

SEQ ID NO: 53307 - DNA, 80 bp, synthetic construct; identical to SEQ ID NO: 8488
  source 1..80: mol_type = other DNA

SEQ ID NO: 53308 - DNA, 80 bp, synthetic construct; identical to SEQ ID NO: 18196
  source 1..80: mol_type = other DNA

SEQ ID NO: 53309 - DNA, 80 bp, synthetic construct; identical to SEQ ID NO: 18197
  source 1..80: mol_type = other DNA

SEQ ID NO: 53310 - DNA, 80 bp, synthetic construct; identical to SEQ ID NO: 18199
  source 1..80: mol_type = other DNA

SEQ ID NO: 53311 - DNA, 80 bp, synthetic construct; identical to SEQ ID NO: 8489
  source 1..80: mol_type = other DNA

SEQ ID NO: 53312 - DNA, 80 bp, synthetic construct; identical to SEQ ID NO: 18201
  source 1..80: mol_type = other DNA

SEQ ID NO: 53313 - DNA, 80 bp, synthetic construct; identical to SEQ ID NO: 18202
  source 1..80: mol_type = other DNA

SEQ ID NO: 53314 - DNA, 80 bp, synthetic construct; identical to SEQ ID NO: 8490
  source 1..80: mol_type = other DNA

SEQ ID NO: 53315 - DNA, 80 bp, synthetic construct; identical to SEQ ID NO: 18205
  source 1..80: mol_type = other DNA

SEQ ID NO: 53316 - DNA, 80 bp, synthetic construct; identical to SEQ ID NO: 18207
  source 1..80: mol_type = other DNA

SEQ ID NO: 53317 - DNA, 80 bp, synthetic construct; identical to SEQ ID NO: 8491
  source 1..80: mol_type = other DNA

SEQ ID NO: 53318 - DNA, 80 bp, synthetic construct; identical to SEQ ID NO: 18209
  source 1..80: mol_type = other DNA

SEQ ID NO: 53319 - DNA, 80 bp, synthetic construct; identical to SEQ ID NO: 8492
  source 1..80: mol_type = other DNA

SEQ ID NO: 53320 - DNA, 80 bp, synthetic construct; identical to SEQ ID NO: 18212
  source 1..80: mol_type = other DNA

SEQ ID NO: 53321 - DNA, 80 bp, synthetic construct; identical to SEQ ID NO: 18214
  source 1..80: mol_type = other DNA

SEQ ID NO: 53322 - DNA, 80 bp, synthetic construct; identical to SEQ ID NO: 8493
  source 1..80: mol_type = other DNA

SEQ ID NO: 53323 - DNA, 80 bp, synthetic construct; identical to SEQ ID NO: 18216
  source 1..80: mol_type = other DNA

SEQ ID NO: 53324 - DNA, 80 bp, synthetic construct; identical to SEQ ID NO: 18217
  source 1..80: mol_type = other DNA

SEQ ID NO: 53325 - DNA, 80 bp, synthetic construct; identical to SEQ ID NO: 18218
  source 1..80: mol_type = other DNA

SEQ ID NO: 53326 - DNA, 80 bp, synthetic construct; identical to SEQ ID NO: 18219
  source 1..80: mol_type = other DNA

SEQ ID NO: 53327 - DNA, 80 bp, synthetic construct; identical to SEQ ID NO: 8494
  source 1..80: mol_type = other DNA

SEQ ID NO: 53328 - DNA, 80 bp, synthetic construct; identical to SEQ ID NO: 18221
  source 1..80: mol_type = other DNA

SEQ ID NO: 53329 - DNA, 80 bp, synthetic construct; identical to SEQ ID NO: 18222
  source 1..80: mol_type = other DNA

SEQ ID NO: 53330 - DNA, 80 bp, synthetic construct; identical to SEQ ID NO: 8495
  source 1..80: mol_type = other DNA

SEQ ID NO: 53331 - DNA, 80 bp, synthetic construct; identical to SEQ ID NO: 18224
  source 1..80: mol_type = other DNA

SEQ ID NO: 53332 - DNA, 80 bp, synthetic construct; identical to SEQ ID NO: 18225
  source 1..80: mol_type = other DNA

SEQ ID NO: 53333 - DNA, 80 bp, synthetic construct; identical to SEQ ID NO: 18226
  source 1..80: mol_type = other DNA

SEQ ID NO: 53334 - DNA, 80 bp, synthetic construct; identical to SEQ ID NO: 8496
  source 1..80: mol_type = other DNA

SEQ ID NO: 53335 - DNA, 80 bp, synthetic construct; identical to SEQ ID NO: 18228
  source 1..80: mol_type = other DNA

SEQ ID NO: 53336 - DNA, 80 bp, synthetic construct; identical to SEQ ID NO: 18229
  source 1..80: mol_type = other DNA

SEQ ID NO: 53337 - DNA, 80 bp, synthetic construct; identical to SEQ ID NO: 18231
  source 1..80: mol_type = other DNA

SEQ ID NO: 53338 - DNA, 80 bp, synthetic construct; identical to SEQ ID NO: 8497
  source 1..80: mol_type = other DNA

SEQ ID NO: 53339 - DNA, 80 bp, synthetic construct; identical to SEQ ID NO: 18233
  source 1..80: mol_type = other DNA

SEQ ID NO: 53340 - DNA, 80 bp, synthetic construct; identical to SEQ ID NO: 18235
  source 1..80: mol_type = other DNA

SEQ ID NO: 53341 - DNA, 80 bp, synthetic construct; identical to SEQ ID NO: 8498
  source 1..80: mol_type = other DNA

SEQ ID NO: 53342 - DNA, 80 bp, synthetic construct; identical to SEQ ID NO: 18237
  source 1..80: mol_type = other DNA

SEQ ID NO: 53343 - DNA, 80 bp, synthetic construct; identical to SEQ ID NO: 18238
  source 1..80: mol_type = other DNA

SEQ ID NO: 53344 - DNA, 80 bp, synthetic construct; identical to SEQ ID NO: 18239
  source 1..80: mol_type = other DNA

SEQ ID NO: 53345 - DNA, 80 bp, synthetic construct; identical to SEQ ID NO: 8499
  source 1..80: mol_type = other DNA

SEQ ID NO: 53346 - DNA, 80 bp, synthetic construct; identical to SEQ ID NO: 18242
  source 1..80: mol_type = other DNA

SEQ ID NO: 53347 - DNA, 80 bp, synthetic construct; identical to SEQ ID NO: 8500
  source 1..80: mol_type = other DNA

SEQ ID NO: 53348 - DNA, 80 bp, synthetic construct; identical to SEQ ID NO: 18244
  source 1..80: mol_type = other DNA

SEQ ID NO: 53349 - DNA, 80 bp, synthetic construct; identical to SEQ ID NO: 18245
  source 1..80: mol_type = other DNA

SEQ ID NO: 53350 - DNA, 80 bp, synthetic construct; identical to SEQ ID NO: 18246
  source 1..80: mol_type = other DNA

SEQ ID NO: 53351 - DNA, 80 bp, synthetic construct; identical to SEQ ID NO: 8501
  source 1..80: mol_type = other DNA

SEQ ID NO: 53352 - DNA, 80 bp, synthetic construct; identical to SEQ ID NO: 18248
  source 1..80: mol_type = other DNA

SEQ ID NO: 53353 - DNA, 80 bp, synthetic construct; identical to SEQ ID NO: 18249
  source 1..80: mol_type = other DNA

SEQ ID NO: 53354 - DNA, 80 bp, synthetic construct; identical to SEQ ID NO: 18250
  source 1..80: mol_type = other DNA

SEQ ID NO: 53355 - DNA, 80 bp, synthetic construct; identical to SEQ ID NO: 18251
  source 1..80: mol_type = other DNA

SEQ ID NO: 53356 - DNA, 80 bp, synthetic construct; identical to SEQ ID NO: 8502
  source 1..80: mol_type = other DNA

SEQ ID NO: 53357 - DNA, 80 bp, synthetic construct; identical to SEQ ID NO: 18253
  source 1..80: mol_type = other DNA

SEQ ID NO: 53358 - DNA, 80 bp, synthetic construct; identical to SEQ ID NO: 18255
  source 1..80: mol_type = other DNA

SEQ ID NO: 53359 - DNA, 80 bp, synthetic construct; identical to SEQ ID NO: 8503
  source 1..80: mol_type = other DNA

SEQ ID NO: 53360 - DNA, 80 bp, synthetic construct; identical to SEQ ID NO: 18258
  source 1..80: mol_type = other DNA

SEQ ID NO: 53361 - DNA, 80 bp, synthetic construct; identical to SEQ ID NO: 18259
  source 1..80: mol_type = other DNA

SEQ ID NO: 53362 - DNA, 80 bp, synthetic construct; identical to SEQ ID NO: 8504
  source 1..80: mol_type = other DNA

SEQ ID NO: 53363 - DNA, 80 bp, synthetic construct; identical to SEQ ID NO: 18261
  source 1..80: mol_type = other DNA

SEQ ID NO: 53364 - DNA, 80 bp, synthetic construct; identical to SEQ ID NO: 18262
  source 1..80: mol_type = other DNA

SEQ ID NO: 53365 - DNA, 80 bp, synthetic construct; identical to SEQ ID NO: 8505
  source 1..80: mol_type = other DNA

SEQ ID NO: 53366 - DNA, 80 bp, synthetic construct; identical to SEQ ID NO: 18265
  source 1..80: mol_type = other DNA

SEQ ID NO: 53367 - DNA, 80 bp, synthetic construct; identical to SEQ ID NO: 18266
  source 1..80: mol_type = other DNA

SEQ ID NO: 53368 - DNA, 80 bp, synthetic construct; identical to SEQ ID NO: 8506
  source 1..80: mol_type = other DNA

SEQ ID NO: 53369 - DNA, 80 bp, synthetic construct; identical to SEQ ID NO: 18268
  source 1..80: mol_type = other DNA

SEQ ID NO: 53370 - DNA, 80 bp, synthetic construct; identical to SEQ ID NO: 18269
  source 1..80: mol_type = other DNA

SEQ ID NO: 53371 - DNA, 80 bp, synthetic construct; identical to SEQ ID NO: 18270
  source 1..80: mol_type = other DNA

SEQ ID NO: 53372 - DNA, 80 bp, synthetic construct; identical to SEQ ID NO: 8507
  source 1..80: mol_type = other DNA

SEQ ID NO: 53373 - DNA, 80 bp, synthetic construct; identical to SEQ ID NO: 18272
  source 1..80: mol_type = other DNA

SEQ ID NO: 53374 - DNA, 80 bp, synthetic construct; identical to SEQ ID NO: 18273
  source 1..80: mol_type = other DNA

SEQ ID NO: 53375 - DNA, 80 bp, synthetic construct; identical to SEQ ID NO: 18274
  source 1..80: mol_type = other DNA

SEQ ID NO: 53376 - DNA, 80 bp, synthetic construct; identical to SEQ ID NO: 8508
  source 1..80: mol_type = other DNA

SEQ ID NO: 53377 - DNA, 80 bp, synthetic construct; identical to SEQ ID NO: 18276
  source 1..80: mol_type = other DNA

SEQ ID NO: 53378 - DNA, 80 bp, synthetic construct; identical to SEQ ID NO: 18277
  source 1..80: mol_type = other DNA

SEQ ID NO: 53379 - DNA, 80 bp, synthetic construct; identical to SEQ ID NO: 18278
  source 1..80: mol_type = other DNA

SEQ ID NO: 53380 - DNA, 80 bp, synthetic construct; identical to SEQ ID NO: 8509
  source 1..80: mol_type = other DNA

SEQ ID NO: 53381 - DNA, 80 bp, synthetic construct; identical to SEQ ID NO: 18281
  source 1..80: mol_type = other DNA

SEQ ID NO: 53382 - DNA, 80 bp, synthetic construct; identical to SEQ ID NO: 18282
  source 1..80: mol_type = other DNA

SEQ ID NO: 53383 - DNA, 80 bp, synthetic construct; identical to SEQ ID NO: 18283
  source 1..80: mol_type = other DNA

SEQ ID NO: 53384 - DNA, 80 bp, synthetic construct; identical to SEQ ID NO: 8510
  source 1..80: mol_type = other DNA

SEQ ID NO: 53385 - DNA, 80 bp, synthetic construct; identical to SEQ ID NO: 18286
  source 1..80: mol_type = other DNA

SEQ ID NO: 53386 - DNA, 80 bp, synthetic construct; identical to SEQ ID NO: 18287
  source 1..80: mol_type = other DNA

SEQ ID NO: 53387 - DNA, 80 bp, synthetic construct; identical to SEQ ID NO: 8511
  source 1..80: mol_type = other DNA

SEQ ID NO: 53388 - DNA, 80 bp, synthetic construct; identical to SEQ ID NO: 18289
  source 1..80: mol_type = other DNA

SEQ ID NO: 53389 - DNA, 80 bp, synthetic construct; identical to SEQ ID NO: 18290
  source 1..80: mol_type = other DNA

SEQ ID NO: 53390 - DNA, 80 bp, synthetic construct; identical to SEQ ID NO: 18291
  source 1..80: mol_type = other DNA

SEQ ID NO: 53391 - DNA, 80 bp, synthetic construct; identical to SEQ ID NO: 8512
  source 1..80: mol_type = other DNA

SEQ ID NO: 53392 - DNA, 80 bp, synthetic construct; identical to SEQ ID NO: 18293
  source 1..80: mol_type = other DNA

SEQ ID NO: 53393 - DNA, 80 bp, synthetic construct; identical to SEQ ID NO: 18294
  source 1..80: mol_type = other DNA

SEQ ID NO: 53394 - DNA, 80 bp, synthetic construct; identical to SEQ ID NO: 18295
  source 1..80: mol_type = other DNA

SEQ ID NO: 53395 - DNA, 80 bp, synthetic construct; identical to SEQ ID NO: 8513
  source 1..80: mol_type = other DNA

SEQ ID NO: 53396 - DNA, 80 bp, synthetic construct; identical to SEQ ID NO: 18297
  source 1..80: mol_type = other DNA

SEQ ID NO: 53397 - DNA, 80 bp, synthetic construct; identical to SEQ ID NO: 18298
  source 1..80: mol_type = other DNA

SEQ ID NO: 53398 - DNA, 80 bp, synthetic construct; identical to SEQ ID NO: 8514
  source 1..80: mol_type = other DNA

SEQ ID NO: 53399 - DNA, 80 bp, synthetic construct; identical to SEQ ID NO: 18301
  source 1..80: mol_type = other DNA

SEQ ID NO: 53400 - DNA, 80 bp, synthetic construct; identical to SEQ ID NO: 18302
  source 1..80: mol_type = other DNA

SEQ ID NO: 53401 - DNA, 80 bp, synthetic construct; identical to SEQ ID NO: 8515
  source 1..80: mol_type = other DNA

SEQ ID NO: 53402 - DNA, 80 bp, synthetic construct; identical to SEQ ID NO: 18304
  source 1..80: mol_type = other DNA

SEQ ID NO: 53403 - DNA, 80 bp, synthetic construct; identical to SEQ ID NO: 18305
  source 1..80: mol_type = other DNA

SEQ ID NO: 53404 - DNA, 80 bp, synthetic construct; identical to SEQ ID NO: 18306
  source 1..80: mol_type = other DNA

SEQ ID NO: 53405 - DNA, 80 bp, synthetic construct; identical to SEQ ID NO: 18307
  source 1..80: mol_type = other DNA

SEQ ID NO: 53406 - DNA, 80 bp, synthetic construct; identical to SEQ ID NO: 8516
  source 1..80: mol_type = other DNA

SEQ ID NO: 53407 - DNA, 80 bp, synthetic construct; identical to SEQ ID NO: 18309
  source 1..80: mol_type = other DNA

SEQ ID NO: 53408 - DNA, 80 bp, synthetic construct; identical to SEQ ID NO: 18310
  source 1..80: mol_type = other DNA

SEQ ID NO: 53409 - DNA, 80 bp, synthetic construct; identical to SEQ ID NO: 18311
  source 1..80: mol_type = other DNA

SEQ ID NO: 53410 - DNA, 80 bp, synthetic construct; identical to SEQ ID NO: 8517
  source 1..80: mol_type = other DNA

SEQ ID NO: 53411 - DNA, 80 bp, synthetic construct; identical to SEQ ID NO: 18314
  source 1..80: mol_type = other DNA

SEQ ID NO: 53412 - DNA, 80 bp, synthetic construct; identical to SEQ ID NO: 18315
  source 1..80: mol_type = other DNA

SEQ ID NO: 53413 - DNA, 80 bp, synthetic construct; identical to SEQ ID NO: 8518
  source 1..80: mol_type = other DNA

SEQ ID NO: 53414 - DNA, 80 bp, synthetic construct; identical to SEQ ID NO: 18318
  source 1..80: mol_type = other DNA

SEQ ID NO: 53415 - DNA, 80 bp, synthetic construct; identical to SEQ ID NO: 18319
  source 1..80: mol_type = other DNA

SEQ ID NO: 53416 - DNA, 80 bp, synthetic construct; identical to SEQ ID NO: 8519
  source 1..80: mol_type = other DNA

SEQ ID NO: 53417 - DNA, 80 bp, synthetic construct; identical to SEQ ID NO: 18321
  source 1..80: mol_type = other DNA

SEQ ID NO: 53418 - DNA, 80 bp, synthetic construct; identical to SEQ ID NO: 18322
  source 1..80: mol_type = other DNA

SEQ ID NO: 53419 - DNA, 80 bp, synthetic construct; identical to SEQ ID NO: 18323
  source 1..80: mol_type = other DNA

SEQ ID NO: 53420 - DNA, 80 bp, synthetic construct; identical to SEQ ID NO: 8520
  source 1..80: mol_type = other DNA

SEQ ID NO: 53421 - DNA, 80 bp, synthetic construct; identical to SEQ ID NO: 18326
  source 1..80: mol_type = other DNA

SEQ ID NO: 53422 - DNA, 80 bp, synthetic construct; identical to SEQ ID NO: 8521
  source 1..80: mol_type = other DNA

SEQ ID NO: 53423 - DNA, 80 bp, synthetic construct; identical to SEQ ID NO: 18328
  source 1..80: mol_type = other DNA

SEQ ID NO: 53424 - DNA, 80 bp, synthetic construct; identical to SEQ ID NO: 18329
  source 1..80: mol_type = other DNA

SEQ ID NO: 53425 - DNA, 80 bp, synthetic construct; identical to SEQ ID NO: 18331
  source 1..80: mol_type = other DNA

SEQ ID NO: 53426 - DNA, 80 bp, synthetic construct; identical to SEQ ID NO: 8522
  source 1..80: mol_type = other DNA

SEQ ID NO: 53427 - DNA, 80 bp, synthetic construct; identical to SEQ ID NO: 18334
  source 1..80: mol_type = other DNA

SEQ ID NO: 53428 - DNA, 80 bp, synthetic construct; identical to SEQ ID NO: 18335
  source 1..80: mol_type = other DNA

SEQ ID NO: 53429 - DNA, 80 bp, synthetic construct; identical to SEQ ID NO: 8523
  source 1..80: mol_type = other DNA

SEQ ID NO: 53430 - DNA, 80 bp, synthetic construct; identical to SEQ ID NO: 18337
  source 1..80: mol_type = other DNA

SEQ ID NO: 53431 - DNA, 80 bp, synthetic construct; identical to SEQ ID NO: 18338
  source 1..80: mol_type = other DNA

SEQ ID NO: 53432 - DNA, 80 bp, synthetic construct; identical to SEQ ID NO: 8524
  source 1..80: mol_type = other DNA

SEQ ID NO: 53433 - DNA, 80 bp, synthetic construct; identical to SEQ ID NO: 18341
  source 1..80: mol_type = other DNA

SEQ ID NO: 53434 - DNA, 80 bp, synthetic construct; identical to SEQ ID NO: 18342
  source 1..80: mol_type = other DNA

SEQ ID NO: 53435 - DNA, 80 bp, synthetic construct; identical to SEQ ID NO: 8525
  source 1..80: mol_type = other DNA

SEQ ID NO: 53436 - DNA, 80 bp, synthetic construct; identical to SEQ ID NO: 18344
  source 1..80: mol_type = other DNA

SEQ ID NO: 53437 - DNA, 80 bp, synthetic construct; identical to SEQ ID NO: 18345
  source 1..80: mol_type = other DNA

SEQ ID NO: 53438 - DNA, 80 bp, synthetic construct; identical to SEQ ID NO: 18346
  source 1..80: mol_type = other DNA

SEQ ID NO: 53439 - DNA, 80 bp, synthetic construct; identical to SEQ ID NO: 18347
  source 1..80: mol_type = other DNA

SEQ ID NO: 53440 - DNA, 80 bp, synthetic construct; identical to SEQ ID NO: 8526
  source 1..80: mol_type = other DNA

SEQ ID NO: 53441 - DNA, 80 bp, synthetic construct; identical to SEQ ID NO: 18349
  source 1..80: mol_type = other DNA

SEQ ID NO: 53442 - DNA, 80 bp, synthetic construct; identical to SEQ ID NO: 18350
  source 1..80: mol_type = other DNA

SEQ ID NO: 53443 - DNA, 80 bp, synthetic construct; identical to SEQ ID NO: 18351
  source 1..80: mol_type = other DNA

SEQ ID NO: 53444 - DNA, 80 bp, synthetic construct; identical to SEQ ID NO: 8527
  source 1..80: mol_type = other DNA

SEQ ID NO: 53445 - DNA, 80 bp, synthetic construct; identical to SEQ ID NO: 18353
  source 1..80: mol_type = other DNA

SEQ ID NO: 53446 - DNA, 80 bp, synthetic construct; identical to SEQ ID NO: 18354
  source 1..80: mol_type = other DNA

SEQ ID NO: 53447 - DNA, 80 bp, synthetic construct; identical to SEQ ID NO: 18355
  source 1..80: mol_type = other DNA

SEQ ID NO: 53448 - DNA, 80 bp, synthetic construct; identical to SEQ ID NO: 8528
  source 1..80: mol_type = other DNA

SEQ ID NO: 53449 - DNA, 80 bp, synthetic construct; identical to SEQ ID NO: 18358
  source 1..80: mol_type = other DNA

SEQ ID NO: 53450 - DNA, 80 bp, synthetic construct; identical to SEQ ID NO: 18359
  source 1..80: mol_type = other DNA

SEQ ID NO: 53451 - DNA, 80 bp, synthetic construct; identical to SEQ ID NO: 8529
  source 1..80: mol_type = other DNA

SEQ ID NO: 53452 - DNA, 80 bp, synthetic construct; identical to SEQ ID NO: 18361
  source 1..80: mol_type = other DNA

SEQ ID NO: 53453 - DNA, 80 bp, synthetic construct; identical to SEQ ID NO: 18362
  source 1..80: mol_type = other DNA

SEQ ID NO: 53454 - DNA, 80 bp, synthetic construct; identical to SEQ ID NO: 8530
  source 1..80: mol_type = other DNA

SEQ ID NO: 53455 - DNA, 80 bp, synthetic construct; identical to SEQ ID NO: 18365
  source 1..80: mol_type = other DNA

SEQ ID NO: 53456 - DNA, 80 bp, synthetic construct; identical to SEQ ID NO: 18366
  source 1..80: mol_type = other DNA

SEQ ID NO: 53457 - DNA, 80 bp, synthetic construct; identical to SEQ ID NO: 8531
  source 1..80: mol_type = other DNA

SEQ ID NO: 53458 - DNA, 80 bp, synthetic construct; identical to SEQ ID NO: 18368
  source 1..80: mol_type = other DNA

SEQ ID NO: 53459 - DNA, 80 bp, synthetic construct; identical to SEQ ID NO: 18369
  source 1..80: mol_type = other DNA

SEQ ID NO: 53460 - DNA, 80 bp, synthetic construct; identical to SEQ ID NO: 18371
  source 1..80: mol_type = other DNA

SEQ ID NO: 53461 - DNA, 80 bp, synthetic construct; identical to SEQ ID NO: 8532
  source 1..80: mol_type = other DNA

SEQ ID NO: 53462 - DNA, 80 bp, synthetic construct; identical to SEQ ID NO: 18373
  source 1..80: mol_type = other DNA

SEQ ID NO: 53463 - DNA, 80 bp, synthetic construct; identical to SEQ ID NO: 18374
  source 1..80: mol_type = other DNA

SEQ ID NO: 53464 - DNA, 80 bp, synthetic construct; identical to SEQ ID NO: 8533
  source 1..80: mol_type = other DNA

SEQ ID NO: 53465 - DNA, 80 bp, synthetic construct; identical to SEQ ID NO: 18376
  source 1..80: mol_type = other DNA

SEQ ID NO: 53466 - DNA, 80 bp, synthetic construct; identical to SEQ ID NO: 18377
  source 1..80: mol_type = other DNA

SEQ ID NO: 53467 - DNA, 80 bp, synthetic construct; identical to SEQ ID NO: 18378
  source 1..80: mol_type = other DNA

SEQ ID NO: 53468 - DNA, 80 bp, synthetic construct; identical to SEQ ID NO: 18379
  source 1..80: mol_type = other DNA

SEQ ID NO: 53469 - DNA, 80 bp, synthetic construct; identical to SEQ ID NO: 8534
  source 1..80: mol_type = other DNA

SEQ ID NO: 53470 - DNA, 80 bp, synthetic construct; identical to SEQ ID NO: 18381
  source 1..80: mol_type = other DNA

SEQ ID NO: 53471 - DNA, 80 bp, synthetic construct; identical to SEQ ID NO: 18382
  source 1..80: mol_type = other DNA

SEQ ID NO: 53472 - DNA, 80 bp, synthetic construct; identical to SEQ ID NO: 18383
  source 1..80: mol_type = other DNA

SEQ ID NO: 53473 - DNA, 80 bp, synthetic construct; identical to SEQ ID NO: 18384
  source 1..80: mol_type = other DNA

SEQ ID NO: 53474 - DNA, 80 bp, synthetic construct; identical to SEQ ID NO: 8535
  source 1..80: mol_type = other DNA

SEQ ID NO: 53475 - DNA, 80 bp, synthetic construct; identical to SEQ ID NO: 18386
  source 1..80: mol_type = other DNA

SEQ ID NO: 53476 - DNA, 80 bp, synthetic construct; identical to SEQ ID NO: 18387
  source 1..80: mol_type = other DNA

SEQ ID NO: 53477 - DNA, 80 bp, synthetic construct; identical to SEQ ID NO: 18388
  source 1..80: mol_type = other DNA

SEQ ID NO: 53478 - DNA, 80 bp, synthetic construct; identical to SEQ ID NO: 8536
  source 1..80: mol_type = other DNA

SEQ ID NO: 53479 - DNA, 80 bp, synthetic construct; identical to SEQ ID NO: 18390
  source 1..80: mol_type = other DNA

SEQ ID NO: 53480 - DNA, 80 bp, synthetic construct; identical to SEQ ID NO: 8537
  source 1..80: mol_type = other DNA

SEQ ID NO: 53481 - DNA, 80 bp, synthetic construct; identical to SEQ ID NO: 18393
  source 1..80: mol_type = other DNA

SEQ ID NO: 53482 - DNA, 80 bp, synthetic construct; identical to SEQ ID NO: 18394
  source 1..80: mol_type = other DNA

SEQ ID NO: 53483 - DNA, 80 bp, synthetic construct; identical to SEQ ID NO: 18396
  source 1..80: mol_type = other DNA

SEQ ID NO: 53484 - DNA, 80 bp, synthetic construct; identical to SEQ ID NO: 8538
  source 1..80: mol_type = other DNA

SEQ ID NO: 53485 - DNA, 80 bp, synthetic construct; identical to SEQ ID NO: 18399
  source 1..80: mol_type = other DNA

SEQ ID NO: 53486 - DNA, 80 bp, synthetic construct; identical to SEQ ID NO: 18400
  source 1..80: mol_type = other DNA

SEQ ID NO: 53487 - DNA, 80 bp, synthetic construct; identical to SEQ ID NO: 8539
  source 1..80: mol_type = other DNA

SEQ ID NO: 53488 - DNA, 80 bp, synthetic construct; identical to SEQ ID NO: 18402
  source 1..80: mol_type = other DNA

SEQ ID NO: 53489 - DNA, 80 bp, synthetic construct; identical to SEQ ID NO: 18403
  source 1..80: mol_type = other DNA

SEQ ID NO: 53490 - DNA, 80 bp, synthetic construct; identical to SEQ ID NO: 8540
  source 1..80: mol_type = other DNA

SEQ ID NO: 53491 - DNA, 80 bp, synthetic construct; identical to SEQ ID NO: 18406
  source 1..80: mol_type = other DNA

SEQ ID NO: 53492 - DNA, 80 bp, synthetic construct; identical to SEQ ID NO: 18407
  source 1..80: mol_type = other DNA

SEQ ID NO: 53493 - DNA, 80 bp, synthetic construct; identical to SEQ ID NO: 18408
  source 1..80: mol_type = other DNA

SEQ ID NO: 53494 - DNA, 80 bp, synthetic construct; identical to SEQ ID NO: 8541
  source 1..80: mol_type = other DNA

SEQ ID NO: 53495 - DNA, 80 bp, synthetic construct; identical to SEQ ID NO: 18410
  source 1..80: mol_type = other DNA

SEQ ID NO: 53496 - DNA, 80 bp, synthetic construct; identical to SEQ ID NO: 18411
  source 1..80: mol_type = other DNA

SEQ ID NO: 53497 - DNA, 80 bp, synthetic construct; identical to SEQ ID NO: 8542
  source 1..80: mol_type = other DNA

SEQ ID NO: 53498 - DNA, 80 bp, synthetic construct; identical to SEQ ID NO: 18413
  source 1..80: mol_type = other DNA

SEQ ID NO: 53499 - DNA, 80 bp, synthetic construct; identical to SEQ ID NO: 18415
  source 1..80: mol_type = other DNA

SEQ ID NO: 53500 - DNA, 80 bp, synthetic construct; identical to SEQ ID NO: 18418
  source 1..80: mol_type = other DNA

SEQ ID NO: 53501 - DNA, 80 bp, synthetic construct; identical to SEQ ID NO: 18419
  source 1..80: mol_type = other DNA

SEQ ID NO: 53502 - DNA, 80 bp, synthetic construct; identical to SEQ ID NO: 18420
  source 1..80: mol_type = other DNA

SEQ ID NO: 53503 - DNA, 80 bp, synthetic construct; identical to SEQ ID NO: 8544
  source 1..80: mol_type = other DNA

SEQ ID NO: 53504 - DNA, 80 bp, synthetic construct; identical to SEQ ID NO: 18422
  source 1..80: mol_type = other DNA

SEQ ID NO: 53505 - DNA, 80 bp, synthetic construct; identical to SEQ ID NO: 18423
  source 1..80: mol_type = other DNA

SEQ ID NO: 53506 - DNA, 80 bp, synthetic construct; identical to SEQ ID NO: 18424
  source 1..80: mol_type = other DNA

SEQ ID NO: 53507 - DNA, 80 bp, synthetic construct; identical to SEQ ID NO: 8545
  source 1..80: mol_type = other DNA

SEQ ID NO: 53508 - DNA, 80 bp, synthetic construct; identical to SEQ ID NO: 18426
  source 1..80: mol_type = other DNA

SEQ ID NO: 53509 - DNA, 80 bp, synthetic construct; identical to SEQ ID NO: 18428
  source 1..80: mol_type = other DNA

SEQ ID NO: 53510 - DNA, 80 bp, synthetic construct; identical to SEQ ID NO: 8546
  source 1..80: mol_type = other DNA

SEQ ID NO: 53511 - DNA, 80 bp, synthetic construct; identical to SEQ ID NO: 18430
  source 1..80: mol_type = other DNA

SEQ ID NO: 53512 - DNA, 80 bp, synthetic construct; identical to SEQ ID NO: 18432
  source 1..80: mol_type = other DNA

SEQ ID NO: 53513 - DNA, 80 bp, synthetic construct; identical to SEQ ID NO: 18433
  source 1..80: mol_type = other DNA

SEQ ID NO: 53514 - DNA, 80 bp, synthetic construct; identical to SEQ ID NO: 8547
  source 1..80: mol_type = other DNA

SEQ ID NO: 53515 - DNA, 80 bp, synthetic construct; identical to SEQ ID NO: 18435
  source 1..80: mol_type = other DNA

SEQ ID NO: 53516 - DNA, 80 bp, synthetic construct; identical to SEQ ID NO: 18436
  source 1..80: mol_type = other DNA

SEQ ID NO: 53517 - DNA, 80 bp, synthetic construct; identical to SEQ ID NO: 8548
  source 1..80: mol_type = other DNA

SEQ ID NO: 53518 - DNA, 80 bp, synthetic construct; identical to SEQ ID NO: 18438
  source 1..80: mol_type = other DNA

SEQ ID NO: 53519 - DNA, 80 bp, synthetic construct; identical to SEQ ID NO: 18439
  source 1..80: mol_type = other DNA

SEQ ID NO: 53520 - DNA, 80 bp, synthetic construct; identical to SEQ ID NO: 8549
  source 1..80: mol_type = other DNA

SEQ ID NO: 53521 - DNA, 80 bp, synthetic construct; identical to SEQ ID NO: 18442
  source 1..80: mol_type = other DNA

SEQ ID NO: 53522 - DNA, 80 bp, synthetic construct; identical to SEQ ID NO: 18443
  source 1..80: mol_type = other DNA

SEQ ID NO: 53523 - DNA, 80 bp, synthetic construct; identical to SEQ ID NO: 8550
  source 1..80: mol_type = other DNA

SEQ ID NO: 53524 - DNA, 80 bp, synthetic construct; identical to SEQ ID NO: 18446
  source 1..80: mol_type = other DNA

SEQ ID NO: 53525 - DNA, 80 bp, synthetic construct; identical to SEQ ID NO: 18447
  source 1..80: mol_type = other DNA

SEQ ID NO: 53526 - DNA, 80 bp, synthetic construct; identical to SEQ ID NO: 18448
  source 1..80: mol_type = other DNA

SEQ ID NO: 53527 - DNA, 80 bp, synthetic construct; identical to SEQ ID NO: 8551
  source 1..80: mol_type = other DNA

SEQ ID NO: 53528 - DNA, 80 bp, synthetic construct; identical to SEQ ID NO: 18450
  source 1..80: mol_type = other DNA

SEQ ID NO: 53529 - DNA, 80 bp, synthetic construct; identical to SEQ ID NO: 18452
  source 1..80: mol_type = other DNA

SEQ ID NO: 53530 - DNA, 80 bp, synthetic construct; identical to SEQ ID NO: 18453
  source 1..80: mol_type = other DNA

SEQ ID NO: 53531 - DNA, 80 bp, synthetic construct; identical to SEQ ID NO: 8552
  source 1..80: mol_type = other DNA

SEQ ID NO: 53532 - DNA, 80 bp, synthetic construct; identical to SEQ ID NO: 18456
  source 1..80: mol_type = other DNA

SEQ ID NO: 53533 - DNA, 80 bp, synthetic construct; identical to SEQ ID NO: 8553
  source 1..80: mol_type = other DNA

SEQ ID NO: 53534 - DNA, 80 bp, synthetic construct; identical to SEQ ID NO: 18458
  source 1..80: mol_type = other DNA

SEQ ID NO: 53535 - DNA, 80 bp, synthetic construct; identical to SEQ ID NO: 18459
  source 1..80: mol_type = other DNA

SEQ ID NO: 53536 - DNA, 80 bp, synthetic construct; identical to SEQ ID NO: 18460
  source 1..80: mol_type = other DNA

SEQ ID NO: 53537 - DNA, 80 bp, synthetic construct; identical to SEQ ID NO: 18461
  source 1..80: mol_type = other DNA

SEQ ID NO: 53538 - DNA, 80 bp, synthetic construct; identical to SEQ ID NO: 8554
  source 1..80: mol_type = other DNA

SEQ ID NO: 53539 - DNA, 80 bp, synthetic construct; identical to SEQ ID NO: 18463
  source 1..80: mol_type = other DNA

SEQ ID NO: 53540 - DNA, 80 bp, synthetic construct; identical to SEQ ID NO: 18464
  source 1..80: mol_type = other DNA

SEQ ID NO: 53541 - DNA, 80 bp, synthetic construct; identical to SEQ ID NO: 8555
  source 1..80: mol_type = other DNA

SEQ ID NO: 53542 - DNA, 80 bp, synthetic construct; identical to SEQ ID NO: 18466
  source 1..80: mol_type = other DNA

SEQ ID NO: 53543 - DNA, 80 bp, synthetic construct; identical to SEQ ID NO: 18468
  source 1..80: mol_type = other DNA

SEQ ID NO: 53544 - DNA, 80 bp, synthetic construct; identical to SEQ ID NO: 8556
  source 1..80: mol_type = other DNA

SEQ ID NO: 53545 - DNA, 80 bp, synthetic construct; identical to SEQ ID NO: 18471
  source 1..80: mol_type = other DNA

SEQ ID NO: 53546 - DNA, 80 bp, synthetic construct; identical to SEQ ID NO: 18472
  source 1..80: mol_type = other DNA

SEQ ID NO: 53547 - DNA, 80 bp, synthetic construct; identical to SEQ ID NO: 8557
  source 1..80: mol_type = other DNA

SEQ ID NO: 53548 - DNA, 80 bp, synthetic construct; identical to SEQ ID NO: 18475
  source 1..80: mol_type = other DNA

SEQ ID NO: 53549 - DNA, 80 bp, synthetic construct; identical to SEQ ID NO: 18476
  source 1..80: mol_type = other DNA

SEQ ID NO: 53550 - DNA, 80 bp, synthetic construct; identical to SEQ ID NO: 8558
  source 1..80: mol_type = other DNA

SEQ ID NO: 53551 - DNA, 80 bp, synthetic construct; identical to SEQ ID NO: 18478
  source 1..80: mol_type = other DNA

SEQ ID NO: 53552 - DNA, 80 bp, synthetic construct; identical to SEQ ID NO: 18480
  source 1..80: mol_type = other DNA

SEQ ID NO: 53553 - DNA, 80 bp, synthetic construct; identical to SEQ ID NO: 8559
  source 1..80: mol_type = other DNA

SEQ ID NO: 53554 - DNA, 80 bp, synthetic construct; identical to SEQ ID NO: 18482
  source 1..80: mol_type = other DNA

SEQ ID NO: 53555 - DNA, 80 bp, synthetic construct; identical to SEQ ID NO: 18484
  source 1..80: mol_type = other DNA

SEQ ID NO: 53556 - DNA, 80 bp, synthetic construct; identical to SEQ ID NO: 8560
  source 1..80: mol_type = other DNA

SEQ ID NO: 53557 - DNA, 80 bp, synthetic construct; identical to SEQ ID NO: 18487
  source 1..80: mol_type = other DNA

SEQ ID NO: 53558 - DNA, 80 bp, synthetic construct; identical to SEQ ID NO: 18488
  source 1..80: mol_type = other DNA

SEQ ID NO: 53559 - DNA, 80 bp, synthetic construct; identical to SEQ ID NO: 8561
  source 1..80: mol_type = other DNA

SEQ ID NO: 53560 - DNA, 80 bp, synthetic construct; identical to SEQ ID NO: 18491
  source 1..80: mol_type = other DNA

SEQ ID NO: 53561 - DNA, 80 bp, synthetic construct; identical to SEQ ID NO: 18492
  source 1..80: mol_type = other DNA

SEQ ID NO: 53562 - DNA, 80 bp, synthetic construct; identical to SEQ ID NO: 8562
  source 1..80: mol_type = other DNA

SEQ ID NO: 53563 - DNA, 80 bp, synthetic construct; identical to SEQ ID NO: 18494
  source 1..80: mol_type = other DNA

SEQ ID NO: 53564 - DNA, 80 bp, synthetic construct; identical to SEQ ID NO: 18495
  source 1..80: mol_type = other DNA

SEQ ID NO: 53565 - DNA, 80 bp, synthetic construct; identical to SEQ ID NO: 18496
  source 1..80: mol_type = other DNA

SEQ ID NO: 53566 - DNA, 80 bp, synthetic construct; identical to SEQ ID NO: 18497
  source 1..80: mol_type = other DNA

SEQ ID NO: 53567 - DNA, 80 bp, synthetic construct; identical to SEQ ID NO: 8563
  source 1..80: mol_type = other DNA

SEQ ID NO: 53568 - DNA, 80 bp, synthetic construct; identical to SEQ ID NO: 18499
  source 1..80: mol_type = other DNA

SEQ ID NO: 53569 - DNA, 80 bp, synthetic construct; identical to SEQ ID NO: 18500
  source 1..80: mol_type = other DNA

SEQ ID NO: 53570 - DNA, 80 bp, synthetic construct; identical to SEQ ID NO: 18501
  source 1..80: mol_type = other DNA

SEQ ID NO: 53571 - DNA, 80 bp, synthetic construct; identical to SEQ ID NO: 8564
  source 1..80: mol_type = other DNA

SEQ ID NO: 53572 - DNA, 80 bp, synthetic construct; identical to SEQ ID NO: 18503
  source 1..80: mol_type = other DNA

SEQ ID NO: 53573 - DNA, 80 bp, synthetic construct; identical to SEQ ID NO: 18504
  source 1..80: mol_type = other DNA

SEQ ID NO: 53574 - DNA, 80 bp, synthetic construct; identical to SEQ ID NO: 18505
  source 1..80: mol_type = other DNA

SEQ ID NO: 53575 - DNA, 80 bp, synthetic construct; identical to SEQ ID NO: 8565
  source 1..80: mol_type = other DNA

SEQ ID NO: 53576 - DNA, 80 bp, synthetic construct; identical to SEQ ID NO: 18507
  source 1..80: mol_type = other DNA

SEQ ID NO: 53577 - DNA, 80 bp, synthetic construct; identical to SEQ ID NO: 18508
  source 1..80: mol_type = other DNA

SEQ ID NO: 53578 - DNA, 80 bp, synthetic construct; identical to SEQ ID NO: 18509
  source 1..80: mol_type = other DNA

SEQ ID NO: 53579 - DNA, 80 bp, synthetic construct; identical to SEQ ID NO: 8566
  source 1..80: mol_type = other DNA

SEQ ID NO: 53580 - DNA, 80 bp, synthetic construct; identical to SEQ ID NO: 18511
  source 1..80: mol_type = other DNA

SEQ ID NO: 53581 - DNA, 80 bp, synthetic construct; identical to SEQ ID NO: 18512
  source 1..80: mol_type = other DNA

SEQ ID NO: 53582 - DNA, 80 bp, synthetic construct; identical to SEQ ID NO: 18514
  source 1..80: mol_type = other DNA

SEQ ID NO: 53583 - DNA, 80 bp, synthetic construct; identical to SEQ ID NO: 18516
  source 1..80: mol_type = other DNA

SEQ ID NO: 53584 - DNA, 80 bp, synthetic construct; identical to SEQ ID NO: 8568
  source 1..80: mol_type = other DNA

SEQ ID NO: 53585 - DNA, 80 bp, synthetic construct; identical to SEQ ID NO: 18519
  source 1..80: mol_type = other DNA

SEQ ID NO: 53586 - DNA, 80 bp, synthetic construct; identical to SEQ ID NO: 18520
  source 1..80: mol_type = other DNA

SEQ ID NO: 53587 - DNA, 80 bp, synthetic construct; identical to SEQ ID NO: 18521
  source 1..80: mol_type = other DNA

SEQ ID NO: 53588 - DNA, 80 bp, synthetic construct; identical to SEQ ID NO: 8569
  source 1..80: mol_type = other DNA

SEQ ID NO: 53589 - DNA, 80 bp, synthetic construct; identical to SEQ ID NO: 18523
  source 1..80: mol_type = other DNA

SEQ ID NO: 53590 - DNA, 80 bp, synthetic construct; identical to SEQ ID NO: 18524
  source 1..80: mol_type = other DNA

SEQ ID NO: 53591 - DNA, 80 bp, synthetic construct; identical to SEQ ID NO: 8570
  source 1..80: mol_type = other DNA

SEQ ID NO: 53592 - DNA, 80 bp, synthetic construct; identical to SEQ ID NO: 18526
  source 1..80: mol_type = other DNA

SEQ ID NO: 53593 - DNA, 80 bp, synthetic construct; identical to SEQ ID NO: 18528
  source 1..80: mol_type = other DNA

SEQ ID NO: 53594 - DNA, 80 bp, synthetic construct; identical to SEQ ID NO: 18529
  source 1..80: mol_type = other DNA

SEQ ID NO: 53595 - DNA, 80 bp, synthetic construct; identical to SEQ ID NO: 8571
  source 1..80: mol_type = other DNA

SEQ ID NO: 53596 - DNA, 80 bp, synthetic construct; identical to SEQ ID NO: 18531
  source 1..80: mol_type = other DNA

SEQ ID NO: 53597 - DNA, 80 bp, synthetic construct; identical to SEQ ID NO: 18533
  source 1..80: mol_type = other DNA

SEQ ID NO: 53598 - DNA, 80 bp, synthetic construct; identical to SEQ ID NO: 8572
  source 1..80: mol_type = other DNA

SEQ ID NO: 53599 - DNA, 80 bp, synthetic construct; identical to SEQ ID NO: 18535
  source 1..80: mol_type = other DNA

SEQ ID NO: 53600 - DNA, 80 bp, synthetic construct; identical to SEQ ID NO: 18536
  source 1..80: mol_type = other DNA

SEQ ID NO: 53601 - DNA, 80 bp, synthetic construct; identical to SEQ ID NO: 18537
  source 1..80: mol_type = other DNA

SEQ ID NO: 53602 - DNA, 80 bp, synthetic construct; identical to SEQ ID NO: 8573
  source 1..80: mol_type = other DNA

SEQ ID NO: 53603 - DNA, 80 bp, synthetic construct; identical to SEQ ID NO: 18539
  source 1..80: mol_type = other DNA

SEQ ID NO: 53604 - DNA, 80 bp, synthetic construct; identical to SEQ ID NO: 18540
  source 1..80: mol_type = other DNA

SEQ ID NO: 53605 - DNA, 80 bp, synthetic construct; identical to SEQ ID NO: 8574
  source 1..80: mol_type = other DNA

SEQ ID NO: 53606 - DNA, 80 bp, synthetic construct; identical to SEQ ID NO: 18544
  source 1..80: mol_type = other DNA

SEQ ID NO: 53607 - DNA, 80 bp, synthetic construct; identical to SEQ ID NO: 18545
  source 1..80: mol_type = other DNA

SEQ ID NO: 53608 - DNA, 80 bp, synthetic construct; identical to SEQ ID NO: 8575
  source 1..80: mol_type = other DNA

SEQ ID NO: 53609 - DNA, 80 bp, synthetic construct; identical to SEQ ID NO: 18547
  source 1..80: mol_type = other DNA

SEQ ID NO: 53610 - DNA, 80 bp, synthetic construct; identical to SEQ ID NO: 18548
  source 1..80: mol_type = other DNA

SEQ ID NO: 53611 - DNA, 80 bp, synthetic construct; identical to SEQ ID NO: 8576
  source 1..80: mol_type = other DNA

SEQ ID NO: 53612 - DNA, 80 bp, synthetic construct; identical to SEQ ID NO: 18550
  source 1..80: mol_type = other DNA

SEQ ID NO: 53613 - DNA, 80 bp, synthetic construct; identical to SEQ ID NO: 18552
  source 1..80: mol_type = other DNA

SEQ ID NO: 53614 - DNA, 80 bp, synthetic construct; identical to SEQ ID NO: 8577
  source 1..80: mol_type = other DNA

SEQ ID NO: 53615 - DNA, 80 bp, synthetic construct; identical to SEQ ID NO: 18555
  source 1..80: mol_type = other DNA

SEQ ID NO: 53616 - DNA, 80 bp, synthetic construct; identical to SEQ ID NO: 8578
  source 1..80: mol_type = other DNA

SEQ ID NO: 53617 - DNA, 80 bp, synthetic construct; identical to SEQ ID NO: 18558
  source 1..80: mol_type = other DNA

SEQ ID NO: 53618 - DNA, 80 bp, synthetic construct; identical to SEQ ID NO: 18559
  source 1..80: mol_type = other DNA

SEQ ID NO: 53619 - DNA, 80 bp, synthetic construct; identical to SEQ ID NO: 18560
  source 1..80: mol_type = other DNA

SEQ ID NO: 53620 - DNA, 80 bp, synthetic construct; identical to SEQ ID NO: 18561
  source 1..80: mol_type = other DNA

SEQ ID NO: 53621 - DNA, 80 bp, synthetic construct; identical to SEQ ID NO: 8579
  source 1..80: mol_type = other DNA

SEQ ID NO: 53622 - DNA, 80 bp, synthetic construct; identical to SEQ ID NO: 18563
  source 1..80: mol_type = other DNA

SEQ ID NO: 53623 - DNA, 80 bp, synthetic construct; identical to SEQ ID NO: 18564
  source 1..80: mol_type = other DNA

SEQ ID NO: 53624 - DNA, 80 bp, synthetic construct; identical to SEQ ID NO: 18565
  source 1..80: mol_type = other DNA

SEQ ID NO: 53625 - DNA, 80 bp, synthetic construct; identical to SEQ ID NO: 8580
  source 1..80: mol_type = other DNA

SEQ ID NO: 53626 - DNA, 80 bp, synthetic construct; identical to SEQ ID NO: 18567
  source 1..80: mol_type = other DNA

SEQ ID NO: 53627 - DNA, 80 bp, synthetic construct; identical to SEQ ID NO: 18568
  source 1..80: mol_type = other DNA

SEQ ID NO: 53628 - DNA, 80 bp, synthetic construct; identical to SEQ ID NO: 8581
  source 1..80: mol_type = other DNA

SEQ ID NO: 53629 - DNA, 80 bp, synthetic construct; identical to SEQ ID NO: 18571
  source 1..80: mol_type = other DNA

SEQ ID NO: 53630 - DNA, 80 bp, synthetic construct; identical to SEQ ID NO: 18572
  source 1..80: mol_type = other DNA

SEQ ID NO: 53631 - DNA, 80 bp, synthetic construct; identical to SEQ ID NO: 8582
  source 1..80: mol_type = other DNA

SEQ ID NO: 53632 - DNA, 80 bp, synthetic construct; identical to SEQ ID NO: 18575
  source 1..80: mol_type = other DNA

SEQ ID NO: 53633 - DNA, 80 bp, synthetic construct; identical to SEQ ID NO: 18576
  source 1..80: mol_type = other DNA

SEQ ID NO: 53634 - DNA, 80 bp, synthetic construct; identical to SEQ ID NO: 8583
  source 1..80: mol_type = other DNA

SEQ ID NO: 53635 - DNA, 80 bp, synthetic construct; identical to SEQ ID NO: 18578
  source 1..80: mol_type = other DNA

SEQ ID NO: 53636 - DNA, 80 bp, synthetic construct; identical to SEQ ID NO: 18579
  source 1..80: mol_type = other DNA

SEQ ID NO: 53637 - DNA, 80 bp, synthetic construct; identical to SEQ ID NO: 18580
  source 1..80: mol_type = other DNA

SEQ ID NO: 53638 - DNA, 80 bp, synthetic construct; identical to SEQ ID NO: 18581
  source 1..80: mol_type = other DNA

SEQ ID NO: 53639 - DNA, 80 bp, synthetic construct; identical to SEQ ID NO: 8584
  source 1..80: mol_type = other DNA

SEQ ID NO: 53640 - DNA, 80 bp, synthetic construct; identical to SEQ ID NO: 18583
  source 1..80: mol_type = other DNA

SEQ ID NO: 53641 - DNA, 80 bp, synthetic construct; identical to SEQ ID NO: 18584
  source 1..80: mol_type = other DNA

SEQ ID NO: 53642 - DNA, 80 bp, synthetic construct; identical to SEQ ID NO: 8585
  source 1..80: mol_type = other DNA

SEQ ID NO: 53643 - DNA, 80 bp, synthetic construct; identical to SEQ ID NO: 18587
  source 1..80: mol_type = other DNA

SEQ ID NO: 53644 - DNA, 80 bp, synthetic construct; identical to SEQ ID NO: 18588
  source 1..80: mol_type = other DNA

SEQ ID NO: 53645 - DNA, 80 bp, synthetic construct; identical to SEQ ID NO: 8586
  source 1..80: mol_type = other DNA

SEQ ID NO: 53646 - DNA, 80 bp, synthetic construct; identical to SEQ ID NO: 18591
  source 1..80: mol_type = other DNA

SEQ ID NO: 53647 - DNA, 80 bp, synthetic construct; identical to SEQ ID NO: 18593
  source 1..80: mol_type = other DNA

SEQ ID NO: 53648 - DNA, 80 bp, synthetic construct; identical to SEQ ID NO: 18594
  source 1..80: mol_type = other DNA

SEQ ID NO: 53649 - DNA, 80 bp, synthetic construct; identical to SEQ ID NO: 8587
  source 1..80: mol_type = other DNA

SEQ ID NO: 53650 - DNA, 80 bp, synthetic construct; identical to SEQ ID NO: 18596
  source 1..80: mol_type = other DNA

SEQ ID NO: 53651 - DNA, 80 bp, synthetic construct; identical to SEQ ID NO: 18597
  source 1..80: mol_type = other DNA

SEQ ID NO: 53652 - DNA, 80 bp, synthetic construct; identical to SEQ ID NO: 18598
  source 1..80: mol_type = other DNA

SEQ ID NO: 53653 - DNA, 80 bp, synthetic construct; identical to SEQ ID NO: 8588
  source 1..80: mol_type = other DNA

SEQ ID NO: 53654 - DNA, 80 bp, synthetic construct; identical to SEQ ID NO: 18600
  source 1..80: mol_type = other DNA

SEQ ID NO: 53655 - DNA, 80 bp, synthetic construct; identical to SEQ ID NO: 18601
  source 1..80: mol_type = other DNA

SEQ ID NO: 53656 - DNA, 80 bp, synthetic construct; identical to SEQ ID NO: 8589
  source 1..80: mol_type = other DNA

SEQ ID NO: 53657 - DNA, 80 bp, synthetic construct; identical to SEQ ID NO: 18604
  source 1..80: mol_type = other DNA

SEQ ID NO: 53658 - DNA, 80 bp, synthetic construct; identical to SEQ ID NO: 18605
  source 1..80: mol_type = other DNA

SEQ ID NO: 53659 - DNA, 80 bp, synthetic construct; identical to SEQ ID NO: 18606
  source 1..80: mol_type = other DNA

SEQ ID NO: 53660 - DNA, 80 bp, synthetic construct; identical to SEQ ID NO: 8590
  source 1..80: mol_type = other DNA

SEQ ID NO: 53661 - DNA, 80 bp, synthetic construct; identical to SEQ ID NO: 18608
  source 1..80: mol_type = other DNA

SEQ ID NO: 53662 - DNA, 80 bp, synthetic construct; identical to SEQ ID NO: 18609
  source 1..80: mol_type = other DNA

SEQ ID NO: 53663 - DNA, 80 bp, synthetic construct; identical to SEQ ID NO: 8591
  source 1..80: mol_type = other DNA

SEQ ID NO: 53664 - DNA, 80 bp, synthetic construct; identical to SEQ ID NO: 18611
  source 1..80: mol_type = other DNA

SEQ ID NO: 53665 - DNA, 80 bp, synthetic construct; identical to SEQ ID NO: 18612
  source 1..80: mol_type = other DNA

SEQ ID NO: 53666 - DNA, 80 bp, synthetic construct; identical to SEQ ID NO: 18613
  source 1..80: mol_type = other DNA

SEQ ID NO: 53667 - DNA, 80 bp, synthetic construct; identical to SEQ ID NO: 8592
  source 1..80: mol_type = other DNA

SEQ ID NO: 53668 - DNA, 80 bp, synthetic construct; identical to SEQ ID NO: 18616
  source 1..80: mol_type = other DNA

SEQ ID NO: 53669 - DNA, 80 bp, synthetic construct; identical to SEQ ID NO: 18617
  source 1..80: mol_type = other DNA

SEQ ID NO: 53670 - DNA, 80 bp, synthetic construct; identical to SEQ ID NO: 8593
  source 1..80: mol_type = other DNA

SEQ ID NO: 53671 - DNA, 80 bp, synthetic construct; identical to SEQ ID NO: 18619
  source 1..80: mol_type = other DNA

SEQ ID NO: 53672 - DNA, 80 bp, synthetic construct; identical to SEQ ID NO: 18620
  source 1..80: mol_type = other DNA

SEQ ID NO: 53673 - DNA, 80 bp, synthetic construct; identical to SEQ ID NO: 18621
  source 1..80: mol_type = other DNA

SEQ ID NO: 53674 - DNA, 80 bp, synthetic construct; identical to SEQ ID NO: 8594
  source 1..80: mol_type = other DNA

SEQ ID NO: 53675 - DNA, 80 bp, synthetic construct; identical to SEQ ID NO: 18623
  source 1..80: mol_type = other DNA

SEQ ID NO: 53676 - DNA, 80 bp, synthetic construct; identical to SEQ ID NO: 18624
  source 1..80: mol_type = other DNA

SEQ ID NO: 53677 - DNA, 80 bp, synthetic construct; identical to SEQ ID NO: 18625
  source 1..80: mol_type = other DNA

SEQ ID NO: 53678 - DNA, 80 bp, synthetic construct; identical to SEQ ID NO: 8595
  source 1..80: mol_type = other DNA

SEQ ID NO: 53679 - DNA, 80 bp, synthetic construct; identical to SEQ ID NO: 18627
  source 1..80: mol_type = other DNA

SEQ ID NO: 53680 - DNA, 80 bp, synthetic construct; identical to SEQ ID NO: 18628
  source 1..80: mol_type = other DNA

SEQ ID NO: 53681 - DNA, 80 bp, synthetic construct; identical to SEQ ID NO: 18629
  source 1..80: mol_type = other DNA

SEQ ID NO: 53682 - DNA, 80 bp, synthetic construct; identical to SEQ ID NO: 8596
  source 1..80: mol_type = other DNA

SEQ ID NO: 53683 - DNA, 80 bp, synthetic construct; identical to SEQ ID NO: 18631
  source 1..80: mol_type = other DNA

SEQ ID NO: 53684 - DNA, 80 bp, synthetic construct; identical to SEQ ID NO: 18632
  source 1..80: mol_type = other DNA

SEQ ID NO: 53685 - DNA, 80 bp, synthetic construct; identical to SEQ ID NO: 8597
  source 1..80: mol_type = other DNA

SEQ ID NO: 53686 - DNA, 80 bp, synthetic construct; identical to SEQ ID NO: 18635
  source 1..80: mol_type = other DNA

SEQ ID NO: 53687 - DNA, 80 bp, synthetic construct; identical to SEQ ID NO: 18636
  source 1..80: mol_type = other DNA

SEQ ID NO: 53688 - DNA, 80 bp, synthetic construct; identical to SEQ ID NO: 18637
  source 1..80: mol_type = other DNA

SEQ ID NO: 53689 - DNA, 80 bp, synthetic construct; identical to SEQ ID NO: 8598
  source 1..80: mol_type = other DNA

SEQ ID NO: 53690 - DNA, 80 bp, synthetic construct; identical to SEQ ID NO: 18640
  source 1..80: mol_type = other DNA

SEQ ID NO: 53691 - DNA, 80 bp, synthetic construct; identical to SEQ ID NO: 8599
  source 1..80: mol_type = other DNA

SEQ ID NO: 53692 - DNA, 80 bp, synthetic construct; identical to SEQ ID NO: 18642
  source 1..80: mol_type = other DNA

SEQ ID NO: 53693 - DNA, 80 bp, synthetic construct; identical to SEQ ID NO: 18643
  source 1..80: mol_type = other DNA

SEQ ID NO: 53694 - DNA, 80 bp, synthetic construct; identical to SEQ ID NO: 18644
  source 1..80: mol_type = other DNA

SEQ ID NO: 53695 - DNA, 80 bp, synthetic construct; identical to SEQ ID NO: 8600
  source 1..80: mol_type = other DNA

SEQ ID NO: 53696 - DNA, 80 bp, synthetic construct; identical to SEQ ID NO: 18646
  source 1..80: mol_type = other DNA

SEQ ID NO: 53697 - DNA, 80 bp, synthetic construct; identical to SEQ ID NO: 18647
  source 1..80: mol_type = other DNA

SEQ ID NO: 53698 - DNA, 80 bp, synthetic construct; identical to SEQ ID NO: 18648
  source 1..80: mol_type = other DNA

SEQ ID NO: 53699 - DNA, 80 bp, synthetic construct; identical to SEQ ID NO: 18649
  source 1..80: mol_type = other DNA

SEQ ID NO: 53700 - DNA, 80 bp, synthetic construct; identical to SEQ ID NO: 8601
  source 1..80: mol_type = other DNA

SEQ ID NO: 53701 - DNA, 80 bp, synthetic construct; identical to SEQ ID NO: 18651
  source 1..80: mol_type = other DNA

SEQ ID NO: 53702 - DNA, 80 bp, synthetic construct; identical to SEQ ID NO: 18652
  source 1..80: mol_type = other DNA

SEQ ID NO: 53703 - DNA, 80 bp, synthetic construct; identical to SEQ ID NO: 18653
  source 1..80: mol_type = other DNA

SEQ ID NO: 53704 - DNA, 80 bp, synthetic construct; identical to SEQ ID NO: 18654
  source 1..80: mol_type = other DNA

SEQ ID NO: 53705 - DNA, 80 bp, synthetic construct; identical to SEQ ID NO: 8602
  source 1..80: mol_type = other DNA

SEQ ID NO: 53706 - DNA, 80 bp, synthetic construct; identical to SEQ ID NO: 18656
  source 1..80: mol_type = other DNA

SEQ ID NO: 53707 - DNA, 80 bp, synthetic construct; identical to SEQ ID NO: 18657
  source 1..80: mol_type = other DNA

SEQ ID NO: 53708 - DNA, 80 bp, synthetic construct; identical to SEQ ID NO: 18658
  source 1..80: mol_type = other DNA

SEQ ID NO: 53709 - DNA, 80 bp, synthetic construct; identical to SEQ ID NO: 18659
  source 1..80: mol_type = other DNA

SEQ ID NO: 53710 - DNA, 80 bp, synthetic construct; identical to SEQ ID NO: 18660
  source 1..80: mol_type = other DNA

SEQ ID NO: 53711 - DNA, 80 bp, synthetic construct; identical to SEQ ID NO: 8603
  source 1..80: mol_type = other DNA

SEQ ID NO: 53712 - DNA, 80 bp, synthetic construct; identical to SEQ ID NO: 18662
  source 1..80: mol_type = other DNA

SEQ ID NO: 53713 - DNA, 80 bp, synthetic construct; identical to SEQ ID NO: 8604
  source 1..80: mol_type = other DNA

SEQ ID NO: 53714 - DNA, 80 bp, synthetic construct; identical to SEQ ID NO: 18664
  source 1..80: mol_type = other DNA

SEQ ID NO: 53715 - DNA, 80 bp, synthetic construct; identical to SEQ ID NO: 18665
  source 1..80: mol_type = other DNA

SEQ ID NO: 53716 - DNA, 80 bp, synthetic construct; identical to SEQ ID NO: 18666
  source 1..80: mol_type = other DNA

SEQ ID NO: 53717 - DNA, 80 bp, synthetic construct; identical to SEQ ID NO: 18667
  source 1..80: mol_type = other DNA

SEQ ID NO: 53718 - DNA, 80 bp, synthetic construct; identical to SEQ ID NO: 8605
  source 1..80: mol_type = other DNA

SEQ ID NO: 53719 - DNA, 80 bp, synthetic construct; identical to SEQ ID NO: 18670
  source 1..80: mol_type = other DNA

SEQ ID NO: 53720 - DNA, 80 bp, synthetic construct; identical to SEQ ID NO: 8606
  source 1..80: mol_type = other DNA

SEQ ID NO: 53721 - DNA, 80 bp, synthetic construct; identical to SEQ ID NO: 18672
  source 1..80: mol_type = other DNA

SEQ ID NO: 53722 - DNA, 80 bp, synthetic construct; identical to SEQ ID NO: 18673
  source 1..80: mol_type = other DNA

SEQ ID NO: 53723 - DNA, 80 bp, synthetic construct; identical to SEQ ID NO: 18674
  source 1..80: mol_type = other DNA

SEQ ID NO: 53724 - DNA, 80 bp, synthetic construct; identical to SEQ ID NO: 8607
  source 1..80: mol_type = other DNA

SEQ ID NO: 53725 - DNA, 80 bp, synthetic construct; identical to SEQ ID NO: 18676
  source 1..80: mol_type = other DNA

SEQ ID NO: 53726 - DNA, 80 bp, synthetic construct; identical to SEQ ID NO: 18677
  source 1..80: mol_type = other DNA

SEQ ID NO: 53727 - DNA, 80 bp, synthetic construct; identical to SEQ ID NO: 18679
  source 1..80: mol_type = other DNA

SEQ ID NO: 53728 - DNA, 80 bp, synthetic construct; identical to SEQ ID NO: 8608
  source 1..80: mol_type = other DNA

SEQ ID NO: 53729 - DNA, 80 bp, synthetic construct; identical to SEQ ID NO: 18681
  source 1..80: mol_type = other DNA

SEQ ID NO: 53730 - DNA, 80 bp, synthetic construct; identical to SEQ ID NO: 18682
  source 1..80: mol_type = other DNA

SEQ ID NO: 53731 - DNA, 80 bp, synthetic construct; identical to SEQ ID NO: 18683
  source 1..80: mol_type = other DNA

SEQ ID NO: 53732 - DNA, 80 bp, synthetic construct; identical to SEQ ID NO: 18684
  source 1..80: mol_type = other DNA

SEQ ID NO: 53733 - DNA, 80 bp, synthetic construct; identical to SEQ ID NO: 8609
  source 1..80: mol_type = other DNA

SEQ ID NO: 53734 - DNA, 80 bp, synthetic construct; identical to SEQ ID NO: 18687
  source 1..80: mol_type = other DNA

SEQ ID NO: 53735 - DNA, 80 bp, synthetic construct; identical to SEQ ID NO: 18688
  source 1..80: mol_type = other DNA

SEQ ID NO: 53736 - DNA, 80 bp, synthetic construct; identical to SEQ ID NO: 8610
  source 1..80: mol_type = other DNA

SEQ ID NO: 53737 - DNA, 80 bp, synthetic construct; identical to SEQ ID NO: 18690
  source 1..80: mol_type = other DNA

SEQ ID NO: 53738 - DNA, 80 bp, synthetic construct; identical to SEQ ID NO: 18691
  source 1..80: mol_type = other DNA

SEQ ID NO: 53739 - DNA, 80 bp, synthetic construct; identical to SEQ ID NO: 8611
  source 1..80: mol_type = other DNA

SEQ ID NO: 53740 - DNA, 80 bp, synthetic construct; identical to SEQ ID NO: 18693
  source 1..80: mol_type = other DNA

SEQ ID NO: 53741 - DNA, 80 bp, synthetic construct; identical to SEQ ID NO: 18695
  source 1..80: mol_type = other DNA

SEQ ID NO: 53742 - DNA, 80 bp, synthetic construct; identical to SEQ ID NO: 8612
  source 1..80: mol_type = other DNA

SEQ ID NO: 53743 - DNA, 80 bp, synthetic construct; identical to SEQ ID NO: 18697
  source 1..80: mol_type = other DNA

SEQ ID NO: 53744 - DNA, 80 bp, synthetic construct; identical to SEQ ID NO: 18698
  source 1..80: mol_type = other DNA

SEQ ID NO: 53745 - DNA, 80 bp, synthetic construct; identical to SEQ ID NO: 18699
  source 1..80: mol_type = other DNA

SEQ ID NO: 53746 - DNA, 80 bp, synthetic construct; identical to SEQ ID NO: 8613
  source 1..80: mol_type = other DNA

SEQ ID NO: 53747 - DNA, 80 bp, synthetic construct; identical to SEQ ID NO: 18701
  source 1..80: mol_type = other DNA

SEQ ID NO: 53748 - DNA, 80 bp, synthetic construct; identical to SEQ ID NO: 18702
  source 1..80: mol_type = other DNA

SEQ ID NO: 53749 - DNA, 80 bp, synthetic construct; identical to SEQ ID NO: 18703
  source 1..80: mol_type = other DNA

SEQ ID NO: 53750 - DNA, 80 bp, synthetic construct; identical to SEQ ID NO: 8614
  source 1..80: mol_type = other DNA

SEQ ID NO: 53751 - DNA, 80 bp, synthetic construct; identical to SEQ ID NO: 18705
  source 1..80: mol_type = other DNA

SEQ ID NO: 53752 - DNA, 80 bp, synthetic construct; identical to SEQ ID NO: 18706
  source 1..80: mol_type = other DNA

SEQ ID NO: 53753 - DNA, 80 bp, synthetic construct; identical to SEQ ID NO: 18707
  source 1..80: mol_type = other DNA

SEQ ID NO: 53754 - DNA, 80 bp, synthetic construct; identical to SEQ ID NO: 8615
  source 1..80: mol_type = other DNA

SEQ ID NO: 53755 - DNA, 80 bp, synthetic construct; identical to SEQ ID NO: 18709
  source 1..80: mol_type = other DNA

SEQ ID NO: 53756 - DNA, 80 bp, synthetic construct; identical to SEQ ID NO: 18710
  source 1..80: mol_type = other DNA

SEQ ID NO: 53757 - DNA, 80 bp, synthetic construct; identical to SEQ ID NO: 18711
  source 1..80: mol_type = other DNA

SEQ ID NO: 53758 - DNA, 80 bp, synthetic construct; identical to SEQ ID NO: 18712
  source 1..80: mol_type = other DNA

SEQ ID NO: 53759 - DNA, 80 bp, synthetic construct; identical to SEQ ID NO: 8616
  source 1..80: mol_type = other DNA

SEQ ID NO: 53760 - DNA, 80 bp, synthetic construct; identical to SEQ ID NO: 18714
  source 1..80: mol_type = other DNA

SEQ ID NO: 53761 - DNA, 80 bp, synthetic construct; identical to SEQ ID NO: 18715
  source 1..80: mol_type = other DNA

SEQ ID NO: 53762 - DNA, 80 bp, synthetic construct; identical to SEQ ID NO: 18716
  source 1..80: mol_type = other DNA

SEQ ID NO: 53763 - DNA, 80 bp, synthetic construct; identical to SEQ ID NO: 8617
  source 1..80: mol_type = other DNA

SEQ ID NO: 53764 - DNA, 80 bp, synthetic construct; identical to SEQ ID NO: 18718
  source 1..80: mol_type = other DNA

SEQ ID NO: 53765 - DNA, 80 bp, synthetic construct; identical to SEQ ID NO: 18719
  source 1..80: mol_type = other DNA

SEQ ID NO: 53766 - DNA, 80 bp, synthetic construct; identical to SEQ ID NO: 18720
  source 1..80: mol_type = other DNA

SEQ ID NO: 53767 - DNA, 80 bp, synthetic construct; identical to SEQ ID NO: 8618
  source 1..80: mol_type = other DNA

SEQ ID NO: 53768 - DNA, 80 bp, synthetic construct; identical to SEQ ID NO: 18722
  source 1..80: mol_type = other DNA

SEQ ID NO: 53769 - DNA, 80 bp, synthetic construct; identical to SEQ ID NO: 18723
  source 1..80: mol_type = other DNA

SEQ ID NO: 53770 - DNA, 80 bp, synthetic construct; identical to SEQ ID NO: 8619
  source 1..80: mol_type = other DNA

SEQ ID NO: 53771 - DNA, 80 bp, synthetic construct; identical to SEQ ID NO: 18725
  source 1..80: mol_type = other DNA

SEQ ID NO: 53772 - DNA, 80 bp, synthetic construct; identical to SEQ ID NO: 18727
  source 1..80: mol_type = other DNA

SEQ ID NO: 53773 - DNA, 80 bp, synthetic construct; identical to SEQ ID NO: 8620
  source 1..80: mol_type = other DNA

SEQ ID NO: 53774 - DNA, 80 bp, synthetic construct; identical to SEQ ID NO: 18729
  source 1..80: mol_type = other DNA

SEQ ID NO: 53775 - DNA, 80 bp, synthetic construct; identical to SEQ ID NO: 18731
  source 1..80: mol_type = other DNA

SEQ ID NO: 53776 - DNA, 80 bp, synthetic construct; identical to SEQ ID NO: 18732
  source 1..80: mol_type = other DNA

SEQ ID NO: 53777 - DNA, 80 bp, synthetic construct; identical to SEQ ID NO: 8621
  source 1..80: mol_type = other DNA

SEQ ID NO: 53778 - DNA, 80 bp, synthetic construct; identical to SEQ ID NO: 18734
  source 1..80: mol_type = other DNA

SEQ ID NO: 53779 - DNA, 80 bp, synthetic construct; identical to SEQ ID NO: 18735
  source 1..80: mol_type = other DNA

SEQ ID NO: 53780 - DNA, 80 bp, synthetic construct; identical to SEQ ID NO: 18736
  source 1..80: mol_type = other DNA

SEQ ID NO: 53781 - DNA, 80 bp, synthetic construct; identical to SEQ ID NO: 8622
  source 1..80: mol_type = other DNA

SEQ ID NO: 53782 - DNA, 80 bp, synthetic construct; identical to SEQ ID NO: 18738
  source 1..80: mol_type = other DNA

SEQ ID NO: 53783 - DNA, 80 bp, synthetic construct; identical to SEQ ID NO: 18740
  source 1..80: mol_type = other DNA

SEQ ID NO: 53784 - DNA, 80 bp, synthetic construct; identical to SEQ ID NO: 8623
  source 1..80: mol_type = other DNA

SEQ ID NO: 53785 - DNA, 80 bp, synthetic construct; identical to SEQ ID NO: 18742
  source 1..80: mol_type = other DNA

SEQ ID NO: 53786 - DNA, 80 bp, synthetic construct; identical to SEQ ID NO: 18744
  source 1..80: mol_type = other DNA

SEQ ID NO: 53787 - DNA, 80 bp, synthetic construct; identical to SEQ ID NO: 8624
  source 1..80: mol_type = other DNA

SEQ ID NO: 53788 - DNA, 80 bp, synthetic construct; identical to SEQ ID NO: 18746
  source 1..80: mol_type = other DNA

SEQ ID NO: 53789 - DNA, 80 bp, synthetic construct; identical to SEQ ID NO: 18747
  source 1..80: mol_type = other DNA

SEQ ID NO: 53790 - DNA, 80 bp, synthetic construct; identical to SEQ ID NO: 18748
  source 1..80: mol_type = other DNA

SEQ ID NO: 53791 - DNA, 80 bp, synthetic construct; identical to SEQ ID NO: 8625
  source 1..80: mol_type = other DNA

SEQ ID NO: 53792 - DNA, 80 bp, synthetic construct; identical to SEQ ID NO: 18751
  source 1..80: mol_type = other DNA

SEQ ID NO: 53793 - DNA, 80 bp, synthetic construct; identical to SEQ ID NO: 18752
  source 1..80: mol_type = other DNA

SEQ ID NO: 53794 - DNA, 80 bp, synthetic construct; identical to SEQ ID NO: 8626
  source 1..80: mol_type = other DNA

SEQ ID NO: 53795 - DNA, 80 bp, synthetic construct; identical to SEQ ID NO: 18754
  source 1..80: mol_type = other DNA

SEQ ID NO: 53796 - DNA, 80 bp, synthetic construct; identical to SEQ ID NO: 18755
  source 1..80: mol_type = other DNA

SEQ ID NO: 53797 - DNA, 80 bp, synthetic construct; identical to SEQ ID NO: 18757
  source 1..80: mol_type = other DNA

SEQ ID NO: 53798 - DNA, 80 bp, synthetic construct; identical to SEQ ID NO: 8627
  source 1..80: mol_type = other DNA

SEQ ID NO: 53799 - DNA, 80 bp, synthetic construct; identical to SEQ ID NO: 18759
  source 1..80: mol_type = other DNA

SEQ ID NO: 53800 - DNA, 80 bp, synthetic construct; identical to SEQ ID NO: 18761
  source 1..80: mol_type = other DNA

SEQ ID NO: 53801 - DNA, 80 bp, synthetic construct; identical to SEQ ID NO: 8628
  source 1..80: mol_type = other DNA

SEQ ID NO: 53802 - DNA, 80 bp, synthetic construct; identical to SEQ ID NO: 18763
  source 1..80: mol_type = other DNA

SEQ ID NO: 53803 - DNA, 80 bp, synthetic construct; identical to SEQ ID NO: 18764
  source 1..80: mol_type = other DNA

SEQ ID NO: 53804 - DNA, 80 bp, synthetic construct; identical to SEQ ID NO: 18765
  source 1..80: mol_type = other DNA

SEQ ID NO: 53805 - DNA, 80 bp, synthetic construct; identical to SEQ ID NO: 8629
  source 1..80: mol_type = other DNA

SEQ ID NO: 53806 - DNA, 80 bp, synthetic construct; identical to SEQ ID NO: 18767
  source 1..80: mol_type = other DNA

SEQ ID NO: 53807 - DNA, 80 bp, synthetic construct; identical to SEQ ID NO: 18768
  source 1..80: mol_type = other DNA

SEQ ID NO: 53808 - DNA, 80 bp, synthetic construct; identical to SEQ ID NO: 8630
  source 1..80: mol_type = other DNA

SEQ ID NO: 53809 - DNA, 80 bp, synthetic construct; identical to SEQ ID NO: 18771
  source 1..80: mol_type = other DNA

SEQ ID NO: 53810 - DNA, 80 bp, synthetic construct; identical to SEQ ID NO: 18772
  source 1..80: mol_type = other DNA

SEQ ID NO: 53811 - DNA, 80 bp, synthetic construct; identical to SEQ ID NO: 8631
  source 1..80: mol_type = other DNA

SEQ ID NO: 53812 - DNA, 80 bp, synthetic construct; identical to SEQ ID NO: 18774
  source 1..80: mol_type = other DNA

SEQ ID NO: 53813 - DNA, 80 bp, synthetic construct; identical to SEQ ID NO: 18776
  source 1..80: mol_type = other DNA

SEQ ID NO: 53814 - DNA, 80 bp, synthetic construct; identical to SEQ ID NO: 8632
  source 1..80: mol_type = other DNA

SEQ ID NO: 53815 - DNA, 80 bp, synthetic construct; identical to SEQ ID NO: 18779
  source 1..80: mol_type = other DNA

SEQ ID NO: 53816 - DNA, 80 bp, synthetic construct; identical to SEQ ID NO: 18780
  source 1..80: mol_type = other DNA

SEQ ID NO: 53817 - DNA, 80 bp, synthetic construct; identical to SEQ ID NO: 8633
  source 1..80: mol_type = other DNA

SEQ ID NO: 53818 - DNA, 80 bp, synthetic construct; identical to SEQ ID NO: 18782
  source 1..80: mol_type = other DNA

SEQ ID NO: 53819 - DNA, 80 bp, synthetic construct; identical to SEQ ID NO: 18783
  source 1..80: mol_type = other DNA

SEQ ID NO: 53820 - DNA, 80 bp, synthetic construct; identical to SEQ ID NO: 18784
  source 1..80: mol_type = other DNA

SEQ ID NO: 53821 - DNA, 80 bp, synthetic construct; identical to SEQ ID NO: 8634
  source 1..80: mol_type = other DNA

SEQ ID NO: 53822 - DNA, 80 bp, synthetic construct; identical to SEQ ID NO: 18787
  source 1..80: mol_type = other DNA

SEQ ID NO: 53823 - DNA, 80 bp, synthetic construct; identical to SEQ ID NO: 8635
  source 1..80: mol_type = other DNA

SEQ ID NO: 53824 - DNA, 80 bp, synthetic construct; identical to SEQ ID NO: 18791
  source 1..80: mol_type = other DNA

SEQ ID NO: 53825 - DNA, 80 bp, synthetic construct; identical to SEQ ID NO: 18793
  source 1..80: mol_type = other DNA

SEQ ID NO: 53826 - DNA, 80 bp, synthetic construct; identical to SEQ ID NO: 8636
  source 1..80: mol_type = other DNA

SEQ ID NO: 53827 - DNA, 80 bp, synthetic construct; identical to SEQ ID NO: 18795
  source 1..80: mol_type = other DNA

SEQ ID NO: 53828 - DNA, 80 bp, synthetic construct; identical to SEQ ID NO: 18796
  source 1..80: mol_type = other DNA

SEQ ID NO: 53829 - DNA, 80 bp, synthetic construct; identical to SEQ ID NO: 18797
  source 1..80: mol_type = other DNA

SEQ ID NO: 53830 - DNA, 80 bp, synthetic construct; identical to SEQ ID NO: 18798
  source 1..80: mol_type = other DNA

SEQ ID NO: 53831 - DNA, 80 bp, synthetic construct; identical to SEQ ID NO: 18799
  source 1..80: mol_type = other DNA

SEQ ID NO: 53832 - DNA, 80 bp, synthetic construct; identical to SEQ ID NO: 8637
  source 1..80: mol_type = other DNA

SEQ ID NO: 53833 - DNA, 80 bp, synthetic construct; identical to SEQ ID NO: 18802
  source 1..80: mol_type = other DNA

SEQ ID NO: 53834 - DNA, 80 bp, synthetic construct; identical to SEQ ID NO: 8638
  source 1..80: mol_type = other DNA

SEQ ID NO: 53835 - DNA, 80 bp, synthetic construct; identical to SEQ ID NO: 18804
  source 1..80: mol_type = other DNA

SEQ ID NO: 53836 - DNA, 80 bp, synthetic construct; identical to SEQ ID NO: 18805
  source 1..80: mol_type = other DNA

SEQ ID NO: 53837 - DNA, 80 bp, synthetic construct; identical to SEQ ID NO: 8639
  source 1..80: mol_type = other DNA

SEQ ID NO: 53838 - DNA, 80 bp, synthetic construct; identical to SEQ ID NO: 18808
  source 1..80: mol_type = other DNA

SEQ ID NO: 53839 - DNA, 80 bp, synthetic construct; identical to SEQ ID NO: 18809
  source 1..80: mol_type = other DNA

SEQ ID NO: 53840 - DNA, 80 bp, synthetic construct; identical to SEQ ID NO: 18810
  source 1..80: mol_type = other DNA

SEQ ID NO: 53841 - DNA, 80 bp, synthetic construct; identical to SEQ ID NO: 8640
  source 1..80: mol_type = other DNA

SEQ ID NO: 53842 - DNA, 80 bp, synthetic construct; identical to SEQ ID NO: 18812
  source 1..80: mol_type = other DNA

SEQ ID NO: 53843 - DNA, 80 bp, synthetic construct; identical to SEQ ID NO: 8641
  source 1..80: mol_type = other DNA

SEQ ID NO: 53844 - DNA, 80 bp, synthetic construct; identical to SEQ ID NO: 18815
  source 1..80: mol_type = other DNA

SEQ ID NO: 53845 - DNA, 80 bp, synthetic construct; identical to SEQ ID NO: 18816
  source 1..80: mol_type = other DNA

SEQ ID NO: 53846 - DNA, 80 bp, synthetic construct; identical to SEQ ID NO: 8642
  source 1..80: mol_type = other DNA

SEQ ID NO: 53847 - DNA, 80 bp, synthetic construct; identical to SEQ ID NO: 18820
  source 1..80: mol_type = other DNA

SEQ ID NO: 53848 - DNA, 80 bp, synthetic construct; identical to SEQ ID NO: 8643
  source 1..80: mol_type = other DNA

SEQ ID NO: 53849 - DNA, 80 bp, synthetic construct; identical to SEQ ID NO: 18823
  source 1..80: mol_type = other DNA

SEQ ID NO: 53850 - DNA, 80 bp, synthetic construct; identical to SEQ ID NO: 18825
  source 1..80: mol_type = other DNA

SEQ ID NO: 53851 - DNA, 80 bp, synthetic construct; identical to SEQ ID NO: 8644
  source 1..80: mol_type = other DNA

SEQ ID NO: 53852 - DNA, 80 bp, synthetic construct; identical to SEQ ID NO: 18827
  source 1..80: mol_type = other DNA

SEQ ID NO: 53853 - DNA, 80 bp, synthetic construct; identical to SEQ ID NO: 8645
  source 1..80: mol_type = other DNA

SEQ ID NO: 53854 - DNA, 80 bp, synthetic construct; identical to SEQ ID NO: 18831
  source 1..80: mol_type = other DNA

SEQ ID NO: 53855 - DNA, 80 bp, synthetic construct; identical to SEQ ID NO: 18832
  source 1..80: mol_type = other DNA

SEQ ID NO: 53856 - DNA, 80 bp, synthetic construct; identical to SEQ ID NO: 8646
  source 1..80: mol_type = other DNA

SEQ ID NO: 53857 - DNA, 80 bp, synthetic construct; identical to SEQ ID NO: 18835
  source 1..80: mol_type = other DNA

SEQ ID NO: 53858 - DNA, 80 bp, synthetic construct; identical to SEQ ID NO: 18836
  source 1..80: mol_type = other DNA

SEQ ID NO: 53859 - DNA, 80 bp, synthetic construct; identical to SEQ ID NO: 8647
  source 1..80: mol_type = other DNA

SEQ ID NO: 53860 - DNA, 80 bp, synthetic construct; identical to SEQ ID NO: 18839
  source 1..80: mol_type = other DNA

SEQ ID NO: 53861 - DNA, 80 bp, synthetic construct; identical to SEQ ID NO: 8648
  source 1..80: mol_type = other DNA

SEQ ID NO: 53862 - DNA, 80 bp, synthetic construct; identical to SEQ ID NO: 18842
  source 1..80: mol_type = other DNA

SEQ ID NO: 53863 - DNA, 80 bp, synthetic construct; identical to SEQ ID NO: 18843
  source 1..80: mol_type = other DNA

SEQ ID NO: 53864 - DNA, 80 bp, synthetic construct; identical to SEQ ID NO: 18844
  source 1..80: mol_type = other DNA

SEQ ID NO: 53865 - DNA, 80 bp, synthetic construct; identical to SEQ ID NO: 8649
  source 1..80: mol_type = other DNA

SEQ ID NO: 53866 - DNA, 80 bp, synthetic construct; identical to SEQ ID NO: 18847
  source 1..80: mol_type = other DNA

SEQ ID NO: 53867 - DNA, 80 bp, synthetic construct; identical to SEQ ID NO: 18848
  source 1..80: mol_type = other DNA

SEQ ID NO: 53868 - DNA, 80 bp, synthetic construct; identical to SEQ ID NO: 8650
  source 1..80: mol_type = other DNA

SEQ ID NO: 53869 - DNA, 80 bp, synthetic construct; identical to SEQ ID NO: 18851
  source 1..80: mol_type = other DNA

SEQ ID NO: 53870 - DNA, 80 bp, synthetic construct; identical to SEQ ID NO: 18852
  source 1..80: mol_type = other DNA

SEQ ID NO: 53871 - DNA, 80 bp, synthetic construct; identical to SEQ ID NO: 8651
  source 1..80: mol_type = other DNA

SEQ ID NO: 53872 - DNA, 80 bp, synthetic construct; identical to SEQ ID NO: 18854
  source 1..80: mol_type = other DNA

SEQ ID NO: 53873 - DNA, 80 bp, synthetic construct; identical to SEQ ID NO: 18856
  source 1..80: mol_type = other DNA

SEQ ID NO: 53874 - DNA, 80 bp, synthetic construct; identical to SEQ ID NO: 8652
  source 1..80: mol_type = other DNA

SEQ ID NO: 53875 - DNA, 80 bp, synthetic construct; identical to SEQ ID NO: 18858
  source 1..80: mol_type = other DNA

SEQ ID NO: 53876 - DNA, 80 bp, synthetic construct; identical to SEQ ID NO: 18859
  source 1..80: mol_type = other DNA

SEQ ID NO: 53877 - DNA, 80 bp, synthetic construct; identical to SEQ ID NO: 18860
  source 1..80: mol_type = other DNA

SEQ ID NO: 53878 - DNA, 80 bp, synthetic construct; identical to SEQ ID NO: 18861
  source 1..80: mol_type = other DNA

SEQ ID NO: 53879 - DNA, 80 bp, synthetic construct; identical to SEQ ID NO: 8653
  source 1..80: mol_type = other DNA

SEQ ID NO: 53880 - DNA, 80 bp, synthetic construct; identical to SEQ ID NO: 18863
  source 1..80: mol_type = other DNA

SEQ ID NO: 53881 - DNA, 80 bp, synthetic construct; identical to SEQ ID NO: 18864
  source 1..80: mol_type = other DNA

SEQ ID NO: 53882 - DNA, 80 bp, synthetic construct; identical to SEQ ID NO: 18865
  source 1..80: mol_type = other DNA

SEQ ID NO: 53883 - DNA, 80 bp, synthetic construct; identical to SEQ ID NO: 8654
  source 1..80: mol_type = other DNA

SEQ ID NO: 53884 - DNA, 80 bp, synthetic construct; identical to SEQ ID NO: 18867
  source 1..80: mol_type = other DNA

SEQ ID NO: 53885 - DNA, 80 bp, synthetic construct; identical to SEQ ID NO: 18868
  source 1..80: mol_type = other DNA

SEQ ID NO: 53886 - DNA, 80 bp, synthetic construct; identical to SEQ ID NO: 18869
  source 1..80: mol_type = other DNA

SEQ ID NO: 53887 - DNA, 80 bp, synthetic construct; identical to SEQ ID NO: 8655
  source 1..80: mol_type = other DNA

SEQ ID NO: 53888 - DNA, 80 bp, synthetic construct; identical to SEQ ID NO: 18871
  source 1..80: mol_type = other DNA

SEQ ID NO: 53889 - DNA, 80 bp, synthetic construct; identical to SEQ ID NO: 18873
  source 1..80: mol_type = other DNA

SEQ ID NO: 53890 - DNA, 80 bp, synthetic construct; identical to SEQ ID NO: 8656
  source 1..80: mol_type = other DNA

SEQ ID NO: 53891 - DNA, 80 bp, synthetic construct; identical to SEQ ID NO: 18875
  source 1..80: mol_type = other DNA

SEQ ID NO: 53892 - DNA, 80 bp, synthetic construct; identical to SEQ ID NO: 8657
  source 1..80: mol_type = other DNA

SEQ ID NO: 53893 - DNA, 80 bp, synthetic construct; identical to SEQ ID NO: 18879
  source 1..80: mol_type = other DNA

SEQ ID NO: 53894 - DNA, 80 bp, synthetic construct; identical to SEQ ID NO: 18880
  source 1..80: mol_type = other DNA

SEQ ID NO: 53895 - DNA, 80 bp, synthetic construct; identical to SEQ ID NO: 8658
  source 1..80: mol_type = other DNA

SEQ ID NO: 53896 - DNA, 80 bp, synthetic construct; identical to SEQ ID NO: 18882
  source 1..80: mol_type = other DNA

SEQ ID NO: 53897 - DNA, 80 bp, synthetic construct; identical to SEQ ID NO: 18884
  source 1..80: mol_type = other DNA

SEQ ID NO: 53898 - DNA, 80 bp, synthetic construct; identical to SEQ ID NO: 8659
  source 1..80: mol_type = other DNA

SEQ ID NO: 53899 - DNA, 80 bp, synthetic construct; identical to SEQ ID NO: 18886
  source 1..80: mol_type = other DNA

SEQ ID NO: 53900 - DNA, 80 bp, synthetic construct; identical to SEQ ID NO: 18887
  source 1..80: mol_type = other DNA

SEQ ID NO: 53901 - DNA, 80 bp, synthetic construct; identical to SEQ ID NO: 8660
  source 1..80: mol_type = other DNA

SEQ ID NO: 53902 - DNA, 80 bp, synthetic construct; identical to SEQ ID NO: 18889
  source 1..80: mol_type = other DNA

SEQ ID NO: 53903 - DNA, 80 bp, synthetic construct; identical to SEQ ID NO: 18890
  source 1..80: mol_type = other DNA

SEQ ID NO: 53904 - DNA, 80 bp, synthetic construct; identical to SEQ ID NO: 18891
  source 1..80: mol_type = other DNA

SEQ ID NO: 53905 - DNA, 80 bp, synthetic construct; identical to SEQ ID NO: 8661
  source 1..80: mol_type = other DNA

SEQ ID NO: 53906 - DNA, 80 bp, synthetic construct; identical to SEQ ID NO: 18894
  source 1..80: mol_type = other DNA

SEQ ID NO: 53907 - DNA, 80 bp, synthetic construct; identical to SEQ ID NO: 8662
  source 1..80: mol_type = other DNA

SEQ ID NO: 53908 - DNA, 80 bp, synthetic construct; identical to SEQ ID NO: 18897
  source 1..80: mol_type = other DNA

SEQ ID NO: 53909 - DNA, 80 bp, synthetic construct; identical to SEQ ID NO: 18898
  source 1..80: mol_type = other DNA

SEQ ID NO: 53910 - DNA, 80 bp, synthetic construct; identical to SEQ ID NO: 18899
  source 1..80: mol_type = other DNA

SEQ ID NO: 53911 - DNA, 80 bp, synthetic construct; identical to SEQ ID NO: 18900
  source 1..80: mol_type = other DNA

SEQ ID NO: 53912 - DNA, 80 bp, synthetic construct; identical to SEQ ID NO: 8663
  source 1..80: mol_type = other DNA

SEQ ID NO: 53913 - DNA, 80 bp, synthetic construct; identical to SEQ ID NO: 18902
  source 1..80: mol_type = other DNA

SEQ ID NO: 53914 - DNA, 80 bp, synthetic construct; identical to SEQ ID NO: 18903
  source 1..80: mol_type = other DNA

SEQ ID NO: 53915 - DNA, 80 bp, synthetic construct; identical to SEQ ID NO: 18904
  source 1..80: mol_type = other DNA

SEQ ID NO: 53916 - DNA, 80 bp, synthetic construct; identical to SEQ ID NO: 8664
  source 1..80: mol_type = other DNA

SEQ ID NO: 53917 - DNA, 80 bp, synthetic construct; identical to SEQ ID NO: 18906
  source 1..80: mol_type = other DNA

SEQ ID NO: 53918 - DNA, 80 bp, synthetic construct; identical to SEQ ID NO: 18907
  source 1..80: mol_type = other DNA

SEQ ID NO: 53919 - DNA, 80 bp, synthetic construct; identical to SEQ ID NO: 18908
  source 1..80: mol_type = other DNA

SEQ ID NO: 53920 - DNA, 80 bp, synthetic construct; identical to SEQ ID NO: 18909
  source 1..80: mol_type = other DNA

SEQ ID NO: 53921 - DNA, 80 bp, synthetic construct; identical to SEQ ID NO: 18910
  source 1..80: mol_type = other DNA

SEQ ID NO: 53922 - DNA, 80 bp, synthetic construct; identical to SEQ ID NO: 18911
  source 1..80: mol_type = other DNA

SEQ ID NO: 53923 - DNA, 80 bp, synthetic construct; identical to SEQ ID NO: 18912
  source 1..80: mol_type = other DNA

SEQ ID NO: 53924 - DNA, 80 bp, synthetic construct; identical to SEQ ID NO: 8665
  source 1..80: mol_type = other DNA

SEQ ID NO: 53925 - DNA, 80 bp, synthetic construct; identical to SEQ ID NO: 18915
  source 1..80: mol_type = other DNA

SEQ ID NO: 53926 - DNA, 80 bp, synthetic construct; identical to SEQ ID NO: 18916
  source 1..80: mol_type = other DNA

SEQ ID NO: 53927 - DNA, 80 bp, synthetic construct; identical to SEQ ID NO: 8666
  source 1..80: mol_type = other DNA

SEQ ID NO: 53928 - DNA, 80 bp, synthetic construct; identical to SEQ ID NO: 18918
  source 1..80: mol_type = other DNA

SEQ ID NO: 53929 - DNA, 80 bp, synthetic construct; identical to SEQ ID NO: 18919
  source 1..80: mol_type = other DNA

SEQ ID NO: 53930 - DNA, 80 bp, synthetic construct; identical to SEQ ID NO: 8667
  source 1..80: mol_type = other DNA

SEQ ID NO: 53931 - DNA, 80 bp, synthetic construct; identical to SEQ ID NO: 18921
  source 1..80: mol_type = other DNA

SEQ ID NO: 53932 - DNA, 80 bp, synthetic construct; identical to SEQ ID NO: 18922
  source 1..80: mol_type = other DNA

SEQ ID NO: 53933 - DNA, 80 bp, synthetic construct; identical to SEQ ID NO: 18923
  source 1..80: mol_type = other DNA

SEQ ID NO: 53934 - DNA, 80 bp, synthetic construct; identical to SEQ ID NO: 8668
  source 1..80: mol_type = other DNA

SEQ ID NO: 53935 - DNA, 80 bp, synthetic construct; identical to SEQ ID NO: 18925
  source 1..80: mol_type = other DNA

SEQ ID NO: 53936 - DNA, 80 bp, synthetic construct; identical to SEQ ID NO: 18926
  source 1..80: mol_type = other DNA

SEQ ID NO: 53937 - DNA, 80 bp, synthetic construct; identical to SEQ ID NO: 18927
  source 1..80: mol_type = other DNA

SEQ ID NO: 53938 - DNA, 80 bp, synthetic construct; identical to SEQ ID NO: 18928
  source 1..80: mol_type = other DNA

SEQ ID NO: 53939 - DNA, 80 bp, synthetic construct; identical to SEQ ID NO: 8669
  source 1..80: mol_type = other DNA

SEQ ID NO: 53940 - DNA, 80 bp, synthetic construct; identical to SEQ ID NO: 18930
  source 1..80: mol_type = other DNA

SEQ ID NO: 53941 - DNA, 80 bp, synthetic construct; identical to SEQ ID NO: 18931
  source 1..80: mol_type = other DNA

SEQ ID NO: 53942 - DNA, 80 bp, synthetic construct; identical to SEQ ID NO: 18932
  source 1..80: mol_type = other DNA

SEQ ID NO: 53943 - DNA, 80 bp, synthetic construct; identical to SEQ ID NO: 8670
  source 1..80: mol_type = other DNA

SEQ ID NO: 53944 - DNA, 80 bp, synthetic construct; identical to SEQ ID NO: 18934
  source 1..80: mol_type = other DNA

SEQ ID NO: 53945 - DNA, 80 bp, synthetic construct; identical to SEQ ID NO: 18936
  source 1..80: mol_type = other DNA

SEQ ID NO: 53946 - DNA, 80 bp, synthetic construct; identical to SEQ ID NO: 8671
  source 1..80: mol_type = other DNA

SEQ ID NO: 53947 - DNA, 80 bp, synthetic construct; identical to SEQ ID NO: 18938
  source 1..80: mol_type = other DNA

SEQ ID NO: 53948 - DNA, 80 bp, synthetic construct; identical to SEQ ID NO: 18939
  source 1..80: mol_type = other DNA

SEQ ID NO: 53949 - DNA, 80 bp, synthetic construct; identical to SEQ ID NO: 18940
  source 1..80: mol_type = other DNA

SEQ ID NO: 53950 - DNA, 80 bp, synthetic construct; identical to SEQ ID NO: 8672
  source 1..80: mol_type = other DNA

SEQ ID NO: 53951 - DNA, 80 bp, synthetic construct; identical to SEQ ID NO: 18942
  source 1..80: mol_type = other DNA

SEQ ID NO: 53952 - DNA, 80 bp, synthetic construct; identical to SEQ ID NO: 18943
  source 1..80: mol_type = other DNA

SEQ ID NO: 53953 - DNA, 80 bp, synthetic construct; identical to SEQ ID NO: 8673
  source 1..80: mol_type = other DNA

SEQ ID NO: 53954 - DNA, 80 bp, synthetic construct; identical to SEQ ID NO: 18945
  source 1..80: mol_type = other DNA

SEQ ID NO: 53955 - DNA, 80 bp, synthetic construct; identical to SEQ ID NO: 18946
  source 1..80: mol_type = other DNA

SEQ ID NO: 53956 - DNA, 80 bp, synthetic construct; identical to SEQ ID NO: 18947
  source 1..80: mol_type = other DNA

SEQ ID NO: 53957 - DNA, 80 bp, synthetic construct; identical to SEQ ID NO: 8674
  source 1..80: mol_type = other DNA

SEQ ID NO: 53958 - DNA, 80 bp, synthetic construct; identical to SEQ ID NO: 18949
  source 1..80: mol_type = other DNA

SEQ ID NO: 53959 - DNA, 80 bp, synthetic construct; identical to SEQ ID NO: 18950
  source 1..80: mol_type = other DNA

SEQ ID NO: 53960 - DNA, 80 bp, synthetic construct; identical to SEQ ID NO: 18951
  source 1..80: mol_type = other DNA

SEQ ID NO: 53961 - DNA, 80 bp, synthetic construct; identical to SEQ ID NO: 8675
  source 1..80: mol_type = other DNA

SEQ ID NO: 53962 - DNA, 80 bp, synthetic construct; identical to SEQ ID NO: 18953
  source 1..80: mol_type = other DNA

SEQ ID NO: 53963 - DNA, 80 bp, synthetic construct; identical to SEQ ID NO: 18954
  source 1..80: mol_type = other DNA

SEQ ID NO: 53964 - DNA, 80 bp, synthetic construct; identical to SEQ ID NO: 18955
  source 1..80: mol_type = other DNA

SEQ ID NO: 53965 - DNA, 80 bp, synthetic construct; identical to SEQ ID NO: 8676
  source 1..80: mol_type = other DNA

SEQ ID NO: 53966 - DNA, 80 bp, synthetic construct; identical to SEQ ID NO: 18957
  source 1..80: mol_type = other DNA

SEQ ID NO: 53967 - DNA, 80 bp, synthetic construct; identical to SEQ ID NO: 18958
  source 1..80: mol_type = other DNA

SEQ ID NO: 53968 - DNA, 80 bp, synthetic construct; identical to SEQ ID NO: 18959
  source 1..80: mol_type = other DNA

SEQ ID NO: 53969 - DNA, 80 bp, synthetic construct; identical to SEQ ID NO: 8677
  source 1..80: mol_type = other DNA

SEQ ID NO: 53970 - DNA, 80 bp, synthetic construct; identical to SEQ ID NO: 18961
  source 1..80: mol_type = other DNA

SEQ ID NO: 53971 - DNA, 80 bp, synthetic construct; identical to SEQ ID NO: 18962
  source 1..80: mol_type = other DNA

SEQ ID NO: 53972 - DNA, 80 bp, synthetic construct; identical to SEQ ID NO: 18963
  source 1..80: mol_type = other DNA

SEQ ID NO: 53973 - DNA, 80 bp, synthetic construct; identical to SEQ ID NO: 8678
  source 1..80: mol_type = other DNA

SEQ ID NO: 53974 - DNA, 80 bp, synthetic construct; identical to SEQ ID NO: 18967
  source 1..80: mol_type = other DNA

SEQ ID NO: 53975 - DNA, 80 bp, synthetic construct; identical to SEQ ID NO: 18968
  source 1..80: mol_type = other DNA

SEQ ID NO: 53976 - DNA, 80 bp, synthetic construct; identical to SEQ ID NO: 8679
  source 1..80: mol_type = other DNA

SEQ ID NO: 53977 - DNA, 80 bp, synthetic construct; identical to SEQ ID NO: 18971
  source 1..80: mol_type = other DNA

SEQ ID NO: 53978 - DNA, 80 bp, synthetic construct; identical to SEQ ID NO: 18972
  source 1..80: mol_type = other DNA

SEQ ID NO: 53979 - DNA, 80 bp, synthetic construct; identical to SEQ ID NO: 8680
  source 1..80: mol_type = other DNA

SEQ ID NO: 53980 - DNA, 80 bp, synthetic construct; identical to SEQ ID NO: 18974
  source 1..80: mol_type = other DNA

SEQ ID NO: 53981 - DNA, 80 bp, synthetic construct; identical to SEQ ID NO: 18975
  source 1..80: mol_type = other DNA

SEQ ID NO: 53982 - DNA, 80 bp, synthetic construct; identical to SEQ ID NO: 8681
  source 1..80: mol_type = other DNA

SEQ ID NO: 53983 - DNA, 80 bp, synthetic construct; identical to SEQ ID NO: 18978
  source 1..80: mol_type = other DNA

SEQ ID NO: 53984 - DNA, 80 bp, synthetic construct; identical to SEQ ID NO: 18979
  source 1..80: mol_type = other DNA

SEQ ID NO: 53985 - DNA, 80 bp, synthetic construct; identical to SEQ ID NO: 18980
  source 1..80: mol_type = other DNA

SEQ ID NO: 53986 - DNA, 80 bp, synthetic construct; identical to SEQ ID NO: 8682
  source 1..80: mol_type = other DNA

SEQ ID NO: 53987 - DNA, 80 bp, synthetic construct; identical to SEQ ID NO: 18982
  source 1..80: mol_type = other DNA

SEQ ID NO: 53988 - DNA, 80 bp, synthetic construct; identical to SEQ ID NO: 18983
  source 1..80: mol_type = other DNA

SEQ ID NO: 53989 - DNA, 80 bp, synthetic construct; identical to SEQ ID NO: 18984
  source 1..80: mol_type = other DNA

SEQ ID NO: 53990 - DNA, 80 bp, synthetic construct; identical to SEQ ID NO: 8683
  source 1..80: mol_type = other DNA

SEQ ID NO: 53991 - DNA, 80 bp, synthetic construct; identical to SEQ ID NO: 18986
  source 1..80: mol_type = other DNA

SEQ ID NO: 53992 - DNA, 80 bp, synthetic construct; identical to SEQ ID NO: 18987
  source 1..80: mol_type = other DNA

SEQ ID NO: 53993 - DNA, 80 bp, synthetic construct; identical to SEQ ID NO: 8684
  source 1..80: mol_type = other DNA

SEQ ID NO: 53994 - DNA, 80 bp, synthetic construct; identical to SEQ ID NO: 18990
  source 1..80: mol_type = other DNA

SEQ ID NO: 53995 - DNA, 80 bp, synthetic construct; identical to SEQ ID NO: 18991
  source 1..80: mol_type = other DNA

SEQ ID NO: 53996 - DNA, 80 bp, synthetic construct; identical to SEQ ID NO: 8685
  source 1..80: mol_type = other DNA

SEQ ID NO: 53997 - DNA, 80 bp, synthetic construct; identical to SEQ ID NO: 18993
  source 1..80: mol_type = other DNA

SEQ ID NO: 53998 - DNA, 80 bp, synthetic construct; identical to SEQ ID NO: 18994
  source 1..80: mol_type = other DNA

SEQ ID NO: 53999 - DNA, 80 bp, synthetic construct; identical to SEQ ID NO: 18995
  source 1..80: mol_type = other DNA

SEQ ID NO: 54000 - DNA, 80 bp, synthetic construct; identical to SEQ ID NO: 8686
  source 1..80: mol_type = other DNA

SEQ ID NO: 54001 - DNA, 80 bp, synthetic construct; identical to SEQ ID NO: 18997
  source 1..80: mol_type = other DNA

SEQ ID NO: 54002 - DNA, 80 bp, synthetic construct; identical to SEQ ID NO: 18998
  source 1..80: mol_type = other DNA

SEQ ID NO: 54003 - DNA, 80 bp, synthetic construct; identical to SEQ ID NO: 18999
  source 1..80: mol_type = other DNA

SEQ ID NO: 54004 - DNA, 80 bp, synthetic construct; identical to SEQ ID NO: 8687
  source 1..80: mol_type = other DNA

SEQ ID NO: 54005 - DNA, 80 bp, synthetic construct; identical to SEQ ID NO: 19002
  source 1..80: mol_type = other DNA

SEQ ID NO: 54006 - DNA, 80 bp, synthetic construct; identical to SEQ ID NO: 19003
  source 1..80: mol_type = other DNA

SEQ ID NO: 54007 - DNA, 80 bp, synthetic construct; identical to SEQ ID NO: 8688
  source 1..80: mol_type = other DNA

SEQ ID NO: 54008 - DNA, 80 bp, synthetic construct; identical to SEQ ID NO: 19005
  source 1..80: mol_type = other DNA

SEQ ID NO: 54009 - DNA, 80 bp, synthetic construct; identical to SEQ ID NO: 19006
  source 1..80: mol_type = other DNA

SEQ ID NO: 54010 - DNA, 80 bp, synthetic construct; identical to SEQ ID NO: 19007
  source 1..80: mol_type = other DNA

SEQ ID NO: 54011 - DNA, 80 bp, synthetic construct; identical to SEQ ID NO: 8689
  source 1..80: mol_type = other DNA

SEQ ID NO: 54012 - DNA, 80 bp, synthetic construct; identical to SEQ ID NO: 19009
  source 1..80: mol_type = other DNA

SEQ ID NO: 54013 - DNA, 80 bp, synthetic construct; identical to SEQ ID NO: 19010
  source 1..80: mol_type = other DNA

SEQ ID NO: 54014 - DNA, 80 bp, synthetic construct; identical to SEQ ID NO: 19011
  source 1..80: mol_type = other DNA

SEQ ID NO: 54015 - DNA, 80 bp, synthetic construct; identical to SEQ ID NO: 19012
  source 1..80: mol_type = other DNA

SEQ ID NO: 54016 - DNA, 80 bp, synthetic construct; identical to SEQ ID NO: 8690
  source 1..80: mol_type = other DNA

SEQ ID NO: 54017 - DNA, 80 bp, synthetic construct; identical to SEQ ID NO: 19014
  source 1..80: mol_type = other DNA

SEQ ID NO: 54018 - DNA, 80 bp, synthetic construct; identical to SEQ ID NO: 8691
  source 1..80: mol_type = other DNA

SEQ ID NO: 54019 - DNA, 80 bp, synthetic construct; identical to SEQ ID NO: 19017
  source 1..80: mol_type = other DNA

SEQ ID NO: 54020 - DNA, 80 bp, synthetic construct; identical to SEQ ID NO: 19018
  source 1..80: mol_type = other DNA

SEQ ID NO: 54021 - DNA, 80 bp, synthetic construct; identical to SEQ ID NO: 19019
  source 1..80: mol_type = other DNA

SEQ ID NO: 54022 - DNA, 80 bp, synthetic construct; identical to SEQ ID NO: 19020
  source 1..80: mol_type = other DNA

SEQ ID NO: 54023 - DNA, 80 bp, synthetic construct; identical to SEQ ID NO: 8692
  source 1..80: mol_type = other DNA

SEQ ID NO: 54024 - DNA, 80 bp, synthetic construct; identical to SEQ ID NO: 19022
  source 1..80: mol_type = other DNA

SEQ ID NO: 54025 - DNA, 80 bp, synthetic construct; identical to SEQ ID NO: 19023
  source 1..80: mol_type = other DNA

SEQ ID NO: 54026 - DNA, 80 bp, synthetic construct; identical to SEQ ID NO: 8693
  source 1..80: mol_type = other DNA

SEQ ID NO: 54027 - DNA, 80 bp, synthetic construct; identical to SEQ ID NO: 19025
  source 1..80: mol_type = other DNA

SEQ ID NO: 54028 - DNA, 80 bp, synthetic construct; identical to SEQ ID NO: 19026
  source 1..80: mol_type = other DNA

SEQ ID NO: 54029 - DNA, 80 bp, synthetic construct; identical to SEQ ID NO: 19027
  source 1..80: mol_type = other DNA

SEQ ID NO: 54030 - DNA, 80 bp, synthetic construct; identical to SEQ ID NO: 8694
  source 1..80: mol_type = other DNA

SEQ ID NO: 54031 - DNA, 80 bp, synthetic construct; identical to SEQ ID NO: 19029
  source 1..80: mol_type = other DNA

SEQ ID NO: 54032 - DNA, 80 bp, synthetic construct; identical to SEQ ID NO: 19030
  source 1..80: mol_type = other DNA

SEQ ID NO: 54033 - DNA, 80 bp, synthetic construct; identical to SEQ ID NO: 19031
  source 1..80: mol_type = other DNA

SEQ ID NO: 54034 - DNA, 80 bp, synthetic construct; identical to SEQ ID NO: 19032
  source 1..80: mol_type = other DNA

SEQ ID NO: 54035 - DNA, 80 bp, synthetic construct; identical to SEQ ID NO: 8695
  source 1..80: mol_type = other DNA

SEQ ID NO: 54036 - DNA, 80 bp, synthetic construct; identical to SEQ ID NO: 19034
  source 1..80: mol_type = other DNA

SEQ ID NO: 54037 - DNA, 80 bp, synthetic construct; identical to SEQ ID NO: 19035
  source 1..80: mol_type = other DNA

SEQ ID NO: 54038 - DNA, 80 bp, synthetic construct; identical to SEQ ID NO: 8696
  source 1..80: mol_type = other DNA

SEQ ID NO: 54039 - DNA, 80 bp, synthetic construct; identical to SEQ ID NO: 19037
  source 1..80: mol_type = other DNA

SEQ ID NO: 54040 - DNA, 80 bp, synthetic construct; identical to SEQ ID NO: 19038
  source 1..80: mol_type = other DNA

SEQ ID NO: 54041 - DNA, 80 bp, synthetic construct; identical to SEQ ID NO: 19039
  source 1..80: mol_type = other DNA

SEQ ID NO: 54042 - DNA, 80 bp, synthetic construct; identical to SEQ ID NO: 8697
  source 1..80: mol_type = other DNA

SEQ ID NO: 54043 - DNA, 80 bp, synthetic construct; identical to SEQ ID NO: 19041
  source 1..80: mol_type = other DNA

SEQ ID NO: 54044 - DNA, 80 bp, synthetic construct; identical to SEQ ID NO: 19042
  source 1..80: mol_type = other DNA

SEQ ID NO: 54045 - DNA, 80 bp, synthetic construct; identical to SEQ ID NO: 19043
  source 1..80: mol_type = other DNA

SEQ ID NO: 54046 - DNA, 80 bp, synthetic construct; identical to SEQ ID NO: 8698
  source 1..80: mol_type = other DNA

SEQ ID NO: 54047 - DNA, 80 bp, synthetic construct; identical to SEQ ID NO: 19045
  source 1..80: mol_type = other DNA

SEQ ID NO: 54048 - DNA, 80 bp, synthetic construct; identical to SEQ ID NO: 19046
  source 1..80: mol_type = other DNA

SEQ ID NO: 54049 - DNA, 80 bp, synthetic construct; identical to SEQ ID NO: 19047
  source 1..80: mol_type = other DNA

SEQ ID NO: 54050 - DNA, 80 bp, synthetic construct; identical to SEQ ID NO: 19048
  source 1..80: mol_type = other DNA

SEQ ID NO: 54051 - DNA, 80 bp, synthetic construct; identical to SEQ ID NO: 8699
  source 1..80: mol_type = other DNA

SEQ ID NO: 54052 - DNA, 80 bp, synthetic construct; identical to SEQ ID NO: 19050
  source 1..80: mol_type = other DNA

SEQ ID NO: 54053 - DNA, 80 bp, synthetic construct; identical to SEQ ID NO: 19051
  source 1..80: mol_type = other DNA

SEQ ID NO: 54054 - DNA, 80 bp, synthetic construct; identical to SEQ ID NO: 8700
  source 1..80: mol_type = other DNA

SEQ ID NO: 54055 - DNA, 80 bp, synthetic construct; identical to SEQ ID NO: 19054
  source 1..80: mol_type = other DNA

SEQ ID NO: 54056 - DNA, 80 bp, synthetic construct; identical to SEQ ID NO: 19055
  source 1..80: mol_type = other DNA

SEQ ID NO: 54057 - DNA, 80 bp, synthetic construct; identical to SEQ ID NO: 8701
  source 1..80: mol_type = other DNA

SEQ ID NO: 54058 - DNA, 80 bp, synthetic construct; identical to SEQ ID NO: 19058
  source 1..80: mol_type = other DNA

SEQ ID NO: 54059 - DNA, 80 bp, synthetic construct; identical to SEQ ID NO: 19059
  source 1..80: mol_type = other DNA

SEQ ID NO: 54060 - DNA, 80 bp, synthetic construct; identical to SEQ ID NO: 19060
  source 1..80: mol_type = other DNA

SEQ ID NO: 54061 - DNA, 80 bp, synthetic construct; identical to SEQ ID NO: 8702
  source 1..80: mol_type = other DNA

SEQ ID NO: 54062 - DNA, 80 bp, synthetic construct; identical to SEQ ID NO: 19062
  source 1..80: mol_type = other DNA

SEQ ID NO: 54063 - DNA, 80 bp, synthetic construct; identical to SEQ ID NO: 19063
  source 1..80: mol_type = other DNA

SEQ ID NO: 54064 - DNA, 80 bp, synthetic construct; identical to SEQ ID NO: 8703
  source 1..80: mol_type = other DNA

SEQ ID NO: 54065 - DNA, 80 bp, synthetic construct; identical to SEQ ID NO: 19065
  source 1..80: mol_type = other DNA

SEQ ID NO: 54066 - DNA, 80 bp, synthetic construct; identical to SEQ ID NO: 19066
  source 1..80: mol_type = other DNA

SEQ ID NO: 54067 - DNA, 80 bp, synthetic construct; identical to SEQ ID NO: 19067
  source 1..80: mol_type = other DNA

SEQ ID NO: 54068 - DNA, 80 bp, synthetic construct; identical to SEQ ID NO: 19068
  source 1..80: mol_type = other DNA

SEQ ID NO: 54069 - DNA, 80 bp, synthetic construct; identical to SEQ ID NO: 8704
  source 1..80: mol_type = other DNA

SEQ ID NO: 54070 - DNA, 80 bp, synthetic construct; identical to SEQ ID NO: 19070
  source 1..80: mol_type = other DNA

SEQ ID NO: 54071 - DNA, 80 bp, synthetic construct; identical to SEQ ID NO: 19071
  source 1..80: mol_type = other DNA

SEQ ID NO: 54072 - DNA, 80 bp, synthetic construct; identical to SEQ ID NO: 8705
  source 1..80: mol_type = other DNA

SEQ ID NO: 54073 - DNA, 80 bp, synthetic construct; identical to SEQ ID NO: 19073
  source 1..80: mol_type = other DNA

SEQ ID NO: 54074 - DNA, 80 bp, synthetic construct; identical to SEQ ID NO: 19074
  source 1..80: mol_type = other DNA

SEQ ID NO: 54075 - DNA, 80 bp, synthetic construct; identical to SEQ ID NO: 19075
  source 1..80: mol_type = other DNA

SEQ ID NO: 54076 - DNA, 80 bp, synthetic construct; identical to SEQ ID NO: 8706
  source 1..80: mol_type = other DNA

SEQ ID NO: 54077 - DNA, 80 bp, synthetic construct; identical to SEQ ID NO: 19077
  source 1..80: mol_type = other DNA

SEQ ID NO: 54078 - DNA, 80 bp, synthetic construct; identical to SEQ ID NO: 19078
  source 1..80: mol_type = other DNA

SEQ ID NO: 54079 - DNA, 80 bp, synthetic construct; identical to SEQ ID NO: 19079
  source 1..80: mol_type = other DNA

SEQ ID NO: 54080 - DNA, 80 bp, synthetic construct; identical to SEQ ID NO: 8707
  source 1..80: mol_type = other DNA

SEQ ID NO: 54081 - DNA, 80 bp, synthetic construct; identical to SEQ ID NO: 19081
  source 1..80: mol_type = other DNA

SEQ ID NO: 54082 - DNA, 80 bp, synthetic construct; identical to SEQ ID NO: 19082
  source 1..80: mol_type = other DNA

SEQ ID NO: 54083 - DNA, 80 bp, synthetic construct; identical to SEQ ID NO: 19083
  source 1..80: mol_type = other DNA

SEQ ID NO: 54084 - DNA, 80 bp, synthetic construct; identical to SEQ ID NO: 8708
  source 1..80: mol_type = other DNA

SEQ ID NO: 54085 - DNA, 80 bp, synthetic construct; identical to SEQ ID NO: 19086
  source 1..80: mol_type = other DNA

SEQ ID NO: 54086 - DNA, 80 bp, synthetic construct; identical to SEQ ID NO: 8709
  source 1..80: mol_type = other DNA

SEQ ID NO: 54087 - DNA, 80 bp, synthetic construct; identical to SEQ ID NO: 19088
  source 1..80: mol_type = other DNA

SEQ ID NO: 54088 - DNA, 80 bp, synthetic construct; identical to SEQ ID NO: 19090
  source 1..80: mol_type = other DNA

SEQ ID NO: 54089 - DNA, 80 bp, synthetic construct; identical to SEQ ID NO: 8710
  source 1..80: mol_type = other DNA

SEQ ID NO: 54090 - DNA, 80 bp, synthetic construct; identical to SEQ ID NO: 19092
  source 1..80: mol_type = other DNA

SEQ ID NO: 54091 - DNA, 80 bp, synthetic construct; identical to SEQ ID NO: 19094
  source 1..80: mol_type = other DNA

SEQ ID NO: 54092 - DNA, 80 bp, synthetic construct; identical to SEQ ID NO: 8711
  source 1..80: mol_type = other DNA

SEQ ID NO: 54093 - DNA, 80 bp, synthetic construct; identical to SEQ ID NO: 19096
  source 1..80: mol_type = other DNA

SEQ ID NO: 54094 - DNA, 80 bp, synthetic construct; identical to SEQ ID NO: 19097
  source 1..80: mol_type = other DNA

SEQ ID NO: 54095 - DNA, 80 bp, synthetic construct; identical to SEQ ID NO: 8712
  source 1..80: mol_type = other DNA

SEQ ID NO: 54096 - DNA, 80 bp, synthetic construct; identical to SEQ ID NO: 19100
  source 1..80: mol_type = other DNA

SEQ ID NO: 54097 - DNA, 80 bp, synthetic construct; identical to SEQ ID NO: 19101
  source 1..80: mol_type = other DNA

SEQ ID NO: 54098 - DNA, 80 bp, synthetic construct; identical to SEQ ID NO: 8713
  source 1..80: mol_type = other DNA

SEQ ID NO: 54099 - DNA, 80 bp, synthetic construct; identical to SEQ ID NO: 19103
  source 1..80: mol_type = other DNA

SEQ ID NO: 54100 - DNA, 80 bp, synthetic construct; identical to SEQ ID NO: 19104
  source 1..80: mol_type = other DNA

SEQ ID NO: 54101 - DNA, 80 bp, synthetic construct; identical to SEQ ID NO: 19105
  source 1..80: mol_type = other DNA

SEQ ID NO: 54102 - DNA, 80 bp, synthetic construct; identical to SEQ ID NO: 8714
  source 1..80: mol_type = other DNA

SEQ ID NO: 54103 - DNA, 80 bp, synthetic construct; identical to SEQ ID NO: 19107
  source 1..80: mol_type = other DNA

SEQ ID NO: 54104 - DNA, 80 bp, synthetic construct; identical to SEQ ID NO: 19108
  source 1..80: mol_type = other DNA

SEQ ID NO: 54105 - DNA, 80 bp, synthetic construct; identical to SEQ ID NO: 19109
  source 1..80: mol_type = other DNA

SEQ ID NO: 54106 - DNA, 80 bp, synthetic construct; identical to SEQ ID NO: 8715
  source 1..80: mol_type = other DNA

SEQ ID NO: 54107 - DNA, 80 bp, synthetic construct; identical to SEQ ID NO: 19111
  source 1..80: mol_type = other DNA

SEQ ID NO: 54108 - DNA, 80 bp, synthetic construct; identical to SEQ ID NO: 19112
  source 1..80: mol_type = other DNA

SEQ ID NO: 54109 - DNA, 80 bp, synthetic construct; identical to SEQ ID NO: 19113
  source 1..80: mol_type = other DNA

SEQ ID NO: 54110 - DNA, 80 bp, synthetic construct; identical to SEQ ID NO: 8716
  source 1..80: mol_type = other DNA

SEQ ID NO: 54111 - DNA, 80 bp, synthetic construct; identical to SEQ ID NO: 19116
  source 1..80: mol_type = other DNA

SEQ ID NO: 54112 - DNA, 80 bp, synthetic construct; identical to SEQ ID NO: 8717
  source 1..80: mol_type = other DNA

SEQ ID NO: 54113 - DNA, 80 bp, synthetic construct; identical to SEQ ID NO: 19119
  source 1..80: mol_type = other DNA

SEQ ID NO: 54114 - DNA, 80 bp, synthetic construct; identical to SEQ ID NO: 19120
  source 1..80: mol_type = other DNA

SEQ ID NO: 54115 - DNA, 80 bp, synthetic construct; identical to SEQ ID NO: 19121
  source 1..80: mol_type = other DNA

SEQ ID NO: 54116 - DNA, 80 bp, synthetic construct; identical to SEQ ID NO: 8718
  source 1..80: mol_type = other DNA

SEQ ID NO: 54117 - DNA, 80 bp, synthetic construct; identical to SEQ ID NO: 19123
  source 1..80: mol_type = other DNA

SEQ ID NO: 54118 - DNA, 80 bp, synthetic construct; identical to SEQ ID NO: 19124
  source 1..80: mol_type = other DNA

SEQ ID NO: 54119 - DNA, 80 bp, synthetic construct; identical to SEQ ID NO: 19125
  source 1..80: mol_type = other DNA

SEQ ID NO: 54120 - DNA, 80 bp, synthetic construct; identical to SEQ ID NO: 8719
  source 1..80: mol_type = other DNA

SEQ ID NO: 54121 - DNA, 80 bp, synthetic construct; identical to SEQ ID NO: 19127
  source 1..80: mol_type = other DNA

SEQ ID NO: 54122 - DNA, 80 bp, synthetic construct; identical to SEQ ID NO: 19128
  source 1..80: mol_type = other DNA

SEQ ID NO: 54123 - DNA, 80 bp, synthetic construct; identical to SEQ ID NO: 19129
  source 1..80: mol_type = other DNA

SEQ ID NO: 54124 - DNA, 80 bp, synthetic construct; identical to SEQ ID NO: 19130
  source 1..80: mol_type = other DNA

SEQ ID NO: 54125 - DNA, 80 bp, synthetic construct; identical to SEQ ID NO: 8720
  source 1..80: mol_type = other DNA

SEQ ID NO: 54126 - DNA, 80 bp, synthetic construct; identical to SEQ ID NO: 19132
  source 1..80: mol_type = other DNA

SEQ ID NO: 54127 - DNA, 80 bp, synthetic construct; identical to SEQ ID NO: 19133
  source 1..80: mol_type = other DNA

SEQ ID NO: 54128 - DNA, 80 bp, synthetic construct; identical to SEQ ID NO: 8721
  source 1..80: mol_type = other DNA

SEQ ID NO: 54129 - DNA, 80 bp, synthetic construct; identical to SEQ ID NO: 19135
  source 1..80: mol_type = other DNA

SEQ ID NO: 54130 - DNA, 80 bp, synthetic construct; identical to SEQ ID NO: 19136
  source 1..80: mol_type = other DNA

SEQ ID NO: 54131 - DNA, 80 bp, synthetic construct; identical to SEQ ID NO: 19137
  source 1..80: mol_type = other DNA

SEQ ID NO: 54132 - DNA, 80 bp, synthetic construct; identical to SEQ ID NO: 19138
  source 1..80: mol_type = other DNA

SEQ ID NO: 54133 - DNA, 80 bp, synthetic construct; identical to SEQ ID NO: 19139
  source 1..80: mol_type = other DNA

SEQ ID NO: 54134 - DNA, 80 bp, synthetic construct; identical to SEQ ID NO: 8722
  source 1..80: mol_type = other DNA

SEQ ID NO: 54135 - DNA, 80 bp, synthetic construct; identical to SEQ ID NO: 19141
  source 1..80: mol_type = other DNA

SEQ ID NO: 54136 - DNA, 80 bp, synthetic construct; identical to SEQ ID NO: 19142
  source 1..80: mol_type = other DNA

SEQ ID NO: 54137 - DNA, 80 bp, synthetic construct; identical to SEQ ID NO: 19143
  source 1..80: mol_type = other DNA

SEQ ID NO: 54138 - DNA, 80 bp, synthetic construct; identical to SEQ ID NO: 8723
  source 1..80: mol_type = other DNA

SEQ ID NO: 54139 - DNA, 80 bp, synthetic construct; identical to SEQ ID NO: 19145
  source 1..80: mol_type = other DNA

SEQ ID NO: 54140 - DNA, 80 bp, synthetic construct; identical to SEQ ID NO: 19146
  source 1..80: mol_type = other DNA

SEQ ID NO: 54141 - DNA, 80 bp, synthetic construct; identical to SEQ ID NO: 8724
  source 1..80: mol_type = other DNA

SEQ ID NO: 54142 - DNA, 80 bp, synthetic construct; identical to SEQ ID NO: 19148
  source 1..80: mol_type = other DNA

SEQ ID NO: 54143 - DNA, 80 bp, synthetic construct; identical to SEQ ID NO: 19149
  source 1..80: mol_type = other DNA

SEQ ID NO: 54144 - DNA, 80 bp, synthetic construct; identical to SEQ ID NO: 19150
  source 1..80: mol_type = other DNA

SEQ ID NO: 54145 - DNA, 80 bp, synthetic construct; identical to SEQ ID NO: 8725
  source 1..80: mol_type = other DNA

SEQ ID NO: 54146 - DNA, 80 bp, synthetic construct; identical to SEQ ID NO: 19152
  source 1..80: mol_type = other DNA

SEQ ID NO: 54147 - DNA, 80 bp, synthetic construct; identical to SEQ ID NO: 19153
  source 1..80: mol_type = other DNA

SEQ ID NO: 54148 - DNA, 80 bp, synthetic construct; identical to SEQ ID NO: 19154
  source 1..80: mol_type = other DNA

SEQ ID NO: 54149 - DNA, 80 bp, synthetic construct; identical to SEQ ID NO: 8726
  source 1..80: mol_type = other DNA

SEQ ID NO: 54150 - DNA, 80 bp, synthetic construct; identical to SEQ ID NO: 19156
  source 1..80: mol_type = other DNA

SEQ ID NO: 54151 - DNA, 80 bp, synthetic construct; identical to SEQ ID NO: 19158
  source 1..80: mol_type = other DNA

SEQ ID NO: 54152 - DNA, 80 bp, synthetic construct; identical to SEQ ID NO: 19159
  source 1..80: mol_type = other DNA

SEQ ID NO: 54153 - DNA, 80 bp, synthetic construct; identical to SEQ ID NO: 8727
  source 1..80: mol_type = other DNA

SEQ ID NO: 54154 - DNA, 80 bp, synthetic construct; identical to SEQ ID NO: 19161
  source 1..80: mol_type = other DNA

SEQ ID NO: 54155 - DNA, 80 bp, synthetic construct; identical to SEQ ID NO: 19162
  source 1..80: mol_type = other DNA

SEQ ID NO: 54156 - DNA, 80 bp, synthetic construct; identical to SEQ ID NO: 8728
  source 1..80: mol_type = other DNA

SEQ ID NO: 54157 - DNA, 80 bp, synthetic construct; identical to SEQ ID NO: 19164
  source 1..80: mol_type = other DNA

SEQ ID NO: 54158 - DNA, 80 bp, synthetic construct; identical to SEQ ID NO: 19165
  source 1..80: mol_type = other DNA

SEQ ID NO: 54159 - DNA, 80 bp, synthetic construct; identical to SEQ ID NO: 19166
  source 1..80: mol_type = other DNA

SEQ ID NO: 54160 - DNA, 80 bp, synthetic construct; identical to SEQ ID NO: 8729
  source 1..80: mol_type = other DNA

SEQ ID NO: 54161 - DNA, 80 bp, synthetic construct; identical to SEQ ID NO: 19168
  source 1..80: mol_type = other DNA

SEQ ID NO: 54162 - DNA, 80 bp, synthetic construct; identical to SEQ ID NO: 19169
  source 1..80: mol_type = other DNA

SEQ ID NO: 54163 - DNA, 80 bp, synthetic construct; identical to SEQ ID NO: 19170
  source 1..80: mol_type = other DNA

SEQ ID NO: 54164 - DNA, 80 bp, synthetic construct; identical to SEQ ID NO: 8730
  source 1..80: mol_type = other DNA

SEQ ID NO: 54165 - DNA, 80 bp, synthetic construct; identical to SEQ ID NO: 19173
  source 1..80: mol_type = other DNA

SEQ ID NO: 54166 - DNA, 80 bp, synthetic construct; identical to SEQ ID NO: 19174
  source 1..80: mol_type = other DNA

SEQ ID NO: 54167 - DNA, 80 bp, synthetic construct; identical to SEQ ID NO: 8731
  source 1..80: mol_type = other DNA

SEQ ID NO: 54168 - DNA, 80 bp, synthetic construct; identical to SEQ ID NO: 19176
  source 1..80: mol_type = other DNA

SEQ ID NO: 54169 - DNA, 80 bp, synthetic construct; identical to SEQ ID NO: 19177
  source 1..80: mol_type = other DNA

SEQ ID NO: 54170 - DNA, 80 bp, synthetic construct; identical to SEQ ID NO: 19178
  source 1..80: mol_type = other DNA

SEQ ID NO: 54171 - DNA, 80 bp, synthetic construct; identical to SEQ ID NO: 19179
  source 1..80: mol_type = other DNA

SEQ ID NO: 54172 - DNA, 80 bp, synthetic construct; identical to SEQ ID NO: 8732
  source 1..80: mol_type = other DNA

SEQ ID NO: 54173 - DNA, 80 bp, synthetic construct; identical to SEQ ID NO: 19181
  source 1..80: mol_type = other DNA

SEQ ID NO: 54174 - DNA, 80 bp, synthetic construct; identical to SEQ ID NO: 19182
  source 1..80: mol_type = other DNA

SEQ ID NO: 54175 - DNA, 80 bp, synthetic construct; identical to SEQ ID NO: 8733
  source 1..80: mol_type = other DNA

SEQ ID NO: 54176 - DNA, 80 bp, synthetic construct; identical to SEQ ID NO: 19185
  source 1..80: mol_type = other DNA

SEQ ID NO: 54177 - DNA, 80 bp, synthetic construct; identical to SEQ ID NO: 19186
  source 1..80: mol_type = other DNA

SEQ ID NO: 54178 - DNA, 80 bp, synthetic construct; identical to SEQ ID NO: 8734
  source 1..80: mol_type = other DNA

SEQ ID NO: 54179 - DNA, 80 bp, synthetic construct; identical to SEQ ID NO: 19188
  source 1..80: mol_type = other DNA

SEQ ID NO: 54180 - DNA, 80 bp, synthetic construct; identical to SEQ ID NO: 19189
  source 1..80: mol_type = other DNA

SEQ ID NO: 54181 - DNA, 80 bp, synthetic construct; identical to SEQ ID NO: 19190
  source 1..80: mol_type = other DNA

SEQ ID NO: 54182 - DNA, 80 bp, synthetic construct; identical to SEQ ID NO: 19191
  source 1..80: mol_type = other DNA

SEQ ID NO: 54183 - DNA, 80 bp, synthetic construct; identical to SEQ ID NO: 8735
  source 1..80: mol_type = other DNA

SEQ ID NO: 54184 - DNA, 80 bp, synthetic construct; identical to SEQ ID NO: 19193
  source 1..80: mol_type = other DNA

SEQ ID NO: 54185 - DNA, 80 bp, synthetic construct; identical to SEQ ID NO: 19194
  source 1..80: mol_type = other DNA

SEQ ID NO: 54186 - DNA, 80 bp, synthetic construct; identical to SEQ ID NO: 8736
  source 1..80: mol_type = other DNA

SEQ ID NO: 54187 - DNA, 80 bp, synthetic construct; identical to SEQ ID NO: 19196
  source 1..80: mol_type = other DNA

SEQ ID NO: 54188 - DNA, 80 bp, synthetic construct; identical to SEQ ID NO: 19197
  source 1..80: mol_type = other DNA

SEQ ID NO: 54189 - DNA, 80 bp, synthetic construct; identical to SEQ ID NO: 19198
  source 1..80: mol_type = other DNA

SEQ ID NO: 54190 - DNA, 80 bp, synthetic construct; identical to SEQ ID NO: 8737
  source 1..80: mol_type = other DNA

SEQ ID NO: 54191 - DNA, 80 bp, synthetic construct; identical to SEQ ID NO: 19200
  source 1..80: mol_type = other DNA

SEQ ID NO: 54192 - DNA, 80 bp, synthetic construct; identical to SEQ ID NO: 19201
  source 1..80: mol_type = other DNA

SEQ ID NO: 54193 - DNA, 80 bp, synthetic construct; identical to SEQ ID NO: 19202
  source 1..80: mol_type = other DNA

SEQ ID NO: 54194 - DNA, 80 bp, synthetic construct; identical to SEQ ID NO: 8738
  source 1..80: mol_type = other DNA

SEQ ID NO: 54195 - DNA, 80 bp, synthetic construct; identical to SEQ ID NO: 19204
  source 1..80: mol_type = other DNA

SEQ ID NO: 54196 - DNA, 80 bp, synthetic construct; identical to SEQ ID NO: 19205
  source 1..80: mol_type = other DNA

SEQ ID NO: 54197 - DNA, 80 bp, synthetic construct; identical to SEQ ID NO: 19206
  source 1..80: mol_type = other DNA

SEQ ID NO: 54198 - DNA, 80 bp, synthetic construct; identical to SEQ ID NO: 19207
  source 1..80: mol_type = other DNA

SEQ ID NO: 54199 - DNA, 80 bp, synthetic construct; identical to SEQ ID NO: 8739
  source 1..80: mol_type = other DNA

SEQ ID NO: 54200 - DNA, 80 bp, synthetic construct; identical to SEQ ID NO: 19209
  source 1..80: mol_type = other DNA

SEQ ID NO: 54201 - DNA, 80 bp, synthetic construct; identical to SEQ ID NO: 19210
  source 1..80: mol_type = other DNA

SEQ ID NO: 54202 - DNA, 80 bp, synthetic construct; identical to SEQ ID NO: 8740
  source 1..80: mol_type = other DNA

SEQ ID NO: 54203 - DNA, 80 bp, synthetic construct; identical to SEQ ID NO: 19212
  source 1..80: mol_type = other DNA

SEQ ID NO: 54204 - DNA, 80 bp, synthetic construct; identical to SEQ ID NO: 19213
  source 1..80: mol_type = other DNA

SEQ ID NO: 54205 - DNA, 80 bp, synthetic construct; identical to SEQ ID NO: 19214
  source 1..80: mol_type = other DNA

SEQ ID NO: 54206 - DNA, 80 bp, synthetic construct; identical to SEQ ID NO: 19215
  source 1..80: mol_type = other DNA

SEQ ID NO: 54207 - DNA, 80 bp, synthetic construct; identical to SEQ ID NO: 8741
  source 1..80: mol_type = other DNA

SEQ ID NO: 54208 - DNA, 80 bp, synthetic construct; identical to SEQ ID NO: 19217
  source 1..80: mol_type = other DNA

SEQ ID NO: 54209 - DNA, 80 bp, synthetic construct; identical to SEQ ID NO: 19218
  source 1..80: mol_type = other DNA

SEQ ID NO: 54210 - DNA, 80 bp, synthetic construct; identical to SEQ ID NO: 8742
  source 1..80: mol_type = other DNA

SEQ ID NO: 54211 - DNA, 80 bp, synthetic construct; identical to SEQ ID NO: 19220
  source 1..80: mol_type = other DNA

SEQ ID NO: 54212 - DNA, 80 bp, synthetic construct; identical to SEQ ID NO: 19221
  source 1..80: mol_type = other DNA

SEQ ID NO: 54213 - DNA, 80 bp, synthetic construct; identical to SEQ ID NO: 19222
  source 1..80: mol_type = other DNA

SEQ ID NO: 54214 - DNA, 80 bp, synthetic construct; identical to SEQ ID NO: 19223
  source 1..80: mol_type = other DNA

SEQ ID NO: 54215 - DNA, 80 bp, synthetic construct; identical to SEQ ID NO: 8743
  source 1..80: mol_type = other DNA

SEQ ID NO: 54216 - DNA, 80 bp, synthetic construct; identical to SEQ ID NO: 19225
  source 1..80: mol_type = other DNA

SEQ ID NO: 54217 - DNA, 80 bp, synthetic construct; identical to SEQ ID NO: 19226
  source 1..80: mol_type = other DNA

SEQ ID NO: 54218 - DNA, 80 bp, synthetic construct; identical to SEQ ID NO: 8744
  source 1..80: mol_type = other DNA

SEQ ID NO: 54219 - DNA, 80 bp, synthetic construct; identical to SEQ ID NO: 19228
  source 1..80: mol_type = other DNA

SEQ ID NO: 54220 - DNA, 80 bp, synthetic construct; identical to SEQ ID NO: 19229
  source 1..80: mol_type = other DNA

SEQ ID NO: 54221 - DNA, 80 bp, synthetic construct; identical to SEQ ID NO: 8745
  source 1..80: mol_type = other DNA

SEQ ID NO: 54222 - DNA, 80 bp, synthetic construct; identical to SEQ ID NO: 19231
  source 1..80: mol_type = other DNA

SEQ ID NO: 54223 - DNA, 80 bp, synthetic construct; identical to SEQ ID NO: 19232
  source 1..80: mol_type = other DNA

SEQ ID NO: 54224 - DNA, 80 bp, synthetic construct; identical to SEQ ID NO: 19233
  source 1..80: mol_type = other DNA

SEQ ID NO: 54225 - DNA, 80 bp, synthetic construct; identical to SEQ ID NO: 8746
  source 1..80: mol_type = other DNA

SEQ ID NO: 54226 - DNA, 80 bp, synthetic construct; identical to SEQ ID NO: 19235
  source 1..80: mol_type = other DNA

SEQ ID NO: 54227 - DNA, 80 bp, synthetic construct; identical to SEQ ID NO: 19236
  source 1..80: mol_type = other DNA

SEQ ID NO: 54228 - DNA, 80 bp, synthetic construct; identical to SEQ ID NO: 19237
  source 1..80: mol_type = other DNA

SEQ ID NO: 54229 - DNA, 80 bp, synthetic construct; identical to SEQ ID NO: 8747
  source 1..80: mol_type = other DNA

SEQ ID NO: 54230 - DNA, 80 bp, synthetic construct; identical to SEQ ID NO: 19239
  source 1..80: mol_type = other DNA

SEQ ID NO: 54231 - DNA, 80 bp, synthetic construct; identical to SEQ ID NO: 19240
  source 1..80: mol_type = other DNA

SEQ ID NO: 54232 - DNA, 80 bp, synthetic construct; identical to SEQ ID NO: 19241
  source 1..80: mol_type = other DNA

SEQ ID NO: 54233 - DNA, 80 bp, synthetic construct; identical to SEQ ID NO: 19242
  source 1..80: mol_type = other DNA

SEQ ID NO: 54234 - DNA, 80 bp, synthetic construct; identical to SEQ ID NO: 8748
  source 1..80: mol_type = other DNA

SEQ ID NO: 54235 - DNA, 80 bp, synthetic construct; identical to SEQ ID NO: 19244
  source 1..80: mol_type = other DNA

SEQ ID NO: 54236 - DNA, 80 bp, synthetic construct; identical to SEQ ID NO: 19245
  source 1..80: mol_type = other DNA

SEQ ID NO: 54237 - DNA, 80 bp, synthetic construct; identical to SEQ ID NO: 8749
  source 1..80: mol_type = other DNA

SEQ ID NO: 54238 - DNA, 80 bp, synthetic construct; identical to SEQ ID NO: 19247
  source 1..80: mol_type = other DNA

SEQ ID NO: 54239 - DNA, 80 bp, synthetic construct; identical to SEQ ID NO: 19248
  source 1..80: mol_type = other DNA

SEQ ID NO: 54240 - DNA, 80 bp, synthetic construct; identical to SEQ ID NO: 19249
  source 1..80: mol_type = other DNA

SEQ ID NO: 54241 - DNA, 80 bp, synthetic construct; identical to SEQ ID NO: 19250
  source 1..80: mol_type = other DNA

SEQ ID NO: 54242 - DNA, 80 bp, synthetic construct; identical to SEQ ID NO: 8750
  source 1..80: mol_type = other DNA

SEQ ID NO: 54243 - DNA, 80 bp, synthetic construct; identical to SEQ ID NO: 19252
  source 1..80: mol_type = other DNA

SEQ ID NO: 54244 - DNA, 80 bp, synthetic construct; identical to SEQ ID NO: 8768
  source 1..80: mol_type = other DNA

SEQ ID NO: 54245 - DNA, 80 bp, synthetic construct; identical to SEQ ID NO: 8751
  source 1..80: mol_type = other DNA

SEQ ID NO: 54246 - DNA, 80 bp, synthetic construct; identical to SEQ ID NO: 19255
  source 1..80: mol_type = other DNA

SEQ ID NO: 54247 - DNA, 80 bp, synthetic construct; identical to SEQ ID NO: 19256
  source 1..80: mol_type = other DNA

SEQ ID NO: 54248 - DNA, 80 bp, synthetic construct; identical to SEQ ID NO: 19257
  source 1..80: mol_type = other DNA

SEQ ID NO: 54249 - DNA, 80 bp, synthetic construct; identical to SEQ ID NO: 19258
  source 1..80: mol_type = other DNA

SEQ ID NO: 54250 - DNA, 80 bp, synthetic construct; identical to SEQ ID NO: 8752
  source 1..80: mol_type = other DNA

SEQ ID NO: 54251 - DNA, 80 bp, synthetic construct; identical to SEQ ID NO: 19260
  source 1..80: mol_type = other DNA

SEQ ID NO: 54252 - DNA, 80 bp, synthetic construct; identical to SEQ ID NO: 19261
  source 1..80: mol_type = other DNA

SEQ ID NO: 54253 - DNA, 80 bp, synthetic construct; identical to SEQ ID NO: 8753
  source 1..80: mol_type = other DNA

SEQ ID NO: 54254 - DNA, 80 bp, synthetic construct; identical to SEQ ID NO: 19263
  source 1..80: mol_type = other DNA

SEQ ID NO: 54255 - DNA, 80 bp, synthetic construct; identical to SEQ ID NO: 19264
  source 1..80: mol_type = other DNA

SEQ ID NO: 54256 - DNA, 80 bp, synthetic construct; identical to SEQ ID NO: 19265
  source 1..80: mol_type = other DNA

SEQ ID NO: 54257 - DNA, 80 bp, synthetic construct; identical to SEQ ID NO: 8754
  source 1..80: mol_type = other DNA

SEQ ID NO: 54258 - DNA, 80 bp, synthetic construct; identical to SEQ ID NO: 19267
  source 1..80: mol_type = other DNA

SEQ ID NO: 54259 - DNA, 80 bp, synthetic construct; identical to SEQ ID NO: 19268
  source 1..80: mol_type = other DNA

SEQ ID NO: 54260 - DNA, 80 bp, synthetic construct; identical to SEQ ID NO: 8755
  source 1..80: mol_type = other DNA

SEQ ID NO: 54261 - DNA, 80 bp, synthetic construct; identical to SEQ ID NO: 19271
  source 1..80: mol_type = other DNA

SEQ ID NO: 54262 - DNA, 80 bp, synthetic construct; identical to SEQ ID NO: 19272
  source 1..80: mol_type = other DNA

SEQ ID NO: 54263 - DNA, 80 bp, synthetic construct; identical to SEQ ID NO: 19273
  source 1..80: mol_type = other DNA

SEQ ID NO: 54264 - DNA, 80 bp, synthetic construct; identical to SEQ ID NO: 19274
  source 1..80: mol_type = other DNA

SEQ ID NO: 54265 - DNA, 80 bp, synthetic construct; identical to SEQ ID NO: 19275
  source 1..80: mol_type = other DNA

SEQ ID NO: 54266 - DNA, 80 bp, synthetic construct; identical to SEQ ID NO: 8756
  source 1..80: mol_type = other DNA

SEQ ID NO: 54267 - DNA, 80 bp, synthetic construct; identical to SEQ ID NO: 19277
  source 1..80: mol_type = other DNA

SEQ ID NO: 54268 - DNA, 80 bp, synthetic construct; identical to SEQ ID NO: 19278
  source 1..80: mol_type = other DNA

SEQ ID NO: 54269 - DNA, 80 bp, synthetic construct; identical to SEQ ID NO: 19279
  source 1..80: mol_type = other DNA

SEQ ID NO: 54270 - DNA, 80 bp, synthetic construct; identical to SEQ ID NO: 19280
  source 1..80: mol_type = other DNA

SEQ ID NO: 54271 - DNA, 80 bp, synthetic construct; identical to SEQ ID NO: 8757
  source 1..80: mol_type = other DNA

SEQ ID NO: 54272 - DNA, 80 bp, synthetic construct; identical to SEQ ID NO: 19282
  source 1..80: mol_type = other DNA

SEQ ID NO: 54273 - DNA, 80 bp, synthetic construct; identical to SEQ ID NO: 19283
  source 1..80: mol_type = other DNA

SEQ ID NO: 54274 - DNA, 80 bp, synthetic construct; identical to SEQ ID NO: 8758
  source 1..80: mol_type = other DNA

SEQ ID NO: 54275 - DNA, 80 bp, synthetic construct; identical to SEQ ID NO: 19285
  source 1..80: mol_type = other DNA

SEQ ID NO: 54276 - DNA, 80 bp, synthetic construct; identical to SEQ ID NO: 19286
  source 1..80: mol_type = other DNA

SEQ ID NO: 54277 - DNA, 80 bp, synthetic construct; identical to SEQ ID NO: 19287
  source 1..80: mol_type = other DNA

SEQ ID NO: 54278 - DNA, 80 bp, synthetic construct; identical to SEQ ID NO: 8759
  source 1..80: mol_type = other DNA

SEQ ID NO: 54279 - DNA, 80 bp, synthetic construct; identical to SEQ ID NO: 19289
  source 1..80: mol_type = other DNA

SEQ ID NO: 54280 - DNA, 80 bp, synthetic construct; identical to SEQ ID NO: 19290
  source 1..80: mol_type = other DNA

SEQ ID NO: 54281 - DNA, 80 bp, synthetic construct; identical to SEQ ID NO: 19291
  source 1..80: mol_type = other DNA

SEQ ID NO: 54282 - DNA, 80 bp, synthetic construct; identical to SEQ ID NO: 19292
  source 1..80: mol_type = other DNA

SEQ ID NO: 54283 - DNA, 80 bp, synthetic construct; identical to SEQ ID NO: 19293
  source 1..80: mol_type = other DNA

SEQ ID NO: 54284 - DNA, 80 bp, synthetic construct; identical to SEQ ID NO: 19294
  source 1..80: mol_type = other DNA

SEQ ID NO: 54285 - DNA, 80 bp, synthetic construct; identical to SEQ ID NO: 8760
  source 1..80: mol_type = other DNA

SEQ ID NO: 54286 - DNA, 80 bp, synthetic construct; identical to SEQ ID NO: 19297
  source 1..80: mol_type = other DNA

SEQ ID NO: 54287 - DNA, 80 bp, synthetic construct; identical to SEQ ID NO: 19298
  source 1..80: mol_type = other DNA

SEQ ID NO: 54288 - DNA, 80 bp, synthetic construct; identical to SEQ ID NO: 19299
  source 1..80: mol_type = other DNA

SEQ ID NO: 54289 - DNA, 80 bp, synthetic construct; identical to SEQ ID NO: 19300
  source 1..80: mol_type = other DNA

SEQ ID NO: 54290 - DNA, 80 bp, synthetic construct; identical to SEQ ID NO: 8762
  source 1..80: mol_type = other DNA

SEQ ID NO: 54291 - DNA, 80 bp, synthetic construct; identical to SEQ ID NO: 19302
  source 1..80: mol_type = other DNA

SEQ ID NO: 54292 - DNA, 80 bp, synthetic construct; identical to SEQ ID NO: 19303
  source 1..80: mol_type = other DNA

SEQ ID NO: 54293 - DNA, 80 bp, synthetic construct; identical to SEQ ID NO: 8763
  source 1..80: mol_type = other DNA

SEQ ID NO: 54294 - DNA, 80 bp, synthetic construct; identical to SEQ ID NO: 19305
  source 1..80: mol_type = other DNA

SEQ ID NO: 54295 - DNA, 80 bp, synthetic construct; identical to SEQ ID NO: 19306
  source 1..80: mol_type = other DNA

SEQ ID NO: 54296 - DNA, 80 bp, synthetic construct; identical to SEQ ID NO: 19307
  source 1..80: mol_type = other DNA

SEQ ID NO: 54297 - DNA, 80 bp, synthetic construct; identical to SEQ ID NO: 19308
  source 1..80: mol_type = other DNA

SEQ ID NO: 54298 - DNA, 80 bp, synthetic construct; identical to SEQ ID NO: 19309
  source 1..80: mol_type = other DNA

SEQ ID NO: 54299 - DNA, 80 bp, synthetic construct; identical to SEQ ID NO: 19310
  source 1..80: mol_type = other DNA

SEQ ID NO: 54300 - DNA, 80 bp, synthetic construct; identical to SEQ ID NO: 19311
  source 1..80: mol_type = other DNA

SEQ ID NO: 54301 - DNA, 80 bp, synthetic construct; identical to SEQ ID NO: 19312
  source 1..80: mol_type = other DNA

SEQ ID NO: 54302 - DNA, 80 bp, synthetic construct; identical to SEQ ID NO: 8764
  source 1..80: mol_type = other DNA

SEQ ID NO: 54303 - DNA, 80 bp, synthetic construct; identical to SEQ ID NO: 19314
  source 1..80: mol_type = other DNA

SEQ ID NO: 54304 - DNA, 80 bp, synthetic construct; identical to SEQ ID NO: 19315
  source 1..80: mol_type = other DNA

SEQ ID NO: 54305 - DNA, 80 bp, synthetic construct; identical to SEQ ID NO: 19316
  source 1..80: mol_type = other DNA

SEQ ID NO: 54306 - DNA, 80 bp, synthetic construct; identical to SEQ ID NO: 19317
  source 1..80: mol_type = other DNA

SEQ ID NO: 54307 - DNA, 80 bp, synthetic construct; identical to SEQ ID NO: 8765
  source 1..80: mol_type = other DNA

SEQ ID NO: 54308 - DNA, 80 bp, synthetic construct; identical to SEQ ID NO: 19319
  source 1..80: mol_type = other DNA

SEQ ID NO: 54309 - DNA, 80 bp, synthetic construct; identical to SEQ ID NO: 19320
  source 1..80: mol_type = other DNA

SEQ ID NO: 54310 - DNA, 80 bp, synthetic construct; identical to SEQ ID NO: 8766
  source 1..80: mol_type = other DNA

SEQ ID NO: 54311 - DNA, 80 bp, synthetic construct; identical to SEQ ID NO: 19322
  source 1..80: mol_type = other DNA

SEQ ID NO: 54312 - DNA, 80 bp, synthetic construct; identical to SEQ ID NO: 19323
  source 1..80: mol_type = other DNA

SEQ ID NO: 54313 - DNA, 80 bp, synthetic construct; identical to SEQ ID NO: 19324
  source 1..80: mol_type = other DNA

SEQ ID NO: 54314 - DNA, 80 bp, synthetic construct; identical to SEQ ID NO: 19325
  source 1..80: mol_type = other DNA

SEQ ID NO: 54315 - DNA, 80 bp, synthetic construct; identical to SEQ ID NO: 19327
  source 1..80: mol_type = other DNA

SEQ ID NO: 54316 - DNA, 80 bp, synthetic construct; identical to SEQ ID NO: 19328
  source 1..80: mol_type = other DNA

SEQ ID NO: 54317 - DNA, 80 bp, synthetic construct; identical to SEQ ID NO: 19329
  source 1..80: mol_type = other DNA

SEQ ID NO: 54318 - DNA, 80 bp, synthetic construct; identical to SEQ ID NO: 19330
  source 1..80: mol_type = other DNA

SEQ ID NO: 54319 - DNA, 80 bp, synthetic construct; identical to SEQ ID NO: 19331
  source 1..80: mol_type = other DNA

SEQ ID NO: 54320 - DNA, 80 bp, synthetic construct; identical to SEQ ID NO: 19332
  source 1..80: mol_type = other DNA

SEQ ID NO: 54321 - DNA, 80 bp, synthetic construct; identical to SEQ ID NO: 19333
  source 1..80: mol_type = other DNA

SEQ ID NO: 54322 - DNA, 80 bp, synthetic construct; identical to SEQ ID NO: 8769
  source 1..80: mol_type = other DNA

SEQ ID NO: 54323 - DNA, 80 bp, synthetic construct; identical to SEQ ID NO: 19335
  source 1..80: mol_type = other DNA

SEQ ID NO: 54324 - DNA, 80 bp, synthetic construct; identical to SEQ ID NO: 19336
  source 1..80: mol_type = other DNA

SEQ ID NO: 54325 - DNA, 80 bp, synthetic construct; identical to SEQ ID NO: 8770
  source 1..80: mol_type = other DNA

SEQ ID NO: 54326 - DNA, 80 bp, synthetic construct; identical to SEQ ID NO: 19338
  source 1..80: mol_type = other DNA

SEQ ID NO: 54327 - DNA, 80 bp, synthetic construct; identical to SEQ ID NO: 19339
  source 1..80: mol_type = other DNA

SEQ ID NO: 54328 - DNA, 80 bp, synthetic construct; identical to SEQ ID NO: 19340
  source 1..80: mol_type = other DNA

SEQ ID NO: 54329 - DNA, 80 bp, synthetic construct; identical to SEQ ID NO: 8771
  source 1..80: mol_type = other DNA

SEQ ID NO: 54330 - DNA, 80 bp, synthetic construct; identical to SEQ ID NO: 19342
  source 1..80: mol_type = other DNA

SEQ ID NO: 54331 - DNA, 80 bp, synthetic construct; identical to SEQ ID NO: 19343
  source 1..80: mol_type = other DNA

SEQ ID NO: 54332 - DNA, 80 bp, synthetic construct; identical to SEQ ID NO: 19344
  source 1..80: mol_type = other DNA

SEQ ID NO: 54333 - DNA, 80 bp, synthetic construct; identical to SEQ ID NO: 19345
  source 1..80: mol_type = other DNA

SEQ ID NO: 54334 - DNA, 80 bp, synthetic construct; identical to SEQ ID NO: 8772
  source 1..80: mol_type = other DNA

SEQ ID NO: 54335 - DNA, 80 bp, synthetic construct; identical to SEQ ID NO: 19347
  source 1..80: mol_type = other DNA

SEQ ID NO: 54336 - DNA, 80 bp, synthetic construct; identical to SEQ ID NO: 19348
  source 1..80: mol_type = other DNA

SEQ ID NO: 54337 - DNA, 80 bp, synthetic construct; identical to SEQ ID NO: 19349
  source 1..80: mol_type = other DNA

SEQ ID NO: 54338 - DNA, 80 bp, synthetic construct; identical to SEQ ID NO: 8773
  source 1..80: mol_type = other DNA

SEQ ID NO: 54339 - DNA, 80 bp, synthetic construct; identical to SEQ ID NO: 19351
  source 1..80: mol_type = other DNA

SEQ ID NO: 54340 - DNA, 80 bp, synthetic construct; identical to SEQ ID NO: 19352
  source 1..80: mol_type = other DNA

SEQ ID NO: 54341 - DNA, 80 bp, synthetic construct; identical to SEQ ID NO: 19353
  source 1..80: mol_type = other DNA

SEQ ID NO: 54342 - DNA, 80 bp, synthetic construct; identical to SEQ ID NO: 8774
  source 1..80: mol_type = other DNA

SEQ ID NO: 54343 - DNA, 80 bp, synthetic construct; identical to SEQ ID NO: 19355
  source 1..80: mol_type = other DNA

SEQ ID NO: 54344 - DNA, 80 bp, synthetic construct; identical to SEQ ID NO: 19356
  source 1..80: mol_type = other DNA

SEQ ID NO: 54345 - DNA, 80 bp, synthetic construct; identical to SEQ ID NO: 19357
  source 1..80: mol_type = other DNA

SEQ ID NO: 54346 - DNA, 80 bp, synthetic construct; identical to SEQ ID NO: 8775
  source 1..80: mol_type = other DNA

SEQ ID NO: 54347 - DNA, 80 bp, synthetic construct; identical to SEQ ID NO: 19359
  source 1..80: mol_type = other DNA

SEQ ID NO: 54348 - DNA, 80 bp, synthetic construct; identical to SEQ ID NO: 19360
  source 1..80: mol_type = other DNA

SEQ ID NO: 54349 - DNA, 80 bp, synthetic construct; identical to SEQ ID NO: 19361
  source 1..80: mol_type = other DNA

SEQ ID NO: 54350 - DNA, 80 bp, synthetic construct; identical to SEQ ID NO: 19362
  source 1..80: mol_type = other DNA

SEQ ID NO: 54351 - DNA, 80 bp, synthetic construct; identical to SEQ ID NO: 8776
  source 1..80: mol_type = other DNA

SEQ ID NO: 54352 - DNA, 80 bp, synthetic construct; identical to SEQ ID NO: 19364
  source 1..80: mol_type = other DNA

SEQ ID NO: 54353 - DNA, 80 bp, synthetic construct; identical to SEQ ID NO: 19365
  source 1..80: mol_type = other DNA

SEQ ID NO: 54354 - DNA, 80 bp, synthetic construct; identical to SEQ ID NO: 19366
  source 1..80: mol_type = other DNA

SEQ ID NO: 54355 - DNA, 80 bp, synthetic construct; identical to SEQ ID NO: 8777
  source 1..80: mol_type = other DNA

SEQ ID NO: 54356 - DNA, 80 bp, synthetic construct; identical to SEQ ID NO: 19368
  source 1..80: mol_type = other DNA

SEQ ID NO: 54357 - DNA, 80 bp, synthetic construct; identical to SEQ ID NO: 19369
  source 1..80: mol_type = other DNA

SEQ ID NO: 54358 - DNA, 80 bp, synthetic construct; identical to SEQ ID NO: 8778
  source 1..80: mol_type = other DNA

SEQ ID NO: 54359 - DNA, 80 bp, synthetic construct; identical to SEQ ID NO: 19371
  source 1..80: mol_type = other DNA

SEQ ID NO: 54360 - DNA, 80 bp, synthetic construct; identical to SEQ ID NO: 19372
  source 1..80: mol_type = other DNA

SEQ ID NO: 54361 - DNA, 80 bp, synthetic construct; identical to SEQ ID NO: 19373
  source 1..80: mol_type = other DNA

SEQ ID NO: 54362 - DNA, 80 bp, synthetic construct; identical to SEQ ID NO: 8779
  source 1..80: mol_type = other DNA

SEQ ID NO: 54363 - DNA, 80 bp, synthetic construct; identical to SEQ ID NO: 19375
  source 1..80: mol_type = other DNA

SEQ ID NO: 54364 - DNA, 80 bp, synthetic construct; identical to SEQ ID NO: 19376
  source 1..80: mol_type = other DNA

SEQ ID NO: 54365 - DNA, 80 bp, synthetic construct; identical to SEQ ID NO: 19377
  source 1..80: mol_type = other DNA

SEQ ID NO: 54366 - DNA, 80 bp, synthetic construct; identical to SEQ ID NO: 8780
  source 1..80: mol_type = other DNA

SEQ ID NO: 54367 - DNA, 80 bp, synthetic construct; identical to SEQ ID NO: 19379
  source 1..80: mol_type = other DNA

SEQ ID NO: 54368 - DNA, 80 bp, synthetic construct; identical to SEQ ID NO: 19380
  source 1..80: mol_type = other DNA

SEQ ID NO: 54369 - DNA, 80 bp, synthetic construct; identical to SEQ ID NO: 19381
  source 1..80: mol_type = other DNA

SEQ ID NO: 54370 - DNA, 80 bp, synthetic construct; identical to SEQ ID NO: 8781
  source 1..80: mol_type = other DNA

SEQ ID NO: 54371 - DNA, 80 bp, synthetic construct; identical to SEQ ID NO: 19383
  source 1..80: mol_type = other DNA

SEQ ID NO: 54372 - DNA, 80 bp, synthetic construct; identical to SEQ ID NO: 19384
  source 1..80: mol_type = other DNA

SEQ ID NO: 54373 - DNA, 80 bp, synthetic construct; identical to SEQ ID NO: 19385
  source 1..80: mol_type = other DNA

SEQ ID NO: 54374 - DNA, 80 bp, synthetic construct; identical to SEQ ID NO: 8782
  source 1..80: mol_type = other DNA

SEQ ID NO: 54375 - DNA, 80 bp, synthetic construct; identical to SEQ ID NO: 19387
  source 1..80: mol_type = other DNA

SEQ ID NO: 54376 - DNA, 80 bp, synthetic construct; identical to SEQ ID NO: 19388
  source 1..80: mol_type = other DNA

SEQ ID NO: 54377 - DNA, 80 bp, synthetic construct; identical to SEQ ID NO: 19389
  source 1..80: mol_type = other DNA

SEQ ID NO: 54378 - DNA, 80 bp, synthetic construct; identical to SEQ ID NO: 19391
  source 1..80: mol_type = other DNA

SEQ ID NO: 54379 - DNA, 80 bp, synthetic construct; identical to SEQ ID NO: 19392
  source 1..80: mol_type = other DNA

SEQ ID NO: 54380 - DNA, 80 bp, synthetic construct; identical to SEQ ID NO: 19393
  source 1..80: mol_type = other DNA

SEQ ID NO: 54381 - DNA, 80 bp, synthetic construct; identical to SEQ ID NO: 19394
  source 1..80: mol_type = other DNA

SEQ ID NO: 54382 - DNA, 80 bp, synthetic construct; identical to SEQ ID NO: 19395
  source 1..80: mol_type = other DNA

SEQ ID NO: 54383 - DNA, 80 bp, synthetic construct; identical to SEQ ID NO: 19396
  source 1..80: mol_type = other DNA

SEQ ID NO: 54384 - DNA, 80 bp, synthetic construct; identical to SEQ ID NO: 19397
  source 1..80: mol_type = other DNA

SEQ ID NO: 54385 - DNA, 80 bp, synthetic construct; identical to SEQ ID NO: 19398
  source 1..80: mol_type = other DNA

SEQ ID NO: 54386 - DNA, 80 bp, synthetic construct; identical to SEQ ID NO: 8784
  source 1..80: mol_type = other DNA

SEQ ID NO: 54387 - DNA, 80 bp, synthetic construct; identical to SEQ ID NO: 19400
  source 1..80: mol_type = other DNA

SEQ ID NO: 54388 - DNA, 80 bp, synthetic construct; identical to SEQ ID NO: 19401
  source 1..80: mol_type = other DNA

SEQ ID NO: 54389 - DNA, 80 bp, synthetic construct; identical to SEQ ID NO: 19402
  source 1..80: mol_type = other DNA

SEQ ID NO: 54390 - DNA, 80 bp, synthetic construct; identical to SEQ ID NO: 8785
  source 1..80: mol_type = other DNA

SEQ ID NO: 54391 - DNA, 80 bp, synthetic construct; identical to SEQ ID NO: 19405
  source 1..80: mol_type = other DNA

SEQ ID NO: 54392 - DNA, 80 bp, synthetic construct; identical to SEQ ID NO: 19406
  source 1..80: mol_type = other DNA

SEQ ID NO: 54393 - DNA, 80 bp, synthetic construct; identical to SEQ ID NO: 19407
  source 1..80: mol_type = other DNA

SEQ ID NO: 54394 - DNA, 80 bp, synthetic construct; identical to SEQ ID NO: 8786
  source 1..80: mol_type = other DNA

SEQ ID NO: 54395 - DNA, 80 bp, synthetic construct; identical to SEQ ID NO: 19409
  source 1..80: mol_type = other DNA

SEQ ID NO: 54396 - DNA, 80 bp, synthetic construct; identical to SEQ ID NO: 19410
  source 1..80: mol_type = other DNA

SEQ ID NO: 54397 - DNA, 80 bp, synthetic construct; identical to SEQ ID NO: 19411
  source 1..80: mol_type = other DNA

SEQ ID NO: 54398 - DNA, 80 bp, synthetic construct; identical to SEQ ID NO: 8787
  source 1..80: mol_type = other DNA

SEQ ID NO: 54399 - DNA, 80 bp, synthetic construct; identical to SEQ ID NO: 19413
  source 1..80: mol_type = other DNA

SEQ ID NO: 54400 - DNA, 80 bp, synthetic construct; identical to SEQ ID NO: 19414
  source 1..80: mol_type = other DNA

SEQ ID NO: 54401 - DNA, 80 bp, synthetic construct; identical to SEQ ID NO: 8788
  source 1..80: mol_type = other DNA

SEQ ID NO: 54402 - DNA, 80 bp, synthetic construct; identical to SEQ ID NO: 19417
  source 1..80: mol_type = other DNA

SEQ ID NO: 54403 - DNA, 80 bp, synthetic construct; identical to SEQ ID NO: 19418
  source 1..80: mol_type = other DNA

SEQ ID NO: 54404 - DNA, 80 bp, synthetic construct; identical to SEQ ID NO: 8789
  source 1..80: mol_type = other DNA

SEQ ID NO: 54405 - DNA, 80 bp, synthetic construct; identical to SEQ ID NO: 19420
  source 1..80: mol_type = other DNA

SEQ ID NO: 54406 - DNA, 80 bp, synthetic construct; identical to SEQ ID NO: 19421
  source 1..80: mol_type = other DNA

SEQ ID NO: 54407 - DNA, 80 bp, synthetic construct; identical to SEQ ID NO: 19422
  source 1..80: mol_type = other DNA

SEQ ID NO: 54408 - DNA, 80 bp, synthetic construct; identical to SEQ ID NO: 19423
  source 1..80: mol_type = other DNA

SEQ ID NO: 54409 - DNA, 80 bp, synthetic construct; identical to SEQ ID NO: 8790
  source 1..80: mol_type = other DNA

SEQ ID NO: 54410 - DNA, 80 bp, synthetic construct; identical to SEQ ID NO: 19425
  source 1..80: mol_type = other DNA

SEQ ID NO: 54411 - DNA, 80 bp, synthetic construct; identical to SEQ ID NO: 19426
  source 1..80: mol_type = other DNA

SEQ ID NO: 54412 - DNA, 80 bp, synthetic construct; identical to SEQ ID NO: 8791
  source 1..80: mol_type = other DNA

SEQ ID NO: 54413 - DNA, 80 bp, synthetic construct; identical to SEQ ID NO: 19428
  source 1..80: mol_type = other DNA

SEQ ID NO: 54414 - DNA, 80 bp, synthetic construct; identical to SEQ ID NO: 19429
  source 1..80: mol_type = other DNA

SEQ ID NO: 54415 - DNA, 80 bp, synthetic construct; identical to SEQ ID NO: 19430
  source 1..80: mol_type = other DNA

SEQ ID NO: 54416 - DNA, 80 bp, synthetic construct; identical to SEQ ID NO: 19431
  source 1..80: mol_type = other DNA

SEQ ID NO: 54417 - DNA, 80 bp, synthetic construct; identical to SEQ ID NO: 8792
  source 1..80: mol_type = other DNA

SEQ ID NO: 54418 - DNA, 80 bp, synthetic construct; identical to SEQ ID NO: 19433
  source 1..80: mol_type = other DNA

SEQ ID NO: 54419 - DNA, 80 bp, synthetic construct; identical to SEQ ID NO: 19434
  source 1..80: mol_type = other DNA

SEQ ID NO: 54420 - DNA, 80 bp, synthetic construct; identical to SEQ ID NO: 19435
  source 1..80: mol_type = other DNA

SEQ ID NO: 54421 - DNA, 80 bp, synthetic construct; identical to SEQ ID NO: 19436
  source 1..80: mol_type = other DNA

SEQ ID NO: 54422 - DNA, 80 bp, synthetic construct; identical to SEQ ID NO: 19437
  source 1..80: mol_type = other DNA

SEQ ID NO: 54423 - DNA, 80 bp, synthetic construct; identical to SEQ ID NO: 19438
  source 1..80: mol_type = other DNA

SEQ ID NO: 54424 - DNA, 80 bp, synthetic construct; identical to SEQ ID NO: 19439
  source 1..80: mol_type = other DNA

SEQ ID NO: 54425 - DNA, 80 bp, synthetic construct; identical to SEQ ID NO: 8794
  source 1..80: mol_type = other DNA

SEQ ID NO: 54426 - DNA, 80 bp, synthetic construct; identical to SEQ ID NO: 19441
  source 1..80: mol_type = other DNA

SEQ ID NO: 54427 - DNA, 80 bp, synthetic construct; identical to SEQ ID NO: 19442
  source 1..80: mol_type = other DNA

SEQ ID NO: 54428 - DNA, 80 bp, synthetic construct; identical to SEQ ID NO: 19443
  source 1..80: mol_type = other DNA

SEQ ID NO: 54429 - DNA, 80 bp, synthetic construct; identical to SEQ ID NO: 8795
  source 1..80: mol_type = other DNA

SEQ ID NO: 54430 - DNA, 80 bp, synthetic construct; identical to SEQ ID NO: 19446
  source 1..80: mol_type = other DNA

SEQ ID NO: 54431 - DNA, 80 bp, synthetic construct; identical to SEQ ID NO: 19447
  source 1..80: mol_type = other DNA

SEQ ID NO: 54432 - DNA, 80 bp, synthetic construct; identical to SEQ ID NO: 19448
  source 1..80: mol_type = other DNA

SEQ ID NO: 54433 - DNA, 80 bp, synthetic construct; identical to SEQ ID NO: 19449
  source 1..80: mol_type = other DNA

SEQ ID NO: 54434 - DNA, 80 bp, synthetic construct; identical to SEQ ID NO: 19450
  source 1..80: mol_type = other DNA

SEQ ID NO: 54435 - DNA, 80 bp, synthetic construct; identical to SEQ ID NO: 8767
  source 1..80: mol_type = other DNA

SEQ ID NO: 54436 - DNA, 80 bp, synthetic construct; identical to SEQ ID NO: 19452
  source 1..80: mol_type = other DNA

SEQ ID NO: 54437 - DNA, 80 bp, synthetic construct; identical to SEQ ID NO: 19453
  source 1..80: mol_type = other DNA

SEQ ID NO: 54438 - DNA, 80 bp, synthetic construct; identical to SEQ ID NO: 19454
  source 1..80: mol_type = other DNA

SEQ ID NO: 54439 - DNA, 80 bp, synthetic construct; identical to SEQ ID NO: 19455
  source 1..80: mol_type = other DNA

SEQ ID NO: 54440 - DNA, 80 bp, synthetic construct; identical to SEQ ID NO: 19456
  source 1..80: mol_type = other DNA

SEQ ID NO: 54441 - DNA, 80 bp, synthetic construct; identical to SEQ ID NO: 19457
  source 1..80: mol_type = other DNA

SEQ ID NO: 54442 - DNA, 80 bp, synthetic construct; identical to SEQ ID NO: 19458
  source 1..80: mol_type = other DNA

SEQ ID NO: 54443 - DNA, 80 bp, synthetic construct; identical to SEQ ID NO: 19459
  source 1..80: mol_type = other DNA

SEQ ID NO: 54444 - DNA, 80 bp, synthetic construct; identical to SEQ ID NO: 19460
  source 1..80: mol_type = other DNA

SEQ ID NO: 54445 - DNA, 80 bp, synthetic construct; identical to SEQ ID NO: 19461
  source 1..80: mol_type = other DNA

SEQ ID NO: 54446 - DNA, 80 bp, synthetic construct; identical to SEQ ID NO: 19462
  source 1..80: mol_type = other DNA

SEQ ID NO: 54447 - DNA, 80 bp, synthetic construct; identical to SEQ ID NO: 19463
  source 1..80: mol_type = other DNA

SEQ ID NO: 54448 - DNA, 80 bp, synthetic construct; identical to SEQ ID NO: 19464
  source 1..80: mol_type = other DNA

SEQ ID NO: 54449 - DNA, 80 bp, synthetic construct; identical to SEQ ID NO: 19465
  source 1..80: mol_type = other DNA

SEQ ID NO: 54450 - DNA, 80 bp, synthetic construct; identical to SEQ ID NO: 8800
  source 1..80: mol_type = other DNA

SEQ ID NO: 54451 - DNA, 80 bp, synthetic construct; identical to SEQ ID NO: 19467
  source 1..80: mol_type = other DNA

SEQ ID NO: 54452 - DNA, 80 bp, synthetic construct; identical to SEQ ID NO: 19468
  source 1..80: mol_type = other DNA

SEQ ID NO: 54453 - DNA, 80 bp, synthetic construct; identical to SEQ ID NO: 19469
  source 1..80: mol_type = other DNA

SEQ ID NO: 54454 - DNA, 80 bp, synthetic construct; identical to SEQ ID NO: 8801
  source 1..80: mol_type = other DNA

SEQ ID NO: 54455 - DNA, 80 bp, synthetic construct; identical to SEQ ID NO: 19471
  source 1..80: mol_type = other DNA

SEQ ID NO: 54456 - DNA, 80 bp, synthetic construct; identical to SEQ ID NO: 19472
  source 1..80: mol_type = other DNA

SEQ ID NO: 54457 - DNA, 80 bp, synthetic construct; identical to SEQ ID NO: 19473
  source 1..80: mol_type = other DNA

SEQ ID NO: 54458 - DNA, 80 bp, synthetic construct; identical to SEQ ID NO: 19474
  source 1..80: mol_type = other DNA

SEQ ID NO: 54459 - DNA, 80 bp, synthetic construct; identical to SEQ ID NO: 19475
  source 1..80: mol_type = other DNA

SEQ ID NO: 54460 - DNA, 80 bp, synthetic construct; identical to SEQ ID NO: 19476
  source 1..80: mol_type = other DNA

SEQ ID NO: 54461 - DNA, 80 bp, synthetic construct; identical to SEQ ID NO: 19477
  source 1..80: mol_type = other DNA

SEQ ID NO: 54462 - DNA, 80 bp, synthetic construct; identical to SEQ ID NO: 19478
  source 1..80: mol_type = other DNA

SEQ ID NO: 54463 - DNA, 80 bp, synthetic construct; identical to SEQ ID NO: 19480
  source 1..80: mol_type = other DNA

SEQ ID NO: 54464 - DNA, 80 bp, synthetic construct; identical to SEQ ID NO: 19482
  source 1..80: mol_type = other DNA

SEQ ID NO: 54465 - DNA, 80 bp, synthetic construct; identical to SEQ ID NO: 8804
  source 1..80: mol_type = other DNA

SEQ ID NO: 54466 - DNA, 80 bp, synthetic construct; identical to SEQ ID NO: 19484
  source 1..80: mol_type = other DNA

SEQ ID NO: 54467 - DNA, 80 bp, synthetic construct; identical to SEQ ID NO: 19485
  source 1..80: mol_type = other DNA

SEQ ID NO: 54468 - DNA, 80 bp, synthetic construct; identical to SEQ ID NO: 19486
  source 1..80: mol_type = other DNA

SEQ ID NO: 54469 - DNA, 80 bp, synthetic construct; identical to SEQ ID NO: 19487
  source 1..80: mol_type = other DNA

SEQ ID NO: 54470 - DNA, 80 bp, synthetic construct; identical to SEQ ID NO: 19488
  source 1..80: mol_type = other DNA

SEQ ID NO: 54471 - DNA, 80 bp, synthetic construct; identical to SEQ ID NO: 19490
  source 1..80: mol_type = other DNA

SEQ ID NO: 54472 - DNA, 80 bp, synthetic construct; identical to SEQ ID NO: 19491
  source 1..80: mol_type = other DNA

SEQ ID NO: 54473 - DNA, 80 bp, synthetic construct; identical to SEQ ID NO: 8806
  source 1..80: mol_type = other DNA

SEQ ID NO: 54474 - DNA, 80 bp, synthetic construct; identical to SEQ ID NO: 19493
  source 1..80: mol_type = other DNA

SEQ ID NO: 54475 - DNA, 80 bp, synthetic construct; identical to SEQ ID NO: 19494
  source 1..80: mol_type = other DNA

SEQ ID NO: 54476 - DNA, 80 bp, synthetic construct; identical to SEQ ID NO: 19495
  source 1..80: mol_type = other DNA

SEQ ID NO: 54477 - DNA, 80 bp, synthetic construct; identical to SEQ ID NO: 8807
  source 1..80: mol_type = other DNA

SEQ ID NO: 54478 - DNA, 80 bp, synthetic construct; identical to SEQ ID NO: 19497
  source 1..80: mol_type = other DNA

SEQ ID NO: 54479 - DNA, 80 bp, synthetic construct; identical to SEQ ID NO: 19498
  source 1..80: mol_type = other DNA

SEQ ID NO: 54480 - DNA, 80 bp, synthetic construct; identical to SEQ ID NO: 19499
  source 1..80: mol_type = other DNA

SEQ ID NO: 54481 - DNA, 80 bp, synthetic construct; identical to SEQ ID NO: 19500
  source 1..80: mol_type = other DNA

SEQ ID NO: 54482 - DNA, 80 bp, synthetic construct; identical to SEQ ID NO: 19501
  source 1..80: mol_type = other DNA

SEQ ID NO: 54483 - DNA, 80 bp, synthetic construct; identical to SEQ ID NO: 19502
  source 1..80: mol_type = other DNA

SEQ ID NO: 54484 - DNA, 80 bp, synthetic construct; identical to SEQ ID NO: 19503
  source 1..80: mol_type = other DNA

SEQ ID NO: 54485 - DNA, 80 bp, synthetic construct; identical to SEQ ID NO: 19504
  source 1..80: mol_type = other DNA

SEQ ID NO: 54486 - DNA, 80 bp, synthetic construct; identical to SEQ ID NO: 8793
  source 1..80: mol_type = other DNA

SEQ ID NO: 54487 - DNA, 80 bp, synthetic construct; identical to SEQ ID NO: 19506
  source 1..80: mol_type = other DNA

SEQ ID NO: 54488 - DNA, 80 bp, synthetic construct; identical to SEQ ID NO: 19507
  source 1..80: mol_type = other DNA

SEQ ID NO: 54489 - DNA, 80 bp, synthetic construct; identical to SEQ ID NO: 19508
  source 1..80: mol_type = other DNA

SEQ ID NO: 54490 - DNA, 80 bp, synthetic construct; identical to SEQ ID NO: 19509
  source 1..80: mol_type = other DNA

SEQ ID NO: 54491 - DNA, 80 bp, synthetic construct; identical to SEQ ID NO: 19510
  source 1..80: mol_type = other DNA

SEQ ID NO: 54492 - DNA, 80 bp, synthetic construct; identical to SEQ ID NO: 19511
  source 1..80: mol_type = other DNA

SEQ ID NO: 54493 - DNA, 80 bp, synthetic construct; identical to SEQ ID NO: 19512
  source 1..80: mol_type = other DNA

SEQ ID NO: 54494 - DNA, 80 bp, synthetic construct; identical to SEQ ID NO: 19513
  source 1..80: mol_type = other DNA

SEQ ID NO: 54495 - DNA, 80 bp, synthetic construct; identical to SEQ ID NO: 19514
  source 1..80: mol_type = other DNA

SEQ ID NO: 54496 - DNA, 80 bp, synthetic construct; identical to SEQ ID NO: 19515
  source 1..80: mol_type = other DNA

SEQ ID NO: 54497 - DNA, 80 bp, synthetic construct; identical to SEQ ID NO: 19516
  source 1..80: mol_type = other DNA

SEQ ID NO: 54498 - DNA, 80 bp, synthetic construct; identical to SEQ ID NO: 19517
  source 1..80: mol_type = other DNA

SEQ ID NO: 54499 - DNA, 80 bp, synthetic construct; identical to SEQ ID NO: 19518
  source 1..80: mol_type = other DNA

SEQ ID NO: 54500 - DNA, 80 bp, synthetic construct; identical to SEQ ID NO: 19519
  source 1..80: mol_type = other DNA

SEQ ID NO: 54501 - DNA, 80 bp, synthetic construct; identical to SEQ ID NO: 8796
  source 1..80: mol_type = other DNA

SEQ ID NO: 54502 - DNA, 80 bp, synthetic construct; identical to SEQ ID NO: 19521
  source 1..80: mol_type = other DNA

SEQ ID NO: 54503 - DNA, 80 bp, synthetic construct; identical to SEQ ID NO: 19522
  source 1..80: mol_type = other DNA

SEQ ID NO: 54504 - DNA, 80 bp, synthetic construct; identical to SEQ ID NO: 19523
  source 1..80: mol_type = other DNA

SEQ ID NO: 54505 - DNA, 80 bp, synthetic construct; identical to SEQ ID NO: 19524
  source 1..80: mol_type = other DNA

SEQ ID NO: 54506 - DNA, 80 bp, synthetic construct; identical to SEQ ID NO: 8797
  source 1..80: mol_type = other DNA

SEQ ID NO: 54507 - DNA, 80 bp, synthetic construct; identical to SEQ ID NO: 19526
  source 1..80: mol_type = other DNA

SEQ ID NO: 54508 - DNA, 80 bp, synthetic construct; identical to SEQ ID NO: 19527
  source 1..80: mol_type = other DNA

SEQ ID NO: 54509 - DNA, 80 bp, synthetic construct; identical to SEQ ID NO: 19528
  source 1..80: mol_type = other DNA

SEQ ID NO: 54510 - DNA, 80 bp, synthetic construct; identical to SEQ ID NO: 8798
  source 1..80: mol_type = other DNA

SEQ ID NO: 54511 - DNA, 80 bp, synthetic construct; identical to SEQ ID NO: 19530
  source 1..80: mol_type = other DNA

SEQ ID NO: 54512 - DNA, 80 bp, synthetic construct; identical to SEQ ID NO: 19531
  source 1..80: mol_type = other DNA

SEQ ID NO: 54513 - DNA, 80 bp, synthetic construct; identical to SEQ ID NO: 19532
  source 1..80: mol_type = other DNA

SEQ ID NO: 54514 - DNA, 80 bp, synthetic construct; identical to SEQ ID NO: 8799
  source 1..80: mol_type = other DNA

SEQ ID NO: 54515 - DNA, 80 bp, synthetic construct; identical to SEQ ID NO: 19534
  source 1..80: mol_type = other DNA

SEQ ID NO: 54516 - DNA, 80 bp, synthetic construct; identical to SEQ ID NO: 19535
  source 1..80: mol_type = other DNA

SEQ ID NO: 54517 - DNA, 80 bp, synthetic construct; identical to SEQ ID NO: 19536
  source 1..80: mol_type = other DNA

SEQ ID NO: 54518 - DNA, 80 bp, synthetic construct; identical to SEQ ID NO: 19537
  source 1..80: mol_type = other DNA

SEQ ID NO: 54519 - DNA, 80 bp, synthetic construct; identical to SEQ ID NO: 19538
  source 1..80: mol_type = other DNA

SEQ ID NO: 54520 - DNA, 80 bp, synthetic construct; identical to SEQ ID NO: 19539
  source 1..80: mol_type = other DNA

SEQ ID NO: 54521 - DNA, 80 bp, synthetic construct; identical to SEQ ID NO: 19540
  source 1..80: mol_type = other DNA

SEQ ID NO: 54522 - DNA, 80 bp, synthetic construct; identical to SEQ ID NO: 19541
  source 1..80: mol_type = other DNA

SEQ ID NO: 54523 - DNA, 80 bp, synthetic construct; identical to SEQ ID NO: 19542
  source 1..80: mol_type = other DNA

SEQ ID NO: 54524 - DNA, 80 bp, synthetic construct; identical to SEQ ID NO: 19543
  source 1..80: mol_type = other DNA

SEQ ID NO: 54525 - DNA, 80 bp, synthetic construct; identical to SEQ ID NO: 19544
  source 1..80: mol_type = other DNA

SEQ ID NO: 54526 - DNA, 80 bp, synthetic construct; identical to SEQ ID NO: 19545
  source 1..80: mol_type = other DNA

SEQ ID NO: 54527 - DNA, 80 bp, synthetic construct; identical to SEQ ID NO: 8802
  source 1..80: mol_type = other DNA

SEQ ID NO: 54528 - DNA, 80 bp, synthetic construct; identical to SEQ ID NO: 19547
  source 1..80: mol_type = other DNA

SEQ ID NO: 54529 - DNA, 80 bp, synthetic construct; identical to SEQ ID NO: 19548
  source 1..80: mol_type = other DNA

SEQ ID NO: 54530 - DNA, 80 bp, synthetic construct; identical to SEQ ID NO: 19550
  source 1..80: mol_type = other DNA

SEQ ID NO: 54531 - DNA, 80 bp, synthetic construct; identical to SEQ ID NO: 19552
  source 1..80: mol_type = other DNA

SEQ ID NO: 54532 - DNA, 80 bp, synthetic construct; identical to SEQ ID NO: 19554
  source 1..80: mol_type = other DNA

SEQ ID NO: 54533 - DNA, 80 bp, synthetic construct; identical to SEQ ID NO: 19555
  source 1..80: mol_type = other DNA

SEQ ID NO: 54534 - DNA, 80 bp, synthetic construct; identical to SEQ ID NO: 19556
  source 1..80: mol_type = other DNA

SEQ ID NO: 54535 - DNA, 80 bp, synthetic construct; identical to SEQ ID NO: 19557
  source 1..80: mol_type = other DNA

SEQ ID NO: 54536 - DNA, 80 bp, synthetic construct; identical to SEQ ID NO: 19559
  source 1..80: mol_type = other DNA

SEQ ID NO: 54537 - DNA, 80 bp, synthetic construct; identical to SEQ ID NO: 19560
  source 1..80: mol_type = other DNA

SEQ ID NO: 54538 - DNA, 80 bp, synthetic construct; identical to SEQ ID NO: 19561
  source 1..80: mol_type = other DNA

SEQ ID NO: 54539 - DNA, 80 bp, synthetic construct; identical to SEQ ID NO: 19562
  source 1..80: mol_type = other DNA

SEQ ID NO: 54540 - DNA, 80 bp, synthetic construct; identical to SEQ ID NO: 19563
  source 1..80: mol_type = other DNA

SEQ ID NO: 54541 - DNA, 80 bp, synthetic construct; identical to SEQ ID NO: 19564
  source 1..80: mol_type = other DNA

SEQ ID NO: 54542 - DNA, 80 bp, synthetic construct; identical to SEQ ID NO: 19565
  source 1..80: mol_type = other DNA

SEQ ID NO: 54543 - DNA, 80 bp, synthetic construct; identical to SEQ ID NO: 19566
  source 1..80: mol_type = other DNA

SEQ ID NO: 54544 - DNA, 80 bp, synthetic construct; identical to SEQ ID NO: 19567
  source 1..80: mol_type = other DNA

SEQ ID NO: 54545 - DNA, 80 bp, synthetic construct; identical to SEQ ID NO: 19568
  source 1..80: mol_type = other DNA

SEQ ID NO: 54546 - DNA, 80 bp, synthetic construct; identical to SEQ ID NO: 19569
  source 1..80: mol_type = other DNA

SEQ ID NO: 54547 - DNA, 80 bp, synthetic construct; identical to SEQ ID NO: 8808
  source 1..80: mol_type = other DNA

SEQ ID NO: 54548 - DNA, 80 bp, synthetic construct; identical to SEQ ID NO: 19571
  source 1..80: mol_type = other DNA

SEQ ID NO: 54549 - DNA, 80 bp, synthetic construct; identical to SEQ ID NO: 19572
  source 1..80: mol_type = other DNA

SEQ ID NO: 54550 - DNA, 80 bp, synthetic construct; identical to SEQ ID NO: 8809
  source 1..80: mol_type = other DNA

SEQ ID NO: 54551 - DNA, 80 bp, synthetic construct; identical to SEQ ID NO: 19574
  source 1..80: mol_type = other DNA

SEQ ID NO: 54552 - DNA, 80 bp, synthetic construct; identical to SEQ ID NO: 19575
  source 1..80: mol_type = other DNA

SEQ ID NO: 54553 - DNA, 80 bp, synthetic construct; identical to SEQ ID NO: 19576
  source 1..80: mol_type = other DNA

SEQ ID NO: 54554 - DNA, 80 bp, synthetic construct; identical to SEQ ID NO: 8810
  source 1..80: mol_type = other DNA

SEQ ID NO: 54555 - DNA, 80 bp, synthetic construct; identical to SEQ ID NO: 19578
  source 1..80: mol_type = other DNA

SEQ ID NO: 54556 - DNA, 80 bp, synthetic construct; identical to SEQ ID NO: 19579
  source 1..80: mol_type = other DNA

SEQ ID NO: 54557 - DNA, 80 bp, synthetic construct; identical to SEQ ID NO: 19580
  source 1..80: mol_type = other DNA

SEQ ID NO: 54558 - DNA, 80 bp, synthetic construct; identical to SEQ ID NO: 8811
  source 1..80: mol_type = other DNA

SEQ ID NO: 54559 - DNA, 80 bp, synthetic construct; identical to SEQ ID NO: 19582
  source 1..80: mol_type = other DNA

SEQ ID NO: 54560 - DNA, 80 bp, synthetic construct; identical to SEQ ID NO: 19583
  source 1..80: mol_type = other DNA

SEQ ID NO: 54561 - DNA, 80 bp, synthetic construct; identical to SEQ ID NO: 19584
  source 1..80: mol_type = other DNA

SEQ ID NO: 54562 - DNA, 80 bp, synthetic construct; identical to SEQ ID NO: 19585
  source 1..80: mol_type = other DNA

SEQ ID NO: 54563 - DNA, 80 bp, synthetic construct; identical to SEQ ID NO: 8812
  source 1..80: mol_type = other DNA

SEQ ID NO: 54564 - DNA, 80 bp, synthetic construct; identical to SEQ ID NO: 19587
  source 1..80: mol_type = other DNA

SEQ ID NO: 54565 - DNA, 80 bp, synthetic construct; identical to SEQ ID NO: 19588
  source 1..80: mol_type = other DNA

SEQ ID NO: 54566 - DNA, 80 bp, synthetic construct; identical to SEQ ID NO: 19589
  source 1..80: mol_type = other DNA

SEQ ID NO: 54567 - DNA, 80 bp, synthetic construct; identical to SEQ ID NO: 19590
  source 1..80: mol_type = other DNA

SEQ ID NO: 54568 - DNA, 80 bp, synthetic construct; identical to SEQ ID NO: 19591
  source 1..80: mol_type = other DNA

SEQ ID NO: 54569 - DNA, 80 bp, synthetic construct; identical to SEQ ID NO: 8813
  source 1..80: mol_type = other DNA

SEQ ID NO: 54570 - DNA, 80 bp, synthetic construct; identical to SEQ ID NO: 19593
  source 1..80: mol_type = other DNA

SEQ ID NO: 54571 - DNA, 80 bp, synthetic construct; identical to SEQ ID NO: 19594
  source 1..80: mol_type = other DNA

SEQ ID NO: 54572 - DNA, 80 bp, synthetic construct; identical to SEQ ID NO: 19595
  source 1..80: mol_type = other DNA

SEQ ID NO: 54573 - DNA, 80 bp, synthetic construct; identical to SEQ ID NO: 8814
  source 1..80: mol_type = other DNA

SEQ ID NO: 54574 - DNA, 80 bp, synthetic construct; identical to SEQ ID NO: 19597
  source 1..80: mol_type = other DNA

SEQ ID NO: 54575 - DNA, 80 bp, synthetic construct; identical to SEQ ID NO: 19598
  source 1..80: mol_type = other DNA

SEQ ID NO: 54576 - DNA, 80 bp, synthetic construct; identical to SEQ ID NO: 8815
  source 1..80: mol_type = other DNA

SEQ ID NO: 54577 - DNA, 80 bp, synthetic construct; identical to SEQ ID NO: 19600
  source 1..80: mol_type = other DNA

SEQ ID NO: 54578 - DNA, 80 bp, synthetic construct; identical to SEQ ID NO: 19601
  source 1..80: mol_type = other DNA

SEQ ID NO: 54579 - DNA, 80 bp, synthetic construct; identical to SEQ ID NO: 8816
  source 1..80: mol_type = other DNA

SEQ ID NO: 54580 - DNA, 80 bp, synthetic construct; identical to SEQ ID NO: 19603
  source 1..80: mol_type = other DNA

SEQ ID NO: 54581 - DNA, 80 bp, synthetic construct; identical to SEQ ID NO: 19604
  source 1..80: mol_type = other DNA

SEQ ID NO: 54582 - DNA, 80 bp, synthetic construct; identical to SEQ ID NO: 19605
  source 1..80: mol_type = other DNA

SEQ ID NO: 54583 - DNA, 80 bp, synthetic construct; identical to SEQ ID NO: 19606
  source 1..80: mol_type = other DNA

SEQ ID NO: 54584 - DNA, 80 bp, synthetic construct; identical to SEQ ID NO: 19607
  source 1..80: mol_type = other DNA

SEQ ID NO: 54585 - DNA, 80 bp, synthetic construct; identical to SEQ ID NO: 8817
  source 1..80: mol_type = other DNA

SEQ ID NO: 54586 - DNA, 80 bp, synthetic construct; identical to SEQ ID NO: 19609
  source 1..80: mol_type = other DNA

SEQ ID NO: 54587 - DNA, 80 bp, synthetic construct; identical to SEQ ID NO: 19610
  source 1..80: mol_type = other DNA

SEQ ID NO: 54588 - DNA, 80 bp, synthetic construct; identical to SEQ ID NO: 19611
  source 1..80: mol_type = other DNA

SEQ ID NO: 54589 - DNA, 80 bp, synthetic construct; identical to SEQ ID NO: 8818
  source 1..80: mol_type = other DNA

SEQ ID NO: 54590 - DNA, 80 bp, synthetic construct; identical to SEQ ID NO: 19613
  source 1..80: mol_type = other DNA

SEQ ID NO: 54591 - DNA, 80 bp, synthetic construct; identical to SEQ ID NO: 19614
  source 1..80: mol_type = other DNA

SEQ ID NO: 54592 - DNA, 80 bp, synthetic construct; identical to SEQ ID NO: 19615
  source 1..80: mol_type = other DNA

SEQ ID NO: 54593 - DNA, 80 bp, synthetic construct; identical to SEQ ID NO: 8819
  source 1..80: mol_type = other DNA

SEQ ID NO: 54594 - DNA, 80 bp, synthetic construct; identical to SEQ ID NO: 19617
  source 1..80: mol_type = other DNA

SEQ ID NO: 54595 - DNA, 80 bp, synthetic construct; identical to SEQ ID NO: 19618
  source 1..80: mol_type = other DNA

SEQ ID NO: 54596 - DNA, 80 bp, synthetic construct; identical to SEQ ID NO: 19619
  source 1..80: mol_type = other DNA

SEQ ID NO: 54597 - DNA, 80 bp, synthetic construct; identical to SEQ ID NO: 8820
  source 1..80: mol_type = other DNA

SEQ ID NO: 54598 - DNA, 80 bp, synthetic construct; identical to SEQ ID NO: 19621
  source 1..80: mol_type = other DNA

SEQ ID NO: 54599 - DNA, 80 bp, synthetic construct; identical to SEQ ID NO: 19623
  source 1..80: mol_type = other DNA

SEQ ID NO: 54600 - DNA, 80 bp, synthetic construct; identical to SEQ ID NO: 19624
  source 1..80: mol_type = other DNA

SEQ ID NO: 54601 - DNA, 80 bp, synthetic construct; identical to SEQ ID NO: 8821
  source 1..80: mol_type = other DNA

SEQ ID NO: 54602 - DNA, 80 bp, synthetic construct; identical to SEQ ID NO: 19626
  source 1..80: mol_type = other DNA

SEQ ID NO: 54603 - DNA, 80 bp, synthetic construct; identical to SEQ ID NO: 19627
  source 1..80: mol_type = other DNA

SEQ ID NO: 54604 - DNA, 80 bp, synthetic construct; identical to SEQ ID NO: 19628
  source 1..80: mol_type = other DNA

SEQ ID NO: 54605 - DNA, 80 bp, synthetic construct; identical to SEQ ID NO: 8822
  source 1..80: mol_type = other DNA

SEQ ID NO: 54606 - DNA, 80 bp, synthetic construct; identical to SEQ ID NO: 19630
  source 1..80: mol_type = other DNA

SEQ ID NO: 54607 - DNA, 80 bp, synthetic construct; identical to SEQ ID NO: 19631
  source 1..80: mol_type = other DNA

SEQ ID NO: 54608 - DNA, 80 bp, synthetic construct; identical to SEQ ID NO: 19632
  source 1..80: mol_type = other DNA

SEQ ID NO: 54609 - DNA, 80 bp, synthetic construct; identical to SEQ ID NO: 8823
  source 1..80: mol_type = other DNA

SEQ ID NO: 54610 - DNA, 80 bp, synthetic construct; identical to SEQ ID NO: 19634
  source 1..80: mol_type = other DNA

SEQ ID NO: 54611 - DNA, 80 bp, synthetic construct; identical to SEQ ID NO: 19635
  source 1..80: mol_type = other DNA

SEQ ID NO: 54612 - DNA, 80 bp, synthetic construct; identical to SEQ ID NO: 8824
  source 1..80: mol_type = other DNA

SEQ ID NO: 54613 - DNA, 80 bp, synthetic construct; identical to SEQ ID NO: 19637
  source 1..80: mol_type = other DNA

SEQ ID NO: 54614 - DNA, 80 bp, synthetic construct; identical to SEQ ID NO: 19638
  source 1..80: mol_type = other DNA

SEQ ID NO: 54615 - DNA, 80 bp, synthetic construct; identical to SEQ ID NO: 19639
  source 1..80: mol_type = other DNA

SEQ ID NO: 54616 - DNA, 80 bp, synthetic construct; identical to SEQ ID NO: 8825
  source 1..80: mol_type = other DNA

SEQ ID NO: 54617 - DNA, 80 bp, synthetic construct; identical to SEQ ID NO: 19642
  source 1..80: mol_type = other DNA

SEQ ID NO: 54618 - DNA, 80 bp, synthetic construct; identical to SEQ ID NO: 19643
  source 1..80: mol_type = other DNA

SEQ ID NO: 54619 - DNA, 80 bp, synthetic construct; identical to SEQ ID NO: 8826
  source 1..80: mol_type = other DNA

SEQ ID NO: 54620 - DNA, 80 bp, synthetic construct; identical to SEQ ID NO: 19645
  source 1..80: mol_type = other DNA

SEQ ID NO: 54621 - DNA, 80 bp, synthetic construct; identical to SEQ ID NO: 19646
  source 1..80: mol_type = other DNA

SEQ ID NO: 54622 - DNA, 80 bp, synthetic construct; identical to SEQ ID NO: 19647
  source 1..80: mol_type = other DNA

SEQ ID NO: 54623 - DNA, 80 bp, synthetic construct; identical to SEQ ID NO: 8827
  source 1..80: mol_type = other DNA

SEQ ID NO: 54624 - DNA, 80 bp, synthetic construct; identical to SEQ ID NO: 19649
  source 1..80: mol_type = other DNA

SEQ ID NO: 54625 - DNA, 80 bp, synthetic construct; identical to SEQ ID NO: 19650
  source 1..80: mol_type = other DNA

SEQ ID NO: 54626 - DNA, 80 bp, synthetic construct; identical to SEQ ID NO: 19651
  source 1..80: mol_type = other DNA

SEQ ID NO: 54627 - DNA, 80 bp, synthetic construct; identical to SEQ ID NO: 19652
  source 1..80: mol_type = other DNA

SEQ ID NO: 54628 - DNA, 80 bp, synthetic construct; identical to SEQ ID NO: 8828
  source 1..80: mol_type = other DNA

SEQ ID NO: 54629 - DNA, 80 bp, synthetic construct; identical to SEQ ID NO: 19654
  source 1..80: mol_type = other DNA

SEQ ID NO: 54630 - DNA, 80 bp, synthetic construct; identical to SEQ ID NO: 19655
  source 1..80: mol_type = other DNA

SEQ ID NO: 54631 - DNA, 80 bp, synthetic construct; identical to SEQ ID NO: 8829
  source 1..80: mol_type = other DNA

SEQ ID NO: 54632 - DNA, 80 bp, synthetic construct; identical to SEQ ID NO: 19657
  source 1..80: mol_type = other DNA

SEQ ID NO: 54633 - DNA, 80 bp, synthetic construct; identical to SEQ ID NO: 19659
  source 1..80: mol_type = other DNA

SEQ ID NO: 54634 - DNA, 80 bp, synthetic construct; identical to SEQ ID NO: 19660
  source 1..80: mol_type = other DNA

SEQ ID NO: 54635 - DNA, 80 bp, synthetic construct; identical to SEQ ID NO: 8830
  source 1..80: mol_type = other DNA

SEQ ID NO: 54636 - DNA, 80 bp, synthetic construct; identical to SEQ ID NO: 19662
  source 1..80: mol_type = other DNA

SEQ ID NO: 54637 - DNA, 80 bp, synthetic construct; identical to SEQ ID NO: 19663
  source 1..80: mol_type = other DNA

SEQ ID NO: 54638 - DNA, 80 bp, synthetic construct; identical to SEQ ID NO: 8831
  source 1..80: mol_type = other DNA

SEQ ID NO: 54639 - DNA, 80 bp, synthetic construct; identical to SEQ ID NO: 19665
  source 1..80: mol_type = other DNA

SEQ ID NO: 54640 - DNA, 80 bp, synthetic construct; identical to SEQ ID NO: 19666
  source 1..80: mol_type = other DNA

SEQ ID NO: 54641 - DNA, 80 bp, synthetic construct; identical to SEQ ID NO: 19667
  source 1..80: mol_type = other DNA

SEQ ID NO: 54642 - DNA, 80 bp, synthetic construct; identical to SEQ ID NO: 19668
  source 1..80: mol_type = other DNA

SEQ ID NO: 54643 - DNA, 80 bp, synthetic construct; identical to SEQ ID NO: 8832
  source 1..80: mol_type = other DNA

SEQ ID NO: 54644 - DNA, 80 bp, synthetic construct; identical to SEQ ID NO: 19670
  source 1..80: mol_type = other DNA

SEQ ID NO: 54645 - DNA, 80 bp, synthetic construct; identical to SEQ ID NO: 19671
  source 1..80: mol_type = other DNA

SEQ ID NO: 54646 - DNA, 80 bp, synthetic construct; identical to SEQ ID NO: 8833
  source 1..80: mol_type = other DNA

SEQ ID NO: 54647 - DNA, 80 bp, synthetic construct; identical to SEQ ID NO: 19673
  source 1..80: mol_type = other DNA

SEQ ID NO: 54648 - DNA, 80 bp, synthetic construct; identical to SEQ ID NO: 19674
  source 1..80: mol_type = other DNA

SEQ ID NO: 54649 - DNA, 80 bp, synthetic construct; identical to SEQ ID NO: 19675
  source 1..80: mol_type = other DNA

SEQ ID NO: 54650 - DNA, 80 bp, synthetic construct; identical to SEQ ID NO: 8834
  source 1..80: mol_type = other DNA

SEQ ID NO: 54651 - DNA, 80 bp, synthetic construct; identical to SEQ ID NO: 19677
  source 1..80: mol_type = other DNA

SEQ ID NO: 54652 - DNA, 80 bp, synthetic construct; identical to SEQ ID NO: 19678
  source 1..80: mol_type = other DNA

SEQ ID NO: 54653 - DNA, 80 bp, synthetic construct; identical to SEQ ID NO: 19679
  source 1..80: mol_type = other DNA

SEQ ID NO: 54654 - DNA, 80 bp, synthetic construct; identical to SEQ ID NO: 19680
  source 1..80: mol_type = other DNA

SEQ ID NO: 54655 - DNA, 80 bp, synthetic construct; identical to SEQ ID NO: 8835
  source 1..80: mol_type = other DNA

SEQ ID NO: 54656 - DNA, 80 bp, synthetic construct; identical to SEQ ID NO: 19682
  source 1..80: mol_type = other DNA

SEQ ID NO: 54657 - DNA, 80 bp, synthetic construct; identical to SEQ ID NO: 19683
  source 1..80: mol_type = other DNA

SEQ ID NO: 54658 - DNA, 80 bp, synthetic construct; identical to SEQ ID NO: 8836
  source 1..80: mol_type = other DNA

SEQ ID NO: 54659 - DNA, 80 bp, synthetic construct; identical to SEQ ID NO: 19685
  source 1..80: mol_type = other DNA

SEQ ID NO: 54660 - DNA, 80 bp, synthetic construct; identical to SEQ ID NO: 19686
  source 1..80: mol_type = other DNA

SEQ ID NO: 54661 - DNA, 80 bp, synthetic construct; identical to SEQ ID NO: 19687
  source 1..80: mol_type = other DNA

SEQ ID NO: 54662 - DNA, 80 bp, synthetic construct; identical to SEQ ID NO: 8837
  source 1..80: mol_type = other DNA

SEQ ID NO: 54663 - DNA, 80 bp, synthetic construct; identical to SEQ ID NO: 19689
  source 1..80: mol_type = other DNA

SEQ ID NO: 54664 - DNA, 80 bp, synthetic construct; identical to SEQ ID NO: 19690
  source 1..80: mol_type = other DNA

SEQ ID NO: 54665 - DNA, 80 bp, synthetic construct; identical to SEQ ID NO: 19691
  source 1..80: mol_type = other DNA

SEQ ID NO: 54666 - DNA, 80 bp, synthetic construct; identical to SEQ ID NO: 8838
  source 1..80: mol_type = other DNA

SEQ ID NO: 54667 - DNA, 80 bp, synthetic construct; identical to SEQ ID NO: 19693
  source 1..80: mol_type = other DNA

SEQ ID NO: 54668 - DNA, 80 bp, synthetic construct; identical to SEQ ID NO: 19694
  source 1..80: mol_type = other DNA

SEQ ID NO: 54669 - DNA, 80 bp, synthetic construct; identical to SEQ ID NO: 19695
  source 1..80: mol_type = other DNA

SEQ ID NO: 54670 - DNA, 80 bp, synthetic construct; identical to SEQ ID NO: 19696
  source 1..80: mol_type = other DNA

SEQ ID NO: 54671 - DNA, 80 bp, synthetic construct; identical to SEQ ID NO: 8839
  source 1..80: mol_type = other DNA

SEQ ID NO: 54672 - DNA, 80 bp, synthetic construct; identical to SEQ ID NO: 19698
  source 1..80: mol_type = other DNA

SEQ ID NO: 54673 - DNA, 80 bp, synthetic construct; identical to SEQ ID NO: 19699
  source 1..80: mol_type = other DNA

SEQ ID NO: 54674 - DNA, 80 bp, synthetic construct; identical to SEQ ID NO: 19700
  source 1..80: mol_type = other DNA

SEQ ID NO: 54675 - DNA, 80 bp, synthetic construct; identical to SEQ ID NO: 19701
  source 1..80: mol_type = other DNA

SEQ ID NO: 54676 - DNA, 80 bp, synthetic construct; identical to SEQ ID NO: 8840
  source 1..80: mol_type = other DNA

SEQ ID NO: 54677 - DNA, 80 bp, synthetic construct; identical to SEQ ID NO: 19703
  source 1..80: mol_type = other DNA

SEQ ID NO: 54678 - DNA, 80 bp, synthetic construct; identical to SEQ ID NO: 19704
  source 1..80: mol_type = other DNA

SEQ ID NO: 54679 - DNA, 80 bp, synthetic construct; identical to SEQ ID NO: 8841
  source 1..80: mol_type = other DNA

SEQ ID NO: 54680 - DNA, 80 bp, synthetic construct; identical to SEQ ID NO: 19706
  source 1..80: mol_type = other DNA

SEQ ID NO: 54681 - DNA, 80 bp, synthetic construct; identical to SEQ ID NO: 19707
  source 1..80: mol_type = other DNA

SEQ ID NO: 54682 - DNA, 80 bp, synthetic construct; identical to SEQ ID NO: 19708
  source 1..80: mol_type = other DNA

SEQ ID NO: 54683 - DNA, 80 bp, synthetic construct; identical to SEQ ID NO: 19709
  source 1..80: mol_type = other DNA

SEQ ID NO: 54684 - DNA, 80 bp, synthetic construct; identical to SEQ ID NO: 8842
  source 1..80: mol_type = other DNA

SEQ ID NO: 54685 - DNA, 80 bp, synthetic construct; identical to SEQ ID NO: 19711
  source 1..80: mol_type = other DNA

SEQ ID NO: 54686 - DNA, 80 bp, synthetic construct; identical to SEQ ID NO: 19712
  source 1..80: mol_type = other DNA

SEQ ID NO: 54687 - DNA, 80 bp, synthetic construct; identical to SEQ ID NO: 8843
  source 1..80: mol_type = other DNA

SEQ ID NO: 54688 - DNA, 80 bp, synthetic construct; identical to SEQ ID NO: 19714
  source 1..80: mol_type = other DNA

SEQ ID NO: 54689 - DNA, 80 bp, synthetic construct; identical to SEQ ID NO: 19715
  source 1..80: mol_type = other DNA

SEQ ID NO: 54690 - DNA, 80 bp, synthetic construct; identical to SEQ ID NO: 19716
  source 1..80: mol_type = other DNA

SEQ ID NO: 54691 - DNA, 80 bp, synthetic construct; identical to SEQ ID NO: 19717
  source 1..80: mol_type = other DNA

SEQ ID NO: 54692 - DNA, 80 bp, synthetic construct; identical to SEQ ID NO: 8844
  source 1..80: mol_type = other DNA

SEQ ID NO: 54693 - DNA, 80 bp, synthetic construct; identical to SEQ ID NO: 19719
  source 1..80: mol_type = other DNA

SEQ ID NO: 54694 - DNA, 80 bp, synthetic construct; identical to SEQ ID NO: 19720
  source 1..80: mol_type = other DNA

SEQ ID NO: 54695 - DNA, 80 bp, synthetic construct; identical to SEQ ID NO: 8845
  source 1..80: mol_type = other DNA

SEQ ID NO: 54696 - DNA, 80 bp, synthetic construct; identical to SEQ ID NO: 19722
  source 1..80: mol_type = other DNA

SEQ ID NO: 54697 - DNA, 80 bp, synthetic construct; identical to SEQ ID NO: 19723
  source 1..80: mol_type = other DNA

SEQ ID NO: 54698 - DNA, 80 bp, synthetic construct; identical to SEQ ID NO: 19724
  source 1..80: mol_type = other DNA

SEQ ID NO: 54699 - DNA, 80 bp, synthetic construct; identical to SEQ ID NO: 8846
  source 1..80: mol_type = other DNA

SEQ ID NO: 54700 - DNA, 80 bp, synthetic construct; identical to SEQ ID NO: 19727
  source 1..80: mol_type = other DNA

SEQ ID NO: 54701 - DNA, 80 bp, synthetic construct; identical to SEQ ID NO: 19728
  source 1..80: mol_type = other DNA

SEQ ID NO: 54702 - DNA, 80 bp, synthetic construct; identical to SEQ ID NO: 19729
  source 1..80: mol_type = other DNA

SEQ ID NO: 54703 - DNA, 80 bp, synthetic construct; identical to SEQ ID NO: 8847
  source 1..80: mol_type = other DNA

SEQ ID NO: 54704 - DNA, 80 bp, synthetic construct; identical to SEQ ID NO: 19731
  source 1..80: mol_type = other DNA

SEQ ID NO: 54705 - DNA, 80 bp, synthetic construct; identical to SEQ ID NO: 19732
  source 1..80: mol_type = other DNA

SEQ ID NO: 54706 - DNA, 80 bp, synthetic construct; identical to SEQ ID NO: 8848
  source 1..80: mol_type = other DNA

SEQ ID NO: 54707 - DNA, 80 bp, synthetic construct; identical to SEQ ID NO: 19734
  source 1..80: mol_type = other DNA

SEQ ID NO: 54708 - DNA, 80 bp, synthetic construct; identical to SEQ ID NO: 19735
  source 1..80: mol_type = other DNA

SEQ ID NO: 54709 - DNA, 80 bp, synthetic construct; identical to SEQ ID NO: 19736
  source 1..80: mol_type = other DNA

SEQ ID NO: 54710 - DNA, 80 bp, synthetic construct; identical to SEQ ID NO: 8849
  source 1..80: mol_type = other DNA

SEQ ID NO: 54711 - DNA, 80 bp, synthetic construct; identical to SEQ ID NO: 19738
  source 1..80: mol_type = other DNA

SEQ ID NO: 54712 - DNA, 80 bp, synthetic construct; identical to SEQ ID NO: 19739
  source 1..80: mol_type = other DNA

SEQ ID NO: 54713 - DNA, 80 bp, synthetic construct; identical to SEQ ID NO: 19740
  source 1..80: mol_type = other DNA

SEQ ID NO: 54714 - DNA, 80 bp, synthetic construct; identical to SEQ ID NO: 8850
  source 1..80: mol_type = other DNA

SEQ ID NO: 54715 - DNA, 80 bp, synthetic construct; identical to SEQ ID NO: 19742
  source 1..80: mol_type = other DNA

SEQ ID NO: 54716 - DNA, 80 bp, synthetic construct; identical to SEQ ID NO: 19743
  source 1..80: mol_type = other DNA

SEQ ID NO: 54717 - DNA, 80 bp, synthetic construct; identical to SEQ ID NO: 19744
  source 1..80: mol_type = other DNA

SEQ ID NO: 54718 - DNA, 80 bp, synthetic construct; identical to SEQ ID NO: 19745
  source 1..80: mol_type = other DNA

SEQ ID NO: 54719 - DNA, 80 bp, synthetic construct; identical to SEQ ID NO: 8851
  source 1..80: mol_type = other DNA

SEQ ID NO: 54720 - DNA, 80 bp, synthetic construct; identical to SEQ ID NO: 19747
  source 1..80: mol_type = other DNA

SEQ ID NO: 54721 - DNA, 80 bp, synthetic construct; identical to SEQ ID NO: 8852
  source 1..80: mol_type = other DNA

SEQ ID NO: 54722 - DNA, 80 bp, synthetic construct; identical to SEQ ID NO: 19751
  source 1..80: mol_type = other DNA

SEQ ID NO: 54723 - DNA, 80 bp, synthetic construct; identical to SEQ ID NO: 19752
  source 1..80: mol_type = other DNA

SEQ ID NO: 54724 - DNA, 80 bp, synthetic construct; identical to SEQ ID NO: 19753
  source 1..80: mol_type = other DNA

SEQ ID NO: 54725 - DNA, 80 bp, synthetic construct; identical to SEQ ID NO: 8853
  source 1..80: mol_type = other DNA

SEQ ID NO: 54726 - DNA, 80 bp, synthetic construct; identical to SEQ ID NO: 19755
  source 1..80: mol_type = other DNA

SEQ ID NO: 54727 - DNA, 80 bp, synthetic construct; identical to SEQ ID NO: 19756
  source 1..80: mol_type = other DNA

SEQ ID NO: 54728 - DNA, 80 bp, synthetic construct; identical to SEQ ID NO: 19757
  source 1..80: mol_type = other DNA

SEQ ID NO: 54729 - DNA, 80 bp, synthetic construct; identical to SEQ ID NO: 8854
  source 1..80: mol_type = other DNA

SEQ ID NO: 54730 - DNA, 80 bp, synthetic construct; identical to SEQ ID NO: 19759
  source 1..80: mol_type = other DNA

SEQ ID NO: 54731 - DNA, 80 bp, synthetic construct; identical to SEQ ID NO: 19760
  source 1..80: mol_type = other DNA

SEQ ID NO: 54732 - DNA, 80 bp, synthetic construct; identical to SEQ ID NO: 19761
  source 1..80: mol_type = other DNA

SEQ ID NO: 54733 - DNA, 80 bp, synthetic construct; identical to SEQ ID NO: 8855
  source 1..80: mol_type = other DNA

SEQ ID NO: 54734 - DNA, 80 bp, synthetic construct; identical to SEQ ID NO: 19763
  source 1..80: mol_type = other DNA

SEQ ID NO: 54735 - DNA, 80 bp, synthetic construct; identical to SEQ ID NO: 19764
  source 1..80: mol_type = other DNA

SEQ ID NO: 54736 - DNA, 80 bp, synthetic construct; identical to SEQ ID NO: 8856
  source 1..80: mol_type = other DNA

SEQ ID NO: 54737 - DNA, 80 bp, synthetic construct; identical to SEQ ID NO: 19766
  source 1..80: mol_type = other DNA

SEQ ID NO: 54738 - DNA, 80 bp, synthetic construct; identical to SEQ ID NO: 19767
  source 1..80: mol_type = other DNA

SEQ ID NO: 54739 - DNA, 80 bp, synthetic construct; identical to SEQ ID NO: 19768
  source 1..80: mol_type = other DNA

SEQ ID NO: 54740 - DNA, 80 bp, synthetic construct; identical to SEQ ID NO: 8857
  source 1..80: mol_type = other DNA

SEQ ID NO: 54741 - DNA, 80 bp, synthetic construct; identical to SEQ ID NO: 19770
  source 1..80: mol_type = other DNA

SEQ ID NO: 54742 - DNA, 80 bp, synthetic construct; identical to SEQ ID NO: 19771
  source 1..80: mol_type = other DNA

SEQ ID NO: 54743 - DNA, 80 bp, synthetic construct; identical to SEQ ID NO: 19772
  source 1..80: mol_type = other DNA

SEQ ID NO: 54744 - DNA, 80 bp, synthetic construct; identical to SEQ ID NO: 8858
  source 1..80: mol_type = other DNA

SEQ ID NO: 54745 - DNA, 80 bp, synthetic construct; identical to SEQ ID NO: 19774
  source 1..80: mol_type = other DNA

SEQ ID NO: 54746 - DNA, 80 bp, synthetic construct; identical to SEQ ID NO: 19775
  source 1..80: mol_type = other DNA

SEQ ID NO: 54747 - DNA, 80 bp, synthetic construct; identical to SEQ ID NO: 19776
  source 1..80: mol_type = other DNA

SEQ ID NO: 54748 - DNA, 80 bp, synthetic construct; identical to SEQ ID NO: 8859
  source 1..80: mol_type = other DNA

SEQ ID NO: 54749 - DNA, 80 bp, synthetic construct; identical to SEQ ID NO: 19778
  source 1..80: mol_type = other DNA

SEQ ID NO: 54750 - DNA, 80 bp, synthetic construct; identical to SEQ ID NO: 19779
  source 1..80: mol_type = other DNA

SEQ ID NO: 54751 - DNA, 80 bp, synthetic construct; identical to SEQ ID NO: 19780
  source 1..80: mol_type = other DNA

SEQ ID NO: 54752 - DNA, 80 bp, synthetic construct; identical to SEQ ID NO: 8860
  source 1..80: mol_type = other DNA

SEQ ID NO: 54753 - DNA, 80 bp, synthetic construct; identical to SEQ ID NO: 19782
  source 1..80: mol_type = other DNA

SEQ ID NO: 54754 - DNA, 80 bp, synthetic construct; identical to SEQ ID NO: 19783
  source 1..80: mol_type = other DNA

SEQ ID NO: 54755 - DNA, 80 bp, synthetic construct; identical to SEQ ID NO: 19784
  source 1..80: mol_type = other DNA

SEQ ID NO: 54756 - DNA, 80 bp, synthetic construct; identical to SEQ ID NO: 8861
  source 1..80: mol_type = other DNA

SEQ ID NO: 54757 - DNA, 80 bp, synthetic construct; identical to SEQ ID NO: 19786
  source 1..80: mol_type = other DNA

SEQ ID NO: 54758 - DNA, 80 bp, synthetic construct; identical to SEQ ID NO: 19787
  source 1..80: mol_type = other DNA

SEQ ID NO: 54759 - DNA, 80 bp, synthetic construct; identical to SEQ ID NO: 19788
  source 1..80: mol_type = other DNA

SEQ ID NO: 54760 - DNA, 80 bp, synthetic construct; identical to SEQ ID NO: 8862
  source 1..80: mol_type = other DNA

SEQ ID NO: 54761 - DNA, 80 bp, synthetic construct; identical to SEQ ID NO: 19792
  source 1..80: mol_type = other DNA

SEQ ID NO: 54762 - DNA, 80 bp, synthetic construct; identical to SEQ ID NO: 8863
  source 1..80: mol_type = other DNA

SEQ ID NO: 54763 - DNA, 80 bp, synthetic construct; identical to SEQ ID NO: 19794
  source 1..80: mol_type = other DNA

SEQ ID NO: 54764 - DNA, 80 bp, synthetic construct; identical to SEQ ID NO: 19796
  source 1..80: mol_type = other DNA

SEQ ID NO: 54765 - DNA, 80 bp, synthetic construct; identical to SEQ ID NO: 8864
  source 1..80: mol_type = other DNA

SEQ ID NO: 54766 - DNA, 80 bp, synthetic construct; identical to SEQ ID NO: 19799
  source 1..80: mol_type = other DNA

SEQ ID NO: 54767 - DNA, 80 bp, synthetic construct; identical to SEQ ID NO: 19800
  source 1..80: mol_type = other DNA

SEQ ID NO: 54768 - DNA, 80 bp, synthetic construct; identical to SEQ ID NO: 19801
  source 1..80: mol_type = other DNA

SEQ ID NO: 54769 - DNA, 80 bp, synthetic construct; identical to SEQ ID NO: 8865
  source 1..80: mol_type = other DNA

SEQ ID NO: 54770 - DNA, 80 bp, synthetic construct; identical to SEQ ID NO: 19803
  source 1..80: mol_type = other DNA

SEQ ID NO: 54771 - DNA, 80 bp, synthetic construct; identical to SEQ ID NO: 19804
  source 1..80: mol_type = other DNA

SEQ ID NO: 54772 - DNA, 80 bp, synthetic construct; identical to SEQ ID NO: 19805
  source 1..80: mol_type = other DNA

SEQ ID NO: 54773 - DNA, 80 bp, synthetic construct; identical to SEQ ID NO: 8866
  source 1..80: mol_type = other DNA

SEQ ID NO: 54774 - DNA, 80 bp, synthetic construct; identical to SEQ ID NO: 19807
  source 1..80: mol_type = other DNA

SEQ ID NO: 54775 - DNA, 80 bp, synthetic construct; identical to SEQ ID NO: 19808
  source 1..80: mol_type = other DNA

SEQ ID NO: 54776 - DNA, 80 bp, synthetic construct; identical to SEQ ID NO: 19809
  source 1..80: mol_type = other DNA

SEQ ID NO: 54777 - DNA, 80 bp, synthetic construct; identical to SEQ ID NO: 8867
  source 1..80: mol_type = other DNA

SEQ ID NO: 54778 - DNA, 80 bp, synthetic construct; identical to SEQ ID NO: 19811
  source 1..80: mol_type = other DNA

SEQ ID NO: 54779 - DNA, 80 bp, synthetic construct; identical to SEQ ID NO: 19812
  source 1..80: mol_type = other DNA

SEQ ID NO: 54780 - DNA, 80 bp, synthetic construct; identical to SEQ ID NO: 19813
  source 1..80: mol_type = other DNA

SEQ ID NO: 54781 - DNA, 80 bp, synthetic construct; identical to SEQ ID NO: 19814
  source 1..80: mol_type = other DNA

SEQ ID NO: 54782 - DNA, 80 bp, synthetic construct; identical to SEQ ID NO: 8868
  source 1..80: mol_type = other DNA

SEQ ID NO: 54783 - DNA, 80 bp, synthetic construct; identical to SEQ ID NO: 19817
  source 1..80: mol_type = other DNA

SEQ ID NO: 54784 - DNA, 80 bp, synthetic construct; identical to SEQ ID NO: 8869
  source 1..80: mol_type = other DNA

SEQ ID NO: 54785 - DNA, 80 bp, synthetic construct; identical to SEQ ID NO: 19820
  source 1..80: mol_type = other DNA

SEQ ID NO: 54786 - DNA, 80 bp, synthetic construct; identical to SEQ ID NO: 19821
  source 1..80: mol_type = other DNA

SEQ ID NO: 54787 - DNA, 80 bp, synthetic construct; identical to SEQ ID NO: 19823
  source 1..80: mol_type = other DNA

SEQ ID NO: 54788 - DNA, 80 bp, synthetic construct; identical to SEQ ID NO: 19825
  source 1..80: mol_type = other DNA

SEQ ID NO: 54789 - DNA, 80 bp, synthetic construct; identical to SEQ ID NO: 8871
  source 1..80: mol_type = other DNA

SEQ ID NO: 54790 - DNA, 80 bp, synthetic construct; identical to SEQ ID NO: 19828
  source 1..80: mol_type = other DNA

SEQ ID NO: 54791 - DNA, 80 bp, synthetic construct; identical to SEQ ID NO: 19829
  source 1..80: mol_type = other DNA

SEQ ID NO: 54792 - DNA, 80 bp, synthetic construct; identical to SEQ ID NO: 19830
  source 1..80: mol_type = other DNA

SEQ ID NO: 54793 - DNA, 80 bp, synthetic construct; identical to SEQ ID NO: 8872
  source 1..80: mol_type = other DNA

SEQ ID NO: 54794 - DNA, 80 bp, synthetic construct; identical to SEQ ID NO: 19832
  source 1..80: mol_type = other DNA

SEQ ID NO: 54795 - DNA, 80 bp, synthetic construct; identical to SEQ ID NO: 19833
  source 1..80: mol_type = other DNA

SEQ ID NO: 54796 - DNA, 80 bp, synthetic construct; identical to SEQ ID NO: 8873
  source 1..80: mol_type = other DNA

SEQ ID NO: 54797 - DNA, 80 bp, synthetic construct; identical to SEQ ID NO: 19835
  source 1..80: mol_type = other DNA

SEQ ID NO: 54798 - DNA, 80 bp, synthetic construct; identical to SEQ ID NO: 19836
  source 1..80: mol_type = other DNA

SEQ ID NO: 54799 - DNA, 80 bp, synthetic construct; identical to SEQ ID NO: 19837
  source 1..80: mol_type = other DNA

SEQ ID NO: 54800 - DNA, 80 bp, synthetic construct; identical to SEQ ID NO: 8874
  source 1..80: mol_type = other DNA

SEQ ID NO: 54801 - DNA, 80 bp, synthetic construct; identical to SEQ ID NO: 19839
  source 1..80: mol_type = other DNA

SEQ ID NO: 54802 - DNA, 80 bp, synthetic construct; identical to SEQ ID NO: 19840
  source 1..80: mol_type = other DNA

SEQ ID NO: 54803 - DNA, 80 bp, synthetic construct; identical to SEQ ID NO: 19841
  source 1..80: mol_type = other DNA

SEQ ID NO: 54804 - DNA, 80 bp, synthetic construct; identical to SEQ ID NO: 8875
  source 1..80: mol_type = other DNA

SEQ ID NO: 54805 - DNA, 80 bp, synthetic construct; identical to SEQ ID NO: 19843
  source 1..80: mol_type = other DNA

SEQ ID NO: 54806 - DNA, 80 bp, synthetic construct; identical to SEQ ID NO: 19844
  source 1..80: mol_type = other DNA

SEQ ID NO: 54807 - DNA, 80 bp, synthetic construct; identical to SEQ ID NO: 19845
  source 1..80: mol_type = other DNA

SEQ ID NO: 54808 - DNA, 80 bp, synthetic construct; identical to SEQ ID NO: 19846
  source 1..80: mol_type = other DNA

SEQ ID NO: 54809 - DNA, 80 bp, synthetic construct; identical to SEQ ID NO: 8876
  source 1..80: mol_type = other DNA

SEQ ID NO: 54810 - DNA, 80 bp, synthetic construct; identical to SEQ ID NO: 19848
  source 1..80: mol_type = other DNA

SEQ ID NO: 54811 - DNA, 80 bp, synthetic construct; identical to SEQ ID NO: 19849
  source 1..80: mol_type = other DNA

SEQ ID NO: 54812 - DNA, 80 bp, synthetic construct; identical to SEQ ID NO: 19850
  source 1..80: mol_type = other DNA

SEQ ID NO: 54813 - DNA, 80 bp, synthetic construct; identical to SEQ ID NO: 8877
  source 1..80: mol_type = other DNA

SEQ ID NO: 54814 - DNA, 80 bp, synthetic construct; identical to SEQ ID NO: 19852
  source 1..80: mol_type = other DNA

SEQ ID NO: 54815 - DNA, 80 bp, synthetic construct; identical to SEQ ID NO: 19853
  source 1..80: mol_type = other DNA

SEQ ID NO: 54816 - DNA, 80 bp, synthetic construct; identical to SEQ ID NO: 19854
  source 1..80: mol_type = other DNA

SEQ ID NO: 54817 - DNA, 80 bp, synthetic construct; identical to SEQ ID NO: 8878
  source 1..80: mol_type = other DNA

SEQ ID NO: 54818 - DNA, 80 bp, synthetic construct; identical to SEQ ID NO: 19856
  source 1..80: mol_type = other DNA

SEQ ID NO: 54819 - DNA, 80 bp, synthetic construct; identical to SEQ ID NO: 19857
  source 1..80: mol_type = other DNA

SEQ ID NO: 54820 - DNA, 80 bp, synthetic construct; identical to SEQ ID NO: 8879
  source 1..80: mol_type = other DNA

SEQ ID NO: 54821 - DNA, 80 bp, synthetic construct; identical to SEQ ID NO: 19860
  source 1..80: mol_type = other DNA

SEQ ID NO: 54822 - DNA, 80 bp, synthetic construct; identical to SEQ ID NO: 8880
  source 1..80: mol_type = other DNA

SEQ ID NO: 54823 - DNA, 80 bp, synthetic construct; identical to SEQ ID NO: 19863
  source 1..80: mol_type = other DNA

SEQ ID NO: 54824 - DNA, 80 bp, synthetic construct; identical to SEQ ID NO: 19864
  source 1..80: mol_type = other DNA

SEQ ID NO: 54825 - DNA, 80 bp, synthetic construct; identical to SEQ ID NO: 19865
  source 1..80: mol_type = other DNA

SEQ ID NO: 54826 - DNA, 80 bp, synthetic construct; identical to SEQ ID NO: 19866
  source 1..80: mol_type = other DNA

SEQ ID NO: 54827 - DNA, 80 bp, synthetic construct; identical to SEQ ID NO: 8881
  source 1..80: mol_type = other DNA

SEQ ID NO: 54828 - DNA, 80 bp, synthetic construct; identical to SEQ ID NO: 19868
  source 1..80: mol_type = other DNA

SEQ ID NO: 54829 - DNA, 80 bp, synthetic construct; identical to SEQ ID NO: 19869
  source 1..80: mol_type = other DNA

SEQ ID NO: 54830 - DNA, 80 bp, synthetic construct; identical to SEQ ID NO: 19870
  source 1..80: mol_type = other DNA

SEQ ID NO: 54831 - DNA, 80 bp, synthetic construct; identical to SEQ ID NO: 8882
  source 1..80: mol_type = other DNA

SEQ ID NO: 54832 - DNA, 80 bp, synthetic construct; identical to SEQ ID NO: 19872
  source 1..80: mol_type = other DNA

SEQ ID NO: 54833 - DNA, 80 bp, synthetic construct; identical to SEQ ID NO: 19873
  source 1..80: mol_type = other DNA

SEQ ID NO: 54834 - DNA, 80 bp, synthetic construct; identical to SEQ ID NO: 8883
  source 1..80: mol_type = other DNA

SEQ ID NO: 54835 - DNA, 80 bp, synthetic construct; identical to SEQ ID NO: 19875
  source 1..80: mol_type = other DNA

SEQ ID NO: 54836 - DNA, 80 bp, synthetic construct; identical to SEQ ID NO: 19876
  source 1..80: mol_type = other DNA

SEQ ID NO: 54837 - DNA, 80 bp, synthetic construct; identical to SEQ ID NO: 19877
  source 1..80: mol_type = other DNA

SEQ ID NO: 54838 - DNA, 80 bp, synthetic construct; identical to SEQ ID NO: 8884
  source 1..80: mol_type = other DNA

SEQ ID NO: 54839 - DNA, 80 bp, synthetic construct; identical to SEQ ID NO: 19879
  source 1..80: mol_type = other DNA

SEQ ID NO: 54840 - DNA, 80 bp, synthetic construct; identical to SEQ ID NO: 19880
  source 1..80: mol_type = other DNA

SEQ ID NO: 54841 - DNA, 80 bp, synthetic construct; identical to SEQ ID NO: 19881
  source 1..80: mol_type = other DNA

SEQ ID NO: 54842 - DNA, 80 bp, synthetic construct; identical to SEQ ID NO: 19882
  source 1..80: mol_type = other DNA

SEQ ID NO: 54843 - DNA, 80 bp, synthetic construct; identical to SEQ ID NO: 19883
  source 1..80: mol_type = other DNA

SEQ ID NO: 54844 - DNA, 80 bp, synthetic construct; identical to SEQ ID NO: 8885
  source 1..80: mol_type = other DNA

SEQ ID NO: 54845 - DNA, 80 bp, synthetic construct; identical to SEQ ID NO: 19885
  source 1..80: mol_type = other DNA

SEQ ID NO: 54846 - DNA, 80 bp, synthetic construct; identical to SEQ ID NO: 19886
  source 1..80: mol_type = other DNA

SEQ ID NO: 54847 - DNA, 80 bp, synthetic construct; identical to SEQ ID NO: 8886
  source 1..80: mol_type = other DNA

SEQ ID NO: 54848 - DNA, 80 bp, synthetic construct; identical to SEQ ID NO: 19888
  source 1..80: mol_type = other DNA

SEQ ID NO: 54849 - DNA, 80 bp, synthetic construct; identical to SEQ ID NO: 19889
  source 1..80: mol_type = other DNA

SEQ ID NO: 54850 - DNA, 80 bp, synthetic construct; identical to SEQ ID NO: 19890
  source 1..80: mol_type = other DNA

SEQ ID NO: 54851 - DNA, 80 bp, synthetic construct; identical to SEQ ID NO: 8887
  source 1..80: mol_type = other DNA

SEQ ID NO: 54852 - DNA, 80 bp, synthetic construct; identical to SEQ ID NO: 19892
  source 1..80: mol_type = other DNA

SEQ ID NO: 54853 - DNA, 80 bp, synthetic construct; identical to SEQ ID NO: 19893
  source 1..80: mol_type = other DNA

SEQ ID NO: 54854 - DNA, 80 bp, synthetic construct; identical to SEQ ID NO: 19894
  source 1..80: mol_type = other DNA

SEQ ID NO: 54855 - DNA, 80 bp, synthetic construct; identical to SEQ ID NO: 8888
  source 1..80: mol_type = other DNA

SEQ ID NO: 54856 - DNA, 80 bp, synthetic construct; identical to SEQ ID NO: 19896
  source 1..80: mol_type = other DNA

SEQ ID NO: 54857 - DNA, 80 bp, synthetic construct; identical to SEQ ID NO: 19897
  source 1..80: mol_type = other DNA

SEQ ID NO: 54858 - DNA, 80 bp, synthetic construct; identical to SEQ ID NO: 19898
  source 1..80: mol_type = other DNA

SEQ ID NO: 54859 - DNA, 80 bp, synthetic construct; identical to SEQ ID NO: 8889
  source 1..80: mol_type = other DNA

SEQ ID NO: 54860 - DNA, 80 bp, synthetic construct; identical to SEQ ID NO: 19900
  source 1..80: mol_type = other DNA

SEQ ID NO: 54861 - DNA, 80 bp, synthetic construct; identical to SEQ ID NO: 19901
  source 1..80: mol_type = other DNA

SEQ ID NO: 54862 - DNA, 80 bp, synthetic construct; identical to SEQ ID NO: 19902
  source 1..80: mol_type = other DNA

SEQ ID NO: 54863 - DNA, 80 bp, synthetic construct; identical to SEQ ID NO: 8890
  source 1..80: mol_type = other DNA

SEQ ID NO: 54864 - DNA, 80 bp, synthetic construct; identical to SEQ ID NO: 19904
  source 1..80: mol_type = other DNA

SEQ ID NO: 54865 - DNA, 80 bp, synthetic construct; identical to SEQ ID NO: 19905
  source 1..80: mol_type = other DNA

SEQ ID NO: 54866 - DNA, 80 bp, synthetic construct; identical to SEQ ID NO: 19906
  source 1..80: mol_type = other DNA

SEQ ID NO: 54867 - DNA, 80 bp, synthetic construct; identical to SEQ ID NO: 8891
  source 1..80: mol_type = other DNA

SEQ ID NO: 54868 - DNA, 80 bp, synthetic construct; identical to SEQ ID NO: 19909
  source 1..80: mol_type = other DNA

SEQ ID NO: 54869 - DNA, 80 bp, synthetic construct; identical to SEQ ID NO: 19910
  source 1..80: mol_type = other DNA

SEQ ID NO: 54870 - DNA, 80 bp, synthetic construct; identical to SEQ ID NO: 8892
  source 1..80: mol_type = other DNA

SEQ ID NO: 54871 - DNA, 80 bp, synthetic construct; identical to SEQ ID NO: 19912
  source 1..80: mol_type = other DNA

SEQ ID NO: 54872 - DNA, 80 bp, synthetic construct; identical to SEQ ID NO: 19913
  source 1..80: mol_type = other DNA

SEQ ID NO: 54873 - DNA, 80 bp, synthetic construct; identical to SEQ ID NO: 19914
  source 1..80: mol_type = other DNA

SEQ ID NO: 54874 - DNA, 80 bp, synthetic construct; identical to SEQ ID NO: 19915
  source 1..80: mol_type = other DNA

SEQ ID NO: 54875 - DNA, 80 bp, synthetic construct; identical to SEQ ID NO: 8893
  source 1..80: mol_type = other DNA

SEQ ID NO: 54876 - DNA, 80 bp, synthetic construct; identical to SEQ ID NO: 19917
  source 1..80: mol_type = other DNA

SEQ ID NO: 54877 - DNA, 80 bp, synthetic construct; identical to SEQ ID NO: 19918
  source 1..80: mol_type = other DNA

SEQ ID NO: 54878 - DNA, 80 bp, synthetic construct; identical to SEQ ID NO: 8894
  source 1..80: mol_type = other DNA

SEQ ID NO: 54879 - DNA, 80 bp, synthetic construct; identical to SEQ ID NO: 19920
  source 1..80: mol_type = other DNA

SEQ ID NO: 54880 - DNA, 80 bp, synthetic construct; identical to SEQ ID NO: 19921
  source 1..80: mol_type = other DNA

SEQ ID NO: 54881 - DNA, 80 bp, synthetic construct; identical to SEQ ID NO: 19922
  source 1..80: mol_type = other DNA

SEQ ID NO: 54882 - DNA, 80 bp, synthetic construct; identical to SEQ ID NO: 8895
  source 1..80: mol_type = other DNA

SEQ ID NO: 54883 - DNA, 80 bp, synthetic construct; identical to SEQ ID NO: 19924
  source 1..80: mol_type = other DNA

SEQ ID NO: 54884 - DNA, 80 bp, synthetic construct; identical to SEQ ID NO: 19925
  source 1..80: mol_type = other DNA

SEQ ID NO: 54885 - DNA, 80 bp, synthetic construct; identical to SEQ ID NO: 19926
  source 1..80: mol_type = other DNA

SEQ ID NO: 54886 - DNA, 80 bp, synthetic construct; identical to SEQ ID NO: 8896
  source 1..80: mol_type = other DNA

SEQ ID NO: 54887 - DNA, 80 bp, synthetic construct; identical to SEQ ID NO: 19928
  source 1..80: mol_type = other DNA

SEQ ID NO: 54888 - DNA, 80 bp, synthetic construct; identical to SEQ ID NO: 19929
  source 1..80: mol_type = other DNA

SEQ ID NO: 54889 - DNA, 80 bp, synthetic construct; identical to SEQ ID NO: 19930
  source 1..80: mol_type = other DNA

SEQ ID NO: 54890 - DNA, 80 bp, synthetic construct; identical to SEQ ID NO: 19931
  source 1..80: mol_type = other DNA

SEQ ID NO: 54891 - DNA, 80 bp, synthetic construct; identical to SEQ ID NO: 8897
  source 1..80: mol_type = other DNA

SEQ ID NO: 54892 - DNA, 80 bp, synthetic construct; identical to SEQ ID NO: 19933
  source 1..80: mol_type = other DNA

SEQ ID NO: 54893 - DNA, 80 bp, synthetic construct; identical to SEQ ID NO: 19934
  source 1..80: mol_type = other DNA

SEQ ID NO: 54894 - DNA, 80 bp, synthetic construct; identical to SEQ ID NO: 8898
  source 1..80: mol_type = other DNA

SEQ ID NO: 54895 - DNA, 80 bp, synthetic construct; identical to SEQ ID NO: 19936
  source 1..80: mol_type = other DNA

SEQ ID NO: 54896 - DNA, 80 bp, synthetic construct; identical to SEQ ID NO: 19937
  source 1..80: mol_type = other DNA

SEQ ID NO: 54897 - DNA, 80 bp, synthetic construct; identical to SEQ ID NO: 19939
  source 1..80: mol_type = other DNA

SEQ ID NO: 54898 - DNA, 80 bp, synthetic construct; identical to SEQ ID NO: 8899
  source 1..80: mol_type = other DNA

SEQ ID NO: 54899 - DNA, 80 bp, synthetic construct; identical to SEQ ID NO: 19941
  source 1..80: mol_type = other DNA

SEQ ID NO: 54900 - DNA, 80 bp, synthetic construct; identical to SEQ ID NO: 19942
  source 1..80: mol_type = other DNA

SEQ ID NO: 54901 - DNA, 80 bp, synthetic construct; identical to SEQ ID NO: 19943
  source 1..80: mol_type = other DNA

SEQ ID NO: 54902 - DNA, 80 bp, synthetic construct; identical to SEQ ID NO: 8900
  source 1..80: mol_type = other DNA

SEQ ID NO: 54903 - DNA, 80 bp, synthetic construct; identical to SEQ ID NO: 19945
  source 1..80: mol_type = other DNA

SEQ ID NO: 54904 - DNA, 80 bp, synthetic construct; identical to SEQ ID NO: 19946
  source 1..80: mol_type = other DNA

SEQ ID NO: 54905 - DNA, 80 bp, synthetic construct; identical to SEQ ID NO: 8901
  source 1..80: mol_type = other DNA

SEQ ID NO: 54906 - DNA, 80 bp, synthetic construct; identical to SEQ ID NO: 19949
  source 1..80: mol_type = other DNA

SEQ ID NO: 54907 - DNA, 80 bp, synthetic construct; identical to SEQ ID NO: 19950
  source 1..80: mol_type = other DNA

SEQ ID NO: 54908 - DNA, 80 bp, synthetic construct; identical to SEQ ID NO: 8902
  source 1..80: mol_type = other DNA

SEQ ID NO: 54909 - DNA, 80 bp, synthetic construct; identical to SEQ ID NO: 19952
  source 1..80: mol_type = other DNA

SEQ ID NO: 54910 - DNA, 80 bp, synthetic construct; identical to SEQ ID NO: 19953
  source 1..80: mol_type = other DNA

SEQ ID NO: 54911 - DNA, 80 bp, synthetic construct; identical to SEQ ID NO: 19954
  source 1..80: mol_type = other DNA

SEQ ID NO: 54912 - DNA, 80 bp, synthetic construct; identical to SEQ ID NO: 8903
  source 1..80: mol_type = other DNA

SEQ ID NO: 54913 - DNA, 80 bp, synthetic construct; identical to SEQ ID NO: 19956
  source 1..80: mol_type = other DNA

SEQ ID NO: 54914 - DNA, 80 bp, synthetic construct; identical to SEQ ID NO: 19957
  source 1..80: mol_type = other DNA

SEQ ID NO: 54915 - DNA, 80 bp, synthetic construct; identical to SEQ ID NO: 19958
  source 1..80: mol_type = other DNA

SEQ ID NO: 54916 - DNA, 80 bp, synthetic construct; identical to SEQ ID NO: 19959
  source 1..80: mol_type = other DNA

SEQ ID NO: 54917 - DNA, 80 bp, synthetic construct; identical to SEQ ID NO: 8904
  source 1..80: mol_type = other DNA

SEQ ID NO: 54918 - DNA, 80 bp, synthetic construct; identical to SEQ ID NO: 19961
  source 1..80: mol_type = other DNA

SEQ ID NO: 54919 - DNA, 80 bp, synthetic construct; identical to SEQ ID NO: 19962
  source 1..80: mol_type = other DNA

SEQ ID NO: 54920 - DNA, 80 bp, synthetic construct; identical to SEQ ID NO: 8905
  source 1..80: mol_type = other DNA

SEQ ID NO: 54921 - DNA, 80 bp, synthetic construct; identical to SEQ ID NO: 19964
  source 1..80: mol_type = other DNA

SEQ ID NO: 54922 - DNA, 80 bp, synthetic construct; identical to SEQ ID NO: 19965
  source 1..80: mol_type = other DNA

SEQ ID NO: 54923 - DNA, 80 bp, synthetic construct; identical to SEQ ID NO: 19966
  source 1..80: mol_type = other DNA

SEQ ID NO: 54924 - DNA, 80 bp, synthetic construct; identical to SEQ ID NO: 19967
  source 1..80: mol_type = other DNA

SEQ ID NO: 54925 - DNA, 80 bp, synthetic construct; identical to SEQ ID NO: 8906
  source 1..80: mol_type = other DNA

SEQ ID NO: 54926 - DNA, 80 bp, synthetic construct; identical to SEQ ID NO: 19969
  source 1..80: mol_type = other DNA

SEQ ID NO: 54927 - DNA, 80 bp, synthetic construct; identical to SEQ ID NO: 19970
  source 1..80: mol_type = other DNA

SEQ ID NO: 54928 - DNA, 80 bp, synthetic construct; identical to SEQ ID NO: 19971
  source 1..80: mol_type = other DNA

SEQ ID NO: 54929 - DNA, 80 bp, synthetic construct; identical to SEQ ID NO: 8907
  source 1..80: mol_type = other DNA

SEQ ID NO: 54930 - DNA, 80 bp, synthetic construct; identical to SEQ ID NO: 19973
  source 1..80: mol_type = other DNA

SEQ ID NO: 54931 - DNA, 80 bp, synthetic construct; identical to SEQ ID NO: 19974
  source 1..80: mol_type = other DNA

SEQ ID NO: 54932 - DNA, 80 bp, synthetic construct; identical to SEQ ID NO: 8908
  source 1..80: mol_type = other DNA

SEQ ID NO: 54933 - DNA, 80 bp, synthetic construct; identical to SEQ ID NO: 19976
  source 1..80: mol_type = other DNA

SEQ ID NO: 54934 - DNA, 80 bp, synthetic construct; identical to SEQ ID NO: 19977
  source 1..80: mol_type = other DNA

SEQ ID NO: 54935 - DNA, 80 bp, synthetic construct; identical to SEQ ID NO: 19978
  source 1..80: mol_type = other DNA

SEQ ID NO: 54936 - DNA, 80 bp, synthetic construct; identical to SEQ ID NO: 8909
  source 1..80: mol_type = other DNA

SEQ ID NO: 54937 - DNA, 80 bp, synthetic construct; identical to SEQ ID NO: 19980
  source 1..80: mol_type = other DNA

SEQ ID NO: 54938 - DNA, 80 bp, synthetic construct; identical to SEQ ID NO: 19981
  source 1..80: mol_type = other DNA

SEQ ID NO: 54939 - DNA, 80 bp, synthetic construct; identical to SEQ ID NO: 19982
  source 1..80: mol_type = other DNA

SEQ ID NO: 54940 - DNA, 80 bp, synthetic construct; identical to SEQ ID NO: 8910
  source 1..80: mol_type = other DNA

SEQ ID NO: 54941 - DNA, 80 bp, synthetic construct; identical to SEQ ID NO: 19984
  source 1..80: mol_type = other DNA

SEQ ID NO: 54942 - DNA, 80 bp, synthetic construct; identical to SEQ ID NO: 19986
  source 1..80: mol_type = other DNA

SEQ ID NO: 54943 - DNA, 80 bp, synthetic construct; identical to SEQ ID NO: 8911
  source 1..80: mol_type = other DNA

SEQ ID NO: 54944 - DNA, 80 bp, synthetic construct; identical to SEQ ID NO: 19988
  source 1..80: mol_type = other DNA

SEQ ID NO: 54945 - DNA, 80 bp, synthetic construct; identical to SEQ ID NO: 19989
  source 1..80: mol_type = other DNA

SEQ ID NO: 54946 - DNA, 80 bp, synthetic construct; identical to SEQ ID NO: 19990
  source 1..80: mol_type = other DNA

SEQ ID NO: 54947 - DNA, 80 bp, synthetic construct; identical to SEQ ID NO: 8912
  source 1..80: mol_type = other DNA

SEQ ID NO: 54948 - DNA, 80 bp, synthetic construct; identical to SEQ ID NO: 19993
  source 1..80: mol_type = other DNA

SEQ ID NO: 54949 - DNA, 80 bp, synthetic construct; identical to SEQ ID NO: 19994
  source 1..80: mol_type = other DNA

SEQ ID NO: 54950 - DNA, 80 bp, synthetic construct; identical to SEQ ID NO: 19995
  source 1..80: mol_type = other DNA

SEQ ID NO: 54951 - DNA, 80 bp, synthetic construct; identical to SEQ ID NO: 8913
  source 1..80: mol_type = other DNA

SEQ ID NO: 54952 - DNA, 80 bp, synthetic construct; identical to SEQ ID NO: 19997
  source 1..80: mol_type = other DNA

SEQ ID NO: 54953 - DNA, 80 bp, synthetic construct; identical to SEQ ID NO: 19998
  source 1..80: mol_type = other DNA

SEQ ID NO: 54954 - DNA, 80 bp, synthetic construct; identical to SEQ ID NO: 19999
  source 1..80: mol_type = other DNA

SEQ ID NO: 54955 - DNA, 80 bp, synthetic construct; identical to SEQ ID NO: 8914
  source 1..80: mol_type = other DNA

SEQ ID NO: 54956 - DNA, 80 bp, synthetic construct; identical to SEQ ID NO: 20001
  source 1..80: mol_type = other DNA

SEQ ID NO: 54957 - DNA, 80 bp, synthetic construct; identical to SEQ ID NO: 20002
  source 1..80: mol_type = other DNA

SEQ ID NO: 54958 - DNA, 80 bp, synthetic construct; identical to SEQ ID NO: 8915
  source 1..80: mol_type = other DNA

SEQ ID NO: 54959 - DNA, 80 bp, synthetic construct; identical to SEQ ID NO: 20004
  source 1..80: mol_type = other DNA

SEQ ID NO: 54960 - DNA, 80 bp, synthetic construct; identical to SEQ ID NO: 20005
  source 1..80: mol_type = other DNA

SEQ ID NO: 54961 - DNA, 80 bp, synthetic construct; identical to SEQ ID NO: 20006
  source 1..80: mol_type = other DNA

SEQ ID NO: 54962 - DNA, 80 bp, synthetic construct; identical to SEQ ID NO: 20007
  source 1..80: mol_type = other DNA

SEQ ID NO: 54963 - DNA, 80 bp, synthetic construct; identical to SEQ ID NO: 8916
  source 1..80: mol_type = other DNA

SEQ ID NO: 54964 - DNA, 80 bp, synthetic construct; identical to SEQ ID NO: 20009
  source 1..80: mol_type = other DNA

SEQ ID NO: 54965 - DNA, 80 bp, synthetic construct; identical to SEQ ID NO: 20010
  source 1..80: mol_type = other DNA

SEQ ID NO: 54966 - DNA, 80 bp, synthetic construct; identical to SEQ ID NO: 20011
  source 1..80: mol_type = other DNA

SEQ ID NO: 54967 - DNA, 80 bp, synthetic construct; identical to SEQ ID NO: 8917
  source 1..80: mol_type = other DNA

SEQ ID NO: 54968 - DNA, 80 bp, synthetic construct; identical to SEQ ID NO: 20013
  source 1..80: mol_type = other DNA

SEQ ID NO: 54969 - DNA, 80 bp, synthetic construct; identical to SEQ ID NO: 20014
  source 1..80: mol_type = other DNA

SEQ ID NO: 54970 - DNA, 80 bp, synthetic construct; identical to SEQ ID NO: 20015
  source 1..80: mol_type = other DNA

SEQ ID NO: 54971 - DNA, 80 bp, synthetic construct; identical to SEQ ID NO: 8918
  source 1..80: mol_type = other DNA

SEQ ID NO: 54972 - DNA, 80 bp, synthetic construct; identical to SEQ ID NO: 20017
  source 1..80: mol_type = other DNA

SEQ ID NO: 54973 - DNA, 80 bp, synthetic construct; identical to SEQ ID NO: 20018
  source 1..80: mol_type = other DNA

SEQ ID NO: 54974 - DNA, 80 bp, synthetic construct; identical to SEQ ID NO: 20019
  source 1..80: mol_type = other DNA

SEQ ID NO: 54975 - DNA, 80 bp, synthetic construct; identical to SEQ ID NO: 8919
  source 1..80: mol_type = other DNA

SEQ ID NO: 54976 - DNA, 80 bp, synthetic construct; identical to SEQ ID NO: 20021
  source 1..80: mol_type = other DNA

SEQ ID NO: 54977 - DNA, 80 bp, synthetic construct; identical to SEQ ID NO: 20022
  source 1..80: mol_type = other DNA

SEQ ID NO: 54978 - DNA, 80 bp, synthetic construct; identical to SEQ ID NO: 20023
  source 1..80: mol_type = other DNA

SEQ ID NO: 54979 - DNA, 80 bp, synthetic construct; identical to SEQ ID NO: 8920
  source 1..80: mol_type = other DNA

SEQ ID NO: 54980 - DNA, 80 bp, synthetic construct; identical to SEQ ID NO: 20026
  source 1..80: mol_type = other DNA

SEQ ID NO: 54981 - DNA, 80 bp, synthetic construct; identical to SEQ ID NO: 20027
  source 1..80: mol_type = other DNA

SEQ ID NO: 54982 - DNA, 80 bp, synthetic construct; identical to SEQ ID NO: 8921
  source 1..80: mol_type = other DNA

SEQ ID NO: 54983 - DNA, 80 bp, synthetic construct; identical to SEQ ID NO: 20029
  source 1..80: mol_type = other DNA

SEQ ID NO: 54984 - DNA, 80 bp, synthetic construct; identical to SEQ ID NO: 20030
  source 1..80: mol_type = other DNA

SEQ ID NO: 54985 - DNA, 80 bp, synthetic construct; identical to SEQ ID NO: 20031
  source 1..80: mol_type = other DNA

SEQ ID NO: 54986 - DNA, 80 bp, synthetic construct; identical to SEQ ID NO: 20032
  source 1..80: mol_type = other DNA

SEQ ID NO: 54987 - DNA, 80 bp, synthetic construct; identical to SEQ ID NO: 8922
  source 1..80: mol_type = other DNA

SEQ ID NO: 54988 - DNA, 80 bp, synthetic construct; identical to SEQ ID NO: 20034
  source 1..80: mol_type = other DNA

SEQ ID NO: 54989 - DNA, 80 bp, synthetic construct; identical to SEQ ID NO: 8923
  source 1..80: mol_type = other DNA

SEQ ID NO: 54990 - DNA, 80 bp, synthetic construct; identical to SEQ ID NO: 20037
  source 1..80: mol_type = other DNA

SEQ ID NO: 54991 - DNA, 80 bp, synthetic construct; identical to SEQ ID NO: 20038
  source 1..80: mol_type = other DNA

SEQ ID NO: 54992 - DNA, 80 bp, synthetic construct; identical to SEQ ID NO: 20039
  source 1..80: mol_type = other DNA

SEQ ID NO: 54993 - DNA, 80 bp, synthetic construct; identical to SEQ ID NO: 20040
  source 1..80: mol_type = other DNA

SEQ ID NO: 54994 - DNA, 80 bp, synthetic construct; identical to SEQ ID NO: 8924
  source 1..80: mol_type = other DNA

SEQ ID NO: 54995 - DNA, 80 bp, synthetic construct; identical to SEQ ID NO: 20042
  source 1..80: mol_type = other DNA

SEQ ID NO: 54996 - DNA, 80 bp, synthetic construct; identical to SEQ ID NO: 20043
  source 1..80: mol_type = other DNA

SEQ ID NO: 54997 - DNA, 80 bp, synthetic construct; identical to SEQ ID NO: 20044
  source 1..80: mol_type = other DNA

SEQ ID NO: 54998 - DNA, 80 bp, synthetic construct; identical to SEQ ID NO: 8925
  source 1..80: mol_type = other DNA

SEQ ID NO: 54999 - DNA, 80 bp, synthetic construct; identical to SEQ ID NO: 20046
  source 1..80: mol_type = other DNA

SEQ ID NO: 55000 - DNA, 80 bp, synthetic construct; identical to SEQ ID NO: 20047
  source 1..80: mol_type = other DNA

SEQ ID NO: 55001 - DNA, 80 bp, synthetic construct; identical to SEQ ID NO: 20048
  source 1..80: mol_type = other DNA

SEQ ID NO: 55002 - DNA, 80 bp, synthetic construct; identical to SEQ ID NO: 8926
  source 1..80: mol_type = other DNA

SEQ ID NO: 55003 - DNA, 80 bp, synthetic construct; identical to SEQ ID NO: 8927
  source 1..80: mol_type = other DNA

SEQ ID NO: 55004 - DNA, 80 bp, synthetic construct; identical to SEQ ID NO: 20055
  source 1..80: mol_type = other DNA

SEQ ID NO: 55005 - DNA, 80 bp, synthetic construct; identical to SEQ ID NO: 20057
  source 1..80: mol_type = other DNA

SEQ ID NO: 55006 - DNA, 80 bp, synthetic construct; identical to SEQ ID NO: 8928
  source 1..80: mol_type = other DNA

SEQ ID NO: 55007 - DNA, 80 bp, synthetic construct; identical to SEQ ID NO: 20059
  source 1..80: mol_type = other DNA

SEQ ID NO: 55008 - DNA, 80 bp, synthetic construct; identical to SEQ ID NO: 20060
  source 1..80: mol_type = other DNA

SEQ ID NO: 55009 - DNA, 80 bp, synthetic construct; identical to SEQ ID NO: 20061
  source 1..80: mol_type = other DNA

SEQ ID NO: 55010 - DNA, 80 bp, synthetic construct; identical to SEQ ID NO: 8929
  source 1..80: mol_type = other DNA

SEQ ID NO: 55011 - DNA, 80 bp, synthetic construct; identical to SEQ ID NO: 20063
  source 1..80: mol_type = other DNA

SEQ ID NO: 55012 - DNA, 80 bp, synthetic construct; identical to SEQ ID NO: 20064
  source 1..80: mol_type = other DNA

SEQ ID NO: 55013 - DNA, 80 bp, synthetic construct; identical to SEQ ID NO: 8930
  source 1..80: mol_type = other DNA

SEQ ID NO: 55014 - DNA, 80 bp, synthetic construct; identical to SEQ ID NO: 20067
  source 1..80: mol_type = other DNA

SEQ ID NO: 55015 - DNA, 80 bp, synthetic construct; identical to SEQ ID NO: 20068
  source 1..80: mol_type = other DNA

SEQ ID NO: 55016 - DNA, 80 bp, synthetic construct; identical to SEQ ID NO: 8931
  source 1..80: mol_type = other DNA

SEQ ID NO: 55017 - DNA, 80 bp, synthetic construct; identical to SEQ ID NO: 20070
  source 1..80: mol_type = other DNA

SEQ ID NO: 55018 - DNA, 80 bp, synthetic construct; identical to SEQ ID NO: 20071
  source 1..80: mol_type = other DNA

SEQ ID NO: 55019 - DNA, 80 bp, synthetic construct; identical to SEQ ID NO: 20072
  source 1..80: mol_type = other DNA

SEQ ID NO: 55020 - DNA, 80 bp, synthetic construct; identical to SEQ ID NO: 20073
  source 1..80: mol_type = other DNA

SEQ ID NO: 55021 - DNA, 80 bp, synthetic construct; identical to SEQ ID NO: 8932
  source 1..80: mol_type = other DNA

SEQ ID NO: 55022 - DNA, 80 bp, synthetic construct; identical to SEQ ID NO: 20075
  source 1..80: mol_type = other DNA

SEQ ID NO: 55023 - DNA, 80 bp, synthetic construct; identical to SEQ ID NO: 20076
  source 1..80: mol_type = other DNA

SEQ ID NO: 55024 - DNA, 80 bp, synthetic construct; identical to SEQ ID NO: 20077
  source 1..80: mol_type = other DNA

SEQ ID NO: 55025 - DNA, 80 bp, synthetic construct; identical to SEQ ID NO: 8933
  source 1..80: mol_type = other DNA

SEQ ID NO: 55026 - DNA, 80 bp, synthetic construct; identical to SEQ ID NO: 20079
  source 1..80: mol_type = other DNA

SEQ ID NO: 55027 - DNA, 80 bp, synthetic construct; identical to SEQ ID NO: 20080
  source 1..80: mol_type = other DNA

SEQ ID NO: 55028 - DNA, 80 bp, synthetic construct; identical to SEQ ID NO: 20081
  source 1..80: mol_type = other DNA

SEQ ID NO: 55029 - DNA, 80 bp, synthetic construct; identical to SEQ ID NO: 8934
  source 1..80: mol_type = other DNA

SEQ ID NO: 55030 - DNA, 80 bp, synthetic construct; identical to SEQ ID NO: 20083
  source 1..80: mol_type = other DNA

SEQ ID NO: 55031 - DNA, 80 bp, synthetic construct; identical to SEQ ID NO: 20084
  source 1..80: mol_type = other DNA

SEQ ID NO: 55032 - DNA, 80 bp, synthetic construct; identical to SEQ ID NO: 8935
  source 1..80: mol_type = other DNA

SEQ ID NO: 55033 - DNA, 80 bp, synthetic construct; identical to SEQ ID NO: 20086
  source 1..80: mol_type = other DNA

SEQ ID NO: 55034 - DNA, 80 bp, synthetic construct; identical to SEQ ID NO: 20087
  source 1..80: mol_type = other DNA

SEQ ID NO: 55035 - DNA, 80 bp, synthetic construct; identical to SEQ ID NO: 20088
  source 1..80: mol_type = other DNA

SEQ ID NO: 55036 - DNA, 80 bp, synthetic construct; identical to SEQ ID NO: 8936
  source 1..80: mol_type = other DNA

SEQ ID NO: 55037 - DNA, 80 bp, synthetic construct; identical to SEQ ID NO: 20090
  source 1..80: mol_type = other DNA

SEQ ID NO: 55038 - DNA, 80 bp, synthetic construct; identical to SEQ ID NO: 20091
  source 1..80: mol_type = other DNA

SEQ ID NO: 55039 - DNA, 80 bp, synthetic construct; identical to SEQ ID NO: 20092
  source 1..80: mol_type = other DNA

SEQ ID NO: 55040 - DNA, 80 bp, synthetic construct; identical to SEQ ID NO: 8937
  source 1..80: mol_type = other DNA

SEQ ID NO: 55041 - DNA, 80 bp, synthetic construct; identical to SEQ ID NO: 20094
  source 1..80: mol_type = other DNA

SEQ ID NO: 55042 - DNA, 80 bp, synthetic construct; identical to SEQ ID NO: 20095
  source 1..80: mol_type = other DNA

SEQ ID NO: 55043 - DNA, 80 bp, synthetic construct; identical to SEQ ID NO: 20096
  source 1..80: mol_type = other DNA

SEQ ID NO: 55044 - DNA, 80 bp, synthetic construct; identical to SEQ ID NO: 20097
  source 1..80: mol_type = other DNA

SEQ ID NO: 55045 - DNA, 80 bp, synthetic construct; identical to SEQ ID NO: 8938
  source 1..80: mol_type = other DNA

SEQ ID NO: 55046 - DNA, 80 bp, synthetic construct; identical to SEQ ID NO: 20099
  source 1..80: mol_type = other DNA

SEQ ID NO: 55047 - DNA, 80 bp, synthetic construct; identical to SEQ ID NO: 20100
  source 1..80: mol_type = other DNA

SEQ ID NO: 55048 - DNA, 80 bp, synthetic construct; identical to SEQ ID NO: 20101
  source 1..80: mol_type = other DNA

SEQ ID NO: 55049 - DNA, 80 bp, synthetic construct; identical to SEQ ID NO: 8939
  source 1..80: mol_type = other DNA

SEQ ID NO: 55050 - DNA, 80 bp, synthetic construct; identical to SEQ ID NO: 20103
  source 1..80: mol_type = other DNA

SEQ ID NO: 55051 - DNA, 80 bp, synthetic construct; identical to SEQ ID NO: 20104
  source 1..80: mol_type = other DNA

SEQ ID NO: 55052 - DNA, 80 bp, synthetic construct; identical to SEQ ID NO: 20105
  source 1..80: mol_type = other DNA

SEQ ID NO: 55053 - DNA, 80 bp, synthetic construct; identical to SEQ ID NO: 8940
  source 1..80: mol_type = other DNA

SEQ ID NO: 55054 - DNA, 80 bp, synthetic construct; identical to SEQ ID NO: 20107
  source 1..80: mol_type = other DNA

SEQ ID NO: 55055 - DNA, 80 bp, synthetic construct; identical to SEQ ID NO: 20108
  source 1..80: mol_type = other DNA

SEQ ID NO: 55056 - DNA, 80 bp, synthetic construct; identical to SEQ ID NO: 8941
  source 1..80: mol_type = other DNA

SEQ ID NO: 55057 - DNA, 80 bp, synthetic construct; identical to SEQ ID NO: 20110
  source 1..80: mol_type = other DNA

SEQ ID NO: 55058 - DNA, 80 bp, synthetic construct; identical to SEQ ID NO: 20111
  source 1..80: mol_type = other DNA

SEQ ID NO: 55059 - DNA, 80 bp, synthetic construct; identical to SEQ ID NO: 20112
  source 1..80: mol_type = other DNA

SEQ ID NO: 55060 - DNA, 80 bp, synthetic construct; identical to SEQ ID NO: 8942
  source 1..80: mol_type = other DNA

SEQ ID NO: 55061 - DNA, 80 bp, synthetic construct; identical to SEQ ID NO: 20114
  source 1..80: mol_type = other DNA

SEQ ID NO: 55062 - DNA, 80 bp, synthetic construct; identical to SEQ ID NO: 20115
  source 1..80: mol_type = other DNA

SEQ ID NO: 55063 - DNA, 80 bp, synthetic construct; identical to SEQ ID NO: 20116
  source 1..80: mol_type = other DNA

SEQ ID NO: 55064 - DNA, 80 bp, synthetic construct; identical to SEQ ID NO: 20117
  source 1..80: mol_type = other DNA

SEQ ID NO: 55065 - DNA, 80 bp, synthetic construct; identical to SEQ ID NO: 8943
  source 1..80: mol_type = other DNA

SEQ ID NO: 55066 - DNA, 80 bp, synthetic construct; identical to SEQ ID NO: 20119
  source 1..80: mol_type = other DNA

SEQ ID NO: 55067 - DNA, 80 bp, synthetic construct; identical to SEQ ID NO: 20120
  source 1..80: mol_type = other DNA

SEQ ID NO: 55068 - DNA, 80 bp, synthetic construct; identical to SEQ ID NO: 8944
  source 1..80: mol_type = other DNA

SEQ ID NO: 55069 - DNA, 80 bp, synthetic construct; identical to SEQ ID NO: 20123
  source 1..80: mol_type = other DNA

SEQ ID NO: 55070 - DNA, 80 bp, synthetic construct; identical to SEQ ID NO: 20124
  source 1..80: mol_type = other DNA

SEQ ID NO: 55071 - DNA, 80 bp, synthetic construct; identical to SEQ ID NO: 20125
  source 1..80: mol_type = other DNA

SEQ ID NO: 55072 - DNA, 80 bp, synthetic construct; identical to SEQ ID NO: 8945
  source 1..80: mol_type = other DNA

SEQ ID NO: 55073 - DNA, 80 bp, synthetic construct; identical to SEQ ID NO: 20127
  source 1..80: mol_type = other DNA

SEQ ID NO: 55074 - DNA, 80 bp, synthetic construct; identical to SEQ ID NO: 20128
  source 1..80: mol_type = other DNA

SEQ ID NO: 55075 - DNA, 80 bp, synthetic construct; identical to SEQ ID NO: 20129
  source 1..80: mol_type = other DNA

SEQ ID NO: 55076 - DNA, 80 bp, synthetic construct; identical to SEQ ID NO: 8946
  source 1..80: mol_type = other DNA

SEQ ID NO: 55077 - DNA, 80 bp, synthetic construct; identical to SEQ ID NO: 20131
  source 1..80: mol_type = other DNA

SEQ ID NO: 55078 - DNA, 80 bp, synthetic construct; identical to SEQ ID NO: 20132
  source 1..80: mol_type = other DNA

SEQ ID NO: 55079 - DNA, 80 bp, synthetic construct; identical to SEQ ID NO: 20133
  source 1..80: mol_type = other DNA

SEQ ID NO: 55080 - DNA, 80 bp, synthetic construct; identical to SEQ ID NO: 8947
  source 1..80: mol_type = other DNA

SEQ ID NO: 55081 - DNA, 80 bp, synthetic construct; identical to SEQ ID NO: 20135
  source 1..80: mol_type = other DNA

SEQ ID NO: 55082 - DNA, 80 bp, synthetic construct; identical to SEQ ID NO: 20136
  source 1..80: mol_type = other DNA

SEQ ID NO: 55083 - DNA, 80 bp, synthetic construct; identical to SEQ ID NO: 20137
  source 1..80: mol_type = other DNA

SEQ ID NO: 55084 - DNA, 80 bp, synthetic construct; identical to SEQ ID NO: 8948
  source 1..80: mol_type = other DNA

SEQ ID NO: 55085 - DNA, 80 bp, synthetic construct; identical to SEQ ID NO: 20139
  source 1..80: mol_type = other DNA

SEQ ID NO: 55086 - DNA, 80 bp, synthetic construct; identical to SEQ ID NO: 20140
  source 1..80: mol_type = other DNA

SEQ ID NO: 55087 - DNA, 80 bp, synthetic construct; identical to SEQ ID NO: 8949
  source 1..80: mol_type = other DNA

SEQ ID NO: 55088 - DNA, 80 bp, synthetic construct; identical to SEQ ID NO: 20142
  source 1..80: mol_type = other DNA

SEQ ID NO: 55089 - DNA, 80 bp, synthetic construct; identical to SEQ ID NO: 20143
  source 1..80: mol_type = other DNA

SEQ ID NO: 55090 - DNA, 80 bp, synthetic construct; identical to SEQ ID NO: 20144
  source 1..80: mol_type = other DNA

SEQ ID NO: 55091 - DNA, 80 bp, synthetic construct; identical to SEQ ID NO: 8950
  source 1..80: mol_type = other DNA

SEQ ID NO: 55092 - DNA, 80 bp, synthetic construct; identical to SEQ ID NO: 20146
  source 1..80: mol_type = other DNA

SEQ ID NO: 55093 - DNA, 80 bp, synthetic construct; identical to SEQ ID NO: 20147
  source 1..80: mol_type = other DNA

SEQ ID NO: 55094 - DNA, 80 bp, synthetic construct; identical to SEQ ID NO: 20148
  source 1..80: mol_type = other DNA

SEQ ID NO: 55095 - DNA, 80 bp, synthetic construct; identical to SEQ ID NO: 20149
  source 1..80: mol_type = other DNA

SEQ ID NO: 55096 - DNA, 80 bp, synthetic construct; identical to SEQ ID NO: 8951
  source 1..80: mol_type = other DNA

SEQ ID NO: 55097 - DNA, 80 bp, synthetic construct; identical to SEQ ID NO: 20151
  source 1..80: mol_type = other DNA

SEQ ID NO: 55098 - DNA, 80 bp, synthetic construct; identical to SEQ ID NO: 20152
  source 1..80: mol_type = other DNA

SEQ ID NO: 55099 - DNA, 80 bp, synthetic construct; identical to SEQ ID NO: 8952
  source 1..80: mol_type = other DNA

SEQ ID NO: 55100 - DNA, 80 bp, synthetic construct; identical to SEQ ID NO: 20154
  source 1..80: mol_type = other DNA

SEQ ID NO: 55101 - DNA, 80 bp, synthetic construct; identical to SEQ ID NO: 20155
  source 1..80: mol_type = other DNA

SEQ ID NO: 55102 - DNA, 80 bp, synthetic construct; identical to SEQ ID NO: 20156
  source 1..80: mol_type = other DNA

SEQ ID NO: 55103 - DNA, 80 bp, synthetic construct; identical to SEQ ID NO: 20157
  source 1..80: mol_type = other DNA

SEQ ID NO: 55104 - DNA, 80 bp, synthetic construct; identical to SEQ ID NO: 8953
  source 1..80: mol_type = other DNA

SEQ ID NO: 55105 - DNA, 80 bp, synthetic construct; identical to SEQ ID NO: 20159
  source 1..80: mol_type = other DNA

SEQ ID NO: 55106 - DNA, 80 bp, synthetic construct; identical to SEQ ID NO: 20160
  source 1..80: mol_type = other DNA

SEQ ID NO: 55107 - DNA, 80 bp, synthetic construct; identical to SEQ ID NO: 20161
  source 1..80: mol_type = other DNA

SEQ ID NO: 55108 - DNA, 80 bp, synthetic construct; identical to SEQ ID NO: 8954
  source 1..80: mol_type = other DNA

SEQ ID NO: 55109 - DNA, 80 bp, synthetic construct; identical to SEQ ID NO: 20163
  source 1..80: mol_type = other DNA

SEQ ID NO: 55110 - DNA, 80 bp, synthetic construct; identical to SEQ ID NO: 20164
  source 1..80: mol_type = other DNA

SEQ ID NO: 55111 - DNA, 80 bp, synthetic construct; identical to SEQ ID NO: 8955
  source 1..80: mol_type = other DNA

SEQ ID NO: 55112 - DNA, 80 bp, synthetic construct; identical to SEQ ID NO: 20166
  source 1..80: mol_type = other DNA

SEQ ID NO: 55113 - DNA, 80 bp, synthetic construct; identical to SEQ ID NO: 20167
  source 1..80: mol_type = other DNA

SEQ ID NO: 55114 - DNA, 80 bp, synthetic construct; identical to SEQ ID NO: 20168
  source 1..80: mol_type = other DNA

SEQ ID NO: 55115 - DNA, 80 bp, synthetic construct; identical to SEQ ID NO: 8956
  source 1..80: mol_type = other DNA

SEQ ID NO: 55116 - DNA, 80 bp, synthetic construct; identical to SEQ ID NO: 20170
  source 1..80: mol_type = other DNA

SEQ ID NO: 55117 - DNA, 80 bp, synthetic construct; identical to SEQ ID NO: 20171
  source 1..80: mol_type = other DNA

SEQ ID NO: 55118 - DNA, 80 bp, synthetic construct; identical to SEQ ID NO: 20172
  source 1..80: mol_type = other DNA

SEQ ID NO: 55119 - DNA, 80 bp, synthetic construct; identical to SEQ ID NO: 8957
  source 1..80: mol_type = other DNA

SEQ ID NO: 55120 - DNA, 80 bp, synthetic construct; identical to SEQ ID NO: 20174
  source 1..80: mol_type = other DNA

SEQ ID NO: 55121 - DNA, 80 bp, synthetic construct; identical to SEQ ID NO: 20175
  source 1..80: mol_type = other DNA

SEQ ID NO: 55122 - DNA, 80 bp, synthetic construct; identical to SEQ ID NO: 20176
  source 1..80: mol_type = other DNA

SEQ ID NO: 55123 - DNA, 80 bp, synthetic construct; identical to SEQ ID NO: 20177
  source 1..80: mol_type = other DNA

SEQ ID NO: 55124 - DNA, 80 bp, synthetic construct; identical to SEQ ID NO: 8958
  source 1..80: mol_type = other DNA

SEQ ID NO: 55125 - DNA, 80 bp, synthetic construct; identical to SEQ ID NO: 20179
  source 1..80: mol_type = other DNA

SEQ ID NO: 55126 - DNA, 80 bp, synthetic construct; identical to SEQ ID NO: 20180
  source 1..80: mol_type = other DNA

SEQ ID NO: 55127 - DNA, 80 bp, synthetic construct; identical to SEQ ID NO: 8959
  source 1..80: mol_type = other DNA

SEQ ID NO: 55128 - DNA, 80 bp, synthetic construct; identical to SEQ ID NO: 20182
  source 1..80: mol_type = other DNA

SEQ ID NO: 55129 - DNA, 80 bp, synthetic construct; identical to SEQ ID NO: 20183
  source 1..80: mol_type = other DNA

SEQ ID NO: 55130 - DNA, 80 bp, synthetic construct; identical to SEQ ID NO: 20184
  source 1..80: mol_type = other DNA

SEQ ID NO: 55131 - DNA, 80 bp, synthetic construct; identical to SEQ ID NO: 20185
  source 1..80: mol_type = other DNA

SEQ ID NO: 55132 - DNA, 80 bp, synthetic construct; identical to SEQ ID NO: 8960
  source 1..80: mol_type = other DNA

SEQ ID NO: 55133 - DNA, 80 bp, synthetic construct; identical to SEQ ID NO: 20187
  source 1..80: mol_type = other DNA

SEQ ID NO: 55134 - DNA, 80 bp, synthetic construct; identical to SEQ ID NO: 20188
  source 1..80: mol_type = other DNA

SEQ ID NO: 55135 - DNA, 80 bp, synthetic construct; identical to SEQ ID NO: 20189
  source 1..80: mol_type = other DNA

SEQ ID NO: 55136 - DNA, 80 bp, synthetic construct; identical to SEQ ID NO: 8961
  source 1..80: mol_type = other DNA

SEQ ID NO: 55137 - DNA, 80 bp, synthetic construct; identical to SEQ ID NO: 20191
  source 1..80: mol_type = other DNA

SEQ ID NO: 55138 - DNA, 80 bp, synthetic construct; identical to SEQ ID NO: 20192
  source 1..80: mol_type = other DNA

SEQ ID NO: 55139 - DNA, 80 bp, synthetic construct; identical to SEQ ID NO: 8962
  source 1..80: mol_type = other DNA

SEQ ID NO: 55140 - DNA, 80 bp, synthetic construct; identical to SEQ ID NO: 20194
  source 1..80: mol_type = other DNA

SEQ ID NO: 55141 - DNA, 80 bp, synthetic construct; identical to SEQ ID NO: 20195
  source 1..80: mol_type = other DNA

SEQ ID NO: 55142 - DNA, 80 bp, synthetic construct; identical to SEQ ID NO: 20196
  source 1..80: mol_type = other DNA

SEQ ID NO: 55143 - DNA, 80 bp, synthetic construct; identical to SEQ ID NO: 20197
  source 1..80: mol_type = other DNA

SEQ ID NO: 55144 - DNA, 80 bp, synthetic construct; identical to SEQ ID NO: 8963
  source 1..80: mol_type = other DNA

SEQ ID NO: 55145 - DNA, 80 bp, synthetic construct; identical to SEQ ID NO: 20199
  source 1..80: mol_type = other DNA

SEQ ID NO: 55146 - DNA, 80 bp, synthetic construct; identical to SEQ ID NO: 20201
  source 1..80: mol_type = other DNA

SEQ ID NO: 55147 - DNA, 80 bp, synthetic construct; identical to SEQ ID NO: 20203
  source 1..80: mol_type = other DNA

SEQ ID NO: 55148 - DNA, 80 bp, synthetic construct; identical to SEQ ID NO: 20205
  source 1..80: mol_type = other DNA

SEQ ID NO: 55149 - DNA, 80 bp, synthetic construct; identical to SEQ ID NO: 20207
  source 1..80: mol_type = other DNA

SEQ ID NO: 55150 - DNA, 80 bp, synthetic construct; identical to SEQ ID NO: 20208
  source 1..80: mol_type = other DNA

SEQ ID NO: 55151 - DNA, 80 bp, synthetic construct; identical to SEQ ID NO: 8966
  source 1..80: mol_type = other DNA

SEQ ID NO: 55152 - DNA, 80 bp, synthetic construct; identical to SEQ ID NO: 20211
  source 1..80: mol_type = other DNA

SEQ ID NO: 55153 - DNA, 80 bp, synthetic construct; identical to SEQ ID NO: 20213
  source 1..80: mol_type = other DNA

SEQ ID NO: 55154 - DNA, 80 bp, synthetic construct; identical to SEQ ID NO: 8967
  source 1..80: mol_type = other DNA

SEQ ID NO: 55155 - DNA, 80 bp, synthetic construct; identical to SEQ ID NO: 20215
  source 1..80: mol_type = other DNA

SEQ ID NO: 55156 - DNA, 80 bp, synthetic construct; identical to SEQ ID NO: 20216
  source 1..80: mol_type = other DNA

SEQ ID NO: 55157 - DNA, 80 bp, synthetic construct; identical to SEQ ID NO: 20217
  source 1..80: mol_type = other DNA

SEQ ID NO: 55158 - DNA, 80 bp, synthetic construct; identical to SEQ ID NO: 8968
  source 1..80: mol_type = other DNA

SEQ ID NO: 55159 - DNA, 80 bp, synthetic construct; identical to SEQ ID NO: 20219
  source 1..80: mol_type = other DNA

SEQ ID NO: 55160 - DNA, 80 bp, synthetic construct; identical to SEQ ID NO: 20220
  source 1..80: mol_type = other DNA

SEQ ID NO: 55161 - DNA, 80 bp, synthetic construct; identical to SEQ ID NO: 8969
  source 1..80: mol_type = other DNA

SEQ ID NO: 55162 - DNA, 80 bp, synthetic construct; identical to SEQ ID NO: 20222
  source 1..80: mol_type = other DNA

SEQ ID NO: 55163 - DNA, 80 bp, synthetic construct; identical to SEQ ID NO: 20223
  source 1..80: mol_type = other DNA

SEQ ID NO: 55164 - DNA, 80 bp, synthetic construct; identical to SEQ ID NO: 20224
  source 1..80: mol_type = other DNA

SEQ ID NO: 55165 - DNA, 80 bp, synthetic construct; identical to SEQ ID NO: 20225
  source 1..80: mol_type = other DNA

SEQ ID NO: 55166 - DNA, 80 bp, synthetic construct; identical to SEQ ID NO: 8970
  source 1..80: mol_type = other DNA

SEQ ID NO: 55167 - DNA, 80 bp, synthetic construct; identical to SEQ ID NO: 20227
  source 1..80: mol_type = other DNA

SEQ ID NO: 55168 - DNA, 80 bp, synthetic construct; identical to SEQ ID NO: 20228
  source 1..80: mol_type = other DNA

SEQ ID NO: 55169 - DNA, 80 bp, synthetic construct; identical to SEQ ID NO: 20229
  source 1..80: mol_type = other DNA

SEQ ID NO: 55170 - DNA, 80 bp, synthetic construct; identical to SEQ ID NO: 8971
  source 1..80: mol_type = other DNA

SEQ ID NO: 55171 - DNA, 80 bp, synthetic construct; identical to SEQ ID NO: 20231
  source 1..80: mol_type = other DNA

SEQ ID NO: 55172 - DNA, 80 bp, synthetic construct; identical to SEQ ID NO: 20232
  source 1..80: mol_type = other DNA

SEQ ID NO: 55173 - DNA, 80 bp, synthetic construct; identical to SEQ ID NO: 8972
  source 1..80: mol_type = other DNA

SEQ ID NO: 55174 - DNA, 80 bp, synthetic construct; identical to SEQ ID NO: 20234
  source 1..80: mol_type = other DNA

SEQ ID NO: 55175 - DNA, 80 bp, synthetic construct; identical to SEQ ID NO: 20235
  source 1..80: mol_type = other DNA

SEQ ID NO: 55176 - DNA, 80 bp, synthetic construct; identical to SEQ ID NO: 20236
  source 1..80: mol_type = other DNA

SEQ ID NO: 55177 - DNA, 80 bp, synthetic construct; identical to SEQ ID NO: 20237
  source 1..80: mol_type = other DNA

SEQ ID NO: 55178 - DNA, 80 bp, synthetic construct; identical to SEQ ID NO: 8973
  source 1..80: mol_type = other DNA

SEQ ID NO: 55179 - DNA, 80 bp, synthetic construct; identical to SEQ ID NO: 20239
  source 1..80: mol_type = other DNA

SEQ ID NO: 55180 - DNA, 80 bp, synthetic construct; identical to SEQ ID NO: 20240
  source 1..80: mol_type = other DNA

SEQ ID NO: 55181 - DNA, 80 bp, synthetic construct; identical to SEQ ID NO: 8974
  source 1..80: mol_type = other DNA

SEQ ID NO: 55182 - DNA, 80 bp, synthetic construct; identical to SEQ ID NO: 20242
  source 1..80: mol_type = other DNA

SEQ ID NO: 55183 - DNA, 80 bp, synthetic construct; identical to SEQ ID NO: 20243
  source 1..80: mol_type = other DNA

SEQ ID NO: 55184 - DNA, 80 bp, synthetic construct; identical to SEQ ID NO: 20244
  source 1..80: mol_type = other DNA

SEQ ID NO: 55185 - DNA, 80 bp, synthetic construct; identical to SEQ ID NO: 8975
  source 1..80: mol_type = other DNA

SEQ ID NO: 55186 - DNA, 80 bp, synthetic construct; identical to SEQ ID NO: 20247
  source 1..80: mol_type = other DNA

SEQ ID NO: 55187 - DNA, 80 bp, synthetic construct; identical to SEQ ID NO: 20248
  source 1..80: mol_type = other DNA

SEQ ID NO: 55188 - DNA, 80 bp, synthetic construct; identical to SEQ ID NO: 8976
  source 1..80: mol_type = other DNA

SEQ ID NO: 55189 - DNA, 80 bp, synthetic construct; identical to SEQ ID NO: 20250
  source 1..80: mol_type = other DNA

SEQ ID NO: 55190 - DNA, 80 bp, synthetic construct; identical to SEQ ID NO: 20251
  source 1..80: mol_type = other DNA

SEQ ID NO: 55191 - DNA, 80 bp, synthetic construct; identical to SEQ ID NO: 20252
  source 1..80: mol_type = other DNA

SEQ ID NO: 55192 - DNA, 80 bp, synthetic construct; identical to SEQ ID NO: 20253
  source 1..80: mol_type = other DNA

SEQ ID NO: 55193 - DNA, 80 bp, synthetic construct; identical to SEQ ID NO: 8977
  source 1..80: mol_type = other DNA

SEQ ID NO: 55194 - DNA, 80 bp, synthetic construct; identical to SEQ ID NO: 20255
  source 1..80: mol_type = other DNA

SEQ ID NO: 55195 - DNA, 80 bp, synthetic construct; identical to SEQ ID NO: 20256
  source 1..80: mol_type = other DNA

SEQ ID NO: 55196 - DNA, 80 bp, synthetic construct; identical to SEQ ID NO: 8978
  source 1..80: mol_type = other DNA

SEQ ID NO: 55197 - DNA, 80 bp, synthetic construct; identical to SEQ ID NO: 20258
  source 1..80: mol_type = other DNA

SEQ ID NO: 55198 - DNA, 80 bp, synthetic construct; identical to SEQ ID NO: 20259
  source 1..80: mol_type = other DNA

SEQ ID NO: 55199 - DNA, 80 bp, synthetic construct; identical to SEQ ID NO: 20260
  source 1..80: mol_type = other DNA

SEQ ID NO: 55200 - DNA, 80 bp, synthetic construct; identical to SEQ ID NO: 20261
  source 1..80: mol_type = other DNA

SEQ ID NO: 55201 - DNA, 80 bp, synthetic construct; identical to SEQ ID NO: 8979
  source 1..80: mol_type = other DNA

SEQ ID NO: 55202 - DNA, 80 bp, synthetic construct; identical to SEQ ID NO: 20263
  source 1..80: mol_type = other DNA

SEQ ID NO: 55203 - DNA, 80 bp, synthetic construct; identical to SEQ ID NO: 20264
  source 1..80: mol_type = other DNA

SEQ ID NO: 55204 - DNA, 80 bp, synthetic construct; identical to SEQ ID NO: 8980
  source 1..80: mol_type = other DNA

SEQ ID NO: 55205 - DNA, 80 bp, synthetic construct; identical to SEQ ID NO: 20267
  source 1..80: mol_type = other DNA

SEQ ID NO: 55206 - DNA, 80 bp, synthetic construct; identical to SEQ ID NO: 8981
  source 1..80: mol_type = other DNA

SEQ ID NO: 55207 - DNA, 80 bp, synthetic construct; identical to SEQ ID NO: 20270
  source 1..80: mol_type = other DNA

SEQ ID NO: 55208 - DNA, 80 bp, synthetic construct; identical to SEQ ID NO: 20271
  source 1..80: mol_type = other DNA

SEQ ID NO: 55209 - DNA, 80 bp, synthetic construct; identical to SEQ ID NO: 20272
  source 1..80: mol_type = other DNA

SEQ ID NO: 55210 - DNA, 80 bp, synthetic construct; identical to SEQ ID NO: 8982
  source 1..80: mol_type = other DNA

SEQ ID NO: 55211 - DNA, 80 bp, synthetic construct; identical to SEQ ID NO: 20275
  source 1..80: mol_type = other DNA

SEQ ID NO: 55212 - DNA, 80 bp, synthetic construct; identical to SEQ ID NO: 20276
  source 1..80: mol_type = other DNA

SEQ ID NO: 55213 - DNA, 80 bp, synthetic construct; identical to SEQ ID NO: 20277
  source 1..80: mol_type = other DNA

SEQ ID NO: 55214 - DNA, 80 bp, synthetic construct; identical to SEQ ID NO: 8983
  source 1..80: mol_type = other DNA

SEQ ID NO: 55215 - DNA, 80 bp, synthetic construct; identical to SEQ ID NO: 20279
  source 1..80: mol_type = other DNA

SEQ ID NO: 55216 - DNA, 80 bp, synthetic construct; identical to SEQ ID NO: 20280
  source 1..80: mol_type = other DNA

SEQ ID NO: 55217 - DNA, 80 bp, synthetic construct; identical to SEQ ID NO: 20281
  source 1..80: mol_type = other DNA

SEQ ID NO: 55218 - DNA, 80 bp, synthetic construct; identical to SEQ ID NO: 8984
  source 1..80: mol_type = other DNA

SEQ ID NO: 55219 - DNA, 80 bp, synthetic construct; identical to SEQ ID NO: 20283
  source 1..80: mol_type = other DNA

SEQ ID NO: 55220 - DNA, 80 bp, synthetic construct; identical to SEQ ID NO: 20284
  source 1..80: mol_type = other DNA

SEQ ID NO: 55221 - DNA, 80 bp, synthetic construct; identical to SEQ ID NO: 8985
  source 1..80: mol_type = other DNA

SEQ ID NO: 55222 - DNA, 80 bp, synthetic construct; identical to SEQ ID NO: 20286
  source 1..80: mol_type = other DNA

SEQ ID NO: 55223 - DNA, 80 bp, synthetic construct; identical to SEQ ID NO: 20287
  source 1..80: mol_type = other DNA

SEQ ID NO: 55224 - DNA, 80 bp, synthetic construct; identical to SEQ ID NO: 20288
  source 1..80: mol_type = other DNA

SEQ ID NO: 55225 - DNA, 80 bp, synthetic construct; identical to SEQ ID NO: 8986
  source 1..80: mol_type = other DNA

SEQ ID NO: 55226 - DNA, 80 bp, synthetic construct; identical to SEQ ID NO: 20290
  source 1..80: mol_type = other DNA

SEQ ID NO: 55227 - DNA, 80 bp, synthetic construct; identical to SEQ ID NO: 20291
  source 1..80: mol_type = other DNA

SEQ ID NO: 55228 - DNA, 80 bp, synthetic construct; identical to SEQ ID NO: 20292
  source 1..80: mol_type = other DNA

SEQ ID NO: 55229 - DNA, 80 bp, synthetic construct; identical to SEQ ID NO: 8987
  source 1..80: mol_type = other DNA

SEQ ID NO: 55230 - DNA, 80 bp, synthetic construct; identical to SEQ ID NO: 20294
  source 1..80: mol_type = other DNA

SEQ ID NO: 55231 - DNA, 80 bp, synthetic construct; identical to SEQ ID NO: 20295
  source 1..80: mol_type = other DNA

SEQ ID NO: 55232 - DNA, 80 bp, synthetic construct; identical to SEQ ID NO: 20296
  source 1..80: mol_type = other DNA

SEQ ID NO: 55233 - DNA, 80 bp, synthetic construct; identical to SEQ ID NO: 8988
  source 1..80: mol_type = other DNA

SEQ ID NO: 55234 - DNA, 80 bp, synthetic construct; identical to SEQ ID NO: 20298
  source 1..80: mol_type = other DNA

SEQ ID NO: 55235 - DNA, 80 bp, synthetic construct; identical to SEQ ID NO: 20299
  source 1..80: mol_type = other DNA

SEQ ID NO: 55236 - DNA, 80 bp, synthetic construct; identical to SEQ ID NO: 20300
  source 1..80: mol_type = other DNA

SEQ ID NO: 55237 - DNA, 80 bp, synthetic construct; identical to SEQ ID NO: 8989
  source 1..80: mol_type = other DNA

SEQ ID NO: 55238 - DNA, 80 bp, synthetic construct; identical to SEQ ID NO: 20302
  source 1..80: mol_type = other DNA

SEQ ID NO: 55239 - DNA, 80 bp, synthetic construct; identical to SEQ ID NO: 20303
  source 1..80: mol_type = other DNA

SEQ ID NO: 55240 - DNA, 80 bp, synthetic construct; identical to SEQ ID NO: 20304
  source 1..80: mol_type = other DNA

SEQ ID NO: 55241 - DNA, 80 bp, synthetic construct; identical to SEQ ID NO: 8990
  source 1..80: mol_type = other DNA

SEQ ID NO: 55242 - DNA, 80 bp, synthetic construct; identical to SEQ ID NO: 20306
  source 1..80: mol_type = other DNA

SEQ ID NO: 55243 - DNA, 80 bp, synthetic construct; identical to SEQ ID NO: 20307
  source 1..80: mol_type = other DNA

SEQ ID NO: 55244 - DNA, 80 bp, synthetic construct; identical to SEQ ID NO: 20308
  source 1..80: mol_type = other DNA

SEQ ID NO: 55245 - DNA, 80 bp, synthetic construct; identical to SEQ ID NO: 8991
  source 1..80: mol_type = other DNA

SEQ ID NO: 55246 - DNA, 80 bp, synthetic construct; identical to SEQ ID NO: 20310
  source 1..80: mol_type = other DNA

SEQ ID NO: 55247 - DNA, 80 bp, synthetic construct; identical to SEQ ID NO: 20311
  source 1..80: mol_type = other DNA

SEQ ID NO: 55248 - DNA, 80 bp, synthetic construct; identical to SEQ ID NO: 20312
  source 1..80: mol_type = other DNA

SEQ ID NO: 55249 - DNA, 80 bp, synthetic construct; identical to SEQ ID NO: 20313
  source 1..80: mol_type = other DNA

SEQ ID NO: 55250 - DNA, 80 bp, synthetic construct; identical to SEQ ID NO: 8992
  source 1..80: mol_type = other DNA

SEQ ID NO: 55251 - DNA, 80 bp, synthetic construct; identical to SEQ ID NO: 20315
  source 1..80: mol_type = other DNA

SEQ ID NO: 55252 - DNA, 80 bp, synthetic construct; identical to SEQ ID NO: 20316
  source 1..80: mol_type = other DNA

SEQ ID NO: 55253 - DNA, 80 bp, synthetic construct; identical to SEQ ID NO: 8993
  source 1..80: mol_type = other DNA

SEQ ID NO: 55254 - DNA, 80 bp, synthetic construct; identical to SEQ ID NO: 20318
  source 1..80: mol_type = other DNA

SEQ ID NO: 55255 - DNA, 80 bp, synthetic construct; identical to SEQ ID NO: 20319
  source 1..80: mol_type = other DNA

SEQ ID NO: 55256 - DNA, 80 bp, synthetic construct; identical to SEQ ID NO: 20320
  source 1..80: mol_type = other DNA

SEQ ID NO: 55257 - DNA, 80 bp, synthetic construct; identical to SEQ ID NO: 20321
  source 1..80: mol_type = other DNA

SEQ ID NO: 55258 - DNA, 80 bp, synthetic construct; identical to SEQ ID NO: 8994
  source 1..80: mol_type = other DNA

SEQ ID NO: 55259 - DNA, 80 bp, synthetic construct; identical to SEQ ID NO: 20323
  source 1..80: mol_type = other DNA

SEQ ID NO: 55260 - DNA, 80 bp, synthetic construct; identical to SEQ ID NO: 20324
  source 1..80: mol_type = other DNA

SEQ ID NO: 55261 - DNA, 80 bp, synthetic construct; identical to SEQ ID NO: 8995
  source 1..80: mol_type = other DNA

SEQ ID NO: 55262 - DNA, 80 bp, synthetic construct; identical to SEQ ID NO: 20326
  source 1..80: mol_type = other DNA

SEQ ID NO: 55263 - DNA, 80 bp, synthetic construct; identical to SEQ ID NO: 20327
  source 1..80: mol_type = other DNA

SEQ ID NO: 55264 - DNA, 80 bp, synthetic construct; identical to SEQ ID NO: 20328
  source 1..80: mol_type = other DNA

SEQ ID NO: 55265 - DNA, 80 bp, synthetic construct; identical to SEQ ID NO: 20329
  source 1..80: mol_type = other DNA

SEQ ID NO: 55266 - DNA, 80 bp, synthetic construct; identical to SEQ ID NO: 8996
  source 1..80: mol_type = other DNA

SEQ ID NO: 55267 - DNA, 80 bp, synthetic construct; identical to SEQ ID NO: 20331
  source 1..80: mol_type = other DNA

SEQ ID NO: 55268 - DNA, 80 bp, synthetic construct; identical to SEQ ID NO: 20333
  source 1..80: mol_type = other DNA

SEQ ID NO: 55269 - DNA, 80 bp, synthetic construct; identical to SEQ ID NO: 8997
  source 1..80: mol_type = other DNA

SEQ ID NO: 55270 - DNA, 80 bp, synthetic construct; identical to SEQ ID NO: 20335
  source 1..80: mol_type = other DNA

SEQ ID NO: 55271 - DNA, 80 bp, synthetic construct; identical to SEQ ID NO: 20336
  source 1..80: mol_type = other DNA

SEQ ID NO: 55272 - DNA, 80 bp, synthetic construct; identical to SEQ ID NO: 20337
  source 1..80: mol_type = other DNA

SEQ ID NO: 55273 - DNA, 80 bp, synthetic construct; identical to SEQ ID NO: 8998
  source 1..80: mol_type = other DNA

SEQ ID NO: 55274 - DNA, 80 bp, synthetic construct; identical to SEQ ID NO: 20339
  source 1..80: mol_type = other DNA

SEQ ID NO: 55275 - DNA, 80 bp, synthetic construct; identical to SEQ ID NO: 20340
  source 1..80: mol_type = other DNA

SEQ ID NO: 55276 - DNA, 80 bp, synthetic construct; identical to SEQ ID NO: 20341
  source 1..80: mol_type = other DNA

SEQ ID NO: 55277 - DNA, 80 bp, synthetic construct; identical to SEQ ID NO: 8999
  source 1..80: mol_type = other DNA

SEQ ID NO: 55278 - DNA, 80 bp, synthetic construct; identical to SEQ ID NO: 20343
  source 1..80: mol_type = other DNA

SEQ ID NO: 55279 - DNA, 80 bp, synthetic construct; identical to SEQ ID NO: 9000
  source 1..80: mol_type = other DNA

SEQ ID NO: 55280 - DNA, 80 bp, synthetic construct; identical to SEQ ID NO: 20346
  source 1..80: mol_type = other DNA

SEQ ID NO: 55281 - DNA, 80 bp, synthetic construct; identical to SEQ ID NO: 20347
  source 1..80: mol_type = other DNA

SEQ ID NO: 55282 - DNA, 80 bp, synthetic construct; identical to SEQ ID NO: 20348
  source 1..80: mol_type = other DNA

SEQ ID NO: 55283 - DNA, 80 bp, synthetic construct; identical to SEQ ID NO: 9001
  source 1..80: mol_type = other DNA

SEQ ID NO: 55284 - DNA, 80 bp, synthetic construct; identical to SEQ ID NO: 20350
  source 1..80: mol_type = other DNA

SEQ ID NO: 55285 - DNA, 80 bp, synthetic construct; identical to SEQ ID NO: 20351
  source 1..80: mol_type = other DNA

SEQ ID NO: 55286 - DNA, 80 bp, synthetic construct; identical to SEQ ID NO: 20352
  source 1..80: mol_type = other DNA

SEQ ID NO: 55287 - DNA, 80 bp, synthetic construct; identical to SEQ ID NO: 9002
  source 1..80: mol_type = other DNA

SEQ ID NO: 55288 - DNA, 80 bp, synthetic construct; identical to SEQ ID NO: 20354
  source 1..80: mol_type = other DNA

SEQ ID NO: 55289 - DNA, 80 bp, synthetic construct; identical to SEQ ID NO: 20356
  source 1..80: mol_type = other DNA

SEQ ID NO: 55290 - DNA, 80 bp, synthetic construct; identical to SEQ ID NO: 9003
  source 1..80: mol_type = other DNA

SEQ ID NO: 55291 - DNA, 80 bp, synthetic construct; identical to SEQ ID NO: 20358
  source 1..80: mol_type = other DNA

SEQ ID NO: 55292 - DNA, 80 bp, synthetic construct; identical to SEQ ID NO: 20359
  source 1..80: mol_type = other DNA

SEQ ID NO: 55293 - DNA, 80 bp, synthetic construct; identical to SEQ ID NO: 20360
  source 1..80: mol_type = other DNA

SEQ ID NO: 55294 - DNA, 80 bp, synthetic construct; identical to SEQ ID NO: 20361
  source 1..80: mol_type = other DNA

SEQ ID NO: 55295 - DNA, 80 bp, synthetic construct; identical to SEQ ID NO: 9004
  source 1..80: mol_type = other DNA

SEQ ID NO: 55296 - DNA, 80 bp, synthetic construct; identical to SEQ ID NO: 20363
  source 1..80: mol_type = other DNA

SEQ ID NO: 55297 - DNA, 80 bp, synthetic construct; identical to SEQ ID NO: 20364
  source 1..80: mol_type = other DNA

SEQ ID NO: 55298 - DNA, 80 bp, synthetic construct; identical to SEQ ID NO: 9005
  source 1..80: mol_type = other DNA

SEQ ID NO: 55299 - DNA, 80 bp, synthetic construct; identical to SEQ ID NO: 20366
  source 1..80: mol_type = other DNA

SEQ ID NO: 55300 - DNA, 80 bp, synthetic construct; identical to SEQ ID NO: 20367
  source 1..80: mol_type = other DNA

SEQ ID NO: 55301 - DNA, 80 bp, synthetic construct; identical to SEQ ID NO: 20368
  source 1..80: mol_type = other DNA

SEQ ID NO: 55302 - DNA, 80 bp, synthetic construct; identical to SEQ ID NO: 9006
  source 1..80: mol_type = other DNA

SEQ ID NO: 55303 - DNA, 80 bp, synthetic construct; identical to SEQ ID NO: 20371
  source 1..80: mol_type = other DNA

SEQ ID NO: 55304 - DNA, 80 bp, synthetic construct; identical to SEQ ID NO: 20372
  source 1..80: mol_type = other DNA

SEQ ID NO: 55305 - DNA, 80 bp, synthetic construct; identical to SEQ ID NO: 9007
  source 1..80: mol_type = other DNA

SEQ ID NO: 55306 - DNA, 80 bp, synthetic construct; identical to SEQ ID NO: 20374
  source 1..80: mol_type = other DNA

SEQ ID NO: 55307 - DNA, 80 bp, synthetic construct; identical to SEQ ID NO: 20375
  source 1..80: mol_type = other DNA

SEQ ID NO: 55308 - DNA, 80 bp, synthetic construct; identical to SEQ ID NO: 20376
  source 1..80: mol_type = other DNA

SEQ ID NO: 55309 - DNA, 80 bp, synthetic construct; identical to SEQ ID NO: 20377
  source 1..80: mol_type = other DNA

SEQ ID NO: 55310 - DNA, 80 bp, synthetic construct; identical to SEQ ID NO: 9008
  source 1..80: mol_type = other DNA

SEQ ID NO: 55311 - DNA, 80 bp, synthetic construct; identical to SEQ ID NO: 20379
  source 1..80: mol_type = other DNA

SEQ ID NO: 55312 - DNA, 80 bp, synthetic construct; identical to SEQ ID NO: 20380
  source 1..80: mol_type = other DNA

SEQ ID NO: 55313 - DNA, 80 bp, synthetic construct; identical to SEQ ID NO: 20381
  source 1..80: mol_type = other DNA

SEQ ID NO: 55314 - DNA, 80 bp, synthetic construct; identical to SEQ ID NO: 20382
  source 1..80: mol_type = other DNA

SEQ ID NO: 55315 - DNA, 80 bp, synthetic construct; identical to SEQ ID NO: 9009
  source 1..80: mol_type = other DNA

SEQ ID NO: 55316 - DNA, 80 bp, synthetic construct; identical to SEQ ID NO: 20384
  source 1..80: mol_type = other DNA

SEQ ID NO: 55317 - DNA, 80 bp, synthetic construct; identical to SEQ ID NO: 20385
  source 1..80: mol_type = other DNA

SEQ ID NO: 55318 - DNA, 80 bp, synthetic construct; identical to SEQ ID NO: 9010
  source 1..80: mol_type = other DNA

SEQ ID NO: 55319 - DNA, 80 bp, synthetic construct; identical to SEQ ID NO: 20387
  source 1..80: mol_type = other DNA

SEQ ID NO: 55320 - DNA, 80 bp, synthetic construct; identical to SEQ ID NO: 20388
  source 1..80: mol_type = other DNA

SEQ ID NO: 55321 - DNA, 80 bp, synthetic construct; identical to SEQ ID NO: 20389
  source 1..80: mol_type = other DNA

SEQ ID NO: 55322 - DNA, 80 bp, synthetic construct; identical to SEQ ID NO: 9011
  source 1..80: mol_type = other DNA

SEQ ID NO: 55323 - DNA, 80 bp, synthetic construct; identical to SEQ ID NO: 20391
  source 1..80: mol_type = other DNA

SEQ ID NO: 55324 - DNA, 80 bp, synthetic construct; identical to SEQ ID NO: 20392
  source 1..80: mol_type = other DNA

SEQ ID NO: 55325 - DNA, 80 bp, synthetic construct; identical to SEQ ID NO: 20393
  source 1..80: mol_type = other DNA

SEQ ID NO: 55326 - DNA, 80 bp, synthetic construct; identical to SEQ ID NO: 9012
  source 1..80: mol_type = other DNA

SEQ ID NO: 55327 - DNA, 80 bp, synthetic construct; identical to SEQ ID NO: 20395
  source 1..80: mol_type = other DNA

SEQ ID NO: 55328 - DNA, 80 bp, synthetic construct; identical to SEQ ID NO: 20396
  source 1..80: mol_type = other DNA

SEQ ID NO: 55329 - DNA, 80 bp, synthetic construct; identical to SEQ ID NO: 20397
  source 1..80: mol_type = other DNA

SEQ ID NO: 55330 - DNA, 80 bp, synthetic construct; identical to SEQ ID NO: 9013
  source 1..80: mol_type = other DNA

SEQ ID NO: 55331 - DNA, 80 bp, synthetic construct; identical to SEQ ID NO: 20399
  source 1..80: mol_type = other DNA

SEQ ID NO: 55332 - DNA, 80 bp, synthetic construct; identical to SEQ ID NO: 20400
  source 1..80: mol_type = other DNA

SEQ ID NO: 55333 - DNA, 80 bp, synthetic construct; identical to SEQ ID NO: 20401
  source 1..80: mol_type = other DNA

SEQ ID NO: 55334 - DNA, 80 bp, synthetic construct; identical to SEQ ID NO: 20402
  source 1..80: mol_type = other DNA

SEQ ID NO: 55335 - DNA, 80 bp, synthetic construct; identical to SEQ ID NO: 9014
  source 1..80: mol_type = other DNA

SEQ ID NO: 55336 - DNA, 80 bp, synthetic construct; identical to SEQ ID NO: 20404
  source 1..80: mol_type = other DNA

SEQ ID NO: 55337 - DNA, 80 bp, synthetic construct; identical to SEQ ID NO: 20405
  source 1..80: mol_type = other DNA

SEQ ID NO: 55338 - DNA, 80 bp, synthetic construct; identical to SEQ ID NO: 9015
  source 1..80: mol_type = other DNA

SEQ ID NO: 55339 - DNA, 80 bp, synthetic construct; identical to SEQ ID NO: 20407
  source 1..80: mol_type = other DNA

SEQ ID NO: 55340 - DNA, 80 bp, synthetic construct; identical to SEQ ID NO: 20408
  source 1..80: mol_type = other DNA

SEQ ID NO: 55341 - DNA, 80 bp, synthetic construct; identical to SEQ ID NO: 20409
  source 1..80: mol_type = other DNA

SEQ ID NO: 55342 - DNA, 80 bp, synthetic construct; identical to SEQ ID NO: 20410
  source 1..80: mol_type = other DNA

SEQ ID NO: 55343 - DNA, 80 bp, synthetic construct; identical to SEQ ID NO: 9016
  source 1..80: mol_type = other DNA

SEQ ID NO: 55344 - DNA, 80 bp, synthetic construct; identical to SEQ ID NO: 20412
  source 1..80: mol_type = other DNA

SEQ ID NO: 55345 - DNA, 80 bp, synthetic construct; identical to SEQ ID NO: 20413
  source 1..80: mol_type = other DNA

SEQ ID NO: 55346 - DNA, 80 bp, synthetic construct; identical to SEQ ID NO: 20414
  source 1..80: mol_type = other DNA

SEQ ID NO: 55347 - DNA, 80 bp, synthetic construct; identical to SEQ ID NO: 9017
  source 1..80: mol_type = other DNA

SEQ ID NO: 55348 - DNA, 80 bp, synthetic construct; identical to SEQ ID NO: 20416
  source 1..80: mol_type = other DNA

SEQ ID NO: 55349 - DNA, 80 bp, synthetic construct; identical to SEQ ID NO: 20417
  source 1..80: mol_type = other DNA

SEQ ID NO: 55350 - DNA, 80 bp, synthetic construct; identical to SEQ ID NO: 9018
  source 1..80: mol_type = other DNA

SEQ ID NO: 55351 - DNA, 80 bp, synthetic construct; identical to SEQ ID NO: 20420
  source 1..80: mol_type = other DNA

SEQ ID NO: 55352 - DNA, 80 bp, synthetic construct; identical to SEQ ID NO: 20421
  source 1..80: mol_type = other DNA

SEQ ID NO: 55353 - DNA, 80 bp, synthetic construct; identical to SEQ ID NO: 9019
  source 1..80: mol_type = other DNA

SEQ ID NO: 55354 - DNA, 80 bp, synthetic construct; identical to SEQ ID NO: 20423
  source 1..80: mol_type = other DNA

SEQ ID NO: 55355 - DNA, 80 bp, synthetic construct; identical to SEQ ID NO: 20424
  source 1..80: mol_type = other DNA

SEQ ID NO: 55356 - DNA, 80 bp, synthetic construct; identical to SEQ ID NO: 20425
  source 1..80: mol_type = other DNA

SEQ ID NO: 55357 - DNA, 80 bp, synthetic construct; identical to SEQ ID NO: 9020
  source 1..80: mol_type = other DNA

SEQ ID NO: 55358 - DNA, 80 bp, synthetic construct; identical to SEQ ID NO: 20427
  source 1..80: mol_type = other DNA

SEQ ID NO: 55359 - DNA, 80 bp, synthetic construct; identical to SEQ ID NO: 20428
  source 1..80: mol_type = other DNA

SEQ ID NO: 55360 - DNA, 80 bp, synthetic construct; identical to SEQ ID NO: 20429
  source 1..80: mol_type = other DNA

SEQ ID NO: 55361 - DNA, 80 bp, synthetic construct; identical to SEQ ID NO: 20430
  source 1..80: mol_type = other DNA

SEQ ID NO: 55362 - DNA, 80 bp, synthetic construct; identical to SEQ ID NO: 9021
  source 1..80: mol_type = other DNA

SEQ ID NO: 55363 - DNA, 80 bp, synthetic construct; identical to SEQ ID NO: 20432
  source 1..80: mol_type = other DNA

SEQ ID NO: 55364 - DNA, 80 bp, synthetic construct; identical to SEQ ID NO: 20433
  source 1..80: mol_type = other DNA

SEQ ID NO: 55365 - DNA, 80 bp, synthetic construct; identical to SEQ ID NO: 9022
  source 1..80: mol_type = other DNA

SEQ ID NO: 55366 - DNA, 80 bp, synthetic construct; identical to SEQ ID NO: 20435
  source 1..80: mol_type = other DNA

SEQ ID NO: 55367 - DNA, 80 bp, synthetic construct; identical to SEQ ID NO: 20436
  source 1..80: mol_type = other DNA

SEQ ID NO: 55368 - DNA, 80 bp, synthetic construct; identical to SEQ ID NO: 20437
  source 1..80: mol_type = other DNA

SEQ ID NO: 55369 - DNA, 80 bp, synthetic construct; identical to SEQ ID NO: 9023
  source 1..80: mol_type = other DNA

SEQ ID NO: 55370 - DNA, 80 bp, synthetic construct; identical to SEQ ID NO: 20439
  source 1..80: mol_type = other DNA

SEQ ID NO: 55371 - DNA, 80 bp, synthetic construct; identical to SEQ ID NO: 20440
  source 1..80: mol_type = other DNA

SEQ ID NO: 55372 - DNA, 80 bp, synthetic construct; identical to SEQ ID NO: 20441
  source 1..80: mol_type = other DNA

SEQ ID NO: 55373 - DNA, 80 bp, synthetic construct; identical to SEQ ID NO: 9024
  source 1..80: mol_type = other DNA

SEQ ID NO: 55374 - DNA, 80 bp, synthetic construct; identical to SEQ ID NO: 20443
  source 1..80: mol_type = other DNA

SEQ ID NO: 55375 - DNA, 80 bp, synthetic construct; identical to SEQ ID NO: 20444
  source 1..80: mol_type = other DNA

SEQ ID NO: 55376 - DNA, 80 bp, synthetic construct; identical to SEQ ID NO: 20445
  source 1..80: mol_type = other DNA

SEQ ID NO: 55377 - DNA, 80 bp, synthetic construct; identical to SEQ ID NO: 20446
  source 1..80: mol_type = other DNA

SEQ ID NO: 55378 - DNA, 80 bp, synthetic construct; identical to SEQ ID NO: 9025
  source 1..80: mol_type = other DNA

SEQ ID NO: 55379 - DNA, 80 bp, synthetic construct; identical to SEQ ID NO: 20448
  source 1..80: mol_type = other DNA

SEQ ID NO: 55380 - DNA, 80 bp, synthetic construct; identical to SEQ ID NO: 20449
  source 1..80: mol_type = other DNA

SEQ ID NO: 55381 - DNA, 80 bp, synthetic construct; identical to SEQ ID NO: 9026
  source 1..80: mol_type = other DNA

SEQ ID NO: 55382 - DNA, 80 bp, synthetic construct; identical to SEQ ID NO: 20451
  source 1..80: mol_type = other DNA

SEQ ID NO: 55383 - DNA, 80 bp, synthetic construct; identical to SEQ ID NO: 20452
  source 1..80: mol_type = other DNA

SEQ ID NO: 55384 - DNA, 80 bp, synthetic construct; identical to SEQ ID NO: 20453
  source 1..80: mol_type = other DNA

SEQ ID NO: 55385 - DNA, 80 bp, synthetic construct; identical to SEQ ID NO: 9027
  source 1..80: mol_type = other DNA

SEQ ID NO: 55386 - DNA, 80 bp, synthetic construct; identical to SEQ ID NO: 20455
  source 1..80: mol_type = other DNA

SEQ ID NO: 55387 - DNA, 80 bp, synthetic construct; identical to SEQ ID NO: 20456
  source 1..80: mol_type = other DNA

SEQ ID NO: 55388 - DNA, 80 bp, synthetic construct; identical to SEQ ID NO: 9028
  source 1..80: mol_type = other DNA

SEQ ID NO: 55389 - DNA, 80 bp, synthetic construct; identical to SEQ ID NO: 20458
  source 1..80: mol_type = other DNA

SEQ ID NO: 55390 - DNA, 80 bp, synthetic construct; identical to SEQ ID NO: 20459
  source 1..80: mol_type = other DNA

SEQ ID NO: 55391 - DNA, 80 bp, synthetic construct; identical to SEQ ID NO: 20460
  source 1..80: mol_type = other DNA

SEQ ID NO: 55392 - DNA, 80 bp, synthetic construct; identical to SEQ ID NO: 9029
  source 1..80: mol_type = other DNA

SEQ ID NO: 55393 - DNA, 80 bp, synthetic construct; identical to SEQ ID NO: 20462
  source 1..80: mol_type = other DNA

SEQ ID NO: 55394 - DNA, 80 bp, synthetic construct; identical to SEQ ID NO: 20463
  source 1..80: mol_type = other DNA

SEQ ID NO: 55395 - DNA, 80 bp, synthetic construct; identical to SEQ ID NO: 20464
  source 1..80: mol_type = other DNA

SEQ ID NO: 55396 - DNA, 80 bp, synthetic construct; identical to SEQ ID NO: 9030
  source 1..80: mol_type = other DNA

SEQ ID NO: 55397 - DNA, 80 bp, synthetic construct; identical to SEQ ID NO: 20466
  source 1..80: mol_type = other DNA

SEQ ID NO: 55398 - DNA, 80 bp, synthetic construct; identical to SEQ ID NO: 20467
  source 1..80: mol_type = other DNA

SEQ ID NO: 55399 - DNA, 80 bp, synthetic construct; identical to SEQ ID NO: 20468
  source 1..80: mol_type = other DNA

SEQ ID NO: 55400 - DNA, 80 bp, synthetic construct; identical to SEQ ID NO: 9031
  source 1..80: mol_type = other DNA

SEQ ID NO: 55401 - DNA, 80 bp, synthetic construct; identical to SEQ ID NO: 20470
  source 1..80: mol_type = other DNA

SEQ ID NO: 55402 - DNA, 80 bp, synthetic construct; identical to SEQ ID NO: 20471
  source 1..80: mol_type = other DNA

SEQ ID NO: 55403 - DNA, 80 bp, synthetic construct; identical to SEQ ID NO: 20472
  source 1..80: mol_type = other DNA

SEQ ID NO: 55404 - DNA, 80 bp, synthetic construct; identical to SEQ ID NO: 9032
  source 1..80: mol_type = other DNA

SEQ ID NO: 55405 - DNA, 80 bp, synthetic construct; identical to SEQ ID NO: 20474
  source 1..80: mol_type = other DNA

SEQ ID NO: 55406 - DNA, 80 bp, synthetic construct; identical to SEQ ID NO: 20475
  source 1..80: mol_type = other DNA

SEQ ID NO: 55407 - DNA, 80 bp, synthetic construct; identical to SEQ ID NO: 20477
  source 1..80: mol_type = other DNA

SEQ ID NO: 55408 - DNA, 80 bp, synthetic construct; identical to SEQ ID NO: 20479
  source 1..80: mol_type = other DNA

SEQ ID NO: 55409 - DNA, 80 bp, synthetic construct; identical to SEQ ID NO: 9034
  source 1..80: mol_type = other DNA

SEQ ID NO: 55410 - DNA, 80 bp, synthetic construct; identical to SEQ ID NO: 20483
  source 1..80: mol_type = other DNA

SEQ ID NO: 55411 - DNA, 80 bp, synthetic construct; identical to SEQ ID NO: 20484
  source 1..80: mol_type = other DNA

SEQ ID NO: 55412 - DNA, 80 bp, synthetic construct; identical to SEQ ID NO: 9035
  source 1..80: mol_type = other DNA

SEQ ID NO: 55413 - DNA, 80 bp, synthetic construct; identical to SEQ ID NO: 20486
  source 1..80: mol_type = other DNA

SEQ ID NO: 55414 - DNA, 80 bp, synthetic construct; identical to SEQ ID NO: 20487
  source 1..80: mol_type = other DNA

SEQ ID NO: 55415 - DNA, 80 bp, synthetic construct; identical to SEQ ID NO: 20488
  source 1..80: mol_type = other DNA

SEQ ID NO: 55416 - DNA, 80 bp, synthetic construct; identical to SEQ ID NO: 9036
  source 1..80: mol_type = other DNA

SEQ ID NO: 55417 - DNA, 80 bp, synthetic construct; identical to SEQ ID NO: 20490
  source 1..80: mol_type = other DNA

SEQ ID NO: 55418 - DNA, 80 bp, synthetic construct; identical to SEQ ID NO: 20491
  source 1..80: mol_type = other DNA

SEQ ID NO: 55419 - DNA, 80 bp, synthetic construct; identical to SEQ ID NO: 20493
  source 1..80: mol_type = other DNA

SEQ ID NO: 55420 - DNA, 80 bp, synthetic construct; identical to SEQ ID NO: 9037
  source 1..80: mol_type = other DNA

SEQ ID NO: 55421 - DNA, 80 bp, synthetic construct; identical to SEQ ID NO: 20495
  source 1..80: mol_type = other DNA

SEQ ID NO: 55422 - DNA, 80 bp, synthetic construct; identical to SEQ ID NO: 20496
  source 1..80: mol_type = other DNA

SEQ ID NO: 55423 - DNA, 80 bp, synthetic construct; identical to SEQ ID NO: 9038
  source 1..80: mol_type = other DNA

SEQ ID NO: 55424 - DNA, 80 bp, synthetic construct; identical to SEQ ID NO: 20498
  source 1..80: mol_type = other DNA

SEQ ID NO: 55425 - DNA, 80 bp, synthetic construct; identical to SEQ ID NO: 20499
  source 1..80: mol_type = other DNA

SEQ ID NO: 55426 - DNA, 80 bp, synthetic construct; identical to SEQ ID NO: 20500
  source 1..80: mol_type = other DNA

SEQ ID NO: 55427 - DNA, 80 bp, synthetic construct; identical to SEQ ID NO: 20501
  source 1..80: mol_type = other DNA

SEQ ID NO: 55428 - DNA, 80 bp, synthetic construct; identical to SEQ ID NO: 9039
  source 1..80: mol_type = other DNA

SEQ ID NO: 55429 - DNA, 80 bp, synthetic construct; identical to SEQ ID NO: 20503
  source 1..80: mol_type = other DNA

SEQ ID NO: 55430 - DNA, 80 bp, synthetic construct; identical to SEQ ID NO: 20504
  source 1..80: mol_type = other DNA

SEQ ID NO: 55431 - DNA, 80 bp, synthetic construct; identical to SEQ ID NO: 9040
  source 1..80: mol_type = other DNA

SEQ ID NO: 55432 - DNA, 80 bp, synthetic construct; identical to SEQ ID NO: 20506
  source 1..80: mol_type = other DNA

SEQ ID NO: 55433 - DNA, 80 bp, synthetic construct; identical to SEQ ID NO: 20507
  source 1..80: mol_type = other DNA

SEQ ID NO: 55434 - DNA, 80 bp, synthetic construct; identical to SEQ ID NO: 20508
  source 1..80: mol_type = other DNA

SEQ ID NO: 55435 - DNA, 80 bp, synthetic construct; identical to SEQ ID NO: 20509
  source 1..80: mol_type = other DNA

SEQ ID NO: 55436 - DNA, 80 bp, synthetic construct; identical to SEQ ID NO: 9041
  source 1..80: mol_type = other DNA

SEQ ID NO: 55437 - DNA, 80 bp, synthetic construct; identical to SEQ ID NO: 20511
  source 1..80: mol_type = other DNA

SEQ ID NO: 55438 - DNA, 80 bp, synthetic construct; identical to SEQ ID NO: 20512
  source 1..80: mol_type = other DNA

SEQ ID NO: 55439 - DNA, 80 bp, synthetic construct; identical to SEQ ID NO: 20513
  source 1..80: mol_type = other DNA

SEQ ID NO: 55440 - DNA, 80 bp, synthetic construct; identical to SEQ ID NO: 9042
  source 1..80: mol_type = other DNA

SEQ ID NO: 55441 - DNA, 80 bp, synthetic construct; identical to SEQ ID NO: 20515
  source 1..80: mol_type = other DNA

SEQ ID NO: 55442 - DNA, 80 bp, synthetic construct; identical to SEQ ID NO: 20516
  source 1..80: mol_type = other DNA

SEQ ID NO: 55443 - DNA, 80 bp, synthetic construct; identical to SEQ ID NO: 20517
  source 1..80: mol_type = other DNA

SEQ ID NO: 55444 - DNA, 80 bp, synthetic construct; identical to SEQ ID NO: 9043
  source 1..80: mol_type = other DNA

SEQ ID NO: 55445 - DNA, 80 bp, synthetic construct; identical to SEQ ID NO: 20519
  source 1..80: mol_type = other DNA

SEQ ID NO: 55446 - DNA, 80 bp, synthetic construct; identical to SEQ ID NO: 20520
  source 1..80: mol_type = other DNA

SEQ ID NO: 55447 - DNA, 80 bp, synthetic construct; identical to SEQ ID NO: 20521
  source 1..80: mol_type = other DNA

SEQ ID NO: 55448 - DNA, 80 bp, synthetic construct; identical to SEQ ID NO: 9044
  source 1..80: mol_type = other DNA

SEQ ID NO: 55449 - DNA, 80 bp, synthetic construct; identical to SEQ ID NO: 20523
  source 1..80: mol_type = other DNA

SEQ ID NO: 55450 - DNA, 80 bp, synthetic construct; identical to SEQ ID NO: 20524
  source 1..80: mol_type = other DNA

SEQ ID NO: 55451 - DNA, 80 bp, synthetic construct; identical to SEQ ID NO: 20525
  source 1..80: mol_type = other DNA

SEQ ID NO: 55452 - DNA, 80 bp, synthetic construct; identical to SEQ ID NO: 9045
  source 1..80: mol_type = other DNA

SEQ ID NO: 55453 - DNA, 80 bp, synthetic construct; identical to SEQ ID NO: 20527
  source 1..80: mol_type = other DNA

SEQ ID NO: 55454 - DNA, 80 bp, synthetic construct; identical to SEQ ID NO: 20528
  source 1..80: mol_type = other DNA

SEQ ID NO: 55455 - DNA, 80 bp, synthetic construct; identical to SEQ ID NO: 20529
  source 1..80: mol_type = other DNA

SEQ ID NO: 55456 - DNA, 80 bp, synthetic construct; identical to SEQ ID NO: 9046
  source 1..80: mol_type = other DNA

SEQ ID NO: 55457 - DNA, 80 bp, synthetic construct; identical to SEQ ID NO: 20531
  source 1..80: mol_type = other DNA

SEQ ID NO: 55458 - DNA, 80 bp, synthetic construct; identical to SEQ ID NO: 20532
  source 1..80: mol_type = other DNA

SEQ ID NO: 55459 - DNA, 80 bp, synthetic construct; identical to SEQ ID NO: 9047
  source 1..80: mol_type = other DNA

SEQ ID NO: 55460 - DNA, 80 bp, synthetic construct; identical to SEQ ID NO: 20534
  source 1..80: mol_type = other DNA

SEQ ID NO: 55461 - DNA, 80 bp, synthetic construct; identical to SEQ ID NO: 20535
  source 1..80: mol_type = other DNA

SEQ ID NO: 55462 - DNA, 80 bp, synthetic construct; identical to SEQ ID NO: 20536
  source 1..80: mol_type = other DNA

SEQ ID NO: 55463 - DNA, 80 bp, synthetic construct; identical to SEQ ID NO: 20537
  source 1..80: mol_type = other DNA

SEQ ID NO: 55464 - DNA, 80 bp, synthetic construct; identical to SEQ ID NO: 9048
  source 1..80: mol_type = other DNA

SEQ ID NO: 55465 - DNA, 80 bp, synthetic construct; identical to SEQ ID NO: 20539
  source 1..80: mol_type = other DNA

SEQ ID NO: 55466 - DNA, 80 bp, synthetic construct; identical to SEQ ID NO: 9049
  source 1..80: mol_type = other DNA

SEQ ID NO: 55467 - DNA, 80 bp, synthetic construct; identical to SEQ ID NO: 20542
  source 1..80: mol_type = other DNA

SEQ ID NO: 55468 - DNA, 80 bp, synthetic construct; identical to SEQ ID NO: 20543
  source 1..80: mol_type = other DNA

SEQ ID NO: 55469 - DNA, 80 bp, synthetic construct; identical to SEQ ID NO: 20544
  source 1..80: mol_type = other DNA

SEQ ID NO: 55470 - DNA, 80 bp, synthetic construct; identical to SEQ ID NO: 20545
  source 1..80: mol_type = other DNA

SEQ ID NO: 55471 - DNA, 80 bp, synthetic construct; identical to SEQ ID NO: 9050
  source 1..80: mol_type = other DNA

SEQ ID NO: 55472 - DNA, 80 bp, synthetic construct; identical to SEQ ID NO: 20547
  source 1..80: mol_type = other DNA

SEQ ID NO: 55473 - DNA, 80 bp, synthetic construct; identical to SEQ ID NO: 20548
  source 1..80: mol_type = other DNA

SEQ ID NO: 55474 - DNA, 80 bp, synthetic construct; identical to SEQ ID NO: 9051
  source 1..80: mol_type = other DNA

SEQ ID NO: 55475 - DNA, 80 bp, synthetic construct; identical to SEQ ID NO: 20550
  source 1..80: mol_type = other DNA

SEQ ID NO: 55476 - DNA, 80 bp, synthetic construct; identical to SEQ ID NO: 20551
  source 1..80: mol_type = other DNA

SEQ ID NO: 55477 - DNA, 80 bp, synthetic construct; identical to SEQ ID NO: 20552
  source 1..80: mol_type = other DNA

SEQ ID NO: 55478 - DNA, 80 bp, synthetic construct; identical to SEQ ID NO: 9052
  source 1..80: mol_type = other DNA

SEQ ID NO: 55479 - DNA, 80 bp, synthetic construct; identical to SEQ ID NO: 20554
  source 1..80: mol_type = other DNA

SEQ ID NO: 55480 - DNA, 80 bp, synthetic construct; identical to SEQ ID NO: 20555
  source 1..80: mol_type = other DNA

SEQ ID NO: 55481 - DNA, 80 bp, synthetic construct; identical to SEQ ID NO: 20556
  source 1..80: mol_type = other DNA

SEQ ID NO: 55482 - DNA, 80 bp, synthetic construct; identical to SEQ ID NO: 9053
  source 1..80: mol_type = other DNA

SEQ ID NO: 55483 - DNA, 80 bp, synthetic construct; identical to SEQ ID NO: 20558
  source 1..80: mol_type = other DNA

SEQ ID NO: 55484 - DNA, 80 bp, synthetic construct; identical to SEQ ID NO: 20559
  source 1..80: mol_type = other DNA

SEQ ID NO: 55485 - DNA, 80 bp, synthetic construct; identical to SEQ ID NO: 20560
  source 1..80: mol_type = other DNA

SEQ ID NO: 55486 - DNA, 80 bp, synthetic construct; identical to SEQ ID NO: 9054
  source 1..80: mol_type = other DNA

SEQ ID NO: 55487 - DNA, 80 bp, synthetic construct; identical to SEQ ID NO: 20562
  source 1..80: mol_type = other DNA

SEQ ID NO: 55488 - DNA, 80 bp, synthetic construct; identical to SEQ ID NO: 20563
  source 1..80: mol_type = other DNA

SEQ ID NO: 55489 - DNA, 80 bp, synthetic construct; identical to SEQ ID NO: 20564
  source 1..80: mol_type = other DNA

SEQ ID NO: 55490 - DNA, 80 bp, synthetic construct; identical to SEQ ID NO: 20565
  source 1..80: mol_type = other DNA

SEQ ID NO: 55491 - DNA, 80 bp, synthetic construct; identical to SEQ ID NO: 9055
  source 1..80: mol_type = other DNA

SEQ ID NO: 55492 - DNA, 80 bp, synthetic construct; identical to SEQ ID NO: 20567
  source 1..80: mol_type = other DNA

SEQ ID NO: 55493 - DNA, 80 bp, synthetic construct; identical to SEQ ID NO: 20568
  source 1..80: mol_type = other DNA

SEQ ID NO: 55494 - DNA, 80 bp, synthetic construct; identical to SEQ ID NO: 20569
  source 1..80: mol_type = other DNA

SEQ ID NO: 55495 - DNA, 80 bp, synthetic construct; identical to SEQ ID NO: 9056
  source 1..80: mol_type = other DNA

SEQ ID NO: 55496 - DNA, 80 bp, synthetic construct; identical to SEQ ID NO: 20571
  source 1..80: mol_type = other DNA

SEQ ID NO: 55497 - DNA, 80 bp, synthetic construct; identical to SEQ ID NO: 20572
  source 1..80: mol_type = other DNA

SEQ ID NO: 55498 - DNA, 80 bp, synthetic construct; identical to SEQ ID NO: 20573
  source 1..80: mol_type = other DNA

SEQ ID NO: 55499 - DNA, 80 bp, synthetic construct; identical to SEQ ID NO: 9057
  source 1..80: mol_type = other DNA

SEQ ID NO: 55500 - DNA, 80 bp, synthetic construct; identical to SEQ ID NO: 20575
  source 1..80: mol_type = other DNA

SEQ ID NO: 55501 - DNA, 80 bp, synthetic construct; identical to SEQ ID NO: 20576
  source 1..80: mol_type = other DNA

SEQ ID NO: 55502 - DNA, 80 bp, synthetic construct; identical to SEQ ID NO: 20577
  source 1..80: mol_type = other DNA

SEQ ID NO: 55503 - DNA, 80 bp, synthetic construct; identical to SEQ ID NO: 9058
  source 1..80: mol_type = other DNA

SEQ ID NO: 55504 - DNA, 80 bp, synthetic construct; identical to SEQ ID NO: 20579
  source 1..80: mol_type = other DNA

SEQ ID NO: 55505 - DNA, 80 bp, synthetic construct; identical to SEQ ID NO: 20580
  source 1..80: mol_type = other DNA

SEQ ID NO: 55506 - DNA, 80 bp, synthetic construct; identical to SEQ ID NO: 20581
  source 1..80: mol_type = other DNA

SEQ ID NO: 55507 - DNA, 80 bp, synthetic construct; identical to SEQ ID NO: 9059
  source 1..80: mol_type = other DNA

SEQ ID NO: 55508 - DNA, 80 bp, synthetic construct; identical to SEQ ID NO: 20583
  source 1..80: mol_type = other DNA

SEQ ID NO: 55509 - DNA, 80 bp, synthetic construct; identical to SEQ ID NO: 20584
  source 1..80: mol_type = other DNA

SEQ ID NO: 55510 - DNA, 80 bp, synthetic construct; identical to SEQ ID NO: 20585
  source 1..80: mol_type = other DNA

SEQ ID NO: 55511 - DNA, 80 bp, synthetic construct; identical to SEQ ID NO: 9060
  source 1..80: mol_type = other DNA

SEQ ID NO: 55512 - DNA, 80 bp, synthetic construct; identical to SEQ ID NO: 20587
  source 1..80: mol_type = other DNA

SEQ ID NO: 55513 - DNA, 80 bp, synthetic construct; identical to SEQ ID NO: 20588
  source 1..80: mol_type = other DNA

SEQ ID NO: 55514 - DNA, 80 bp, synthetic construct; identical to SEQ ID NO: 9061
  source 1..80: mol_type = other DNA

SEQ ID NO: 55515 - DNA, 80 bp, synthetic construct; identical to SEQ ID NO: 20590
  source 1..80: mol_type = other DNA

SEQ ID NO: 55516 - DNA, 80 bp, synthetic construct; identical to SEQ ID NO: 20591
  source 1..80: mol_type = other DNA

SEQ ID NO: 55517 - DNA, 80 bp, synthetic construct; identical to SEQ ID NO: 20592
  source 1..80: mol_type = other DNA

SEQ ID NO: 55518 - DNA, 80 bp, synthetic construct; identical to SEQ ID NO: 20593
  source 1..80: mol_type = other DNA

SEQ ID NO: 55519 - DNA, 80 bp, synthetic construct; identical to SEQ ID NO: 9062
  source 1..80: mol_type = other DNA

SEQ ID NO: 55520 - DNA, 80 bp, synthetic construct; identical to SEQ ID NO: 20595
  source 1..80: mol_type = other DNA

SEQ ID NO: 55521 - DNA, 80 bp, synthetic construct; identical to SEQ ID NO: 9063
  source 1..80: mol_type = other DNA

SEQ ID NO: 55522 - DNA, 80 bp, synthetic construct; identical to SEQ ID NO: 20599
  source 1..80: mol_type = other DNA

SEQ ID NO: 55523 - DNA, 80 bp, synthetic construct; identical to SEQ ID NO: 20600
  source 1..80: mol_type = other DNA

SEQ ID NO: 55524 - DNA, 80 bp, synthetic construct; identical to SEQ ID NO: 9064
  source 1..80: mol_type = other DNA

SEQ ID NO: 55525 - DNA, 80 bp, synthetic construct; identical to SEQ ID NO: 20602
  source 1..80: mol_type = other DNA

SEQ ID NO: 55526 - DNA, 80 bp, synthetic construct; identical to SEQ ID NO: 20603
  source 1..80: mol_type = other DNA

SEQ ID NO: 55527 - DNA, 80 bp, synthetic construct; identical to SEQ ID NO: 20604
  source 1..80: mol_type = other DNA

SEQ ID NO: 55528 - DNA, 80 bp, synthetic construct; identical to SEQ ID NO: 20605
  source 1..80: mol_type = other DNA

SEQ ID NO: 55529 - DNA, 80 bp, synthetic construct; identical to SEQ ID NO: 9065
  source 1..80: mol_type = other DNA

SEQ ID NO: 55530 - DNA, 80 bp, synthetic construct; identical to SEQ ID NO: 20607
  source 1..80: mol_type = other DNA

SEQ ID NO: 55531 - DNA, 80 bp, synthetic construct; identical to SEQ ID NO: 20608
  source 1..80: mol_type = other DNA

SEQ ID NO: 55532 - DNA, 80 bp, synthetic construct; identical to SEQ ID NO: 9066
  source 1..80: mol_type = other DNA

SEQ ID NO: 55533 - DNA, 80 bp, synthetic construct; identical to SEQ ID NO: 20610
  source 1..80: mol_type = other DNA

SEQ ID NO: 55534 - DNA, 80 bp, synthetic construct; identical to SEQ ID NO: 20611
  source 1..80: mol_type = other DNA

SEQ ID NO: 55535 - DNA, 80 bp, synthetic construct; identical to SEQ ID NO: 20612
  source 1..80: mol_type = other DNA

SEQ ID NO: 55536 - DNA, 80 bp, synthetic construct; identical to SEQ ID NO: 20613
  source 1..80: mol_type = other DNA

SEQ ID NO: 55537 - DNA, 80 bp, synthetic construct; identical to SEQ ID NO: 9067
  source 1..80: mol_type = other DNA

SEQ ID NO: 55538 - DNA, 80 bp, synthetic construct; identical to SEQ ID NO: 20615
  source 1..80: mol_type = other DNA

SEQ ID NO: 55539 - DNA, 80 bp, synthetic construct; identical to SEQ ID NO: 20616
  source 1..80: mol_type = other DNA

SEQ ID NO: 55540 - DNA, 80 bp, synthetic construct; identical to SEQ ID NO: 20617
  source 1..80: mol_type = other DNA

SEQ ID NO: 55541 - DNA, 80 bp, synthetic construct; identical to SEQ ID NO: 9068
  source 1..80: mol_type = other DNA

SEQ ID NO: 55542 - DNA, 80 bp, synthetic construct; identical to SEQ ID NO: 20619
  source 1..80: mol_type = other DNA

SEQ ID NO: 55543 - DNA, 80 bp, synthetic construct; identical to SEQ ID NO: 20620
  source 1..80: mol_type = other DNA

SEQ ID NO: 55544 - DNA, 80 bp, synthetic construct; identical to SEQ ID NO: 9069
  source 1..80: mol_type = other DNA

SEQ ID NO: 55545 - DNA, 80 bp, synthetic construct; identical to SEQ ID NO: 20622
  source 1..80: mol_type = other DNA

SEQ ID NO: 55546 - DNA, 80 bp, synthetic construct; identical to SEQ ID NO: 20623
  source 1..80: mol_type = other DNA

SEQ ID NO: 55547 - DNA, 80 bp, synthetic construct; identical to SEQ ID NO: 20624
  source 1..80: mol_type = other DNA

SEQ ID NO: 55548 - DNA, 80 bp, synthetic construct; identical to SEQ ID NO: 9070
  source 1..80: mol_type = other DNA

SEQ ID NO: 55549 - DNA, 80 bp, synthetic construct; identical to SEQ ID NO: 20626
  source 1..80: mol_type = other DNA

SEQ ID NO: 55550 - DNA, 80 bp, synthetic construct; identical to SEQ ID NO: 20627
  source 1..80: mol_type = other DNA

SEQ ID NO: 55551 - DNA, 80 bp, synthetic construct; identical to SEQ ID NO: 20628
  source 1..80: mol_type = other DNA

SEQ ID NO: 55552 - DNA, 80 bp, synthetic construct; identical to SEQ ID NO: 20629
  source 1..80: mol_type = other DNA

SEQ ID NO: 55553 - DNA, 80 bp, synthetic construct; identical to SEQ ID NO: 9071
  source 1..80: mol_type = other DNA

SEQ ID NO: 55554 - DNA, 80 bp, synthetic construct; identical to SEQ ID NO: 20632
  source 1..80: mol_type = other DNA

SEQ ID NO: 55555 - DNA, 80 bp, synthetic construct; identical to SEQ ID NO: 9072
  source 1..80: mol_type = other DNA

SEQ ID NO: 55556 - DNA, 80 bp, synthetic construct; identical to SEQ ID NO: 20634
  source 1..80: mol_type = other DNA

SEQ ID NO: 55557 - DNA, 80 bp, synthetic construct; identical to SEQ ID NO: 20635
  source 1..80: mol_type = other DNA

SEQ ID NO: 55558 - DNA, 80 bp, synthetic construct; identical to SEQ ID NO: 20636
  source 1..80: mol_type = other DNA

SEQ ID NO: 55559 - DNA, 80 bp, synthetic construct; identical to SEQ ID NO: 9073
  source 1..80: mol_type = other DNA

SEQ ID NO: 55560 - DNA, 80 bp, synthetic construct; identical to SEQ ID NO: 20638
  source 1..80: mol_type = other DNA

SEQ ID NO: 55561 - DNA, 80 bp, synthetic construct; identical to SEQ ID NO: 20639
  source 1..80: mol_type = other DNA

SEQ ID NO: 55562 - DNA, 80 bp, synthetic construct; identical to SEQ ID NO: 9074
  source 1..80: mol_type = other DNA

SEQ ID NO: 55563 - DNA, 80 bp, synthetic construct; identical to SEQ ID NO: 20642
  source 1..80: mol_type = other DNA

SEQ ID NO: 55564 - DNA, 80 bp, synthetic construct; identical to SEQ ID NO: 20643
  source 1..80: mol_type = other DNA

SEQ ID NO: 55565 - DNA, 80 bp, synthetic construct; identical to SEQ ID NO: 20644
  source 1..80: mol_type = other DNA

SEQ ID NO: 55566 - DNA, 80 bp, synthetic construct; identical to SEQ ID NO: 9075
  source 1..80: mol_type = other DNA

SEQ ID NO: 55567 - DNA, 80 bp, synthetic construct; identical to SEQ ID NO: 20646
  source 1..80: mol_type = other DNA

SEQ ID NO: 55568 - DNA, 80 bp, synthetic construct; identical to SEQ ID NO: 20647
  source 1..80: mol_type = other DNA

SEQ ID NO: 55569 - DNA, 80 bp, synthetic construct; identical to SEQ ID NO: 20648
  source 1..80: mol_type = other DNA

SEQ ID NO: 55570 - DNA, 80 bp, synthetic construct; identical to SEQ ID NO: 20649
  source 1..80: mol_type = other DNA

SEQ ID NO: 55571 - DNA, 80 bp, synthetic construct; identical to SEQ ID NO: 9076
  source 1..80: mol_type = other DNA

SEQ ID NO: 55572 - DNA, 80 bp, synthetic construct; identical to SEQ ID NO: 20651
  source 1..80: mol_type = other DNA

SEQ ID NO: 55573 - DNA, 80 bp, synthetic construct; identical to SEQ ID NO: 20652
  source 1..80: mol_type = other DNA

SEQ ID NO: 55574 - DNA, 80 bp, synthetic construct; identical to SEQ ID NO: 9077
  source 1..80: mol_type = other DNA

SEQ ID NO: 55575 - DNA, 80 bp, synthetic construct; identical to SEQ ID NO: 20654
  source 1..80: mol_type = other DNA

SEQ ID NO: 55576 - DNA, 80 bp, synthetic construct; identical to SEQ ID NO: 20655
  source 1..80: mol_type = other DNA

SEQ ID NO: 55577 - DNA, 80 bp, synthetic construct; identical to SEQ ID NO: 20656
  source 1..80: mol_type = other DNA

SEQ ID NO: 55578 - DNA, 80 bp, synthetic construct; identical to SEQ ID NO: 9078
  source 1..80: mol_type = other DNA

SEQ ID NO: 55579 - DNA, 80 bp, synthetic construct; identical to SEQ ID NO: 20658
  source 1..80: mol_type = other DNA

SEQ ID NO: 55580 - DNA, 80 bp, synthetic construct; identical to SEQ ID NO: 20659
  source 1..80: mol_type = other DNA

SEQ ID NO: 55581 - DNA, 80 bp, synthetic construct; identical to SEQ ID NO: 20660
  source 1..80: mol_type = other DNA

SEQ ID NO: 55582 - DNA, 80 bp, synthetic construct; identical to SEQ ID NO: 9079
  source 1..80: mol_type = other DNA

SEQ ID NO: 55583 - DNA, 80 bp, synthetic construct; identical to SEQ ID NO: 20663
  source 1..80: mol_type = other DNA

SEQ ID NO: 55584 - DNA, 80 bp, synthetic construct; identical to SEQ ID NO: 20664
  source 1..80: mol_type = other DNA

SEQ ID NO: 55585 - DNA, 80 bp, synthetic construct; identical to SEQ ID NO: 20665
  source 1..80: mol_type = other DNA

SEQ ID NO: 55586 - DNA, 80 bp, synthetic construct; identical to SEQ ID NO: 9080
  source 1..80: mol_type = other DNA

SEQ ID NO: 55587 - DNA, 80 bp, synthetic construct; identical to SEQ ID NO: 20667
  source 1..80: mol_type = other DNA

SEQ ID NO: 55588 - DNA, 80 bp, synthetic construct; identical to SEQ ID NO: 20668
  source 1..80: mol_type = other DNA

SEQ ID NO: 55589 - DNA, 80 bp, synthetic construct; identical to SEQ ID NO: 9081
  source 1..80: mol_type = other DNA

SEQ ID NO: 55590 - DNA, 80 bp, synthetic construct; identical to SEQ ID NO: 20670
  source 1..80: mol_type = other DNA

SEQ ID NO: 55591 - DNA, 80 bp, synthetic construct; identical to SEQ ID NO: 20671
  source 1..80: mol_type = other DNA

SEQ ID NO: 55592 - DNA, 80 bp, synthetic construct; identical to SEQ ID NO: 20672
  source 1..80: mol_type = other DNA

SEQ ID NO: 55593 - DNA, 80 bp, synthetic construct; identical to SEQ ID NO: 9082
  source 1..80: mol_type = other DNA

SEQ ID NO: 55594 - DNA, 80 bp, synthetic construct; identical to SEQ ID NO: 20675
  source 1..80: mol_type = other DNA

SEQ ID NO: 55595 - DNA, 80 bp, synthetic construct; identical to SEQ ID NO: 20676
  source 1..80: mol_type = other DNA

SEQ ID NO: 55596 - DNA, 80 bp, synthetic construct; identical to SEQ ID NO: 9083
  source 1..80: mol_type = other DNA

SEQ ID NO: 55597 - DNA, 80 bp, synthetic construct; identical to SEQ ID NO: 20678
  source 1..80: mol_type = other DNA

SEQ ID NO: 55598 - DNA, 80 bp, synthetic construct; identical to SEQ ID NO: 20679
  source 1..80: mol_type = other DNA

SEQ ID NO: 55599 - DNA, 80 bp, synthetic construct; identical to SEQ ID NO: 20680
  source 1..80: mol_type = other DNA

SEQ ID NO: 55600 - DNA, 80 bp, synthetic construct; identical to SEQ ID NO: 20681
  source 1..80: mol_type = other DNA

SEQ ID NO: 55601 - DNA, 80 bp, synthetic construct; identical to SEQ ID NO: 9084
  source 1..80: mol_type = other DNA

SEQ ID NO: 55602 - DNA, 80 bp, synthetic construct; identical to SEQ ID NO: 20683
  source 1..80: mol_type = other DNA

SEQ ID NO: 55603 - DNA, 80 bp, synthetic construct; identical to SEQ ID NO: 20684
  source 1..80: mol_type = other DNA

SEQ ID NO: 55604 - DNA, 80 bp, synthetic construct; identical to SEQ ID NO: 9085
  source 1..80: mol_type = other DNA

SEQ ID NO: 55605 - DNA, 80 bp, synthetic construct; identical to SEQ ID NO: 20687
  source 1..80: mol_type = other DNA

SEQ ID NO: 55606 - DNA, 80 bp, synthetic construct; identical to SEQ ID NO: 9086
  source 1..80: mol_type = other DNA

SEQ ID NO: 55607 - DNA, 80 bp, synthetic construct; identical to SEQ ID NO: 20691
  source 1..80: mol_type = other DNA

SEQ ID NO: 55608 - DNA, 80 bp, synthetic construct; identical to SEQ ID NO: 20693
  source 1..80: mol_type = other DNA

SEQ ID NO: 55609 - DNA, 80 bp, synthetic construct; identical to SEQ ID NO: 20695
  source 1..80: mol_type = other DNA

SEQ ID NO: 55610 - DNA, 80 bp, synthetic construct; identical to SEQ ID NO: 9088
  source 1..80: mol_type = other DNA

SEQ ID NO: 55611 - DNA, 80 bp, synthetic construct; identical to SEQ ID NO: 20698
  source 1..80: mol_type = other DNA

SEQ ID NO: 55612 - DNA, 80 bp, synthetic construct; identical to SEQ ID NO: 20699
  source 1..80: mol_type = other DNA

SEQ ID NO: 55613 - DNA, 80 bp, synthetic construct; identical to SEQ ID NO: 20700
  source 1..80: mol_type = other DNA

SEQ ID NO: 55614 - DNA, 80 bp, synthetic construct; identical to SEQ ID NO: 9089
  source 1..80: mol_type = other DNA

SEQ ID NO: 55615 - DNA, 80 bp, synthetic construct; identical to SEQ ID NO: 20703
  source 1..80: mol_type = other DNA

SEQ ID NO: 55616 - DNA, 80 bp, synthetic construct; identical to SEQ ID NO: 20704
  source 1..80: mol_type = other DNA

SEQ ID NO: 55617 - DNA, 80 bp, synthetic construct; identical to SEQ ID NO: 9090
  source 1..80: mol_type = other DNA

SEQ ID NO: 55618 - DNA, 80 bp, synthetic construct; identical to SEQ ID NO: 20706
  source 1..80: mol_type = other DNA

SEQ ID NO: 55619 - DNA, 80 bp, synthetic construct; identical to SEQ ID NO: 20707
  source 1..80: mol_type = other DNA

SEQ ID NO: 55620 - DNA, 80 bp, synthetic construct; identical to SEQ ID NO: 20708
  source 1..80: mol_type = other DNA

SEQ ID NO: 55621 - DNA, 80 bp, synthetic construct; identical to SEQ ID NO: 20709
  source 1..80: mol_type = other DNA

SEQ ID NO: 55622 - DNA, 80 bp, synthetic construct; identical to SEQ ID NO: 9091
  source 1..80: mol_type = other DNA

SEQ ID NO: 55623 - DNA, 80 bp, synthetic construct; identical to SEQ ID NO: 20711
  source 1..80: mol_type = other DNA

SEQ ID NO: 55624 - DNA, 80 bp, synthetic construct; identical to SEQ ID NO: 20713
  source 1..80: mol_type = other DNA

SEQ ID NO: 55625 - DNA, 80 bp, synthetic construct; identical to SEQ ID NO: 9092
  source 1..80: mol_type = other DNA

SEQ ID NO: 55626 - DNA, 80 bp, synthetic construct; identical to SEQ ID NO: 20715
  source 1..80: mol_type = other DNA

SEQ ID NO: 55627 - DNA, 80 bp, synthetic construct; identical to SEQ ID NO: 20716
  source 1..80: mol_type = other DNA

SEQ ID NO: 55628 - DNA, 80 bp, synthetic construct; identical to SEQ ID NO: 9093
  source 1..80: mol_type = other DNA

SEQ ID NO: 55629 - DNA, 80 bp, synthetic construct; identical to SEQ ID NO: 20718
  source 1..80: mol_type = other DNA

SEQ ID NO: 55630 - DNA, 80 bp, synthetic construct; identical to SEQ ID NO: 20720
  source 1..80: mol_type = other DNA

SEQ ID NO: 55631 - DNA, 80 bp, synthetic construct; identical to SEQ ID NO: 20721
  source 1..80: mol_type = other DNA

SEQ ID NO: 55632 - DNA, 80 bp, synthetic construct; identical to SEQ ID NO: 9094
  source 1..80: mol_type = other DNA

SEQ ID NO: 55633 - DNA, 80 bp, synthetic construct; identical to SEQ ID NO: 20723
  source 1..80: mol_type = other DNA

SEQ ID NO: 55634 - DNA, 80 bp, synthetic construct; identical to SEQ ID NO: 20724
  source 1..80: mol_type = other DNA

SEQ ID NO: 55635 - DNA, 80 bp, synthetic construct; identical to SEQ ID NO: 20725
  source 1..80: mol_type = other DNA

SEQ ID NO: 55636 - DNA, 80 bp, synthetic construct; identical to SEQ ID NO: 9095
  source 1..80: mol_type = other DNA

SEQ ID NO: 55637 - DNA, 80 bp, synthetic construct; identical to SEQ ID NO: 20727
  source 1..80: mol_type = other DNA

SEQ ID NO: 55638 - DNA, 80 bp, synthetic construct; identical to SEQ ID NO: 20728
  source 1..80: mol_type = other DNA

SEQ ID NO: 55639 - DNA, 80 bp, synthetic construct; identical to SEQ ID NO: 20729
  source 1..80: mol_type = other DNA

SEQ ID NO: 55640 - DNA, 80 bp, synthetic construct; identical to SEQ ID NO: 9096
  source 1..80: mol_type = other DNA

SEQ ID NO: 55641 - DNA, 80 bp, synthetic construct; identical to SEQ ID NO: 20731
  source 1..80: mol_type = other DNA

SEQ ID NO: 55642 - DNA, 80 bp, synthetic construct; identical to SEQ ID NO: 20732
  source 1..80: mol_type = other DNA

SEQ ID NO: 55643 - DNA, 80 bp, synthetic construct; identical to SEQ ID NO: 9097
  source 1..80: mol_type = other DNA

SEQ ID NO: 55644 - DNA, 80 bp, synthetic construct; identical to SEQ ID NO: 20734
  source 1..80: mol_type = other DNA

SEQ ID NO: 55645 - DNA, 80 bp, synthetic construct; identical to SEQ ID NO: 20735
  source 1..80: mol_type = other DNA

SEQ ID NO: 55646 - DNA, 80 bp, synthetic construct; identical to SEQ ID NO: 20736
  source 1..80: mol_type = other DNA

SEQ ID NO: 55647 - DNA, 80 bp, synthetic construct; identical to SEQ ID NO: 9098
  source 1..80: mol_type = other DNA

SEQ ID NO: 55648 - DNA, 80 bp, synthetic construct; identical to SEQ ID NO: 20738
  source 1..80: mol_type = other DNA

SEQ ID NO: 55649 - DNA, 80 bp, synthetic construct; identical to SEQ ID NO: 20739
  source 1..80: mol_type = other DNA

SEQ ID NO: 55650 - DNA, 80 bp, synthetic construct; identical to SEQ ID NO: 20740
  source 1..80: mol_type = other DNA

SEQ ID NO: 55651 - DNA, 80 bp, synthetic construct; identical to SEQ ID NO: 20741
  source 1..80: mol_type = other DNA

SEQ ID NO: 55652 - DNA, 80 bp, synthetic construct; identical to SEQ ID NO: 9099
  source 1..80: mol_type = other DNA

SEQ ID NO: 55653 - DNA, 80 bp, synthetic construct; identical to SEQ ID NO: 20743
  source 1..80: mol_type = other DNA

SEQ ID NO: 55654 - DNA, 80 bp, synthetic construct; identical to SEQ ID NO: 20744
  source 1..80: mol_type = other DNA

SEQ ID NO: 55655 - DNA, 80 bp, synthetic construct; identical to SEQ ID NO: 9100
  source 1..80: mol_type = other DNA

SEQ ID NO: 55656 - DNA, 80 bp, synthetic construct; identical to SEQ ID NO: 20746
  source 1..80: mol_type = other DNA

SEQ ID NO: 55657 - DNA, 80 bp, synthetic construct; identical to SEQ ID NO: 20747
  source 1..80: mol_type = other DNA

SEQ ID NO: 55658 - DNA, 80 bp, synthetic construct; identical to SEQ ID NO: 20748
  source 1..80: mol_type = other DNA

SEQ ID NO: 55659 - DNA, 80 bp, synthetic construct; identical to SEQ ID NO: 9101
  source 1..80: mol_type = other DNA

SEQ ID NO: 55660 - DNA, 80 bp, synthetic construct; identical to SEQ ID NO: 20750
  source 1..80: mol_type = other DNA

SEQ ID NO: 55661 - DNA, 80 bp, synthetic construct; identical to SEQ ID NO: 20751
  source 1..80: mol_type = other DNA

SEQ ID NO: 55662 - DNA, 80 bp, synthetic construct; identical to SEQ ID NO: 20752
  source 1..80: mol_type = other DNA

SEQ ID NO: 55663 - DNA, 80 bp, synthetic construct; identical to SEQ ID NO: 9102
  source 1..80: mol_type = other DNA

SEQ ID NO: 55664 - DNA, 80 bp, synthetic construct; identical to SEQ ID NO: 20754
  source 1..80: mol_type = other DNA

SEQ ID NO: 55665 - DNA, 80 bp, synthetic construct; identical to SEQ ID NO: 20755
  source 1..80: mol_type = other DNA

SEQ ID NO: 55666 - DNA, 80 bp, synthetic construct; identical to SEQ ID NO: 20756
  source 1..80: mol_type = other DNA

SEQ ID NO: 55667 - DNA, 80 bp, synthetic construct; identical to SEQ ID NO: 9103
  source 1..80: mol_type = other DNA

SEQ ID NO: 55668 - DNA, 80 bp, synthetic construct; identical to SEQ ID NO: 20758
  source 1..80: mol_type = other DNA

SEQ ID NO: 55669 - DNA, 80 bp, synthetic construct; identical to SEQ ID NO: 20759
  source 1..80: mol_type = other DNA

SEQ ID NO: 55670 - DNA, 80 bp, synthetic construct; identical to SEQ ID NO: 20760
  source 1..80: mol_type = other DNA

SEQ ID NO: 55671 - DNA, 80 bp, synthetic construct; identical to SEQ ID NO: 9104
  source 1..80: mol_type = other DNA

SEQ ID NO: 55672 - DNA, 80 bp, synthetic construct; identical to SEQ ID NO: 20762
  source 1..80: mol_type = other DNA

SEQ ID NO: 55673 - DNA, 80 bp, synthetic construct; identical to SEQ ID NO: 20763
  source 1..80: mol_type = other DNA

SEQ ID NO: 55674 - DNA, 80 bp, synthetic construct; identical to SEQ ID NO: 20764
  source 1..80: mol_type = other DNA

SEQ ID NO: 55675 - DNA, 80 bp, synthetic construct; identical to SEQ ID NO: 9105
  source 1..80: mol_type = other DNA

SEQ ID NO: 55676 - DNA, 80 bp, synthetic construct; identical to SEQ ID NO: 20767
  source 1..80: mol_type = other DNA

SEQ ID NO: 55677 - DNA, 80 bp, synthetic construct; identical to SEQ ID NO: 20768
  source 1..80: mol_type = other DNA

SEQ ID NO: 55678 - DNA, 80 bp, synthetic construct; identical to SEQ ID NO: 20769
  source 1..80: mol_type = other DNA

SEQ ID NO: 55679 - DNA, 80 bp, synthetic construct; identical to SEQ ID NO: 9106
  source 1..80: mol_type = other DNA

SEQ ID NO: 55680 - DNA, 80 bp, synthetic construct; identical to SEQ ID NO: 20771
  source 1..80: mol_type = other DNA

SEQ ID NO: 55681 - DNA, 80 bp, synthetic construct; identical to SEQ ID NO: 20772
  source 1..80: mol_type = other DNA

SEQ ID NO: 55682 - DNA, 80 bp, synthetic construct; identical to SEQ ID NO: 20773
  source 1..80: mol_type = other DNA

SEQ ID NO: 55683 - DNA, 80 bp, synthetic construct; identical to SEQ ID NO: 9107
  source 1..80: mol_type = other DNA

SEQ ID NO: 55684 - DNA, 80 bp, synthetic construct; identical to SEQ ID NO: 20775
  source 1..80: mol_type = other DNA

SEQ ID NO: 55685 - DNA, 80 bp, synthetic construct; identical to SEQ ID NO: 20776
  source 1..80: mol_type = other DNA

SEQ ID NO: 55686 - DNA, 80 bp, synthetic construct; identical to SEQ ID NO: 20777
  source 1..80: mol_type = other DNA

SEQ ID NO: 55687 - DNA, 80 bp, synthetic construct; identical to SEQ ID NO: 20778
  source 1..80: mol_type = other DNA

SEQ ID NO: 55688 - DNA, 80 bp, synthetic construct; identical to SEQ ID NO: 9108
  source 1..80: mol_type = other DNA

SEQ ID NO: 55689 - DNA, 80 bp, synthetic construct; identical to SEQ ID NO: 20780
  source 1..80: mol_type = other DNA

SEQ ID NO: 55690 - DNA, 80 bp, synthetic construct; identical to SEQ ID NO: 20781
  source 1..80: mol_type = other DNA

SEQ ID NO: 55691 - DNA, 80 bp, synthetic construct; identical to SEQ ID NO: 9109
  source 1..80: mol_type = other DNA

SEQ ID NO: 55692 - DNA, 80 bp, synthetic construct; identical to SEQ ID NO: 20783
  source 1..80: mol_type = other DNA

SEQ ID NO: 55693 - DNA, 80 bp, synthetic construct; identical to SEQ ID NO: 20784
  source 1..80: mol_type = other DNA

SEQ ID NO: 55694 - DNA, 80 bp, synthetic construct; identical to SEQ ID NO: 20785
  source 1..80: mol_type = other DNA

SEQ ID NO: 55695 - DNA, 80 bp, synthetic construct; identical to SEQ ID NO: 9110
  source 1..80: mol_type = other DNA

SEQ ID NO: 55696 - DNA, 80 bp, synthetic construct; identical to SEQ ID NO: 20787
  source 1..80: mol_type = other DNA

SEQ ID NO: 55697 - DNA, 80 bp, synthetic construct; identical to SEQ ID NO: 20788
  source 1..80: mol_type = other DNA

SEQ ID NO: 55698 - DNA, 80 bp, synthetic construct; identical to SEQ ID NO: 20789
  source 1..80: mol_type = other DNA

SEQ ID NO: 55699 - DNA, 80 bp, synthetic construct; identical to SEQ ID NO: 9111
  source 1..80: mol_type = other DNA

SEQ ID NO: 55700 - DNA, 80 bp, synthetic construct; identical to SEQ ID NO: 20791
  source 1..80: mol_type = other DNA

SEQ ID NO: 55701 - DNA, 80 bp, synthetic construct; identical to SEQ ID NO: 20792
  source 1..80: mol_type = other DNA

SEQ ID NO: 55702 - DNA, 80 bp, synthetic construct; identical to SEQ ID NO: 20793
  source 1..80: mol_type = other DNA

SEQ ID NO: 55703 - DNA, 80 bp, synthetic construct; identical to SEQ ID NO: 20794
  source 1..80: mol_type = other DNA

SEQ ID NO: 55704 - DNA, 80 bp, synthetic construct; identical to SEQ ID NO: 9112
  source 1..80: mol_type = other DNA

SEQ ID NO: 55705 - DNA, 80 bp, synthetic construct; identical to SEQ ID NO: 20796
  source 1..80: mol_type = other DNA

SEQ ID NO: 55706 - DNA, 80 bp, synthetic construct; identical to SEQ ID NO: 20797
  source 1..80: mol_type = other DNA

SEQ ID NO: 55707 - DNA, 80 bp, synthetic construct; identical to SEQ ID NO: 20798
  source 1..80: mol_type = other DNA

SEQ ID NO: 55708 - DNA, 80 bp, synthetic construct; identical to SEQ ID NO: 9113
  source 1..80: mol_type = other DNA

SEQ ID NO: 55709 - DNA, 80 bp, synthetic construct; identical to SEQ ID NO: 20800
  source 1..80: mol_type = other DNA

SEQ ID NO: 55710 - DNA, 80 bp, synthetic construct; identical to SEQ ID NO: 20801
  source 1..80: mol_type = other DNA

SEQ ID NO: 55711 - DNA, 80 bp, synthetic construct; identical to SEQ ID NO: 20802
  source 1..80: mol_type = other DNA

SEQ ID NO: 55712 - DNA, 80 bp, synthetic construct; identical to SEQ ID NO: 9114
  source 1..80: mol_type = other DNA

SEQ ID NO: 55713 - DNA, 80 bp, synthetic construct; identical to SEQ ID NO: 20804
  source 1..80: mol_type = other DNA

SEQ ID NO: 55714 - DNA, 80 bp, synthetic construct; identical to SEQ ID NO: 20805
  source 1..80: mol_type = other DNA

SEQ ID NO: 55715 - DNA, 80 bp, synthetic construct; identical to SEQ ID NO: 9115
  source 1..80: mol_type = other DNA

SEQ ID NO: 55716 - DNA, 80 bp, synthetic construct; identical to SEQ ID NO: 20807
  source 1..80: mol_type = other DNA

SEQ ID NO: 55717 - DNA, 80 bp, synthetic construct; identical to SEQ ID NO: 20808
  source 1..80: mol_type = other DNA

SEQ ID NO: 55718 - DNA, 80 bp, synthetic construct; identical to SEQ ID NO: 9116
  source 1..80: mol_type = other DNA

SEQ ID NO: 55719 - DNA, 80 bp, synthetic construct; identical to SEQ ID NO: 20810
  source 1..80: mol_type = other DNA

SEQ ID NO: 55720 - DNA, 80 bp, synthetic construct; identical to SEQ ID NO: 20811
  source 1..80: mol_type = other DNA

SEQ ID NO: 55721 - DNA, 80 bp, synthetic construct; identical to SEQ ID NO: 20812
  source 1..80: mol_type = other DNA

SEQ ID NO: 55722 - DNA, 80 bp, synthetic construct; identical to SEQ ID NO: 9117
  source 1..80: mol_type = other DNA

SEQ ID NO: 55723 - DNA, 80 bp, synthetic construct; identical to SEQ ID NO: 20814
  source 1..80: mol_type = other DNA

SEQ ID NO: 55724 - DNA, 80 bp, synthetic construct; identical to SEQ ID NO: 20815
  source 1..80: mol_type = other DNA

SEQ ID NO: 55725 - DNA, 80 bp, synthetic construct; identical to SEQ ID NO: 20816
  source 1..80: mol_type = other DNA

SEQ ID NO: 55726 - DNA, 80 bp, synthetic construct; identical to SEQ ID NO: 20817
  source 1..80: mol_type = other DNA

SEQ ID NO: 55727 - DNA, 80 bp, synthetic construct; identical to SEQ ID NO: 9118
  source 1..80: mol_type = other DNA

SEQ ID NO: 55728 - DNA, 80 bp, synthetic construct; identical to SEQ ID NO: 20819
  source 1..80: mol_type = other DNA

SEQ ID NO: 55729 - DNA, 80 bp, synthetic construct; identical to SEQ ID NO: 20820
  source 1..80: mol_type = other DNA

SEQ ID NO: 55730 - DNA, 80 bp, synthetic construct; identical to SEQ ID NO: 9119
  source 1..80: mol_type = other DNA

SEQ ID NO: 55731 - DNA, 80 bp, synthetic construct; identical to SEQ ID NO: 20822
  source 1..80: mol_type = other DNA

SEQ ID NO: 55732 - DNA, 80 bp, synthetic construct; identical to SEQ ID NO: 20823
  source 1..80: mol_type = other DNA

SEQ ID NO: 55733 - DNA, 80 bp, synthetic construct; identical to SEQ ID NO: 20824
  source 1..80: mol_type = other DNA

SEQ ID NO: 55734 - DNA, 80 bp, synthetic construct; identical to SEQ ID NO: 9120
  source 1..80: mol_type = other DNA

SEQ ID NO: 55735 - DNA, 80 bp, synthetic construct; identical to SEQ ID NO: 20826
  source 1..80: mol_type = other DNA

SEQ ID NO: 55736 - DNA, 80 bp, synthetic construct; identical to SEQ ID NO: 20827
  source 1..80: mol_type = other DNA

SEQ ID NO: 55737 - DNA, 80 bp, synthetic construct; identical to SEQ ID NO: 20828
  source 1..80: mol_type = other DNA

SEQ ID NO: 55738 - DNA, 80 bp, synthetic construct; identical to SEQ ID NO: 9121
  source 1..80: mol_type = other DNA

SEQ ID NO: 55739 - DNA, 80 bp, synthetic construct; identical to SEQ ID NO: 20830
  source 1..80: mol_type = other DNA

SEQ ID NO: 55740 - DNA, 80 bp, synthetic construct; identical to SEQ ID NO: 20831
  source 1..80: mol_type = other DNA

SEQ ID NO: 55741 - DNA, 80 bp, synthetic construct; identical to SEQ ID NO: 20832
  source 1..80: mol_type = other DNA

SEQ ID NO: 55742 - DNA, 80 bp, synthetic construct; identical to SEQ ID NO: 20833
  source 1..80: mol_type = other DNA

SEQ ID NO: 55743 - DNA, 80 bp, synthetic construct; identical to SEQ ID NO: 9122
  source 1..80: mol_type = other DNA

SEQ ID NO: 55744 - DNA, 80 bp, synthetic construct; identical to SEQ ID NO: 20835
  source 1..80: mol_type = other DNA

SEQ ID NO: 55745 - DNA, 80 bp, synthetic construct; identical to SEQ ID NO: 20836
  source 1..80: mol_type = other DNA

SEQ ID NO: 55746 - DNA, 80 bp, synthetic construct; identical to SEQ ID NO: 9123
  source 1..80: mol_type = other DNA

SEQ ID NO: 55747 - DNA, 80 bp, synthetic construct; identical to SEQ ID NO: 20838
  source 1..80: mol_type = other DNA

SEQ ID NO: 55748 - DNA, 80 bp, synthetic construct; identical to SEQ ID NO: 20839
  source 1..80: mol_type = other DNA

SEQ ID NO: 55749 - DNA, 80 bp, synthetic construct; identical to SEQ ID NO: 20840
  source 1..80: mol_type = other DNA

SEQ ID NO: 55750 - DNA, 80 bp, synthetic construct; identical to SEQ ID NO: 9124
  source 1..80: mol_type = other DNA

SEQ ID NO: 55751 - DNA, 80 bp, synthetic construct; identical to SEQ ID NO: 20842
  source 1..80: mol_type = other DNA

SEQ ID NO: 55752 - DNA, 80 bp, synthetic construct; identical to SEQ ID NO: 20843
  source 1..80: mol_type = other DNA

SEQ ID NO: 55753 - DNA, 80 bp, synthetic construct; identical to SEQ ID NO: 20844
  source 1..80: mol_type = other DNA

SEQ ID NO: 55754 - DNA, 80 bp, synthetic construct; identical to SEQ ID NO: 9125
  source 1..80: mol_type = other DNA

SEQ ID NO: 55755 - DNA, 80 bp, synthetic construct; identical to SEQ ID NO: 20846
  source 1..80: mol_type = other DNA

SEQ ID NO: 55756 - DNA, 80 bp, synthetic construct; identical to SEQ ID NO: 20847
  source 1..80: mol_type = other DNA

SEQ ID NO: 55757 - DNA, 80 bp, synthetic construct; identical to SEQ ID NO: 20848
  source 1..80: mol_type = other DNA

SEQ ID NO: 55758 - DNA, 80 bp, synthetic construct; identical to SEQ ID NO: 9126
  source 1..80: mol_type = other DNA

SEQ ID NO: 55759 - DNA, 80 bp, synthetic construct; identical to SEQ ID NO: 20850
  source 1..80: mol_type = other DNA

SEQ ID NO: 55760 - DNA, 80 bp, synthetic construct; identical to SEQ ID NO: 20851
  source 1..80: mol_type = other DNA

SEQ ID NO: 55761 - DNA, 80 bp, synthetic construct; identical to SEQ ID NO: 20852
  source 1..80: mol_type = other DNA

SEQ ID NO: 55762 - DNA, 80 bp, synthetic construct; identical to SEQ ID NO: 9127
  source 1..80: mol_type = other DNA

SEQ ID NO: 55763 - DNA, 80 bp, synthetic construct; identical to SEQ ID NO: 20854
  source 1..80: mol_type = other DNA

SEQ ID NO: 55764 - DNA, 80 bp, synthetic construct; identical to SEQ ID NO: 20855
  source 1..80: mol_type = other DNA

SEQ ID NO: 55765 - DNA, 80 bp, synthetic construct; identical to SEQ ID NO: 20856
  source 1..80: mol_type = other DNA

SEQ ID NO: 55766 - DNA, 80 bp, synthetic construct; identical to SEQ ID NO: 20857
  source 1..80: mol_type = other DNA

SEQ ID NO: 55767 - DNA, 80 bp, synthetic construct; identical to SEQ ID NO: 9128
  source 1..80: mol_type = other DNA

SEQ ID NO: 55768 - DNA, 80 bp, synthetic construct; identical to SEQ ID NO: 20859
  source 1..80: mol_type = other DNA

SEQ ID NO: 55769 - DNA, 80 bp, synthetic construct; identical to SEQ ID NO: 20860
  source 1..80: mol_type = other DNA

SEQ ID NO: 55770 - DNA, 80 bp, synthetic construct; identical to SEQ ID NO: 9129
  source 1..80: mol_type = other DNA

SEQ ID NO: 55771 - DNA, 80 bp, synthetic construct; identical to SEQ ID NO: 20862
  source 1..80: mol_type = other DNA

SEQ ID NO: 55772 - DNA, 80 bp, synthetic construct; identical to SEQ ID NO: 20863
  source 1..80: mol_type = other DNA

SEQ ID NO: 55773 - DNA, 80 bp, synthetic construct; identical to SEQ ID NO: 20864
  source 1..80: mol_type = other DNA

SEQ ID NO: 55774 - DNA, 80 bp, synthetic construct; identical to SEQ ID NO: 20865
  source 1..80: mol_type = other DNA

SEQ ID NO: 55775 - DNA, 80 bp, synthetic construct; identical to SEQ ID NO: 9130
  source 1..80: mol_type = other DNA

SEQ ID NO: 55776 - DNA, 80 bp, synthetic construct; identical to SEQ ID NO: 20867
  source 1..80: mol_type = other DNA

SEQ ID NO: 55777 - DNA, 80 bp, synthetic construct; identical to SEQ ID NO: 20868
  source 1..80: mol_type = other DNA

SEQ ID NO: 55778 - DNA, 80 bp, synthetic construct; identical to SEQ ID NO: 9131
  source 1..80: mol_type = other DNA

SEQ ID NO: 55779 - DNA, 80 bp, synthetic construct; identical to SEQ ID NO: 20871
  source 1..80: mol_type = other DNA

SEQ ID NO: 55780 - DNA, 80 bp, synthetic construct; identical to SEQ ID NO: 20872
  source 1..80: mol_type = other DNA

SEQ ID NO: 55781 - DNA, 80 bp, synthetic construct; identical to SEQ ID NO: 20873
  source 1..80: mol_type = other DNA

SEQ ID NO: 55782 - DNA, 80 bp, synthetic construct; identical to SEQ ID NO: 9132
  source 1..80: mol_type = other DNA

SEQ ID NO: 55783 - DNA, 80 bp, synthetic construct; identical to SEQ ID NO: 20875
  source 1..80: mol_type = other DNA

SEQ ID NO: 55784 - DNA, 80 bp, synthetic construct; identical to SEQ ID NO: 20876
  source 1..80: mol_type = other DNA

SEQ ID NO: 55785 - DNA, 80 bp, synthetic construct; identical to SEQ ID NO: 9133
  source 1..80: mol_type = other DNA

SEQ ID NO: 55786 - DNA, 80 bp, synthetic construct; identical to SEQ ID NO: 20878
  source 1..80: mol_type = other DNA

SEQ ID NO: 55787 - DNA, 80 bp, synthetic construct; identical to SEQ ID NO: 20879
  source 1..80: mol_type = other DNA

SEQ ID NO: 55788 - DNA, 80 bp, synthetic construct; identical to SEQ ID NO: 20880
  source 1..80: mol_type = other DNA

SEQ ID NO: 55789 - DNA, 80 bp, synthetic construct; identical to SEQ ID NO: 9134
  source 1..80: mol_type = other DNA

SEQ ID NO: 55790 - DNA, 80 bp, synthetic construct; identical to SEQ ID NO: 20882
  source 1..80: mol_type = other DNA

SEQ ID NO: 55791 - DNA, 80 bp, synthetic construct; identical to SEQ ID NO: 20883
  source 1..80: mol_type = other DNA

SEQ ID NO: 55792 - DNA, 80 bp, synthetic construct; identical to SEQ ID NO: 20884
  source 1..80: mol_type = other DNA

SEQ ID NO: 55793 - DNA, 80 bp, synthetic construct; identical to SEQ ID NO: 20885
  source 1..80: mol_type = other DNA

SEQ ID NO: 55794 - DNA, 80 bp, synthetic construct; identical to SEQ ID NO: 9135
  source 1..80: mol_type = other DNA

SEQ ID NO: 55795 - DNA, 80 bp, synthetic construct; identical to SEQ ID NO: 20887
  source 1..80: mol_type = other DNA

SEQ ID NO: 55796 - DNA, 80 bp, synthetic construct; identical to SEQ ID NO: 20888
  source 1..80: mol_type = other DNA

SEQ ID NO: 55797 - DNA, 80 bp, synthetic construct; identical to SEQ ID NO: 20889
  source 1..80: mol_type = other DNA

SEQ ID NO: 55798 - DNA, 80 bp, synthetic construct; identical to SEQ ID NO: 9136
  source 1..80: mol_type = other DNA

SEQ ID NO: 55799 - DNA, 80 bp, synthetic construct; identical to SEQ ID NO: 20891
  source 1..80: mol_type = other DNA

SEQ ID NO: 55800 - DNA, 80 bp, synthetic construct; identical to SEQ ID NO: 20892
  source 1..80: mol_type = other DNA

SEQ ID NO: 55801 - DNA, 80 bp, synthetic construct; identical to SEQ ID NO: 9137
  source 1..80: mol_type = other DNA

SEQ ID NO: 55802 - DNA, 80 bp, synthetic construct; identical to SEQ ID NO: 20895
  source 1..80: mol_type = other DNA

SEQ ID NO: 55803 - DNA, 80 bp, synthetic construct; identical to SEQ ID NO: 20896
  source 1..80: mol_type = other DNA

SEQ ID NO: 55804 - DNA, 80 bp, synthetic construct; identical to SEQ ID NO: 9138
  source 1..80: mol_type = other DNA

SEQ ID NO: 55805 - DNA, 80 bp, synthetic construct; identical to SEQ ID NO: 20898
  source 1..80: mol_type = other DNA

SEQ ID NO: 55806 - DNA, 80 bp, synthetic construct; identical to SEQ ID NO: 20899
  source 1..80: mol_type = other DNA

SEQ ID NO: 55807 - DNA, 80 bp, synthetic construct; identical to SEQ ID NO: 20900
  source 1..80: mol_type = other DNA

SEQ ID NO: 55808 - DNA, 80 bp, synthetic construct; identical to SEQ ID NO: 20901
  source 1..80: mol_type = other DNA

SEQ ID NO: 55809 - DNA, 80 bp, synthetic construct; identical to SEQ ID NO: 9139
  source 1..80: mol_type = other DNA

SEQ ID NO: 55810 - DNA, 80 bp, synthetic construct; identical to SEQ ID NO: 20903
  source 1..80: mol_type = other DNA

SEQ ID NO: 55811 - DNA, 80 bp, synthetic construct; identical to SEQ ID NO: 20904
  source 1..80: mol_type = other DNA

SEQ ID NO: 55812 - DNA, 80 bp, synthetic construct; identical to SEQ ID NO: 20905
  source 1..80: mol_type = other DNA

SEQ ID NO: 55813 - DNA, 80 bp, synthetic construct; identical to SEQ ID NO: 9140
  source 1..80: mol_type = other DNA

SEQ ID NO: 55814 - DNA, 80 bp, synthetic construct; identical to SEQ ID NO: 20907
  source 1..80: mol_type = other DNA

SEQ ID NO: 55815 - DNA, 80 bp, synthetic construct; identical to SEQ ID NO: 20908
  source 1..80: mol_type = other DNA

SEQ ID NO: 55816 - DNA, 80 bp, synthetic construct; identical to SEQ ID NO: 9141
  source 1..80: mol_type = other DNA

SEQ ID NO: 55817 - DNA, 80 bp, synthetic construct; identical to SEQ ID NO: 20910
  source 1..80: mol_type = other DNA

SEQ ID NO: 55818 - DNA, 80 bp, synthetic construct; identical to SEQ ID NO: 20911
  source 1..80: mol_type = other DNA

SEQ ID NO: 55819 - DNA, 80 bp, synthetic construct; identical to SEQ ID NO: 20912
  source 1..80: mol_type = other DNA

SEQ ID NO: 55820 - DNA, 80 bp, synthetic construct; identical to SEQ ID NO: 20913
  source 1..80: mol_type = other DNA

SEQ ID NO: 55821 - DNA, 80 bp, synthetic construct; identical to SEQ ID NO: 9142
  source 1..80: mol_type = other DNA

SEQ ID NO: 55822 - DNA, 80 bp, synthetic construct; identical to SEQ ID NO: 20915
  source 1..80: mol_type = other DNA

SEQ ID NO: 55823 - DNA, 80 bp, synthetic construct; identical to SEQ ID NO: 20916
  source 1..80: mol_type = other DNA

SEQ ID NO: 55824 - DNA, 80 bp, synthetic construct; identical to SEQ ID NO: 20917
  source 1..80: mol_type = other DNA

SEQ ID NO: 55825 - DNA, 80 bp, synthetic construct; identical to SEQ ID NO: 9143
  source 1..80: mol_type = other DNA

SEQ ID NO: 55826 - DNA, 80 bp, synthetic construct; identical to SEQ ID NO: 20919
  source 1..80: mol_type = other DNA

SEQ ID NO: 55827 - DNA, 80 bp, synthetic construct; identical to SEQ ID NO: 20920
  source 1..80: mol_type = other DNA

SEQ ID NO: 55828 - DNA, 80 bp, synthetic construct; identical to SEQ ID NO: 20921
  source 1..80: mol_type = other DNA

SEQ ID NO: 55829 - DNA, 80 bp, synthetic construct; identical to SEQ ID NO: 9144
  source 1..80: mol_type = other DNA

SEQ ID NO: 55830 - DNA, 80 bp, synthetic construct; identical to SEQ ID NO: 20923
  source 1..80: mol_type = other DNA

SEQ ID NO: 55831 - DNA, 80 bp, synthetic construct; identical to SEQ ID NO: 9147
  source 1..80: mol_type = other DNA

SEQ ID NO: 55832 - DNA, 80 bp, synthetic construct; identical to SEQ ID NO: 20925
  source 1..80: mol_type = other DNA

SEQ ID NO: 55833 - DNA, 80 bp, synthetic construct; identical to SEQ ID NO: 20926
  source 1..80: mol_type = other DNA

SEQ ID NO: 55834 - DNA, 80 bp, synthetic construct; identical to SEQ ID NO: 20927
  source 1..80: mol_type = other DNA

SEQ ID NO: 55835 - DNA, 80 bp, synthetic construct; identical to SEQ ID NO: 20928
  source 1..80: mol_type = other DNA

SEQ ID NO: 55836 - DNA, 80 bp, synthetic construct; identical to SEQ ID NO: 9148
  source 1..80: mol_type = other DNA

SEQ ID NO: 55837 - DNA, 80 bp, synthetic construct; identical to SEQ ID NO: 20930
  source 1..80: mol_type = other DNA

SEQ ID NO: 55838 - DNA, 80 bp, synthetic construct; identical to SEQ ID NO: 20931
  source 1..80: mol_type = other DNA

SEQ ID NO: 55839 - DNA, 80 bp, synthetic construct; identical to SEQ ID NO: 20932
  source 1..80: mol_type = other DNA

SEQ ID NO: 55840 - DNA, 80 bp, synthetic construct; identical to SEQ ID NO: 9149
  source 1..80: mol_type = other DNA

SEQ ID NO: 55841 - DNA, 80 bp, synthetic construct; identical to SEQ ID NO: 20934
  source 1..80: mol_type = other DNA

SEQ ID NO: 55842 - DNA, 80 bp, synthetic construct; identical to SEQ ID NO: 20935
  source 1..80: mol_type = other DNA

SEQ ID NO: 55843 - DNA, 80 bp, synthetic construct; identical to SEQ ID NO: 9150
  source 1..80: mol_type = other DNA

SEQ ID NO: 55844 - DNA, 80 bp, synthetic construct; identical to SEQ ID NO: 20937
  source 1..80: mol_type = other DNA

SEQ ID NO: 55845 - DNA, 80 bp, synthetic construct; identical to SEQ ID NO: 20938
  source 1..80: mol_type = other DNA

SEQ ID NO: 55846 - DNA, 80 bp, synthetic construct; identical to SEQ ID NO: 20939
  source 1..80: mol_type = other DNA

SEQ ID NO: 55847 - DNA, 80 bp, synthetic construct; identical to SEQ ID NO: 20940
  source 1..80: mol_type = other DNA

SEQ ID NO: 55848 - DNA, 80 bp, synthetic construct; identical to SEQ ID NO: 9151
  source 1..80: mol_type = other DNA

SEQ ID NO: 55849 - DNA, 80 bp, synthetic construct; identical to SEQ ID NO: 20942
  source 1..80: mol_type = other DNA

SEQ ID NO: 55850 - DNA, 80 bp, synthetic construct; identical to SEQ ID NO: 20943
  source 1..80: mol_type = other DNA

SEQ ID NO: 55851 - DNA, 80 bp, synthetic construct; identical to SEQ ID NO: 20944
  source 1..80: mol_type = other DNA

SEQ ID NO: 55852 - DNA, 80 bp, synthetic construct; identical to SEQ ID NO: 9152
  source 1..80: mol_type = other DNA

SEQ ID NO: 55853 - DNA, 80 bp, synthetic construct; identical to SEQ ID NO: 20946
  source 1..80: mol_type = other DNA

SEQ ID NO: 55854 - DNA, 80 bp, synthetic construct; identical to SEQ ID NO: 20947
  source 1..80: mol_type = other DNA

SEQ ID NO: 55855 - DNA, 80 bp, synthetic construct; identical to SEQ ID NO: 9153
  source 1..80: mol_type = other DNA

SEQ ID NO: 55856 - DNA, 80 bp, synthetic construct; identical to SEQ ID NO: 20949
  source 1..80: mol_type = other DNA

SEQ ID NO: 55857 - DNA, 80 bp, synthetic construct; identical to SEQ ID NO: 20950
  source 1..80: mol_type = other DNA

SEQ ID NO: 55858 - DNA, 80 bp, synthetic construct; identical to SEQ ID NO: 20951
  source 1..80: mol_type = other DNA

SEQ ID NO: 55859 - DNA, 80 bp, synthetic construct; identical to SEQ ID NO: 9154
  source 1..80: mol_type = other DNA

SEQ ID NO: 55860 - DNA, 80 bp, synthetic construct; identical to SEQ ID NO: 20953
  source 1..80: mol_type = other DNA

SEQ ID NO: 55861 - DNA, 80 bp, synthetic construct; identical to SEQ ID NO: 20954
  source 1..80: mol_type = other DNA

SEQ ID NO: 55862 - DNA, 80 bp, synthetic construct; identical to SEQ ID NO: 20955
  source 1..80: mol_type = other DNA

SEQ ID NO: 55863 - DNA, 80 bp, synthetic construct; identical to SEQ ID NO: 20956
  source 1..80: mol_type = other DNA

SEQ ID NO: 55864 - DNA, 80 bp, synthetic construct; identical to SEQ ID NO: 9155
  source 1..80: mol_type = other DNA

SEQ ID NO: 55865 - DNA, 80 bp, synthetic construct; identical to SEQ ID NO: 20958
  source 1..80: mol_type = other DNA

SEQ ID NO: 55866 - DNA, 80 bp, synthetic construct; identical to SEQ ID NO: 20959
  source 1..80: mol_type = other DNA

SEQ ID NO: 55867 - DNA, 80 bp, synthetic construct; identical to SEQ ID NO: 9156
  source 1..80: mol_type = other DNA

SEQ ID NO: 55868 - DNA, 80 bp, synthetic construct; identical to SEQ ID NO: 20961
  source 1..80: mol_type = other DNA

SEQ ID NO: 55869 - DNA, 80 bp, synthetic construct; identical to SEQ ID NO: 20962
  source 1..80: mol_type = other DNA

SEQ ID NO: 55870 - DNA, 80 bp, synthetic construct; identical to SEQ ID NO: 20963
  source 1..80: mol_type = other DNA

SEQ ID NO: 55871 - DNA, 80 bp, synthetic construct; identical to SEQ ID NO: 9157
  source 1..80: mol_type = other DNA

SEQ ID NO: 55872 - DNA, 80 bp, synthetic construct; identical to SEQ ID NO: 20965
  source 1..80: mol_type = other DNA

SEQ ID NO: 55873 - DNA, 80 bp, synthetic construct; identical to SEQ ID NO: 20966
  source 1..80: mol_type = other DNA

SEQ ID NO: 55874 - DNA, 80 bp, synthetic construct; identical to SEQ ID NO: 20967
  source 1..80: mol_type = other DNA

SEQ ID NO: 55875 - DNA, 80 bp, synthetic construct; identical to SEQ ID NO: 20968
  source 1..80: mol_type = other DNA

SEQ ID NO: 55876 - DNA, 80 bp, synthetic construct; identical to SEQ ID NO: 9158
  source 1..80: mol_type = other DNA

SEQ ID NO: 55877 - DNA, 80 bp, synthetic construct; identical to SEQ ID NO: 20970
  source 1..80: mol_type = other DNA

SEQ ID NO: 55878 - DNA, 80 bp, synthetic construct; identical to SEQ ID NO: 20971
  source 1..80: mol_type = other DNA

SEQ ID NO: 55879 - DNA, 80 bp, synthetic construct; identical to SEQ ID NO: 20972
  source 1..80: mol_type = other DNA

SEQ ID NO: 55880 - DNA, 80 bp, synthetic construct; identical to SEQ ID NO: 9159
  source 1..80: mol_type = other DNA

SEQ ID NO: 55881 - DNA, 80 bp, synthetic construct; identical to SEQ ID NO: 20974
  source 1..80: mol_type = other DNA

SEQ ID NO: 55882 - DNA, 80 bp, synthetic construct; identical to SEQ ID NO: 20975
  source 1..80: mol_type = other DNA

SEQ ID NO: 55883 - DNA, 80 bp, synthetic construct; identical to SEQ ID NO: 20976
  source 1..80: mol_type = other DNA

SEQ ID NO: 55884 - DNA, 80 bp, synthetic construct; identical to SEQ ID NO: 9160
  source 1..80: mol_type = other DNA

SEQ ID NO: 55885 - DNA, 80 bp, synthetic construct; identical to SEQ ID NO: 20978
  source 1..80: mol_type = other DNA

SEQ ID NO: 55886 - DNA, 80 bp, synthetic construct; identical to SEQ ID NO: 20979
  source 1..80: mol_type = other DNA

SEQ ID NO: 55887 - DNA, 80 bp, synthetic construct; identical to SEQ ID NO: 20980
  source 1..80: mol_type = other DNA

SEQ ID NO: 55888 - DNA, 80 bp, synthetic construct; identical to SEQ ID NO: 9161
  source 1..80: mol_type = other DNA

SEQ ID NO: 55889 - DNA, 80 bp, synthetic construct; identical to SEQ ID NO: 20982
  source 1..80: mol_type = other DNA

SEQ ID NO: 55890 - DNA, 80 bp, synthetic construct; identical to SEQ ID NO: 20983
  source 1..80: mol_type = other DNA

SEQ ID NO: 55891 - DNA, 80 bp, synthetic construct; identical to SEQ ID NO: 9162
  source 1..80: mol_type = other DNA

SEQ ID NO: 55892 - DNA, 80 bp, synthetic construct; identical to SEQ ID NO: 20986
  source 1..80: mol_type = other DNA

SEQ ID NO: 55893 - DNA, 80 bp, synthetic construct; identical to SEQ ID NO: 20987
  source 1..80: mol_type = other DNA

SEQ ID NO: 55894 - DNA, 80 bp, synthetic construct; identical to SEQ ID NO: 9163
  source 1..80: mol_type = other DNA

SEQ ID NO: 55895 - DNA, 80 bp, synthetic construct; identical to SEQ ID NO: 20989
  source 1..80: mol_type = other DNA

SEQ ID NO: 55896 - DNA, 80 bp, synthetic construct; identical to SEQ ID NO: 20990
  source 1..80: mol_type = other DNA

SEQ ID NO: 55897 - DNA, 80 bp, synthetic construct; identical to SEQ ID NO: 20991
  source 1..80: mol_type = other DNA

SEQ ID NO: 55898 - DNA, 80 bp, synthetic construct; identical to SEQ ID NO: 9164
  source 1..80: mol_type = other DNA

SEQ ID NO: 55899 - DNA, 80 bp, synthetic construct; identical to SEQ ID NO: 20993
  source 1..80: mol_type = other DNA

SEQ ID NO: 55900 - DNA, 80 bp, synthetic construct; identical to SEQ ID NO: 20994
  source 1..80: mol_type = other DNA

SEQ ID NO: 55901 - DNA, 80 bp, synthetic construct; identical to SEQ ID NO: 20995
  source 1..80: mol_type = other DNA

SEQ ID NO: 55902 - DNA, 80 bp, synthetic construct; identical to SEQ ID NO: 9165
  source 1..80: mol_type = other DNA

SEQ ID NO: 55903 - DNA, 80 bp, synthetic construct; identical to SEQ ID NO: 20997
  source 1..80: mol_type = other DNA

SEQ ID NO: 55904 - DNA, 80 bp, synthetic construct; identical to SEQ ID NO: 20998
  source 1..80: mol_type = other DNA

SEQ ID NO: 55905 - DNA, 80 bp, synthetic construct; identical to SEQ ID NO: 20999
  source 1..80: mol_type = other DNA

SEQ ID NO: 55906 - DNA, 80 bp, synthetic construct; identical to SEQ ID NO: 21000
  source 1..80: mol_type = other DNA

SEQ ID NO: 55907 - DNA, 80 bp, synthetic construct; identical to SEQ ID NO: 9166
  source 1..80: mol_type = other DNA

SEQ ID NO: 55908 - DNA, 80 bp, synthetic construct; identical to SEQ ID NO: 21002
  source 1..80: mol_type = other DNA

SEQ ID NO: 55909 - DNA, 80 bp, synthetic construct; identical to SEQ ID NO: 21003
  source 1..80: mol_type = other DNA

SEQ ID NO: 55910 - DNA, 80 bp, synthetic construct; identical to SEQ ID NO: 9167
  source 1..80: mol_type = other DNA

SEQ ID NO: 55911 - DNA, 80 bp, synthetic construct; identical to SEQ ID NO: 21005
  source 1..80: mol_type = other DNA

SEQ ID NO: 55912 - DNA, 80 bp, synthetic construct; identical to SEQ ID NO: 21006
  source 1..80: mol_type = other DNA

SEQ ID NO: 55913 - DNA, 80 bp, synthetic construct; identical to SEQ ID NO: 21007
  source 1..80: mol_type = other DNA

SEQ ID NO: 55914 - DNA, 80 bp, synthetic construct; identical to SEQ ID NO: 9168
  source 1..80: mol_type = other DNA

SEQ ID NO: 55915 - DNA, 80 bp, synthetic construct; identical to SEQ ID NO: 21009
  source 1..80: mol_type = other DNA

SEQ ID NO: 55916 - DNA, 80 bp, synthetic construct; identical to SEQ ID NO: 21010
  source 1..80: mol_type = other DNA

SEQ ID NO: 55917 - DNA, 80 bp, synthetic construct; identical to SEQ ID NO: 21011
  source 1..80: mol_type = other DNA

SEQ ID NO: 55918 - DNA, 80 bp, synthetic construct; identical to SEQ ID NO: 9169
  source 1..80: mol_type = other DNA

SEQ ID NO: 55919 - DNA, 80 bp, synthetic construct; identical to SEQ ID NO: 21013
  source 1..80: mol_type = other DNA

SEQ ID NO: 55920 - DNA, 80 bp, synthetic construct; identical to SEQ ID NO: 21014
  source 1..80: mol_type = other DNA

SEQ ID NO: 55921 - DNA, 80 bp, synthetic construct; identical to SEQ ID NO: 21015
  source 1..80: mol_type = other DNA

SEQ ID NO: 55922 - DNA, 80 bp, synthetic construct; identical to SEQ ID NO: 9170
  source 1..80: mol_type = other DNA

SEQ ID NO: 55923 - DNA, 80 bp, synthetic construct; identical to SEQ ID NO: 21017
  source 1..80: mol_type = other DNA

SEQ ID NO: 55924 - DNA, 80 bp, synthetic construct; identical to SEQ ID NO: 21018
  source 1..80: mol_type = other DNA

SEQ ID NO: 55925 - DNA, 80 bp, synthetic construct; identical to SEQ ID NO: 21019
  source 1..80: mol_type = other DNA

SEQ ID NO: 55926 - DNA, 80 bp, synthetic construct; identical to SEQ ID NO: 21020
  source 1..80: mol_type = other DNA

SEQ ID NO: 55927 - DNA, 80 bp, synthetic construct; identical to SEQ ID NO: 9171
  source 1..80: mol_type = other DNA

SEQ ID NO: 55928 - DNA, 80 bp, synthetic construct; identical to SEQ ID NO: 21022
  source 1..80: mol_type = other DNA

SEQ ID NO: 55929 - DNA, 80 bp, synthetic construct; identical to SEQ ID NO: 21024
  source 1..80: mol_type = other DNA

SEQ ID NO: 55930 - DNA, 80 bp, synthetic construct; identical to SEQ ID NO: 9172
  source 1..80: mol_type = other DNA

SEQ ID NO: 55931 - DNA, 80 bp, synthetic construct; identical to SEQ ID NO: 21027
  source 1..80: mol_type = other DNA

SEQ ID NO: 55932 - DNA, 80 bp, synthetic construct; identical to SEQ ID NO: 21028
  source 1..80: mol_type = other DNA

SEQ ID NO: 55933 - DNA, 80 bp, synthetic construct; identical to SEQ ID NO: 21029
  source 1..80: mol_type = other DNA

SEQ ID NO: 55934 - DNA, 80 bp, synthetic construct; identical to SEQ ID NO: 21031
  source 1..80: mol_type = other DNA

SEQ ID NO: 55935 - DNA, 80 bp, synthetic construct; identical to SEQ ID NO: 21032
  source 1..80: mol_type = other DNA

SEQ ID NO: 55936 - DNA, 80 bp, synthetic construct; identical to SEQ ID NO: 21033
  source 1..80: mol_type = other DNA

SEQ ID NO: 55937 - DNA, 80 bp, synthetic construct; identical to SEQ ID NO: 21034
  source 1..80: mol_type = other DNA

SEQ ID NO: 55938 - DNA, 80 bp, synthetic construct; identical to SEQ ID NO: 9174
  source 1..80: mol_type = other DNA

SEQ ID NO: 55939 - DNA, 80 bp, synthetic construct; identical to SEQ ID NO: 21036
  source 1..80: mol_type = other DNA

SEQ ID NO: 55940 - DNA, 80 bp, synthetic construct; identical to SEQ ID NO: 21037
  source 1..80: mol_type = other DNA

SEQ ID NO: 55941 - DNA, 80 bp, synthetic construct; identical to SEQ ID NO: 9175
  source 1..80: mol_type = other DNA

SEQ ID NO: 55942 - DNA, 80 bp, synthetic construct; identical to SEQ ID NO: 21039
  source 1..80: mol_type = other DNA

SEQ ID NO: 55943 - DNA, 80 bp, synthetic construct; identical to SEQ ID NO: 21040
  source 1..80: mol_type = other DNA

SEQ ID NO: 55944 - DNA, 80 bp, synthetic construct; identical to SEQ ID NO: 21041
  source 1..80: mol_type = other DNA

SEQ ID NO: 55945 - DNA, 80 bp, synthetic construct; identical to SEQ ID NO: 21042
  source 1..80: mol_type = other DNA

SEQ ID NO: 55946 - DNA, 80 bp, synthetic construct; identical to SEQ ID NO: 9176
  source 1..80: mol_type = other DNA

SEQ ID NO: 55947 - DNA, 80 bp, synthetic construct; identical to SEQ ID NO: 21044
  source 1..80: mol_type = other DNA

SEQ ID NO: 55948 - DNA, 80 bp, synthetic construct; identical to SEQ ID NO: 21045
  source 1..80: mol_type = other DNA

SEQ ID NO: 55949 - DNA, 80 bp, synthetic construct; identical to SEQ ID NO: 21046
  source 1..80: mol_type = other DNA

SEQ ID NO: 55950 - DNA, 80 bp, synthetic construct; identical to SEQ ID NO: 9177
  source 1..80: mol_type = other DNA

SEQ ID NO: 55951 - DNA, 80 bp, synthetic construct; identical to SEQ ID NO: 21049
  source 1..80: mol_type = other DNA

SEQ ID NO: 55952 - DNA, 80 bp, synthetic construct; identical to SEQ ID NO: 21050
  source 1..80: mol_type = other DNA

SEQ ID NO: 55953 - DNA, 80 bp, synthetic construct; identical to SEQ ID NO: 9178
  source 1..80: mol_type = other DNA

SEQ ID NO: 55954 - DNA, 80 bp, synthetic construct; identical to SEQ ID NO: 21052
  source 1..80: mol_type = other DNA

SEQ ID NO: 55955 - DNA, 80 bp, synthetic construct; identical to SEQ ID NO: 21053
  source 1..80: mol_type = other DNA

SEQ ID NO: 55956 - DNA, 80 bp, synthetic construct; identical to SEQ ID NO: 21054
  source 1..80: mol_type = other DNA

SEQ ID NO: 55957 - DNA, 80 bp, synthetic construct; identical to SEQ ID NO: 21055
  source 1..80: mol_type = other DNA

SEQ ID NO: 55958 - DNA, 80 bp, synthetic construct; identical to SEQ ID NO: 9179
  source 1..80: mol_type = other DNA

SEQ ID NO: 55959 - DNA, 80 bp, synthetic construct; identical to SEQ ID NO: 21057
  source 1..80: mol_type = other DNA

SEQ ID NO: 55960 - DNA, 80 bp, synthetic construct; identical to SEQ ID NO: 21058
  source 1..80: mol_type = other DNA

SEQ ID NO: 55961 - DNA, 80 bp, synthetic construct; identical to SEQ ID NO: 21059
  source 1..80: mol_type = other DNA

SEQ ID NO: 55962 - DNA, 80 bp, synthetic construct; identical to SEQ ID NO: 9180
  source 1..80: mol_type = other DNA

SEQ ID NO: 55963 - DNA, 80 bp, synthetic construct; identical to SEQ ID NO: 21061
  source 1..80: mol_type = other DNA

SEQ ID NO: 55964 - DNA, 80 bp, synthetic construct; identical to SEQ ID NO: 21063
  source 1..80: mol_type = other DNA

SEQ ID NO: 55965 - DNA, 80 bp, synthetic construct; identical to SEQ ID NO: 21064
  source 1..80: mol_type = other DNA

SEQ ID NO: 55966 - DNA, 80 bp, synthetic construct; identical to SEQ ID NO: 9181
  source 1..80: mol_type = other DNA

SEQ ID NO: 55967 - DNA, 80 bp, synthetic construct; identical to SEQ ID NO: 21066
  source 1..80: mol_type = other DNA

SEQ ID NO: 55968 - DNA, 80 bp, synthetic construct; identical to SEQ ID NO: 21067
  source 1..80: mol_type = other DNA

SEQ ID NO: 55969 - DNA, 80 bp, synthetic construct; identical to SEQ ID NO: 21068
  source 1..80: mol_type = other DNA

SEQ ID NO: 55970 - DNA, 80 bp, synthetic construct; identical to SEQ ID NO: 9182
  source 1..80: mol_type = other DNA

SEQ ID NO: 55971 - DNA, 80 bp, synthetic construct; identical to SEQ ID NO: 21070
  source 1..80: mol_type = other DNA

SEQ ID NO: 55972 - DNA, 80 bp, synthetic construct; identical to SEQ ID NO: 21071
  source 1..80: mol_type = other DNA

SEQ ID NO: 55973 - DNA, 80 bp, synthetic construct; identical to SEQ ID NO: 21072
  source 1..80: mol_type = other DNA

SEQ ID NO: 55974 - DNA, 80 bp, synthetic construct; identical to SEQ ID NO: 9183
  source 1..80: mol_type = other DNA

SEQ ID NO: 55975 - DNA, 80 bp, synthetic construct; identical to SEQ ID NO: 21074
  source 1..80: mol_type = other DNA

SEQ ID NO: 55976 - DNA, 80 bp, synthetic construct; identical to SEQ ID NO: 21075
  source 1..80: mol_type = other DNA

SEQ ID NO: 55977 - DNA, 80 bp, synthetic construct; identical to SEQ ID NO: 9184
  source 1..80: mol_type = other DNA

SEQ ID NO: 55978 - DNA, 80 bp, synthetic construct; identical to SEQ ID NO: 21077
  source 1..80: mol_type = other DNA

SEQ ID NO: 55979 - DNA, 80 bp, synthetic construct; identical to SEQ ID NO: 21078
  source 1..80: mol_type = other DNA

SEQ ID NO: 55980 - DNA, 80 bp, synthetic construct; identical to SEQ ID NO: 21079
  source 1..80: mol_type = other DNA

SEQ ID NO: 55981 - DNA, 80 bp, synthetic construct; identical to SEQ ID NO: 21080
  source 1..80: mol_type = other DNA

SEQ ID NO: 55982 - DNA, 80 bp, synthetic construct; identical to SEQ ID NO: 9185
  source 1..80: mol_type = other DNA

SEQ ID NO: 55983 - DNA, 80 bp, synthetic construct; identical to SEQ ID NO: 21082
  source 1..80: mol_type = other DNA

SEQ ID NO: 55984 - DNA, 80 bp, synthetic construct; identical to SEQ ID NO: 21083
  source 1..80: mol_type = other DNA

SEQ ID NO: 55985 - DNA, 80 bp, synthetic construct; identical to SEQ ID NO: 9186
  source 1..80: mol_type = other DNA

SEQ ID NO: 55986 - DNA, 80 bp, synthetic construct; identical to SEQ ID NO: 21085
  source 1..80: mol_type = other DNA

SEQ ID NO: 55987 - DNA, 80 bp, synthetic construct; identical to SEQ ID NO: 21086
  source 1..80: mol_type = other DNA

SEQ ID NO: 55988 - DNA, 80 bp, synthetic construct; identical to SEQ ID NO: 21087
  source 1..80: mol_type = other DNA

SEQ ID NO: 55989 - DNA, 80 bp, synthetic construct; identical to SEQ ID NO: 9187
  source 1..80: mol_type = other DNA

SEQ ID NO: 55990 - DNA, 80 bp, synthetic construct; identical to SEQ ID NO: 21089
  source 1..80: mol_type = other DNA

SEQ ID NO: 55991 - DNA, 80 bp, synthetic construct; identical to SEQ ID NO: 21090
  source 1..80: mol_type = other DNA

SEQ ID NO: 55992 - DNA, 80 bp, synthetic construct; identical to SEQ ID NO: 21091
  source 1..80: mol_type = other DNA

SEQ ID NO: 55993 - DNA, 80 bp, synthetic construct; identical to SEQ ID NO: 9188
  source 1..80: mol_type = other DNA

SEQ ID NO: 55994 - DNA, 80 bp, synthetic construct; identical to SEQ ID NO: 21093
  source 1..80: mol_type = other DNA

SEQ ID NO: 55995 - DNA, 80 bp, synthetic construct; identical to SEQ ID NO: 21094
  source 1..80: mol_type = other DNA

SEQ ID NO: 55996 - DNA, 80 bp, synthetic construct; identical to SEQ ID NO: 21095
  source 1..80: mol_type = other DNA

SEQ ID NO: 55997 - DNA, 80 bp, synthetic construct; identical to SEQ ID NO: 9189
  source 1..80: mol_type = other DNA

SEQ ID NO: 55998 - DNA, 80 bp, synthetic construct; identical to SEQ ID NO: 21097
  source 1..80: mol_type = other DNA

SEQ ID NO: 55999 - DNA, 80 bp, synthetic construct; identical to SEQ ID NO: 21098
  source 1..80: mol_type = other DNA

SEQ ID NO: 56000 - DNA, 80 bp, synthetic construct; identical to SEQ ID NO: 21099
  source 1..80: mol_type = other DNA

SEQ ID NO: 56001 - DNA, 80 bp, synthetic construct; identical to SEQ ID NO: 9190
  source 1..80: mol_type = other DNA

SEQ ID NO: 56002 - DNA, 80 bp, synthetic construct; identical to SEQ ID NO: 21101
  source 1..80: mol_type = other DNA

SEQ ID NO: 56003 - DNA, 80 bp, synthetic construct; identical to SEQ ID NO: 21102
  source 1..80: mol_type = other DNA

SEQ ID NO: 56004 - DNA, 80 bp, synthetic construct; identical to SEQ ID NO: 9191
  source 1..80: mol_type = other DNA

SEQ ID NO: 56005 - DNA, 80 bp, synthetic construct; identical to SEQ ID NO: 21105
  source 1..80: mol_type = other DNA

SEQ ID NO: 56006 - DNA, 80 bp, synthetic construct; identical to SEQ ID NO: 21106
  source 1..80: mol_type = other DNA

SEQ ID NO: 56007 - DNA, 80 bp, synthetic construct; identical to SEQ ID NO: 21107
  source 1..80: mol_type = other DNA

SEQ ID NO: 56008 - DNA, 80 bp, synthetic construct; identical to SEQ ID NO: 9192
  source 1..80: mol_type = other DNA

SEQ ID NO: 56009 - DNA, 80 bp, synthetic construct; identical to SEQ ID NO: 21109
  source 1..80: mol_type = other DNA

SEQ ID NO: 56010 - DNA, 80 bp, synthetic construct; identical to SEQ ID NO: 21110
  source 1..80: mol_type = other DNA

SEQ ID NO: 56011 - DNA, 80 bp, synthetic construct; identical to SEQ ID NO: 21111
  source 1..80: mol_type = other DNA

SEQ ID NO: 56012 - DNA, 80 bp, synthetic construct; identical to SEQ ID NO: 21112
  source 1..80: mol_type = other DNA

SEQ ID NO: 56013 - DNA, 80 bp, synthetic construct; identical to SEQ ID NO: 9193
  source 1..80: mol_type = other DNA

SEQ ID NO: 56014 - DNA, 80 bp, synthetic construct; identical to SEQ ID NO: 21114
  source 1..80: mol_type = other DNA

SEQ ID NO: 56015 - DNA, 80 bp, synthetic construct; identical to SEQ ID NO: 21115
  source 1..80: mol_type = other DNA

SEQ ID NO: 56016 - DNA, 80 bp, synthetic construct; identical to SEQ ID NO: 21116
  source 1..80: mol_type = other DNA

SEQ ID NO: 56017 - DNA, 80 bp, synthetic construct; identical to SEQ ID NO: 9194
  source 1..80: mol_type = other DNA

SEQ ID NO: 56018 - DNA, 80 bp, synthetic construct; identical to SEQ ID NO: 21118
  source 1..80: mol_type = other DNA

SEQ ID NO: 56019 - DNA, 80 bp, synthetic construct; identical to SEQ ID NO: 21119
  source 1..80: mol_type = other DNA

SEQ ID NO: 56020 - DNA, 80 bp, synthetic construct; identical to SEQ ID NO: 21120
  source 1..80: mol_type = other DNA

SEQ ID NO: 56021 - DNA, 80 bp, synthetic construct; identical to SEQ ID NO: 9195
  source 1..80: mol_type = other DNA

SEQ ID NO: 56022 - DNA, 80 bp, synthetic construct; identical to SEQ ID NO: 21122
  source 1..80: mol_type = other DNA

SEQ ID NO: 56023 - DNA, 80 bp, synthetic construct; identical to SEQ ID NO: 21123
  source 1..80: mol_type = other DNA

SEQ ID NO: 56024 - DNA, 80 bp, synthetic construct; identical to SEQ ID NO: 21124
  source 1..80: mol_type = other DNA

SEQ ID NO: 56025 - DNA, 80 bp, synthetic construct; identical to SEQ ID NO: 9196
  source 1..80: mol_type = other DNA

SEQ ID NO: 56026 - DNA, 80 bp, synthetic construct; identical to SEQ ID NO: 21126
  source 1..80: mol_type = other DNA

SEQ ID NO: 56027 - DNA, 80 bp, synthetic construct; identical to SEQ ID NO: 21127
  source 1..80: mol_type = other DNA

SEQ ID NO: 56028 - DNA, 80 bp, synthetic construct; identical to SEQ ID NO: 21128
  source 1..80: mol_type = other DNA

SEQ ID NO: 56029 - DNA, 80 bp, synthetic construct; identical to SEQ ID NO: 9197
  source 1..80: mol_type = other DNA

SEQ ID NO: 56030 - DNA, 80 bp, synthetic construct; identical to SEQ ID NO: 21130
  source 1..80: mol_type = other DNA

SEQ ID NO: 56031 - DNA, 80 bp, synthetic construct; identical to SEQ ID NO: 21132
  source 1..80: mol_type = other DNA

SEQ ID NO: 56032 - DNA, 80 bp, synthetic construct; identical to SEQ ID NO: 21133
  source 1..80: mol_type = other DNA

SEQ ID NO: 56033 - DNA, 80 bp, synthetic construct; identical to SEQ ID NO: 9198
  source 1..80: mol_type = other DNA

SEQ ID NO: 56034 - DNA, 80 bp, synthetic construct; identical to SEQ ID NO: 21135
  source 1..80: mol_type = other DNA

SEQ ID NO: 56035 - DNA, 80 bp, synthetic construct; identical to SEQ ID NO: 21136
  source 1..80: mol_type = other DNA

SEQ ID NO: 56036 - DNA, 80 bp, synthetic construct; identical to SEQ ID NO: 21137
  source 1..80: mol_type = other DNA

SEQ ID NO: 56037 - DNA, 80 bp, synthetic construct; identical to SEQ ID NO: 9199
  source 1..80: mol_type = other DNA

SEQ ID NO: 56038 - DNA, 80 bp, synthetic construct; identical to SEQ ID NO: 21139
  source 1..80: mol_type = other DNA

SEQ ID NO: 56039 - DNA, 80 bp, synthetic construct; identical to SEQ ID NO: 21140
  source 1..80: mol_type = other DNA

SEQ ID NO: 56040 - DNA, 80 bp, synthetic construct; identical to SEQ ID NO: 21141
  source 1..80: mol_type = other DNA

SEQ ID NO: 56041 - DNA, 80 bp, synthetic construct; identical to SEQ ID NO: 9200
  source 1..80: mol_type = other DNA

SEQ ID NO: 56042 - DNA, 80 bp, synthetic construct; identical to SEQ ID NO: 21143
  source 1..80: mol_type = other DNA

SEQ ID NO: 56043 - DNA, 80 bp, synthetic construct; identical to SEQ ID NO: 21144
  source 1..80: mol_type = other DNA

SEQ ID NO: 56044 - DNA, 80 bp, synthetic construct; identical to SEQ ID NO: 21145
  source 1..80: mol_type = other DNA

SEQ ID NO: 56045 - DNA, 80 bp, synthetic construct; identical to SEQ ID NO: 21146
  source 1..80: mol_type = other DNA

SEQ ID NO: 56046 - DNA, 80 bp, synthetic construct; identical to SEQ ID NO: 9201
  source 1..80: mol_type = other DNA

SEQ ID NO: 56047 - DNA, 80 bp, synthetic construct; identical to SEQ ID NO: 21149
  source 1..80: mol_type = other DNA

SEQ ID NO: 56048 - DNA, 80 bp, synthetic construct; identical to SEQ ID NO: 21150
  source 1..80: mol_type = other DNA

SEQ ID NO: 56049 - DNA, 80 bp, synthetic construct; identical to SEQ ID NO: 9202
  source 1..80: mol_type = other DNA

SEQ ID NO: 56050 - DNA, 80 bp, synthetic construct; identical to SEQ ID NO: 21152
  source 1..80: mol_type = other DNA

SEQ ID NO: 56051 - DNA, 80 bp, synthetic construct; identical to SEQ ID NO: 21153
  source 1..80: mol_type = other DNA

SEQ ID NO: 56052 - DNA, 80 bp, synthetic construct; identical to SEQ ID NO: 21154
  source 1..80: mol_type = other DNA

SEQ ID NO: 56053 - DNA, 80 bp, synthetic construct; identical to SEQ ID NO: 9203
  source 1..80: mol_type = other DNA

SEQ ID NO: 56054 - DNA, 80 bp, synthetic construct; identical to SEQ ID NO: 21156
  source 1..80: mol_type = other DNA

SEQ ID NO: 56055 - DNA, 80 bp, synthetic construct; identical to SEQ ID NO: 21157
  source 1..80: mol_type = other DNA

SEQ ID NO: 56056 - DNA, 80 bp, synthetic construct; identical to SEQ ID NO: 9204
  source 1..80: mol_type = other DNA

SEQ ID NO: 56057 - DNA, 80 bp, synthetic construct; identical to SEQ ID NO: 21159
  source 1..80: mol_type = other DNA

SEQ ID NO: 56058 - DNA, 80 bp, synthetic construct; identical to SEQ ID NO: 21160
  source 1..80: mol_type = other DNA

SEQ ID NO: 56059 - DNA, 80 bp, synthetic construct; identical to SEQ ID NO: 21161
  source 1..80: mol_type = other DNA

SEQ ID NO: 56060 - DNA, 80 bp, synthetic construct; identical to SEQ ID NO: 21162
  source 1..80: mol_type = other DNA

SEQ ID NO: 56061 - DNA, 80 bp, synthetic construct; identical to SEQ ID NO: 9205
  source 1..80: mol_type = other DNA

SEQ ID NO: 56062 - DNA, 80 bp, synthetic construct; identical to SEQ ID NO: 21164
  source 1..80: mol_type = other DNA

SEQ ID NO: 56063 - DNA, 80 bp, synthetic construct; identical to SEQ ID NO: 21165
  source 1..80: mol_type = other DNA

SEQ ID NO: 56064 - DNA, 80 bp, synthetic construct; identical to SEQ ID NO: 9206
  source 1..80: mol_type = other DNA

SEQ ID NO: 56065 - DNA, 80 bp, synthetic construct; identical to SEQ ID NO: 21167
  source 1..80: mol_type = other DNA

SEQ ID NO: 56066 - DNA, 80 bp, synthetic construct; identical to SEQ ID NO: 21168
  source 1..80: mol_type = other DNA

SEQ ID NO: 56067 - DNA, 80 bp, synthetic construct; identical to SEQ ID NO: 21169
  source 1..80: mol_type = other DNA

SEQ ID NO: 56068 - DNA, 80 bp, synthetic construct; identical to SEQ ID NO: 21170
  source 1..80: mol_type = other DNA

SEQ ID NO: 56069 - DNA, 80 bp, synthetic construct; identical to SEQ ID NO: 9207
  source 1..80: mol_type = other DNA

SEQ ID NO: 56070 - DNA, 80 bp, synthetic construct; identical to SEQ ID NO: 21172
  source 1..80: mol_type = other DNA

SEQ ID NO: 56071 - DNA, 80 bp, synthetic construct; identical to SEQ ID NO: 21173
  source 1..80: mol_type = other DNA

SEQ ID NO: 56072 - DNA, 80 bp, synthetic construct; identical to SEQ ID NO: 9208
  source 1..80: mol_type = other DNA

SEQ ID NO: 56073 - DNA, 80 bp, synthetic construct; identical to SEQ ID NO: 21176
  source 1..80: mol_type = other DNA

SEQ ID NO: 56074 - DNA, 80 bp, synthetic construct; identical to SEQ ID NO: 21177
  source 1..80: mol_type = other DNA

SEQ ID NO: 56075 - DNA, 80 bp, synthetic construct; identical to SEQ ID NO: 21178
  source 1..80: mol_type = other DNA

SEQ ID NO: 56076 - DNA, 80 bp, synthetic construct; identical to SEQ ID NO: 9209
  source 1..80: mol_type = other DNA

SEQ ID NO: 56077 - DNA, 80 bp, synthetic construct; identical to SEQ ID NO: 21180
  source 1..80: mol_type = other DNA

SEQ ID NO: 56078 - DNA, 80 bp, synthetic construct; identical to SEQ ID NO: 21181
  source 1..80: mol_type = other DNA

SEQ ID NO: 56079 - DNA, 80 bp, synthetic construct; identical to SEQ ID NO: 9210
  source 1..80: mol_type = other DNA

SEQ ID NO: 56080 - DNA, 80 bp, synthetic construct; identical to SEQ ID NO: 21183
  source 1..80: mol_type = other DNA

SEQ ID NO: 56081 - DNA, 80 bp, synthetic construct; identical to SEQ ID NO: 21184
  source 1..80: mol_type = other DNA

SEQ ID NO: 56082 - DNA, 80 bp, synthetic construct; identical to SEQ ID NO: 21185
  source 1..80: mol_type = other DNA

SEQ ID NO: 56083 - DNA, 80 bp, synthetic construct; identical to SEQ ID NO: 9211
  source 1..80: mol_type = other DNA

SEQ ID NO: 56084 - DNA, 80 bp, synthetic construct; identical to SEQ ID NO: 21187
  source 1..80: mol_type = other DNA

SEQ ID NO: 56085 - DNA, 80 bp, synthetic construct; identical to SEQ ID NO: 21188
  source 1..80: mol_type = other DNA

SEQ ID NO: 56086 - DNA, 80 bp, synthetic construct; identical to SEQ ID NO: 21189
  source 1..80: mol_type = other DNA

SEQ ID NO: 56087 - DNA, 80 bp, synthetic construct; identical to SEQ ID NO: 21190
  source 1..80: mol_type = other DNA

SEQ ID NO: 56088 - DNA, 80 bp, synthetic construct; identical to SEQ ID NO: 9212
  source 1..80: mol_type = other DNA

SEQ ID NO: 56089 - DNA, 80 bp, synthetic construct; identical to SEQ ID NO: 21192
  source 1..80: mol_type = other DNA

SEQ ID NO: 56090 - DNA, 80 bp, synthetic construct; identical to SEQ ID NO: 21193
  source 1..80: mol_type = other DNA

SEQ ID NO: 56091 - DNA, 80 bp, synthetic construct; identical to SEQ ID NO: 9213
  source 1..80: mol_type = other DNA

SEQ ID NO: 56092 - DNA, 80 bp, synthetic construct; identical to SEQ ID NO: 21195
  source 1..80: mol_type = other DNA

SEQ ID NO: 56093 - DNA, 80 bp, synthetic construct; identical to SEQ ID NO: 21196
  source 1..80: mol_type = other DNA

SEQ ID NO: 56094 - DNA, 80 bp, synthetic construct; identical to SEQ ID NO: 21197
  source 1..80: mol_type = other DNA

SEQ ID NO: 56095 - DNA, 80 bp, synthetic construct; identical to SEQ ID NO: 9214
  source 1..80: mol_type = other DNA

SEQ ID NO: 56096 - DNA, 80 bp, synthetic construct; identical to SEQ ID NO: 21199
  source 1..80: mol_type = other DNA

SEQ ID NO: 56097 - DNA, 80 bp, synthetic construct; identical to SEQ ID NO: 21200
  source 1..80: mol_type = other DNA

SEQ ID NO: 56098 - DNA, 80 bp, synthetic construct; identical to SEQ ID NO: 21201
  source 1..80: mol_type = other DNA

SEQ ID NO: 56099 - DNA, 80 bp, synthetic construct; identical to SEQ ID NO: 9215
  source 1..80: mol_type = other DNA

SEQ ID NO: 56100 - DNA, 80 bp, synthetic construct; identical to SEQ ID NO: 21204
  source 1..80: mol_type = other DNA

SEQ ID NO: 56101 - DNA, 80 bp, synthetic construct; identical to SEQ ID NO: 21205
  source 1..80: mol_type = other DNA

SEQ ID NO: 56102 - DNA, 80 bp, synthetic construct; identical to SEQ ID NO: 9216
  source 1..80: mol_type = other DNA

SEQ ID NO: 56103 - DNA, 80 bp, synthetic construct; identical to SEQ ID NO: 21207
  source 1..80: mol_type = other DNA

SEQ ID NO: 56104 - DNA, 80 bp, synthetic construct; identical to SEQ ID NO: 21208
  source 1..80: mol_type = other DNA

SEQ ID NO: 56105 - DNA, 80 bp, synthetic construct; identical to SEQ ID NO: 21209
  source 1..80: mol_type = other DNA

SEQ ID NO: 56106 - DNA, 80 bp, synthetic construct; identical to SEQ ID NO: 9217
  source 1..80: mol_type = other DNA

SEQ ID NO: 56107 - DNA, 80 bp, synthetic construct; identical to SEQ ID NO: 21211
  source 1..80: mol_type = other DNA

SEQ ID NO: 56108 - DNA, 80 bp, synthetic construct; identical to SEQ ID NO: 21212
  source 1..80: mol_type = other DNA

SEQ ID NO: 56109 - DNA, 80 bp, synthetic construct; identical to SEQ ID NO: 21213
  source 1..80: mol_type = other DNA

SEQ ID NO: 56110 - DNA, 80 bp, synthetic construct; identical to SEQ ID NO: 21214
  source 1..80: mol_type = other DNA

SEQ ID NO: 56111 - DNA, 80 bp, synthetic construct; identical to SEQ ID NO: 9218
  source 1..80: mol_type = other DNA

SEQ ID NO: 56112 - DNA, 80 bp, synthetic construct; identical to SEQ ID NO: 21216
  source 1..80: mol_type = other DNA

SEQ ID NO: 56113 - DNA, 80 bp, synthetic construct; identical to SEQ ID NO: 21217
  source 1..80: mol_type = other DNA

SEQ ID NO: 56114 - DNA, 80 bp, synthetic construct; identical to SEQ ID NO: 21218
  source 1..80: mol_type = other DNA

SEQ ID NO: 56115 - DNA, 80 bp, synthetic construct; identical to SEQ ID NO: 9219
  source 1..80: mol_type = other DNA

SEQ ID NO: 56116 - DNA, 80 bp, synthetic construct; identical to SEQ ID NO: 21220
  source 1..80: mol_type = other DNA

SEQ ID NO: 56117 - DNA, 80 bp, synthetic construct; identical to SEQ ID NO: 21221
  source 1..80: mol_type = other DNA

SEQ ID NO: 56118 - DNA, 80 bp, synthetic construct; identical to SEQ ID NO: 21222
  source 1..80: mol_type = other DNA

SEQ ID NO: 56119 - DNA, 80 bp, synthetic construct; identical to SEQ ID NO: 9220
  source 1..80: mol_type = other DNA

SEQ ID NO: 56120 - DNA, 80 bp, synthetic construct; identical to SEQ ID NO: 21224
  source 1..80: mol_type = other DNA

SEQ ID NO: 56121 - DNA, 80 bp, synthetic construct; identical to SEQ ID NO: 21225
  source 1..80: mol_type = other DNA

SEQ ID NO: 56122 - DNA, 80 bp, synthetic construct; identical to SEQ ID NO: 9221
  source 1..80: mol_type = other DNA

SEQ ID NO: 56123 - DNA, 80 bp, synthetic construct; identical to SEQ ID NO: 21227
  source 1..80: mol_type = other DNA

SEQ ID NO: 56124 - DNA, 80 bp, synthetic construct; identical to SEQ ID NO: 21228
  source 1..80: mol_type = other DNA

SEQ ID NO: 56125 - DNA, 80 bp, synthetic construct; identical to SEQ ID NO: 21229
  source 1..80: mol_type = other DNA

SEQ ID NO: 56126 - DNA, 80 bp, synthetic construct; identical to SEQ ID NO: 9222
  source 1..80: mol_type = other DNA

SEQ ID NO: 56127 - DNA, 80 bp, synthetic construct; identical to SEQ ID NO: 21232
  source 1..80: mol_type = other DNA

SEQ ID NO: 56128 - DNA, 80 bp, synthetic construct; identical to SEQ ID NO: 21233
  source 1..80: mol_type = other DNA

SEQ ID NO: 56129 - DNA, 80 bp, synthetic construct; identical to SEQ ID NO: 21234
  source 1..80: mol_type = other DNA

SEQ ID NO: 56130 - DNA, 80 bp, synthetic construct; identical to SEQ ID NO: 9223
  source 1..80: mol_type = other DNA

SEQ ID NO: 56131 - DNA, 80 bp, synthetic construct; identical to SEQ ID NO: 21236
  source 1..80: mol_type = other DNA

SEQ ID NO: 56132 - DNA, 80 bp, synthetic construct; identical to SEQ ID NO: 21237
  source 1..80: mol_type = other DNA

SEQ ID NO: 56133 - DNA, 80 bp, synthetic construct; identical to SEQ ID NO: 21238
  source 1..80: mol_type = other DNA

SEQ ID NO: 56134 - DNA, 80 bp, synthetic construct; identical to SEQ ID NO: 9224
  source 1..80: mol_type = other DNA

SEQ ID NO: 56135 - DNA, 80 bp, synthetic construct; identical to SEQ ID NO: 21240
  source 1..80: mol_type = other DNA

SEQ ID NO: 56136 - DNA, 80 bp, synthetic construct; identical to SEQ ID NO: 21241
  source 1..80: mol_type = other DNA

SEQ ID NO: 56137 - DNA, 80 bp, synthetic construct; identical to SEQ ID NO: 9225
  source 1..80: mol_type = other DNA

SEQ ID NO: 56138 - DNA, 80 bp, synthetic construct; identical to SEQ ID NO: 21244
  source 1..80: mol_type = other DNA

SEQ ID NO: 56139 - DNA, 80 bp, synthetic construct; identical to SEQ ID NO: 21245
  source 1..80: mol_type = other DNA

SEQ ID NO: 56140 - DNA, 80 bp, synthetic construct; identical to SEQ ID NO: 21246
  source 1..80: mol_type = other DNA

SEQ ID NO: 56141 - DNA, 80 bp, synthetic construct; identical to SEQ ID NO: 9226
  source 1..80: mol_type = other DNA

SEQ ID NO: 56142 - DNA, 80 bp, synthetic construct; identical to SEQ ID NO: 21248
  source 1..80: mol_type = other DNA

SEQ ID NO: 56143 - DNA, 80 bp, synthetic construct; identical to SEQ ID NO: 21249
  source 1..80: mol_type = other DNA

SEQ ID NO: 56144 - DNA, 80 bp, synthetic construct; identical to SEQ ID NO: 9227
  source 1..80: mol_type = other DNA

SEQ ID NO: 56145 - DNA, 80 bp, synthetic construct; identical to SEQ ID NO: 21251
  source 1..80: mol_type = other DNA

SEQ ID NO: 56146 - DNA, 80 bp, synthetic construct; identical to SEQ ID NO: 21252
  source 1..80: mol_type = other DNA

SEQ ID NO: 56147 - DNA, 80 bp, synthetic construct; identical to SEQ ID NO: 21253
  source 1..80: mol_type = other DNA

SEQ ID NO: 56148 - DNA, 80 bp, synthetic construct; identical to SEQ ID NO: 9228
  source 1..80: mol_type = other DNA

SEQ ID NO: 56149 - DNA, 80 bp, synthetic construct; identical to SEQ ID NO: 21255
  source 1..80: mol_type = other DNA

SEQ ID NO: 56150 - DNA, 80 bp, synthetic construct; identical to SEQ ID NO: 21256
  source 1..80: mol_type = other DNA

SEQ ID NO: 56151 - DNA, 80 bp, synthetic construct; identical to SEQ ID NO: 21257
  source 1..80: mol_type = other DNA

SEQ ID NO: 56152 - DNA, 80 bp, synthetic construct; identical to SEQ ID NO: 9229
  source 1..80: mol_type = other DNA

SEQ ID NO: 56153 - DNA, 80 bp, synthetic construct; identical to SEQ ID NO: 21259
  source 1..80: mol_type = other DNA

SEQ ID NO: 56154 - DNA, 80 bp, synthetic construct; identical to SEQ ID NO: 21260
  source 1..80: mol_type = other DNA

SEQ ID NO: 56155 - DNA, 80 bp, synthetic construct; identical to SEQ ID NO: 21261
  source 1..80: mol_type = other DNA

SEQ ID NO: 56156 - DNA, 80 bp, synthetic construct; identical to SEQ ID NO: 9230
  source 1..80: mol_type = other DNA

SEQ ID NO: 56157 - DNA, 80 bp, synthetic construct; identical to SEQ ID NO: 21263
  source 1..80: mol_type = other DNA

SEQ ID NO: 56158 - DNA, 80 bp, synthetic construct; identical to SEQ ID NO: 21264
  source 1..80: mol_type = other DNA

SEQ ID NO: 56159 - DNA, 80 bp, synthetic construct; identical to SEQ ID NO: 21265
  source 1..80: mol_type = other DNA

SEQ ID NO: 56160 - DNA, 80 bp, synthetic construct; identical to SEQ ID NO: 21266
  source 1..80: mol_type = other DNA

SEQ ID NO: 56161 - DNA, 80 bp, synthetic construct; identical to SEQ ID NO: 9231
  source 1..80: mol_type = other DNA

SEQ ID NO: 56162 - DNA, 80 bp, synthetic construct; identical to SEQ ID NO: 21268
  source 1..80: mol_type = other DNA

SEQ ID NO: 56163 - DNA, 80 bp, synthetic construct; identical to SEQ ID NO: 21269
  source 1..80: mol_type = other DNA

SEQ ID NO: 56164 - DNA, 80 bp, synthetic construct; identical to SEQ ID NO: 21270
  source 1..80: mol_type = other DNA

SEQ ID NO: 56165 - DNA, 80 bp, synthetic construct; identical to SEQ ID NO: 9232
  source 1..80: mol_type = other DNA

SEQ ID NO: 56166 - DNA, 80 bp, synthetic construct; identical to SEQ ID NO: 21272
  source 1..80: mol_type = other DNA

SEQ ID NO: 56167 - DNA, 80 bp, synthetic construct; identical to SEQ ID NO: 21273
  source 1..80: mol_type = other DNA

SEQ ID NO: 56168 - DNA, 80 bp, synthetic construct; identical to SEQ ID NO: 21274
  source 1..80: mol_type = other DNA

SEQ ID NO: 56169 - DNA, 80 bp, synthetic construct; identical to SEQ ID NO: 9233
  source 1..80: mol_type = other DNA

SEQ ID NO: 56170 - DNA, 80 bp, synthetic construct; identical to SEQ ID NO: 21276
  source 1..80: mol_type = other DNA

SEQ ID NO: 56171 - DNA, 80 bp, synthetic construct; identical to SEQ ID NO: 21277
  source 1..80: mol_type = other DNA

SEQ ID NO: 56172 - DNA, 80 bp, synthetic construct; identical to SEQ ID NO: 21278
  source 1..80: mol_type = other DNA

SEQ ID NO: 56173 - DNA, 80 bp, synthetic construct; identical to SEQ ID NO: 9234
  source 1..80: mol_type = other DNA

SEQ ID NO: 56174 - DNA, 80 bp, synthetic construct; identical to SEQ ID NO: 21280
  source 1..80: mol_type = other DNA

SEQ ID NO: 56175 - DNA, 80 bp, synthetic construct; identical to SEQ ID NO: 21281
  source 1..80: mol_type = other DNA

SEQ ID NO: 56176 - DNA, 80 bp, synthetic construct; identical to SEQ ID NO: 9235
  source 1..80: mol_type = other DNA

SEQ ID NO: 56177 - DNA, 80 bp, synthetic construct; identical to SEQ ID NO: 21283
  source 1..80: mol_type = other DNA

SEQ ID NO: 56178 - DNA, 80 bp, synthetic construct; identical to SEQ ID NO: 21284
  source 1..80: mol_type = other DNA

SEQ ID NO: 56179 - DNA, 80 bp, synthetic construct; identical to SEQ ID NO: 21285
  source 1..80: mol_type = other DNA

SEQ ID NO: 56180 - DNA, 80 bp, synthetic construct; identical to SEQ ID NO: 21286
  source 1..80: mol_type = other DNA

SEQ ID NO: 56181 - DNA, 80 bp, synthetic construct; identical to SEQ ID NO: 9236
  source 1..80: mol_type = other DNA

SEQ ID NO: 56182 - DNA, 80 bp, synthetic construct; identical to SEQ ID NO: 21288
  source 1..80: mol_type = other DNA

SEQ ID NO: 56183 - DNA, 80 bp, synthetic construct; identical to SEQ ID NO: 21289
  source 1..80: mol_type = other DNA

SEQ ID NO: 56184 - DNA, 80 bp, synthetic construct; identical to SEQ ID NO: 21290
  source 1..80: mol_type = other DNA

SEQ ID NO: 56185 - DNA, 80 bp, synthetic construct; identical to SEQ ID NO: 9237
  source 1..80: mol_type = other DNA

SEQ ID NO: 56186 - DNA, 80 bp, synthetic construct; identical to SEQ ID NO: 21292
  source 1..80: mol_type = other DNA

SEQ ID NO: 56187 - DNA, 80 bp, synthetic construct; identical to SEQ ID NO: 21293
  source 1..80: mol_type = other DNA

SEQ ID NO: 56188 - DNA, 80 bp, synthetic construct; identical to SEQ ID NO: 21294
  source 1..80: mol_type = other DNA

SEQ ID NO: 56189 - DNA, 80 bp, synthetic construct; identical to SEQ ID NO: 9238
  source 1..80: mol_type = other DNA

SEQ ID NO: 56190 - DNA, 80 bp, synthetic construct; identical to SEQ ID NO: 21296
  source 1..80: mol_type = other DNA

SEQ ID NO: 56191 - DNA, 80 bp, synthetic construct; identical to SEQ ID NO: 21297
  source 1..80: mol_type = other DNA

SEQ ID NO: 56192 - DNA, 80 bp, synthetic construct; identical to SEQ ID NO: 9239
  source 1..80: mol_type = other DNA

SEQ ID NO: 56193 - DNA, 80 bp, synthetic construct; identical to SEQ ID NO: 21299
  source 1..80: mol_type = other DNA

SEQ ID NO: 56194 - DNA, 80 bp, synthetic construct; identical to SEQ ID NO: 21300
  source 1..80: mol_type = other DNA

SEQ ID NO: 56195 - DNA, 80 bp, synthetic construct; identical to SEQ ID NO: 21301
  source 1..80: mol_type = other DNA

SEQ ID NO: 56196 - DNA, 80 bp, synthetic construct; identical to SEQ ID NO: 9240
  source 1..80: mol_type = other DNA

SEQ ID NO: 56197 - DNA, 80 bp, synthetic construct; identical to SEQ ID NO: 21303
  source 1..80: mol_type = other DNA

SEQ ID NO: 56198 - DNA, 80 bp, synthetic construct; identical to SEQ ID NO: 21304
  source 1..80: mol_type = other DNA

SEQ ID NO: 56199 - DNA, 80 bp, synthetic construct; identical to SEQ ID NO: 21305
  source 1..80: mol_type = other DNA

SEQ ID NO: 56200 - DNA, 80 bp, synthetic construct; identical to SEQ ID NO: 9241
  source 1..80: mol_type = other DNA

SEQ ID NO: 56201 - DNA, 80 bp, synthetic construct; identical to SEQ ID NO: 21307
  source 1..80: mol_type = other DNA

SEQ ID NO: 56202 - DNA, 80 bp, synthetic construct; identical to SEQ ID NO: 21308
  source 1..80: mol_type = other DNA

SEQ ID NO: 56203 - DNA, 80 bp, synthetic construct; identical to SEQ ID NO: 21309
  source 1..80: mol_type = other DNA

SEQ ID NO: 56204 - DNA, 80 bp, synthetic construct; identical to SEQ ID NO: 21310
  source 1..80: mol_type = other DNA

SEQ ID NO: 56205 - DNA, 80 bp, synthetic construct; identical to SEQ ID NO: 9242
  source 1..80: mol_type = other DNA

SEQ ID NO: 56206 - DNA, 80 bp, synthetic construct; identical to SEQ ID NO: 21312
  source 1..80: mol_type = other DNA

SEQ ID NO: 56207 - DNA, 80 bp, synthetic construct; identical to SEQ ID NO: 21313
  source 1..80: mol_type = other DNA

SEQ ID NO: 56208 - DNA, 80 bp, synthetic construct; identical to SEQ ID NO: 9243
  source 1..80: mol_type = other DNA

SEQ ID NO: 56209 - DNA, 80 bp, synthetic construct; identical to SEQ ID NO: 21315
  source 1..80: mol_type = other DNA

SEQ ID NO: 56210 - DNA, 80 bp, synthetic construct; identical to SEQ ID NO: 21316
  source 1..80: mol_type = other DNA

SEQ ID NO: 56211 - DNA, 80 bp, synthetic construct; identical to SEQ ID NO: 9244
  source 1..80: mol_type = other DNA

SEQ ID NO: 56212 - DNA, 80 bp, synthetic construct; identical to SEQ ID NO: 21319
  source 1..80: mol_type = other DNA

SEQ ID NO: 56213 - DNA, 80 bp, synthetic construct; identical to SEQ ID NO: 21320
  source 1..80: mol_type = other DNA

SEQ ID NO: 56214 - DNA, 80 bp, synthetic construct; identical to SEQ ID NO: 21321
  source 1..80: mol_type = other DNA

SEQ ID NO: 56215 - DNA, 80 bp, synthetic construct; identical to SEQ ID NO: 9245
  source 1..80: mol_type = other DNA

SEQ ID NO: 56216 - DNA, 80 bp, synthetic construct; identical to SEQ ID NO: 21323
  source 1..80: mol_type = other DNA

SEQ ID NO: 56217 - DNA, 80 bp, synthetic construct; identical to SEQ ID NO: 21324
  source 1..80: mol_type = other DNA

SEQ ID NO: 56218 - DNA, 80 bp, synthetic construct; identical to SEQ ID NO: 9246
  source 1..80: mol_type = other DNA

SEQ ID NO: 56219 - DNA, 80 bp, synthetic construct; identical to SEQ ID NO: 21326
  source 1..80: mol_type = other DNA

SEQ ID NO: 56220 - DNA, 80 bp, synthetic construct; identical to SEQ ID NO: 21327
  source 1..80: mol_type = other DNA

SEQ ID NO: 56221 - DNA, 80 bp, synthetic construct; identical to SEQ ID NO: 21328
  source 1..80: mol_type = other DNA

SEQ ID NO: 56222 - DNA, 80 bp, synthetic construct; identical to SEQ ID NO: 21329
  source 1..80: mol_type = other DNA

SEQ ID NO: 56223 - DNA, 80 bp, synthetic construct; identical to SEQ ID NO: 9247
  source 1..80: mol_type = other DNA

SEQ ID NO: 56224 - DNA, 80 bp, synthetic construct; identical to SEQ ID NO: 21331
  source 1..80: mol_type = other DNA

SEQ ID NO: 56225 - DNA, 80 bp, synthetic construct; identical to SEQ ID NO: 21332
  source 1..80: mol_type = other DNA

SEQ ID NO: 56226 - DNA, 80 bp, synthetic construct; identical to SEQ ID NO: 21333
  source 1..80: mol_type = other DNA

SEQ ID NO: 56227 - DNA, 80 bp, synthetic construct; identical to SEQ ID NO: 21334
  source 1..80: mol_type = other DNA

SEQ ID NO: 56228 - DNA, 80 bp, synthetic construct; identical to SEQ ID NO: 9248
  source 1..80: mol_type = other DNA

SEQ ID NO: 56229 - DNA, 80 bp, synthetic construct; identical to SEQ ID NO: 21336
  source 1..80: mol_type = other DNA

SEQ ID NO: 56230 - DNA, 80 bp, synthetic construct; identical to SEQ ID NO: 21337
  source 1..80: mol_type = other DNA

SEQ ID NO: 56231 - DNA, 80 bp, synthetic construct; identical to SEQ ID NO: 21338
  source 1..80: mol_type = other DNA

SEQ ID NO: 56232 - DNA, 80 bp, synthetic construct; identical to SEQ ID NO: 9249
  source 1..80: mol_type = other DNA

SEQ ID NO: 56233 - DNA, 80 bp, synthetic construct; identical to SEQ ID NO: 21340
  source 1..80: mol_type = other DNA

SEQ ID NO: 56234 - DNA, 80 bp, synthetic construct; identical to SEQ ID NO: 21341
  source 1..80: mol_type = other DNA

SEQ ID NO: 56235 - DNA, 80 bp, synthetic construct; identical to SEQ ID NO: 21342
  source 1..80: mol_type = other DNA

SEQ ID NO: 56236 - DNA, 80 bp, synthetic construct; identical to SEQ ID NO: 9250
  source 1..80: mol_type = other DNA

SEQ ID NO: 56237 - DNA, 80 bp, synthetic construct; identical to SEQ ID NO: 21344
  source 1..80: mol_type = other DNA

SEQ ID NO: 56238 - DNA, 80 bp, synthetic construct; identical to SEQ ID NO: 21345
  source 1..80: mol_type = other DNA

SEQ ID NO: 56239 - DNA, 80 bp, synthetic construct; identical to SEQ ID NO: 21346
  source 1..80: mol_type = other DNA

SEQ ID NO: 56240 - DNA, 80 bp, synthetic construct; identical to SEQ ID NO: 9251
  source 1..80: mol_type = other DNA

SEQ ID NO: 56241 - DNA, 80 bp, synthetic construct; identical to SEQ ID NO: 21348
  source 1..80: mol_type = other DNA

SEQ ID NO: 56242 - DNA, 80 bp, synthetic construct; identical to SEQ ID NO: 21349
  source 1..80: mol_type = other DNA

SEQ ID NO: 56243 - DNA, 80 bp, synthetic construct; identical to SEQ ID NO: 21350
  source 1..80: mol_type = other DNA

SEQ ID NO: 56244 - DNA, 80 bp, synthetic construct; identical to SEQ ID NO: 21351
  source 1..80: mol_type = other DNA

SEQ ID NO: 56245 - DNA, 80 bp, synthetic construct; identical to SEQ ID NO: 9252
  source 1..80: mol_type = other DNA

SEQ ID NO: 56246 - DNA, 80 bp, synthetic construct; identical to SEQ ID NO: 21353
  source 1..80: mol_type = other DNA

SEQ ID NO: 56247 - DNA, 80 bp, synthetic construct; identical to SEQ ID NO: 21354
  source 1..80: mol_type = other DNA

SEQ ID NO: 56248 - DNA, 80 bp, synthetic construct; identical to SEQ ID NO: 9253
  source 1..80: mol_type = other DNA

SEQ ID NO: 56249 - DNA, 80 bp, synthetic construct; identical to SEQ ID NO: 21356
  source 1..80: mol_type = other DNA

SEQ ID NO: 56250 - DNA, 80 bp, synthetic construct; identical to SEQ ID NO: 21357
  source 1..80: mol_type = other DNA

SEQ ID NO: 56251 - DNA, 80 bp, synthetic construct; identical to SEQ ID NO: 21358
  source 1..80: mol_type = other DNA

SEQ ID NO: 56252 - DNA, 80 bp, synthetic construct; identical to SEQ ID NO: 21359
  source 1..80: mol_type = other DNA

SEQ ID NO: 56253 - DNA, 80 bp, synthetic construct; identical to SEQ ID NO: 9254
  source 1..80: mol_type = other DNA

SEQ ID NO: 56254 - DNA, 80 bp, synthetic construct; identical to SEQ ID NO: 21361
  source 1..80: mol_type = other DNA

SEQ ID NO: 56255 - DNA, 80 bp, synthetic construct; identical to SEQ ID NO: 21362
  source 1..80: mol_type = other DNA

SEQ ID NO: 56256 - DNA, 80 bp, synthetic construct; identical to SEQ ID NO: 21363
  source 1..80: mol_type = other DNA

SEQ ID NO: 56257 - DNA, 80 bp, synthetic construct; identical to SEQ ID NO: 9255
  source 1..80: mol_type = other DNA

SEQ ID NO: 56258 - DNA, 80 bp, synthetic construct; identical to SEQ ID NO: 21365
  source 1..80: mol_type = other DNA

SEQ ID NO: 56259 - DNA, 80 bp, synthetic construct; identical to SEQ ID NO: 21366
  source 1..80: mol_type = other DNA

SEQ ID NO: 56260 - DNA, 80 bp, synthetic construct; identical to SEQ ID NO: 21367
  source 1..80: mol_type = other DNA

SEQ ID NO: 56261 - DNA, 80 bp, synthetic construct; identical to SEQ ID NO: 9256
  source 1..80: mol_type = other DNA

SEQ ID NO: 56262 - DNA, 80 bp, synthetic construct; identical to SEQ ID NO: 21369
  source 1..80: mol_type = other DNA

SEQ ID NO: 56263 - DNA, 80 bp, synthetic construct; identical to SEQ ID NO: 21370
  source 1..80: mol_type = other DNA

SEQ ID NO: 56264 - DNA, 80 bp, synthetic construct; identical to SEQ ID NO: 9257
  source 1..80: mol_type = other DNA

SEQ ID NO: 56265 - DNA, 80 bp, synthetic construct; identical to SEQ ID NO: 21372
  source 1..80: mol_type = other DNA

SEQ ID NO: 56266 - DNA, 80 bp, synthetic construct; identical to SEQ ID NO: 21373
  source 1..80: mol_type = other DNA

SEQ ID NO: 56267 - DNA, 80 bp, synthetic construct; identical to SEQ ID NO: 21374
  source 1..80: mol_type = other DNA

SEQ ID NO: 56268 - DNA, 80 bp, synthetic construct; identical to SEQ ID NO: 9258
  source 1..80: mol_type = other DNA

SEQ ID NO: 56269 - DNA, 80 bp, synthetic construct; identical to SEQ ID NO: 21376
  source 1..80: mol_type = other DNA

SEQ ID NO: 56270 - DNA, 80 bp, synthetic construct; identical to SEQ ID NO: 21377
  source 1..80: mol_type = other DNA

SEQ ID NO: 56271 - DNA, 80 bp, synthetic construct; identical to SEQ ID NO: 21379
  source 1..80: mol_type = other DNA

SEQ ID NO: 56272 - DNA, 80 bp, synthetic construct; identical to SEQ ID NO: 9259
  source 1..80: mol_type = other DNA

SEQ ID NO: 56273 - DNA, 80 bp, synthetic construct; identical to SEQ ID NO: 21381
  source 1..80: mol_type = other DNA

SEQ ID NO: 56274 - DNA, 80 bp, synthetic construct; identical to SEQ ID NO: 21382
  source 1..80: mol_type = other DNA

SEQ ID NO: 56275 - DNA, 80 bp, synthetic construct; identical to SEQ ID NO: 21383
  source 1..80: mol_type = other DNA

SEQ ID NO: 56276 - DNA, 80 bp, synthetic construct; identical to SEQ ID NO: 9260
  source 1..80: mol_type = other DNA

SEQ ID NO: 56277 - DNA, 80 bp, synthetic construct; identical to SEQ ID NO: 21385
  source 1..80: mol_type = other DNA

SEQ ID NO: 56278 - DNA, 80 bp, synthetic construct; identical to SEQ ID NO: 21386
  source 1..80: mol_type = other DNA

SEQ ID NO: 56279 - DNA, 80 bp, synthetic construct; identical to SEQ ID NO: 21387
  source 1..80: mol_type = other DNA

SEQ ID NO: 56280 - DNA, 80 bp, synthetic construct; identical to SEQ ID NO: 9261
  source 1..80: mol_type = other DNA

SEQ ID NO: 56281 - DNA, 80 bp, synthetic construct; identical to SEQ ID NO: 21389
  source 1..80: mol_type = other DNA

SEQ ID NO: 56282 - DNA, 80 bp, synthetic construct; identical to SEQ ID NO: 21390
  source 1..80: mol_type = other DNA

SEQ ID NO: 56283 - DNA, 80 bp, synthetic construct; identical to SEQ ID NO: 21391
  source 1..80: mol_type = other DNA

SEQ ID NO: 56284 - DNA, 80 bp, synthetic construct; identical to SEQ ID NO: 21392
  source 1..80: mol_type = other DNA

SEQ ID NO: 56285 - DNA, 80 bp, synthetic construct; identical to SEQ ID NO: 9262
  source 1..80: mol_type = other DNA

SEQ ID NO: 56286 - DNA, 80 bp, synthetic construct; identical to SEQ ID NO: 21394
  source 1..80: mol_type = other DNA

SEQ ID NO: 56287 - DNA, 80 bp, synthetic construct; identical to SEQ ID NO: 21395
  source 1..80: mol_type = other DNA

SEQ ID NO: 56288 - DNA, 80 bp, synthetic construct; identical to SEQ ID NO: 9263
  source 1..80: mol_type = other DNA

SEQ ID NO: 56289 - DNA, 80 bp, synthetic construct; identical to SEQ ID NO: 21397
  source 1..80: mol_type = other DNA

SEQ ID NO: 56290 - DNA, 80 bp, synthetic construct; identical to SEQ ID NO: 21398
  source 1..80: mol_type = other DNA

SEQ ID NO: 56291 - DNA, 80 bp, synthetic construct; identical to SEQ ID NO: 21399
  source 1..80: mol_type = other DNA

SEQ ID NO: 56292 - DNA, 80 bp, synthetic construct; identical to SEQ ID NO: 9264
  source 1..80: mol_type = other DNA

SEQ ID NO: 56293 - DNA, 80 bp, synthetic construct; identical to SEQ ID NO: 21401
  source 1..80: mol_type = other DNA

SEQ ID NO: 56294 - DNA, 80 bp, synthetic construct; identical to SEQ ID NO: 21402
  source 1..80: mol_type = other DNA

SEQ ID NO: 56295 - DNA, 80 bp, synthetic construct; identical to SEQ ID NO: 21403
  source 1..80: mol_type = other DNA

SEQ ID NO: 56296 - DNA, 80 bp, synthetic construct; identical to SEQ ID NO: 21404
  source 1..80: mol_type = other DNA

SEQ ID NO: 56297 - DNA, 80 bp, synthetic construct; identical to SEQ ID NO: 9265
  source 1..80: mol_type = other DNA

SEQ ID NO: 56298 - DNA, 80 bp, synthetic construct; identical to SEQ ID NO: 21406
  source 1..80: mol_type = other DNA

SEQ ID NO: 56299 - DNA, 80 bp, synthetic construct; identical to SEQ ID NO: 21407
  source 1..80: mol_type = other DNA

SEQ ID NO: 56300 - DNA, 80 bp, synthetic construct; identical to SEQ ID NO: 21408
  source 1..80: mol_type = other DNA

SEQ ID NO: 56301 - DNA, 80 bp, synthetic construct; identical to SEQ ID NO: 9266
  source 1..80: mol_type = other DNA

SEQ ID NO: 56302 - DNA, 80 bp, synthetic construct; identical to SEQ ID NO: 21410
  source 1..80: mol_type = other DNA

SEQ ID NO: 56303 - DNA, 80 bp, synthetic construct; identical to SEQ ID NO: 21411
  source 1..80: mol_type = other DNA

SEQ ID NO: 56304 - DNA, 80 bp, synthetic construct; identical to SEQ ID NO: 9267
  source 1..80: mol_type = other DNA

SEQ ID NO: 56305 - DNA, 80 bp, synthetic construct; identical to SEQ ID NO: 21414
  source 1..80: mol_type = other DNA

SEQ ID NO: 56306 - DNA, 80 bp, synthetic construct; identical to SEQ ID NO: 21415
  source 1..80: mol_type = other DNA

SEQ ID NO: 56307 - DNA, 80 bp, synthetic construct; identical to SEQ ID NO: 21416
  source 1..80: mol_type = other DNA

SEQ ID NO: 56308 - DNA, 80 bp, synthetic construct; identical to SEQ ID NO: 9268
  source 1..80: mol_type = other DNA

SEQ ID NO: 56309 - DNA, 80 bp, synthetic construct; identical to SEQ ID NO: 21418
  source 1..80: mol_type = other DNA

SEQ ID NO: 56310 - DNA, 80 bp, synthetic construct; identical to SEQ ID NO: 21419
  source 1..80: mol_type = other DNA

SEQ ID NO: 56311 - DNA, 80 bp, synthetic construct; identical to SEQ ID NO: 21420
  source 1..80: mol_type = other DNA

SEQ ID NO: 56312 - DNA, 80 bp, synthetic construct; identical to SEQ ID NO: 9269
  source 1..80: mol_type = other DNA

SEQ ID NO: 56313 - DNA, 80 bp, synthetic construct; identical to SEQ ID NO: 21422
  source 1..80: mol_type = other DNA

SEQ ID NO: 56314 - DNA, 80 bp, synthetic construct; identical to SEQ ID NO: 21423
  source 1..80: mol_type = other DNA

SEQ ID NO: 56315 - DNA, 80 bp, synthetic construct; identical to SEQ ID NO: 21424
  source 1..80: mol_type = other DNA

SEQ ID NO: 56316 - DNA, 80 bp, synthetic construct; identical to SEQ ID NO: 21425
  source 1..80: mol_type = other DNA

SEQ ID NO: 56317 - DNA, 80 bp, synthetic construct; identical to SEQ ID NO: 9270
  source 1..80: mol_type = other DNA

SEQ ID NO: 56318 - DNA, 80 bp, synthetic construct; identical to SEQ ID NO: 21427
  source 1..80: mol_type = other DNA

SEQ ID NO: 56319 - DNA, 80 bp, synthetic construct; identical to SEQ ID NO: 21428
  source 1..80: mol_type = other DNA

SEQ ID NO: 56320 - DNA, 80 bp, synthetic construct; identical to SEQ ID NO: 21429
  source 1..80: mol_type = other DNA

SEQ ID NO: 56321 - DNA, 80 bp, synthetic construct; identical to SEQ ID NO: 9271
  source 1..80: mol_type = other DNA

SEQ ID NO: 56322 - DNA, 80 bp, synthetic construct; identical to SEQ ID NO: 21431
  source 1..80: mol_type = other DNA

SEQ ID NO: 56323 - DNA, 80 bp, synthetic construct; identical to SEQ ID NO: 21432
  source 1..80: mol_type = other DNA

SEQ ID NO: 56324 - DNA, 80 bp, synthetic construct; identical to SEQ ID NO: 21433
  source 1..80: mol_type = other DNA

SEQ ID NO: 56325 - DNA, 80 bp, synthetic construct; identical to SEQ ID NO: 9272
  source 1..80: mol_type = other DNA

SEQ ID NO: 56326 - DNA, 80 bp, synthetic construct; identical to SEQ ID NO: 21437
  source 1..80: mol_type = other DNA

SEQ ID NO: 56327 - DNA, 80 bp, synthetic construct; identical to SEQ ID NO: 9273
  source 1..80: mol_type = other DNA

SEQ ID NO: 56328 - DNA, 80 bp, synthetic construct; identical to SEQ ID NO: 21439
  source 1..80: mol_type = other DNA

SEQ ID NO: 56329 - DNA, 80 bp, synthetic construct; identical to SEQ ID NO: 21440
  source 1..80: mol_type = other DNA

SEQ ID NO: 56330 - DNA, 80 bp, synthetic construct; identical to SEQ ID NO: 21441
  source 1..80: mol_type = other DNA

SEQ ID NO: 56331 - DNA, 80 bp, synthetic construct; identical to SEQ ID NO: 21442
  source 1..80: mol_type = other DNA

SEQ ID NO: 56332 - DNA, 80 bp, synthetic construct; identical to SEQ ID NO: 9274
  source 1..80: mol_type = other DNA

SEQ ID NO: 56333 - DNA, 80 bp, synthetic construct; identical to SEQ ID NO: 21444
  source 1..80: mol_type = other DNA

SEQ ID NO: 56334 - DNA, 80 bp, synthetic construct; identical to SEQ ID NO: 21445
  source 1..80: mol_type = other DNA

SEQ ID NO: 56335 - DNA, 80 bp, synthetic construct; identical to SEQ ID NO: 9275
  source 1..80: mol_type = other DNA

SEQ ID NO: 56336 - DNA, 80 bp, synthetic construct; identical to SEQ ID NO: 21447
  source 1..80: mol_type = other DNA

SEQ ID NO: 56337 - DNA, 80 bp, synthetic construct; identical to SEQ ID NO: 21448
  source 1..80: mol_type = other DNA

SEQ ID NO: 56338 - DNA, 80 bp, synthetic construct; identical to SEQ ID NO: 21449
  source 1..80: mol_type = other DNA

SEQ ID NO: 56339 - DNA, 80 bp, synthetic construct; identical to SEQ ID NO: 9276
  source 1..80: mol_type = other DNA

SEQ ID NO: 56340 - DNA, 80 bp, synthetic construct; identical to SEQ ID NO: 21451
  source 1..80: mol_type = other DNA

SEQ ID NO: 56341 - DNA, 80 bp, synthetic construct; identical to SEQ ID NO: 21452
  source 1..80: mol_type = other DNA

SEQ ID NO: 56342 - DNA, 80 bp, synthetic construct; identical to SEQ ID NO: 21453
  source 1..80: mol_type = other DNA

SEQ ID NO: 56343 - DNA, 80 bp, synthetic construct; identical to SEQ ID NO: 21454
  source 1..80: mol_type = other DNA

SEQ ID NO: 56344 - DNA, 80 bp, synthetic construct; identical to SEQ ID NO: 9277
  source 1..80: mol_type = other DNA

SEQ ID NO: 56345 - DNA, 80 bp, synthetic construct; identical to SEQ ID NO: 21456
  source 1..80: mol_type = other DNA

SEQ ID NO: 56346 - DNA, 80 bp, synthetic construct; identical to SEQ ID NO: 21457
  source 1..80: mol_type = other DNA

SEQ ID NO: 56347 - DNA, 80 bp, synthetic construct; identical to SEQ ID NO: 21458
  source 1..80: mol_type = other DNA

SEQ ID NO: 56348 - DNA, 80 bp, synthetic construct; identical to SEQ ID NO: 9278
  source 1..80: mol_type = other DNA

SEQ ID NO: 56349 - DNA, 80 bp, synthetic construct; identical to SEQ ID NO: 21460
  source 1..80: mol_type = other DNA

SEQ ID NO: 56350 - DNA, 80 bp, synthetic construct; identical to SEQ ID NO: 21461
  source 1..80: mol_type = other DNA

SEQ ID NO: 56351 - DNA, 80 bp, synthetic construct; identical to SEQ ID NO: 9279
  source 1..80: mol_type = other DNA

SEQ ID NO: 56352 - DNA, 80 bp, synthetic construct; identical to SEQ ID NO: 21463
  source 1..80: mol_type = other DNA

SEQ ID NO: 56353 - DNA, 80 bp, synthetic construct; identical to SEQ ID NO: 21464
  source 1..80: mol_type = other DNA

SEQ ID NO: 56354 - DNA, 80 bp, synthetic construct; identical to SEQ ID NO: 21465
  source 1..80: mol_type = other DNA

SEQ ID NO: 56355 - DNA, 80 bp, synthetic construct; identical to SEQ ID NO: 9280
  source 1..80: mol_type = other DNA

SEQ ID NO: 56356 - DNA, 80 bp, synthetic construct; identical to SEQ ID NO: 21469
  source 1..80: mol_type = other DNA

SEQ ID NO: 56357 - DNA, 80 bp, synthetic construct; identical to SEQ ID NO: 21470
  source 1..80: mol_type = other DNA

SEQ ID NO: 56358 - DNA, 80 bp, synthetic construct; identical to SEQ ID NO: 9281
  source 1..80: mol_type = other DNA

SEQ ID NO: 56359 - DNA, 80 bp, synthetic construct; identical to SEQ ID NO: 21472
  source 1..80: mol_type = other DNA

SEQ ID NO: 56360 - DNA, 80 bp, synthetic construct; identical to SEQ ID NO: 21473
  source 1..80: mol_type = other DNA

SEQ ID NO: 56361 - DNA, 80 bp, synthetic construct; identical to SEQ ID NO: 21474
  source 1..80: mol_type = other DNA

SEQ ID NO: 56362 - DNA, 80 bp, synthetic construct; identical to SEQ ID NO: 9282
  source 1..80: mol_type = other DNA

SEQ ID NO: 56363 - DNA, 80 bp, synthetic construct; identical to SEQ ID NO: 21476
  source 1..80: mol_type = other DNA

SEQ ID NO: 56364 - DNA, 80 bp, synthetic construct; identical to SEQ ID NO: 21477
  source 1..80: mol_type = other DNA

SEQ ID NO: 56365 - DNA, 80 bp, synthetic construct; identical to SEQ ID NO: 9283
  source 1..80: mol_type = other DNA

SEQ ID NO: 56366 - DNA, 80 bp, synthetic construct; identical to SEQ ID NO: 21479
  source 1..80: mol_type = other DNA

SEQ ID NO: 56367 - DNA, 80 bp, synthetic construct; identical to SEQ ID NO: 21480
  source 1..80: mol_type = other DNA

SEQ ID NO: 56368 - DNA, 80 bp, synthetic construct; identical to SEQ ID NO: 21481
  source 1..80: mol_type = other DNA

SEQ ID NO: 56369 - DNA, 80 bp, synthetic construct; identical to SEQ ID NO: 9284
  source 1..80: mol_type = other DNA

SEQ ID NO: 56370 - DNA, 80 bp, synthetic construct; identical to SEQ ID NO: 21483
  source 1..80: mol_type = other DNA

SEQ ID NO: 56371 - DNA, 80 bp, synthetic construct; identical to SEQ ID NO: 21484
  source 1..80: mol_type = other DNA

SEQ ID NO: 56372 - DNA, 80 bp, synthetic construct; identical to SEQ ID NO: 21485
  source 1..80: mol_type = other DNA

SEQ ID NO: 56373 - DNA, 80 bp, synthetic construct; identical to SEQ ID NO: 9285
  source 1..80: mol_type = other DNA

SEQ ID NO: 56374 - DNA, 80 bp, synthetic construct; identical to SEQ ID NO: 21487
  source 1..80: mol_type = other DNA

SEQ ID NO: 56375 - DNA, 80 bp, synthetic construct; identical to SEQ ID NO: 21488
  source 1..80: mol_type = other DNA

SEQ ID NO: 56376 - DNA, 80 bp, synthetic construct; identical to SEQ ID NO: 21489
  source 1..80: mol_type = other DNA

SEQ ID NO: 56377 - DNA, 80 bp, synthetic construct; identical to SEQ ID NO: 9286
  source 1..80: mol_type = other DNA

SEQ ID NO: 56378 - DNA, 80 bp, synthetic construct; identical to SEQ ID NO: 21491
  source 1..80: mol_type = other DNA

SEQ ID NO: 56379 - DNA, 80 bp, synthetic construct; identical to SEQ ID NO: 21492
  source 1..80: mol_type = other DNA

SEQ ID NO: 56380 - DNA, 80 bp, synthetic construct; identical to SEQ ID NO: 21493
  source 1..80: mol_type = other DNA

SEQ ID NO: 56381 - DNA, 80 bp, synthetic construct; identical to SEQ ID NO: 21494
  source 1..80: mol_type = other DNA

SEQ ID NO: 56382 - DNA, 80 bp, synthetic construct; identical to SEQ ID NO: 9287
  source 1..80: mol_type = other DNA

SEQ ID NO: 56383 - DNA, 80 bp, synthetic construct; identical to SEQ ID NO: 21496
  source 1..80: mol_type = other DNA

SEQ ID NO: 56384 - DNA, 80 bp, synthetic construct; identical to SEQ ID NO: 21497
  source 1..80: mol_type = other DNA

SEQ ID NO: 56385 - DNA, 80 bp, synthetic construct; identical to SEQ ID NO: 21498
  source 1..80: mol_type = other DNA

SEQ ID NO: 56386 - DNA, 80 bp, synthetic construct; identical to SEQ ID NO: 21499
  source 1..80: mol_type = other DNA

SEQ ID NO: 56387 - DNA, 80 bp, synthetic construct; identical to SEQ ID NO: 9288
  source 1..80: mol_type = other DNA

SEQ ID NO: 56388 - DNA, 80 bp, synthetic construct; identical to SEQ ID NO: 21501
  source 1..80: mol_type = other DNA

SEQ ID NO: 56389 - DNA, 80 bp, synthetic construct; identical to SEQ ID NO: 21502
  source 1..80: mol_type = other DNA

SEQ ID NO: 56390 - DNA, 80 bp, synthetic construct; identical to SEQ ID NO: 9289
  source 1..80: mol_type = other DNA

SEQ ID NO: 56391 - DNA, 80 bp, synthetic construct; identical to SEQ ID NO: 21504
  source 1..80: mol_type = other DNA

SEQ ID NO: 56392 - DNA, 80 bp, synthetic construct; identical to SEQ ID NO: 21505
  source 1..80: mol_type = other DNA

SEQ ID NO: 56393 - DNA, 80 bp, synthetic construct; identical to SEQ ID NO: 21506
  source 1..80: mol_type = other DNA

SEQ ID NO: 56394 - DNA, 80 bp, synthetic construct; identical to SEQ ID NO: 9290
  source 1..80: mol_type = other DNA

SEQ ID NO: 56395 - DNA, 80 bp, synthetic construct; identical to SEQ ID NO: 21509
  source 1..80: mol_type = other DNA

SEQ ID NO: 56396 - DNA, 80 bp, synthetic construct; identical to SEQ ID NO: 21510
  source 1..80: mol_type = other DNA

SEQ ID NO: 56397 - DNA, 80 bp, synthetic construct; identical to SEQ ID NO: 9291
  source 1..80: mol_type = other DNA

SEQ ID NO: 56398 - DNA, 80 bp, synthetic construct; identical to SEQ ID NO: 21513
  source 1..80: mol_type = other DNA

SEQ ID NO: 56399 - DNA, 80 bp, synthetic construct; identical to SEQ ID NO: 21514
  source 1..80: mol_type = other DNA

SEQ ID NO: 56400 - DNA, 80 bp, synthetic construct; identical to SEQ ID NO: 9292
  source 1..80: mol_type = other DNA

SEQ ID NO: 56401 - DNA, 80 bp, synthetic construct; identical to SEQ ID NO: 21516
  source 1..80: mol_type = other DNA

SEQ ID NO: 56402 - DNA, 80 bp, synthetic construct; identical to SEQ ID NO: 21517
  source 1..80: mol_type = other DNA

SEQ ID NO: 56403 - DNA, 80 bp, synthetic construct; identical to SEQ ID NO: 21518
  source 1..80: mol_type = other DNA

SEQ ID NO: 56404 - DNA, 80 bp, synthetic construct; identical to SEQ ID NO: 21519
  source 1..80: mol_type = other DNA

SEQ ID NO: 56405 - DNA, 80 bp, synthetic construct; identical to SEQ ID NO: 9293
  source 1..80: mol_type = other DNA

SEQ ID NO: 56406 - DNA, 80 bp, synthetic construct; identical to SEQ ID NO: 21521
  source 1..80: mol_type = other DNA

SEQ ID NO: 56407 - DNA, 80 bp, synthetic construct; identical to SEQ ID NO: 21522
  source 1..80: mol_type = other DNA

SEQ ID NO: 56408 - DNA, 80 bp, synthetic construct; identical to SEQ ID NO: 9294
  source 1..80: mol_type = other DNA

SEQ ID NO: 56409 - DNA, 80 bp, synthetic construct; identical to SEQ ID NO: 21524
  source 1..80: mol_type = other DNA

SEQ ID NO: 56410 - DNA, 80 bp, synthetic construct; identical to SEQ ID NO: 21525
  source 1..80: mol_type = other DNA

SEQ ID NO: 56411 - DNA, 80 bp, synthetic construct; identical to SEQ ID NO: 21526
  source 1..80: mol_type = other DNA

SEQ ID NO: 56412 - DNA, 80 bp, synthetic construct; identical to SEQ ID NO: 9295
  source 1..80: mol_type = other DNA

SEQ ID NO: 56413 - DNA, 80 bp, synthetic construct; identical to SEQ ID NO: 21528
  source 1..80: mol_type = other DNA

SEQ ID NO: 56414 - DNA, 80 bp, synthetic construct; identical to SEQ ID NO: 21529
  source 1..80: mol_type = other DNA

SEQ ID NO: 56415 - DNA, 80 bp, synthetic construct; identical to SEQ ID NO: 21530
  source 1..80: mol_type = other DNA

SEQ ID NO: 56416 - DNA, 80 bp, synthetic construct; identical to SEQ ID NO: 9296
  source 1..80: mol_type = other DNA

SEQ ID NO: 56417 - DNA, 80 bp, synthetic construct; identical to SEQ ID NO: 21532
  source 1..80: mol_type = other DNA

SEQ ID NO: 56418 - DNA, 80 bp, synthetic construct; identical to SEQ ID NO: 21533
  source 1..80: mol_type = other DNA

SEQ ID NO: 56419 - DNA, 80 bp, synthetic construct; identical to SEQ ID NO: 21534
  source 1..80: mol_type = other DNA

SEQ ID NO: 56420 - DNA, 80 bp, synthetic construct; identical to SEQ ID NO: 9297
  source 1..80: mol_type = other DNA

SEQ ID NO: 56421 - DNA, 80 bp, synthetic construct; identical to SEQ ID NO: 21536
  source 1..80: mol_type = other DNA

SEQ ID NO: 56422 - DNA, 80 bp, synthetic construct; identical to SEQ ID NO: 21537
  source 1..80: mol_type = other DNA

SEQ ID NO: 56423 - DNA, 80 bp, synthetic construct; identical to SEQ ID NO: 21538
  source 1..80: mol_type = other DNA

SEQ ID NO: 56424 - DNA, 80 bp, synthetic construct; identical to SEQ ID NO: 21539
  source 1..80: mol_type = other DNA

SEQ ID NO: 56425 - DNA, 80 bp, synthetic construct; identical to SEQ ID NO: 9298
  source 1..80: mol_type = other DNA

SEQ ID NO: 56426 - DNA, 80 bp, synthetic construct; identical to SEQ ID NO: 21541
  source 1..80: mol_type = other DNA

SEQ ID NO: 56427 - DNA, 80 bp, synthetic construct; identical to SEQ ID NO: 21542
  source 1..80: mol_type = other DNA

SEQ ID NO: 56428 - DNA, 80 bp, synthetic construct; identical to SEQ ID NO: 9299
  source 1..80: mol_type = other DNA

SEQ ID NO: 56429 - DNA, 80 bp, synthetic construct; identical to SEQ ID NO: 21544
  source 1..80: mol_type = other DNA

SEQ ID NO: 56430 - DNA, 80 bp, synthetic construct; identical to SEQ ID NO: 21545
  source 1..80: mol_type = other DNA

SEQ ID NO: 56431 - DNA, 80 bp, synthetic construct; identical to SEQ ID NO: 21546
  source 1..80: mol_type = other DNA

SEQ ID NO: 56432 - DNA, 80 bp, synthetic construct; identical to SEQ ID NO: 9300
  source 1..80: mol_type = other DNA

SEQ ID NO: 56433 - DNA, 80 bp, synthetic construct; identical to SEQ ID NO: 21548
  source 1..80: mol_type = other DNA

SEQ ID NO: 56434 - DNA, 80 bp, synthetic construct; identical to SEQ ID NO: 21549
  source 1..80: mol_type = other DNA

SEQ ID NO: 56435 - DNA, 80 bp, synthetic construct; identical to SEQ ID NO: 21550
  source 1..80: mol_type = other DNA

SEQ ID NO: 56436 - DNA, 80 bp, synthetic construct; identical to SEQ ID NO: 21551
  source 1..80: mol_type = other DNA

SEQ ID NO: 56437 - DNA, 80 bp, synthetic construct; identical to SEQ ID NO: 9301
  source 1..80: mol_type = other DNA

SEQ ID NO: 56438 - DNA, 80 bp, synthetic construct; identical to SEQ ID NO: 21553
  source 1..80: mol_type = other DNA

SEQ ID NO: 56439 - DNA, 80 bp, synthetic construct; identical to SEQ ID NO: 21554
  source 1..80: mol_type = other DNA

SEQ ID NO: 56440 - DNA, 80 bp, synthetic construct; identical to SEQ ID NO: 21555
  source 1..80: mol_type = other DNA

SEQ ID NO: 56441 - DNA, 80 bp, synthetic construct; identical to SEQ ID NO: 9302
  source 1..80: mol_type = other DNA

SEQ ID NO: 56442 - DNA, 80 bp, synthetic construct; identical to SEQ ID NO: 21557
  source 1..80: mol_type = other DNA

SEQ ID NO: 56443 - DNA, 80 bp, synthetic construct; identical to SEQ ID NO: 21558
  source 1..80: mol_type = other DNA

SEQ ID NO: 56444 - DNA, 80 bp, synthetic construct; identical to SEQ ID NO: 9303
  source 1..80: mol_type = other DNA

SEQ ID NO: 56445 - DNA, 80 bp, synthetic construct; identical to SEQ ID NO: 21560
  source 1..80: mol_type = other DNA

SEQ ID NO: 56446 - DNA, 80 bp, synthetic construct; identical to SEQ ID NO: 21561
  source 1..80: mol_type = other DNA

SEQ ID NO: 56447 - DNA, 80 bp, synthetic construct; identical to SEQ ID NO: 21562
  source 1..80: mol_type = other DNA

SEQ ID NO: 56448 - DNA, 80 bp, synthetic construct; identical to SEQ ID NO: 21563
  source 1..80: mol_type = other DNA

SEQ ID NO: 56449 - DNA, 80 bp, synthetic construct; identical to SEQ ID NO: 9304
  source 1..80: mol_type = other DNA

SEQ ID NO: 56450 - DNA, 80 bp, synthetic construct; identical to SEQ ID NO: 21566
  source 1..80: mol_type = other DNA

SEQ ID NO: 56451 - DNA, 80 bp, synthetic construct; identical to SEQ ID NO: 9305
  source 1..80: mol_type = other DNA

SEQ ID NO: 56452 - DNA, 80 bp, synthetic construct; identical to SEQ ID NO: 21569
  source 1..80: mol_type = other DNA

SEQ ID NO: 56453 - DNA, 80 bp, synthetic construct; identical to SEQ ID NO: 21570
  source 1..80: mol_type = other DNA

SEQ ID NO: 56454 - DNA, 80 bp, synthetic construct; identical to SEQ ID NO: 21571
  source 1..80: mol_type = other DNA

SEQ ID NO: 56455 - DNA, 80 bp, synthetic construct; identical to SEQ ID NO: 21572
  source 1..80: mol_type = other DNA

SEQ ID NO: 56456 - DNA, 80 bp, synthetic construct; identical to SEQ ID NO: 9306
  source 1..80: mol_type = other DNA

SEQ ID NO: 56457 - DNA, 80 bp, synthetic construct; identical to SEQ ID NO: 21574
  source 1..80: mol_type = other DNA

SEQ ID NO: 56458 - DNA, 80 bp, synthetic construct; identical to SEQ ID NO: 21575
  source 1..80: mol_type = other DNA

SEQ ID NO: 56459 - DNA, 80 bp, synthetic construct; identical to SEQ ID NO: 21576
  source 1..80: mol_type = other DNA

SEQ ID NO: 56460 - DNA, 80 bp, synthetic construct; identical to SEQ ID NO: 9307
  source 1..80: mol_type = other DNA

SEQ ID NO: 56461 - DNA, 80 bp, synthetic construct; identical to SEQ ID NO: 21578
  source 1..80: mol_type = other DNA

SEQ ID NO: 56462 - DNA, 80 bp, synthetic construct; identical to SEQ ID NO: 21579
  source 1..80: mol_type = other DNA

SEQ ID NO: 56463 - DNA, 80 bp, synthetic construct; identical to SEQ ID NO: 21580
  source 1..80: mol_type = other DNA

SEQ ID NO: 56464 - DNA, 80 bp, synthetic construct; identical to SEQ ID NO: 9308
  source 1..80: mol_type = other DNA

SEQ ID NO: 56465 - DNA, 80 bp, synthetic construct; identical to SEQ ID NO: 21582
  source 1..80: mol_type = other DNA

SEQ ID NO: 56466 - DNA, 80 bp, synthetic construct; identical to SEQ ID NO: 21583
  source 1..80: mol_type = other DNA

SEQ ID NO: 56467 - DNA, 80 bp, synthetic construct; identical to SEQ ID NO: 21584
  source 1..80: mol_type = other DNA

SEQ ID NO: 56468 - DNA, 80 bp, synthetic construct; identical to SEQ ID NO: 9309
  source 1..80: mol_type = other DNA

SEQ ID NO: 56469 - DNA, 80 bp, synthetic construct; identical to SEQ ID NO: 21586
  source 1..80: mol_type = other DNA

SEQ ID NO: 56470 - DNA, 80 bp, synthetic construct; identical to SEQ ID NO: 21587
  source 1..80: mol_type = other DNA

SEQ ID NO: 56471 - DNA, 80 bp, synthetic construct; identical to SEQ ID NO: 21588
  source 1..80: mol_type = other DNA

SEQ ID NO: 56472 - DNA, 80 bp, synthetic construct; identical to SEQ ID NO: 9310
  source 1..80: mol_type = other DNA

SEQ ID NO: 56473 - DNA, 80 bp, synthetic construct; identical to SEQ ID NO: 21590
  source 1..80: mol_type = other DNA

SEQ ID NO: 56474 - DNA, 80 bp, synthetic construct; identical to SEQ ID NO: 21591
  source 1..80: mol_type = other DNA

SEQ ID NO: 56475 - DNA, 80 bp, synthetic construct; identical to SEQ ID NO: 21592
  source 1..80: mol_type = other DNA

SEQ ID NO: 56476 - DNA, 80 bp, synthetic construct; identical to SEQ ID NO: 9311
  source 1..80: mol_type = other DNA

SEQ ID NO: 56477 - DNA, 80 bp, synthetic construct; identical to SEQ ID NO: 21594
  source 1..80: mol_type = other DNA

SEQ ID NO: 56478 - DNA, 80 bp, synthetic construct; identical to SEQ ID NO: 21595
  source 1..80: mol_type = other DNA

SEQ ID NO: 56479 - DNA, 80 bp, synthetic construct; identical to SEQ ID NO: 21596
  source 1..80: mol_type = other DNA

SEQ ID NO: 56480 - DNA, 80 bp, synthetic construct; identical to SEQ ID NO: 21597
  source 1..80: mol_type = other DNA

SEQ ID NO: 56481 - DNA, 80 bp, synthetic construct; identical to SEQ ID NO: 9312
  source 1..80: mol_type = other DNA

SEQ ID NO: 56482 - DNA, 80 bp, synthetic construct; identical to SEQ ID NO: 21599
  source 1..80: mol_type = other DNA

SEQ ID NO: 56483 - DNA, 80 bp, synthetic construct; identical to SEQ ID NO: 21600
  source 1..80: mol_type = other DNA

SEQ ID NO: 56484 - DNA, 80 bp, synthetic construct; identical to SEQ ID NO: 9313
  source 1..80: mol_type = other DNA

SEQ ID NO: 56485 - DNA, 80 bp, synthetic construct; identical to SEQ ID NO: 21602
  source 1..80: mol_type = other DNA

SEQ ID NO: 56486 - DNA, 80 bp, synthetic construct; identical to SEQ ID NO: 21603
  source 1..80: mol_type = other DNA

SEQ ID NO: 56487 - DNA, 80 bp, synthetic construct; identical to SEQ ID NO: 21604
  source 1..80: mol_type = other DNA

SEQ ID NO: 56488 - DNA, 80 bp, synthetic construct; identical to SEQ ID NO: 9314
  source 1..80: mol_type = other DNA

SEQ ID NO: 56489 - DNA, 80 bp, synthetic construct; identical to SEQ ID NO: 21606
  source 1..80: mol_type = other DNA

SEQ ID NO: 56490 - DNA, 80 bp, synthetic construct; identical to SEQ ID NO: 21607
  source 1..80: mol_type = other DNA

SEQ ID NO: 56491 - DNA, 80 bp, synthetic construct; identical to SEQ ID NO: 21608
  source 1..80: mol_type = other DNA

SEQ ID NO: 56492 - DNA, 80 bp, synthetic construct; identical to SEQ ID NO: 21609
  source 1..80: mol_type = other DNA

SEQ ID NO: 56493 - DNA, 80 bp, synthetic construct; identical to SEQ ID NO: 9315
  source 1..80: mol_type = other DNA

SEQ ID NO: 56494 - DNA, 80 bp, synthetic construct; identical to SEQ ID NO: 21611
  source 1..80: mol_type = other DNA

SEQ ID NO: 56495 - DNA, 80 bp, synthetic construct; identical to SEQ ID NO: 21612
  source 1..80: mol_type = other DNA

SEQ ID NO: 56496 - DNA, 80 bp, synthetic construct; identical to SEQ ID NO: 21613
  source 1..80: mol_type = other DNA

SEQ ID NO: 56497 - DNA, 80 bp, synthetic construct; identical to SEQ ID NO: 9316
  source 1..80: mol_type = other DNA

SEQ ID NO: 56498 - DNA, 80 bp, synthetic construct; identical to SEQ ID NO: 21615
  source 1..80: mol_type = other DNA

SEQ ID NO: 56499 - DNA, 80 bp, synthetic construct; identical to SEQ ID NO: 21616
  source 1..80: mol_type = other DNA

SEQ ID NO: 56500 - DNA, 80 bp, synthetic construct; identical to SEQ ID NO: 9317
  source 1..80: mol_type = other DNA

SEQ ID NO: 56501 - DNA, 80 bp, synthetic construct; identical to SEQ ID NO: 21618
  source 1..80: mol_type = other DNA

SEQ ID NO: 56502 - DNA, 80 bp, synthetic construct; identical to SEQ ID NO: 21619
  source 1..80: mol_type = other DNA

SEQ ID NO: 56503 - DNA, 80 bp, synthetic construct; identical to SEQ ID NO: 21620
  source 1..80: mol_type = other DNA

SEQ ID NO: 56504 - DNA, 80 bp, synthetic construct; identical to SEQ ID NO: 9318
  source 1..80: mol_type = other DNA

SEQ ID NO: 56505 - DNA, 80 bp, synthetic construct; identical to SEQ ID NO: 21622
  source 1..80: mol_type = other DNA

SEQ ID NO: 56506 - DNA, 80 bp, synthetic construct; identical to SEQ ID NO: 21623
  source 1..80: mol_type = other DNA

SEQ ID NO: 56507 - DNA, 80 bp, synthetic construct; identical to SEQ ID NO: 21624
  source 1..80: mol_type = other DNA

SEQ ID NO: 56508 - DNA, 80 bp, synthetic construct; identical to SEQ ID NO: 9319
  source 1..80: mol_type = other DNA

SEQ ID NO: 56509 - DNA, 80 bp, synthetic construct; identical to SEQ ID NO: 21626
  source 1..80: mol_type = other DNA

SEQ ID NO: 56510 - DNA, 80 bp, synthetic construct; identical to SEQ ID NO: 21627
  source 1..80: mol_type = other DNA

SEQ ID NO: 56511 - DNA, 80 bp, synthetic construct; identical to SEQ ID NO: 21628
  source 1..80: mol_type = other DNA

SEQ ID NO: 56512 - DNA, 80 bp, synthetic construct; identical to SEQ ID NO: 21629
  source 1..80: mol_type = other DNA

SEQ ID NO: 56513 - DNA, 80 bp, synthetic construct; identical to SEQ ID NO: 21630
  source 1..80: mol_type = other DNA

SEQ ID NO: 56514 - DNA, 80 bp, synthetic construct; identical to SEQ ID NO: 9320
  source 1..80: mol_type = other DNA

SEQ ID NO: 56515 - DNA, 80 bp, synthetic construct; identical to SEQ ID NO: 21632
  source 1..80: mol_type = other DNA

SEQ ID NO: 56516 - DNA, 80 bp, synthetic construct; identical to SEQ ID NO: 21633
  source 1..80: mol_type = other DNA

SEQ ID NO: 56517 - DNA, 80 bp, synthetic construct; identical to SEQ ID NO: 21634
  source 1..80: mol_type = other DNA

SEQ ID NO: 56518 - DNA, 80 bp, synthetic construct; identical to SEQ ID NO: 21635
  source 1..80: mol_type = other DNA

SEQ ID NO: 56519 - DNA, 80 bp, synthetic construct; identical to SEQ ID NO: 9321
  source 1..80: mol_type = other DNA

SEQ ID NO: 56520 - DNA, 80 bp, synthetic construct; identical to SEQ ID NO: 21637
  source 1..80: mol_type = other DNA

SEQ ID NO: 56521 - DNA, 80 bp, synthetic construct; identical to SEQ ID NO: 21638
  source 1..80: mol_type = other DNA

SEQ ID NO: 56522 - DNA, 80 bp, synthetic construct; identical to SEQ ID NO: 9322
  source 1..80: mol_type = other DNA

SEQ ID NO: 56523 - DNA, 80 bp, synthetic construct; identical to SEQ ID NO: 21640
  source 1..80: mol_type = other DNA

SEQ ID NO: 56524 - DNA, 80 bp, synthetic construct; identical to SEQ ID NO: 21641
  source 1..80: mol_type = other DNA

SEQ ID NO: 56525 - DNA, 80 bp, synthetic construct; identical to SEQ ID NO: 21642
  source 1..80: mol_type = other DNA

SEQ ID NO: 56526 - DNA, 80 bp, synthetic construct; identical to SEQ ID NO: 9323
  source 1..80: mol_type = other DNA

SEQ ID NO: 56527 - DNA, 80 bp, synthetic construct; identical to SEQ ID NO: 21644
  source 1..80: mol_type = other DNA

SEQ ID NO: 56528 - DNA, 80 bp, synthetic construct; identical to SEQ ID NO: 21646
  source 1..80: mol_type = other DNA

SEQ ID NO: 56529 - DNA, 80 bp, synthetic construct; identical to SEQ ID NO: 9324
  source 1..80: mol_type = other DNA

SEQ ID NO: 56530 - DNA, 80 bp, synthetic construct; identical to SEQ ID NO: 21648
  source 1..80: mol_type = other DNA

SEQ ID NO: 56531 - DNA, 80 bp, synthetic construct; identical to SEQ ID NO: 21649
  source 1..80: mol_type = other DNA

SEQ ID NO: 56532 - DNA, 80 bp, synthetic construct; identical to SEQ ID NO: 21650
  source 1..80: mol_type = other DNA

SEQ ID NO: 56533 - DNA, 80 bp, synthetic construct; identical to SEQ ID NO: 21651
  source 1..80: mol_type = other DNA

SEQ ID NO: 56534 - DNA, 80 bp, synthetic construct; identical to SEQ ID NO: 9325
  source 1..80: mol_type = other DNA

SEQ ID NO: 56535 - DNA, 80 bp, synthetic construct; identical to SEQ ID NO: 21653
  source 1..80: mol_type = other DNA

SEQ ID NO: 56536 - DNA, 80 bp, synthetic construct; identical to SEQ ID NO: 21654
  source 1..80: mol_type = other DNA

SEQ ID NO: 56537 - DNA, 80 bp, synthetic construct; identical to SEQ ID NO: 21655
  source 1..80: mol_type = other DNA

SEQ ID NO: 56538 - DNA, 80 bp, synthetic construct; identical to SEQ ID NO: 9326
  source 1..80: mol_type = other DNA

SEQ ID NO: 56539 - DNA, 80 bp, synthetic construct; identical to SEQ ID NO: 21657
  source 1..80: mol_type = other DNA

SEQ ID NO: 56540 - DNA, 80 bp, synthetic construct; identical to SEQ ID NO: 21658
  source 1..80: mol_type = other DNA

SEQ ID NO: 56541 - DNA, 80 bp, synthetic construct; identical to SEQ ID NO: 21659
  source 1..80: mol_type = other DNA

SEQ ID NO: 56542 - DNA, 80 bp, synthetic construct; identical to SEQ ID NO: 9327
  source 1..80: mol_type = other DNA

SEQ ID NO: 56543 - DNA, 80 bp, synthetic construct; identical to SEQ ID NO: 21661
  source 1..80: mol_type = other DNA

SEQ ID NO: 56544 - DNA, 80 bp, synthetic construct; identical to SEQ ID NO: 21662
  source 1..80: mol_type = other DNA

SEQ ID NO: 56545 - DNA, 80 bp, synthetic construct; identical to SEQ ID NO: 21663
  source 1..80: mol_type = other DNA

SEQ ID NO: 56546 - DNA, 80 bp, synthetic construct; identical to SEQ ID NO: 9328
  source 1..80: mol_type = other DNA

SEQ ID NO: 56547 - DNA, 80 bp, synthetic construct; identical to SEQ ID NO: 21665
  source 1..80: mol_type = other DNA

SEQ ID NO: 56548 - DNA, 80 bp, synthetic construct; identical to SEQ ID NO: 21666
  source 1..80: mol_type = other DNA

SEQ ID NO: 56549 - DNA, 80 bp, synthetic construct; identical to SEQ ID NO: 21667
  source 1..80: mol_type = other DNA

SEQ ID NO: 56550 - DNA, 80 bp, synthetic construct; identical to SEQ ID NO: 21668
  source 1..80: mol_type = other DNA

SEQ ID NO: 56551 - DNA, 80 bp, synthetic construct; identical to SEQ ID NO: 9329
  source 1..80: mol_type = other DNA

SEQ ID NO: 56552 - DNA, 80 bp, synthetic construct; identical to SEQ ID NO: 21670
  source 1..80: mol_type = other DNA

SEQ ID NO: 56553 - DNA, 80 bp, synthetic construct; identical to SEQ ID NO: 21671
  source 1..80: mol_type = other DNA

SEQ ID NO: 56554 - DNA, 80 bp, synthetic construct; identical to SEQ ID NO: 9330
  source 1..80: mol_type = other DNA

SEQ ID NO: 56555 - DNA, 80 bp, synthetic construct; identical to SEQ ID NO: 21673
  source 1..80: mol_type = other DNA

SEQ ID NO: 56556 - DNA, 80 bp, synthetic construct; identical to SEQ ID NO: 21674
  source 1..80: mol_type = other DNA

SEQ ID NO: 56557 - DNA, 80 bp, synthetic construct; identical to SEQ ID NO: 21675
  source 1..80: mol_type = other DNA

SEQ ID NO: 56558 - DNA, 80 bp, synthetic construct; identical to SEQ ID NO: 21676
  source 1..80: mol_type = other DNA

SEQ ID NO: 56559 - DNA, 80 bp, synthetic construct; identical to SEQ ID NO: 9331
  source 1..80: mol_type = other DNA

SEQ ID NO: 56560 - DNA, 80 bp, synthetic construct; identical to SEQ ID NO: 21678
  source 1..80: mol_type = other DNA

SEQ ID NO: 56561 - DNA, 80 bp, synthetic construct; identical to SEQ ID NO: 21679
  source 1..80: mol_type = other DNA

SEQ ID NO: 56562 - DNA, 80 bp, synthetic construct; identical to SEQ ID NO: 9332
  source 1..80: mol_type = other DNA

SEQ ID NO: 56563 - DNA, 80 bp, synthetic construct; identical to SEQ ID NO: 21681
  source 1..80: mol_type = other DNA

SEQ ID NO: 56564 - DNA, 80 bp, synthetic construct; identical to SEQ ID NO: 21682
  source 1..80: mol_type = other DNA

SEQ ID NO: 56565 - DNA, 80 bp, synthetic construct; identical to SEQ ID NO: 21683
  source 1..80: mol_type = other DNA

SEQ ID NO: 56566 - DNA, 80 bp, synthetic construct; identical to SEQ ID NO: 9333
  source 1..80: mol_type = other DNA

SEQ ID NO: 56567 - DNA, 80 bp, synthetic construct; identical to SEQ ID NO: 21685
  source 1..80: mol_type = other DNA

SEQ ID NO: 56568 - DNA, 80 bp, synthetic construct; identical to SEQ ID NO: 21686
  source 1..80: mol_type = other DNA

SEQ ID NO: 56569 - DNA, 80 bp, synthetic construct; identical to SEQ ID NO: 21687
  source 1..80: mol_type = other DNA

SEQ ID NO: 56570 - DNA, 80 bp, synthetic construct; identical to SEQ ID NO: 9334
  source 1..80: mol_type = other DNA

SEQ ID NO: 56571 - DNA, 80 bp, synthetic construct; identical to SEQ ID NO: 21689
  source 1..80: mol_type = other DNA

SEQ ID NO: 56572 - DNA, 80 bp, synthetic construct; identical to SEQ ID NO: 21690
  source 1..80: mol_type = other DNA

SEQ ID NO: 56573 - DNA, 80 bp, synthetic construct; identical to SEQ ID NO: 21691
  source 1..80: mol_type = other DNA

SEQ ID NO: 56574 - DNA, 80 bp, synthetic construct; identical to SEQ ID NO: 9335
  source 1..80: mol_type = other DNA

SEQ ID NO: 56575 - DNA, 80 bp, synthetic construct; identical to SEQ ID NO: 21693
  source 1..80: mol_type = other DNA

SEQ ID NO: 56576 - DNA, 80 bp, synthetic construct; identical to SEQ ID NO: 21694
  source 1..80: mol_type = other DNA

SEQ ID NO: 56577 - DNA, 80 bp, synthetic construct; identical to SEQ ID NO: 21695
  source 1..80: mol_type = other DNA

SEQ ID NO: 56578 - DNA, 80 bp, synthetic construct; identical to SEQ ID NO: 9336
  source 1..80: mol_type = other DNA

SEQ ID NO: 56579 - DNA, 80 bp, synthetic construct; identical to SEQ ID NO: 21697
  source 1..80: mol_type = other DNA

SEQ ID NO: 56580 - DNA, 80 bp, synthetic construct; identical to SEQ ID NO: 21698
  source 1..80: mol_type = other DNA

SEQ ID NO: 56581 - DNA, 80 bp, synthetic construct; identical to SEQ ID NO: 21699
  source 1..80: mol_type = other DNA

SEQ ID NO: 56582 - DNA, 80 bp, synthetic construct; identical to SEQ ID NO: 21700
  source 1..80: mol_type = other DNA

SEQ ID NO: 56583 - DNA, 80 bp, synthetic construct; identical to SEQ ID NO: 9337
  source 1..80: mol_type = other DNA

SEQ ID NO: 56584 - DNA, 80 bp, synthetic construct; identical to SEQ ID NO: 21702
  source 1..80: mol_type = other DNA

SEQ ID NO: 56585 - DNA, 80 bp, synthetic construct; identical to SEQ ID NO: 21703
  source 1..80: mol_type = other DNA

SEQ ID NO: 56586 - DNA, 80 bp, synthetic construct; identical to SEQ ID NO: 21704
  source 1..80: mol_type = other DNA

SEQ ID NO: 56587 - DNA, 80 bp, synthetic construct; identical to SEQ ID NO: 9338
  source 1..80: mol_type = other DNA

SEQ ID NO: 56588 - DNA, 80 bp, synthetic construct; identical to SEQ ID NO: 21706
  source 1..80: mol_type = other DNA

SEQ ID NO: 56589 - DNA, 80 bp, synthetic construct; identical to SEQ ID NO: 21707
  source 1..80: mol_type = other DNA

SEQ ID NO: 56590 - DNA, 80 bp, synthetic construct; identical to SEQ ID NO: 21708
  source 1..80: mol_type = other DNA

SEQ ID NO: 56591 - DNA, 80 bp, synthetic construct; identical to SEQ ID NO: 9339
  source 1..80: mol_type = other DNA

SEQ ID NO: 56592 - DNA, 80 bp, synthetic construct; identical to SEQ ID NO: 21710
  source 1..80: mol_type = other DNA

SEQ ID NO: 56593 - DNA, 80 bp, synthetic construct; identical to SEQ ID NO: 21711
  source 1..80: mol_type = other DNA

SEQ ID NO: 56594 - DNA, 80 bp, synthetic construct; identical to SEQ ID NO: 9340
  source 1..80: mol_type = other DNA

SEQ ID NO: 56595 - DNA, 80 bp, synthetic construct; identical to SEQ ID NO: 21713
  source 1..80: mol_type = other DNA

SEQ ID NO: 56596 - DNA, 80 bp, synthetic construct; identical to SEQ ID NO: 21714
  source 1..80: mol_type = other DNA

SEQ ID NO: 56597 - DNA, 80 bp, synthetic construct; identical to SEQ ID NO: 21715
  source 1..80: mol_type = other DNA

SEQ ID NO: 56598 - DNA, 80 bp, synthetic construct; identical to SEQ ID NO: 21716
  source 1..80: mol_type = other DNA

SEQ ID NO: 56599 - DNA, 80 bp, synthetic construct; identical to SEQ ID NO: 9341
  source 1..80: mol_type = other DNA

SEQ ID NO: 56600 - DNA, 80 bp, synthetic construct; identical to SEQ ID NO: 21718
  source 1..80: mol_type = other DNA

SEQ ID NO: 56601 - DNA, 80 bp, synthetic construct; identical to SEQ ID NO: 21719
  source 1..80: mol_type = other DNA

SEQ ID NO: 56602 - DNA, 80 bp, synthetic construct; identical to SEQ ID NO: 21720
  source 1..80: mol_type = other DNA

SEQ ID NO: 56603 - DNA, 80 bp, synthetic construct; identical to SEQ ID NO: 9342
  source 1..80: mol_type = other DNA

SEQ ID NO: 56604 - DNA, 80 bp, synthetic construct; identical to SEQ ID NO: 21722
  source 1..80: mol_type = other DNA

SEQ ID NO: 56605 - DNA, 80 bp, synthetic construct; identical to SEQ ID NO: 21723
  source 1..80: mol_type = other DNA

SEQ ID NO: 56606 - DNA, 80 bp, synthetic construct; identical to SEQ ID NO: 9343
  source 1..80: mol_type = other DNA

SEQ ID NO: 56607 - DNA, 80 bp, synthetic construct; identical to SEQ ID NO: 21725
  source 1..80: mol_type = other DNA

SEQ ID NO: 56608 - DNA, 80 bp, synthetic construct; identical to SEQ ID NO: 21726
  source 1..80: mol_type = other DNA

SEQ ID NO: 56609 - DNA, 80 bp, synthetic construct; identical to SEQ ID NO: 21727
  source 1..80: mol_type = other DNA

SEQ ID NO: 56610 - DNA, 80 bp, synthetic construct; identical to SEQ ID NO: 9344
  source 1..80: mol_type = other DNA

SEQ ID NO: 56611 - DNA, 80 bp, synthetic construct; identical to SEQ ID NO: 21729
  source 1..80: mol_type = other DNA

SEQ ID NO: 56612 - DNA, 80 bp, synthetic construct; identical to SEQ ID NO: 21730
  source 1..80: mol_type = other DNA

SEQ ID NO: 56613 - DNA, 80 bp, synthetic construct; identical to SEQ ID NO: 21731
  source 1..80: mol_type = other DNA

SEQ ID NO: 56614 - DNA, 80 bp, synthetic construct; identical to SEQ ID NO: 9345
  source 1..80: mol_type = other DNA

SEQ ID NO: 56615 - DNA, 80 bp, synthetic construct; identical to SEQ ID NO: 21733
  source 1..80: mol_type = other DNA

SEQ ID NO: 56616 - DNA, 80 bp, synthetic construct; identical to SEQ ID NO: 21734
  source 1..80: mol_type = other DNA

SEQ ID NO: 56617 - DNA, 80 bp, synthetic construct; identical to SEQ ID NO: 21735
  source 1..80: mol_type = other DNA

SEQ ID NO: 56618 - DNA, 80 bp, synthetic construct; identical to SEQ ID NO: 9346
  source 1..80: mol_type = other DNA

SEQ ID NO: 56619 - DNA, 80 bp, synthetic construct; identical to SEQ ID NO: 21737
  source 1..80: mol_type = other DNA

SEQ ID NO: 56620 - DNA, 80 bp, synthetic construct; identical to SEQ ID NO: 21738
  source 1..80: mol_type = other DNA

SEQ ID NO: 56621 - DNA, 80 bp, synthetic construct; identical to SEQ ID NO: 21739
  source 1..80: mol_type = other DNA

SEQ ID NO: 56622 - DNA, 80 bp, synthetic construct; identical to SEQ ID NO: 9347
  source 1..80: mol_type = other DNA

SEQ ID NO: 56623 - DNA, 80 bp, synthetic construct; identical to SEQ ID NO: 21741
  source 1..80: mol_type = other DNA

SEQ ID NO: 56624 - DNA, 80 bp, synthetic construct; identical to SEQ ID NO: 21742
  source 1..80: mol_type = other DNA

SEQ ID NO: 56625 - DNA, 80 bp, synthetic construct; identical to SEQ ID NO: 21743
  source 1..80: mol_type = other DNA

SEQ ID NO: 56626 - DNA, 80 bp, synthetic construct; identical to SEQ ID NO: 21744
  source 1..80: mol_type = other DNA

SEQ ID NO: 56627 - DNA, 80 bp, synthetic construct; identical to SEQ ID NO: 9348
  source 1..80: mol_type = other DNA

SEQ ID NO: 56628 - DNA, 80 bp, synthetic construct; identical to SEQ ID NO: 21746
  source 1..80: mol_type = other DNA

SEQ ID NO: 56629 - DNA, 80 bp, synthetic construct; identical to SEQ ID NO: 9349
  source 1..80: mol_type = other DNA

SEQ ID NO: 56630 - DNA, 80 bp, synthetic construct; identical to SEQ ID NO: 21750
  source 1..80: mol_type = other DNA

SEQ ID NO: 56631 - DNA, 80 bp, synthetic construct; identical to SEQ ID NO: 9350
  source 1..80: mol_type = other DNA

SEQ ID NO: 56632 - DNA, 80 bp, synthetic construct; identical to SEQ ID NO: 21753
  source 1..80: mol_type = other DNA

SEQ ID NO: 56633 - DNA, 80 bp, synthetic construct; identical to SEQ ID NO: 21755
  source 1..80: mol_type = other DNA

SEQ ID NO: 56634 - DNA, 80 bp, synthetic construct; identical to SEQ ID NO: 9351
  source 1..80: mol_type = other DNA

SEQ ID NO: 56635 - DNA, 80 bp, synthetic construct; identical to SEQ ID NO: 21757
  source 1..80: mol_type = other DNA

SEQ ID NO: 56636 - DNA, 80 bp, synthetic construct; identical to SEQ ID NO: 21758
  source 1..80: mol_type = other DNA

SEQ ID NO: 56637 - DNA, 80 bp, synthetic construct; identical to SEQ ID NO: 9352
  source 1..80: mol_type = other DNA

SEQ ID NO: 56638 - DNA, 80 bp, synthetic construct; identical to SEQ ID NO: 21760
  source 1..80: mol_type = other DNA

SEQ ID NO: 56639 - DNA, 80 bp, synthetic construct; identical to SEQ ID NO: 21761
  source 1..80: mol_type = other DNA

SEQ ID NO: 56640 - DNA, 80 bp, synthetic construct; identical to SEQ ID NO: 21762
  source 1..80: mol_type = other DNA

SEQ ID NO: 56641 - DNA, 80 bp, synthetic construct; identical to SEQ ID NO: 9353
  source 1..80: mol_type = other DNA

SEQ ID NO: 56642 - DNA, 80 bp, synthetic construct; identical to SEQ ID NO: 21764
  source 1..80: mol_type = other DNA

SEQ ID NO: 56643 - DNA, 80 bp, synthetic construct; identical to SEQ ID NO: 21765
  source 1..80: mol_type = other DNA

SEQ ID NO: 56644 - DNA, 80 bp, synthetic construct; identical to SEQ ID NO: 21766
  source 1..80: mol_type = other DNA

SEQ ID NO: 56645 - DNA, 80 bp, synthetic construct; identical to SEQ ID NO: 21767
  source 1..80: mol_type = other DNA

SEQ ID NO: 56646 - DNA, 80 bp, synthetic construct; identical to SEQ ID NO: 9354
  source 1..80: mol_type = other DNA

SEQ ID NO: 56647 - DNA, 80 bp, synthetic construct; identical to SEQ ID NO: 21769
  source 1..80: mol_type = other DNA

SEQ ID NO: 56648 - DNA, 80 bp, synthetic construct; identical to SEQ ID NO: 21770
  source 1..80: mol_type = other DNA

SEQ ID NO: 56649 - DNA, 80 bp, synthetic construct; identical to SEQ ID NO: 9355
  source 1..80: mol_type = other DNA

SEQ ID NO: 56650 - DNA, 80 bp, synthetic construct; identical to SEQ ID NO: 21772
  source 1..80: mol_type = other DNA

SEQ ID NO: 56651 - DNA, 80 bp, synthetic construct; identical to SEQ ID NO: 21773
  source 1..80: mol_type = other DNA

SEQ ID NO: 56652 - DNA, 80 bp, synthetic construct; identical to SEQ ID NO: 21774
  source 1..80: mol_type = other DNA

SEQ ID NO: 56653 - DNA, 80 bp, synthetic construct; identical to SEQ ID NO: 9356
  source 1..80: mol_type = other DNA

SEQ ID NO: 56654 - DNA, 80 bp, synthetic construct; identical to SEQ ID NO: 21776
  source 1..80: mol_type = other DNA

SEQ ID NO: 56655 - DNA, 80 bp, synthetic construct; identical to SEQ ID NO: 21778
  source 1..80: mol_type = other DNA

SEQ ID NO: 56656 - DNA, 80 bp, synthetic construct; identical to SEQ ID NO: 21779
  source 1..80: mol_type = other DNA

SEQ ID NO: 56657 - DNA, 80 bp, synthetic construct; identical to SEQ ID NO: 9357
  source 1..80: mol_type = other DNA

SEQ ID NO: 56658 - DNA, 80 bp, synthetic construct; identical to SEQ ID NO: 21781
  source 1..80: mol_type = other DNA

SEQ ID NO: 56659 - DNA, 80 bp, synthetic construct; identical to SEQ ID NO: 21782
  source 1..80: mol_type = other DNA

SEQ ID NO: 56660 - DNA, 80 bp, synthetic construct; identical to SEQ ID NO: 9358
  source 1..80: mol_type = other DNA

SEQ ID NO: 56661 - DNA, 80 bp, synthetic construct; identical to SEQ ID NO: 21784
  source 1..80: mol_type = other DNA

SEQ ID NO: 56662 - DNA, 80 bp, synthetic construct; identical to SEQ ID NO: 21785
  source 1..80: mol_type = other DNA

SEQ ID NO: 56663 - DNA, 80 bp, synthetic construct; identical to SEQ ID NO: 21786
  source 1..80: mol_type = other DNA

SEQ ID NO: 56664 - DNA, 80 bp, synthetic construct; identical to SEQ ID NO: 21787
  source 1..80: mol_type = other DNA

SEQ ID NO: 56665 - DNA, 80 bp, synthetic construct; identical to SEQ ID NO: 9359
  source 1..80: mol_type = other DNA

SEQ ID NO: 56666 - DNA, 80 bp, synthetic construct; identical to SEQ ID NO: 21789
  source 1..80: mol_type = other DNA

SEQ ID NO: 56667 - DNA, 80 bp, synthetic construct; identical to SEQ ID NO: 21790
  source 1..80: mol_type = other DNA

SEQ ID NO: 56668 - DNA, 80 bp, synthetic construct; identical to SEQ ID NO: 21791
  source 1..80: mol_type = other DNA

SEQ ID NO: 56669 - DNA, 80 bp, synthetic construct; identical to SEQ ID NO: 9360
  source 1..80: mol_type = other DNA

SEQ ID NO: 56670 - DNA, 80 bp, synthetic construct; identical to SEQ ID NO: 21793
  source 1..80: mol_type = other DNA

SEQ ID NO: 56671 - DNA, 80 bp, synthetic construct; identical to SEQ ID NO: 21794
  source 1..80: mol_type = other DNA

SEQ ID NO: 56672 - DNA, 80 bp, synthetic construct; identical to SEQ ID NO: 21795
  source 1..80: mol_type = other DNA

SEQ ID NO: 56673 - DNA, 80 bp, synthetic construct; identical to SEQ ID NO: 9361
  source 1..80: mol_type = other DNA

SEQ ID NO: 56674 - DNA, 80 bp, synthetic construct; identical to SEQ ID NO: 21797
  source 1..80: mol_type = other DNA

SEQ ID NO: 56675 - DNA, 80 bp, synthetic construct; identical to SEQ ID NO: 21798
  source 1..80: mol_type = other DNA

SEQ ID NO: 56676 - DNA, 80 bp, synthetic construct; identical to SEQ ID NO: 9362
  source 1..80: mol_type = other DNA

SEQ ID NO: 56677 - DNA, 80 bp, synthetic construct; identical to SEQ ID NO: 21800
  source 1..80: mol_type = other DNA

SEQ ID NO: 56678 - DNA, 80 bp, synthetic construct; identical to SEQ ID NO: 21801
  source 1..80: mol_type = other DNA

SEQ ID NO: 56679 - DNA, 80 bp, synthetic construct; identical to SEQ ID NO: 21802
  source 1..80: mol_type = other DNA

SEQ ID NO: 56680 - DNA, 80 bp, synthetic construct; identical to SEQ ID NO: 9363
  source 1..80: mol_type = other DNA

SEQ ID NO: 56681 - DNA, 80 bp, synthetic construct; identical to SEQ ID NO: 21804
  source 1..80: mol_type = other DNA

SEQ ID NO: 56682 - DNA, 80 bp, synthetic construct; identical to SEQ ID NO: 21805
  source 1..80: mol_type = other DNA

SEQ ID NO: 56683 - DNA, 80 bp, synthetic construct; identical to SEQ ID NO: 21806
  source 1..80: mol_type = other DNA

SEQ ID NO: 56684 - DNA, 80 bp, synthetic construct; identical to SEQ ID NO: 21807
  source 1..80: mol_type = other DNA

SEQ ID NO: 56685 - DNA, 80 bp, synthetic construct; identical to SEQ ID NO: 9364
  source 1..80: mol_type = other DNA

SEQ ID NO: 56686 - DNA, 80 bp, synthetic construct; identical to SEQ ID NO: 21809
  source 1..80: mol_type = other DNA

SEQ ID NO: 56687 - DNA, 80 bp, synthetic construct; identical to SEQ ID NO: 21810
  source 1..80: mol_type = other DNA

SEQ ID NO: 56688 - DNA, 80 bp, synthetic construct; identical to SEQ ID NO: 9365
  source 1..80: mol_type = other DNA

SEQ ID NO: 56689 - DNA, 80 bp, synthetic construct; identical to SEQ ID NO: 21813
  source 1..80: mol_type = other DNA

SEQ ID NO: 56690 - DNA, 80 bp, synthetic construct; identical to SEQ ID NO: 21814
  source 1..80: mol_type = other DNA

SEQ ID NO: 56691 - DNA, 80 bp, synthetic construct; identical to SEQ ID NO: 21815
  source 1..80: mol_type = other DNA

SEQ ID NO: 56692 - DNA, 80 bp, synthetic construct; identical to SEQ ID NO: 9366
  source 1..80: mol_type = other DNA

SEQ ID NO: 56693 - DNA, 80 bp, synthetic construct; identical to SEQ ID NO: 21817
  source 1..80: mol_type = other DNA

SEQ ID NO: 56694 - DNA, 80 bp, synthetic construct; identical to SEQ ID NO: 21818
  source 1..80: mol_type = other DNA

SEQ ID NO: 56695 - DNA, 80 bp, synthetic construct; identical to SEQ ID NO: 21819
  source 1..80: mol_type = other DNA

SEQ ID NO: 56696 - DNA, 80 bp, synthetic construct; identical to SEQ ID NO: 9367
  source 1..80: mol_type = other DNA

SEQ ID NO: 56697 - DNA, 80 bp, synthetic construct; identical to SEQ ID NO: 21821
  source 1..80: mol_type = other DNA

SEQ ID NO: 56698 - DNA, 80 bp, synthetic construct; identical to SEQ ID NO: 21822
  source 1..80: mol_type = other DNA

SEQ ID NO: 56699 - DNA, 80 bp, synthetic construct; identical to SEQ ID NO: 9368
  source 1..80: mol_type = other DNA

SEQ ID NO: 56700 - DNA, 80 bp, synthetic construct; identical to SEQ ID NO: 21824
  source 1..80: mol_type = other DNA

SEQ ID NO: 56701 - DNA, 80 bp, synthetic construct; identical to SEQ ID NO: 21825
  source 1..80: mol_type = other DNA

SEQ ID NO: 56702 - DNA, 80 bp, synthetic construct; identical to SEQ ID NO: 21826
  source 1..80: mol_type = other DNA

SEQ ID NO: 56703 - DNA, 80 bp, synthetic construct; identical to SEQ ID NO: 21827
  source 1..80: mol_type = other DNA

SEQ ID NO: 56704 - DNA, 80 bp, synthetic construct; identical to SEQ ID NO: 9369
  source 1..80: mol_type = other DNA

SEQ ID NO: 56705 - DNA, 80 bp, synthetic construct; identical to SEQ ID NO: 21829
  source 1..80: mol_type = other DNA

SEQ ID NO: 56706 - DNA, 80 bp, synthetic construct; identical to SEQ ID NO: 21830
  source 1..80: mol_type = other DNA

SEQ ID NO: 56707 - DNA, 80 bp, synthetic construct; identical to SEQ ID NO: 9370
  source 1..80: mol_type = other DNA

SEQ ID NO: 56708 - DNA, 80 bp, synthetic construct; identical to SEQ ID NO: 21832
  source 1..80: mol_type = other DNA

SEQ ID NO: 56709 - DNA, 80 bp, synthetic construct; identical to SEQ ID NO: 21833
  source 1..80: mol_type = other DNA

SEQ ID NO: 56710 - DNA, 80 bp, synthetic construct; identical to SEQ ID NO: 21834
  source 1..80: mol_type = other DNA

SEQ ID NO: 56711 - DNA, 80 bp, synthetic construct; identical to SEQ ID NO: 21835
  source 1..80: mol_type = other DNA

SEQ ID NO: 56712 - DNA, 80 bp, synthetic construct; identical to SEQ ID NO: 9371
  source 1..80: mol_type = other DNA

SEQ ID NO: 56713 - DNA, 80 bp, synthetic construct; identical to SEQ ID NO: 21837
  source 1..80: mol_type = other DNA

SEQ ID NO: 56714 - DNA, 80 bp, synthetic construct; identical to SEQ ID NO: 21838
  source 1..80: mol_type = other DNA

SEQ ID NO: 56715 - DNA, 80 bp, synthetic construct; identical to SEQ ID NO: 21839
  source 1..80: mol_type = other DNA

SEQ ID NO: 56716 - DNA, 80 bp, synthetic construct; identical to SEQ ID NO: 9372
  source 1..80: mol_type = other DNA

SEQ ID NO: 56717 - DNA, 80 bp, synthetic construct; identical to SEQ ID NO: 21841
  source 1..80: mol_type = other DNA

SEQ ID NO: 56718 - DNA, 80 bp, synthetic construct; identical to SEQ ID NO: 21842
  source 1..80: mol_type = other DNA

SEQ ID NO: 56719 - DNA, 80 bp, synthetic construct; identical to SEQ ID NO: 21843
  source 1..80: mol_type = other DNA

SEQ ID NO: 56720 - DNA, 80 bp, synthetic construct; identical to SEQ ID NO: 9373
  source 1..80: mol_type = other DNA

SEQ ID NO: 56721 - DNA, 80 bp, synthetic construct; identical to SEQ ID NO: 21845
  source 1..80: mol_type = other DNA

SEQ ID NO: 56722 - DNA, 80 bp, synthetic construct; identical to SEQ ID NO: 21846
  source 1..80: mol_type = other DNA

SEQ ID NO: 56723 - DNA, 80 bp, synthetic construct; identical to SEQ ID NO: 9374
  source 1..80: mol_type = other DNA

SEQ ID NO: 56724 - DNA, 80 bp, synthetic construct; identical to SEQ ID NO: 21848
  source 1..80: mol_type = other DNA

SEQ ID NO: 56725 - DNA, 80 bp, synthetic construct; identical to SEQ ID NO: 21849
  source 1..80: mol_type = other DNA

SEQ ID NO: 56726 - DNA, 80 bp, synthetic construct; identical to SEQ ID NO: 21850
  source 1..80: mol_type = other DNA

SEQ ID NO: 56727 - DNA, 80 bp, synthetic construct; identical to SEQ ID NO: 21851
  source 1..80: mol_type = other DNA

SEQ ID NO: 56728 - DNA, 80 bp, synthetic construct; identical to SEQ ID NO: 9375
  source 1..80: mol_type = other DNA

SEQ ID NO: 56729 - DNA, 80 bp, synthetic construct; identical to SEQ ID NO: 21853
  source 1..80: mol_type = other DNA

SEQ ID NO: 56730 - DNA, 80 bp, synthetic construct; identical to SEQ ID NO: 21854
  source 1..80: mol_type = other DNA

SEQ ID NO: 56731 - DNA, 80 bp, synthetic construct; identical to SEQ ID NO: 21855
  source 1..80: mol_type = other DNA

SEQ ID NO: 56732 - DNA, 80 bp, synthetic construct; identical to SEQ ID NO: 9376
  source 1..80: mol_type = other DNA

SEQ ID NO: 56733 - DNA, 80 bp, synthetic construct; identical to SEQ ID NO: 21857
  source 1..80: mol_type = other DNA

SEQ ID NO: 56734 - DNA, 80 bp, synthetic construct; identical to SEQ ID NO: 21858
  source 1..80: mol_type = other DNA

SEQ ID NO: 56735 - DNA, 80 bp, synthetic construct; identical to SEQ ID NO: 9377
  source 1..80: mol_type = other DNA

SEQ ID NO: 56736 - DNA, 80 bp, synthetic construct; identical to SEQ ID NO: 21861
  source 1..80: mol_type = other DNA

SEQ ID NO: 56737 - DNA, 80 bp, synthetic construct; identical to SEQ ID NO: 21862
  source 1..80: mol_type = other DNA

SEQ ID NO: 56738 - DNA, 80 bp, synthetic construct; identical to SEQ ID NO: 9378
  source 1..80: mol_type = other DNA

SEQ ID NO: 56739 - DNA, 80 bp, synthetic construct; identical to SEQ ID NO: 21864
  source 1..80: mol_type = other DNA

SEQ ID NO: 56740 - DNA, 80 bp, synthetic construct; identical to SEQ ID NO: 21865
  source 1..80: mol_type = other DNA

SEQ ID NO: 56741 - DNA, 80 bp, synthetic construct; identical to SEQ ID NO: 21866
  source 1..80: mol_type = other DNA

SEQ ID NO: 56742 - DNA, 80 bp, synthetic construct; identical to SEQ ID NO: 21867
  source 1..80: mol_type = other DNA

SEQ ID NO: 56743 - DNA, 80 bp, synthetic construct; identical to SEQ ID NO: 9379
  source 1..80: mol_type = other DNA

SEQ ID NO: 56744 - DNA, 80 bp, synthetic construct; identical to SEQ ID NO: 21869
  source 1..80: mol_type = other DNA

SEQ ID NO: 56745 - DNA, 80 bp, synthetic construct; identical to SEQ ID NO: 21870
  source 1..80: mol_type = other DNA

SEQ ID NO: 56746 - DNA, 80 bp, synthetic construct; identical to SEQ ID NO: 21871
  source 1..80: mol_type = other DNA

SEQ ID NO: 56747 - DNA, 80 bp, synthetic construct; identical to SEQ ID NO: 9380
  source 1..80: mol_type = other DNA

SEQ ID NO: 56748 - DNA, 80 bp, synthetic construct; identical to SEQ ID NO: 21873
  source 1..80: mol_type = other DNA

SEQ ID NO: 56749 - DNA, 80 bp, synthetic construct; identical to SEQ ID NO: 21874
  source 1..80: mol_type = other DNA

SEQ ID NO: 56750 - DNA, 80 bp, synthetic construct; identical to SEQ ID NO: 9381
  source 1..80: mol_type = other DNA

SEQ ID NO: 56751 - DNA, 80 bp, synthetic construct; identical to SEQ ID NO: 21876
  source 1..80: mol_type = other DNA

SEQ ID NO: 56752 - DNA, 80 bp, synthetic construct; identical to SEQ ID NO: 21877
  source 1..80: mol_type = other DNA

SEQ ID NO: 56753 - DNA, 80 bp, synthetic construct; identical to SEQ ID NO: 21878
  source 1..80: mol_type = other DNA

SEQ ID NO: 56754 - DNA, 80 bp, synthetic construct; identical to SEQ ID NO: 21879
  source 1..80: mol_type = other DNA

SEQ ID NO: 56755 - DNA, 80 bp, synthetic construct; identical to SEQ ID NO: 9382
  source 1..80: mol_type = other DNA

SEQ ID NO: 56756 - DNA, 80 bp, synthetic construct; identical to SEQ ID NO: 21881
  source 1..80: mol_type = other DNA

SEQ ID NO: 56757 - DNA, 80 bp, synthetic construct; identical to SEQ ID NO: 21882
  source 1..80: mol_type = other DNA

SEQ ID NO: 56758 - DNA, 80 bp, synthetic construct; identical to SEQ ID NO: 9383
  source 1..80: mol_type = other DNA

SEQ ID NO: 56759 - DNA, 80 bp, synthetic construct; identical to SEQ ID NO: 21884
  source 1..80: mol_type = other DNA

SEQ ID NO: 56760 - DNA, 80 bp, synthetic construct; identical to SEQ ID NO: 21885
  source 1..80: mol_type = other DNA

SEQ ID NO: 56761 - DNA, 80 bp, synthetic construct; identical to SEQ ID NO: 21886
  source 1..80: mol_type = other DNA

SEQ ID NO: 56762 - DNA, 80 bp, synthetic construct; identical to SEQ ID NO: 21887
  source 1..80: mol_type = other DNA

SEQ ID NO: 56763 - DNA, 80 bp, synthetic construct; identical to SEQ ID NO: 9384
  source 1..80: mol_type = other DNA

SEQ ID NO: 56764 - DNA, 80 bp, synthetic construct; identical to SEQ ID NO: 21889
  source 1..80: mol_type = other DNA

SEQ ID NO: 56765 - DNA, 80 bp, synthetic construct; identical to SEQ ID NO: 21890
  source 1..80: mol_type = other DNA

SEQ ID NO: 56766 - DNA, 80 bp, synthetic construct; identical to SEQ ID NO: 9385
  source 1..80: mol_type = other DNA

SEQ ID NO: 56767 - DNA, 80 bp, synthetic construct; identical to SEQ ID NO: 21893
  source 1..80: mol_type = other DNA

SEQ ID NO: 56768 - DNA, 80 bp, synthetic construct; identical to SEQ ID NO: 21894
  source 1..80: mol_type = other DNA

SEQ ID NO: 56769 - DNA, 80 bp, synthetic construct; identical to SEQ ID NO: 21895
  source 1..80: mol_type = other DNA

SEQ ID NO: 56770 - DNA, 80 bp, synthetic construct; identical to SEQ ID NO: 9386
  source 1..80: mol_type = other DNA

SEQ ID NO: 56771 - DNA, 80 bp, synthetic construct; identical to SEQ ID NO: 21897
  source 1..80: mol_type = other DNA

SEQ ID NO: 56772 - DNA, 80 bp, synthetic construct; identical to SEQ ID NO: 21898
  source 1..80: mol_type = other DNA

SEQ ID NO: 56773 - DNA, 80 bp, synthetic construct; identical to SEQ ID NO: 21899
  source 1..80: mol_type = other DNA

SEQ ID NO: 56774 - DNA, 80 bp, synthetic construct; identical to SEQ ID NO: 9387
  source 1..80: mol_type = other DNA

SEQ ID NO: 56775 - DNA, 80 bp, synthetic construct; identical to SEQ ID NO: 21901
  source 1..80: mol_type = other DNA

SEQ ID NO: 56776 - DNA, 80 bp, synthetic construct; identical to SEQ ID NO: 21902
  source 1..80: mol_type = other DNA

SEQ ID NO: 56777 - DNA, 80 bp, synthetic construct; identical to SEQ ID NO: 21903
  source 1..80: mol_type = other DNA

SEQ ID NO: 56778 - DNA, 80 bp, synthetic construct; identical to SEQ ID NO: 9388
  source 1..80: mol_type = other DNA

SEQ ID NO: 56779 - DNA, 80 bp, synthetic construct; identical to SEQ ID NO: 21905
  source 1..80: mol_type = other DNA

SEQ ID NO: 56780 - DNA, 80 bp, synthetic construct; identical to SEQ ID NO: 9389
  source 1..80: mol_type = other DNA

SEQ ID NO: 56781 - DNA, 80 bp, synthetic construct; identical to SEQ ID NO: 21907
  source 1..80: mol_type = other DNA

SEQ ID NO: 56782 - DNA, 80 bp, synthetic construct; identical to SEQ ID NO: 21908
  source 1..80: mol_type = other DNA

SEQ ID NO: 56783 - DNA, 80 bp, synthetic construct; identical to SEQ ID NO: 21909
  source 1..80: mol_type = other DNA

SEQ ID NO: 56784 - DNA, 80 bp, synthetic construct; identical to SEQ ID NO: 9390
  source 1..80: mol_type = other DNA

SEQ ID NO: 56785 - DNA, 80 bp, synthetic construct; identical to SEQ ID NO: 21911
  source 1..80: mol_type = other DNA

SEQ ID NO: 56786 - DNA, 80 bp, synthetic construct; identical to SEQ ID NO: 21912
  source 1..80: mol_type = other DNA

SEQ ID NO: 56787 - DNA, 80 bp, synthetic construct; identical to SEQ ID NO: 21913
  source 1..80: mol_type = other DNA

SEQ ID NO: 56788 - DNA, 80 bp, synthetic construct; identical to SEQ ID NO: 21914
  source 1..80: mol_type = other DNA

SEQ ID NO: 56789 - DNA, 80 bp, synthetic construct; identical to SEQ ID NO: 9391
  source 1..80: mol_type = other DNA

SEQ ID NO: 56790 - DNA, 80 bp, synthetic construct; identical to SEQ ID NO: 21916
  source 1..80: mol_type = other DNA

SEQ ID NO: 56791 - DNA, 80 bp, synthetic construct; identical to SEQ ID NO: 21917
  source 1..80: mol_type = other DNA

SEQ ID NO: 56792 - DNA, 80 bp, synthetic construct; identical to SEQ ID NO: 21918
  source 1..80: mol_type = other DNA

SEQ ID NO: 56793 - DNA, 80 bp, synthetic construct; identical to SEQ ID NO: 9392
  source 1..80: mol_type = other DNA

SEQ ID NO: 56794 - DNA, 80 bp, synthetic construct; identical to SEQ ID NO: 21920
  source 1..80: mol_type = other DNA

SEQ ID NO: 56795 - DNA, 80 bp, synthetic construct; identical to SEQ ID NO: 21921
  source 1..80: mol_type = other DNA

SEQ ID NO: 56796 - DNA, 80 bp, synthetic construct; identical to SEQ ID NO: 21922
  source 1..80: mol_type = other DNA

SEQ ID NO: 56797 - DNA, 80 bp, synthetic construct; identical to SEQ ID NO: 9393
  source 1..80: mol_type = other DNA

SEQ ID NO: 56798 - DNA, 80 bp, synthetic construct; identical to SEQ ID NO: 21924
  source 1..80: mol_type = other DNA

SEQ ID NO: 56799 - DNA, 80 bp, synthetic construct; identical to SEQ ID NO: 21925
  source 1..80: mol_type = other DNA

SEQ ID NO: 56800 - DNA, 80 bp, synthetic construct; identical to SEQ ID NO: 21926
  source 1..80: mol_type = other DNA

SEQ ID NO: 56801 - DNA, 80 bp, synthetic construct; identical to SEQ ID NO: 9394
  source 1..80: mol_type = other DNA

SEQ ID NO: 56802 - DNA, 80 bp, synthetic construct; identical to SEQ ID NO: 21928
  source 1..80: mol_type = other DNA

SEQ ID NO: 56803 - DNA, 80 bp, synthetic construct; identical to SEQ ID NO: 21930
  source 1..80: mol_type = other DNA

SEQ ID NO: 56804 - DNA, 80 bp, synthetic construct; identical to SEQ ID NO: 9395
  source 1..80: mol_type = other DNA

SEQ ID NO: 56805 - DNA, 80 bp, synthetic construct; identical to SEQ ID NO: 21932
  source 1..80: mol_type = other DNA

SEQ ID NO: 56806 - DNA, 80 bp, synthetic construct; identical to SEQ ID NO: 21933
  source 1..80: mol_type = other DNA

SEQ ID NO: 56807 - DNA, 80 bp, synthetic construct; identical to SEQ ID NO: 9396
  source 1..80: mol_type = other DNA

SEQ ID NO: 56808 - DNA, 80 bp, synthetic construct; identical to SEQ ID NO: 21936
  source 1..80: mol_type = other DNA

SEQ ID NO: 56809 - DNA, 80 bp, synthetic construct; identical to SEQ ID NO: 21937
  source 1..80: mol_type = other DNA

SEQ ID NO: 56810 - DNA, 80 bp, synthetic construct; identical to SEQ ID NO: 9397
  source 1..80: mol_type = other DNA

SEQ ID NO: 56811 - DNA, 80 bp, synthetic construct; identical to SEQ ID NO: 21940
  source 1..80: mol_type = other DNA

SEQ ID NO: 56812 - DNA, 80 bp, synthetic construct; identical to SEQ ID NO: 21941
  source 1..80: mol_type = other DNA

SEQ ID NO: 56813 - DNA, 80 bp, synthetic construct; identical to SEQ ID NO: 9398
  source 1..80: mol_type = other DNA

SEQ ID NO: 56814 - DNA, 80 bp, synthetic construct; identical to SEQ ID NO: 21943
  source 1..80: mol_type = other DNA

SEQ ID NO: 56815 - DNA, 80 bp, synthetic construct; identical to SEQ ID NO: 21944
  source 1..80: mol_type = other DNA

SEQ ID NO: 56816 - DNA, 80 bp, synthetic construct; identical to SEQ ID NO: 21945
  source 1..80: mol_type = other DNA

SEQ ID NO: 56817 - DNA, 80 bp, synthetic construct; identical to SEQ ID NO: 21946
  source 1..80: mol_type = other DNA

SEQ ID NO: 56818 - DNA, 80 bp, synthetic construct; identical to SEQ ID NO: 9399
  source 1..80: mol_type = other DNA

SEQ ID NO: 56819 - DNA, 80 bp, synthetic construct; identical to SEQ ID NO: 21948
  source 1..80: mol_type = other DNA

SEQ ID NO: 56820 - DNA, 80 bp, synthetic construct; identical to SEQ ID NO: 21949
  source 1..80: mol_type = other DNA

SEQ ID NO: 56821 - DNA, 80 bp, synthetic construct; identical to SEQ ID NO: 21950
  source 1..80: mol_type = other DNA

SEQ ID NO: 56822 - DNA, 80 bp, synthetic construct; identical to SEQ ID NO: 9400
  source 1..80: mol_type = other DNA

SEQ ID NO: 56823 - DNA, 80 bp, synthetic construct; identical to SEQ ID NO: 21952
  source 1..80: mol_type = other DNA

SEQ ID NO: 56824 - DNA, 80 bp, synthetic construct; identical to SEQ ID NO: 21953
  source 1..80: mol_type = other DNA

SEQ ID NO: 56825 - DNA, 80 bp, synthetic construct; identical to SEQ ID NO: 9401
  source 1..80: mol_type = other DNA

SEQ ID NO: 56826 - DNA, 80 bp, synthetic construct; identical to SEQ ID NO: 21955
  source 1..80: mol_type = other DNA

SEQ ID NO: 56827 - DNA, 80 bp, synthetic construct; identical to SEQ ID NO: 21956
  source 1..80: mol_type = other DNA

SEQ ID NO: 56828 - DNA, 80 bp, synthetic construct; identical to SEQ ID NO: 21957
  source 1..80: mol_type = other DNA

SEQ ID NO: 56829 - DNA, 80 bp, synthetic construct; identical to SEQ ID NO: 21958
  source 1..80: mol_type = other DNA

SEQ ID NO: 56830 - DNA, 80 bp, synthetic construct; identical to SEQ ID NO: 9402
  source 1..80: mol_type = other DNA

SEQ ID NO: 56831 - DNA, 80 bp, synthetic construct; identical to SEQ ID NO: 21960
  source 1..80: mol_type = other DNA

SEQ ID NO: 56832 - DNA, 80 bp, synthetic construct; identical to SEQ ID NO: 21961
  source 1..80: mol_type = other DNA

SEQ ID NO: 56833 - DNA, 80 bp, synthetic construct; identical to SEQ ID NO: 21962
  source 1..80: mol_type = other DNA

SEQ ID NO: 56834 - DNA, 80 bp, synthetic construct; identical to SEQ ID NO: 9403
  source 1..80: mol_type = other DNA

SEQ ID NO: 56835 - DNA, 80 bp, synthetic construct; identical to SEQ ID NO: 21964
  source 1..80: mol_type = other DNA

SEQ ID NO: 56836 - DNA, 80 bp, synthetic construct; identical to SEQ ID NO: 21965
  source 1..80: mol_type = other DNA

SEQ ID NO: 56837 - DNA, 80 bp, synthetic construct; identical to SEQ ID NO: 9404
  source 1..80: mol_type = other DNA

SEQ ID NO: 56838 - DNA, 80 bp, synthetic construct; identical to SEQ ID NO: 21967
  source 1..80: mol_type = other DNA

SEQ ID NO: 56839 - DNA, 80 bp, synthetic construct; identical to SEQ ID NO: 21968
  source 1..80: mol_type = other DNA

SEQ ID NO: 56840 - DNA, 80 bp, synthetic construct; identical to SEQ ID NO: 21969
  source 1..80: mol_type = other DNA

SEQ ID NO: 56841 - DNA, 80 bp, synthetic construct; identical to SEQ ID NO: 21970
  source 1..80: mol_type = other DNA

SEQ ID NO: 56842 - DNA, 80 bp, synthetic construct; identical to SEQ ID NO: 9405
  source 1..80: mol_type = other DNA

SEQ ID NO: 56843 - DNA, 80 bp, synthetic construct; identical to SEQ ID NO: 21972
  source 1..80: mol_type = other DNA

SEQ ID NO: 56844 - DNA, 80 bp, synthetic construct; identical to SEQ ID NO: 21973
  source 1..80: mol_type = other DNA

SEQ ID NO: 56845 - DNA, 80 bp, synthetic construct; identical to SEQ ID NO: 9406
  source 1..80: mol_type = other DNA

SEQ ID NO: 56846 - DNA, 80 bp, synthetic construct; identical to SEQ ID NO: 21975
  source 1..80: mol_type = other DNA

SEQ ID NO: 56847 - DNA, 80 bp, synthetic construct; identical to SEQ ID NO: 21976
  source 1..80: mol_type = other DNA

SEQ ID NO: 56848 - DNA, 80 bp, synthetic construct; identical to SEQ ID NO: 21977
  source 1..80: mol_type = other DNA

SEQ ID NO: 56849 - DNA, 80 bp, synthetic construct; identical to SEQ ID NO: 21978
  source 1..80: mol_type = other DNA

SEQ ID NO: 56850 - DNA, 80 bp, synthetic construct; identical to SEQ ID NO: 9407
  source 1..80: mol_type = other DNA

SEQ ID NO: 56851 - DNA, 80 bp, synthetic construct; identical to SEQ ID NO: 21980
  source 1..80: mol_type = other DNA

SEQ ID NO: 56852 - DNA, 80 bp, synthetic construct; identical to SEQ ID NO: 9408
  source 1..80: mol_type = other DNA

SEQ ID NO: 56853 - DNA, 80 bp, synthetic construct; identical to SEQ ID NO: 21983
  source 1..80: mol_type = other DNA

SEQ ID NO: 56854 - DNA, 80 bp, synthetic construct; identical to SEQ ID NO: 21984
  source 1..80: mol_type = other DNA

SEQ ID NO: 56855 - DNA, 80 bp, synthetic construct; identical to SEQ ID NO: 21985
  source 1..80: mol_type = other DNA

SEQ ID NO: 56856 - DNA, 80 bp, synthetic construct; identical to SEQ ID NO: 9409
  source 1..80: mol_type = other DNA

SEQ ID NO: 56857 - DNA, 80 bp, synthetic construct; identical to SEQ ID NO: 21987
  source 1..80: mol_type = other DNA

SEQ ID NO: 56858 - DNA, 80 bp, synthetic construct; identical to SEQ ID NO: 21988
  source 1..80: mol_type = other DNA

SEQ ID NO: 56859 - DNA, 80 bp, synthetic construct; identical to SEQ ID NO: 21989
  source 1..80: mol_type = other DNA

SEQ ID NO: 56860 - DNA, 80 bp, synthetic construct; identical to SEQ ID NO: 9410
  source 1..80: mol_type = other DNA

SEQ ID NO: 56861 - DNA, 80 bp, synthetic construct; identical to SEQ ID NO: 21991
  source 1..80: mol_type = other DNA

SEQ ID NO: 56862 - DNA, 80 bp, synthetic construct; identical to SEQ ID NO: 21992
  source 1..80: mol_type = other DNA

SEQ ID NO: 56863 - DNA, 80 bp, synthetic construct; identical to SEQ ID NO: 21993
  source 1..80: mol_type = other DNA

SEQ ID NO: 56864 - DNA, 80 bp, synthetic construct; identical to SEQ ID NO: 9411
  source 1..80: mol_type = other DNA

SEQ ID NO: 56865 - DNA, 80 bp, synthetic construct; identical to SEQ ID NO: 21995
  source 1..80: mol_type = other DNA

SEQ ID NO: 56866 - DNA, 80 bp, synthetic construct; identical to SEQ ID NO: 21996
  source 1..80: mol_type = other DNA

SEQ ID NO: 56867 - DNA, 80 bp, synthetic construct; identical to SEQ ID NO: 21997
  source 1..80: mol_type = other DNA

SEQ ID NO: 56868 - DNA, 80 bp, synthetic construct; identical to SEQ ID NO: 9412
  source 1..80: mol_type = other DNA

SEQ ID NO: 56869 - DNA, 80 bp, synthetic construct; identical to SEQ ID NO: 21999
  source 1..80: mol_type = other DNA

SEQ ID NO: 56870 - DNA, 80 bp, synthetic construct; identical to SEQ ID NO: 22000
  source 1..80: mol_type = other DNA

SEQ ID NO: 56871 - DNA, 80 bp, synthetic construct; identical to SEQ ID NO: 22001
  source 1..80: mol_type = other DNA

SEQ ID NO: 56872 - DNA, 80 bp, synthetic construct; identical to SEQ ID NO: 22002
  source 1..80: mol_type = other DNA

SEQ ID NO: 56873 - DNA, 80 bp, synthetic construct; identical to SEQ ID NO: 9413
  source 1..80: mol_type = other DNA

SEQ ID NO: 56874 - DNA, 80 bp, synthetic construct; identical to SEQ ID NO: 22004
  source 1..80: mol_type = other DNA

SEQ ID NO: 56875 - DNA, 80 bp, synthetic construct; identical to SEQ ID NO: 22005
  source 1..80: mol_type = other DNA

SEQ ID NO: 56876 - DNA, 80 bp, synthetic construct; identical to SEQ ID NO: 22006
  source 1..80: mol_type = other DNA

SEQ ID NO: 56877 - DNA, 80 bp, synthetic construct; identical to SEQ ID NO: 9414
  source 1..80: mol_type = other DNA

SEQ ID NO: 56878 - DNA, 80 bp, synthetic construct; identical to SEQ ID NO: 22008
  source 1..80: mol_type = other DNA

SEQ ID NO: 56879 - DNA, 80 bp, synthetic construct; identical to SEQ ID NO: 22009
  source 1..80: mol_type = other DNA

SEQ ID NO: 56880 - DNA, 80 bp, synthetic construct; identical to SEQ ID NO: 9415
  source 1..80: mol_type = other DNA

SEQ ID NO: 56881 - DNA, 80 bp, synthetic construct; identical to SEQ ID NO: 22011
  source 1..80: mol_type = other DNA

SEQ ID NO: 56882 - DNA, 80 bp, synthetic construct; identical to SEQ ID NO: 22012
  source 1..80: mol_type = other DNA

SEQ ID NO: 56883 - DNA, 80 bp, synthetic construct; identical to SEQ ID NO: 22013
  source 1..80: mol_type = other DNA

SEQ ID NO: 56884 - DNA, 80 bp, synthetic construct; identical to SEQ ID NO: 9416
  source 1..80: mol_type = other DNA

SEQ ID NO: 56885 - DNA, 80 bp, synthetic construct; identical to SEQ ID NO: 22015
  source 1..80: mol_type = other DNA

SEQ ID NO: 56886 - DNA, 80 bp, synthetic construct; identical to SEQ ID NO: 22016
  source 1..80: mol_type = other DNA

SEQ ID NO: 56887 - DNA, 80 bp, synthetic construct; identical to SEQ ID NO: 22017
  source 1..80: mol_type = other DNA

SEQ ID NO: 56888 - DNA, 80 bp, synthetic construct; identical to SEQ ID NO: 9417
  source 1..80: mol_type = other DNA

SEQ ID NO: 56889 - DNA, 80 bp, synthetic construct; identical to SEQ ID NO: 22019
  source 1..80: mol_type = other DNA

SEQ ID NO: 56890 - DNA, 80 bp, synthetic construct; identical to SEQ ID NO: 22020
  source 1..80: mol_type = other DNA

SEQ ID NO: 56891 - DNA, 80 bp, synthetic construct; identical to SEQ ID NO: 22021
  source 1..80: mol_type = other DNA

SEQ ID NO: 56892 - DNA, 80 bp, synthetic construct; identical to SEQ ID NO: 9418
  source 1..80: mol_type = other DNA

SEQ ID NO: 56893 - DNA, 80 bp, synthetic construct; identical to SEQ ID NO: 22023
  source 1..80: mol_type = other DNA

SEQ ID NO: 56894 - DNA, 80 bp, synthetic construct; identical to SEQ ID NO: 22024
  source 1..80: mol_type = other DNA

SEQ ID NO: 56895 - DNA, 80 bp, synthetic construct; identical to SEQ ID NO: 22025
  source 1..80: mol_type = other DNA

SEQ ID NO: 56896 - DNA, 80 bp, synthetic construct; identical to SEQ ID NO: 9419
  source 1..80: mol_type = other DNA

SEQ ID NO: 56897 - DNA, 80 bp, synthetic construct; identical to SEQ ID NO: 22027
  source 1..80: mol_type = other DNA

SEQ ID NO: 56898 - DNA, 80 bp, synthetic construct; identical to SEQ ID NO: 22028
  source 1..80: mol_type = other DNA

SEQ ID NO: 56899 - DNA, 80 bp, synthetic construct; identical to SEQ ID NO: 22029
  source 1..80: mol_type = other DNA

SEQ ID NO: 56900 - DNA, 80 bp, synthetic construct; identical to SEQ ID NO: 22030
  source 1..80: mol_type = other DNA

SEQ ID NO: 56901 - DNA, 80 bp, synthetic construct; identical to SEQ ID NO: 9420
  source 1..80: mol_type = other DNA

SEQ ID NO: 56902 - DNA, 80 bp, synthetic construct; identical to SEQ ID NO: 22032
  source 1..80: mol_type = other DNA

SEQ ID NO: 56903 - DNA, 80 bp, synthetic construct; identical to SEQ ID NO: 22033
  source 1..80: mol_type = other DNA

SEQ ID NO: 56904 - DNA, 80 bp, synthetic construct; identical to SEQ ID NO: 9421
  source 1..80: mol_type = other DNA

SEQ ID NO: 56905 - DNA, 80 bp, synthetic construct; identical to SEQ ID NO: 22035
  source 1..80: mol_type = other DNA

SEQ ID NO: 56906 - DNA, 80 bp, synthetic construct; identical to SEQ ID NO: 22036
  source 1..80: mol_type = other DNA

SEQ ID NO: 56907 - DNA, 80 bp, synthetic construct; identical to SEQ ID NO: 22037
  source 1..80: mol_type = other DNA

SEQ ID NO: 56908 - DNA, 80 bp, synthetic construct; identical to SEQ ID NO: 22038
  source 1..80: mol_type = other DNA

SEQ ID NO: 56909 - DNA, 80 bp, synthetic construct; identical to SEQ ID NO: 9422
  source 1..80: mol_type = other DNA

SEQ ID NO: 56910 - DNA, 80 bp, synthetic construct; identical to SEQ ID NO: 22040
  source 1..80: mol_type = other DNA

SEQ ID NO: 56911 - DNA, 80 bp, synthetic construct; identical to SEQ ID NO: 22041
  source 1..80: mol_type = other DNA

SEQ ID NO: 56912 - DNA, 80 bp, synthetic construct; identical to SEQ ID NO: 9423
  source 1..80: mol_type = other DNA

SEQ ID NO: 56913 - DNA, 80 bp, synthetic construct; identical to SEQ ID NO: 22043
  source 1..80: mol_type = other DNA

SEQ ID NO: 56914 - DNA, 80 bp, synthetic construct; identical to SEQ ID NO: 22044
  source 1..80: mol_type = other DNA

SEQ ID NO: 56915 - DNA, 80 bp, synthetic construct; identical to SEQ ID NO: 22045
  source 1..80: mol_type = other DNA

SEQ ID NO: 56916 - DNA, 80 bp, synthetic construct; identical to SEQ ID NO: 22046
  source 1..80: mol_type = other DNA

SEQ ID NO: 56917 - DNA, 80 bp, synthetic construct; identical to SEQ ID NO: 9424
  source 1..80: mol_type = other DNA

SEQ ID NO: 56918 - DNA, 80 bp, synthetic construct; identical to SEQ ID NO: 22048
  source 1..80: mol_type = other DNA

SEQ ID NO: 56919 - DNA, 80 bp, synthetic construct; identical to SEQ ID NO: 22049
  source 1..80: mol_type = other DNA

SEQ ID NO: 56920 - DNA, 80 bp, synthetic construct; identical to SEQ ID NO: 9425
  source 1..80: mol_type = other DNA

SEQ ID NO: 56921 - DNA, 80 bp, synthetic construct; identical to SEQ ID NO: 22051
  source 1..80: mol_type = other DNA

SEQ ID NO: 56922 - DNA, 80 bp, synthetic construct; identical to SEQ ID NO: 22052
  source 1..80: mol_type = other DNA

SEQ ID NO: 56923 - DNA, 80 bp, synthetic construct; identical to SEQ ID NO: 22053
  source 1..80: mol_type = other DNA

SEQ ID NO: 56924 - DNA, 80 bp, synthetic construct; identical to SEQ ID NO: 9426
  source 1..80: mol_type = other DNA

SEQ ID NO: 56925 - DNA, 80 bp, synthetic construct; identical to SEQ ID NO: 22055
  source 1..80: mol_type = other DNA

SEQ ID NO: 56926 - DNA, 80 bp, synthetic construct; identical to SEQ ID NO: 22056
  source 1..80: mol_type = other DNA

SEQ ID NO: 56927 - DNA, 80 bp, synthetic construct; identical to SEQ ID NO: 22057
  source 1..80: mol_type = other DNA

SEQ ID NO: 56928 - DNA, 80 bp, synthetic construct; identical to SEQ ID NO: 22058
  source 1..80: mol_type = other DNA

SEQ ID NO: 56929 - DNA, 80 bp, synthetic construct; identical to SEQ ID NO: 9427
  source 1..80: mol_type = other DNA

SEQ ID NO: 56930 - DNA, 80 bp, synthetic construct; identical to SEQ ID NO: 22060
  source 1..80: mol_type = other DNA

SEQ ID NO: 56931 - DNA, 80 bp, synthetic construct; identical to SEQ ID NO: 22061
  source 1..80: mol_type = other DNA

SEQ ID NO: 56932 - DNA, 80 bp, synthetic construct; identical to SEQ ID NO: 22062
  source 1..80: mol_type = other DNA

SEQ ID NO: 56933 - DNA, 80 bp, synthetic construct; identical to SEQ ID NO: 9428
  source 1..80: mol_type = other DNA

SEQ ID NO: 56934 - DNA, 80 bp, synthetic construct; identical to SEQ ID NO: 22064
  source 1..80: mol_type = other DNA

SEQ ID NO: 56935 - DNA, 80 bp, synthetic construct; identical to SEQ ID NO: 22065
  source 1..80: mol_type = other DNA

SEQ ID NO: 56936 - DNA, 80 bp, synthetic construct; identical to SEQ ID NO: 9429
  source 1..80: mol_type = other DNA

SEQ ID NO: 56937 - DNA, 80 bp, synthetic construct; identical to SEQ ID NO: 22067
  source 1..80: mol_type = other DNA

SEQ ID NO: 56938 - DNA, 80 bp, synthetic construct; identical to SEQ ID NO: 22068
  source 1..80: mol_type = other DNA

SEQ ID NO: 56939 - DNA, 80 bp, synthetic construct; identical to SEQ ID NO: 22069
  source 1..80: mol_type = other DNA

SEQ ID NO: 56940 - DNA, 80 bp, synthetic construct; identical to SEQ ID NO: 22070
  source 1..80: mol_type = other DNA

SEQ ID NO: 56941 - DNA, 80 bp, synthetic construct; identical to SEQ ID NO: 9430
  source 1..80: mol_type = other DNA

SEQ ID NO: 56942 - DNA, 80 bp, synthetic construct; identical to SEQ ID NO: 22072
  source 1..80: mol_type = other DNA

SEQ ID NO: 56943 - DNA, 80 bp, synthetic construct; identical to SEQ ID NO: 22073
  source 1..80: mol_type = other DNA

SEQ ID NO: 56944 - DNA, 80 bp, synthetic construct; identical to SEQ ID NO: 9431
  source 1..80: mol_type = other DNA

SEQ ID NO: 56945 - DNA, 80 bp, synthetic construct; identical to SEQ ID NO: 22075
  source 1..80: mol_type = other DNA

SEQ ID NO: 56946 - DNA, 80 bp, synthetic construct; identical to SEQ ID NO: 22076
  source 1..80: mol_type = other DNA

SEQ ID NO: 56947 - DNA, 80 bp, synthetic construct; identical to SEQ ID NO: 22077
  source 1..80: mol_type = other DNA

SEQ ID NO: 56948 - DNA, 80 bp, synthetic construct; identical to SEQ ID NO: 22078
  source 1..80: mol_type = other DNA

SEQ ID NO: 56949 - DNA, 80 bp, synthetic construct; identical to SEQ ID NO: 9432
  source 1..80: mol_type = other DNA

SEQ ID NO: 56950 - DNA, 80 bp, synthetic construct; identical to SEQ ID NO: 22080
  source 1..80: mol_type = other DNA

SEQ ID NO: 56951 - DNA, 80 bp, synthetic construct; identical to SEQ ID NO: 22081
  source 1..80: mol_type = other DNA

SEQ ID NO: 56952 - DNA, 80 bp, synthetic construct; identical to SEQ ID NO: 9433
  source 1..80: mol_type = other DNA

SEQ ID NO: 56953 - DNA, 80 bp, synthetic construct; identical to SEQ ID NO: 22083
  source 1..80: mol_type = other DNA

SEQ ID NO: 56954 - DNA, 80 bp, synthetic construct; identical to SEQ ID NO: 22084
  source 1..80: mol_type = other DNA

SEQ ID NO: 56955 - DNA, 80 bp, synthetic construct; identical to SEQ ID NO: 22085
  source 1..80: mol_type = other DNA

SEQ ID NO: 56956 - DNA, 80 bp, synthetic construct; identical to SEQ ID NO: 22086
  source 1..80: mol_type = other DNA

SEQ ID NO: 56957 - DNA, 80 bp, synthetic construct; identical to SEQ ID NO: 9434
  source 1..80: mol_type = other DNA

SEQ ID NO: 56958 - DNA, 80 bp, synthetic construct; identical to SEQ ID NO: 22088
  source 1..80: mol_type = other DNA

SEQ ID NO: 56959 - DNA, 80 bp, synthetic construct; identical to SEQ ID NO: 22089
  source 1..80: mol_type = other DNA

SEQ ID NO: 56960 - DNA, 80 bp, synthetic construct; identical to SEQ ID NO: 22090
  source 1..80: mol_type = other DNA

SEQ ID NO: 56961 - DNA, 80 bp, synthetic construct; identical to SEQ ID NO: 9435
  source 1..80: mol_type = other DNA

SEQ ID NO: 56962 - DNA, 80 bp, synthetic construct; identical to SEQ ID NO: 22092
  source 1..80: mol_type = other DNA

SEQ ID NO: 56963 - DNA, 80 bp, synthetic construct; identical to SEQ ID NO: 22093
  source 1..80: mol_type = other DNA

SEQ ID NO: 56964 - DNA, 80 bp, synthetic construct; identical to SEQ ID NO: 9436
  source 1..80: mol_type = other DNA

SEQ ID NO: 56965 - DNA, 80 bp, synthetic construct; identical to SEQ ID NO: 22096
  source 1..80: mol_type = other DNA

SEQ ID NO: 56966 - DNA, 80 bp, synthetic construct; identical to SEQ ID NO: 22097
  source 1..80: mol_type = other DNA

SEQ ID NO: 56967 - DNA, 80 bp, synthetic construct; identical to SEQ ID NO: 22098
  source 1..80: mol_type = other DNA

SEQ ID NO: 56968 - DNA, 80 bp, synthetic construct; identical to SEQ ID NO: 9437
  source 1..80: mol_type = other DNA

SEQ ID NO: 56969 - DNA, 80 bp, synthetic construct; identical to SEQ ID NO: 22101
  source 1..80: mol_type = other DNA

SEQ ID NO: 56970 - DNA, 80 bp, synthetic construct; identical to SEQ ID NO: 9438
  source 1..80: mol_type = other DNA

SEQ ID NO: 56971 - DNA, 80 bp, synthetic construct; identical to SEQ ID NO: 22103
  source 1..80: mol_type = other DNA

SEQ ID NO: 56972 - DNA, 80 bp, synthetic construct; identical to SEQ ID NO: 22104
  source 1..80: mol_type = other DNA

SEQ ID NO: 56973 - DNA, 80 bp, synthetic construct; identical to SEQ ID NO: 22105
  source 1..80: mol_type = other DNA

SEQ ID NO: 56974 - DNA, 80 bp, synthetic construct; identical to SEQ ID NO: 22106
  source 1..80: mol_type = other DNA

SEQ ID NO: 56975 - DNA, 80 bp, synthetic construct; identical to SEQ ID NO: 9439
  source 1..80: mol_type = other DNA

SEQ ID NO: 56976 - DNA, 80 bp, synthetic construct; identical to SEQ ID NO: 22108
  source 1..80: mol_type = other DNA

SEQ ID NO: 56977 - DNA, 80 bp, synthetic construct; identical to SEQ ID NO: 22109
  source 1..80: mol_type = other DNA

SEQ ID NO: 56978 - DNA, 80 bp, synthetic construct; identical to SEQ ID NO: 22110
  source 1..80: mol_type = other DNA

SEQ ID NO: 56979 - DNA, 80 bp, synthetic construct; identical to SEQ ID NO: 9440
  source 1..80: mol_type = other DNA

SEQ ID NO: 56980 - DNA, 80 bp, synthetic construct; identical to SEQ ID NO: 22112
  source 1..80: mol_type = other DNA

SEQ ID NO: 56981 - DNA, 80 bp, synthetic construct; identical to SEQ ID NO: 22114
  source 1..80: mol_type = other DNA

SEQ ID NO: 56982 - DNA, 80 bp, synthetic construct; identical to SEQ ID NO: 9441
  source 1..80: mol_type = other DNA

SEQ ID NO: 56983 - DNA, 80 bp, synthetic construct; identical to SEQ ID NO: 22116
  source 1..80: mol_type = other DNA

SEQ ID NO: 56984 - DNA, 80 bp, synthetic construct; identical to SEQ ID NO: 22117
  source 1..80: mol_type = other DNA

SEQ ID NO: 56985 - DNA, 80 bp, synthetic construct; identical to SEQ ID NO: 22118
  source 1..80: mol_type = other DNA

SEQ ID NO: 56986 - DNA, 80 bp, synthetic construct; identical to SEQ ID NO: 9442
  source 1..80: mol_type = other DNA

SEQ ID NO: 56987 - DNA, 80 bp, synthetic construct; identical to SEQ ID NO: 22120
  source 1..80: mol_type = other DNA

SEQ ID NO: 56988 - DNA, 80 bp, synthetic construct; identical to SEQ ID NO: 22121
  source 1..80: mol_type = other DNA

SEQ ID NO: 56989 - DNA, 80 bp, synthetic construct; identical to SEQ ID NO: 22122
  source 1..80: mol_type = other DNA

SEQ ID NO: 56990 - DNA, 80 bp, synthetic construct; identical to SEQ ID NO: 9443
  source 1..80: mol_type = other DNA

SEQ ID NO: 56991 - DNA, 80 bp, synthetic construct; identical to SEQ ID NO: 22124
  source 1..80: mol_type = other DNA

SEQ ID NO: 56992 - DNA, 80 bp, synthetic construct; identical to SEQ ID NO: 22125
  source 1..80: mol_type = other DNA

SEQ ID NO: 56993 - DNA, 80 bp, synthetic construct; identical to SEQ ID NO: 22126
  source 1..80: mol_type = other DNA

SEQ ID NO: 56994 - DNA, 80 bp, synthetic construct; identical to SEQ ID NO: 9444
  source 1..80: mol_type = other DNA

SEQ ID NO: 56995 - DNA, 80 bp, synthetic construct; identical to SEQ ID NO: 22128
  source 1..80: mol_type = other DNA

SEQ ID NO: 56996 - DNA, 80 bp, synthetic construct; identical to SEQ ID NO: 22129
  source 1..80: mol_type = other DNA

SEQ ID NO: 56997 - DNA, 80 bp, synthetic construct; identical to SEQ ID NO: 22130
  source 1..80: mol_type = other DNA

SEQ ID NO: 56998 - DNA, 80 bp, synthetic construct; identical to SEQ ID NO: 9445
  source 1..80: mol_type = other DNA

SEQ ID NO: 56999 - DNA, 80 bp, synthetic construct; identical to SEQ ID NO: 22132
  source 1..80: mol_type = other DNA

SEQ ID NO: 57000 - DNA, 80 bp, synthetic construct; identical to SEQ ID NO: 22133
  source 1..80: mol_type = other DNA

SEQ ID NO: 57001 - DNA, 80 bp, synthetic construct; identical to SEQ ID NO: 22134
  source 1..80: mol_type = other DNA

SEQ ID NO: 57002 - DNA, 80 bp, synthetic construct; identical to SEQ ID NO: 9446
  source 1..80: mol_type = other DNA

SEQ ID NO: 57003 - DNA, 80 bp, synthetic construct; identical to SEQ ID NO: 22136
  source 1..80: mol_type = other DNA

SEQ ID NO: 57004 - DNA, 80 bp, synthetic construct; identical to SEQ ID NO: 22137
  source 1..80: mol_type = other DNA

SEQ ID NO: 57005 - DNA, 80 bp, synthetic construct; identical to SEQ ID NO: 9447
  source 1..80: mol_type = other DNA

SEQ ID NO: 57006 - DNA, 80 bp, synthetic construct; identical to SEQ ID NO: 22139
  source 1..80: mol_type = other DNA

SEQ ID NO: 57007 - DNA, 80 bp, synthetic construct; identical to SEQ ID NO: 22140
  source 1..80: mol_type = other DNA

SEQ ID NO: 57008 - DNA, 80 bp, synthetic construct; identical to SEQ ID NO: 22141
  source 1..80: mol_type = other DNA

SEQ ID NO: 57009 - DNA, 80 bp, synthetic construct; identical to SEQ ID NO: 9448
  source 1..80: mol_type = other DNA

SEQ ID NO: 57010 - DNA, 80 bp, synthetic construct; identical to SEQ ID NO: 22143
  source 1..80: mol_type = other DNA

SEQ ID NO: 57011 - DNA, 80 bp, synthetic construct; identical to SEQ ID NO: 22144
  source 1..80: mol_type = other DNA

SEQ ID NO: 57012 - DNA, 80 bp, synthetic construct; identical to SEQ ID NO: 22145
  source 1..80: mol_type = other DNA

SEQ ID NO: 57013 - DNA, 80 bp, synthetic construct; identical to SEQ ID NO: 22146
  source 1..80: mol_type = other DNA

SEQ ID NO: 57014 - DNA, 80 bp, synthetic construct; identical to SEQ ID NO: 9449
  source 1..80: mol_type = other DNA

SEQ ID NO: 57015 - DNA, 80 bp, synthetic construct; identical to SEQ ID NO: 22148
  source 1..80: mol_type = other DNA

SEQ ID NO: 57016 - DNA, 80 bp, synthetic construct; identical to SEQ ID NO: 22149
  source 1..80: mol_type = other DNA

SEQ ID NO: 57017 - DNA, 80 bp, synthetic construct; identical to SEQ ID NO: 22150
  source 1..80: mol_type = other DNA

SEQ ID NO: 57018 - DNA, 80 bp, synthetic construct; identical to SEQ ID NO: 9450
  source 1..80: mol_type = other DNA

SEQ ID NO: 57019 - DNA, 80 bp, synthetic construct; identical to SEQ ID NO: 22152
  source 1..80: mol_type = other DNA

SEQ ID NO: 57020 - DNA, 80 bp, synthetic construct; identical to SEQ ID NO: 22153
  source 1..80: mol_type = other DNA

SEQ ID NO: 57021 - DNA, 80 bp, synthetic construct; identical to SEQ ID NO: 22154
  source 1..80: mol_type = other DNA

SEQ ID NO: 57022 - DNA, 80 bp, synthetic construct; identical to SEQ ID NO: 9451
  source 1..80: mol_type = other DNA

SEQ ID NO: 57023 - DNA, 80 bp, synthetic construct; identical to SEQ ID NO: 22156
  source 1..80: mol_type = other DNA

SEQ ID NO: 57024 - DNA, 80 bp, synthetic construct; identical to SEQ ID NO: 22157
  source 1..80: mol_type = other DNA

SEQ ID NO: 57025 - DNA, 80 bp, synthetic construct; identical to SEQ ID NO: 9452
  source 1..80: mol_type = other DNA

SEQ ID NO: 57026 - DNA, 80 bp, synthetic construct; identical to SEQ ID NO: 22160
  source 1..80: mol_type = other DNA

SEQ ID NO: 57027 - DNA, 80 bp, synthetic construct; identical to SEQ ID NO: 22161
  source 1..80: mol_type = other DNA

SEQ ID NO: 57028 - DNA, 80 bp, synthetic construct; identical to SEQ ID NO: 9453
  source 1..80: mol_type = other DNA

SEQ ID NO: 57029 - DNA, 80 bp, synthetic construct; identical to SEQ ID NO: 22163
  source 1..80: mol_type = other DNA

SEQ ID NO: 57030 - DNA, 80 bp, synthetic construct; identical to SEQ ID NO: 22164
  source 1..80: mol_type = other DNA

SEQ ID NO: 57031 - DNA, 80 bp, synthetic construct; identical to SEQ ID NO: 22165
  source 1..80: mol_type = other DNA

SEQ ID NO: 57032 - DNA, 80 bp, synthetic construct; identical to SEQ ID NO: 22166
  source 1..80: mol_type = other DNA

SEQ ID NO: 57033 - DNA, 80 bp, synthetic construct; identical to SEQ ID NO: 9454
  source 1..80: mol_type = other DNA

SEQ ID NO: 57034 - DNA, 80 bp, synthetic construct; identical to SEQ ID NO: 22168
  source 1..80: mol_type = other DNA

SEQ ID NO: 57035 - DNA, 80 bp, synthetic construct; identical to SEQ ID NO: 22169
  source 1..80: mol_type = other DNA

SEQ ID NO: 57036 - DNA, 80 bp, synthetic construct; identical to SEQ ID NO: 9455
  source 1..80: mol_type = other DNA

SEQ ID NO: 57037 - DNA, 80 bp, synthetic construct; identical to SEQ ID NO: 22172
  source 1..80: mol_type = other DNA

SEQ ID NO: 57038 - DNA, 80 bp, synthetic construct; identical to SEQ ID NO: 22173
  source 1..80: mol_type = other DNA

SEQ ID NO: 57039 - DNA, 80 bp, synthetic construct; identical to SEQ ID NO: 9456
  source 1..80: mol_type = other DNA

SEQ ID NO: 57040 - DNA, 80 bp, synthetic construct; identical to SEQ ID NO: 22176
  source 1..80: mol_type = other DNA

SEQ ID NO: 57041 - DNA, 80 bp, synthetic construct; identical to SEQ ID NO: 22177
  source 1..80: mol_type = other DNA

SEQ ID NO: 57042 - DNA, 80 bp, synthetic construct; identical to SEQ ID NO: 22178
  source 1..80: mol_type = other DNA

SEQ ID NO: 57043 - DNA, 80 bp, synthetic construct; identical to SEQ ID NO: 9457
  source 1..80: mol_type = other DNA

SEQ ID NO: 57044 - DNA, 80 bp, synthetic construct; identical to SEQ ID NO: 22180
  source 1..80: mol_type = other DNA

SEQ ID NO: 57045 - DNA, 80 bp, synthetic construct; identical to SEQ ID NO: 22181
  source 1..80: mol_type = other DNA

SEQ ID NO: 57046 - DNA, 80 bp, synthetic construct; identical to SEQ ID NO: 22182
  source 1..80: mol_type = other DNA

SEQ ID NO: 57047 - DNA, 80 bp, synthetic construct; identical to SEQ ID NO: 9458
  source 1..80: mol_type = other DNA

SEQ ID NO: 57048 - DNA, 80 bp, synthetic construct; identical to SEQ ID NO: 22184
  source 1..80: mol_type = other DNA

SEQ ID NO: 57049 - DNA, 80 bp, synthetic construct; identical to SEQ ID NO: 22185
  source 1..80: mol_type = other DNA

SEQ ID NO: 57050 - DNA, 80 bp, synthetic construct; identical to SEQ ID NO: 22186
  source 1..80: mol_type = other DNA

SEQ ID NO: 57051 - DNA, 80 bp, synthetic construct; identical to SEQ ID NO: 9459
  source 1..80: mol_type = other DNA

SEQ ID NO: 57052 - DNA, 80 bp, synthetic construct; identical to SEQ ID NO: 22188
  source 1..80: mol_type = other DNA

SEQ ID NO: 57053 - DNA, 80 bp, synthetic construct; identical to SEQ ID NO: 22189
  source 1..80: mol_type = other DNA

SEQ ID NO: 57054 - DNA, 80 bp, synthetic construct; identical to SEQ ID NO: 22190
  source 1..80: mol_type = other DNA

SEQ ID NO: 57055 - DNA, 80 bp, synthetic construct; identical to SEQ ID NO: 9460
  source 1..80: mol_type = other DNA

SEQ ID NO: 57056 - DNA, 80 bp, synthetic construct; identical to SEQ ID NO: 22193
  source 1..80: mol_type = other DNA

SEQ ID NO: 57057 - DNA, 80 bp, synthetic construct; identical to SEQ ID NO: 22194
  source 1..80: mol_type = other DNA

SEQ ID NO: 57058 - DNA, 80 bp, synthetic construct; identical to SEQ ID NO: 9461
  source 1..80: mol_type = other DNA

SEQ ID NO: 57059 - DNA, 80 bp, synthetic construct; identical to SEQ ID NO: 22196
  source 1..80: mol_type = other DNA

SEQ ID NO: 57060 - DNA, 80 bp, synthetic construct; identical to SEQ ID NO: 22197
  source 1..80: mol_type = other DNA

SEQ ID NO: 57061 - DNA, 80 bp, synthetic construct; identical to SEQ ID NO: 9462
  source 1..80: mol_type = other DNA

SEQ ID NO: 57062 - DNA, 80 bp, synthetic construct; identical to SEQ ID NO: 22200
  source 1..80: mol_type = other DNA

SEQ ID NO: 57063 - DNA, 80 bp, synthetic construct; identical to SEQ ID NO: 22201
  source 1..80: mol_type = other DNA

SEQ ID NO: 57064 - DNA, 80 bp, synthetic construct; identical to SEQ ID NO: 22202
  source 1..80: mol_type = other DNA

SEQ ID NO: 57065 - DNA, 80 bp, synthetic construct; identical to SEQ ID NO: 9463
  source 1..80: mol_type = other DNA

SEQ ID NO: 57066 - DNA, 80 bp, synthetic construct; identical to SEQ ID NO: 22204
  source 1..80: mol_type = other DNA

SEQ ID NO: 57067 - DNA, 80 bp, synthetic construct; identical to SEQ ID NO: 22205
  source 1..80: mol_type = other DNA

SEQ ID NO: 57068 - DNA, 80 bp, synthetic construct; identical to SEQ ID NO: 22206
  source 1..80: mol_type = other DNA

SEQ ID NO: 57069 - DNA, 80 bp, synthetic construct; identical to SEQ ID NO: 9464
  source 1..80: mol_type = other DNA

SEQ ID NO: 57070 - DNA, 80 bp, synthetic construct; identical to SEQ ID NO: 22208
  source 1..80: mol_type = other DNA

SEQ ID NO: 57071 - DNA, 80 bp, synthetic construct; identical to SEQ ID NO: 22209
  source 1..80: mol_type = other DNA

SEQ ID NO: 57072 - DNA, 80 bp, synthetic construct; identical to SEQ ID NO: 9465
  source 1..80: mol_type = other DNA

SEQ ID NO: 57073 - DNA, 80 bp, synthetic construct; identical to SEQ ID NO: 22211
  source 1..80: mol_type = other DNA

SEQ ID NO: 57074 - DNA, 80 bp, synthetic construct; identical to SEQ ID NO: 22212
  source 1..80: mol_type = other DNA

SEQ ID NO: 57075 - DNA, 80 bp, synthetic construct; identical to SEQ ID NO: 9466
  source 1..80: mol_type = other DNA

SEQ ID NO: 57076 - DNA, 80 bp, synthetic construct; identical to SEQ ID NO: 22214
  source 1..80: mol_type = other DNA

SEQ ID NO: 57077 - DNA, 80 bp, synthetic construct; identical to SEQ ID NO: 9467
  source 1..80: mol_type = other DNA

SEQ ID NO: 57078 - DNA, 80 bp, synthetic construct; identical to SEQ ID NO: 22217
  source 1..80: mol_type = other DNA

SEQ ID NO: 57079 - DNA, 80 bp, synthetic construct; identical to SEQ ID NO: 22218
  source 1..80: mol_type = other DNA

SEQ ID NO: 57080 - DNA, 80 bp, synthetic construct; identical to SEQ ID NO: 22219
  source 1..80: mol_type = other DNA

SEQ ID NO: 57081 - DNA, 80 bp, synthetic construct; identical to SEQ ID NO: 22220
  source 1..80: mol_type = other DNA

SEQ ID NO: 57082 - DNA, 80 bp, synthetic construct; identical to SEQ ID NO: 9468
  source 1..80: mol_type = other DNA

SEQ ID NO: 57083 - DNA, 80 bp, synthetic construct; identical to SEQ ID NO: 22222
  source 1..80: mol_type = other DNA

SEQ ID NO: 57084 - DNA, 80 bp, synthetic construct; identical to SEQ ID NO: 22223
  source 1..80: mol_type = other DNA

SEQ ID NO: 57085 - DNA, 80 bp, synthetic construct; identical to SEQ ID NO: 22224
  source 1..80: mol_type = other DNA

SEQ ID NO: 57086 - DNA, 80 bp, synthetic construct; identical to SEQ ID NO: 9469
  source 1..80: mol_type = other DNA

SEQ ID NO: 57087 - DNA, 80 bp, synthetic construct; identical to SEQ ID NO: 22226
  source 1..80: mol_type = other DNA

SEQ ID NO: 57088 - DNA, 80 bp, synthetic construct; identical to SEQ ID NO: 22227
  source 1..80: mol_type = other DNA

SEQ ID NO: 57089 - DNA, 80 bp, synthetic construct; identical to SEQ ID NO: 22228
  source 1..80: mol_type = other DNA

SEQ ID NO: 57090 - DNA, 80 bp, synthetic construct; identical to SEQ ID NO: 9470
  source 1..80: mol_type = other DNA

SEQ ID NO: 57091 - DNA, 80 bp, synthetic construct; identical to SEQ ID NO: 22230
  source 1..80: mol_type = other DNA

SEQ ID NO: 57092 - DNA, 80 bp, synthetic construct; identical to SEQ ID NO: 22231
  source 1..80: mol_type = other DNA

SEQ ID NO: 57093 - DNA, 80 bp, synthetic construct; identical to SEQ ID NO: 9471
  source 1..80: mol_type = other DNA

SEQ ID NO: 57094 - DNA, 80 bp, synthetic construct; identical to SEQ ID NO: 22233
  source 1..80: mol_type = other DNA

SEQ ID NO: 57095 - DNA, 80 bp, synthetic construct; identical to SEQ ID NO: 22235
  source 1..80: mol_type = other DNA

SEQ ID NO: 57096 - DNA, 80 bp, synthetic construct; identical to SEQ ID NO: 22236
  source 1..80: mol_type = other DNA

SEQ ID NO: 57097 - DNA, 80 bp, synthetic construct; identical to SEQ ID NO: 9472
  source 1..80: mol_type = other DNA

SEQ ID NO: 57098 - DNA, 80 bp, synthetic construct; identical to SEQ ID NO: 22238
  source 1..80: mol_type = other DNA

SEQ ID NO: 57099 - DNA, 80 bp, synthetic construct; identical to SEQ ID NO: 22239
  source 1..80: mol_type = other DNA

SEQ ID NO: 57100 - DNA, 80 bp, synthetic construct; identical to SEQ ID NO: 9473
  source 1..80: mol_type = other DNA

SEQ ID NO: 57101 - DNA, 80 bp, synthetic construct; identical to SEQ ID NO: 22241
  source 1..80: mol_type = other DNA

SEQ ID NO: 57102 - DNA, 80 bp, synthetic construct; identical to SEQ ID NO: 22242
  source 1..80: mol_type = other DNA

SEQ ID NO: 57103 - DNA, 80 bp, synthetic construct; identical to SEQ ID NO: 22243
  source 1..80: mol_type = other DNA

SEQ ID NO: 57104 - DNA, 80 bp, synthetic construct; identical to SEQ ID NO: 9474
  source 1..80: mol_type = other DNA

SEQ ID NO: 57105 - DNA, 80 bp, synthetic construct; identical to SEQ ID NO: 22245
  source 1..80: mol_type = other DNA

SEQ ID NO: 57106 - DNA, 80 bp, synthetic construct; identical to SEQ ID NO: 22246
  source 1..80: mol_type = other DNA

SEQ ID NO: 57107 - DNA, 80 bp, synthetic construct; identical to SEQ ID NO: 9475
  source 1..80: mol_type = other DNA

SEQ ID NO: 57108 - DNA, 80 bp, synthetic construct; identical to SEQ ID NO: 22249
  source 1..80: mol_type = other DNA

SEQ ID NO: 57109 - DNA, 80 bp, synthetic construct; identical to SEQ ID NO: 22250
  source 1..80: mol_type = other DNA

SEQ ID NO: 57110 - DNA, 80 bp, synthetic construct; identical to SEQ ID NO: 22251
  source 1..80: mol_type = other DNA

SEQ ID NO: 57111 - DNA, 80 bp, synthetic construct; identical to SEQ ID NO: 9476
  source 1..80: mol_type = other DNA

SEQ ID NO: 57112 - DNA, 80 bp, synthetic construct; identical to SEQ ID NO: 22253
  source 1..80: mol_type = other DNA

SEQ ID NO: 57113 - DNA, 80 bp, synthetic construct; identical to SEQ ID NO: 9477
  source 1..80: mol_type = other DNA

SEQ ID NO: 57114 - DNA, 80 bp, synthetic construct; identical to SEQ ID NO: 22255
  source 1..80: mol_type = other DNA

SEQ ID NO: 57115 - DNA, 80 bp, synthetic construct; identical to SEQ ID NO: 22256
  source 1..80: mol_type = other DNA

SEQ ID NO: 57116 - DNA, 80 bp, synthetic construct; identical to SEQ ID NO: 22257
  source 1..80: mol_type = other DNA

SEQ ID NO: 57117 - DNA, 80 bp, synthetic construct; identical to SEQ ID NO: 22258
  source 1..80: mol_type = other DNA

SEQ ID NO: 57118 - DNA, 80 bp, synthetic construct; identical to SEQ ID NO: 9478
  source 1..80: mol_type = other DNA

SEQ ID NO: 57119 - DNA, 80 bp, synthetic construct; identical to SEQ ID NO: 22260
  source 1..80: mol_type = other DNA

SEQ ID NO: 57120 - DNA, 80 bp, synthetic construct; identical to SEQ ID NO: 22261
  source 1..80: mol_type = other DNA

SEQ ID NO: 57121 - DNA, 80 bp, synthetic construct; identical to SEQ ID NO: 22262
  source 1..80: mol_type = other DNA

SEQ ID NO: 57122 - DNA, 80 bp, synthetic construct; identical to SEQ ID NO: 9479
  source 1..80: mol_type = other DNA

SEQ ID NO: 57123 - DNA, 80 bp, synthetic construct; identical to SEQ ID NO: 22264
  source 1..80: mol_type = other DNA

SEQ ID NO: 57124 - DNA, 80 bp, synthetic construct; identical to SEQ ID NO: 22265
  source 1..80: mol_type = other DNA

SEQ ID NO: 57125 - DNA, 80 bp, synthetic construct; identical to SEQ ID NO: 22266
  source 1..80: mol_type = other DNA

SEQ ID NO: 57126 - DNA, 80 bp, synthetic construct; identical to SEQ ID NO: 9480
  source 1..80: mol_type = other DNA

SEQ ID NO: 57127 - DNA, 80 bp, synthetic construct; identical to SEQ ID NO: 22268
  source 1..80: mol_type = other DNA

SEQ ID NO: 57128 - DNA, 80 bp, synthetic construct; identical to SEQ ID NO: 22269
  source 1..80: mol_type = other DNA

SEQ ID NO: 57129 - DNA, 80 bp, synthetic construct; identical to SEQ ID NO: 22270
  source 1..80: mol_type = other DNA

SEQ ID NO: 57130 - DNA, 80 bp, synthetic construct; identical to SEQ ID NO: 22271
  source 1..80: mol_type = other DNA

SEQ ID NO: 57131 - DNA, 80 bp, synthetic construct; identical to SEQ ID NO: 9481
  source 1..80: mol_type = other DNA

SEQ ID NO: 57132 - DNA, 80 bp, synthetic construct; identical to SEQ ID NO: 22273
  source 1..80: mol_type = other DNA

SEQ ID NO: 57133 - DNA, 80 bp, synthetic construct; identical to SEQ ID NO: 22274
  source 1..80: mol_type = other DNA

SEQ ID NO: 57134 - DNA, 80 bp, synthetic construct; identical to SEQ ID NO: 9482
  source 1..80: mol_type = other DNA

SEQ ID NO: 57135 - DNA, 80 bp, synthetic construct; identical to SEQ ID NO: 22276
  source 1..80: mol_type = other DNA

SEQ ID NO: 57136 - DNA, 80 bp, synthetic construct; identical to SEQ ID NO: 22277
  source 1..80: mol_type = other DNA

SEQ ID NO: 57137 - DNA, 80 bp, synthetic construct; identical to SEQ ID NO: 22278
  source 1..80: mol_type = other DNA

SEQ ID NO: 57138 - DNA, 80 bp, synthetic construct; identical to SEQ ID NO: 22279
  source 1..80: mol_type = other DNA

SEQ ID NO: 57139 - DNA, 80 bp, synthetic construct; identical to SEQ ID NO: 9483
  source 1..80: mol_type = other DNA

SEQ ID NO: 57140 - DNA, 80 bp, synthetic construct; identical to SEQ ID NO: 22281
  source 1..80: mol_type = other DNA

SEQ ID NO: 57141 - DNA, 80 bp, synthetic construct; identical to SEQ ID NO: 22283
  source 1..80: mol_type = other DNA

SEQ ID NO: 57142 - DNA, 80 bp, synthetic construct; identical to SEQ ID NO: 9484
  source 1..80: mol_type = other DNA

SEQ ID NO: 57143 - DNA, 80 bp, synthetic construct; identical to SEQ ID NO: 22285
  source 1..80: mol_type = other DNA

SEQ ID NO: 57144 - DNA, 80 bp, synthetic construct; identical to SEQ ID NO: 22286
  source 1..80: mol_type = other DNA

SEQ ID NO: 57145 - DNA, 80 bp, synthetic construct; identical to SEQ ID NO: 22287
  source 1..80: mol_type = other DNA

SEQ ID NO: 57146 - DNA, 80 bp, synthetic construct; identical to SEQ ID NO: 22288
  source 1..80: mol_type = other DNA

SEQ ID NO: 57147 - DNA, 80 bp, synthetic construct; identical to SEQ ID NO: 9485
  source 1..80: mol_type = other DNA

SEQ ID NO: 57148 - DNA, 80 bp, synthetic construct; identical to SEQ ID NO: 22290
  source 1..80: mol_type = other DNA

SEQ ID NO: 57149 - DNA, 80 bp, synthetic construct; identical to SEQ ID NO: 22291
  source 1..80: mol_type = other DNA

SEQ ID NO: 57150 - DNA, 80 bp, synthetic construct; identical to SEQ ID NO: 9486
  source 1..80: mol_type = other DNA

SEQ ID NO: 57151 - DNA, 80 bp, synthetic construct; identical to SEQ ID NO: 22294
  source 1..80: mol_type = other DNA

SEQ ID NO: 57152 - DNA, 80 bp, synthetic construct; identical to SEQ ID NO: 22295
  source 1..80: mol_type = other DNA

SEQ ID NO: 57153 - DNA, 80 bp, synthetic construct; identical to SEQ ID NO: 22296
  source 1..80: mol_type = other DNA

SEQ ID NO: 57154 - DNA, 80 bp, synthetic construct; identical to SEQ ID NO: 9487
  source 1..80: mol_type = other DNA

SEQ ID NO: 57155 - DNA, 80 bp, synthetic construct; identical to SEQ ID NO: 22298
  source 1..80: mol_type = other DNA

SEQ ID NO: 57156 - DNA, 80 bp, synthetic construct; identical to SEQ ID NO: 22299
  source 1..80: mol_type = other DNA

SEQ ID NO: 57157 - DNA, 80 bp, synthetic construct; identical to SEQ ID NO: 9488
  source 1..80: mol_type = other DNA

SEQ ID NO: 57158 - DNA, 80 bp, synthetic construct; identical to SEQ ID NO: 22301
  source 1..80: mol_type = other DNA

SEQ ID NO: 57159 - DNA, 80 bp, synthetic construct; identical to SEQ ID NO: 22303
  source 1..80: mol_type = other DNA

SEQ ID NO: 57160 - DNA, 80 bp, synthetic construct; identical to SEQ ID NO: 9489
  source 1..80: mol_type = other DNA

SEQ ID NO: 57161 - DNA, 80 bp, synthetic construct; identical to SEQ ID NO: 22305
  source 1..80: mol_type = other DNA

SEQ ID NO: 57162 - DNA, 80 bp, synthetic construct; identical to SEQ ID NO: 22306
  source 1..80: mol_type = other DNA

SEQ ID NO: 57163 - DNA, 80 bp, synthetic construct; identical to SEQ ID NO: 22307
  source 1..80: mol_type = other DNA

SEQ ID NO: 57164 - DNA, 80 bp, synthetic construct; identical to SEQ ID NO: 22308
  source 1..80: mol_type = other DNA

SEQ ID NO: 57165 - DNA, 80 bp, synthetic construct; identical to SEQ ID NO: 9490
  source 1..80: mol_type = other DNA

SEQ ID NO: 57166 - DNA, 80 bp, synthetic construct; identical to SEQ ID NO: 22310
  source 1..80: mol_type = other DNA

SEQ ID NO: 57167 - DNA, 80 bp, synthetic construct; identical to SEQ ID NO: 22311
  source 1..80: mol_type = other DNA

SEQ ID NO: 57168 - DNA, 80 bp, synthetic construct; identical to SEQ ID NO: 9491
  source 1..80: mol_type = other DNA

SEQ ID NO: 57169 - DNA, 80 bp, synthetic construct; identical to SEQ ID NO: 22313
  source 1..80: mol_type = other DNA

SEQ ID NO: 57170 - DNA, 80 bp, synthetic construct; identical to SEQ ID NO: 22314
  source 1..80: mol_type = other DNA

SEQ ID NO: 57171 - DNA, 80 bp, synthetic construct; identical to SEQ ID NO: 22315
  source 1..80: mol_type = other DNA

SEQ ID NO: 57172 - DNA, 80 bp, synthetic construct; identical to SEQ ID NO: 9492
  source 1..80: mol_type = other DNA

SEQ ID NO: 57173 - DNA, 80 bp, synthetic construct; identical to SEQ ID NO: 22317
  source 1..80: mol_type = other DNA

SEQ ID NO: 57174 - DNA, 80 bp, synthetic construct; identical to SEQ ID NO: 22318
  source 1..80: mol_type = other DNA

SEQ ID NO: 57175 - DNA, 80 bp, synthetic construct; identical to SEQ ID NO: 9493
  source 1..80: mol_type = other DNA

SEQ ID NO: 57176 - DNA, 80 bp, synthetic construct; identical to SEQ ID NO: 22320
  source 1..80: mol_type = other DNA

SEQ ID NO: 57177 - DNA, 80 bp, synthetic construct; identical to SEQ ID NO: 22321
  source 1..80: mol_type = other DNA

SEQ ID NO: 57178 - DNA, 80 bp, synthetic construct; identical to SEQ ID NO: 22322
  source 1..80: mol_type = other DNA

SEQ ID NO: 57179 - DNA, 80 bp, synthetic construct; identical to SEQ ID NO: 22323
  source 1..80: mol_type = other DNA

SEQ ID NO: 57180 - DNA, 80 bp, synthetic construct; identical to SEQ ID NO: 9494
  source 1..80: mol_type = other DNA

SEQ ID NO: 57181 - DNA, 80 bp, synthetic construct; identical to SEQ ID NO: 22325
  source 1..80: mol_type = other DNA

SEQ ID NO: 57182 - DNA, 80 bp, synthetic construct; identical to SEQ ID NO: 22326
  source 1..80: mol_type = other DNA

SEQ ID NO: 57183 - DNA, 80 bp, synthetic construct; identical to SEQ ID NO: 9495
  source 1..80: mol_type = other DNA

SEQ ID NO: 57184 - DNA, 80 bp, synthetic construct; identical to SEQ ID NO: 22329
  source 1..80: mol_type = other DNA

SEQ ID NO: 57185 - DNA, 80 bp, synthetic construct; identical to SEQ ID NO: 22330
  source 1..80: mol_type = other DNA

SEQ ID NO: 57186 - DNA, 80 bp, synthetic construct; identical to SEQ ID NO: 9496
  source 1..80: mol_type = other DNA

SEQ ID NO: 57187 - DNA, 80 bp, synthetic construct; identical to SEQ ID NO: 22333
  source 1..80: mol_type = other DNA

SEQ ID NO: 57188 - DNA, 80 bp, synthetic construct; identical to SEQ ID NO: 22334
  source 1..80: mol_type = other DNA

SEQ ID NO: 57189 - DNA, 80 bp, synthetic construct; identical to SEQ ID NO: 22335
  source 1..80: mol_type = other DNA

SEQ ID NO: 57190 - DNA, 80 bp, synthetic construct; identical to SEQ ID NO: 9497
  source 1..80: mol_type = other DNA

SEQ ID NO: 57191 - DNA, 80 bp, synthetic construct; identical to SEQ ID NO: 22337
  source 1..80: mol_type = other DNA

SEQ ID NO: 57192 - DNA, 80 bp, synthetic construct; identical to SEQ ID NO: 22338
  source 1..80: mol_type = other DNA

SEQ ID NO: 57193 - DNA, 80 bp, synthetic construct; identical to SEQ ID NO: 22339
  source 1..80: mol_type = other DNA

SEQ ID NO: 57194 - DNA, 80 bp, synthetic construct; identical to SEQ ID NO: 9498
  source 1..80: mol_type = other DNA

SEQ ID NO: 57195 - DNA, 80 bp, synthetic construct; identical to SEQ ID NO: 22341
  source 1..80: mol_type = other DNA

SEQ ID NO: 57196 - DNA, 80 bp, synthetic construct; identical to SEQ ID NO: 9499
  source 1..80: mol_type = other DNA

SEQ ID NO: 57197 - DNA, 80 bp, synthetic construct; identical to SEQ ID NO: 22344
  source 1..80: mol_type = other DNA

SEQ ID NO: 57198 - DNA, 80 bp, synthetic construct; identical to SEQ ID NO: 22345
  source 1..80: mol_type = other DNA

SEQ ID NO: 57199 - DNA, 80 bp, synthetic construct; identical to SEQ ID NO: 22346
  source 1..80: mol_type = other DNA

SEQ ID NO: 57200 - DNA, 80 bp, synthetic construct; identical to SEQ ID NO: 9500
  source 1..80: mol_type = other DNA

SEQ ID NO: 57201 - DNA, 80 bp, synthetic construct; identical to SEQ ID NO: 22348
  source 1..80: mol_type = other DNA

SEQ ID NO: 57202 - DNA, 80 bp, synthetic construct; identical to SEQ ID NO: 22349
  source 1..80: mol_type = other DNA

SEQ ID NO: 57203 - DNA, 80 bp, synthetic construct; identical to SEQ ID NO: 22350
  source 1..80: mol_type = other DNA

SEQ ID NO: 57204 - DNA, 80 bp, synthetic construct; identical to SEQ ID NO: 22351
  source 1..80: mol_type = other DNA

SEQ ID NO: 57205 - DNA, 80 bp, synthetic construct; identical to SEQ ID NO: 9501
  source 1..80: mol_type = other DNA

SEQ ID NO: 57206 - DNA, 80 bp, synthetic construct; identical to SEQ ID NO: 22353
  source 1..80: mol_type = other DNA

SEQ ID NO: 57207 - DNA, 80 bp, synthetic construct; identical to SEQ ID NO: 22354
  source 1..80: mol_type = other DNA

SEQ ID NO: 57208 - DNA, 80 bp, synthetic construct; identical to SEQ ID NO: 9502
  source 1..80: mol_type = other DNA

SEQ ID NO: 57209 - DNA, 80 bp, synthetic construct; identical to SEQ ID NO: 22356
  source 1..80: mol_type = other DNA

SEQ ID NO: 57210 - DNA, 80 bp, synthetic construct; identical to SEQ ID NO: 22357
  source 1..80: mol_type = other DNA

SEQ ID NO: 57211 - DNA, 80 bp, synthetic construct; identical to SEQ ID NO: 22358
  source 1..80: mol_type = other DNA

SEQ ID NO: 57212 - DNA, 80 bp, synthetic construct; identical to SEQ ID NO: 22359
  source 1..80: mol_type = other DNA

SEQ ID NO: 57213 - DNA, 80 bp, synthetic construct; identical to SEQ ID NO: 9503
  source 1..80: mol_type = other DNA

SEQ ID NO: 57214 - DNA, 80 bp, synthetic construct; identical to SEQ ID NO: 22361
  source 1..80: mol_type = other DNA

SEQ ID NO: 57215 - DNA, 80 bp, synthetic construct; identical to SEQ ID NO: 22362
  source 1..80: mol_type = other DNA

SEQ ID NO: 57216 - DNA, 80 bp, synthetic construct; identical to SEQ ID NO: 9504
  source 1..80: mol_type = other DNA

SEQ ID NO: 57217 - DNA, 80 bp, synthetic construct; identical to SEQ ID NO: 22364
  source 1..80: mol_type = other DNA

SEQ ID NO: 57218 - DNA, 80 bp, synthetic construct; identical to SEQ ID NO: 22365
  source 1..80: mol_type = other DNA

SEQ ID NO: 57219 - DNA, 80 bp, synthetic construct; identical to SEQ ID NO: 22366
  source 1..80: mol_type = other DNA

SEQ ID NO: 57220 - DNA, 80 bp, synthetic construct; identical to SEQ ID NO: 9505
  source 1..80: mol_type = other DNA

SEQ ID NO: 57221 - DNA, 80 bp, synthetic construct; identical to SEQ ID NO: 22368
  source 1..80: mol_type = other DNA

SEQ ID NO: 57222 - DNA, 80 bp, synthetic construct; identical to SEQ ID NO: 22369
  source 1..80: mol_type = other DNA

SEQ ID NO: 57223 - DNA, 80 bp, synthetic construct; identical to SEQ ID NO: 22370
  source 1..80: mol_type = other DNA

SEQ ID NO: 57224 - DNA, 80 bp, synthetic construct; identical to SEQ ID NO: 9506
  source 1..80: mol_type = other DNA

SEQ ID NO: 57225 - DNA, 80 bp, synthetic construct; identical to SEQ ID NO: 22372
  source 1..80: mol_type = other DNA

SEQ ID NO: 57226 - DNA, 80 bp, synthetic construct; identical to SEQ ID NO: 22373
  source 1..80: mol_type = other DNA

SEQ ID NO: 57227 - DNA, 80 bp, synthetic construct; identical to SEQ ID NO: 22374
  source 1..80: mol_type = other DNA

SEQ ID NO: 57228 - DNA, 80 bp, synthetic construct; identical to SEQ ID NO: 22375
  source 1..80: mol_type = other DNA

SEQ ID NO: 57229 - DNA, 80 bp, synthetic construct; identical to SEQ ID NO: 9507
  source 1..80: mol_type = other DNA

SEQ ID NO: 57230 - DNA, 80 bp, synthetic construct; identical to SEQ ID NO: 22377
  source 1..80: mol_type = other DNA

SEQ ID NO: 57231 - DNA, 80 bp, synthetic construct; identical to SEQ ID NO: 22378
  source 1..80: mol_type = other DNA

SEQ ID NO: 57232 - DNA, 80 bp, synthetic construct; identical to SEQ ID NO: 22379
  source 1..80: mol_type = other DNA

SEQ ID NO: 57233 - DNA, 80 bp, synthetic construct; identical to SEQ ID NO: 9508
  source 1..80: mol_type = other DNA

SEQ ID NO: 57234 - DNA, 80 bp, synthetic construct; identical to SEQ ID NO: 22381
  source 1..80: mol_type = other DNA

SEQ ID NO: 57235 - DNA, 80 bp, synthetic construct; identical to SEQ ID NO: 22382
  source 1..80: mol_type = other DNA

SEQ ID NO: 57236 - DNA, 80 bp, synthetic construct; identical to SEQ ID NO: 9509
  source 1..80: mol_type = other DNA

SEQ ID NO: 57237 - DNA, 80 bp, synthetic construct; identical to SEQ ID NO: 22384
  source 1..80: mol_type = other DNA

SEQ ID NO: 57238 - DNA, 80 bp, synthetic construct; identical to SEQ ID NO: 22385
  source 1..80: mol_type = other DNA

SEQ ID NO: 57239 - DNA, 80 bp, synthetic construct; identical to SEQ ID NO: 22386
  source 1..80: mol_type = other DNA

SEQ ID NO: 57240 - DNA, 80 bp, synthetic construct; identical to SEQ ID NO: 22387
  source 1..80: mol_type = other DNA

SEQ ID NO: 57241 - DNA, 80 bp, synthetic construct; identical to SEQ ID NO: 9510
  source 1..80: mol_type = other DNA

SEQ ID NO: 57242 - DNA, 80 bp, synthetic construct; identical to SEQ ID NO: 22389
  source 1..80: mol_type = other DNA

SEQ ID NO: 57243 - DNA, 80 bp, synthetic construct; identical to SEQ ID NO: 22390
  source 1..80: mol_type = other DNA

SEQ ID NO: 57244 - DNA, 80 bp, synthetic construct; identical to SEQ ID NO: 9511
  source 1..80: mol_type = other DNA

SEQ ID NO: 57245 - DNA, 80 bp, synthetic construct; identical to SEQ ID NO: 22392
  source 1..80: mol_type = other DNA

SEQ ID NO: 57246 - DNA, 80 bp, synthetic construct; identical to SEQ ID NO: 22393
  source 1..80: mol_type = other DNA

SEQ ID NO: 57247 - DNA, 80 bp, synthetic construct; identical to SEQ ID NO: 22394
  source 1..80: mol_type = other DNA

SEQ ID NO: 57248 - DNA, 80 bp, synthetic construct; identical to SEQ ID NO: 9512
  source 1..80: mol_type = other DNA

SEQ ID NO: 57249 - DNA, 80 bp, synthetic construct; identical to SEQ ID NO: 22396
  source 1..80: mol_type = other DNA

SEQ ID NO: 57250 - DNA, 80 bp, synthetic construct; identical to SEQ ID NO: 22397
  source 1..80: mol_type = other DNA

SEQ ID NO: 57251 - DNA, 80 bp, synthetic construct; identical to SEQ ID NO: 22398
  source 1..80: mol_type = other DNA

SEQ ID NO: 57252 - DNA, 80 bp, synthetic construct; identical to SEQ ID NO: 22399
  source 1..80: mol_type = other DNA

SEQ ID NO: 57253 - DNA, 80 bp, synthetic construct; identical to SEQ ID NO: 9513
  source 1..80: mol_type = other DNA

SEQ ID NO: 57254 - DNA, 80 bp, synthetic construct; identical to SEQ ID NO: 22401
  source 1..80: mol_type = other DNA

SEQ ID NO: 57255 - DNA, 80 bp, synthetic construct; identical to SEQ ID NO: 9514
  source 1..80: mol_type = other DNA

SEQ ID NO: 57256 - DNA, 80 bp, synthetic construct; identical to SEQ ID NO: 22404
  source 1..80: mol_type = other DNA

SEQ ID NO: 57257 - DNA, 80 bp, synthetic construct; identical to SEQ ID NO: 22405
  source 1..80: mol_type = other DNA

SEQ ID NO: 57258 - DNA, 80 bp, synthetic construct; identical to SEQ ID NO: 22406
  source 1..80: mol_type = other DNA

SEQ ID NO: 57259 - DNA, 80 bp, synthetic construct; identical to SEQ ID NO: 9515
  source 1..80: mol_type = other DNA

SEQ ID NO: 57260 - DNA, 80 bp, synthetic construct; identical to SEQ ID NO: 22408
  source 1..80: mol_type = other DNA

SEQ ID NO: 57261 - DNA, 80 bp, synthetic construct; identical to SEQ ID NO: 22409
  source 1..80: mol_type = other DNA

SEQ ID NO: 57262 - DNA, 80 bp, synthetic construct; identical to SEQ ID NO: 22410
  source 1..80: mol_type = other DNA

SEQ ID NO: 57263 - DNA, 80 bp, synthetic construct; identical to SEQ ID NO: 22411
  source 1..80: mol_type = other DNA

SEQ ID NO: 57264 - DNA, 80 bp, synthetic construct; identical to SEQ ID NO: 9516
  source 1..80: mol_type = other DNA

SEQ ID NO: 57265 - DNA, 80 bp, synthetic construct; identical to SEQ ID NO: 22413
  source 1..80: mol_type = other DNA

SEQ ID NO: 57266 - DNA, 80 bp, synthetic construct; identical to SEQ ID NO: 22414
  source 1..80: mol_type = other DNA

SEQ ID NO: 57267 - DNA, 80 bp, synthetic construct; identical to SEQ ID NO: 22415
  source 1..80: mol_type = other DNA

SEQ ID NO: 57268 - DNA, 80 bp, synthetic construct; identical to SEQ ID NO: 9517
  source 1..80: mol_type = other DNA

SEQ ID NO: 57269 - DNA, 80 bp, synthetic construct; identical to SEQ ID NO: 22417
  source 1..80: mol_type = other DNA

SEQ ID NO: 57270 - DNA, 80 bp, synthetic construct; identical to SEQ ID NO: 22418
  source 1..80: mol_type = other DNA

SEQ ID NO: 57271 - DNA, 80 bp, synthetic construct; identical to SEQ ID NO: 22419
  source 1..80: mol_type = other DNA

SEQ ID NO: 57272 - DNA, 80 bp, synthetic construct; identical to SEQ ID NO: 9518
  source 1..80: mol_type = other DNA

SEQ ID NO: 57273 - DNA, 80 bp, synthetic construct; identical to SEQ ID NO: 22421
  source 1..80: mol_type = other DNA

SEQ ID NO: 57274 - DNA, 80 bp, synthetic construct; identical to SEQ ID NO: 22422
  source 1..80: mol_type = other DNA

SEQ ID NO: 57275 - DNA, 80 bp, synthetic construct; identical to SEQ ID NO: 9519
  source 1..80: mol_type = other DNA

SEQ ID NO: 57276 - DNA, 80 bp, synthetic construct; identical to SEQ ID NO: 22425
  source 1..80: mol_type = other DNA

SEQ ID NO: 57277 - DNA, 80 bp, synthetic construct; identical to SEQ ID NO: 22426
  source 1..80: mol_type = other DNA

SEQ ID NO: 57278 - DNA, 80 bp, synthetic construct; identical to SEQ ID NO: 9520
  source 1..80: mol_type = other DNA

SEQ ID NO: 57279 - DNA, 80 bp, synthetic construct; identical to SEQ ID NO: 22428
  source 1..80: mol_type = other DNA

SEQ ID NO: 57280 - DNA, 80 bp, synthetic construct; identical to SEQ ID NO: 22429
  source 1..80: mol_type = other DNA

SEQ ID NO: 57281 - DNA, 80 bp, synthetic construct; identical to SEQ ID NO: 22430
  source 1..80: mol_type = other DNA

SEQ ID NO: 57282 - DNA, 80 bp, synthetic construct; identical to SEQ ID NO: 22431
  source 1..80: mol_type = other DNA

SEQ ID NO: 57283 - DNA, 80 bp, synthetic construct; identical to SEQ ID NO: 9521
  source 1..80: mol_type = other DNA

SEQ ID NO: 57284 - DNA, 80 bp, synthetic construct; identical to SEQ ID NO: 22433
  source 1..80: mol_type = other DNA

SEQ ID NO: 57285 - DNA, 80 bp, synthetic construct; identical to SEQ ID NO: 22434
  source 1..80: mol_type = other DNA

SEQ ID NO: 57286 - DNA, 80 bp, synthetic construct; identical to SEQ ID NO: 22435
  source 1..80: mol_type = other DNA

SEQ ID NO: 57287 - DNA, 80 bp, synthetic construct; identical to SEQ ID NO: 9522
  source 1..80: mol_type = other DNA

SEQ ID NO: 57288 - DNA, 80 bp, synthetic construct; identical to SEQ ID NO: 22437
  source 1..80: mol_type = other DNA

SEQ ID NO: 57289 - DNA, 80 bp, synthetic construct; identical to SEQ ID NO: 22438
  source 1..80: mol_type = other DNA

SEQ ID NO: 57290 - DNA, 80 bp, synthetic construct; identical to SEQ ID NO: 9523
  source 1..80: mol_type = other DNA

SEQ ID NO: 57291 - DNA, 80 bp, synthetic construct; identical to SEQ ID NO: 22441
  source 1..80: mol_type = other DNA

SEQ ID NO: 57292 - DNA, 80 bp, synthetic construct; identical to SEQ ID NO: 22442
  source 1..80: mol_type = other DNA

SEQ ID NO: 57293 - DNA, 80 bp, synthetic construct; identical to SEQ ID NO: 9524
  source 1..80: mol_type = other DNA

SEQ ID NO: 57294 - DNA, 80 bp, synthetic construct; identical to SEQ ID NO: 22444
  source 1..80: mol_type = other DNA

SEQ ID NO: 57295 - DNA, 80 bp, synthetic construct; identical to SEQ ID NO: 22445
  source 1..80: mol_type = other DNA

SEQ ID NO: 57296 - DNA, 80 bp, synthetic construct; identical to SEQ ID NO: 22446
  source 1..80: mol_type = other DNA

SEQ ID NO: 57297 - DNA, 80 bp, synthetic construct; identical to SEQ ID NO: 22447
  source 1..80: mol_type = other DNA

SEQ ID NO: 57298 - DNA, 80 bp, synthetic construct; identical to SEQ ID NO: 9525
  source 1..80: mol_type = other DNA

SEQ ID NO: 57299 - DNA, 80 bp, synthetic construct; identical to SEQ ID NO: 22449
  source 1..80: mol_type = other DNA

SEQ ID NO: 57300 - DNA, 80 bp, synthetic construct; identical to SEQ ID NO: 22450
  source 1..80: mol_type = other DNA

SEQ ID NO: 57301 - DNA, 80 bp, synthetic construct; identical to SEQ ID NO: 22451
  source 1..80: mol_type = other DNA

SEQ ID NO: 57302 - DNA, 80 bp, synthetic construct; identical to SEQ ID NO: 9526
  source 1..80: mol_type = other DNA

SEQ ID NO: 57303 - DNA, 80 bp, synthetic construct; identical to SEQ ID NO: 22453
  source 1..80: mol_type = other DNA

SEQ ID NO: 57304 - DNA, 80 bp, synthetic construct; identical to SEQ ID NO: 22454
  source 1..80: mol_type = other DNA

SEQ ID NO: 57305 - DNA, 80 bp, synthetic construct; identical to SEQ ID NO: 22455
  source 1..80: mol_type = other DNA

SEQ ID NO: 57306 - DNA, 80 bp, synthetic construct; identical to SEQ ID NO: 9527
  source 1..80: mol_type = other DNA

SEQ ID NO: 57307 - DNA, 80 bp, synthetic construct; identical to SEQ ID NO: 22457
  source 1..80: mol_type = other DNA

SEQ ID NO: 57308 - DNA, 80 bp, synthetic construct; identical to SEQ ID NO: 22458
  source 1..80: mol_type = other DNA

SEQ ID NO: 57309 - DNA, 80 bp, synthetic construct; identical to SEQ ID NO: 22459
  source 1..80: mol_type = other DNA

SEQ ID NO: 57310 - DNA, 80 bp, synthetic construct; identical to SEQ ID NO: 9528
  source 1..80: mol_type = other DNA

SEQ ID NO: 57311 - DNA, 80 bp, synthetic construct; identical to SEQ ID NO: 22461
  source 1..80: mol_type = other DNA

SEQ ID NO: 57312 - DNA, 80 bp, synthetic construct; identical to SEQ ID NO: 22462
  source 1..80: mol_type = other DNA

SEQ ID NO: 57313 - DNA, 80 bp, synthetic construct; identical to SEQ ID NO: 22463
  source 1..80: mol_type = other DNA

SEQ ID NO: 57314 - DNA, 80 bp, synthetic construct; identical to SEQ ID NO: 9529
  source 1..80: mol_type = other DNA

SEQ ID NO: 57315 - DNA, 80 bp, synthetic construct; identical to SEQ ID NO: 22465
  source 1..80: mol_type = other DNA

SEQ ID NO: 57316 - DNA, 80 bp, synthetic construct; identical to SEQ ID NO: 22466
  source 1..80: mol_type = other DNA

SEQ ID NO: 57317 - DNA, 80 bp, synthetic construct; identical to SEQ ID NO: 22467
  source 1..80: mol_type = other DNA

SEQ ID NO: 57318 - DNA, 80 bp, synthetic construct; identical to SEQ ID NO: 9530
  source 1..80: mol_type = other DNA

SEQ ID NO: 57319 - DNA, 80 bp, synthetic construct; identical to SEQ ID NO: 22469
  source 1..80: mol_type = other DNA

SEQ ID NO: 57320 - DNA, 80 bp, synthetic construct; identical to SEQ ID NO: 22470
  source 1..80: mol_type = other DNA

SEQ ID NO: 57321 - DNA, 80 bp, synthetic construct; identical to SEQ ID NO: 22471
  source 1..80: mol_type = other DNA

SEQ ID NO: 57322 - DNA, 80 bp, synthetic construct; identical to SEQ ID NO: 9531
  source 1..80: mol_type = other DNA

SEQ ID NO: 57323 - DNA, 80 bp, synthetic construct; identical to SEQ ID NO: 22473
  source 1..80: mol_type = other DNA

SEQ ID NO: 57324 - DNA, 80 bp, synthetic construct; identical to SEQ ID NO: 22474
  source 1..80: mol_type = other DNA

SEQ ID NO: 57325 - DNA, 80 bp, synthetic construct; identical to SEQ ID NO: 9532
  source 1..80: mol_type = other DNA

SEQ ID NO: 57326 - DNA, 80 bp, synthetic construct; identical to SEQ ID NO: 22476
  source 1..80: mol_type = other DNA

SEQ ID NO: 57327 - DNA, 80 bp, synthetic construct; identical to SEQ ID NO: 22477
  source 1..80: mol_type = other DNA

SEQ ID NO: 57328 - DNA, 80 bp, synthetic construct; identical to SEQ ID NO: 22478
  source 1..80: mol_type = other DNA

SEQ ID NO: 57329 - DNA, 80 bp, synthetic construct; identical to SEQ ID NO: 9533
  source 1..80: mol_type = other DNA

SEQ ID NO: 57330 - DNA, 80 bp, synthetic construct; identical to SEQ ID NO: 22480
  source 1..80: mol_type = other DNA

SEQ ID NO: 57331 - DNA, 80 bp, synthetic construct; identical to SEQ ID NO: 22481
  source 1..80: mol_type = other DNA

SEQ ID NO: 57332 - DNA, 80 bp, synthetic construct; identical to SEQ ID NO: 22482
  source 1..80: mol_type = other DNA

SEQ ID NO: 57333 - DNA, 80 bp, synthetic construct; identical to SEQ ID NO: 9534
  source 1..80: mol_type = other DNA

SEQ ID NO: 57334 - DNA, 80 bp, synthetic construct; identical to SEQ ID NO: 22484
  source 1..80: mol_type = other DNA

SEQ ID NO: 57335 - DNA, 80 bp, synthetic construct; identical to SEQ ID NO: 22485
  source 1..80: mol_type = other DNA

SEQ ID NO: 57336 - DNA, 80 bp, synthetic construct; identical to SEQ ID NO: 22486
  source 1..80: mol_type = other DNA

SEQ ID NO: 57337 - DNA, 80 bp, synthetic construct; identical to SEQ ID NO: 22487
  source 1..80: mol_type = other DNA

SEQ ID NO: 57338 - DNA, 80 bp, synthetic construct; identical to SEQ ID NO: 9535
  source 1..80: mol_type = other DNA

SEQ ID NO: 57339 - DNA, 80 bp, synthetic construct; identical to SEQ ID NO: 22489
  source 1..80: mol_type = other DNA

SEQ ID NO: 57340 - DNA, 80 bp, synthetic construct; identical to SEQ ID NO: 22490
  source 1..80: mol_type = other DNA

SEQ ID NO: 57341 - DNA, 80 bp, synthetic construct; identical to SEQ ID NO: 22491
  source 1..80: mol_type = other DNA

SEQ ID NO: 57342 - DNA, 80 bp, synthetic construct; identical to SEQ ID NO: 9536
  source 1..80: mol_type = other DNA

SEQ ID NO: 57343 - DNA, 80 bp, synthetic construct; identical to SEQ ID NO: 22493
  source 1..80: mol_type = other DNA

SEQ ID NO: 57344 - DNA, 80 bp, synthetic construct; identical to SEQ ID NO: 22494
  source 1..80: mol_type = other DNA

SEQ ID NO: 57345 - DNA, 80 bp, synthetic construct; identical to SEQ ID NO: 22495
  source 1..80: mol_type = other DNA

SEQ ID NO: 57346 - DNA, 80 bp, synthetic construct; identical to SEQ ID NO: 9537
  source 1..80: mol_type = other DNA

SEQ ID NO: 57347 - DNA, 80 bp, synthetic construct; identical to SEQ ID NO: 22498
  source 1..80: mol_type = other DNA

SEQ ID NO: 57348 - DNA, 80 bp, synthetic construct; identical to SEQ ID NO: 22499
  source 1..80: mol_type = other DNA

SEQ ID NO: 57349 - DNA, 80 bp, synthetic construct; identical to SEQ ID NO: 9538
  source 1..80: mol_type = other DNA

SEQ ID NO: 57350 - DNA, 80 bp, synthetic construct; identical to SEQ ID NO: 22501
  source 1..80: mol_type = other DNA

SEQ ID NO: 57351 - DNA, 80 bp, synthetic construct; identical to SEQ ID NO: 22502
  source 1..80: mol_type = other DNA

SEQ ID NO: 57352 - DNA, 80 bp, synthetic construct; identical to SEQ ID NO: 9539
  source 1..80: mol_type = other DNA

SEQ ID NO: 57353 - DNA, 80 bp, synthetic construct; identical to SEQ ID NO: 22504
  source 1..80: mol_type = other DNA

SEQ ID NO: 57354 - DNA, 80 bp, synthetic construct; identical to SEQ ID NO: 22505
  source 1..80: mol_type = other DNA

SEQ ID NO: 57355 - DNA, 80 bp, synthetic construct; identical to SEQ ID NO: 22506
  source 1..80: mol_type = other DNA

SEQ ID NO: 57356 - DNA, 80 bp, synthetic construct; identical to SEQ ID NO: 22507
  source 1..80: mol_type = other DNA

SEQ ID NO: 57357 - DNA, 80 bp, synthetic construct; identical to SEQ ID NO: 9540
  source 1..80: mol_type = other DNA

SEQ ID NO: 57358 - DNA, 80 bp, synthetic construct; identical to SEQ ID NO: 22509
  source 1..80: mol_type = other DNA

SEQ ID NO: 57359 - DNA, 80 bp, synthetic construct; identical to SEQ ID NO: 22510
  source 1..80: mol_type = other DNA

SEQ ID NO: 57360 - DNA, 80 bp, synthetic construct; identical to SEQ ID NO: 22511
  source 1..80: mol_type = other DNA

SEQ ID NO: 57361 - DNA, 80 bp, synthetic construct; identical to SEQ ID NO: 9541
  source 1..80: mol_type = other DNA

SEQ ID NO: 57362 - DNA, 80 bp, synthetic construct; identical to SEQ ID NO: 22513
  source 1..80: mol_type = other DNA

SEQ ID NO: 57363 - DNA, 80 bp, synthetic construct; identical to SEQ ID NO: 22514
  source 1..80: mol_type = other DNA

SEQ ID NO: 57364 - DNA, 80 bp, synthetic construct; identical to SEQ ID NO: 9542
  source 1..80: mol_type = other DNA

SEQ ID NO: 57365 - DNA, 80 bp, synthetic construct; identical to SEQ ID NO: 22516
  source 1..80: mol_type = other DNA

SEQ ID NO: 57366 - DNA, 80 bp, synthetic construct; identical to SEQ ID NO: 22517
  source 1..80: mol_type = other DNA

SEQ ID NO: 57367 - DNA, 80 bp, synthetic construct; identical to SEQ ID NO: 22518
  source 1..80: mol_type = other DNA

SEQ ID NO: 57368 - DNA, 80 bp, synthetic construct; identical to SEQ ID NO: 9543
  source 1..80: mol_type = other DNA

SEQ ID NO: 57369 - DNA, 80 bp, synthetic construct; identical to SEQ ID NO: 22520
  source 1..80: mol_type = other DNA

SEQ ID NO: 57370 - DNA, 80 bp, synthetic construct; identical to SEQ ID NO: 22521
  source 1..80: mol_type = other DNA

SEQ ID NO: 57371 - DNA, 80 bp, synthetic construct; identical to SEQ ID NO: 22523
  source 1..80: mol_type = other DNA

SEQ ID NO: 57372 - DNA, 80 bp, synthetic construct; identical to SEQ ID NO: 9544
  source 1..80: mol_type = other DNA

SEQ ID NO: 57373 - DNA, 80 bp, synthetic construct; identical to SEQ ID NO: 22525
  source 1..80: mol_type = other DNA

SEQ ID NO: 57374 - DNA, 80 bp, synthetic construct; identical to SEQ ID NO: 22526
  source 1..80: mol_type = other DNA

SEQ ID NO: 57375 - DNA, 80 bp, synthetic construct; identical to SEQ ID NO: 9545
  source 1..80: mol_type = other DNA

SEQ ID NO: 57376 - DNA, 80 bp, synthetic construct; identical to SEQ ID NO: 22528
  source 1..80: mol_type = other DNA

SEQ ID NO: 57377 - DNA, 80 bp, synthetic construct; identical to SEQ ID NO: 22529
  source 1..80: mol_type = other DNA

SEQ ID NO: 57378 - DNA, 80 bp, synthetic construct; identical to SEQ ID NO: 22530
  source 1..80: mol_type = other DNA

SEQ ID NO: 57379 - DNA, 80 bp, synthetic construct; identical to SEQ ID NO: 22531
  source 1..80: mol_type = other DNA

SEQ ID NO: 57380 - DNA, 80 bp, synthetic construct; identical to SEQ ID NO: 9546
  source 1..80: mol_type = other DNA

SEQ ID NO: 57381 - DNA, 80 bp, synthetic construct; identical to SEQ ID NO: 22533
  source 1..80: mol_type = other DNA

SEQ ID NO: 57382 - DNA, 80 bp, synthetic construct; identical to SEQ ID NO: 22534
  source 1..80: mol_type = other DNA

SEQ ID NO: 57383 - DNA, 80 bp, synthetic construct; identical to SEQ ID NO: 22535
  source 1..80: mol_type = other DNA

SEQ ID NO: 57384 - DNA, 80 bp, synthetic construct; identical to SEQ ID NO: 9547
  source 1..80: mol_type = other DNA

SEQ ID NO: 57385 - DNA, 80 bp, synthetic construct; identical to SEQ ID NO: 22537
  source 1..80: mol_type = other DNA

SEQ ID NO: 57386 - DNA, 80 bp, synthetic construct; identical to SEQ ID NO: 22538
  source 1..80: mol_type = other DNA

SEQ ID NO: 57387 - DNA, 80 bp, synthetic construct; identical to SEQ ID NO: 9548
  source 1..80: mol_type = other DNA

SEQ ID NO: 57388 - DNA, 80 bp, synthetic construct; identical to SEQ ID NO: 22540
  source 1..80: mol_type = other DNA

SEQ ID NO: 57389 - DNA, 80 bp, synthetic construct; identical to SEQ ID NO: 22541
  source 1..80: mol_type = other DNA

SEQ ID NO: 57390 - DNA, 80 bp, synthetic construct; identical to SEQ ID NO: 22542
  source 1..80: mol_type = other DNA

SEQ ID NO: 57391 - DNA, 80 bp, synthetic construct; identical to SEQ ID NO: 22543
  source 1..80: mol_type = other DNA

SEQ ID NO: 57392 - DNA, 80 bp, synthetic construct; identical to SEQ ID NO: 9549
  source 1..80: mol_type = other DNA

SEQ ID NO: 57393 - DNA, 80 bp, synthetic construct; identical to SEQ ID NO: 22545
  source 1..80: mol_type = other DNA

SEQ ID NO: 57394 - DNA, 80 bp, synthetic construct; identical to SEQ ID NO: 22546
  source 1..80: mol_type = other DNA

SEQ ID NO: 57395 - DNA, 80 bp, synthetic construct; identical to SEQ ID NO: 22547
  source 1..80: mol_type = other DNA

SEQ ID NO: 57396 - DNA, 80 bp, synthetic construct; identical to SEQ ID NO: 9550
  source 1..80: mol_type = other DNA

SEQ ID NO: 57397 - DNA, 80 bp, synthetic construct; identical to SEQ ID NO: 22549
  source 1..80: mol_type = other DNA

SEQ ID NO: 57398 - DNA, 80 bp, synthetic construct; identical to SEQ ID NO: 22550
  source 1..80: mol_type = other DNA

SEQ ID NO: 57399 - DNA, 80 bp, synthetic construct; identical to SEQ ID NO: 22551
  source 1..80: mol_type = other DNA

SEQ ID NO: 57400 - DNA, 80 bp, synthetic construct; identical to SEQ ID NO: 9551
  source 1..80: mol_type = other DNA

SEQ ID NO: 57401 - DNA, 80 bp, synthetic construct; identical to SEQ ID NO: 22553
  source 1..80: mol_type = other DNA

SEQ ID NO: 57402 - DNA, 80 bp, synthetic construct; identical to SEQ ID NO: 22554
  source 1..80: mol_type = other DNA

SEQ ID NO: 57403 - DNA, 80 bp, synthetic construct; identical to SEQ ID NO: 22555
  source 1..80: mol_type = other DNA

SEQ ID NO: 57404 - DNA, 80 bp, synthetic construct; identical to SEQ ID NO: 9552
  source 1..80: mol_type = other DNA

SEQ ID NO: 57405 - DNA, 80 bp, synthetic construct; identical to SEQ ID NO: 22557
  source 1..80: mol_type = other DNA

SEQ ID NO: 57406 - DNA, 80 bp, synthetic construct; identical to SEQ ID NO: 22558
  source 1..80: mol_type = other DNA

SEQ ID NO: 57407 - DNA, 80 bp, synthetic construct; identical to SEQ ID NO: 22559
  source 1..80: mol_type = other DNA

SEQ ID NO: 57408 - DNA, 80 bp, synthetic construct; identical to SEQ ID NO: 22560
  source 1..80: mol_type = other DNA

SEQ ID NO: 57409 - DNA, 80 bp, synthetic construct; identical to SEQ ID NO: 9553
  source 1..80: mol_type = other DNA

SEQ ID NO: 57410 - DNA, 80 bp, synthetic construct; identical to SEQ ID NO: 22562
  source 1..80: mol_type = other DNA

SEQ ID NO: 57411 - DNA, 80 bp, synthetic construct; identical to SEQ ID NO: 22563
  source 1..80: mol_type = other DNA

SEQ ID NO: 57412 - DNA, 80 bp, synthetic construct; identical to SEQ ID NO: 9554
  source 1..80: mol_type = other DNA

SEQ ID NO: 57413 - DNA, 80 bp, synthetic construct; identical to SEQ ID NO: 22565
  source 1..80: mol_type = other DNA

SEQ ID NO: 57414 - DNA, 80 bp, synthetic construct; identical to SEQ ID NO: 22566
  source 1..80: mol_type = other DNA

SEQ ID NO: 57415 - DNA, 80 bp, synthetic construct; identical to SEQ ID NO: 22567
  source 1..80: mol_type = other DNA

SEQ ID NO: 57416 - DNA, 80 bp, synthetic construct; identical to SEQ ID NO: 9555
  source 1..80: mol_type = other DNA

SEQ ID NO: 57417 - DNA, 80 bp, synthetic construct; identical to SEQ ID NO: 22569
  source 1..80: mol_type = other DNA

SEQ ID NO: 57418 - DNA, 80 bp, synthetic construct; identical to SEQ ID NO: 22570
  source 1..80: mol_type = other DNA

SEQ ID NO: 57419 - DNA, 80 bp, synthetic construct; identical to SEQ ID NO: 9556
  source 1..80: mol_type = other DNA

SEQ ID NO: 57420 - DNA, 80 bp, synthetic construct; identical to SEQ ID NO: 22573
  source 1..80: mol_type = other DNA

SEQ ID NO: 57421 - DNA, 80 bp, synthetic construct; identical to SEQ ID NO: 22575
  source 1..80: mol_type = other DNA

SEQ ID NO: 57422 - DNA, 80 bp, synthetic construct; identical to SEQ ID NO: 9557
  source 1..80: mol_type = other DNA

SEQ ID NO: 57423 - DNA, 80 bp, synthetic construct; identical to SEQ ID NO: 22577
  source 1..80: mol_type = other DNA

SEQ ID NO: 57424 - DNA, 80 bp, synthetic construct; identical to SEQ ID NO: 22578
  source 1..80: mol_type = other DNA

SEQ ID NO: 57425 - DNA, 80 bp, synthetic construct; identical to SEQ ID NO: 22579
  source 1..80: mol_type = other DNA

SEQ ID NO: 57426 - DNA, 80 bp, synthetic construct; identical to SEQ ID NO: 22580
  source 1..80: mol_type = other DNA

SEQ ID NO: 57427 - DNA, 80 bp, synthetic construct; identical to SEQ ID NO: 9558
  source 1..80: mol_type = other DNA

SEQ ID NO: 57428 - DNA, 80 bp, synthetic construct; identical to SEQ ID NO: 22582
  source 1..80: mol_type = other DNA

SEQ ID NO: 57429 - DNA, 80 bp, synthetic construct; identical to SEQ ID NO: 22583
  source 1..80: mol_type = other DNA

SEQ ID NO: 57430 - DNA, 80 bp, synthetic construct; identical to SEQ ID NO: 22584
  source 1..80: mol_type = other DNA

SEQ ID NO: 57431 - DNA, 80 bp, synthetic construct; identical to SEQ ID NO: 9559
  source 1..80: mol_type = other DNA

SEQ ID NO: 57432 - DNA, 80 bp, synthetic construct; identical to SEQ ID NO: 22586
  source 1..80: mol_type = other DNA

SEQ ID NO: 57433 - DNA, 80 bp, synthetic construct; identical to SEQ ID NO: 22587
  source 1..80: mol_type = other DNA

SEQ ID NO: 57434 - DNA, 80 bp, synthetic construct; identical to SEQ ID NO: 9560
  source 1..80: mol_type = other DNA

SEQ ID NO: 57435 - DNA, 80 bp, synthetic construct; identical to SEQ ID NO: 22589
  source 1..80: mol_type = other DNA

SEQ ID NO: 57436 - DNA, 80 bp, synthetic construct; identical to SEQ ID NO: 22590
  source 1..80: mol_type = other DNA

SEQ ID NO: 57437 - DNA, 80 bp, synthetic construct; identical to SEQ ID NO: 22591
  source 1..80: mol_type = other DNA

SEQ ID NO: 57438 - DNA, 80 bp, synthetic construct; identical to SEQ ID NO: 9561
  source 1..80: mol_type = other DNA

SEQ ID NO: 57439 - DNA, 80 bp, synthetic construct; identical to SEQ ID NO: 22593
  source 1..80: mol_type = other DNA

SEQ ID NO: 57440 - DNA, 80 bp, synthetic construct; identical to SEQ ID NO: 22594
  source 1..80: mol_type = other DNA

SEQ ID NO: 57441 - DNA, 80 bp, synthetic construct; identical to SEQ ID NO: 22595
  source 1..80: mol_type = other DNA

SEQ ID NO: 57442 - DNA, 80 bp, synthetic construct; identical to SEQ ID NO: 9562
  source 1..80: mol_type = other DNA

SEQ ID NO: 57443 - DNA, 80 bp, synthetic construct; identical to SEQ ID NO: 22597
  source 1..80: mol_type = other DNA

SEQ ID NO: 57444 - DNA, 80 bp, synthetic construct; identical to SEQ ID NO: 22598
  source 1..80: mol_type = other DNA

SEQ ID NO: 57445 - DNA, 80 bp, synthetic construct; identical to SEQ ID NO: 22599
  source 1..80: mol_type = other DNA

SEQ ID NO: 57446 - DNA, 80 bp, synthetic construct; identical to SEQ ID NO: 22600
  source 1..80: mol_type = other DNA

SEQ ID NO: 57447 - DNA, 80 bp, synthetic construct; identical to SEQ ID NO: 9563
  source 1..80: mol_type = other DNA

SEQ ID NO: 57448 - DNA, 80 bp, synthetic construct; identical to SEQ ID NO: 22602
  source 1..80: mol_type = other DNA

SEQ ID NO: 57449 - DNA, 80 bp, synthetic construct; identical to SEQ ID NO: 22603
  source 1..80: mol_type = other DNA

SEQ ID NO: 57450 - DNA, 80 bp, synthetic construct; identical to SEQ ID NO: 9564
  source 1..80: mol_type = other DNA

SEQ ID NO: 57451 - DNA, 80 bp, synthetic construct; identical to SEQ ID NO: 22605
  source 1..80: mol_type = other DNA

SEQ ID NO: 57452 - DNA, 80 bp, synthetic construct; identical to SEQ ID NO: 22606
  source 1..80: mol_type = other DNA

SEQ ID NO: 57453 - DNA, 80 bp, synthetic construct; identical to SEQ ID NO: 22607
  source 1..80: mol_type = other DNA

SEQ ID NO: 57454 - DNA, 80 bp, synthetic construct; identical to SEQ ID NO: 22608
  source 1..80: mol_type = other DNA

SEQ ID NO: 57455 - DNA, 80 bp, synthetic construct; identical to SEQ ID NO: 9565
  source 1..80: mol_type = other DNA

SEQ ID NO: 57456 - DNA, 80 bp, synthetic construct; identical to SEQ ID NO: 22610
  source 1..80: mol_type = other DNA

SEQ ID NO: 57457 - DNA, 80 bp, synthetic construct; identical to SEQ ID NO: 22611
  source 1..80: mol_type = other DNA

SEQ ID NO: 57458 - DNA, 80 bp, synthetic construct; identical to SEQ ID NO: 9566
  source 1..80: mol_type = other DNA

SEQ ID NO: 57459 - DNA, 80 bp, synthetic construct; identical to SEQ ID NO: 22613
  source 1..80: mol_type = other DNA

SEQ ID NO: 57460 - DNA, 80 bp, synthetic construct; identical to SEQ ID NO: 22614
  source 1..80: mol_type = other DNA

SEQ ID NO: 57461 - DNA, 80 bp, synthetic construct; identical to SEQ ID NO: 22615
  source 1..80: mol_type = other DNA

SEQ ID NO: 57462 - DNA, 80 bp, synthetic construct; identical to SEQ ID NO: 22616
  source 1..80: mol_type = other DNA

SEQ ID NO: 57463 - DNA, 80 bp, synthetic construct; identical to SEQ ID NO: 9567
  source 1..80: mol_type = other DNA

SEQ ID NO: 57464 - DNA, 80 bp, synthetic construct; identical to SEQ ID NO: 22618
  source 1..80: mol_type = other DNA

SEQ ID NO: 57465 - DNA, 80 bp, synthetic construct; identical to SEQ ID NO: 22619
  source 1..80: mol_type = other DNA

SEQ ID NO: 57466 - DNA, 80 bp, synthetic construct; identical to SEQ ID NO: 9568
  source 1..80: mol_type = other DNA

SEQ ID NO: 57467 - DNA, 80 bp, synthetic construct; identical to SEQ ID NO: 22621
  source 1..80: mol_type = other DNA

SEQ ID NO: 57468 - DNA, 80 bp, synthetic construct; identical to SEQ ID NO: 22622
  source 1..80: mol_type = other DNA

SEQ ID NO: 57469 - DNA, 80 bp, synthetic construct; identical to SEQ ID NO: 22623
  source 1..80: mol_type = other DNA

SEQ ID NO: 57470 - DNA, 80 bp, synthetic construct; identical to SEQ ID NO: 9569
  source 1..80: mol_type = other DNA

SEQ ID NO: 57471 - DNA, 80 bp, synthetic construct; identical to SEQ ID NO: 22625
  source 1..80: mol_type = other DNA

SEQ ID NO: 57472 - DNA, 80 bp, synthetic construct; identical to SEQ ID NO: 22626
  source 1..80: mol_type = other DNA

SEQ ID NO: 57473 - DNA, 80 bp, synthetic construct; identical to SEQ ID NO: 22627
  source 1..80: mol_type = other DNA

SEQ ID NO: 57474 - DNA, 80 bp, synthetic construct; identical to SEQ ID NO: 22628
  source 1..80: mol_type = other DNA

SEQ ID NO: 57475 - DNA, 80 bp, synthetic construct; identical to SEQ ID NO: 9570
  source 1..80: mol_type = other DNA

SEQ ID NO: 57476 - DNA, 80 bp, synthetic construct; identical to SEQ ID NO: 22630
  source 1..80: mol_type = other DNA

SEQ ID NO: 57477 - DNA, 80 bp, synthetic construct; identical to SEQ ID NO: 22631
  source 1..80: mol_type = other DNA

SEQ ID NO: 57478 - DNA, 80 bp, synthetic construct; identical to SEQ ID NO: 22632
  source 1..80: mol_type = other DNA

SEQ ID NO: 57479 - DNA, 80 bp, synthetic construct; identical to SEQ ID NO: 9571
  source 1..80: mol_type = other DNA

SEQ ID NO: 57480 - DNA, 80 bp, synthetic construct; identical to SEQ ID NO: 22634
  source 1..80: mol_type = other DNA

SEQ ID NO: 57481 - DNA, 80 bp, synthetic construct; identical to SEQ ID NO: 22635
  source 1..80: mol_type = other DNA

SEQ ID NO: 57482 - DNA, 80 bp, synthetic construct; identical to SEQ ID NO: 22636
  source 1..80: mol_type = other DNA

SEQ ID NO: 57483 - DNA, 80 bp, synthetic construct; identical to SEQ ID NO: 9572
  source 1..80: mol_type = other DNA

SEQ ID NO: 57484 - DNA, 80 bp, synthetic construct; identical to SEQ ID NO: 22638
  source 1..80: mol_type = other DNA

SEQ ID NO: 57485 - DNA, 80 bp, synthetic construct; identical to SEQ ID NO: 22639
  source 1..80: mol_type = other DNA

SEQ ID NO: 57486 - DNA, 80 bp, synthetic construct; identical to SEQ ID NO: 9573
  source 1..80: mol_type = other DNA

SEQ ID NO: 57487 - DNA, 80 bp, synthetic construct; identical to SEQ ID NO: 22641
  source 1..80: mol_type = other DNA

SEQ ID NO: 57488 - DNA, 80 bp, synthetic construct; identical to SEQ ID NO: 22642
  source 1..80: mol_type = other DNA

SEQ ID NO: 57489 - DNA, 80 bp, synthetic construct; identical to SEQ ID NO: 22643
  source 1..80: mol_type = other DNA

SEQ ID NO: 57490 - DNA, 80 bp, synthetic construct; identical to SEQ ID NO: 9574
  source 1..80: mol_type = other DNA

SEQ ID NO: 57491 - DNA, 80 bp, synthetic construct; identical to SEQ ID NO: 22645
  source 1..80: mol_type = other DNA

SEQ ID NO: 57492 - DNA, 80 bp, synthetic construct; identical to SEQ ID NO: 22646
  source 1..80: mol_type = other DNA

SEQ ID NO: 57493 - DNA, 80 bp, synthetic construct; identical to SEQ ID NO: 22647
  source 1..80: mol_type = other DNA

SEQ ID NO: 57494 - DNA, 80 bp, synthetic construct; identical to SEQ ID NO: 9575
  source 1..80: mol_type = other DNA

SEQ ID NO: 57495 - DNA, 80 bp, synthetic construct; identical to SEQ ID NO: 22649
  source 1..80: mol_type = other DNA

SEQ ID NO: 57496 - DNA, 80 bp, synthetic construct; identical to SEQ ID NO: 22650
  source 1..80: mol_type = other DNA

SEQ ID NO: 57497 - DNA, 80 bp, synthetic construct; identical to SEQ ID NO: 22651
  source 1..80: mol_type = other DNA

SEQ ID NO: 57498 - DNA, 80 bp, synthetic construct; identical to SEQ ID NO: 9576
  source 1..80: mol_type = other DNA

SEQ ID NO: 57499 - DNA, 80 bp, synthetic construct; identical to SEQ ID NO: 22653
  source 1..80: mol_type = other DNA

SEQ ID NO: 57500 - DNA, 80 bp, synthetic construct; identical to SEQ ID NO: 22654
  source 1..80: mol_type = other DNA

SEQ ID NO: 57501 - DNA, 80 bp, synthetic construct; identical to SEQ ID NO: 22655
  source 1..80: mol_type = other DNA

SEQ ID NO: 57502 - DNA, 80 bp, synthetic construct; identical to SEQ ID NO: 9577
  source 1..80: mol_type = other DNA

SEQ ID NO: 57503 - DNA, 80 bp, synthetic construct; identical to SEQ ID NO: 22657
  source 1..80: mol_type = other DNA

SEQ ID NO: 57504 - DNA, 80 bp, synthetic construct; identical to SEQ ID NO: 22658
  source 1..80: mol_type = other DNA

SEQ ID NO: 57505 - DNA, 80 bp, synthetic construct; identical to SEQ ID NO: 22660
  source 1..80: mol_type = other DNA

SEQ ID NO: 57506 - DNA, 80 bp, synthetic construct; identical to SEQ ID NO: 9578
  source 1..80: mol_type = other DNA

SEQ ID NO: 57507 - DNA, 80 bp, synthetic construct; identical to SEQ ID NO: 22662
  source 1..80: mol_type = other DNA

SEQ ID NO: 57508 - DNA, 80 bp, synthetic construct; identical to SEQ ID NO: 22663
  source 1..80: mol_type = other DNA

SEQ ID NO: 57509 - DNA, 80 bp, synthetic construct; identical to SEQ ID NO: 22664
  source 1..80: mol_type = other DNA

SEQ ID NO: 57510 - DNA, 80 bp, synthetic construct; identical to SEQ ID NO: 9579
  source 1..80: mol_type = other DNA

SEQ ID NO: 57511 - DNA, 80 bp, synthetic construct; identical to SEQ ID NO: 22666
  source 1..80: mol_type = other DNA

SEQ ID NO: 57512 - DNA, 80 bp, synthetic construct; identical to SEQ ID NO: 22667
  source 1..80: mol_type = other DNA

SEQ ID NO: 57513 - DNA, 80 bp, synthetic construct; identical to SEQ ID NO: 9580
  source 1..80: mol_type = other DNA

SEQ ID NO: 57514 - DNA, 80 bp, synthetic construct; identical to SEQ ID NO: 22669
  source 1..80: mol_type = other DNA

SEQ ID NO: 57515 - DNA, 80 bp, synthetic construct; identical to SEQ ID NO: 22670
  source 1..80: mol_type = other DNA

SEQ ID NO: 57516 - DNA, 80 bp, synthetic construct; identical to SEQ ID NO: 22671
  source 1..80: mol_type = other DNA

SEQ ID NO: 57517 - DNA, 80 bp, synthetic construct; identical to SEQ ID NO: 9581
  source 1..80: mol_type = other DNA

SEQ ID NO: 57518 - DNA, 80 bp, synthetic construct; identical to SEQ ID NO: 22673
  source 1..80: mol_type = other DNA

SEQ ID NO: 57519 - DNA, 80 bp, synthetic construct; identical to SEQ ID NO: 22675
  source 1..80: mol_type = other DNA

SEQ ID NO: 57520 - DNA, 80 bp, synthetic construct; identical to SEQ ID NO: 9582
  source 1..80: mol_type = other DNA

SEQ ID NO: 57521 - DNA, 80 bp, synthetic construct; identical to SEQ ID NO: 22677
  source 1..80: mol_type = other DNA

SEQ ID NO: 57522 - DNA, 80 bp, synthetic construct; identical to SEQ ID NO: 22678
  source 1..80: mol_type = other DNA

SEQ ID NO: 57523 - DNA, 80 bp, synthetic construct; identical to SEQ ID NO: 22679
  source 1..80: mol_type = other DNA

SEQ ID NO: 57524 - DNA, 80 bp, synthetic construct; identical to SEQ ID NO: 9583
  source 1..80: mol_type = other DNA

SEQ ID NO: 57525 - DNA, 80 bp, synthetic construct; identical to SEQ ID NO: 22681
  source 1..80: mol_type = other DNA

SEQ ID NO: 57526 - DNA, 80 bp, synthetic construct; identical to SEQ ID NO: 22682
  source 1..80: mol_type = other DNA

SEQ ID NO: 57527 - DNA, 80 bp, synthetic construct; identical to SEQ ID NO: 22683
  source 1..80: mol_type = other DNA

SEQ ID NO: 57528 - DNA, 80 bp, synthetic construct; identical to SEQ ID NO: 22684
  source 1..80: mol_type = other DNA

SEQ ID NO: 57529 - DNA, 80 bp, synthetic construct; identical to SEQ ID NO: 9584
  source 1..80: mol_type = other DNA

SEQ ID NO: 57530 - DNA, 80 bp, synthetic construct; identical to SEQ ID NO: 22686
  source 1..80: mol_type = other DNA

SEQ ID NO: 57531 - DNA, 80 bp, synthetic construct; identical to SEQ ID NO: 22687
  source 1..80: mol_type = other DNA

SEQ ID NO: 57532 - DNA, 80 bp, synthetic construct; identical to SEQ ID NO: 22688
  source 1..80: mol_type = other DNA

SEQ ID NO: 57533 - DNA, 80 bp, synthetic construct; identical to SEQ ID NO: 9585
  source 1..80: mol_type = other DNA

SEQ ID NO: 57534 - DNA, 80 bp, synthetic construct; identical to SEQ ID NO: 22690
  source 1..80: mol_type = other DNA

SEQ ID NO: 57535 - DNA, 80 bp, synthetic construct; identical to SEQ ID NO: 22691
  source 1..80: mol_type = other DNA

SEQ ID NO: 57536 - DNA, 80 bp, synthetic construct; identical to SEQ ID NO: 9586
  source 1..80: mol_type = other DNA

SEQ ID NO: 57537 - DNA, 80 bp, synthetic construct; identical to SEQ ID NO: 22693
  source 1..80: mol_type = other DNA

SEQ ID NO: 57538 - DNA, 80 bp, synthetic construct; identical to SEQ ID NO: 22694
  source 1..80: mol_type = other DNA

SEQ ID NO: 57539 - DNA, 80 bp, synthetic construct; identical to SEQ ID NO: 22695
  source 1..80: mol_type = other DNA

SEQ ID NO: 57540 - DNA, 80 bp, synthetic construct; identical to SEQ ID NO: 9587
  source 1..80: mol_type = other DNA

SEQ ID NO: 57541 - DNA, 80 bp, synthetic construct; identical to SEQ ID NO: 22697
  source 1..80: mol_type = other DNA

SEQ ID NO: 57542 - DNA, 80 bp, synthetic construct; identical to SEQ ID NO: 22698
  source 1..80: mol_type = other DNA

SEQ ID NO: 57543 - DNA, 80 bp, synthetic construct; identical to SEQ ID NO: 22699
  source 1..80: mol_type = other DNA

SEQ ID NO: 57544 - DNA, 80 bp, synthetic construct; identical to SEQ ID NO: 22700
  source 1..80: mol_type = other DNA

SEQ ID NO: 57545 - DNA, 80 bp, synthetic construct; identical to SEQ ID NO: 9588
  source 1..80: mol_type = other DNA

SEQ ID NO: 57546 - DNA, 80 bp, synthetic construct; identical to SEQ ID NO: 22702
  source 1..80: mol_type = other DNA

SEQ ID NO: 57547 - DNA, 80 bp, synthetic construct; identical to SEQ ID NO: 22703
  source 1..80: mol_type = other DNA

SEQ ID NO: 57548 - DNA, 80 bp, synthetic construct; identical to SEQ ID NO: 9589
  source 1..80: mol_type = other DNA

SEQ ID NO: 57549 - DNA, 80 bp, synthetic construct; identical to SEQ ID NO: 22705
  source 1..80: mol_type = other DNA

SEQ ID NO: 57550 - DNA, 80 bp, synthetic construct; identical to SEQ ID NO: 22706
  source 1..80: mol_type = other DNA

SEQ ID NO: 57551 - DNA, 80 bp, synthetic construct; identical to SEQ ID NO: 22707
  source 1..80: mol_type = other DNA

SEQ ID NO: 57552 - DNA, 80 bp, synthetic construct; identical to SEQ ID NO: 22708
  source 1..80: mol_type = other DNA

SEQ ID NO: 57553 - DNA, 80 bp, synthetic construct; identical to SEQ ID NO: 9590
  source 1..80: mol_type = other DNA

SEQ ID NO: 57554 - DNA, 80 bp, synthetic construct; identical to SEQ ID NO: 22710
  source 1..80: mol_type = other DNA

SEQ ID NO: 57555 - DNA, 80 bp, synthetic construct; identical to SEQ ID NO: 22711
  source 1..80: mol_type = other DNA

SEQ ID NO: 57556 - DNA, 80 bp, synthetic construct; identical to SEQ ID NO: 9591
  source 1..80: mol_type = other DNA

SEQ ID NO: 57557 - DNA, 80 bp, synthetic construct; identical to SEQ ID NO: 22713
  source 1..80: mol_type = other DNA

SEQ ID NO: 57558 - DNA, 80 bp, synthetic construct; identical to SEQ ID NO: 22714
  source 1..80: mol_type = other DNA

SEQ ID NO: 57559 - DNA, 80 bp, synthetic construct; identical to SEQ ID NO: 22715
  source 1..80: mol_type = other DNA

SEQ ID NO: 57560 - DNA, 80 bp, synthetic construct; identical to SEQ ID NO: 22716
  source 1..80: mol_type = other DNA

SEQ ID NO: 57561 - DNA, 80 bp, synthetic construct; identical to SEQ ID NO: 9592
  source 1..80: mol_type = other DNA

SEQ ID NO: 57562 - DNA, 80 bp, synthetic construct; identical to SEQ ID NO: 22718
  source 1..80: mol_type = other DNA

SEQ ID NO: 57563 - DNA, 80 bp, synthetic construct; identical to SEQ ID NO: 22719
  source 1..80: mol_type = other DNA

SEQ ID NO: 57564 - DNA, 80 bp, synthetic construct; identical to SEQ ID NO: 22720
  source 1..80: mol_type = other DNA

SEQ ID NO: 57565 - DNA, 80 bp, synthetic construct; identical to SEQ ID NO: 9593
  source 1..80: mol_type = other DNA

SEQ ID NO: 57566 - DNA, 80 bp, synthetic construct; identical to SEQ ID NO: 22722
  source 1..80: mol_type = other DNA

SEQ ID NO: 57567 - DNA, 80 bp, synthetic construct; identical to SEQ ID NO: 22723
  source 1..80: mol_type = other DNA

SEQ ID NO: 57568 - DNA, 80 bp, synthetic construct; identical to SEQ ID NO: 9594
  source 1..80: mol_type = other DNA

SEQ ID NO: 57569 - DNA, 80 bp, synthetic construct; identical to SEQ ID NO: 22726
  source 1..80: mol_type = other DNA

SEQ ID NO: 57570 - DNA, 80 bp, synthetic construct; identical to SEQ ID NO: 22727
  source 1..80: mol_type = other DNA

SEQ ID NO: 57571 - DNA, 80 bp, synthetic construct; identical to SEQ ID NO: 9595
  source 1..80: mol_type = other DNA

SEQ ID NO: 57572 - DNA, 80 bp, synthetic construct; identical to SEQ ID NO: 22729
  source 1..80: mol_type = other DNA

SEQ ID NO: 57573 - DNA, 80 bp, synthetic construct; identical to SEQ ID NO: 22730
  source 1..80: mol_type = other DNA

SEQ ID NO: 57574 - DNA, 80 bp, synthetic construct; identical to SEQ ID NO: 22731
  source 1..80: mol_type = other DNA

SEQ ID NO: 57575 - DNA, 80 bp, synthetic construct; identical to SEQ ID NO: 9596
  source 1..80: mol_type = other DNA

SEQ ID NO: 57576 - DNA, 80 bp, synthetic construct; identical to SEQ ID NO: 22734
  source 1..80: mol_type = other DNA

SEQ ID NO: 57577 - DNA, 80 bp, synthetic construct; identical to SEQ ID NO: 22735
  source 1..80: mol_type = other DNA

SEQ ID NO: 57578 - DNA, 80 bp, synthetic construct; identical to SEQ ID NO: 9597
  source 1..80: mol_type = other DNA

SEQ ID NO: 57579 - DNA, 80 bp, synthetic construct; identical to SEQ ID NO: 22737
  source 1..80: mol_type = other DNA

SEQ ID NO: 57580 - DNA, 80 bp, synthetic construct; identical to SEQ ID NO: 22738
  source 1..80: mol_type = other DNA

SEQ ID NO: 57581 - DNA, 80 bp, synthetic construct; identical to SEQ ID NO: 22739
  source 1..80: mol_type = other DNA

SEQ ID NO: 57582 - DNA, 80 bp, synthetic construct; identical to SEQ ID NO: 9598
  source 1..80: mol_type = other DNA

SEQ ID NO: 57583 - DNA, 80 bp, synthetic construct; identical to SEQ ID NO: 22742
  source 1..80: mol_type = other DNA

SEQ ID NO: 57584 - DNA, 80 bp, synthetic construct; identical to SEQ ID NO: 22743
  source 1..80: mol_type = other DNA

SEQ ID NO: 57585 - DNA, 80 bp, synthetic construct; identical to SEQ ID NO: 22744
  source 1..80: mol_type = other DNA

SEQ ID NO: 57586 - DNA, 80 bp, synthetic construct; identical to SEQ ID NO: 9599
  source 1..80: mol_type = other DNA

SEQ ID NO: 57587 - DNA, 80 bp, synthetic construct; identical to SEQ ID NO: 22746
  source 1..80: mol_type = other DNA

SEQ ID NO: 57588 - DNA, 80 bp, synthetic construct; identical to SEQ ID NO: 22747
  source 1..80: mol_type = other DNA

SEQ ID NO: 57589 - DNA, 80 bp, synthetic construct; identical to SEQ ID NO: 22748
  source 1..80: mol_type = other DNA

SEQ ID NO: 57590 - DNA, 80 bp, synthetic construct; identical to SEQ ID NO: 9600
  source 1..80: mol_type = other DNA

SEQ ID NO: 57591 - DNA, 80 bp, synthetic construct; identical to SEQ ID NO: 22750
  source 1..80: mol_type = other DNA

SEQ ID NO: 57592 - DNA, 80 bp, synthetic construct; identical to SEQ ID NO: 22751
  source 1..80: mol_type = other DNA

SEQ ID NO: 57593 - DNA, 80 bp, synthetic construct; identical to SEQ ID NO: 9601
  source 1..80: mol_type = other DNA

SEQ ID NO: 57594 - DNA, 80 bp, synthetic construct; identical to SEQ ID NO: 22753
  source 1..80: mol_type = other DNA

SEQ ID NO: 57595 - DNA, 80 bp, synthetic construct; identical to SEQ ID NO: 22754
  source 1..80: mol_type = other DNA

SEQ ID NO: 57596 - DNA, 80 bp, synthetic construct; identical to SEQ ID NO: 22755
  source 1..80: mol_type = other DNA

SEQ ID NO: 57597 - DNA, 80 bp, synthetic construct; identical to SEQ ID NO: 9602
  source 1..80: mol_type = other DNA

SEQ ID NO: 57598 - DNA, 80 bp, synthetic construct; identical to SEQ ID NO: 22757
  source 1..80: mol_type = other DNA

SEQ ID NO: 57599 - DNA, 80 bp, synthetic construct; identical to SEQ ID NO: 22758
  source 1..80: mol_type = other DNA

SEQ ID NO: 57600 - DNA, 80 bp, synthetic construct; identical to SEQ ID NO: 22759
  source 1..80: mol_type = other DNA

SEQ ID NO: 57601 - DNA, 80 bp, synthetic construct; identical to SEQ ID NO: 22760
  source 1..80: mol_type = other DNA

SEQ ID NO: 57602 - DNA, 80 bp, synthetic construct; identical to SEQ ID NO: 9603
  source 1..80: mol_type = other DNA

SEQ ID NO: 57603 - DNA, 80 bp, synthetic construct; identical to SEQ ID NO: 22762
  source 1..80: mol_type = other DNA

SEQ ID NO: 57604 - DNA, 80 bp, synthetic construct; identical to SEQ ID NO: 22763
  source 1..80: mol_type = other DNA

SEQ ID NO: 57605 - DNA, 80 bp, synthetic construct; identical to SEQ ID NO: 22764
  source 1..80: mol_type = other DNA

SEQ ID NO: 57606 - DNA, 80 bp, synthetic construct; identical to SEQ ID NO: 9604
  source 1..80: mol_type = other DNA

SEQ ID NO: 57607 - DNA, 80 bp, synthetic construct; identical to SEQ ID NO: 22766
  source 1..80: mol_type = other DNA

SEQ ID NO: 57608 - DNA, 80 bp, synthetic construct; identical to SEQ ID NO: 22767
  source 1..80: mol_type = other DNA

SEQ ID NO: 57609 - DNA, 80 bp, synthetic construct; identical to SEQ ID NO: 9605
  source 1..80: mol_type = other DNA

SEQ ID NO: 57610 - DNA, 80 bp, synthetic construct; identical to SEQ ID NO: 22769
  source 1..80: mol_type = other DNA

SEQ ID NO: 57611 - DNA, 80 bp, synthetic construct; identical to SEQ ID NO: 22770
  source 1..80: mol_type = other DNA

SEQ ID NO: 57612 - DNA, 80 bp, synthetic construct; identical to SEQ ID NO: 22771
  source 1..80: mol_type = other DNA

SEQ ID NO: 57613 - DNA, 80 bp, synthetic construct; identical to SEQ ID NO: 9606
  source 1..80: mol_type = other DNA

SEQ ID NO: 57614 - DNA, 80 bp, synthetic construct; identical to SEQ ID NO: 22773
  source 1..80: mol_type = other DNA

SEQ ID NO: 57615 - DNA, 80 bp, synthetic construct; identical to SEQ ID NO: 22774
  source 1..80: mol_type = other DNA

SEQ ID NO: 57616 - DNA, 80 bp, synthetic construct; identical to SEQ ID NO: 22775
  source 1..80: mol_type = other DNA

SEQ ID NO: 57617 - DNA, 80 bp, synthetic construct; identical to SEQ ID NO: 22776
  source 1..80: mol_type = other DNA

SEQ ID NO: 57618 - DNA, 80 bp, synthetic construct; identical to SEQ ID NO: 9607
  source 1..80: mol_type = other DNA

SEQ ID NO: 57619 - DNA, 80 bp, synthetic construct; identical to SEQ ID NO: 22778
  source 1..80: mol_type = other DNA

SEQ ID NO: 57620 - DNA, 80 bp, synthetic construct; identical to SEQ ID NO: 22779
  source 1..80: mol_type = other DNA

SEQ ID NO: 57621 - DNA, 80 bp, synthetic construct; identical to SEQ ID NO: 22780
  source 1..80: mol_type = other DNA

SEQ ID NO: 57622 - DNA, 80 bp, synthetic construct; identical to SEQ ID NO: 9608
  source 1..80: mol_type = other DNA

SEQ ID NO: 57623 - DNA, 80 bp, synthetic construct; identical to SEQ ID NO: 22782
  source 1..80: mol_type = other DNA

SEQ ID NO: 57624 - DNA, 80 bp, synthetic construct; identical to SEQ ID NO: 22783
  source 1..80: mol_type = other DNA

SEQ ID NO: 57625 - DNA, 80 bp, synthetic construct; identical to SEQ ID NO: 22784
  source 1..80: mol_type = other DNA

SEQ ID NO: 57626 - DNA, 80 bp, synthetic construct; identical to SEQ ID NO: 9609
  source 1..80: mol_type = other DNA

SEQ ID NO: 57627 - DNA, 80 bp, synthetic construct; identical to SEQ ID NO: 22786
  source 1..80: mol_type = other DNA

SEQ ID NO: 57628 - DNA, 80 bp, synthetic construct; identical to SEQ ID NO: 22787
  source 1..80: mol_type = other DNA

SEQ ID NO: 57629 - DNA, 80 bp, synthetic construct; identical to SEQ ID NO: 22788
  source 1..80: mol_type = other DNA

SEQ ID NO: 57630 - DNA, 80 bp, synthetic construct; identical to SEQ ID NO: 9610
  source 1..80: mol_type = other DNA

SEQ ID NO: 57631 - DNA, 80 bp, synthetic construct; identical to SEQ ID NO: 22790
  source 1..80: mol_type = other DNA

SEQ ID NO: 57632 - DNA, 80 bp, synthetic construct; identical to SEQ ID NO: 22791
  source 1..80: mol_type = other DNA

SEQ ID NO: 57633 - DNA, 80 bp, synthetic construct; identical to SEQ ID NO: 9611
  source 1..80: mol_type = other DNA

SEQ ID NO: 57634 - DNA, 80 bp, synthetic construct; identical to SEQ ID NO: 22793
  source 1..80: mol_type = other DNA

SEQ ID NO: 57635 - DNA, 80 bp, synthetic construct; identical to SEQ ID NO: 22794
  source 1..80: mol_type = other DNA

SEQ ID NO: 57636 - DNA, 80 bp, synthetic construct; identical to SEQ ID NO: 22795
  source 1..80: mol_type = other DNA

SEQ ID NO: 57637 - DNA, 80 bp, synthetic construct; identical to SEQ ID NO: 9612
  source 1..80: mol_type = other DNA

SEQ ID NO: 57638 - DNA, 80 bp, synthetic construct; identical to SEQ ID NO: 22797
  source 1..80: mol_type = other DNA

SEQ ID NO: 57639 - DNA, 80 bp, synthetic construct; identical to SEQ ID NO: 22798
  source 1..80: mol_type = other DNA

SEQ ID NO: 57640 - DNA, 80 bp, synthetic construct; identical to SEQ ID NO: 22799
  source 1..80: mol_type = other DNA

SEQ ID NO: 57641 - DNA, 80 bp, synthetic construct; identical to SEQ ID NO: 9613
  source 1..80: mol_type = other DNA

SEQ ID NO: 57642 - DNA, 80 bp, synthetic construct; identical to SEQ ID NO: 22801
  source 1..80: mol_type = other DNA

SEQ ID NO: 57643 - DNA, 80 bp, synthetic construct; identical to SEQ ID NO: 22802
  source 1..80: mol_type = other DNA

SEQ ID NO: 57644 - DNA, 80 bp, synthetic construct; identical to SEQ ID NO: 22803
  source 1..80: mol_type = other DNA

SEQ ID NO: 57645 - DNA, 80 bp, synthetic construct; identical to SEQ ID NO: 9614
  source 1..80: mol_type = other DNA

SEQ ID NO: 57646 - DNA, 80 bp, synthetic construct; identical to SEQ ID NO: 22805
  source 1..80: mol_type = other DNA

SEQ ID NO: 57647 - DNA, 80 bp, synthetic construct; identical to SEQ ID NO: 22806
  source 1..80: mol_type = other DNA

SEQ ID NO: 57648 - DNA, 80 bp, synthetic construct; identical to SEQ ID NO: 9615
  source 1..80: mol_type = other DNA

SEQ ID NO: 57649 - DNA, 80 bp, synthetic construct; identical to SEQ ID NO: 22808
  source 1..80: mol_type = other DNA

SEQ ID NO: 57650 - DNA, 80 bp, synthetic construct; identical to SEQ ID NO: 22809
  source 1..80: mol_type = other DNA

SEQ ID NO: 57651 - DNA, 80 bp, synthetic construct; identical to SEQ ID NO: 22810
  source 1..80: mol_type = other DNA

SEQ ID NO: 57652 - DNA, 80 bp, synthetic construct; identical to SEQ ID NO: 22811
  source 1..80: mol_type = other DNA

SEQ ID NO: 57653 - DNA, 80 bp, synthetic construct; identical to SEQ ID NO: 9616
  source 1..80: mol_type = other DNA

SEQ ID NO: 57654 - DNA, 80 bp, synthetic construct; identical to SEQ ID NO: 22813
  source 1..80: mol_type = other DNA

SEQ ID NO: 57655 - DNA, 80 bp, synthetic construct; identical to SEQ ID NO: 22814
  source 1..80: mol_type = other DNA

SEQ ID NO: 57656 - DNA, 80 bp, synthetic construct; identical to SEQ ID NO: 9617
  source 1..80: mol_type = other DNA

SEQ ID NO: 57657 - DNA, 80 bp, synthetic construct; identical to SEQ ID NO: 22816
  source 1..80: mol_type = other DNA

SEQ ID NO: 57658 - DNA, 80 bp, synthetic construct; identical to SEQ ID NO: 22817
  source 1..80: mol_type = other DNA

SEQ ID NO: 57659 - DNA, 80 bp, synthetic construct; identical to SEQ ID NO: 22818
  source 1..80: mol_type = other DNA

SEQ ID NO: 57660 - DNA, 80 bp, synthetic construct; identical to SEQ ID NO: 22819
  source 1..80: mol_type = other DNA

SEQ ID NO: 57661 - DNA, 80 bp, synthetic construct; identical to SEQ ID NO: 9618
  source 1..80: mol_type = other DNA

SEQ ID NO: 57662 - DNA, 80 bp, synthetic construct; identical to SEQ ID NO: 22821
  source 1..80: mol_type = other DNA

SEQ ID NO: 57663 - DNA, 80 bp, synthetic construct; identical to SEQ ID NO: 22822
  source 1..80: mol_type = other DNA

SEQ ID NO: 57664 - DNA, 80 bp, synthetic construct; identical to SEQ ID NO: 22823
  source 1..80: mol_type = other DNA

SEQ ID NO: 57665 - DNA, 80 bp, synthetic construct; identical to SEQ ID NO: 9619
  source 1..80: mol_type = other DNA

SEQ ID NO: 57666 - DNA, 80 bp, synthetic construct; identical to SEQ ID NO: 22825
  source 1..80: mol_type = other DNA

SEQ ID NO: 57667 - DNA, 80 bp, synthetic construct; identical to SEQ ID NO: 22826
  source 1..80: mol_type = other DNA

SEQ ID NO: 57668 - DNA, 80 bp, synthetic construct; identical to SEQ ID NO: 9620
  source 1..80: mol_type = other DNA

SEQ ID NO: 57669 - DNA, 80 bp, synthetic construct; identical to SEQ ID NO: 22828
  source 1..80: mol_type = other DNA

SEQ ID NO: 57670 - DNA, 80 bp, synthetic construct; identical to SEQ ID NO: 22829
  source 1..80: mol_type = other DNA

SEQ ID NO: 57671 - DNA, 80 bp, synthetic construct; identical to SEQ ID NO: 22830
  source 1..80: mol_type = other DNA

SEQ ID NO: 57672 - DNA, 80 bp, synthetic construct; identical to SEQ ID NO: 22831
  source 1..80: mol_type = other DNA

SEQ ID NO: 57673 - DNA, 80 bp, synthetic construct; identical to SEQ ID NO: 9621
  source 1..80: mol_type = other DNA

SEQ ID NO: 57674 - DNA, 80 bp, synthetic construct; identical to SEQ ID NO: 22833
  source 1..80: mol_type = other DNA

SEQ ID NO: 57675 - DNA, 80 bp, synthetic construct; identical to SEQ ID NO: 22834
  source 1..80: mol_type = other DNA

SEQ ID NO: 57676 - DNA, 80 bp, synthetic construct; identical to SEQ ID NO: 9622
  source 1..80: mol_type = other DNA

SEQ ID NO: 57677 - DNA, 80 bp, synthetic construct; identical to SEQ ID NO: 22836
  source 1..80: mol_type = other DNA

SEQ ID NO: 57678 - DNA, 80 bp, synthetic construct; identical to SEQ ID NO: 22837
  source 1..80: mol_type = other DNA

SEQ ID NO: 57679 - DNA, 80 bp, synthetic construct; identical to SEQ ID NO: 22838
  source 1..80: mol_type = other DNA

SEQ ID NO: 57680 - DNA, 80 bp, synthetic construct; identical to SEQ ID NO: 22839
  source 1..80: mol_type = other DNA

SEQ ID NO: 57681 - DNA, 80 bp, synthetic construct; identical to SEQ ID NO: 9623
  source 1..80: mol_type = other DNA

SEQ ID NO: 57682 - DNA, 80 bp, synthetic construct; identical to SEQ ID NO: 22841
  source 1..80: mol_type = other DNA

SEQ ID NO: 57683 - DNA, 80 bp, synthetic construct; identical to SEQ ID NO: 22842
  source 1..80: mol_type = other DNA

SEQ ID NO: 57684 - DNA, 80 bp, synthetic construct; identical to SEQ ID NO: 9624
  source 1..80: mol_type = other DNA

SEQ ID NO: 57685 - DNA, 80 bp, synthetic construct; identical to SEQ ID NO: 22844
  source 1..80: mol_type = other DNA

SEQ ID NO: 57686 - DNA, 80 bp, synthetic construct; identical to SEQ ID NO: 22845
  source 1..80: mol_type = other DNA

SEQ ID NO: 57687 - DNA, 80 bp, synthetic construct; identical to SEQ ID NO: 22846
  source 1..80: mol_type = other DNA

SEQ ID NO: 57688 - DNA, 80 bp, synthetic construct; identical to SEQ ID NO: 9625
  source 1..80: mol_type = other DNA

SEQ ID NO: 57689 - DNA, 80 bp, synthetic construct; identical to SEQ ID NO: 22848
  source 1..80: mol_type = other DNA

SEQ ID NO: 57690 - DNA, 80 bp, synthetic construct; identical to SEQ ID NO: 22849
  source 1..80: mol_type = other DNA

SEQ ID NO: 57691 - DNA, 80 bp, synthetic construct; identical to SEQ ID NO: 22850
  source 1..80: mol_type = other DNA

SEQ ID NO: 57692 - DNA, 80 bp, synthetic construct; identical to SEQ ID NO: 9626
  source 1..80: mol_type = other DNA

SEQ ID NO: 57693 - DNA, 80 bp, synthetic construct; identical to SEQ ID NO: 22852
  source 1..80: mol_type = other DNA

SEQ ID NO: 57694 - DNA, 80 bp, synthetic construct; identical to SEQ ID NO: 22853
  source 1..80: mol_type = other DNA

SEQ ID NO: 57695 - DNA, 80 bp, synthetic construct; identical to SEQ ID NO: 22854
  source 1..80: mol_type = other DNA

SEQ ID NO: 57696 - DNA, 80 bp, synthetic construct; identical to SEQ ID NO: 22855
  source 1..80: mol_type = other DNA

SEQ ID NO: 57697 - DNA, 80 bp, synthetic construct; identical to SEQ ID NO: 9627
  source 1..80: mol_type = other DNA

SEQ ID NO: 57698 - DNA, 80 bp, synthetic construct; identical to SEQ ID NO: 22857
  source 1..80: mol_type = other DNA

SEQ ID NO: 57699 - DNA, 80 bp, synthetic construct; identical to SEQ ID NO: 22858
  source 1..80: mol_type = other DNA

SEQ ID NO: 57700 - DNA, 80 bp, synthetic construct; identical to SEQ ID NO: 9628
  source 1..80: mol_type = other DNA

SEQ ID NO: 57701 - DNA, 80 bp, synthetic construct; identical to SEQ ID NO: 22861
  source 1..80: mol_type = other DNA

SEQ ID NO: 57702 - DNA, 80 bp, synthetic construct; identical to SEQ ID NO: 22862
  source 1..80: mol_type = other DNA

SEQ ID NO: 57703 - DNA, 80 bp, synthetic construct; identical to SEQ ID NO: 9629
  source 1..80: mol_type = other DNA

SEQ ID NO: 57704 - DNA, 80 bp, synthetic construct; identical to SEQ ID NO: 22864
  source 1..80: mol_type = other DNA

SEQ ID NO: 57705 - DNA, 80 bp, synthetic construct; identical to SEQ ID NO: 22866
  source 1..80: mol_type = other DNA

SEQ ID NO: 57706 - DNA, 80 bp, synthetic construct; identical to SEQ ID NO: 22867
  source 1..80: mol_type = other DNA

SEQ ID NO: 57707 - DNA, 80 bp, synthetic construct; identical to SEQ ID NO: 9630
  source 1..80: mol_type = other DNA

SEQ ID NO: 57708 - DNA, 80 bp, synthetic construct; identical to SEQ ID NO: 22869
  source 1..80: mol_type = other DNA

SEQ ID NO: 57709 - DNA, 80 bp, synthetic construct; identical to SEQ ID NO: 22870
  source 1..80: mol_type = other DNA

SEQ ID NO: 57710 - DNA, 80 bp, synthetic construct; identical to SEQ ID NO: 22871
  source 1..80: mol_type = other DNA

SEQ ID NO: 57711 - DNA, 80 bp, synthetic construct; identical to SEQ ID NO: 9631
  source 1..80: mol_type = other DNA

SEQ ID NO: 57712 - DNA, 80 bp, synthetic construct; identical to SEQ ID NO: 22873
  source 1..80: mol_type = other DNA

SEQ ID NO: 57713 - DNA, 80 bp, synthetic construct; identical to SEQ ID NO: 22874
  source 1..80: mol_type = other DNA

SEQ ID NO: 57714 - DNA, 80 bp, synthetic construct; identical to SEQ ID NO: 9632
  source 1..80: mol_type = other DNA

SEQ ID NO: 57715 - DNA, 80 bp, synthetic construct; identical to SEQ ID NO: 22877
  source 1..80: mol_type = other DNA

SEQ ID NO: 57716 - DNA, 80 bp, synthetic construct; identical to SEQ ID NO: 22878
  source 1..80: mol_type = other DNA

SEQ ID NO: 57717 - DNA, 80 bp, synthetic construct; identical to SEQ ID NO: 9633
  source 1..80: mol_type = other DNA

SEQ ID NO: 57718 - DNA, 80 bp, synthetic construct; identical to SEQ ID NO: 22880
  source 1..80: mol_type = other DNA

SEQ ID NO: 57719 - DNA, 80 bp, synthetic construct; identical to SEQ ID NO: 22881
  source 1..80: mol_type = other DNA

SEQ ID NO: 57720 - DNA, 80 bp, synthetic construct; identical to SEQ ID NO: 22882
  source 1..80: mol_type = other DNA

SEQ ID NO: 57721 - DNA, 80 bp, synthetic construct; identical to SEQ ID NO: 9634
  source 1..80: mol_type = other DNA

SEQ ID NO: 57722 - DNA, 80 bp, synthetic construct; identical to SEQ ID NO: 22884
  source 1..80: mol_type = other DNA

SEQ ID NO: 57723 - DNA, 80 bp, synthetic construct; identical to SEQ ID NO: 22885
  source 1..80: mol_type = other DNA

SEQ ID NO: 57724 - DNA, 80 bp, synthetic construct; identical to SEQ ID NO: 22886
  source 1..80: mol_type = other DNA

SEQ ID NO: 57725 - DNA, 80 bp, synthetic construct; identical to SEQ ID NO: 9635
  source 1..80: mol_type = other DNA

SEQ ID NO: 57726 - DNA, 80 bp, synthetic construct; identical to SEQ ID NO: 22888
  source 1..80: mol_type = other DNA

SEQ ID NO: 57727 - DNA, 80 bp, synthetic construct; identical to SEQ ID NO: 22889
  source 1..80: mol_type = other DNA

SEQ ID NO: 57728 - DNA, 80 bp, synthetic construct; identical to SEQ ID NO: 9636
  source 1..80: mol_type = other DNA

SEQ ID NO: 57729 - DNA, 80 bp, synthetic construct; identical to SEQ ID NO: 22892
  source 1..80: mol_type = other DNA

SEQ ID NO: 57730 - DNA, 80 bp, synthetic construct; identical to SEQ ID NO: 22893
  source 1..80: mol_type = other DNA

SEQ ID NO: 57731 - DNA, 80 bp, synthetic construct; identical to SEQ ID NO: 22894
  source 1..80: mol_type = other DNA

SEQ ID NO: 57732 - DNA, 80 bp, synthetic construct; identical to SEQ ID NO: 9637
  source 1..80: mol_type = other DNA

SEQ ID NO: 57733 - DNA, 80 bp, synthetic construct; identical to SEQ ID NO: 22896
  source 1..80: mol_type = other DNA

SEQ ID NO: 57734 - DNA, 80 bp, synthetic construct; identical to SEQ ID NO: 22897
  source 1..80: mol_type = other DNA

SEQ ID NO: 57735 - DNA, 80 bp, synthetic construct; identical to SEQ ID NO: 22898
  source 1..80: mol_type = other DNA

SEQ ID NO: 57736 - DNA, 80 bp, synthetic construct; identical to SEQ ID NO: 9638
  source 1..80: mol_type = other DNA

SEQ ID NO: 57737 - DNA, 80 bp, synthetic construct; identical to SEQ ID NO: 22900
  source 1..80: mol_type = other DNA

SEQ ID NO: 57738 - DNA, 80 bp, synthetic construct; identical to SEQ ID NO: 22901
  source 1..80: mol_type = other DNA

SEQ ID NO: 57739 - DNA, 80 bp, synthetic construct; identical to SEQ ID NO: 22902
  source 1..80: mol_type = other DNA

SEQ ID NO: 57740 - DNA, 80 bp, synthetic construct; identical to SEQ ID NO: 22903
  source 1..80: mol_type = other DNA

SEQ ID NO: 57741 - DNA, 80 bp, synthetic construct; identical to SEQ ID NO: 9639
  source 1..80: mol_type = other DNA

SEQ ID NO: 57742 - DNA, 80 bp, synthetic construct; identical to SEQ ID NO: 22905
  source 1..80: mol_type = other DNA

SEQ ID NO: 57743 - DNA, 80 bp, synthetic construct; identical to SEQ ID NO: 22906
  source 1..80: mol_type = other DNA

SEQ ID NO: 57744 - DNA, 80 bp, synthetic construct; identical to SEQ ID NO: 9640
  source 1..80: mol_type = other DNA

SEQ ID NO: 57745 - DNA, 80 bp, synthetic construct; identical to SEQ ID NO: 22909
  source 1..80: mol_type = other DNA

SEQ ID NO: 57746 - DNA, 80 bp, synthetic construct; identical to SEQ ID NO: 22910
  source 1..80: mol_type = other DNA

SEQ ID NO: 57747 - DNA, 80 bp, synthetic construct; identical to SEQ ID NO: 9641
  source 1..80: mol_type = other DNA

SEQ ID NO: 57748 - DNA, 80 bp, synthetic construct; identical to SEQ ID NO: 22912
  source 1..80: mol_type = other DNA

SEQ ID NO: 57749 - DNA, 80 bp, synthetic construct; identical to SEQ ID NO: 22913
  source 1..80: mol_type = other DNA

SEQ ID NO: 57750 - DNA, 80 bp, synthetic construct; identical to SEQ ID NO: 22914
  source 1..80: mol_type = other DNA

SEQ ID NO: 57751 - DNA, 80 bp, synthetic construct; identical to SEQ ID NO: 9642
  source 1..80: mol_type = other DNA

SEQ ID NO: 57752 - DNA, 80 bp, synthetic construct; identical to SEQ ID NO: 22916
  source 1..80: mol_type = other DNA

SEQ ID NO: 57753 - DNA, 80 bp, synthetic construct; identical to SEQ ID NO: 22917
  source 1..80: mol_type = other DNA

SEQ ID NO: 57754 - DNA, 80 bp, synthetic construct; identical to SEQ ID NO: 22918
  source 1..80: mol_type = other DNA

SEQ ID NO: 57755 - DNA, 80 bp, synthetic construct; identical to SEQ ID NO: 9643
  source 1..80: mol_type = other DNA

SEQ ID NO: 57756 - DNA, 80 bp, synthetic construct; identical to SEQ ID NO: 22920
  source 1..80: mol_type = other DNA

SEQ ID NO: 57757 - DNA, 80 bp, synthetic construct; identical to SEQ ID NO: 22921
  source 1..80: mol_type = other DNA

SEQ ID NO: 57758 - DNA, 80 bp, synthetic construct; identical to SEQ ID NO: 22922
  source 1..80: mol_type = other DNA

SEQ ID NO: 57759 - DNA, 80 bp, synthetic construct; identical to SEQ ID NO: 22923
  source 1..80: mol_type = other DNA

SEQ ID NO: 57760 - DNA, 80 bp, synthetic construct; identical to SEQ ID NO: 9644
  source 1..80: mol_type = other DNA

SEQ ID NO: 57761 - DNA, 80 bp, synthetic construct; identical to SEQ ID NO: 22925
  source 1..80: mol_type = other DNA

SEQ ID NO: 57762 - DNA, 80 bp, synthetic construct; identical to SEQ ID NO: 22926
  source 1..80: mol_type = other DNA

SEQ ID NO: 57763 - DNA, 80 bp, synthetic construct; identical to SEQ ID NO: 22927
  source 1..80: mol_type = other DNA

SEQ ID NO: 57764 - DNA, 80 bp, synthetic construct; identical to SEQ ID NO: 9645
  source 1..80: mol_type = other DNA

SEQ ID NO: 57765 - DNA, 80 bp, synthetic construct; identical to SEQ ID NO: 22929
  source 1..80: mol_type = other DNA

SEQ ID NO: 57766 - DNA, 80 bp, synthetic construct; identical to SEQ ID NO: 22930
  source 1..80: mol_type = other DNA

SEQ ID NO: 57767 - DNA, 80 bp, synthetic construct; identical to SEQ ID NO: 9646
  source 1..80: mol_type = other DNA

SEQ ID NO: 57768 - DNA, 80 bp, synthetic construct; identical to SEQ ID NO: 22932
  source 1..80: mol_type = other DNA

SEQ ID NO: 57769 - DNA, 80 bp, synthetic construct; identical to SEQ ID NO: 22933
  source 1..80: mol_type = other DNA

SEQ ID NO: 57770 - DNA, 80 bp, synthetic construct; identical to SEQ ID NO: 22934
  source 1..80: mol_type = other DNA

SEQ ID NO: 57771 - DNA, 80 bp, synthetic construct; identical to SEQ ID NO: 9647
  source 1..80: mol_type = other DNA

SEQ ID NO: 57772 - DNA, 80 bp, synthetic construct; identical to SEQ ID NO: 22936
  source 1..80: mol_type = other DNA

SEQ ID NO: 57773 - DNA, 80 bp, synthetic construct; identical to SEQ ID NO: 22937
  source 1..80: mol_type = other DNA

SEQ ID NO: 57774 - DNA, 80 bp, synthetic construct; identical to SEQ ID NO: 22938
  source 1..80: mol_type = other DNA

SEQ ID NO: 57775 - DNA, 80 bp, synthetic construct; identical to SEQ ID NO: 22939
  source 1..80: mol_type = other DNA

SEQ ID NO: 57776 - DNA, 80 bp, synthetic construct; identical to SEQ ID NO: 9648
  source 1..80: mol_type = other DNA

SEQ ID NO: 57777 - DNA, 80 bp, synthetic construct; identical to SEQ ID NO: 22941
  source 1..80: mol_type = other DNA

SEQ ID NO: 57778 - DNA, 80 bp, synthetic construct; identical to SEQ ID NO: 22942
  source 1..80: mol_type = other DNA

SEQ ID NO: 57779 - DNA, 80 bp, synthetic construct; identical to SEQ ID NO: 22943
  source 1..80: mol_type = other DNA

SEQ ID NO: 57780 - DNA, 80 bp, synthetic construct; identical to SEQ ID NO: 9649
  source 1..80: mol_type = other DNA

SEQ ID NO: 57781 - DNA, 80 bp, synthetic construct; identical to SEQ ID NO: 22945
  source 1..80: mol_type = other DNA

SEQ ID NO: 57782 - DNA, 80 bp, synthetic construct; identical to SEQ ID NO: 22946
  source 1..80: mol_type = other DNA

SEQ ID NO: 57783 - DNA, 80 bp, synthetic construct; identical to SEQ ID NO: 22947
  source 1..80: mol_type = other DNA

SEQ ID NO: 57784 - DNA, 80 bp, synthetic construct; identical to SEQ ID NO: 9650
  source 1..80: mol_type = other DNA

SEQ ID NO: 57785 - DNA, 80 bp, synthetic construct; identical to SEQ ID NO: 22949
  source 1..80: mol_type = other DNA

SEQ ID NO: 57786 - DNA, 80 bp, synthetic construct; identical to SEQ ID NO: 22950
  source 1..80: mol_type = other DNA

SEQ ID NO: 57787 - DNA, 80 bp, synthetic construct; identical to SEQ ID NO: 22951
  source 1..80: mol_type = other DNA

SEQ ID NO: 57788 - DNA, 80 bp, synthetic construct; identical to SEQ ID NO: 9651
  source 1..80: mol_type = other DNA

SEQ ID NO: 57789 - DNA, 80 bp, synthetic construct; identical to SEQ ID NO: 22953
  source 1..80: mol_type = other DNA

SEQ ID NO: 57790 - DNA, 80 bp, synthetic construct; identical to SEQ ID NO: 22954
  source 1..80: mol_type = other DNA

SEQ ID NO: 57791 - DNA, 80 bp, synthetic construct; identical to SEQ ID NO: 9652
  source 1..80: mol_type = other DNA

SEQ ID NO: 57792 - DNA, 80 bp, synthetic construct; identical to SEQ ID NO: 22956
  source 1..80: mol_type = other DNA

SEQ ID NO: 57793 - DNA, 80 bp, synthetic construct; identical to SEQ ID NO: 22957
  source 1..80: mol_type = other DNA

SEQ ID NO: 57794 - DNA, 80 bp, synthetic construct; identical to SEQ ID NO: 22959
  source 1..80: mol_type = other DNA

SEQ ID NO: 57795 - DNA, 80 bp, synthetic construct; identical to SEQ ID NO: 9653
  source 1..80: mol_type = other DNA

SEQ ID NO: 57796 - DNA, 80 bp, synthetic construct; identical to SEQ ID NO: 22961
  source 1..80: mol_type = other DNA

SEQ ID NO: 57797 - DNA, 80 bp, synthetic construct; identical to SEQ ID NO: 22962
  source 1..80: mol_type = other DNA

SEQ ID NO: 57798 - DNA, 80 bp, synthetic construct; identical to SEQ ID NO: 9654
  source 1..80: mol_type = other DNA

SEQ ID NO: 57799 - DNA, 80 bp, synthetic construct; identical to SEQ ID NO: 22964
  source 1..80: mol_type = other DNA

SEQ ID NO: 57800 - DNA, 80 bp, synthetic construct; identical to SEQ ID NO: 22965
  source 1..80: mol_type = other DNA

SEQ ID NO: 57801 - DNA, 80 bp, synthetic construct; identical to SEQ ID NO: 22966
  source 1..80: mol_type = other DNA

SEQ ID NO: 57802 - DNA, 80 bp, synthetic construct; identical to SEQ ID NO: 22967
  source 1..80: mol_type = other DNA

SEQ ID NO: 57803 - DNA, 80 bp, synthetic construct; identical to SEQ ID NO: 9655
  source 1..80: mol_type = other DNA

SEQ ID NO: 57804 - DNA, 80 bp, synthetic construct; identical to SEQ ID NO: 22969
  source 1..80: mol_type = other DNA

SEQ ID NO: 57805 - DNA, 80 bp, synthetic construct; identical to SEQ ID NO: 22970
  source 1..80: mol_type = other DNA

SEQ ID NO: 57806 - DNA, 80 bp, synthetic construct; identical to SEQ ID NO: 22971
  source 1..80: mol_type = other DNA

SEQ ID NO: 57807 - DNA, 80 bp, synthetic construct; identical to SEQ ID NO: 9656
  source 1..80: mol_type = other DNA

SEQ ID NO: 57808 - DNA, 80 bp, synthetic construct; identical to SEQ ID NO: 22973
  source 1..80: mol_type = other DNA

SEQ ID NO: 57809 - DNA, 80 bp, synthetic construct; identical to SEQ ID NO: 22974
  source 1..80: mol_type = other DNA

SEQ ID NO: 57810 - DNA, 80 bp, synthetic construct; identical to SEQ ID NO: 9657
  source 1..80: mol_type = other DNA

SEQ ID NO: 57811 - DNA, 80 bp, synthetic construct; identical to SEQ ID NO: 22976
  source 1..80: mol_type = other DNA

SEQ ID NO: 57812 - DNA, 80 bp, synthetic construct; identical to SEQ ID NO: 22977
  source 1..80: mol_type = other DNA

SEQ ID NO: 57813 - DNA, 80 bp, synthetic construct; identical to SEQ ID NO: 22978
  source 1..80: mol_type = other DNA

SEQ ID NO: 57814 - DNA, 80 bp, synthetic construct; identical to SEQ ID NO: 9658
  source 1..80: mol_type = other DNA

SEQ ID NO: 57815 - DNA, 80 bp, synthetic construct; identical to SEQ ID NO: 22980
  source 1..80: mol_type = other DNA

SEQ ID NO: 57816 - DNA, 80 bp, synthetic construct; identical to SEQ ID NO: 22981
  source 1..80: mol_type = other DNA

SEQ ID NO: 57817 - DNA, 80 bp, synthetic construct; identical to SEQ ID NO: 22982
  source 1..80: mol_type = other DNA

SEQ ID NO: 57818 - DNA, 80 bp, synthetic construct; identical to SEQ ID NO: 9659
  source 1..80: mol_type = other DNA

SEQ ID NO: 57819 - DNA, 80 bp, synthetic construct; identical to SEQ ID NO: 22984
  source 1..80: mol_type = other DNA

SEQ ID NO: 57820 - DNA, 80 bp, synthetic construct; identical to SEQ ID NO: 22985
  source 1..80: mol_type = other DNA

SEQ ID NO: 57821 - DNA, 80 bp, synthetic construct; identical to SEQ ID NO: 22986
  source 1..80: mol_type = other DNA

SEQ ID NO: 57822 - DNA, 80 bp, synthetic construct; identical to SEQ ID NO: 9660
  source 1..80: mol_type = other DNA

SEQ ID NO: 57823 - DNA, 80 bp, synthetic construct; identical to SEQ ID NO: 22988
  source 1..80: mol_type = other DNA

SEQ ID NO: 57824 - DNA, 80 bp, synthetic construct; identical to SEQ ID NO: 22989
  source 1..80: mol_type = other DNA

SEQ ID NO: 57825 - DNA, 80 bp, synthetic construct; identical to SEQ ID NO: 22990
  source 1..80: mol_type = other DNA

SEQ ID NO: 57826 - DNA, 80 bp, synthetic construct; identical to SEQ ID NO: 9661
  source 1..80: mol_type = other DNA

SEQ ID NO: 57827 - DNA, 80 bp, synthetic construct; identical to SEQ ID NO: 22992
  source 1..80: mol_type = other DNA

SEQ ID NO: 57828 - DNA, 80 bp, synthetic construct; identical to SEQ ID NO: 22993
  source 1..80: mol_type = other DNA

SEQ ID NO: 57829 - DNA, 80 bp, synthetic construct; identical to SEQ ID NO: 22994
  source 1..80: mol_type = other DNA

SEQ ID NO: 57830 - DNA, 80 bp, synthetic construct; identical to SEQ ID NO: 9662
  source 1..80: mol_type = other DNA

SEQ ID NO: 57831 - DNA, 80 bp, synthetic construct; identical to SEQ ID NO: 22996
  source 1..80: mol_type = other DNA

SEQ ID NO: 57832 - DNA, 80 bp, synthetic construct; identical to SEQ ID NO: 22997
  source 1..80: mol_type = other DNA

SEQ ID NO: 57833 - DNA, 80 bp, synthetic construct; identical to SEQ ID NO: 22998
  source 1..80: mol_type = other DNA

SEQ ID NO: 57834 - DNA, 80 bp, synthetic construct; identical to SEQ ID NO: 22999
  source 1..80: mol_type = other DNA

SEQ ID NO: 57835 - DNA, 80 bp, synthetic construct; identical to SEQ ID NO: 9663
  source 1..80: mol_type = other DNA

SEQ ID NO: 57836 - DNA, 80 bp, synthetic construct; identical to SEQ ID NO: 23001
  source 1..80: mol_type = other DNA

SEQ ID NO: 57837 - DNA, 80 bp, synthetic construct; identical to SEQ ID NO: 23002
  source 1..80: mol_type = other DNA

SEQ ID NO: 57838 - DNA, 80 bp, synthetic construct; identical to SEQ ID NO: 9664
  source 1..80: mol_type = other DNA

SEQ ID NO: 57839 - DNA, 80 bp, synthetic construct; identical to SEQ ID NO: 23004
  source 1..80: mol_type = other DNA

SEQ ID NO: 57840 - DNA, 80 bp, synthetic construct; identical to SEQ ID NO: 23005
  source 1..80: mol_type = other DNA

SEQ ID NO: 57841 - DNA, 80 bp, synthetic construct; identical to SEQ ID NO: 23006
  source 1..80: mol_type = other DNA

SEQ ID NO: 57842 - DNA, 80 bp, synthetic construct; identical to SEQ ID NO: 9665
  source 1..80: mol_type = other DNA

SEQ ID NO: 57843 - DNA, 80 bp, synthetic construct; identical to SEQ ID NO: 23008
  source 1..80: mol_type = other DNA

SEQ ID NO: 57844 - DNA, 80 bp, synthetic construct; identical to SEQ ID NO: 23009
  source 1..80: mol_type = other DNA

SEQ ID NO: 57845 - DNA, 80 bp, synthetic construct; identical to SEQ ID NO: 23010
  source 1..80: mol_type = other DNA

SEQ ID NO: 57846 - DNA, 80 bp, synthetic construct; identical to SEQ ID NO: 23011
  source 1..80: mol_type = other DNA

SEQ ID NO: 57847 - DNA, 80 bp, synthetic construct; identical to SEQ ID NO: 9666
  source 1..80: mol_type = other DNA

SEQ ID NO: 57848 - DNA, 80 bp, synthetic construct; identical to SEQ ID NO: 23013
  source 1..80: mol_type = other DNA

SEQ ID NO: 57849 - DNA, 80 bp, synthetic construct; identical to SEQ ID NO: 23014
  source 1..80: mol_type = other DNA

SEQ ID NO: 57850 - DNA, 80 bp, synthetic construct; identical to SEQ ID NO: 9667
  source 1..80: mol_type = other DNA

SEQ ID NO: 57851 - DNA, 80 bp, synthetic construct; identical to SEQ ID NO: 23016
  source 1..80: mol_type = other DNA

SEQ ID NO: 57852 - DNA, 80 bp, synthetic construct; identical to SEQ ID NO: 23017
  source 1..80: mol_type = other DNA

SEQ ID NO: 57853 - DNA, 80 bp, synthetic construct; identical to SEQ ID NO: 23018
  source 1..80: mol_type = other DNA

SEQ ID NO: 57854 - DNA, 80 bp, synthetic construct; identical to SEQ ID NO: 9668
  source 1..80: mol_type = other DNA

SEQ ID NO: 57855 - DNA, 80 bp, synthetic construct; identical to SEQ ID NO: 23020
  source 1..80: mol_type = other DNA

SEQ ID NO: 57856 - DNA, 80 bp, synthetic construct; identical to SEQ ID NO: 23021
  source 1..80: mol_type = other DNA

SEQ ID NO: 57857 - DNA, 80 bp, synthetic construct; identical to SEQ ID NO: 23022
  source 1..80: mol_type = other DNA

SEQ ID NO: 57858 - DNA, 80 bp, synthetic construct; identical to SEQ ID NO: 9669
  source 1..80: mol_type = other DNA

SEQ ID NO: 57859 - DNA, 80 bp, synthetic construct; identical to SEQ ID NO: 23024
  source 1..80: mol_type = other DNA

SEQ ID NO: 57860 - DNA, 80 bp, synthetic construct; identical to SEQ ID NO: 23025
  source 1..80: mol_type = other DNA

SEQ ID NO: 57861 - DNA, 80 bp, synthetic construct; identical to SEQ ID NO: 23026
  source 1..80: mol_type = other DNA

SEQ ID NO: 57862 - DNA, 80 bp, synthetic construct; identical to SEQ ID NO: 23027
  source 1..80: mol_type = other DNA

SEQ ID NO: 57863 - DNA, 80 bp, synthetic construct; identical to SEQ ID NO: 9670
  source 1..80: mol_type = other DNA

SEQ ID NO: 57864 - DNA, 80 bp, synthetic construct; identical to SEQ ID NO: 23029
  source 1..80: mol_type = other DNA

SEQ ID NO: 57865 - DNA, 80 bp, synthetic construct; identical to SEQ ID NO: 23030
  source 1..80: mol_type = other DNA

SEQ ID NO: 57866 - DNA, 80 bp, synthetic construct; identical to SEQ ID NO: 9671
  source 1..80: mol_type = other DNA

SEQ ID NO: 57867 - DNA, 80 bp, synthetic construct; identical to SEQ ID NO: 23032
  source 1..80: mol_type = other DNA

SEQ ID NO: 57868 - DNA, 80 bp, synthetic construct; identical to SEQ ID NO: 23033
  source 1..80: mol_type = other DNA

SEQ ID NO: 57869 - DNA, 80 bp, synthetic construct; identical to SEQ ID NO: 23034
  source 1..80: mol_type = other DNA

SEQ ID NO: 57870 - DNA, 80 bp, synthetic construct; identical to SEQ ID NO: 9672
  source 1..80: mol_type = other DNA

SEQ ID NO: 57871 - DNA, 80 bp, synthetic construct; identical to SEQ ID NO: 23036
  source 1..80: mol_type = other DNA

SEQ ID NO: 57872 - DNA, 80 bp, synthetic construct; identical to SEQ ID NO: 23037
  source 1..80: mol_type = other DNA

SEQ ID NO: 57873 - DNA, 80 bp, synthetic construct; identical to SEQ ID NO: 23038
  source 1..80: mol_type = other DNA

SEQ ID NO: 57874 - DNA, 80 bp, synthetic construct; identical to SEQ ID NO: 23039
  source 1..80: mol_type = other DNA

SEQ ID NO: 57875 - DNA, 80 bp, synthetic construct; identical to SEQ ID NO: 9673
  source 1..80: mol_type = other DNA

SEQ ID NO: 57876 - DNA, 80 bp, synthetic construct; identical to SEQ ID NO: 23041
  source 1..80: mol_type = other DNA

SEQ ID NO: 57877 - DNA, 80 bp, synthetic construct; identical to SEQ ID NO: 23042
  source 1..80: mol_type = other DNA

SEQ ID NO: 57878 - DNA, 80 bp, synthetic construct; identical to SEQ ID NO: 23043
  source 1..80: mol_type = other DNA

SEQ ID NO: 57879 - DNA, 80 bp, synthetic construct; identical to SEQ ID NO: 9674
  source 1..80: mol_type = other DNA

SEQ ID NO: 57880 - DNA, 80 bp, synthetic construct; identical to SEQ ID NO: 23045
  source 1..80: mol_type = other DNA

SEQ ID NO: 57881 - DNA, 80 bp, synthetic construct; identical to SEQ ID NO: 23046
  source 1..80: mol_type = other DNA

SEQ ID NO: 57882 - DNA, 80 bp, synthetic construct; identical to SEQ ID NO: 23047
  source 1..80: mol_type = other DNA

SEQ ID NO: 57883 - DNA, 80 bp, synthetic construct; identical to SEQ ID NO: 9675
  source 1..80: mol_type = other DNA

SEQ ID NO: 57884 - DNA, 80 bp, synthetic construct; identical to SEQ ID NO: 23050
  source 1..80: mol_type = other DNA

SEQ ID NO: 57885 - DNA, 80 bp, synthetic construct; identical to SEQ ID NO: 23051
  source 1..80: mol_type = other DNA

SEQ ID NO: 57886 - DNA, 80 bp, synthetic construct; identical to SEQ ID NO: 23052
  source 1..80: mol_type = other DNA

SEQ ID NO: 57887 - DNA, 80 bp, synthetic construct; identical to SEQ ID NO: 9676
  source 1..80: mol_type = other DNA

SEQ ID NO: 57888 - DNA, 80 bp, synthetic construct; identical to SEQ ID NO: 23054
  source 1..80: mol_type = other DNA

SEQ ID NO: 57889 - DNA, 80 bp, synthetic construct; identical to SEQ ID NO: 23055
  source 1..80: mol_type = other DNA

SEQ ID NO: 57890 - DNA, 80 bp, synthetic construct; identical to SEQ ID NO: 9677
  source 1..80: mol_type = other DNA

SEQ ID NO: 57891 - DNA, 80 bp, synthetic construct; identical to SEQ ID NO: 23058
  source 1..80: mol_type = other DNA

SEQ ID NO: 57892 - DNA, 80 bp, synthetic construct; identical to SEQ ID NO: 23059
  source 1..80: mol_type = other DNA

SEQ ID NO: 57893 - DNA, 80 bp, synthetic construct; identical to SEQ ID NO: 23060
  source 1..80: mol_type = other DNA

SEQ ID NO: 57894 - DNA, 80 bp, synthetic construct; identical to SEQ ID NO: 9678
  source 1..80: mol_type = other DNA

SEQ ID NO: 57895 - DNA, 80 bp, synthetic construct; identical to SEQ ID NO: 23062
  source 1..80: mol_type = other DNA

SEQ ID NO: 57896 - DNA, 80 bp, synthetic construct; identical to SEQ ID NO: 23063
  source 1..80: mol_type = other DNA

SEQ ID NO: 57897 - DNA, 80 bp, synthetic construct; identical to SEQ ID NO: 23064
  source 1..80: mol_type = other DNA

SEQ ID NO: 57898 - DNA, 80 bp, synthetic construct; identical to SEQ ID NO: 9679
  source 1..80: mol_type = other DNA

SEQ ID NO: 57899 - DNA, 80 bp, synthetic construct; identical to SEQ ID NO: 23066
  source 1..80: mol_type = other DNA

SEQ ID NO: 57900 - DNA, 80 bp, synthetic construct; identical to SEQ ID NO: 23067
  source 1..80: mol_type = other DNA

SEQ ID NO: 57901 - DNA, 80 bp, synthetic construct; identical to SEQ ID NO: 9680
  source 1..80: mol_type = other DNA

SEQ ID NO: 57902 - DNA, 80 bp, synthetic construct; identical to SEQ ID NO: 23069
  source 1..80: mol_type = other DNA

SEQ ID NO: 57903 - DNA, 80 bp, synthetic construct; identical to SEQ ID NO: 23071
  source 1..80: mol_type = other DNA

SEQ ID NO: 57904 - DNA, 80 bp, synthetic construct; identical to SEQ ID NO: 23072
  source 1..80: mol_type = other DNA

SEQ ID NO: 57905 - DNA, 80 bp, synthetic construct; identical to SEQ ID NO: 9681
  source 1..80: mol_type = other DNA

SEQ ID NO: 57906 - DNA, 80 bp, synthetic construct; identical to SEQ ID NO: 23074
  source 1..80: mol_type = other DNA

SEQ ID NO: 57907 - DNA, 80 bp, synthetic construct; identical to SEQ ID NO: 23075
  source 1..80: mol_type = other DNA

SEQ ID NO: 57908 - DNA, 80 bp, synthetic construct; identical to SEQ ID NO: 23076
  source 1..80: mol_type = other DNA

SEQ ID NO: 57909 - DNA, 80 bp, synthetic construct; identical to SEQ ID NO: 9682
  source 1..80: mol_type = other DNA

SEQ ID NO: 57910 - DNA, 80 bp, synthetic construct; identical to SEQ ID NO: 23078
  source 1..80: mol_type = other DNA

SEQ ID NO: 57911 - DNA, 80 bp, synthetic construct; identical to SEQ ID NO: 23079
  source 1..80: mol_type = other DNA

SEQ ID NO: 57912 - DNA, 80 bp, synthetic construct; identical to SEQ ID NO: 23080
  source 1..80: mol_type = other DNA

SEQ ID NO: 57913 - DNA, 80 bp, synthetic construct; identical to SEQ ID NO: 9683
  source 1..80: mol_type = other DNA

SEQ ID NO: 57914 - DNA, 80 bp, synthetic construct; identical to SEQ ID NO: 23082
  source 1..80: mol_type = other DNA

SEQ ID NO: 57915 - DNA, 80 bp, synthetic construct; identical to SEQ ID NO: 23083
  source 1..80: mol_type = other DNA

SEQ ID NO: 57916 - DNA, 80 bp, synthetic construct; identical to SEQ ID NO: 23084
  source 1..80: mol_type = other DNA

SEQ ID NO: 57917 - DNA, 80 bp, synthetic construct; identical to SEQ ID NO: 9684
  source 1..80: mol_type = other DNA

SEQ ID NO: 57918 - DNA, 80 bp, synthetic construct; identical to SEQ ID NO: 23086
  source 1..80: mol_type = other DNA

SEQ ID NO: 57919 - DNA, 80 bp, synthetic construct; identical to SEQ ID NO: 23087
  source 1..80: mol_type = other DNA

SEQ ID NO: 57920 - DNA, 80 bp, synthetic construct; identical to SEQ ID NO: 23088
  source 1..80: mol_type = other DNA

SEQ ID NO: 57921 - DNA, 80 bp, synthetic construct; identical to SEQ ID NO: 9685
  source 1..80: mol_type = other DNA

SEQ ID NO: 57922 - DNA, 80 bp, synthetic construct; identical to SEQ ID NO: 23091
  source 1..80: mol_type = other DNA

SEQ ID NO: 57923 - DNA, 80 bp, synthetic construct; identical to SEQ ID NO: 23092
  source 1..80: mol_type = other DNA

SEQ ID NO: 57924 - DNA, 80 bp, synthetic construct; identical to SEQ ID NO: 23093
  source 1..80: mol_type = other DNA

SEQ ID NO: 57925 - DNA, 80 bp, synthetic construct; identical to SEQ ID NO: 9686
  source 1..80: mol_type = other DNA

SEQ ID NO: 57926 - DNA, 80 bp, synthetic construct; identical to SEQ ID NO: 23095
  source 1..80: mol_type = other DNA

SEQ ID NO: 57927 - DNA, 80 bp, synthetic construct; identical to SEQ ID NO: 23096
  source 1..80: mol_type = other DNA

SEQ ID NO: 57928 - DNA, 80 bp, synthetic construct; identical to SEQ ID NO: 23097
  source 1..80: mol_type = other DNA

SEQ ID NO: 57929 - DNA, 80 bp, synthetic construct; identical to SEQ ID NO: 9687
  source 1..80: mol_type = other DNA

SEQ ID NO: 57930 - DNA, 80 bp, synthetic construct; identical to SEQ ID NO: 23099
  source 1..80: mol_type = other DNA

SEQ ID NO: 57931 - DNA, 80 bp, synthetic construct; identical to SEQ ID NO: 23100
  source 1..80: mol_type = other DNA

SEQ ID NO: 57932 - DNA, 80 bp, synthetic construct; identical to SEQ ID NO: 23101
  source 1..80: mol_type = other DNA

SEQ ID NO: 57933 - DNA, 80 bp, synthetic construct; identical to SEQ ID NO: 9688
  source 1..80: mol_type = other DNA

SEQ ID NO: 57934 - DNA, 80 bp, synthetic construct; identical to SEQ ID NO: 23103
  source 1..80: mol_type = other DNA

SEQ ID NO: 57935 - DNA, 80 bp, synthetic construct; identical to SEQ ID NO: 23104
  source 1..80: mol_type = other DNA

SEQ ID NO: 57936 - DNA, 80 bp, synthetic construct; identical to SEQ ID NO: 9689
  source 1..80: mol_type = other DNA

SEQ ID NO: 57937 - DNA, 80 bp, synthetic construct; identical to SEQ ID NO: 23106
  source 1..80: mol_type = other DNA

SEQ ID NO: 57938 - DNA, 80 bp, synthetic construct; identical to SEQ ID NO: 23107
  source 1..80: mol_type = other DNA

SEQ ID NO: 57939 - DNA, 80 bp, synthetic construct; identical to SEQ ID NO: 23108
  source 1..80: mol_type = other DNA

SEQ ID NO: 57940 - DNA, 80 bp, synthetic construct; identical to SEQ ID NO: 23109
  source 1..80: mol_type = other DNA

SEQ ID NO: 57941 - DNA, 80 bp, synthetic construct; identical to SEQ ID NO: 9690
  source 1..80: mol_type = other DNA

SEQ ID NO: 57942 - DNA, 80 bp, synthetic construct; identical to SEQ ID NO: 23111
  source 1..80: mol_type = other DNA

SEQ ID NO: 57943 - DNA, 80 bp, synthetic construct; identical to SEQ ID NO: 23112
  source 1..80: mol_type = other DNA

SEQ ID NO: 57944 - DNA, 80 bp, synthetic construct; identical to SEQ ID NO: 23113
  source 1..80: mol_type = other DNA

SEQ ID NO: 57945 - DNA, 80 bp, synthetic construct; identical to SEQ ID NO: 9691
  source 1..80: mol_type = other DNA

SEQ ID NO: 57946 - DNA, 80 bp, synthetic construct; identical to SEQ ID NO: 23115
  source 1..80: mol_type = other DNA

SEQ ID NO: 57947 - DNA, 80 bp, synthetic construct; identical to SEQ ID NO: 23116
  source 1..80: mol_type = other DNA

SEQ ID NO: 57948 - DNA, 80 bp, synthetic construct; identical to SEQ ID NO: 9692
  source 1..80: mol_type = other DNA

SEQ ID NO: 57949 - DNA, 80 bp, synthetic construct; identical to SEQ ID NO: 23119
  source 1..80: mol_type = other DNA

SEQ ID NO: 57950 - DNA, 80 bp, synthetic construct; identical to SEQ ID NO: 23120
  source 1..80: mol_type = other DNA

SEQ ID NO: 57951 - DNA, 80 bp, synthetic construct; identical to SEQ ID NO: 23121
  source 1..80: mol_type = other DNA

SEQ ID NO: 57952 - DNA, 80 bp, synthetic construct; identical to SEQ ID NO: 9693
  source 1..80: mol_type = other DNA

SEQ ID NO: 57953 - DNA, 80 bp, synthetic construct; identical to SEQ ID NO: 23123
  source 1..80: mol_type = other DNA

SEQ ID NO: 57954 - DNA, 80 bp, synthetic construct; identical to SEQ ID NO: 23124
  source 1..80: mol_type = other DNA

SEQ ID NO: 57955 - DNA, 80 bp, synthetic construct; identical to SEQ ID NO: 23125
  source 1..80: mol_type = other DNA

SEQ ID NO: 57956 - DNA, 80 bp, synthetic construct; identical to SEQ ID NO: 9694
  source 1..80: mol_type = other DNA

SEQ ID NO: 57957 - DNA, 80 bp, synthetic construct; identical to SEQ ID NO: 23127
  source 1..80: mol_type = other DNA

SEQ ID NO: 57958 - DNA, 80 bp, synthetic construct; identical to SEQ ID NO: 23128
  source 1..80: mol_type = other DNA

SEQ ID NO: 57959 - DNA, 80 bp, synthetic construct; identical to SEQ ID NO: 9695
  source 1..80: mol_type = other DNA

SEQ ID NO: 57960 - DNA, 80 bp, synthetic construct; identical to SEQ ID NO: 23130
  source 1..80: mol_type = other DNA

SEQ ID NO: 57961 - DNA, 80 bp, synthetic construct; identical to SEQ ID NO: 23131
  source 1..80: mol_type = other DNA

SEQ ID NO: 57962 - DNA, 80 bp, synthetic construct; identical to SEQ ID NO: 23132
  source 1..80: mol_type = other DNA

SEQ ID NO: 57963 - DNA, 80 bp, synthetic construct; identical to SEQ ID NO: 23133
  source 1..80: mol_type = other DNA

SEQ ID NO: 57964 - DNA, 80 bp, synthetic construct; identical to SEQ ID NO: 9696
  source 1..80: mol_type = other DNA

SEQ ID NO: 57965 - DNA, 80 bp, synthetic construct; identical to SEQ ID NO: 23135
  source 1..80: mol_type = other DNA

SEQ ID NO: 57966 - DNA, 80 bp, synthetic construct; identical to SEQ ID NO: 23136
  source 1..80: mol_type = other DNA

SEQ ID NO: 57967 - DNA, 80 bp, synthetic construct; identical to SEQ ID NO: 9697
  source 1..80: mol_type = other DNA

SEQ ID NO: 57968 - DNA, 80 bp, synthetic construct; identical to SEQ ID NO: 23138
  source 1..80: mol_type = other DNA

SEQ ID NO: 57969 - DNA, 80 bp, synthetic construct; identical to SEQ ID NO: 23139
  source 1..80: mol_type = other DNA

SEQ ID NO: 57970 - DNA, 80 bp, synthetic construct; identical to SEQ ID NO: 23141
  source 1..80: mol_type = other DNA

SEQ ID NO: 57971 - DNA, 80 bp, synthetic construct; identical to SEQ ID NO: 9698
  source 1..80: mol_type = other DNA

SEQ ID NO: 57972 - DNA, 80 bp, synthetic construct; identical to SEQ ID NO: 23143
  source 1..80: mol_type = other DNA

SEQ ID NO: 57973 - DNA, 80 bp, synthetic construct; identical to SEQ ID NO: 23144
  source 1..80: mol_type = other DNA

SEQ ID NO: 57974 - DNA, 80 bp, synthetic construct; identical to SEQ ID NO: 23145
  source 1..80: mol_type = other DNA

SEQ ID NO: 57975 - DNA, 80 bp, synthetic construct; identical to SEQ ID NO: 9699
  source 1..80: mol_type = other DNA

SEQ ID NO: 57976 - DNA, 80 bp, synthetic construct; identical to SEQ ID NO: 23147
  source 1..80: mol_type = other DNA

SEQ ID NO: 57977 - DNA, 80 bp, synthetic construct; identical to SEQ ID NO: 23148
  source 1..80: mol_type = other DNA

SEQ ID NO: 57978 - DNA, 80 bp, synthetic construct; identical to SEQ ID NO: 9700
  source 1..80: mol_type = other DNA

SEQ ID NO: 57979 - DNA, 80 bp, synthetic construct; identical to SEQ ID NO: 23150
  source 1..80: mol_type = other DNA

SEQ ID NO: 57980 - DNA, 80 bp, synthetic construct; identical to SEQ ID NO: 23151
  source 1..80: mol_type = other DNA

SEQ ID NO: 57981 - DNA, 80 bp, synthetic construct; identical to SEQ ID NO: 23152
  source 1..80: mol_type = other DNA

SEQ ID NO: 57982 - DNA, 80 bp, synthetic construct; identical to SEQ ID NO: 23153
  source 1..80: mol_type = other DNA

SEQ ID NO: 57983 - DNA, 80 bp, synthetic construct; identical to SEQ ID NO: 9701
  source 1..80: mol_type = other DNA

SEQ ID NO: 57984 - DNA, 80 bp, synthetic construct; identical to SEQ ID NO: 23155
  source 1..80: mol_type = other DNA

SEQ ID NO: 57985 - DNA, 80 bp, synthetic construct; identical to SEQ ID NO: 23156
  source 1..80: mol_type = other DNA

SEQ ID NO: 57986 - DNA, 80 bp, synthetic construct; identical to SEQ ID NO: 9702
  source 1..80: mol_type = other DNA

SEQ ID NO: 57987 - DNA, 80 bp, synthetic construct; identical to SEQ ID NO: 23158
  source 1..80: mol_type = other DNA

SEQ ID NO: 57988 - DNA, 80 bp, synthetic construct; identical to SEQ ID NO: 23160
  source 1..80: mol_type = other DNA

SEQ ID NO: 57989 - DNA, 80 bp, synthetic construct; identical to SEQ ID NO: 23161
  source 1..80: mol_type = other DNA

SEQ ID NO: 57990 - DNA, 80 bp, synthetic construct; identical to SEQ ID NO: 9703
  source 1..80: mol_type = other DNA

SEQ ID NO: 57991 - DNA, 80 bp, synthetic construct; identical to SEQ ID NO: 23163
  source 1..80: mol_type = other DNA

SEQ ID NO: 57992 - DNA, 80 bp, synthetic construct; identical to SEQ ID NO: 23164
  source 1..80: mol_type = other DNA

SEQ ID NO: 57993 - DNA, 80 bp, synthetic construct; identical to SEQ ID NO: 23165
  source 1..80: mol_type = other DNA

SEQ ID NO: 57994 - DNA, 80 bp, synthetic construct; identical to SEQ ID NO: 9704
  source 1..80: mol_type = other DNA

SEQ ID NO: 57995 - DNA, 80 bp, synthetic construct; identical to SEQ ID NO: 23167
  source 1..80: mol_type = other DNA

SEQ ID NO: 57996 - DNA, 80 bp, synthetic construct; identical to SEQ ID NO: 23168
  source 1..80: mol_type = other DNA

SEQ ID NO: 57997 - DNA, 80 bp, synthetic construct; identical to SEQ ID NO: 23169
  source 1..80: mol_type = other DNA

SEQ ID NO: 57998 - DNA, 80 bp, synthetic construct; identical to SEQ ID NO: 9705
  source 1..80: mol_type = other DNA

SEQ ID NO: 57999 - DNA, 80 bp, synthetic construct; identical to SEQ ID NO: 23171
  source 1..80: mol_type = other DNA

SEQ ID NO: 58000 - DNA, 80 bp, synthetic construct; identical to SEQ ID NO: 23172
  source 1..80: mol_type = other DNA

SEQ ID NO: 58001 - DNA, 80 bp, synthetic construct; identical to SEQ ID NO: 9706
  source 1..80: mol_type = other DNA

SEQ ID NO: 58002 - DNA, 80 bp, synthetic construct; identical to SEQ ID NO: 23174
  source 1..80: mol_type = other DNA

SEQ ID NO: 58003 - DNA, 80 bp, synthetic construct; identical to SEQ ID NO: 23175
  source 1..80: mol_type = other DNA

SEQ ID NO: 58004 - DNA, 80 bp, synthetic construct; identical to SEQ ID NO: 23176
  source 1..80: mol_type = other DNA

SEQ ID NO: 58005 - DNA, 80 bp, synthetic construct; identical to SEQ ID NO: 9707
  source 1..80: mol_type = other DNA

SEQ ID NO: 58006 - DNA, 80 bp, synthetic construct; identical to SEQ ID NO: 23178
  source 1..80: mol_type = other DNA

SEQ ID NO: 58007 - DNA, 80 bp, synthetic construct; identical to SEQ ID NO: 23179
  source 1..80: mol_type = other DNA

SEQ ID NO: 58008 - DNA, 80 bp, synthetic construct; identical to SEQ ID NO: 23180
  source 1..80: mol_type = other DNA

SEQ ID NO: 58009 - DNA, 80 bp, synthetic construct; identical to SEQ ID NO: 23181
  source 1..80: mol_type = other DNA

SEQ ID NO: 58010 - DNA, 80 bp, synthetic construct; identical to SEQ ID NO: 9708
  source 1..80: mol_type = other DNA

SEQ ID NO: 58011 - DNA, 80 bp, synthetic construct; identical to SEQ ID NO: 23183
  source 1..80: mol_type = other DNA

SEQ ID NO: 58012 - DNA, 80 bp, synthetic construct; identical to SEQ ID NO: 23184
  source 1..80: mol_type = other DNA

SEQ ID NO: 58013 - DNA, 80 bp, synthetic construct; identical to SEQ ID NO: 9709
  source 1..80: mol_type = other DNA

SEQ ID NO: 58014 - DNA, 80 bp, synthetic construct; identical to SEQ ID NO: 23187
  source 1..80: mol_type = other DNA

SEQ ID NO: 58015 - DNA, 80 bp, synthetic construct; identical to SEQ ID NO: 23188
  source 1..80: mol_type = other DNA

SEQ ID NO: 58016 - DNA, 80 bp, synthetic construct; identical to SEQ ID NO: 23189
  source 1..80: mol_type = other DNA

SEQ ID NO: 58017 - DNA, 80 bp, synthetic construct; identical to SEQ ID NO: 9710
  source 1..80: mol_type = other DNA

SEQ ID NO: 58018 - DNA, 80 bp, synthetic construct; identical to SEQ ID NO: 23191
  source 1..80: mol_type = other DNA

SEQ ID NO: 58019 - DNA, 80 bp, synthetic construct; identical to SEQ ID NO: 9711
  source 1..80: mol_type = other DNA

SEQ ID NO: 58020 - DNA, 80 bp, synthetic construct; identical to SEQ ID NO: 23194
  source 1..80: mol_type = other DNA

SEQ ID NO: 58021 - DNA, 80 bp, synthetic construct; identical to SEQ ID NO: 23195
  source 1..80: mol_type = other DNA

SEQ ID NO: 58022 - DNA, 80 bp, synthetic construct; identical to SEQ ID NO: 23196
  source 1..80: mol_type = other DNA

SEQ ID NO: 58023 - DNA, 80 bp, synthetic construct; identical to SEQ ID NO: 23197
  source 1..80: mol_type = other DNA

SEQ ID NO: 58024 - DNA, 80 bp, synthetic construct; identical to SEQ ID NO: 9712
  source 1..80: mol_type = other DNA

SEQ ID NO: 58025 - DNA, 80 bp, synthetic construct; identical to SEQ ID NO: 23199
  source 1..80: mol_type = other DNA

SEQ ID NO: 58026 - DNA, 80 bp, synthetic construct; identical to SEQ ID NO: 23200
  source 1..80: mol_type = other DNA

SEQ ID NO: 58027 - DNA, 80 bp, synthetic construct; identical to SEQ ID NO: 23201
  source 1..80: mol_type = other DNA

SEQ ID NO: 58028 - DNA, 80 bp, synthetic construct; identical to SEQ ID NO: 9713
  source 1..80: mol_type = other DNA

SEQ ID NO: 58029 - DNA, 80 bp, synthetic construct; identical to SEQ ID NO: 23203
  source 1..80: mol_type = other DNA

SEQ ID NO: 58030 - DNA, 80 bp, synthetic construct; identical to SEQ ID NO: 23204
  source 1..80: mol_type = other DNA

SEQ ID NO: 58031 - DNA, 80 bp, synthetic construct; identical to SEQ ID NO: 23205
  source 1..80: mol_type = other DNA

SEQ ID NO: 58032 - DNA, 80 bp, synthetic construct; identical to SEQ ID NO: 9714
  source 1..80: mol_type = other DNA

SEQ ID NO: 58033 - DNA, 80 bp, synthetic construct; identical to SEQ ID NO: 23207
  source 1..80: mol_type = other DNA

SEQ ID NO: 58034 - DNA, 80 bp, synthetic construct; identical to SEQ ID NO: 23208
  source 1..80: mol_type = other DNA

SEQ ID NO: 58035 - DNA, 80 bp, synthetic construct; identical to SEQ ID NO: 9715
  source 1..80: mol_type = other DNA

SEQ ID NO: 58036 - DNA, 80 bp, synthetic construct; identical to SEQ ID NO: 23210
  source 1..80: mol_type = other DNA

SEQ ID NO: 58037 - DNA, 80 bp, synthetic construct; identical to SEQ ID NO: 23211
  source 1..80: mol_type = other DNA

SEQ ID NO: 58038 - DNA, 80 bp, synthetic construct; identical to SEQ ID NO: 23212
  source 1..80: mol_type = other DNA

SEQ ID NO: 58039 - DNA, 80 bp, synthetic construct; identical to SEQ ID NO: 9716
  source 1..80: mol_type = other DNA

SEQ ID NO: 58040 - DNA, 80 bp, synthetic construct; identical to SEQ ID NO: 23214
  source 1..80: mol_type = other DNA

SEQ ID NO: 58041 - DNA, 80 bp, synthetic construct; identical to SEQ ID NO: 23216
  source 1..80: mol_type = other DNA

SEQ ID NO: 58042 - DNA, 80 bp, synthetic construct; identical to SEQ ID NO: 23217
  source 1..80: mol_type = other DNA

SEQ ID NO: 58043 - DNA, 80 bp, synthetic construct; identical to SEQ ID NO: 9717
  source 1..80: mol_type = other DNA

SEQ ID NO: 58044 - DNA, 80 bp, synthetic construct; identical to SEQ ID NO: 23219
  source 1..80: mol_type = other DNA

SEQ ID NO: 58045 - DNA, 80 bp, synthetic construct; identical to SEQ ID NO: 23220
  source 1..80: mol_type = other DNA

SEQ ID NO: 58046 - DNA, 80 bp, synthetic construct; identical to SEQ ID NO: 23221
  source 1..80: mol_type = other DNA

SEQ ID NO: 58047 - DNA, 80 bp, synthetic construct; identical to SEQ ID NO: 9718
  source 1..80: mol_type = other DNA

SEQ ID NO: 58048 - DNA, 80 bp, synthetic construct; identical to SEQ ID NO: 23223
  source 1..80: mol_type = other DNA

SEQ ID NO: 58049 - DNA, 80 bp, synthetic construct; identical to SEQ ID NO: 23224
  source 1..80: mol_type = other DNA

SEQ ID NO: 58050 - DNA, 80 bp, synthetic construct; identical to SEQ ID NO: 9719
  source 1..80: mol_type = other DNA

SEQ ID NO: 58051 - DNA, 80 bp, synthetic construct; identical to SEQ ID NO: 23226
  source 1..80: mol_type = other DNA

SEQ ID NO: 58052 - DNA, 80 bp, synthetic construct; identical to SEQ ID NO: 23227
  source 1..80: mol_type = other DNA

SEQ ID NO: 58053 - DNA, 80 bp, synthetic construct; identical to SEQ ID NO: 23228
  source 1..80: mol_type = other DNA

SEQ ID NO: 58054 - DNA, 80 bp, synthetic construct; identical to SEQ ID NO: 9720
  source 1..80: mol_type = other DNA

SEQ ID NO: 58055 - DNA, 80 bp, synthetic construct; identical to SEQ ID NO: 23231
  source 1..80: mol_type = other DNA

SEQ ID NO: 58056 - DNA, 80 bp, synthetic construct; identical to SEQ ID NO: 23232
  source 1..80: mol_type = other DNA

SEQ ID NO: 58057 - DNA, 80 bp, synthetic construct; identical to SEQ ID NO: 9721
  source 1..80: mol_type = other DNA

SEQ ID NO: 58058 - DNA, 80 bp, synthetic construct; identical to SEQ ID NO: 23234
  source 1..80: mol_type = other DNA

SEQ ID NO: 58059 - DNA, 80 bp, synthetic construct; identical to SEQ ID NO: 23235
  source 1..80: mol_type = other DNA

SEQ ID NO: 58060 - DNA, 80 bp, synthetic construct; identical to SEQ ID NO: 23236
  source 1..80: mol_type = other DNA

SEQ ID NO: 58061 - DNA, 80 bp, synthetic construct; identical to SEQ ID NO: 9722
  source 1..80: mol_type = other DNA

SEQ ID NO: 58062 - DNA, 80 bp, synthetic construct; identical to SEQ ID NO: 23238
  source 1..80: mol_type = other DNA

SEQ ID NO: 58063 - DNA, 80 bp, synthetic construct; identical to SEQ ID NO: 23240
  source 1..80: mol_type = other DNA

SEQ ID NO: 58064 - DNA, 80 bp, synthetic construct; identical to SEQ ID NO: 23241
  source 1..80: mol_type = other DNA

SEQ ID NO: 58065 - DNA, 80 bp, synthetic construct; identical to SEQ ID NO: 9723
  source 1..80: mol_type = other DNA

SEQ ID NO: 58066 - DNA, 80 bp, synthetic construct; identical to SEQ ID NO: 23243
  source 1..80: mol_type = other DNA

SEQ ID NO: 58067 - DNA, 80 bp, synthetic construct; identical to SEQ ID NO: 23244
  source 1..80: mol_type = other DNA

SEQ ID NO: 58068 - DNA, 80 bp, synthetic construct; identical to SEQ ID NO: 9724
  source 1..80: mol_type = other DNA

SEQ ID NO: 58069 - DNA, 80 bp, synthetic construct; identical to SEQ ID NO: 23246
  source 1..80: mol_type = other DNA

SEQ ID NO: 58070 - DNA, 80 bp, synthetic construct; identical to SEQ ID NO: 23247
  source 1..80: mol_type = other DNA

SEQ ID NO: 58071 - DNA, 80 bp, synthetic construct; identical to SEQ ID NO: 23248
  source 1..80: mol_type = other DNA

SEQ ID NO: 58072 - DNA, 80 bp, synthetic construct; identical to SEQ ID NO: 9725
  source 1..80: mol_type = other DNA

SEQ ID NO: 58073 - DNA, 80 bp, synthetic construct; identical to SEQ ID NO: 23250
  source 1..80: mol_type = other DNA

SEQ ID NO: 58074 - DNA, 80 bp, synthetic construct; identical to SEQ ID NO: 23251
  source 1..80: mol_type = other DNA

SEQ ID NO: 58075 - DNA, 80 bp, synthetic construct; identical to SEQ ID NO: 23252
  source 1..80: mol_type = other DNA

SEQ ID NO: 58076 - DNA, 80 bp, synthetic construct; identical to SEQ ID NO: 9726
  source 1..80: mol_type = other DNA

SEQ ID NO: 58077 - DNA, 80 bp, synthetic construct; identical to SEQ ID NO: 23254
  source 1..80: mol_type = other DNA

SEQ ID NO: 58078 - DNA, 80 bp, synthetic construct; identical to SEQ ID NO: 23255
  source 1..80: mol_type = other DNA

SEQ ID NO: 58079 - DNA, 80 bp, synthetic construct; identical to SEQ ID NO: 23256
  source 1..80: mol_type = other DNA

SEQ ID NO: 58080 - DNA, 80 bp, synthetic construct; identical to SEQ ID NO: 23257
  source 1..80: mol_type = other DNA

SEQ ID NO: 58081 - DNA, 80 bp, synthetic construct; identical to SEQ ID NO: 9727
  source 1..80: mol_type = other DNA

SEQ ID NO: 58082 - DNA, 80 bp, synthetic construct; identical to SEQ ID NO: 23259
  source 1..80: mol_type = other DNA

SEQ ID NO: 58083 - DNA, 80 bp, synthetic construct; identical to SEQ ID NO: 23260
  source 1..80: mol_type = other DNA

SEQ ID NO: 58084 - DNA, 80 bp, synthetic construct; identical to SEQ ID NO: 23261
  source 1..80: mol_type = other DNA

SEQ ID NO: 58085 - DNA, 80 bp, synthetic construct; identical to SEQ ID NO: 9728
  source 1..80: mol_type = other DNA

SEQ ID NO: 58086 - DNA, 80 bp, synthetic construct; identical to SEQ ID NO: 23263
  source 1..80: mol_type = other DNA

SEQ ID NO: 58087 - DNA, 80 bp, synthetic construct; identical to SEQ ID NO: 23264
  source 1..80: mol_type = other DNA

SEQ ID NO: 58088 - DNA, 80 bp, synthetic construct; identical to SEQ ID NO: 23265
  source 1..80: mol_type = other DNA

SEQ ID NO: 58089 - DNA, 80 bp, synthetic construct; identical to SEQ ID NO: 9729
  source 1..80: mol_type = other DNA

SEQ ID NO: 58090 - DNA, 80 bp, synthetic construct; identical to SEQ ID NO: 23267
  source 1..80: mol_type = other DNA

SEQ ID NO: 58091 - DNA, 80 bp, synthetic construct; identical to SEQ ID NO: 23268
  source 1..80: mol_type = other DNA

SEQ ID NO: 58092 - DNA, 80 bp, synthetic construct; identical to SEQ ID NO: 23269
  source 1..80: mol_type = other DNA

SEQ ID NO: 58093 - DNA, 80 bp, synthetic construct; identical to SEQ ID NO: 9730
  source 1..80: mol_type = other DNA

SEQ ID NO: 58094 - DNA, 80 bp, synthetic construct; identical to SEQ ID NO: 23271
  source 1..80: mol_type = other DNA

SEQ ID NO: 58095 - DNA, 80 bp, synthetic construct; identical to SEQ ID NO: 23272
  source 1..80: mol_type = other DNA

SEQ ID NO: 58096 - DNA, 80 bp, synthetic construct; identical to SEQ ID NO: 9731
  source 1..80: mol_type = other DNA

SEQ ID NO: 58097 - DNA, 80 bp, synthetic construct; identical to SEQ ID NO: 23274
  source 1..80: mol_type = other DNA

SEQ ID NO: 58098 - DNA, 80 bp, synthetic construct; identical to SEQ ID NO: 23275
  source 1..80: mol_type = other DNA

SEQ ID NO: 58099 - DNA, 80 bp, synthetic construct; identical to SEQ ID NO: 23276
  source 1..80: mol_type = other DNA

SEQ ID NO: 58100 - DNA, 80 bp, synthetic construct; identical to SEQ ID NO: 23277
  source 1..80: mol_type = other DNA

SEQ ID NO: 58101 - DNA, 80 bp, synthetic construct; identical to SEQ ID NO: 9732
  source 1..80: mol_type = other DNA

SEQ ID NO: 58102 - DNA, 80 bp, synthetic construct; identical to SEQ ID NO: 23279
  source 1..80: mol_type = other DNA

SEQ ID NO: 58103 - DNA, 80 bp, synthetic construct; identical to SEQ ID NO: 23280
  source 1..80: mol_type = other DNA

SEQ ID NO: 58104 - DNA, 80 bp, synthetic construct; identical to SEQ ID NO: 23281
  source 1..80: mol_type = other DNA

SEQ ID NO: 58105 - DNA, 80 bp, synthetic construct; identical to SEQ ID NO: 9733
  source 1..80: mol_type = other DNA

SEQ ID NO: 58106 - DNA, 80 bp, synthetic construct; identical to SEQ ID NO: 23283
  source 1..80: mol_type = other DNA

SEQ ID NO: 58107 - DNA, 80 bp, synthetic construct; identical to SEQ ID NO: 23284
  source 1..80: mol_type = other DNA

SEQ ID NO: 58108 - DNA, 80 bp, synthetic construct; identical to SEQ ID NO: 23285
  source 1..80: mol_type = other DNA

SEQ ID NO: 58109 - DNA, 80 bp, synthetic construct; identical to SEQ ID NO: 9734
  source 1..80: mol_type = other DNA

SEQ ID NO: 58110 - DNA, 80 bp, synthetic construct; identical to SEQ ID NO: 23287
  source 1..80: mol_type = other DNA

SEQ ID NO: 58111 - DNA, 80 bp, synthetic construct; identical to SEQ ID NO: 23288
  source 1..80: mol_type = other DNA

SEQ ID NO: 58112 - DNA, 80 bp, synthetic construct; identical to SEQ ID NO: 23289
  source 1..80: mol_type = other DNA

SEQ ID NO: 58113 - DNA, 80 bp, synthetic construct; identical to SEQ ID NO: 23290
  source 1..80: mol_type = other DNA

SEQ ID NO: 58114 - DNA, 80 bp, synthetic construct; identical to SEQ ID NO: 9735
  source 1..80: mol_type = other DNA

SEQ ID NO: 58115 - DNA, 80 bp, synthetic construct; identical to SEQ ID NO: 23292
  source 1..80: mol_type = other DNA

SEQ ID NO: 58116 - DNA, 80 bp, synthetic construct; identical to SEQ ID NO: 23293
  source 1..80: mol_type = other DNA

SEQ ID NO: 58117 - DNA, 80 bp, synthetic construct; identical to SEQ ID NO: 23294
  source 1..80: mol_type = other DNA

SEQ ID NO: 58118 - DNA, 80 bp, synthetic construct; identical to SEQ ID NO: 9736
  source 1..80: mol_type = other DNA

SEQ ID NO: 58119 - DNA, 80 bp, synthetic construct; identical to SEQ ID NO: 23296
  source 1..80: mol_type = other DNA

SEQ ID NO: 58120 - DNA, 80 bp, synthetic construct; identical to SEQ ID NO: 23297
  source 1..80: mol_type = other DNA

SEQ ID NO: 58121 - DNA, 80 bp, synthetic construct; identical to SEQ ID NO: 23298
  source 1..80: mol_type = other DNA

SEQ ID NO: 58122 - DNA, 80 bp, synthetic construct; identical to SEQ ID NO: 23299
  source 1..80: mol_type = other DNA

SEQ ID NO: 58123 - DNA, 80 bp, synthetic construct; identical to SEQ ID NO: 9737
  source 1..80: mol_type = other DNA

SEQ ID NO: 58124 - DNA, 80 bp, synthetic construct; identical to SEQ ID NO: 23301
  source 1..80: mol_type = other DNA

SEQ ID NO: 58125 - DNA, 80 bp, synthetic construct; identical to SEQ ID NO: 23302
  source 1..80: mol_type = other DNA

SEQ ID NO: 58126 - DNA, 80 bp, synthetic construct; identical to SEQ ID NO: 23303
  source 1..80: mol_type = other DNA

SEQ ID NO: 58127 - DNA, 80 bp, synthetic construct; identical to SEQ ID NO: 9738
  source 1..80: mol_type = other DNA

SEQ ID NO: 58128 - DNA, 80 bp, synthetic construct; identical to SEQ ID NO: 23305
  source 1..80: mol_type = other DNA

SEQ ID NO: 58129 - DNA, 80 bp, synthetic construct; identical to SEQ ID NO: 23306
  source 1..80: mol_type = other DNA

SEQ ID NO: 58130 - DNA, 80 bp, synthetic construct; identical to SEQ ID NO: 9739
  source 1..80: mol_type = other DNA

SEQ ID NO: 58131 - DNA, 80 bp, synthetic construct; identical to SEQ ID NO: 23308
  source 1..80: mol_type = other DNA

SEQ ID NO: 58132 - DNA, 80 bp, synthetic construct; identical to SEQ ID NO: 23309
  source 1..80: mol_type = other DNA

SEQ ID NO: 58133 - DNA, 80 bp, synthetic construct; identical to SEQ ID NO: 23310
  source 1..80: mol_type = other DNA

SEQ ID NO: 58134 - DNA, 80 bp, synthetic construct; identical to SEQ ID NO: 23311
  source 1..80: mol_type = other DNA

SEQ ID NO: 58135 - DNA, 80 bp, synthetic construct; identical to SEQ ID NO: 9740
  source 1..80: mol_type = other DNA

SEQ ID NO: 58136 - DNA, 80 bp, synthetic construct; identical to SEQ ID NO: 23313
  source 1..80: mol_type = other DNA

SEQ ID NO: 58137 - DNA, 80 bp, synthetic construct; identical to SEQ ID NO: 23314
  source 1..80: mol_type = other DNA

SEQ ID NO: 58138 - DNA, 80 bp, synthetic construct; identical to SEQ ID NO: 23315
  source 1..80: mol_type = other DNA

SEQ ID NO: 58139 - DNA, 80 bp, synthetic construct; identical to SEQ ID NO: 9741
  source 1..80: mol_type = other DNA

SEQ ID NO: 58140 - DNA, 80 bp, synthetic construct; identical to SEQ ID NO: 23317
  source 1..80: mol_type = other DNA

SEQ ID NO: 58141 - DNA, 80 bp, synthetic construct; identical to SEQ ID NO: 23318
  source 1..80: mol_type = other DNA

SEQ ID NO: 58142 - DNA, 80 bp, synthetic construct; identical to SEQ ID NO: 23319
  source 1..80: mol_type = other DNA

SEQ ID NO: 58143 - DNA, 80 bp, synthetic construct; identical to SEQ ID NO: 9742
  source 1..80: mol_type = other DNA

SEQ ID NO: 58144 - DNA, 80 bp, synthetic construct; identical to SEQ ID NO: 23321
  source 1..80: mol_type = other DNA

SEQ ID NO: 58145 - DNA, 80 bp, synthetic construct; identical to SEQ ID NO: 23322
  source 1..80: mol_type = other DNA

SEQ ID NO: 58146 - DNA, 80 bp, synthetic construct; identical to SEQ ID NO: 9743
  source 1..80: mol_type = other DNA

SEQ ID NO: 58147 - DNA, 80 bp, synthetic construct; identical to SEQ ID NO: 23324
  source 1..80: mol_type = other DNA

SEQ ID NO: 58148 - DNA, 80 bp, synthetic construct; identical to SEQ ID NO: 23325
  source 1..80: mol_type = other DNA

SEQ ID NO: 58149 - DNA, 80 bp, synthetic construct; identical to SEQ ID NO: 23326
  source 1..80: mol_type = other DNA

SEQ ID NO: 58150 - DNA, 80 bp, synthetic construct; identical to SEQ ID NO: 23327
  source 1..80: mol_type = other DNA

SEQ ID NO: 58151 - DNA, 80 bp, synthetic construct; identical to SEQ ID NO: 9744
  source 1..80: mol_type = other DNA

SEQ ID NO: 58152 - DNA, 80 bp, synthetic construct; identical to SEQ ID NO: 23329
  source 1..80: mol_type = other DNA

SEQ ID NO: 58153 - DNA, 80 bp, synthetic construct; identical to SEQ ID NO: 23330
  source 1..80: mol_type = other DNA

SEQ ID NO: 58154 - DNA, 80 bp, synthetic construct; identical to SEQ ID NO: 9745
  source 1..80: mol_type = other DNA

SEQ ID NO: 58155 - DNA, 80 bp, synthetic construct; identical to SEQ ID NO: 23332
  source 1..80: mol_type = other DNA

SEQ ID NO: 58156 - DNA, 80 bp, synthetic construct; identical to SEQ ID NO: 9746
  source 1..80: mol_type = other DNA

SEQ ID NO: 58157 - DNA, 80 bp, synthetic construct; identical to SEQ ID NO: 23336
  source 1..80: mol_type = other DNA

SEQ ID NO: 58158 - DNA, 80 bp, synthetic construct; identical to SEQ ID NO: 23337
  source 1..80: mol_type = other DNA

SEQ ID NO: 58159 - DNA, 80 bp, synthetic construct; identical to SEQ ID NO: 23338
  source 1..80: mol_type = other DNA

SEQ ID NO: 58160 - DNA, 80 bp, synthetic construct; identical to SEQ ID NO: 23339
  source 1..80: mol_type = other DNA

SEQ ID NO: 58161 - DNA, 80 bp, synthetic construct; identical to SEQ ID NO: 9747
  source 1..80: mol_type = other DNA

SEQ ID NO: 58162 - DNA, 80 bp, synthetic construct; identical to SEQ ID NO: 23341
  source 1..80: mol_type = other DNA

SEQ ID NO: 58163 - DNA, 80 bp, synthetic construct; identical to SEQ ID NO: 23342
  source 1..80: mol_type = other DNA

SEQ ID NO: 58164 - DNA, 80 bp, synthetic construct; identical to SEQ ID NO: 23343
  source 1..80: mol_type = other DNA

SEQ ID NO: 58165 - DNA, 80 bp, synthetic construct; identical to SEQ ID NO: 9748
  source 1..80: mol_type = other DNA

SEQ ID NO: 58166 - DNA, 80 bp, synthetic construct; identical to SEQ ID NO: 23345
  source 1..80: mol_type = other DNA

SEQ ID NO: 58167 - DNA, 80 bp, synthetic construct; identical to SEQ ID NO: 23346
  source 1..80: mol_type = other DNA

SEQ ID NO: 58168 - DNA, 80 bp, synthetic construct; identical to SEQ ID NO: 23347
  source 1..80: mol_type = other DNA

SEQ ID NO: 58169 - DNA, 80 bp, synthetic construct; identical to SEQ ID NO: 9749
  source 1..80: mol_type = other DNA

SEQ ID NO: 58170 - DNA, 80 bp, synthetic construct; identical to SEQ ID NO: 23349
  source 1..80: mol_type = other DNA

SEQ ID NO: 58171 - DNA, 80 bp, synthetic construct; identical to SEQ ID NO: 23350
  source 1..80: mol_type = other DNA

SEQ ID NO: 58172 - DNA, 80 bp, synthetic construct; identical to SEQ ID NO: 9750
  source 1..80: mol_type = other DNA

SEQ ID NO: 58173 - DNA, 80 bp, synthetic construct; identical to SEQ ID NO: 23352
  source 1..80: mol_type = other DNA

SEQ ID NO: 58174 - DNA, 80 bp, synthetic construct; identical to SEQ ID NO: 23353
  source 1..80: mol_type = other DNA

SEQ ID NO: 58175 - DNA, 80 bp, synthetic construct; identical to SEQ ID NO: 23354
  source 1..80: mol_type = other DNA

SEQ ID NO: 58176 - DNA, 80 bp, synthetic construct; identical to SEQ ID NO: 9751
  source 1..80: mol_type = other DNA

SEQ ID NO: 58177 - DNA, 80 bp, synthetic construct; identical to SEQ ID NO: 23356
  source 1..80: mol_type = other DNA

SEQ ID NO: 58178 - DNA, 80 bp, synthetic construct; identical to SEQ ID NO: 23357
  source 1..80: mol_type = other DNA

SEQ ID NO: 58179 - DNA, 80 bp, synthetic construct; identical to SEQ ID NO: 23358
  source 1..80: mol_type = other DNA

SEQ ID NO: 58180 - DNA, 80 bp, synthetic construct; identical to SEQ ID NO: 9752
  source 1..80: mol_type = other DNA

SEQ ID NO: 58181 - DNA, 80 bp, synthetic construct; identical to SEQ ID NO: 23361
  source 1..80: mol_type = other DNA

SEQ ID NO: 58182 - DNA, 80 bp, synthetic construct; identical to SEQ ID NO: 23362
  source 1..80: mol_type = other DNA

SEQ ID NO: 58183 - DNA, 80 bp, synthetic construct; identical to SEQ ID NO: 23363
  source 1..80: mol_type = other DNA

SEQ ID NO: 58184 - DNA, 80 bp, synthetic construct; identical to SEQ ID NO: 9753
  source 1..80: mol_type = other DNA

SEQ ID NO: 58185 - DNA, 80 bp, synthetic construct; identical to SEQ ID NO: 23365
  source 1..80: mol_type = other DNA

SEQ ID NO: 58186 - DNA, 80 bp, synthetic construct; identical to SEQ ID NO: 23366
  source 1..80: mol_type = other DNA

SEQ ID NO: 58187 - DNA, 80 bp, synthetic construct; identical to SEQ ID NO: 23367
  source 1..80: mol_type = other DNA

SEQ ID NO: 58188 - DNA, 80 bp, synthetic construct; identical to SEQ ID NO: 9754
  source 1..80: mol_type = other DNA

SEQ ID NO: 58189 - DNA, 80 bp, synthetic construct; identical to SEQ ID NO: 23369
  source 1..80: mol_type = other DNA

SEQ ID NO: 58190 - DNA, 80 bp, synthetic construct; identical to SEQ ID NO: 23370
  source 1..80: mol_type = other DNA

SEQ ID NO: 58191 - DNA, 80 bp, synthetic construct; identical to SEQ ID NO: 23371
  source 1..80: mol_type = other DNA

SEQ ID NO: 58192 - DNA, 80 bp, synthetic construct; identical to SEQ ID NO: 9755
  source 1..80: mol_type = other DNA

SEQ ID NO: 58193 - DNA, 80 bp, synthetic construct; identical to SEQ ID NO: 23373
  source 1..80: mol_type = other DNA

SEQ ID NO: 58194 - DNA, 80 bp, synthetic construct; identical to SEQ ID NO: 23374
  source 1..80: mol_type = other DNA

SEQ ID NO: 58195 - DNA, 80 bp, synthetic construct; identical to SEQ ID NO: 23375
  source 1..80: mol_type = other DNA

SEQ ID NO: 58196 - DNA, 80 bp, synthetic construct; identical to SEQ ID NO: 9756
  source 1..80: mol_type = other DNA

SEQ ID NO: 58197 - DNA, 80 bp, synthetic construct; identical to SEQ ID NO: 23377
  source 1..80: mol_type = other DNA

SEQ ID NO: 58198 - DNA, 80 bp, synthetic construct; identical to SEQ ID NO: 23378
  source 1..80: mol_type = other DNA

SEQ ID NO: 58199 - DNA, 80 bp, synthetic construct; identical to SEQ ID NO: 23379
  source 1..80: mol_type = other DNA

SEQ ID NO: 58200 - DNA, 80 bp, synthetic construct; identical to SEQ ID NO: 23380
  source 1..80: mol_type = other DNA

SEQ ID NO: 58201 - DNA, 80 bp, synthetic construct; identical to SEQ ID NO: 9757
  source 1..80: mol_type = other DNA

SEQ ID NO: 58202 - DNA, 80 bp, synthetic construct; identical to SEQ ID NO: 23382
  source 1..80: mol_type = other DNA

SEQ ID NO: 58203 - DNA, 80 bp, synthetic construct; identical to SEQ ID NO: 23383
  source 1..80: mol_type = other DNA

SEQ ID NO: 58204 - DNA, 80 bp, synthetic construct; identical to SEQ ID NO: 23384
  source 1..80: mol_type = other DNA

SEQ ID NO: 58205 - DNA, 80 bp, synthetic construct; identical to SEQ ID NO: 9758
  source 1..80: mol_type = other DNA

SEQ ID NO: 58206 - DNA, 80 bp, synthetic construct; identical to SEQ ID NO: 23386
  source 1..80: mol_type = other DNA

SEQ ID NO: 58207 - DNA, 80 bp, synthetic construct; identical to SEQ ID NO: 23387
  source 1..80: mol_type = other DNA

SEQ ID NO: 58208 - DNA, 80 bp, synthetic construct; identical to SEQ ID NO: 23388
  source 1..80: mol_type = other DNA

SEQ ID NO: 58209 - DNA, 80 bp, synthetic construct; identical to SEQ ID NO: 9759
  source 1..80: mol_type = other DNA

SEQ ID NO: 58210 - DNA, 80 bp, synthetic construct; identical to SEQ ID NO: 23390
  source 1..80: mol_type = other DNA

SEQ ID NO: 58211 - DNA, 80 bp, synthetic construct; identical to SEQ ID NO: 23391
  source 1..80: mol_type = other DNA

SEQ ID NO: 58212 - DNA, 80 bp, synthetic construct; identical to SEQ ID NO: 23392
  source 1..80: mol_type = other DNA

SEQ ID NO: 58213 - DNA, 80 bp, synthetic construct; identical to SEQ ID NO: 9760
  source 1..80: mol_type = other DNA

SEQ ID NO: 58214 - DNA, 80 bp, synthetic construct; identical to SEQ ID NO: 23394
  source 1..80: mol_type = other DNA

SEQ ID NO: 58215 - DNA, 80 bp, synthetic construct; identical to SEQ ID NO: 23395
  source 1..80: mol_type = other DNA

SEQ ID NO: 58216 - DNA, 80 bp, synthetic construct; identical to SEQ ID NO: 23396
  source 1..80: mol_type = other DNA

SEQ ID NO: 58217 - DNA, 80 bp, synthetic construct; identical to SEQ ID NO: 9761
  source 1..80: mol_type = other DNA

SEQ ID NO: 58218 - DNA, 80 bp, synthetic construct; identical to SEQ ID NO: 23398
  source 1..80: mol_type = other DNA

SEQ ID NO: 58219 - DNA, 80 bp, synthetic construct; identical to SEQ ID NO: 23399
  source 1..80: mol_type = other DNA

SEQ ID NO: 58220 - DNA, 80 bp, synthetic construct; identical to SEQ ID NO: 9762
  source 1..80: mol_type = other DNA

SEQ ID NO: 58221 - DNA, 80 bp, synthetic construct; identical to SEQ ID NO: 23401
  source 1..80: mol_type = other DNA

SEQ ID NO: 58222 - DNA, 80 bp, synthetic construct; identical to SEQ ID NO: 23402
  source 1..80: mol_type = other DNA

SEQ ID NO: 58223 - DNA, 80 bp, synthetic construct; identical to SEQ ID NO: 23403
  source 1..80: mol_type = other DNA

SEQ ID NO: 58224 - DNA, 80 bp, synthetic construct; identical to SEQ ID NO: 9763
  source 1..80: mol_type = other DNA

SEQ ID NO: 58225 - DNA, 80 bp, synthetic construct; identical to SEQ ID NO: 23405
  source 1..80: mol_type = other DNA

SEQ ID NO: 58226 - DNA, 80 bp, synthetic construct; identical to SEQ ID NO: 23406
  source 1..80: mol_type = other DNA

SEQ ID NO: 58227 - DNA, 80 bp, synthetic construct; identical to SEQ ID NO: 23407
  source 1..80: mol_type = other DNA

SEQ ID NO: 58228 - DNA, 80 bp, synthetic construct; identical to SEQ ID NO: 9764
  source 1..80: mol_type = other DNA

SEQ ID NO: 58229 - DNA, 80 bp, synthetic construct; identical to SEQ ID NO: 23409
  source 1..80: mol_type = other DNA

SEQ ID NO: 58230 - DNA, 80 bp, synthetic construct; identical to SEQ ID NO: 23410
  source 1..80: mol_type = other DNA

SEQ ID NO: 58231 - DNA, 80 bp, synthetic construct; identical to SEQ ID NO: 23411
  source 1..80: mol_type = other DNA

SEQ ID NO: 58232 - DNA, 80 bp, synthetic construct; identical to SEQ ID NO: 9765
  source 1..80: mol_type = other DNA

SEQ ID NO: 58233 - DNA, 80 bp, synthetic construct; identical to SEQ ID NO: 23413
  source 1..80: mol_type = other DNA

SEQ ID NO: 58234 - DNA, 80 bp, synthetic construct; identical to SEQ ID NO: 23414
  source 1..80: mol_type = other DNA

SEQ ID NO: 58235 - DNA, 80 bp, synthetic construct; identical to SEQ ID NO: 23415
  source 1..80: mol_type = other DNA

SEQ ID NO: 58236 - DNA, 80 bp, synthetic construct; identical to SEQ ID NO: 9766
  source 1..80: mol_type = other DNA

SEQ ID NO: 58237 - DNA, 80 bp, synthetic construct; identical to SEQ ID NO: 23417
  source 1..80: mol_type = other DNA

SEQ ID NO: 58238 - DNA, 80 bp, synthetic construct; identical to SEQ ID NO: 23418
  source 1..80: mol_type = other DNA

SEQ ID NO: 58239 - DNA, 80 bp, synthetic construct; identical to SEQ ID NO: 23419
  source 1..80: mol_type = other DNA

SEQ ID NO: 58240 - DNA, 80 bp, synthetic construct; identical to SEQ ID NO: 23420
  source 1..80: mol_type = other DNA

SEQ ID NO: 58241 - DNA, 80 bp, synthetic construct; identical to SEQ ID NO: 9767
  source 1..80: mol_type = other DNA

SEQ ID NO: 58242 - DNA, 80 bp, synthetic construct; identical to SEQ ID NO: 23422
  source 1..80: mol_type = other DNA

SEQ ID NO: 58243 - DNA, 80 bp, synthetic construct; identical to SEQ ID NO: 23423
  source 1..80: mol_type = other DNA

SEQ ID NO: 58244 - DNA, 80 bp, synthetic construct; identical to SEQ ID NO: 9768
  source 1..80: mol_type = other DNA

SEQ ID NO: 58245 - DNA, 80 bp, synthetic construct; identical to SEQ ID NO: 23425
  source 1..80: mol_type = other DNA

SEQ ID NO: 58246 - DNA, 80 bp, synthetic construct; identical to SEQ ID NO: 23426
  source 1..80: mol_type = other DNA

SEQ ID NO: 58247 - DNA, 80 bp, synthetic construct; identical to SEQ ID NO: 23427
  source 1..80: mol_type = other DNA

SEQ ID NO: 58248 - DNA, 80 bp, synthetic construct; identical to SEQ ID NO: 9769
  source 1..80: mol_type = other DNA

SEQ ID NO: 58249 - DNA, 80 bp, synthetic construct; identical to SEQ ID NO: 23429
  source 1..80: mol_type = other DNA

SEQ ID NO: 58250 - DNA, 80 bp, synthetic construct; identical to SEQ ID NO: 23430
  source 1..80: mol_type = other DNA

SEQ ID NO: 58251 - DNA, 80 bp, synthetic construct; identical to SEQ ID NO: 23431
  source 1..80: mol_type = other DNA

SEQ ID NO: 58252 - DNA, 80 bp, synthetic construct; identical to SEQ ID NO: 23432
  source 1..80: mol_type = other DNA

SEQ ID NO: 58253 - DNA, 80 bp, synthetic construct; identical to SEQ ID NO: 9770
  source 1..80: mol_type = other DNA

SEQ ID NO: 58254 - DNA, 80 bp, synthetic construct; identical to SEQ ID NO: 23434
  source 1..80: mol_type = other DNA

SEQ ID NO: 58255 - DNA, 80 bp, synthetic construct; identical to SEQ ID NO: 23435
  source 1..80: mol_type = other DNA

SEQ ID NO: 58256 - DNA, 80 bp, synthetic construct; identical to SEQ ID NO: 9771
  source 1..80: mol_type = other DNA

SEQ ID NO: 58257 - DNA, 80 bp, synthetic construct; identical to SEQ ID NO: 23437
  source 1..80: mol_type = other DNA

SEQ ID NO: 58258 - DNA, 80 bp, synthetic construct; identical to SEQ ID NO: 23438
  source 1..80: mol_type = other DNA

SEQ ID NO: 58259 - DNA, 80 bp, synthetic construct; identical to SEQ ID NO: 23439
  source 1..80: mol_type = other DNA

SEQ ID NO: 58260 - DNA, 80 bp, synthetic construct; identical to SEQ ID NO: 9772
  source 1..80: mol_type = other DNA

SEQ ID NO: 58261 - DNA, 80 bp, synthetic construct; identical to SEQ ID NO: 23441
  source 1..80: mol_type = other DNA

SEQ ID NO: 58262 - DNA, 80 bp, synthetic construct; identical to SEQ ID NO: 23442
  source 1..80: mol_type = other DNA

SEQ ID NO: 58263 - DNA, 80 bp, synthetic construct; identical to SEQ ID NO: 23443
  source 1..80: mol_type = other DNA

SEQ ID NO: 58264 - DNA, 80 bp, synthetic construct; identical to SEQ ID NO: 9773
  source 1..80: mol_type = other DNA

SEQ ID NO: 58265 - DNA, 80 bp, synthetic construct; identical to SEQ ID NO: 23446
  source 1..80: mol_type = other DNA

SEQ ID NO: 58266 - DNA, 80 bp, synthetic construct; identical to SEQ ID NO: 23447
  source 1..80: mol_type = other DNA

SEQ ID NO: 58267 - DNA, 80 bp, synthetic construct; identical to SEQ ID NO: 9774
  source 1..80: mol_type = other DNA

SEQ ID NO: 58268 - DNA, 80 bp, synthetic construct; identical to SEQ ID NO: 23449
  source 1..80: mol_type = other DNA

SEQ ID NO: 58269 - DNA, 80 bp, synthetic construct; identical to SEQ ID NO: 23450
  source 1..80: mol_type = other DNA

SEQ ID NO: 58270 - DNA, 80 bp, synthetic construct; identical to SEQ ID NO: 23451
  source 1..80: mol_type = other DNA

SEQ ID NO: 58271 - DNA, 80 bp, synthetic construct; identical to SEQ ID NO: 23452
  source 1..80: mol_type = other DNA

SEQ ID NO: 58272 - DNA, 80 bp, synthetic construct; identical to SEQ ID NO: 23453
  source 1..80: mol_type = other DNA

SEQ ID NO: 58273 - DNA, 80 bp, synthetic construct; identical to SEQ ID NO: 9775
  source 1..80: mol_type = other DNA

SEQ ID NO: 58274 - DNA, 80 bp, synthetic construct; identical to SEQ ID NO: 23455
  source 1..80: mol_type = other DNA

SEQ ID NO: 58275 - DNA, 80 bp, synthetic construct; identical to SEQ ID NO: 23456
  source 1..80: mol_type = other DNA

SEQ ID NO: 58276 - DNA, 80 bp, synthetic construct; identical to SEQ ID NO: 9776
  source 1..80: mol_type = other DNA

SEQ ID NO: 58277 - DNA, 80 bp, synthetic construct; identical to SEQ ID NO: 23459
  source 1..80: mol_type = other DNA

SEQ ID NO: 58278 - DNA, 80 bp, synthetic construct; identical to SEQ ID NO: 23460
  source 1..80: mol_type = other DNA

SEQ ID NO: 58279 - DNA, 80 bp, synthetic construct; identical to SEQ ID NO: 9777
  source 1..80: mol_type = other DNA

SEQ ID NO: 58280 - DNA, 80 bp, synthetic construct; identical to SEQ ID NO: 23462
  source 1..80: mol_type = other DNA

SEQ ID NO: 58281 - DNA, 80 bp, synthetic construct; identical to SEQ ID NO: 23463
  source 1..80: mol_type = other DNA

SEQ ID NO: 58282 - DNA, 80 bp, synthetic construct; identical to SEQ ID NO: 23464
  source 1..80: mol_type = other DNA

SEQ ID NO: 58283 - DNA, 80 bp, synthetic construct; identical to SEQ ID NO: 23465
  source 1..80: mol_type = other DNA

SEQ ID NO: 58284 - DNA, 80 bp, synthetic construct; identical to SEQ ID NO: 9778
  source 1..80: mol_type = other DNA

SEQ ID NO: 58285 - DNA, 80 bp, synthetic construct; identical to SEQ ID NO: 23467
  source 1..80: mol_type = other DNA

SEQ ID NO: 58286 - DNA, 80 bp, synthetic construct; identical to SEQ ID NO: 23468
  source 1..80: mol_type = other DNA

SEQ ID NO: 58287 - DNA, 80 bp, synthetic construct; identical to SEQ ID NO: 23469
  source 1..80: mol_type = other DNA

SEQ ID NO: 58288 - DNA, 80 bp, synthetic construct; identical to SEQ ID NO: 9779
  source 1..80: mol_type = other DNA

SEQ ID NO: 58289 - DNA, 80 bp, synthetic construct; identical to SEQ ID NO: 23471
  source 1..80: mol_type = other DNA

SEQ ID NO: 58290 - DNA, 80 bp, synthetic construct; identical to SEQ ID NO: 23472
  source 1..80: mol_type = other DNA

SEQ ID NO: 58291 - DNA, 80 bp, synthetic construct; identical to SEQ ID NO: 23474
  source 1..80: mol_type = other DNA

SEQ ID NO: 58292 - DNA, 80 bp, synthetic construct; identical to SEQ ID NO: 9780
  source 1..80: mol_type = other DNA

SEQ ID NO: 58293 - DNA, 80 bp, synthetic construct; identical to SEQ ID NO: 23476
  source 1..80: mol_type = other DNA

SEQ ID NO: 58294 - DNA, 80 bp, synthetic construct; identical to SEQ ID NO: 23477
  source 1..80: mol_type = other DNA

SEQ ID NO: 58295 - DNA, 80 bp, synthetic construct; identical to SEQ ID NO: 23478
  source 1..80: mol_type = other DNA

SEQ ID NO: 58296 - DNA, 80 bp, synthetic construct; identical to SEQ ID NO: 9781
  source 1..80: mol_type = other DNA

SEQ ID NO: 58297 - DNA, 80 bp, synthetic construct; identical to SEQ ID NO: 23480
  source 1..80: mol_type = other DNA

SEQ ID NO: 58298 - DNA, 80 bp, synthetic construct; identical to SEQ ID NO: 23481
  source 1..80: mol_type = other DNA

SEQ ID NO: 58299 - DNA, 80 bp, synthetic construct; identical to SEQ ID NO: 9782
  source 1..80: mol_type = other DNA

SEQ ID NO: 58300 - DNA, 80 bp, synthetic construct; identical to SEQ ID NO: 23483
  source 1..80: mol_type = other DNA

SEQ ID NO: 58301 - DNA, 80 bp, synthetic construct; identical to SEQ ID NO: 23484
  source 1..80: mol_type = other DNA

SEQ ID NO: 58302 - DNA, 80 bp, synthetic construct; identical to SEQ ID NO: 23485
  source 1..80: mol_type = other DNA

SEQ ID NO: 58303 - DNA, 80 bp, synthetic construct; identical to SEQ ID NO: 9783
  source 1..80: mol_type = other DNA

SEQ ID NO: 58304 - DNA, 80 bp, synthetic construct; identical to SEQ ID NO: 23487
  source 1..80: mol_type = other DNA

SEQ ID NO: 58305 - DNA, 80 bp, synthetic construct; identical to SEQ ID NO: 23488
  source 1..80: mol_type = other DNA

SEQ ID NO: 58306 - DNA, 80 bp, synthetic construct; identical to SEQ ID NO: 23489
  source 1..80: mol_type = other DNA

SEQ ID NO: 58307 - DNA, 80 bp, synthetic construct; identical to SEQ ID NO: 9784
  source 1..80: mol_type = other DNA

SEQ ID NO: 58308 - DNA, 80 bp, synthetic construct; identical to SEQ ID NO: 23491
  source 1..80: mol_type = other DNA

SEQ ID NO: 58309 - DNA, 80 bp, synthetic construct; identical to SEQ ID NO: 23492
  source 1..80: mol_type = other DNA

SEQ ID NO: 58310 - DNA, 80 bp, synthetic construct; identical to SEQ ID NO: 23493
  source 1..80: mol_type = other DNA

SEQ ID NO: 58311 - DNA, 80 bp, synthetic construct; identical to SEQ ID NO: 23494
  source 1..80: mol_type = other DNA

SEQ ID NO: 58312 - DNA, 80 bp, synthetic construct; identical to SEQ ID NO: 9785
  source 1..80: mol_type = other DNA

SEQ ID NO: 58313 - DNA, 80 bp, synthetic construct; identical to SEQ ID NO: 23496
  source 1..80: mol_type = other DNA

SEQ ID NO: 58314 - DNA, 80 bp, synthetic construct; identical to SEQ ID NO: 23497
  source 1..80: mol_type = other DNA

SEQ ID NO: 58315 - DNA, 80 bp, synthetic construct; identical to SEQ ID NO: 9786
  source 1..80: mol_type = other DNA

SEQ ID NO: 58316 - DNA, 80 bp, synthetic construct; identical to SEQ ID NO: 23499
  source 1..80: mol_type = other DNA

SEQ ID NO: 58317 - DNA, 80 bp, synthetic construct; identical to SEQ ID NO: 23500
  source 1..80: mol_type = other DNA

SEQ ID NO: 58318 - DNA, 80 bp, synthetic construct; identical to SEQ ID NO: 23501
  source 1..80: mol_type = other DNA

SEQ ID NO: 58319 - DNA, 80 bp, synthetic construct; identical to SEQ ID NO: 9787
  source 1..80: mol_type = other DNA

SEQ ID NO: 58320 - DNA, 80 bp, synthetic construct; identical to SEQ ID NO: 23503
  source 1..80: mol_type = other DNA

SEQ ID NO: 58321 - DNA, 80 bp, synthetic construct; identical to SEQ ID NO: 23504
  source 1..80: mol_type = other DNA

SEQ ID NO: 58322 - DNA, 80 bp, synthetic construct; identical to SEQ ID NO: 23505
  source 1..80: mol_type = other DNA

SEQ ID NO: 58323 - DNA, 80 bp, synthetic construct; identical to SEQ ID NO: 23506
  source 1..80: mol_type = other DNA

SEQ ID NO: 58324 - DNA, 80 bp, synthetic construct; identical to SEQ ID NO: 9788
  source 1..80: mol_type = other DNA

SEQ ID NO: 58325 - DNA, 80 bp, synthetic construct; identical to SEQ ID NO: 23508
  source 1..80: mol_type = other DNA

SEQ ID NO: 58326 - DNA, 80 bp, synthetic construct; identical to SEQ ID NO: 23509
  source 1..80: mol_type = other DNA

SEQ ID NO: 58327 - DNA, 80 bp, synthetic construct; identical to SEQ ID NO: 23510
  source 1..80: mol_type = other DNA

SEQ ID NO: 58328 - DNA, 80 bp, synthetic construct; identical to SEQ ID NO: 9789
  source 1..80: mol_type = other DNA

SEQ ID NO: 58329 - DNA, 80 bp, synthetic construct; identical to SEQ ID NO: 23512
  source 1..80: mol_type = other DNA

SEQ ID NO: 58330 - DNA, 80 bp, synthetic construct; identical to SEQ ID NO: 23513
  source 1..80: mol_type = other DNA

SEQ ID NO: 58331 - DNA, 80 bp, synthetic construct; identical to SEQ ID NO: 9790
  source 1..80: mol_type = other DNA

SEQ ID NO: 58332 - DNA, 80 bp, synthetic construct; identical to SEQ ID NO: 23515
  source 1..80: mol_type = other DNA

SEQ ID NO: 58333 - DNA, 80 bp, synthetic construct; identical to SEQ ID NO: 23516
  source 1..80: mol_type = other DNA

SEQ ID NO: 58334 - DNA, 80 bp, synthetic construct; identical to SEQ ID NO: 23517
  source 1..80: mol_type = other DNA

SEQ ID NO: 58335 - DNA, 80 bp, synthetic construct; identical to SEQ ID NO: 9791
  source 1..80: mol_type = other DNA

SEQ ID NO: 58336 - DNA, 80 bp, synthetic construct; identical to SEQ ID NO: 23519
  source 1..80: mol_type = other DNA

SEQ ID NO: 58337 - DNA, 80 bp, synthetic construct; identical to SEQ ID NO: 23520
  source 1..80: mol_type = other DNA

SEQ ID NO: 58338 - DNA, 80 bp, synthetic construct; identical to SEQ ID NO: 23521
  source 1..80: mol_type = other DNA

SEQ ID NO: 58339 - DNA, 80 bp, synthetic construct; identical to SEQ ID NO: 9792
  source 1..80: mol_type = other DNA

SEQ ID NO: 58340 - DNA, 80 bp, synthetic construct; identical to SEQ ID NO: 23523
  source 1..80: mol_type = other DNA

SEQ ID NO: 58341 - DNA, 80 bp, synthetic construct; identical to SEQ ID NO: 23524
  source 1..80: mol_type = other DNA

SEQ ID NO: 58342 - DNA, 80 bp, synthetic construct; identical to SEQ ID NO: 23525
  source 1..80: mol_type = other DNA

SEQ ID NO: 58343 - DNA, 80 bp, synthetic construct; identical to SEQ ID NO: 23526
  source 1..80: mol_type = other DNA

SEQ ID NO: 58344 - DNA, 80 bp, synthetic construct; identical to SEQ ID NO: 9793
  source 1..80: mol_type = other DNA

SEQ ID NO: 58345 - DNA, 80 bp, synthetic construct; identical to SEQ ID NO: 23528
  source 1..80: mol_type = other DNA

SEQ ID NO: 58346 - DNA, 80 bp, synthetic construct; identical to SEQ ID NO: 23529
  source 1..80: mol_type = other DNA

SEQ ID NO: 58347 - DNA, 80 bp, synthetic construct; identical to SEQ ID NO: 23530
  source 1..80: mol_type = other DNA

SEQ ID NO: 58348 - DNA, 80 bp, synthetic construct; identical to SEQ ID NO: 9794
  source 1..80: mol_type = other DNA

SEQ ID NO: 58349 - DNA, 80 bp, synthetic construct; identical to SEQ ID NO: 23532
  source 1..80: mol_type = other DNA

SEQ ID NO: 58350 - DNA, 80 bp, synthetic construct; identical to SEQ ID NO: 23533
  source 1..80: mol_type = other DNA

SEQ ID NO: 58351 - DNA, 80 bp, synthetic construct; identical to SEQ ID NO: 23534
  source 1..80: mol_type = other DNA

SEQ ID NO: 58352 - DNA, 80 bp, synthetic construct; identical to SEQ ID NO: 9795
  source 1..80: mol_type = other DNA

SEQ ID NO: 58353 - DNA, 80 bp, synthetic construct; identical to SEQ ID NO: 23536
  source 1..80: mol_type = other DNA

SEQ ID NO: 58354 - DNA, 80 bp, synthetic construct; identical to SEQ ID NO: 23537
  source 1..80: mol_type = other DNA

SEQ ID NO: 58355 - DNA, 80 bp, synthetic construct; identical to SEQ ID NO: 23538
  source 1..80: mol_type = other DNA

SEQ ID NO: 58356 - DNA, 80 bp, synthetic construct; identical to SEQ ID NO: 9796
  source 1..80: mol_type = other DNA

SEQ ID NO: 58357 - DNA, 80 bp, synthetic construct; identical to SEQ ID NO: 23540
  source 1..80: mol_type = other DNA

SEQ ID NO: 58358 - DNA, 80 bp, synthetic construct; identical to SEQ ID NO: 23541
  source 1..80: mol_type = other DNA

SEQ ID NO: 58359 - DNA, 80 bp, synthetic construct; identical to SEQ ID NO: 9797
  source 1..80: mol_type = other DNA

SEQ ID NO: 58360 - DNA, 80 bp, synthetic construct; identical to SEQ ID NO: 23543
  source 1..80: mol_type = other DNA

SEQ ID NO: 58361 - DNA, 80 bp, synthetic construct; identical to SEQ ID NO: 23544
  source 1..80: mol_type = other DNA

SEQ ID NO: 58362 - DNA, 80 bp, synthetic construct; identical to SEQ ID NO: 23545
  source 1..80: mol_type = other DNA

SEQ ID NO: 58363 - DNA, 80 bp, synthetic construct; identical to SEQ ID NO: 23546
  source 1..80: mol_type = other DNA

SEQ ID NO: 58364 - DNA, 80 bp, synthetic construct; identical to SEQ ID NO: 9798
  source 1..80: mol_type = other DNA

SEQ ID NO: 58365 - DNA, 80 bp, synthetic construct; identical to SEQ ID NO: 23548
  source 1..80: mol_type = other DNA

SEQ ID NO: 58366 - DNA, 80 bp, synthetic construct; identical to SEQ ID NO: 23549
  source 1..80: mol_type = other DNA

SEQ ID NO: 58367 - DNA, 80 bp, synthetic construct; identical to SEQ ID NO: 23550
  source 1..80: mol_type = other DNA

SEQ ID NO: 58368 - DNA, 80 bp, synthetic construct; identical to SEQ ID NO: 9799
  source 1..80: mol_type = other DNA

SEQ ID NO: 58369 - DNA, 80 bp, synthetic construct; identical to SEQ ID NO: 23552
  source 1..80: mol_type = other DNA

SEQ ID NO: 58370 - DNA, 80 bp, synthetic construct; identical to SEQ ID NO: 23553
  source 1..80: mol_type = other DNA

SEQ ID NO: 58371 - DNA, 80 bp, synthetic construct; identical to SEQ ID NO: 23554
  source 1..80: mol_type = other DNA

SEQ ID NO: 58372 - DNA, 80 bp, synthetic construct; identical to SEQ ID NO: 9800
  source 1..80: mol_type = other DNA

SEQ ID NO: 58373 - DNA, 80 bp, synthetic construct; identical to SEQ ID NO: 23556
  source 1..80: mol_type = other DNA

SEQ ID NO: 58374 - DNA, 80 bp, synthetic construct; identical to SEQ ID NO: 23557
  source 1..80: mol_type = other DNA

SEQ ID NO: 58375 - DNA, 80 bp, synthetic construct; identical to SEQ ID NO: 9801
  source 1..80: mol_type = other DNA

SEQ ID NO: 58376 - DNA, 80 bp, synthetic construct; identical to SEQ ID NO: 23559
  source 1..80: mol_type = other DNA

SEQ ID NO: 58377 - DNA, 80 bp, synthetic construct; identical to SEQ ID NO: 23560
  source 1..80: mol_type = other DNA

SEQ ID NO: 58378 - DNA, 80 bp, synthetic construct; identical to SEQ ID NO: 23561
  source 1..80: mol_type = other DNA

SEQ ID NO: 58379 - DNA, 80 bp, synthetic construct; identical to SEQ ID NO: 9802
  source 1..80: mol_type = other DNA

SEQ ID NO: 58380 - DNA, 80 bp, synthetic construct; identical to SEQ ID NO: 23563
  source 1..80: mol_type = other DNA

SEQ ID NO: 58381 - DNA, 80 bp, synthetic construct; identical to SEQ ID NO: 23564
  source 1..80: mol_type = other DNA

SEQ ID NO: 58382 - DNA, 80 bp, synthetic construct; identical to SEQ ID NO: 23565
  source 1..80: mol_type = other DNA

SEQ ID NO: 58383 - DNA, 80 bp, synthetic construct; identical to SEQ ID NO: 23566
  source 1..80: mol_type = other DNA

SEQ ID NO: 58384 - DNA, 80 bp, synthetic construct; identical to SEQ ID NO: 9803
  source 1..80: mol_type = other DNA

SEQ ID NO: 58385 - DNA, 80 bp, synthetic construct; identical to SEQ ID NO: 23568
  source 1..80: mol_type = other DNA

SEQ ID NO: 58386 - DNA, 80 bp, synthetic construct; identical to SEQ ID NO: 23569
  source 1..80: mol_type = other DNA

SEQ ID NO: 58387 - DNA, 80 bp, synthetic construct; identical to SEQ ID NO: 23570
  source 1..80: mol_type = other DNA

SEQ ID NO: 58388 - DNA, 80 bp, synthetic construct; identical to SEQ ID NO: 9804
  source 1..80: mol_type = other DNA

SEQ ID NO: 58389 - DNA, 80 bp, synthetic construct; identical to SEQ ID NO: 23572
  source 1..80: mol_type = other DNA

SEQ ID NO: 58390 - DNA, 80 bp, synthetic construct; identical to SEQ ID NO: 23573
  source 1..80: mol_type = other DNA

SEQ ID NO: 58391 - DNA, 80 bp, synthetic construct; identical to SEQ ID NO: 9805
  source 1..80: mol_type = other DNA

SEQ ID NO: 58392 - DNA, 80 bp, synthetic construct; identical to SEQ ID NO: 23575
  source 1..80: mol_type = other DNA

SEQ ID NO: 58393 - DNA, 80 bp, synthetic construct; identical to SEQ ID NO: 23576
  source 1..80: mol_type = other DNA

SEQ ID NO: 58394 - DNA, 80 bp, synthetic construct; identical to SEQ ID NO: 23577
  source 1..80: mol_type = other DNA

SEQ ID NO: 58395 - DNA, 80 bp, synthetic construct; identical to SEQ ID NO: 9806
  source 1..80: mol_type = other DNA

SEQ ID NO: 58396 - DNA, 80 bp, synthetic construct; identical to SEQ ID NO: 23579
  source 1..80: mol_type = other DNA

SEQ ID NO: 58397 - DNA, 80 bp, synthetic construct; identical to SEQ ID NO: 23580
  source 1..80: mol_type = other DNA

SEQ ID NO: 58398 - DNA, 80 bp, synthetic construct; identical to SEQ ID NO: 23581
  source 1..80: mol_type = other DNA

SEQ ID NO: 58399 - DNA, 80 bp, synthetic construct; identical to SEQ ID NO: 23582
  source 1..80: mol_type = other DNA

SEQ ID NO: 58400 - DNA, 80 bp, synthetic construct; identical to SEQ ID NO: 9807
  source 1..80: mol_type = other DNA

SEQ ID NO: 58401 - DNA, 80 bp, synthetic construct; identical to SEQ ID NO: 23585
  source 1..80: mol_type = other DNA

SEQ ID NO: 58402 - DNA, 80 bp, synthetic construct; identical to SEQ ID NO: 9808
  source 1..80: mol_type = other DNA

SEQ ID NO: 58403 - DNA, 80 bp, synthetic construct; identical to SEQ ID NO: 23587
  source 1..80: mol_type = other DNA

SEQ ID NO: 58404 - DNA, 80 bp, synthetic construct; identical to SEQ ID NO: 23588
  source 1..80: mol_type = other DNA

SEQ ID NO: 58405 - DNA, 80 bp, synthetic construct; identical to SEQ ID NO: 23589
  source 1..80: mol_type = other DNA

SEQ ID NO: 58406 - DNA, 80 bp, synthetic construct; identical to SEQ ID NO: 23590
  source 1..80: mol_type = other DNA

SEQ ID NO: 58407 - DNA, 80 bp, synthetic construct; identical to SEQ ID NO: 9809
  source 1..80: mol_type = other DNA

SEQ ID NO: 58408 - DNA, 80 bp, synthetic construct; identical to SEQ ID NO: 23592
  source 1..80: mol_type = other DNA

SEQ ID NO: 58409 - DNA, 80 bp, synthetic construct; identical to SEQ ID NO: 23593
  source 1..80: mol_type = other DNA

SEQ ID NO: 58410 - DNA, 80 bp, synthetic construct; identical to SEQ ID NO: 23594
  source 1..80: mol_type = other DNA

SEQ ID NO: 58411 - DNA, 80 bp, synthetic construct; identical to SEQ ID NO: 9810
  source 1..80: mol_type = other DNA

SEQ ID NO: 58412 - DNA, 80 bp, synthetic construct; identical to SEQ ID NO: 23596
  source 1..80: mol_type = other DNA

SEQ ID NO: 58413 - DNA, 80 bp, synthetic construct; identical to SEQ ID NO: 23597
  source 1..80: mol_type = other DNA

SEQ ID NO: 58414 - DNA, 80 bp, synthetic construct; identical to SEQ ID NO: 23598
  source 1..80: mol_type = other DNA

SEQ ID NO: 58415 - DNA, 80 bp, synthetic construct; identical to SEQ ID NO: 9811
  source 1..80: mol_type = other DNA

SEQ ID NO: 58416 - DNA, 80 bp, synthetic construct; identical to SEQ ID NO: 23600
  source 1..80: mol_type = other DNA

SEQ ID NO: 58417 - DNA, 80 bp, synthetic construct; identical to SEQ ID NO: 23601
  source 1..80: mol_type = other DNA

SEQ ID NO: 58418 - DNA, 80 bp, synthetic construct; identical to SEQ ID NO: 9812
  source 1..80: mol_type = other DNA

SEQ ID NO: 58419 - DNA, 80 bp, synthetic construct; identical to SEQ ID NO: 23603
  source 1..80: mol_type = other DNA

SEQ ID NO: 58420 - DNA, 80 bp, synthetic construct; identical to SEQ ID NO: 23604
  source 1..80: mol_type = other DNA

SEQ ID NO: 58421 - DNA, 80 bp, synthetic construct; identical to SEQ ID NO: 23605
  source 1..80: mol_type = other DNA

SEQ ID NO: 58422 - DNA, 80 bp, synthetic construct; identical to SEQ ID NO: 9813
  source 1..80: mol_type = other DNA

SEQ ID NO: 58423 - DNA, 80 bp, synthetic construct; identical to SEQ ID NO: 23607
  source 1..80: mol_type = other DNA

SEQ ID NO: 58424 - DNA, 80 bp, synthetic construct; identical to SEQ ID NO: 23608
  source 1..80: mol_type = other DNA

SEQ ID NO: 58425 - DNA, 80 bp, synthetic construct; identical to SEQ ID NO: 9814
  source 1..80: mol_type = other DNA

SEQ ID NO: 58426 - DNA, 80 bp, synthetic construct; identical to SEQ ID NO: 23610
  source 1..80: mol_type = other DNA

SEQ ID NO: 58427 - DNA, 80 bp, synthetic construct; identical to SEQ ID NO: 23611
  source 1..80: mol_type = other DNA

SEQ ID NO: 58428 - DNA, 80 bp, synthetic construct; identical to SEQ ID NO: 23612
  source 1..80: mol_type = other DNA

SEQ ID NO: 58429 - DNA, 80 bp, synthetic construct; identical to SEQ ID NO: 9815
  source 1..80: mol_type = other DNA

SEQ ID NO: 58430 - DNA, 80 bp, synthetic construct; identical to SEQ ID NO: 23614
  source 1..80: mol_type = other DNA

SEQ ID NO: 58431 - DNA, 80 bp, synthetic construct; identical to SEQ ID NO: 23615
  source 1..80: mol_type = other DNA

SEQ ID NO: 58432 - DNA, 80 bp, synthetic construct; identical to SEQ ID NO: 23616
  source 1..80: mol_type = other DNA

SEQ ID NO: 58433 - DNA, 80 bp, synthetic construct; identical to SEQ ID NO: 9816
  source 1..80: mol_type = other DNA

SEQ ID NO: 58434 - DNA, 80 bp, synthetic construct; identical to SEQ ID NO: 23618
  source 1..80: mol_type = other DNA

SEQ ID NO: 58435 - DNA, 80 bp, synthetic construct; identical to SEQ ID NO: 23619
  source 1..80: mol_type = other DNA

SEQ ID NO: 58436 - DNA, 80 bp, synthetic construct; identical to SEQ ID NO: 23620
  source 1..80: mol_type = other DNA

SEQ ID NO: 58437 - DNA, 80 bp, synthetic construct; identical to SEQ ID NO: 9817
  source 1..80: mol_type = other DNA

SEQ ID NO: 58438 - DNA, 80 bp, synthetic construct; identical to SEQ ID NO: 23622
  source 1..80: mol_type = other DNA

SEQ ID NO: 58439 - DNA, 80 bp, synthetic construct; identical to SEQ ID NO: 23623
  source 1..80: mol_type = other DNA

SEQ ID NO: 58440 - DNA, 80 bp, synthetic construct; identical to SEQ ID NO: 9818
  source 1..80: mol_type = other DNA

SEQ ID NO: 58441 - DNA, 80 bp, synthetic construct; identical to SEQ ID NO: 23625
  source 1..80: mol_type = other DNA

SEQ ID NO: 58442 - DNA, 80 bp, synthetic construct; identical to SEQ ID NO: 23626
  source 1..80: mol_type = other DNA

SEQ ID NO: 58443 - DNA, 80 bp, synthetic construct; identical to SEQ ID NO: 23627
  source 1..80: mol_type = other DNA

SEQ ID NO: 58444 - DNA, 80 bp, synthetic construct; identical to SEQ ID NO: 23628
  source 1..80: mol_type = other DNA

SEQ ID NO: 58445 - DNA, 80 bp, synthetic construct; identical to SEQ ID NO: 9819
  source 1..80: mol_type = other DNA

SEQ ID NO: 58446 - DNA, 80 bp, synthetic construct; identical to SEQ ID NO: 23630
  source 1..80: mol_type = other DNA

SEQ ID NO: 58447 - DNA, 80 bp, synthetic construct; identical to SEQ ID NO: 23631
  source 1..80: mol_type = other DNA

SEQ ID NO: 58448 - DNA, 80 bp, synthetic construct; identical to SEQ ID NO: 9820
  source 1..80: mol_type = other DNA

SEQ ID NO: 58449 - DNA, 80 bp, synthetic construct; identical to SEQ ID NO: 23634
  source 1..80: mol_type = other DNA

SEQ ID NO: 58450 - DNA, 80 bp, synthetic construct; identical to SEQ ID NO: 23635
  source 1..80: mol_type = other DNA

SEQ ID NO: 58451 - DNA, 80 bp, synthetic construct; identical to SEQ ID NO: 9821
  source 1..80: mol_type = other DNA

SEQ ID NO: 58452 - DNA, 80 bp, synthetic construct; identical to SEQ ID NO: 23637
  source 1..80: mol_type = other DNA

SEQ ID NO: 58453 - DNA, 80 bp, synthetic construct; identical to SEQ ID NO: 23638
  source 1..80: mol_type = other DNA

SEQ ID NO: 58454 - DNA, 80 bp, synthetic construct; identical to SEQ ID NO: 23639
  source 1..80: mol_type = other DNA

SEQ ID NO: 58455 - DNA, 80 bp, synthetic construct; identical to SEQ ID NO: 9822
  source 1..80: mol_type = other DNA

SEQ ID NO: 58456 - DNA, 80 bp, synthetic construct; identical to SEQ ID NO: 23641
  source 1..80: mol_type = other DNA

SEQ ID NO: 58457 - DNA, 80 bp, synthetic construct; identical to SEQ ID NO: 23642
  source 1..80: mol_type = other DNA

SEQ ID NO: 58458 - DNA, 80 bp, synthetic construct; identical to SEQ ID NO: 23643
  source 1..80: mol_type = other DNA

SEQ ID NO: 58459 - DNA, 80 bp, synthetic construct; identical to SEQ ID NO: 23644
  source 1..80: mol_type = other DNA

SEQ ID NO: 58460 - DNA, 80 bp, synthetic construct; identical to SEQ ID NO: 9823
  source 1..80: mol_type = other DNA

SEQ ID NO: 58461 - DNA, 80 bp, synthetic construct; identical to SEQ ID NO: 23646
  source 1..80: mol_type = other DNA

SEQ ID NO: 58462 - DNA, 80 bp, synthetic construct; identical to SEQ ID NO: 23647
  source 1..80: mol_type = other DNA

SEQ ID NO: 58463 - DNA, 80 bp, synthetic construct; identical to SEQ ID NO: 9824
  source 1..80: mol_type = other DNA

SEQ ID NO: 58464 - DNA, 80 bp, synthetic construct; identical to SEQ ID NO: 23649
  source 1..80: mol_type = other DNA

SEQ ID NO: 58465 - DNA, 80 bp, synthetic construct; identical to SEQ ID NO: 10001
  source 1..80: mol_type = other DNA

SEQ ID NO: 58466 - DNA, 80 bp, synthetic construct; identical to SEQ ID NO: 23653
  source 1..80: mol_type = other DNA

SEQ ID NO: 58467 - DNA, 80 bp, synthetic construct; identical to SEQ ID NO: 23655
  source 1..80: mol_type = other DNA

SEQ ID NO: 58468 - DNA, 80 bp, synthetic construct; identical to SEQ ID NO: 9826
  source 1..80: mol_type = other DNA

SEQ ID NO: 58469 - DNA, 80 bp, synthetic construct; identical to SEQ ID NO: 23659
  source 1..80: mol_type = other DNA

SEQ ID NO: 58470 - DNA, 80 bp, synthetic construct; identical to SEQ ID NO: 23660
  source 1..80: mol_type = other DNA

SEQ ID NO: 58471 - DNA, 80 bp, synthetic construct; identical to SEQ ID NO: 9827
  source 1..80: mol_type = other DNA

SEQ ID NO: 58472 - DNA, 80 bp, synthetic construct; identical to SEQ ID NO: 23662
  source 1..80: mol_type = other DNA

SEQ ID NO: 58473 - DNA, 80 bp, synthetic construct; identical to SEQ ID NO: 23663
  source 1..80: mol_type = other DNA

SEQ ID NO: 58474 - DNA, 80 bp, synthetic construct; identical to SEQ ID NO: 23664
  source 1..80: mol_type = other DNA

SEQ ID NO: 58475 - DNA, 80 bp, synthetic construct; identical to SEQ ID NO: 9828
  source 1..80: mol_type = other DNA

SEQ ID NO: 58476 - DNA, 80 bp, synthetic construct; identical to SEQ ID NO: 23666
  source 1..80: mol_type = other DNA

SEQ ID NO: 58477 - DNA, 80 bp, synthetic construct; identical to SEQ ID NO: 23667
  source 1..80: mol_type = other DNA

SEQ ID NO: 58478 - DNA, 80 bp, synthetic construct; identical to SEQ ID NO: 23668
  source 1..80: mol_type = other DNA

SEQ ID NO: 58479 - DNA, 80 bp, synthetic construct; identical to SEQ ID NO: 9829
  source 1..80: mol_type = other DNA

SEQ ID NO: 58480 - DNA, 80 bp, synthetic construct; identical to SEQ ID NO: 23670
  source 1..80: mol_type = other DNA

SEQ ID NO: 58481 - DNA, 80 bp, synthetic construct; identical to SEQ ID NO: 23671
  source 1..80: mol_type = other DNA

SEQ ID NO: 58482 - DNA, 80 bp, synthetic construct; identical to SEQ ID NO: 23672
  source 1..80: mol_type = other DNA

SEQ ID NO: 58483 - DNA, 80 bp, synthetic construct; identical to SEQ ID NO: 9830
  source 1..80: mol_type = other DNA

SEQ ID NO: 58484 - DNA, 80 bp, synthetic construct; identical to SEQ ID NO: 23674
  source 1..80: mol_type = other DNA

SEQ ID NO: 58485 - DNA, 80 bp, synthetic construct; identical to SEQ ID NO: 23675
  source 1..80: mol_type = other DNA

SEQ ID NO: 58486 - DNA, 80 bp, synthetic construct; identical to SEQ ID NO: 23676
  source 1..80: mol_type = other DNA

SEQ ID NO: 58487 - DNA, 80 bp, synthetic construct; identical to SEQ ID NO: 9831
  source 1..80: mol_type = other DNA

SEQ ID NO: 58488 - DNA, 80 bp, synthetic construct; identical to SEQ ID NO: 23678
  source 1..80: mol_type = other DNA

SEQ ID NO: 58489 - DNA, 80 bp, synthetic construct; identical to SEQ ID NO: 23679
  source 1..80: mol_type = other DNA

SEQ ID NO: 58490 - DNA, 80 bp, synthetic construct; identical to SEQ ID NO: 9832
  source 1..80: mol_type = other DNA

SEQ ID NO: 58491 - DNA, 80 bp, synthetic construct; identical to SEQ ID NO: 23681
  source 1..80: mol_type = other DNA

SEQ ID NO: 58492 - DNA, 80 bp, synthetic construct; identical to SEQ ID NO: 23682
  source 1..80: mol_type = other DNA

SEQ ID NO: 58493 - DNA, 80 bp, synthetic construct; identical to SEQ ID NO: 23683
  source 1..80: mol_type = other DNA

SEQ ID NO: 58494 - DNA, 80 bp, synthetic construct; identical to SEQ ID NO: 9833
  source 1..80: mol_type = other DNA

SEQ ID NO: 58495 - DNA, 80 bp, synthetic construct; identical to SEQ ID NO: 23685
  source 1..80: mol_type = other DNA

SEQ ID NO: 58496 - DNA, 80 bp, synthetic construct; identical to SEQ ID NO: 23686
  source 1..80: mol_type = other DNA

SEQ ID NO: 58497 - DNA, 80 bp, synthetic construct; identical to SEQ ID NO: 23687
  source 1..80: mol_type = other DNA

SEQ ID NO: 58498 - DNA, 80 bp, synthetic construct; identical to SEQ ID NO: 23688
  source 1..80: mol_type = other DNA

SEQ ID NO: 58499 - DNA, 80 bp, synthetic construct; identical to SEQ ID NO: 9834
  source 1..80: mol_type = other DNA

SEQ ID NO: 58500 - DNA, 80 bp, synthetic construct; identical to SEQ ID NO: 23690
  source 1..80: mol_type = other DNA

SEQ ID NO: 58501 - DNA, 80 bp, synthetic construct; identical to SEQ ID NO: 23691
  source 1..80: mol_type = other DNA

SEQ ID NO: 58502 - DNA, 80 bp, synthetic construct; identical to SEQ ID NO: 9835
  source 1..80: mol_type = other DNA

SEQ ID NO: 58503 - DNA, 80 bp, synthetic construct; identical to SEQ ID NO: 23693
  source 1..80: mol_type = other DNA

SEQ ID NO: 58504 - DNA, 80 bp, synthetic construct; identical to SEQ ID NO: 23694
  source 1..80: mol_type = other DNA

SEQ ID NO: 58505 - DNA, 80 bp, synthetic construct; identical to SEQ ID NO: 23695
  source 1..80: mol_type = other DNA

SEQ ID NO: 58506 - DNA, 80 bp, synthetic construct; identical to SEQ ID NO: 9836
  source 1..80: mol_type = other DNA

SEQ ID NO: 58507 - DNA, 80 bp, synthetic construct; identical to SEQ ID NO: 23697
  source 1..80: mol_type = other DNA

SEQ ID NO: 58508 - DNA, 80 bp, synthetic construct; identical to SEQ ID NO: 23698
  source 1..80: mol_type = other DNA

SEQ ID NO: 58509 - DNA, 80 bp, synthetic construct; identical to SEQ ID NO: 23699
  source 1..80: mol_type = other DNA

SEQ ID NO: 58510 - DNA, 80 bp, synthetic construct; identical to SEQ ID NO: 23700
  source 1..80: mol_type = other DNA

SEQ ID NO: 58511 - DNA, 80 bp, synthetic construct; identical to SEQ ID NO: 9837
  source 1..80: mol_type = other DNA

SEQ ID NO: 58512 - DNA, 80 bp, synthetic construct; identical to SEQ ID NO: 23702
  source 1..80: mol_type = other DNA

SEQ ID NO: 58513 - DNA, 80 bp, synthetic construct; identical to SEQ ID NO: 23703
  source 1..80: mol_type = other DNA

SEQ ID NO: 58514 - DNA, 80 bp, synthetic construct; identical to SEQ ID NO: 9838
  source 1..80: mol_type = other DNA

SEQ ID NO: 58515 - DNA, 80 bp, synthetic construct; identical to SEQ ID NO: 23705
  source 1..80: mol_type = other DNA

SEQ ID NO: 58516 - DNA, 80 bp, synthetic construct; identical to SEQ ID NO: 23706
  source 1..80: mol_type = other DNA

SEQ ID NO: 58517 - DNA, 80 bp, synthetic construct; identical to SEQ ID NO: 23707
  source 1..80: mol_type = other DNA

SEQ ID NO: 58518 - DNA, 80 bp, synthetic construct; identical to SEQ ID NO: 9839
  source 1..80: mol_type = other DNA

SEQ ID NO: 58519 - DNA, 80 bp, synthetic construct; identical to SEQ ID NO: 23710
  source 1..80: mol_type = other DNA

SEQ ID NO: 58520 - DNA, 80 bp, synthetic construct; identical to SEQ ID NO: 23711
  source 1..80: mol_type = other DNA

SEQ ID NO: 58521 - DNA, 80 bp, synthetic construct; identical to SEQ ID NO: 9840
  source 1..80: mol_type = other DNA

SEQ ID NO: 58522 - DNA, 80 bp, synthetic construct; identical to SEQ ID NO: 23713
  source 1..80: mol_type = other DNA

SEQ ID NO: 58523 - DNA, 80 bp, synthetic construct; identical to SEQ ID NO: 23714
  source 1..80: mol_type = other DNA

SEQ ID NO: 58524 - DNA, 80 bp, synthetic construct; identical to SEQ ID NO: 23715
  source 1..80: mol_type = other DNA

SEQ ID NO: 58525 - DNA, 80 bp, synthetic construct; identical to SEQ ID NO: 9841
  source 1..80: mol_type = other DNA

SEQ ID NO: 58526 - DNA, 80 bp, synthetic construct; identical to SEQ ID NO: 23717
  source 1..80: mol_type = other DNA

SEQ ID NO: 58527 - DNA, 80 bp, synthetic construct; identical to SEQ ID NO: 23718
  source 1..80: mol_type = other DNA

SEQ ID NO: 58528 - DNA, 80 bp, synthetic construct; identical to SEQ ID NO: 23719
  source 1..80: mol_type = other DNA

SEQ ID NO: 58529 - DNA, 80 bp, synthetic construct; identical to SEQ ID NO: 23720
  source 1..80: mol_type = other DNA

SEQ ID NO: 58530 - DNA, 80 bp, synthetic construct; identical to SEQ ID NO: 9842
  source 1..80: mol_type = other DNA

SEQ ID NO: 58531 - DNA, 80 bp, synthetic construct; identical to SEQ ID NO: 23722
  source 1..80: mol_type = other DNA

SEQ ID NO: 58532 - DNA, 80 bp, synthetic construct; identical to SEQ ID NO: 23723
  source 1..80: mol_type = other DNA

SEQ ID NO: 58533 - DNA, 80 bp, synthetic construct; identical to SEQ ID NO: 9843
  source 1..80: mol_type = other DNA

SEQ ID NO: 58534 - DNA, 80 bp, synthetic construct; identical to SEQ ID NO: 23725
  source 1..80: mol_type = other DNA

SEQ ID NO: 58535 - DNA, 80 bp, synthetic construct; identical to SEQ ID NO: 23726
  source 1..80: mol_type = other DNA

SEQ ID NO: 58536 - DNA, 80 bp, synthetic construct; identical to SEQ ID NO: 23727
  source 1..80: mol_type = other DNA

SEQ ID NO: 58537 - DNA, 80 bp, synthetic construct; identical to SEQ ID NO: 9844
  source 1..80: mol_type = other DNA

SEQ ID NO: 58538 - DNA, 80 bp, synthetic construct; identical to SEQ ID NO: 23729
  source 1..80: mol_type = other DNA

SEQ ID NO: 58539 - DNA, 80 bp, synthetic construct; identical to SEQ ID NO: 23730
  source 1..80: mol_type = other DNA

SEQ ID NO: 58540 - DNA, 80 bp, synthetic construct; identical to SEQ ID NO: 23731
  source 1..80: mol_type = other DNA

SEQ ID NO: 58541 - DNA, 80 bp, synthetic construct; identical to SEQ ID NO: 23732
  source 1..80: mol_type = other DNA

SEQ ID NO: 58542 - DNA, 80 bp, synthetic construct; identical to SEQ ID NO: 9845
  source 1..80: mol_type = other DNA

SEQ ID NO: 58543 - DNA, 80 bp, synthetic construct; identical to SEQ ID NO: 23734
  source 1..80: mol_type = other DNA

SEQ ID NO: 58544 - DNA, 80 bp, synthetic construct; identical to SEQ ID NO: 23735
  source 1..80: mol_type = other DNA

SEQ ID NO: 58545 - DNA, 80 bp, synthetic construct; identical to SEQ ID NO: 23736
  source 1..80: mol_type = other DNA

SEQ ID NO: 58546 - DNA, 80 bp, synthetic construct; identical to SEQ ID NO: 9846
  source 1..80: mol_type = other DNA

SEQ ID NO: 58547 - DNA, 80 bp, synthetic construct; identical to SEQ ID NO: 23738
  source 1..80: mol_type = other DNA

SEQ ID NO: 58548 - DNA, 80 bp, synthetic construct; identical to SEQ ID NO: 23739
  source 1..80: mol_type = other DNA

SEQ ID NO: 58549 - DNA, 80 bp, synthetic construct; identical to SEQ ID NO: 9847
  source 1..80: mol_type = other DNA

SEQ ID NO: 58550 - DNA, 80 bp, synthetic construct; identical to SEQ ID NO: 23741
  source 1..80: mol_type = other DNA

SEQ ID NO: 58551 - DNA, 80 bp, synthetic construct; identical to SEQ ID NO: 23742
  source 1..80: mol_type = other DNA

SEQ ID NO: 58552 - DNA, 80 bp, synthetic construct; identical to SEQ ID NO: 23743
  source 1..80: mol_type = other DNA

SEQ ID NO: 58553 - DNA, 80 bp, synthetic construct; identical to SEQ ID NO: 23744
  source 1..80: mol_type = other DNA

SEQ ID NO: 58554 - DNA, 80 bp, synthetic construct; identical to SEQ ID NO: 9848
  source 1..80: mol_type = other DNA

SEQ ID NO: 58555 - DNA, 80 bp, synthetic construct; identical to SEQ ID NO: 23746
  source 1..80: mol_type = other DNA

SEQ ID NO: 58556 - DNA, 80 bp, synthetic construct; identical to SEQ ID NO: 23747
  source 1..80: mol_type = other DNA

SEQ ID NO: 58557 - DNA, 80 bp, synthetic construct; identical to SEQ ID NO: 23748
  source 1..80: mol_type = other DNA

SEQ ID NO: 58558 - DNA, 80 bp, synthetic construct; identical to SEQ ID NO: 23749
  source 1..80: mol_type = other DNA

SEQ ID NO: 58559 - DNA, 80 bp, synthetic construct; identical to SEQ ID NO: 9849
  source 1..80: mol_type = other DNA

SEQ ID NO: 58560 - DNA, 80 bp, synthetic construct; identical to SEQ ID NO: 23751
  source 1..80: mol_type = other DNA

SEQ ID NO: 58561 - DNA, 80 bp, synthetic construct; identical to SEQ ID NO: 23752
  source 1..80: mol_type = other DNA

SEQ ID NO: 58562 - DNA, 80 bp, synthetic construct; identical to SEQ ID NO: 9850
  source 1..80: mol_type = other DNA

SEQ ID NO: 58563 - DNA, 80 bp, synthetic construct; identical to SEQ ID NO: 23754
  source 1..80: mol_type = other DNA

SEQ ID NO: 58564 - DNA, 80 bp, synthetic construct; identical to SEQ ID NO: 23755
  source 1..80: mol_type = other DNA

SEQ ID NO: 58565 - DNA, 80 bp, synthetic construct; identical to SEQ ID NO: 23756
  source 1..80: mol_type = other DNA

SEQ ID NO: 58566 - DNA, 80 bp, synthetic construct; identical to SEQ ID NO: 9851
  source 1..80: mol_type = other DNA

SEQ ID NO: 58567 - DNA, 80 bp, synthetic construct; identical to SEQ ID NO: 23758
  source 1..80: mol_type = other DNA

SEQ ID NO: 58568 - DNA, 80 bp, synthetic construct; identical to SEQ ID NO: 23759
  source 1..80: mol_type = other DNA

SEQ ID NO: 58569 - DNA, 80 bp, synthetic construct; identical to SEQ ID NO: 23760
  source 1..80: mol_type = other DNA

SEQ ID NO: 58570 - DNA, 80 bp, synthetic construct; identical to SEQ ID NO: 9852
  source 1..80: mol_type = other DNA

SEQ ID NO: 58571 - DNA, 80 bp, synthetic construct; identical to SEQ ID NO: 23762
  source 1..80: mol_type = other DNA

SEQ ID NO: 58572 - DNA, 80 bp, synthetic construct; identical to SEQ ID NO: 23763
  source 1..80: mol_type = other DNA

SEQ ID NO: 58573 - DNA, 80 bp, synthetic construct; identical to SEQ ID NO: 9853
  source 1..80: mol_type = other DNA

SEQ ID NO: 58574 - DNA, 80 bp, synthetic construct; identical to SEQ ID NO: 23765
  source 1..80: mol_type = other DNA

SEQ ID NO: 58575 - DNA, 80 bp, synthetic construct; identical to SEQ ID NO: 23766
  source 1..80: mol_type = other DNA

SEQ ID NO: 58576 - DNA, 80 bp, synthetic construct; identical to SEQ ID NO: 23767
  source 1..80: mol_type = other DNA

SEQ ID NO: 58577 - DNA, 80 bp, synthetic construct; identical to SEQ ID NO: 9854
  source 1..80: mol_type = other DNA

SEQ ID NO: 58578 - DNA, 80 bp, synthetic construct; identical to SEQ ID NO: 23769
  source 1..80: mol_type = other DNA

SEQ ID NO: 58579 - DNA, 80 bp, synthetic construct; identical to SEQ ID NO: 23770
  source 1..80: mol_type = other DNA

SEQ ID NO: 58580 - DNA, 80 bp, synthetic construct; identical to SEQ ID NO: 23771
  source 1..80: mol_type = other DNA

SEQ ID NO: 58581 - DNA, 80 bp, synthetic construct; identical to SEQ ID NO: 23772
  source 1..80: mol_type = other DNA

SEQ ID NO: 58582 - DNA, 80 bp, synthetic construct; identical to SEQ ID NO: 9855
  source 1..80: mol_type = other DNA

SEQ ID NO: 58583 - DNA, 80 bp, synthetic construct; identical to SEQ ID NO: 23774
  source 1..80: mol_type = other DNA

SEQ ID NO: 58584 - DNA, 80 bp, synthetic construct; identical to SEQ ID NO: 23775
  source 1..80: mol_type = other DNA

SEQ ID NO: 58585 - DNA, 80 bp, synthetic construct; identical to SEQ ID NO: 23776
  source 1..80: mol_type = other DNA

SEQ ID NO: 58586 - DNA, 80 bp, synthetic construct; identical to SEQ ID NO: 9856
  source 1..80: mol_type = other DNA

SEQ ID NO: 58587 - DNA, 80 bp, synthetic construct; identical to SEQ ID NO: 23778
  source 1..80: mol_type = other DNA

SEQ ID NO: 58588 - DNA, 80 bp, synthetic construct; identical to SEQ ID NO: 23779
  source 1..80: mol_type = other DNA

SEQ ID NO: 58589 - DNA, 80 bp, synthetic construct; identical to SEQ ID NO: 23780
  source 1..80: mol_type = other DNA

SEQ ID NO: 58590 - DNA, 80 bp, synthetic construct; identical to SEQ ID NO: 23781
  source 1..80: mol_type = other DNA

SEQ ID NO: 58591 - DNA, 80 bp, synthetic construct; identical to SEQ ID NO: 9857
  source 1..80: mol_type = other DNA

SEQ ID NO: 58592 - DNA, 80 bp, synthetic construct; identical to SEQ ID NO: 23783
  source 1..80: mol_type = other DNA

SEQ ID NO: 58593 - DNA, 80 bp, synthetic construct; identical to SEQ ID NO: 23784
  source 1..80: mol_type = other DNA

SEQ ID NO: 58594 - DNA, 80 bp, synthetic construct; identical to SEQ ID NO: 23785
  source 1..80: mol_type = other DNA

SEQ ID NO: 58595 - DNA, 80 bp, synthetic construct; identical to SEQ ID NO: 9858
  source 1..80: mol_type = other DNA

SEQ ID NO: 58596 - DNA, 80 bp, synthetic construct; identical to SEQ ID NO: 23787
  source 1..80: mol_type = other DNA

SEQ ID NO: 58597 - DNA, 80 bp, synthetic construct; identical to SEQ ID NO: 23788
  source 1..80: mol_type = other DNA

SEQ ID NO: 58598 - DNA, 80 bp, synthetic construct; identical to SEQ ID NO: 9859
  source 1..80: mol_type = other DNA

SEQ ID NO: 58599 - DNA, 80 bp, synthetic construct; identical to SEQ ID NO: 23790
  source 1..80: mol_type = other DNA

SEQ ID NO: 58600 - DNA, 80 bp, synthetic construct; identical to SEQ ID NO: 23791
  source 1..80: mol_type = other DNA

SEQ ID NO: 58601 - DNA, 80 bp, synthetic construct; identical to SEQ ID NO: 23792
  source 1..80: mol_type = other DNA

SEQ ID NO: 58602 - DNA, 80 bp, synthetic construct; identical to SEQ ID NO: 23793
  source 1..80: mol_type = other DNA

SEQ ID NO: 58603 - DNA, 80 bp, synthetic construct; identical to SEQ ID NO: 9860
  source 1..80: mol_type = other DNA

SEQ ID NO: 58604 - DNA, 80 bp, synthetic construct; identical to SEQ ID NO: 23795
  source 1..80: mol_type = other DNA

SEQ ID NO: 58605 - DNA, 80 bp, synthetic construct; identical to SEQ ID NO: 23796
  source 1..80: mol_type = other DNA

SEQ ID NO: 58606 - DNA, 80 bp, synthetic construct; identical to SEQ ID NO: 23797
  source 1..80: mol_type = other DNA

SEQ ID NO: 58607 - DNA, 80 bp, synthetic construct; identical to SEQ ID NO: 9861
  source 1..80: mol_type = other DNA

SEQ ID NO: 58608 - DNA, 80 bp, synthetic construct; identical to SEQ ID NO: 23799
  source 1..80: mol_type = other DNA

SEQ ID NO: 58609 - DNA, 80 bp, synthetic construct; identical to SEQ ID NO: 23800
  source 1..80: mol_type = other DNA

SEQ ID NO: 58610 - DNA, 80 bp, synthetic construct; identical to SEQ ID NO: 23801
  source 1..80: mol_type = other DNA

SEQ ID NO: 58611 - DNA, 80 bp, synthetic construct; identical to SEQ ID NO: 9862
  source 1..80: mol_type = other DNA

SEQ ID NO: 58612 - DNA, 80 bp, synthetic construct; identical to SEQ ID NO: 23804
  source 1..80: mol_type = other DNA

SEQ ID NO: 58613 - DNA, 80 bp, synthetic construct; identical to SEQ ID NO: 23805
  source 1..80: mol_type = other DNA

SEQ ID NO: 58614 - DNA, 80 bp, synthetic construct; identical to SEQ ID NO: 9863
  source 1..80: mol_type = other DNA

SEQ ID NO: 58615 - DNA, 80 bp, synthetic construct; identical to SEQ ID NO: 23808
  source 1..80: mol_type = other DNA

SEQ ID NO: 58616 - DNA, 80 bp, synthetic construct; identical to SEQ ID NO: 23809
  source 1..80: mol_type = other DNA

SEQ ID NO: 58617 - DNA, 80 bp, synthetic construct; identical to SEQ ID NO: 23810
  source 1..80: mol_type = other DNA

SEQ ID NO: 58618 - DNA, 80 bp, synthetic construct; identical to SEQ ID NO: 9864
  source 1..80: mol_type = other DNA

SEQ ID NO: 58619 - DNA, 80 bp, synthetic construct; identical to SEQ ID NO: 23812
  source 1..80: mol_type = other DNA

SEQ ID NO: 58620 - DNA, 80 bp, synthetic construct; identical to SEQ ID NO: 23813
  source 1..80: mol_type = other DNA

SEQ ID NO: 58621 - DNA, 80 bp, synthetic construct; identical to SEQ ID NO: 9865
  source 1..80: mol_type = other DNA

SEQ ID NO: 58622 - DNA, 80 bp, synthetic construct; identical to SEQ ID NO: 23815
  source 1..80: mol_type = other DNA

SEQ ID NO: 58623 - DNA, 80 bp, synthetic construct; identical to SEQ ID NO: 23816
  source 1..80: mol_type = other DNA

SEQ ID NO: 58624 - DNA, 80 bp, synthetic construct; identical to SEQ ID NO: 23817
  source 1..80: mol_type = other DNA

SEQ ID NO: 58625 - DNA, 80 bp, synthetic construct; identical to SEQ ID NO: 23818
  source 1..80: mol_type = other DNA

SEQ ID NO: 58626 - DNA, 80 bp, synthetic construct; identical to SEQ ID NO: 9866
  source 1..80: mol_type = other DNA

SEQ ID NO: 58627 - DNA, 80 bp, synthetic construct; identical to SEQ ID NO: 23820
  source 1..80: mol_type = other DNA

SEQ ID NO: 58628 - DNA, 80 bp, synthetic construct; identical to SEQ ID NO: 23821
  source 1..80: mol_type = other DNA

SEQ ID NO: 58629 - DNA, 80 bp, synthetic construct; identical to SEQ ID NO: 23822
  source 1..80: mol_type = other DNA

SEQ ID NO: 58630 - DNA, 80 bp, synthetic construct; identical to SEQ ID NO: 9867
  source 1..80: mol_type = other DNA

SEQ ID NO: 58631 - DNA, 80 bp, synthetic construct; identical to SEQ ID NO: 23824
  source 1..80: mol_type = other DNA

SEQ ID NO: 58632 - DNA, 80 bp, synthetic construct; identical to SEQ ID NO: 23825
  source 1..80: mol_type = other DNA

SEQ ID NO: 58633 - DNA, 80 bp, synthetic construct; identical to SEQ ID NO: 9868
  source 1..80: mol_type = other DNA

SEQ ID NO: 58634 - DNA, 80 bp, synthetic construct; identical to SEQ ID NO: 23827
  source 1..80: mol_type = other DNA

SEQ ID NO: 58635 - DNA, 80 bp, synthetic construct; identical to SEQ ID NO: 23828
  source 1..80: mol_type = other DNA

SEQ ID NO: 58636 - DNA, 80 bp, synthetic construct; identical to SEQ ID NO: 23829
  source 1..80: mol_type = other DNA

SEQ ID NO: 58637 - DNA, 80 bp, synthetic construct; identical to SEQ ID NO: 9869
  source 1..80: mol_type = other DNA

SEQ ID NO: 58638 - DNA, 80 bp, synthetic construct; identical to SEQ ID NO: 23831
  source 1..80: mol_type = other DNA

SEQ ID NO: 58639 - DNA, 80 bp, synthetic construct; identical to SEQ ID NO: 23832
  source 1..80: mol_type = other DNA

SEQ ID NO: 58640 - DNA, 80 bp, synthetic construct; identical to SEQ ID NO: 23833
  source 1..80: mol_type = other DNA

SEQ ID NO: 58641 - DNA, 80 bp, synthetic construct; identical to SEQ ID NO: 9870
  source 1..80: mol_type = other DNA

SEQ ID NO: 58642 - DNA, 80 bp, synthetic construct; identical to SEQ ID NO: 23835
  source 1..80: mol_type = other DNA

SEQ ID NO: 58643 - DNA, 80 bp, synthetic construct; identical to SEQ ID NO: 23837
  source 1..80: mol_type = other DNA

SEQ ID NO: 58644 - DNA, 80 bp, synthetic construct; identical to SEQ ID NO: 9871
  source 1..80: mol_type = other DNA

SEQ ID NO: 58645 - DNA, 80 bp, synthetic construct; identical to SEQ ID NO: 23839
  source 1..80: mol_type = other DNA

SEQ ID NO: 58646 - DNA, 80 bp, synthetic construct; identical to SEQ ID NO: 23840
  source 1..80: mol_type = other DNA

SEQ ID NO: 58647 - DNA, 80 bp, synthetic construct; identical to SEQ ID NO: 23841
  source 1..80: mol_type = other DNA

SEQ ID NO: 58648 - DNA, 80 bp, synthetic construct; identical to SEQ ID NO: 23842
  source 1..80: mol_type = other DNA

SEQ ID NO: 58649 - DNA, 80 bp, synthetic construct; identical to SEQ ID NO: 9872
  source 1..80: mol_type = other DNA

SEQ ID NO: 58650 - DNA, 80 bp, synthetic construct; identical to SEQ ID NO: 23844
  source 1..80: mol_type = other DNA

SEQ ID NO: 58651 - DNA, 80 bp, synthetic construct; identical to SEQ ID NO: 23845
  source 1..80: mol_type = other DNA

SEQ ID NO: 58652 - DNA, 80 bp, synthetic construct; identical to SEQ ID NO: 9873
  source 1..80: mol_type = other DNA

SEQ ID NO: 58653 - DNA, 80 bp, synthetic construct; identical to SEQ ID NO: 23847
  source 1..80: mol_type = other DNA

SEQ ID NO: 58654 - DNA, 80 bp, synthetic construct; identical to SEQ ID NO: 23848
  source 1..80: mol_type = other DNA

SEQ ID NO: 58655 - DNA, 80 bp, synthetic construct; identical to SEQ ID NO: 23849
  source 1..80: mol_type = other DNA

SEQ ID NO: 58656 - DNA, 80 bp, synthetic construct; identical to SEQ ID NO: 23850
  source 1..80: mol_type = other DNA

SEQ ID NO: 58657 - DNA, 80 bp, synthetic construct; identical to SEQ ID NO: 9874
  source 1..80: mol_type = other DNA

SEQ ID NO: 58658 - DNA, 80 bp, synthetic construct; identical to SEQ ID NO: 23852
  source 1..80: mol_type = other DNA

SEQ ID NO: 58659 - DNA, 80 bp, synthetic construct; identical to SEQ ID NO: 23853
  source 1..80: mol_type = other DNA

SEQ ID NO: 58660 - DNA, 80 bp, synthetic construct; identical to SEQ ID NO: 9875
  source 1..80: mol_type = other DNA

SEQ ID NO: 58661 - DNA, 80 bp, synthetic construct; identical to SEQ ID NO: 23855
  source 1..80: mol_type = other DNA

SEQ ID NO: 58662 - DNA, 80 bp, synthetic construct; identical to SEQ ID NO: 23856
  source 1..80: mol_type = other DNA

SEQ ID NO: 58663 - DNA, 80 bp, synthetic construct; identical to SEQ ID NO: 23857
  source 1..80: mol_type = other DNA

SEQ ID NO: 58664 - DNA, 80 bp, synthetic construct; identical to SEQ ID NO: 23858
  source 1..80: mol_type = other DNA

SEQ ID NO: 58665 - DNA, 80 bp, synthetic construct; identical to SEQ ID NO: 9876
  source 1..80: mol_type = other DNA

SEQ ID NO: 58666 - DNA, 80 bp, synthetic construct; identical to SEQ ID NO: 23860
  source 1..80: mol_type = other DNA

SEQ ID NO: 58667 - DNA, 80 bp, synthetic construct; identical to SEQ ID NO: 23861
  source 1..80: mol_type = other DNA

SEQ ID NO: 58668 - DNA, 80 bp, synthetic construct; identical to SEQ ID NO: 9877
  source 1..80: mol_type = other DNA

SEQ ID NO: 58669 - DNA, 80 bp, synthetic construct; identical to SEQ ID NO: 23863
  source 1..80: mol_type = other DNA

SEQ ID NO: 58670 - DNA, 80 bp, synthetic construct; identical to SEQ ID NO: 23864
  source 1..80: mol_type = other DNA

SEQ ID NO: 58671 - DNA, 80 bp, synthetic construct; identical to SEQ ID NO: 23865
  source 1..80: mol_type = other DNA

SEQ ID NO: 58672 - DNA, 80 bp, synthetic construct; identical to SEQ ID NO: 23866
  source 1..80: mol_type = other DNA

SEQ ID NO: 58673 - DNA, 80 bp, synthetic construct; identical to SEQ ID NO: 9878
  source 1..80: mol_type = other DNA

SEQ ID NO: 58674 - DNA, 80 bp, synthetic construct; identical to SEQ ID NO: 23868
  source 1..80: mol_type = other DNA

SEQ ID NO: 58675 - DNA, 80 bp, synthetic construct; identical to SEQ ID NO: 23869
  source 1..80: mol_type = other DNA

SEQ ID NO: 58676 - DNA, 80 bp, synthetic construct; identical to SEQ ID NO: 23870
  source 1..80: mol_type = other DNA

SEQ ID NO: 58677 - DNA, 80 bp, synthetic construct; identical to SEQ ID NO: 9879
  source 1..80: mol_type = other DNA

SEQ ID NO: 58678 - DNA, 80 bp, synthetic construct; identical to SEQ ID NO: 23872
  source 1..80: mol_type = other DNA

SEQ ID NO: 58679 - DNA, 80 bp, synthetic construct; identical to SEQ ID NO: 23873
  source 1..80: mol_type = other DNA

SEQ ID NO: 58680 - DNA, 80 bp, synthetic construct; identical to SEQ ID NO: 9880
  source 1..80: mol_type = other DNA

SEQ ID NO: 58681 - DNA, 80 bp, synthetic construct; identical to SEQ ID NO: 23875
  source 1..80: mol_type = other DNA

SEQ ID NO: 58682 - DNA, 80 bp, synthetic construct; identical to SEQ ID NO: 23876
  source 1..80: mol_type = other DNA

SEQ ID NO: 58683 - DNA, 80 bp, synthetic construct; identical to SEQ ID NO: 23877
  source 1..80: mol_type = other DNA

SEQ ID NO: 58684 - DNA, 80 bp, synthetic construct; identical to SEQ ID NO: 23878
  source 1..80: mol_type = other DNA

SEQ ID NO: 58685 - DNA, 80 bp, synthetic construct; identical to SEQ ID NO: 23879
  source 1..80: mol_type = other DNA

SEQ ID NO: 58686 - DNA, 80 bp, synthetic construct; identical to SEQ ID NO: 9881
  source 1..80: mol_type = other DNA

SEQ ID NO: 58687 - DNA, 80 bp, synthetic construct; identical to SEQ ID NO: 23881
  source 1..80: mol_type = other DNA

SEQ ID NO: 58688 - DNA, 80 bp, synthetic construct; identical to SEQ ID NO: 23882
  source 1..80: mol_type = other DNA

SEQ ID NO: 58689 - DNA, 80 bp, synthetic construct; identical to SEQ ID NO: 9882
  source 1..80: mol_type = other DNA

SEQ ID NO: 58690 - DNA, 80 bp, synthetic construct; identical to SEQ ID NO: 23884
  source 1..80: mol_type = other DNA

SEQ ID NO: 58691 - DNA, 80 bp, synthetic construct; identical to SEQ ID NO: 23885
  source 1..80: mol_type = other DNA

SEQ ID NO: 58692 - DNA, 80 bp, synthetic construct; identical to SEQ ID NO: 23886
  source 1..80: mol_type = other DNA

SEQ ID NO: 58693 - DNA, 80 bp, synthetic construct; identical to SEQ ID NO: 9883
  source 1..80: mol_type = other DNA

SEQ ID NO: 58694 - DNA, 80 bp, synthetic construct; identical to SEQ ID NO: 23888
  source 1..80: mol_type = other DNA

SEQ ID NO: 58695 - DNA, 80 bp, synthetic construct; identical to SEQ ID NO: 23889
  source 1..80: mol_type = other DNA

SEQ ID NO: 58696 - DNA, 80 bp, synthetic construct; identical to SEQ ID NO: 23890
  source 1..80: mol_type = other DNA

SEQ ID NO: 58697 - DNA, 80 bp, synthetic construct; identical to SEQ ID NO: 23891
  source 1..80: mol_type = other DNA

SEQ ID NO: 58698 - DNA, 80 bp, synthetic construct; identical to SEQ ID NO: 9884
  source 1..80: mol_type = other DNA

SEQ ID NO: 58699 - DNA, 80 bp, synthetic construct; identical to SEQ ID NO: 23893
  source 1..80: mol_type = other DNA

SEQ ID NO: 58700 - DNA, 80 bp, synthetic construct; identical to SEQ ID NO: 23894
  source 1..80: mol_type = other DNA

SEQ ID NO: 58701 - DNA, 80 bp, synthetic construct; identical to SEQ ID NO: 23895
  source 1..80: mol_type = other DNA

SEQ ID NO: 58702 - DNA, 80 bp, synthetic construct; identical to SEQ ID NO: 9885
  source 1..80: mol_type = other DNA

SEQ ID NO: 58703 - DNA, 80 bp, synthetic construct; identical to SEQ ID NO: 23897
  source 1..80: mol_type = other DNA

SEQ ID NO: 58704 - DNA, 80 bp, synthetic construct; identical to SEQ ID NO: 23898
  source 1..80: mol_type = other DNA

SEQ ID NO: 58705 - DNA, 80 bp, synthetic construct; identical to SEQ ID NO: 23899
  source 1..80: mol_type = other DNA

SEQ ID NO: 58706 - DNA, 80 bp, synthetic construct; identical to SEQ ID NO: 9886
  source 1..80: mol_type = other DNA

SEQ ID NO: 58707 - DNA, 80 bp, synthetic construct; identical to SEQ ID NO: 23901
  source 1..80: mol_type = other DNA

SEQ ID NO: 58708 - DNA, 80 bp, synthetic construct; identical to SEQ ID NO: 23902
  source 1..80: mol_type = other DNA

SEQ ID NO: 58709 - DNA, 80 bp, synthetic construct; identical to SEQ ID NO: 23903
  source 1..80: mol_type = other DNA

SEQ ID NO: 58710 - DNA, 80 bp, synthetic construct; identical to SEQ ID NO: 9887
  source 1..80: mol_type = other DNA

SEQ ID NO: 58711 - DNA, 80 bp, synthetic construct; identical to SEQ ID NO: 23905
  source 1..80: mol_type = other DNA

SEQ ID NO: 58712 - DNA, 80 bp, synthetic construct; identical to SEQ ID NO: 23906
  source 1..80: mol_type = other DNA

SEQ ID NO: 58713 - DNA, 80 bp, synthetic construct; identical to SEQ ID NO: 23907
  source 1..80: mol_type = other DNA

SEQ ID NO: 58714 - DNA, 80 bp, synthetic construct; identical to SEQ ID NO: 23908
  source 1..80: mol_type = other DNA

SEQ ID NO: 58715 - DNA, 80 bp, synthetic construct; identical to SEQ ID NO: 9888
  source 1..80: mol_type = other DNA

SEQ ID NO: 58716 - DNA, 80 bp, synthetic construct; identical to SEQ ID NO: 23910
  source 1..80: mol_type = other DNA

SEQ ID NO: 58717 - DNA, 80 bp, synthetic construct; identical to SEQ ID NO: 23912
  source 1..80: mol_type = other DNA

SEQ ID NO: 58718 - DNA, 80 bp, synthetic construct; identical to SEQ ID NO: 9889
  source 1..80: mol_type = other DNA

SEQ ID NO: 58719 - DNA, 80 bp, synthetic construct; identical to SEQ ID NO: 23914
  source 1..80: mol_type = other DNA

SEQ ID NO: 58720 - DNA, 80 bp, synthetic construct; identical to SEQ ID NO: 23915
  source 1..80: mol_type = other DNA

SEQ ID NO: 58721 - DNA, 80 bp, synthetic construct; identical to SEQ ID NO: 23916
  source 1..80: mol_type = other DNA

SEQ ID NO: 58722 - DNA, 80 bp, synthetic construct; identical to SEQ ID NO: 23917
  source 1..80: mol_type = other DNA

SEQ ID NO: 58723 - DNA, 80 bp, synthetic construct; identical to SEQ ID NO: 9890
  source 1..80: mol_type = other DNA

SEQ ID NO: 58724 - DNA, 80 bp, synthetic construct; identical to SEQ ID NO: 23919
  source 1..80: mol_type = other DNA

SEQ ID NO: 58725 - DNA, 80 bp, synthetic construct; identical to SEQ ID NO: 23920
  source 1..80: mol_type = other DNA

SEQ ID NO: 58726 - DNA, 80 bp, synthetic construct; identical to SEQ ID NO: 9891
  source 1..80: mol_type = other DNA

SEQ ID NO: 58727 - DNA, 80 bp, synthetic construct; identical to SEQ ID NO: 23922
  source 1..80: mol_type = other DNA

SEQ ID NO: 58728 - DNA, 80 bp, synthetic construct; identical to SEQ ID NO: 23923
  source 1..80: mol_type = other DNA

SEQ ID NO: 58729 - DNA, 80 bp, synthetic construct; identical to SEQ ID NO: 23924
  source 1..80: mol_type = other DNA

SEQ ID NO: 58730 - DNA, 80 bp, synthetic construct; identical to SEQ ID NO: 23925
  source 1..80: mol_type = other DNA

SEQ ID NO: 58731 - DNA, 80 bp, synthetic construct; identical to SEQ ID NO: 9892
  source 1..80: mol_type = other DNA

SEQ ID NO: 58732 - DNA, 80 bp, synthetic construct; identical to SEQ ID NO: 23927
  source 1..80: mol_type = other DNA

SEQ ID NO: 58733 - DNA, 80 bp, synthetic construct; identical to SEQ ID NO: 23928
  source 1..80: mol_type = other DNA

SEQ ID NO: 58734 - DNA, 80 bp, synthetic construct; identical to SEQ ID NO: 9893
  source 1..80: mol_type = other DNA

SEQ ID NO: 58735 - DNA, 80 bp, synthetic construct; identical to SEQ ID NO: 23930
  source 1..80: mol_type = other DNA

SEQ ID NO: 58736 - DNA, 80 bp, synthetic construct; identical to SEQ ID NO: 23931
  source 1..80: mol_type = other DNA

SEQ ID NO: 58737 - DNA, 80 bp, synthetic construct; identical to SEQ ID NO: 23932
  source 1..80: mol_type = other DNA

SEQ ID NO: 58738 - DNA, 80 bp, synthetic construct; identical to SEQ ID NO: 9894
  source 1..80: mol_type = other DNA

SEQ ID NO: 58739 - DNA, 80 bp, synthetic construct; identical to SEQ ID NO: 23934
  source 1..80: mol_type = other DNA

SEQ ID NO: 58740 - DNA, 80 bp, synthetic construct; identical to SEQ ID NO: 23935
  source 1..80: mol_type = other DNA

SEQ ID NO: 58741 - DNA, 80 bp, synthetic construct; identical to SEQ ID NO: 23936
  source 1..80: mol_type = other DNA

SEQ ID NO: 58742 - DNA, 80 bp, synthetic construct; identical to SEQ ID NO: 9895
  source 1..80: mol_type = other DNA

SEQ ID NO: 58743 - DNA, 80 bp, synthetic construct; identical to SEQ ID NO: 23938
  source 1..80: mol_type = other DNA

SEQ ID NO: 58744 - DNA, 80 bp, synthetic construct; identical to SEQ ID NO: 23939
  source 1..80: mol_type = other DNA

SEQ ID NO: 58745 - DNA, 80 bp, synthetic construct; identical to SEQ ID NO: 23940
  source 1..80: mol_type = other DNA

SEQ ID NO: 58746 - DNA, 80 bp, synthetic construct; identical to SEQ ID NO: 23941
  source 1..80: mol_type = other DNA

SEQ ID NO: 58747 - DNA, 80 bp, synthetic construct; identical to SEQ ID NO: 9896
  source 1..80: mol_type = other DNA

SEQ ID NO: 58748 - DNA, 80 bp, synthetic construct; identical to SEQ ID NO: 23943
  source 1..80: mol_type = other DNA

SEQ ID NO: 58749 - DNA, 80 bp, synthetic construct; identical to SEQ ID NO: 23944
  source 1..80: mol_type = other DNA

SEQ ID NO: 58750 - DNA, 80 bp, synthetic construct; identical to SEQ ID NO: 9897
  source 1..80: mol_type = other DNA

SEQ ID NO: 58751 - DNA, 80 bp, synthetic construct; identical to SEQ ID NO: 23946
  source 1..80: mol_type = other DNA

SEQ ID NO: 58752 - DNA, 80 bp, synthetic construct; identical to SEQ ID NO: 23947
  source 1..80: mol_type = other DNA

SEQ ID NO: 58753 - DNA, 80 bp, synthetic construct; identical to SEQ ID NO: 23948
  source 1..80: mol_type = other DNA

SEQ ID NO: 58754 - DNA, 80 bp, synthetic construct; identical to SEQ ID NO: 23949
  source 1..80: mol_type = other DNA

SEQ ID NO: 58755 - DNA, 80 bp, synthetic construct; identical to SEQ ID NO: 9898
  source 1..80: mol_type = other DNA

SEQ ID NO: 58756 - DNA, 80 bp, synthetic construct; identical to SEQ ID NO: 23951
  source 1..80: mol_type = other DNA

SEQ ID NO: 58757 - DNA, 80 bp, synthetic construct; identical to SEQ ID NO: 23952
  source 1..80: mol_type = other DNA

SEQ ID NO: 58758 - DNA, 80 bp, synthetic construct; identical to SEQ ID NO: 9899
  source 1..80: mol_type = other DNA

SEQ ID NO: 58759 - DNA, 80 bp, synthetic construct; identical to SEQ ID NO: 23955
  source 1..80: mol_type = other DNA

SEQ ID NO: 58760 - DNA, 80 bp, synthetic construct; identical to SEQ ID NO: 23956
  source 1..80: mol_type = other DNA

SEQ ID NO: 58761 - DNA, 80 bp, synthetic construct; identical to SEQ ID NO: 23957
  source 1..80: mol_type = other DNA

SEQ ID NO: 58762 - DNA, 80 bp, synthetic construct; identical to SEQ ID NO: 9900
  source 1..80: mol_type = other DNA

SEQ ID NO: 58763 - DNA, 80 bp, synthetic construct; identical to SEQ ID NO: 23959
  source 1..80: mol_type = other DNA

SEQ ID NO: 58764 - DNA, 80 bp, synthetic construct; identical to SEQ ID NO: 23960
  source 1..80: mol_type = other DNA

SEQ ID NO: 58765 - DNA, 80 bp, synthetic construct; identical to SEQ ID NO: 9901
  source 1..80: mol_type = other DNA

SEQ ID NO: 58766 - DNA, 80 bp, synthetic construct; identical to SEQ ID NO: 23962
  source 1..80: mol_type = other DNA

SEQ ID NO: 58767 - DNA, 80 bp, synthetic construct; identical to SEQ ID NO: 23963
  source 1..80: mol_type = other DNA

SEQ ID NO: 58768 - DNA, 80 bp, synthetic construct; identical to SEQ ID NO: 23964
  source 1..80: mol_type = other DNA

SEQ ID NO: 58769 - DNA, 80 bp, synthetic construct; identical to SEQ ID NO: 9902
  source 1..80: mol_type = other DNA

SEQ ID NO: 58770 - DNA, 80 bp, synthetic construct; identical to SEQ ID NO: 23966
  source 1..80: mol_type = other DNA

SEQ ID NO: 58771 - DNA, 80 bp, synthetic construct; identical to SEQ ID NO: 23967
  source 1..80: mol_type = other DNA

SEQ ID NO: 58772 - DNA, 80 bp, synthetic construct; identical to SEQ ID NO: 23968
  source 1..80: mol_type = other DNA

SEQ ID NO: 58773 - DNA, 80 bp, synthetic construct; identical to SEQ ID NO: 9903
  source 1..80: mol_type = other DNA

SEQ ID NO: 58774 - DNA, 80 bp, synthetic construct; identical to SEQ ID NO: 23970
  source 1..80: mol_type = other DNA

SEQ ID NO: 58775 - DNA, 80 bp, synthetic construct; identical to SEQ ID NO: 23971
  source 1..80: mol_type = other DNA

SEQ ID NO: 58776 - DNA, 80 bp, synthetic construct; identical to SEQ ID NO: 23972
  source 1..80: mol_type = other DNA

SEQ ID NO: 58777 - DNA, 80 bp, synthetic construct; identical to SEQ ID NO: 9904
  source 1..80: mol_type = other DNA

SEQ ID NO: 58778 - DNA, 80 bp, synthetic construct; identical to SEQ ID NO: 23975
  source 1..80: mol_type = other DNA

SEQ ID NO: 58779 - DNA, 80 bp, synthetic construct; identical to SEQ ID NO: 23976
  source 1..80: mol_type = other DNA

SEQ ID NO: 58780 - DNA, 80 bp, synthetic construct; identical to SEQ ID NO: 23977
  source 1..80: mol_type = other DNA

SEQ ID NO: 58781 - DNA, 80 bp, synthetic construct; identical to SEQ ID NO: 9905
  source 1..80: mol_type = other DNA

SEQ ID NO: 58782 - DNA, 80 bp, synthetic construct; identical to SEQ ID NO: 23979
  source 1..80: mol_type = other DNA

SEQ ID NO: 58783 - DNA, 80 bp, synthetic construct; identical to SEQ ID NO: 23980
  source 1..80: mol_type = other DNA

SEQ ID NO: 58784 - DNA, 80 bp, synthetic construct; identical to SEQ ID NO: 9906
  source 1..80: mol_type = other DNA

SEQ ID NO: 58785 - DNA, 80 bp, synthetic construct; identical to SEQ ID NO: 23982
  source 1..80: mol_type = other DNA

SEQ ID NO: 58786 - DNA, 80 bp, synthetic construct; identical to SEQ ID NO: 23983
  source 1..80: mol_type = other DNA

SEQ ID NO: 58787 - DNA, 80 bp, synthetic construct; identical to SEQ ID NO: 23984
  source 1..80: mol_type = other DNA

SEQ ID NO: 58788 - DNA, 80 bp, synthetic construct; identical to SEQ ID NO: 23985
  source 1..80: mol_type = other DNA

SEQ ID NO: 58789 - DNA, 80 bp, synthetic construct; identical to SEQ ID NO: 9907
  source 1..80: mol_type = other DNA

SEQ ID NO: 58790 - DNA, 80 bp, synthetic construct; identical to SEQ ID NO: 23987
  source 1..80: mol_type = other DNA

SEQ ID NO: 58791 - DNA, 80 bp, synthetic construct; identical to SEQ ID NO: 23988
  source 1..80: mol_type = other DNA

SEQ ID NO: 58792 - DNA, 80 bp, synthetic construct; identical to SEQ ID NO: 23989
  source 1..80: mol_type = other DNA

SEQ ID NO: 58793 - DNA, 80 bp, synthetic construct; identical to SEQ ID NO: 9908
  source 1..80: mol_type = other DNA

SEQ ID NO: 58794 - DNA, 80 bp, synthetic construct; identical to SEQ ID NO: 23991
  source 1..80: mol_type = other DNA

SEQ ID NO: 58795 - DNA, 80 bp, synthetic construct; identical to SEQ ID NO: 23992
  source 1..80: mol_type = other DNA

SEQ ID NO: 58796 - DNA, 80 bp, synthetic construct; identical to SEQ ID NO: 9909
  source 1..80: mol_type = other DNA

SEQ ID NO: 58797 - DNA, 80 bp, synthetic construct; identical to SEQ ID NO: 23994
  source 1..80: mol_type = other DNA

SEQ ID NO: 58798 - DNA, 80 bp, synthetic construct; identical to SEQ ID NO: 23995
  source 1..80: mol_type = other DNA

SEQ ID NO: 58799 - DNA, 80 bp, synthetic construct; identical to SEQ ID NO: 9910
  source 1..80: mol_type = other DNA

SEQ ID NO: 58800 - DNA, 80 bp, synthetic construct; identical to SEQ ID NO: 23998
  source 1..80: mol_type = other DNA

SEQ ID NO: 58801 - DNA, 80 bp, synthetic construct; identical to SEQ ID NO: 23999
  source 1..80: mol_type = other DNA

SEQ ID NO: 58802 - DNA, 80 bp, synthetic construct; identical to SEQ ID NO: 24000
  source 1..80: mol_type = other DNA

SEQ ID NO: 58803 - DNA, 80 bp, synthetic construct; identical to SEQ ID NO: 9911
  source 1..80: mol_type = other DNA

SEQ ID NO: 58804 - DNA, 80 bp, synthetic construct; identical to SEQ ID NO: 24002
  source 1..80: mol_type = other DNA

SEQ ID NO: 58805 - DNA, 80 bp, synthetic construct; identical to SEQ ID NO: 24003
  source 1..80: mol_type = other DNA

SEQ ID NO: 58806 - DNA, 80 bp, synthetic construct; identical to SEQ ID NO: 24004
  source 1..80: mol_type = other DNA

SEQ ID NO: 58807 - DNA, 80 bp, synthetic construct; identical to SEQ ID NO: 24005
  source 1..80: mol_type = other DNA

SEQ ID NO: 58808 - DNA, 80 bp, synthetic construct; identical to SEQ ID NO: 9912
  source 1..80: mol_type = other DNA

SEQ ID NO: 58809 - DNA, 80 bp, synthetic construct; identical to SEQ ID NO: 24007
  source 1..80: mol_type = other DNA

SEQ ID NO: 58810 - DNA, 80 bp, synthetic construct; identical to SEQ ID NO: 24008
  source 1..80: mol_type = other DNA

SEQ ID NO: 58811 - DNA, 80 bp, synthetic construct; identical to SEQ ID NO: 9913
  source 1..80: mol_type = other DNA

SEQ ID NO: 58812 - DNA, 80 bp, synthetic construct; identical to SEQ ID NO: 24010
  source 1..80: mol_type = other DNA

SEQ ID NO: 58813 - DNA, 80 bp, synthetic construct; identical to SEQ ID NO: 24011
  source 1..80: mol_type = other DNA

SEQ ID NO: 58814 - DNA, 80 bp, synthetic construct; identical to SEQ ID NO: 9914
  source 1..80: mol_type = other DNA

SEQ ID NO: 58815 - DNA, 80 bp, synthetic construct; identical to SEQ ID NO: 24014
  source 1..80: mol_type = other DNA

SEQ ID NO: 58816 - DNA, 80 bp, synthetic construct; identical to SEQ ID NO: 24015
  source 1..80: mol_type = other DNA

SEQ ID NO: 58817 - DNA, 80 bp, synthetic construct; identical to SEQ ID NO: 24017
  source 1..80: mol_type = other DNA

SEQ ID NO: 58818 - DNA, 80 bp, synthetic construct; identical to SEQ ID NO: 9915
  source 1..80: mol_type = other DNA

SEQ ID NO: 58819 - DNA, 80 bp, synthetic construct; identical to SEQ ID NO: 24019
  source 1..80: mol_type = other DNA

SEQ ID NO: 58820 - DNA, 80 bp, synthetic construct; identical to SEQ ID NO: 24020
  source 1..80: mol_type = other DNA

SEQ ID NO: 58821 - DNA, 80 bp, synthetic construct; identical to SEQ ID NO: 9916
  source 1..80: mol_type = other DNA

SEQ ID NO: 58822 - DNA, 80 bp, synthetic construct; identical to SEQ ID NO: 24022
  source 1..80: mol_type = other DNA

SEQ ID NO: 58823 - DNA, 80 bp, synthetic construct; identical to SEQ ID NO: 24023
  source 1..80: mol_type = other DNA

SEQ ID NO: 58824 - DNA, 80 bp, synthetic construct; identical to SEQ ID NO: 24024
  source 1..80: mol_type = other DNA

SEQ ID NO: 58825 - DNA, 80 bp, synthetic construct; identical to SEQ ID NO: 9917
  source 1..80: mol_type = other DNA

SEQ ID NO: 58826 - DNA, 80 bp, synthetic construct; identical to SEQ ID NO: 24026
  source 1..80: mol_type = other DNA

SEQ ID NO: 58827 - DNA, 80 bp, synthetic construct; identical to SEQ ID NO: 24027
  source 1..80: mol_type = other DNA

SEQ ID NO: 58828 - DNA, 80 bp, synthetic construct; identical to SEQ ID NO: 9918
  source 1..80: mol_type = other DNA

SEQ ID NO: 58829 - DNA, 80 bp, synthetic construct; identical to SEQ ID NO: 24030
  source 1..80: mol_type = other DNA

SEQ ID NO: 58830 - DNA, 80 bp, synthetic construct; identical to SEQ ID NO: 24031
  source 1..80: mol_type = other DNA

SEQ ID NO: 58831 - DNA, 80 bp, synthetic construct; identical to SEQ ID NO: 24032
  source 1..80: mol_type = other DNA

SEQ ID NO: 58832 - DNA, 80 bp, synthetic construct; identical to SEQ ID NO: 9919
  source 1..80: mol_type = other DNA

SEQ ID NO: 58833 - DNA, 80 bp, synthetic construct; identical to SEQ ID NO: 24034
  source 1..80: mol_type = other DNA

SEQ ID NO: 58834 - DNA, 80 bp, synthetic construct; identical to SEQ ID NO: 24035
  source 1..80: mol_type = other DNA

SEQ ID NO: 58835 - DNA, 80 bp, synthetic construct; identical to SEQ ID NO: 24036
  source 1..80: mol_type = other DNA

SEQ ID NO: 58836 - DNA, 80 bp, synthetic construct; identical to SEQ ID NO: 24037
  source 1..80: mol_type = other DNA

SEQ ID NO: 58837 - DNA, 80 bp, synthetic construct; identical to SEQ ID NO: 9920
  source 1..80: mol_type = other DNA

SEQ ID NO: 58838 - DNA, 80 bp, synthetic construct; identical to SEQ ID NO: 24039
  source 1..80: mol_type = other DNA

SEQ ID NO: 58839 - DNA, 80 bp, synthetic construct; identical to SEQ ID NO: 24040
  source 1..80: mol_type = other DNA

SEQ ID NO: 58840 - DNA, 80 bp, synthetic construct; identical to SEQ ID NO: 24041
  source 1..80: mol_type = other DNA

SEQ ID NO: 58841 - DNA, 80 bp, synthetic construct; identical to SEQ ID NO: 9921
  source 1..80: mol_type = other DNA

SEQ ID NO: 58842 - DNA, 80 bp, synthetic construct; identical to SEQ ID NO: 24043
  source 1..80: mol_type = other DNA

SEQ ID NO: 58843 - DNA, 80 bp, synthetic construct; identical to SEQ ID NO: 24044
  source 1..80: mol_type = other DNA

SEQ ID NO: 58844 - DNA, 80 bp, synthetic construct; identical to SEQ ID NO: 24045
  source 1..80: mol_type = other DNA

SEQ ID NO: 58845 - DNA, 80 bp, synthetic construct; identical to SEQ ID NO: 9922
  source 1..80: mol_type = other DNA

SEQ ID NO: 58846 - DNA, 80 bp, synthetic construct; identical to SEQ ID NO: 24047
  source 1..80: mol_type = other DNA

SEQ ID NO: 58847 - DNA, 80 bp, synthetic construct; identical to SEQ ID NO: 24048
  source 1..80: mol_type = other DNA

SEQ ID NO: 58848 - DNA, 80 bp, synthetic construct; identical to SEQ ID NO: 24049
  source 1..80: mol_type = other DNA

SEQ ID NO: 58849 - DNA, 80 bp, synthetic construct; identical to SEQ ID NO: 9923
  source 1..80: mol_type = other DNA

SEQ ID NO: 58850 - DNA, 80 bp, synthetic construct; identical to SEQ ID NO: 24051
  source 1..80: mol_type = other DNA

SEQ ID NO: 58851 - DNA, 80 bp, synthetic construct; identical to SEQ ID NO: 24052
  source 1..80: mol_type = other DNA

SEQ ID NO: 58852 - DNA, 80 bp, synthetic construct; identical to SEQ ID NO: 24053
  source 1..80: mol_type = other DNA

SEQ ID NO: 58853 - DNA, 80 bp, synthetic construct; identical to SEQ ID NO: 9924
  source 1..80: mol_type = other DNA

SEQ ID NO: 58854 - DNA, 80 bp, synthetic construct; identical to SEQ ID NO: 24055
  source 1..80: mol_type = other DNA

SEQ ID NO: 58855 - DNA, 80 bp, synthetic construct; identical to SEQ ID NO: 24056
  source 1..80: mol_type = other DNA

SEQ ID NO: 58856 - DNA, 80 bp, synthetic construct; identical to SEQ ID NO: 9925
  source 1..80: mol_type = other DNA

SEQ ID NO: 58857 - DNA, 80 bp, synthetic construct; identical to SEQ ID NO: 24058
  source 1..80: mol_type = other DNA

SEQ ID NO: 58858 - DNA, 80 bp, synthetic construct; identical to SEQ ID NO: 24059
  source 1..80: mol_type = other DNA

SEQ ID NO: 58859 - DNA, 80 bp, synthetic construct; identical to SEQ ID NO: 24060
  source 1..80: mol_type = other DNA

SEQ ID NO: 58860 - DNA, 80 bp, synthetic construct; identical to SEQ ID NO: 24061
  source 1..80: mol_type = other DNA

SEQ ID NO: 58861 - DNA, 80 bp, synthetic construct; identical to SEQ ID NO: 9926
  source 1..80: mol_type = other DNA

SEQ ID NO: 58862 - DNA, 80 bp, synthetic construct; identical to SEQ ID NO: 24063
  source 1..80: mol_type = other DNA

SEQ ID NO: 58863 - DNA, 80 bp, synthetic construct; identical to SEQ ID NO: 24064
  source 1..80: mol_type = other DNA

SEQ ID NO: 58864 - DNA, 80 bp, synthetic construct; identical to SEQ ID NO: 24065
  source 1..80: mol_type = other DNA

SEQ ID NO: 58865 - DNA, 80 bp, synthetic construct; identical to SEQ ID NO: 9927
  source 1..80: mol_type = other DNA

SEQ ID NO: 58866 - DNA, 80 bp, synthetic construct; identical to SEQ ID NO: 24067
  source 1..80: mol_type = other DNA

SEQ ID NO: 58867 - DNA, 80 bp, synthetic construct; identical to SEQ ID NO: 24068
  source 1..80: mol_type = other DNA

SEQ ID NO: 58868 - DNA, 80 bp, synthetic construct; identical to SEQ ID NO: 9928
  source 1..80: mol_type = other DNA

SEQ ID NO: 58869 - DNA, 80 bp, synthetic construct; identical to SEQ ID NO: 24070
  source 1..80: mol_type = other DNA

SEQ ID NO: 58870 - DNA, 80 bp, synthetic construct; identical to SEQ ID NO: 24071
  source 1..80: mol_type = other DNA

SEQ ID NO: 58871 - DNA, 80 bp, synthetic construct; identical to SEQ ID NO: 24072
  source 1..80: mol_type = other DNA

SEQ ID NO: 58872 - DNA, 80 bp, synthetic construct; identical to SEQ ID NO: 9929
  source 1..80: mol_type = other DNA

SEQ ID NO: 58873 - DNA, 80 bp, synthetic construct; identical to SEQ ID NO: 24074
  source 1..80: mol_type = other DNA

SEQ ID NO: 58874 - DNA, 80 bp, synthetic construct; identical to SEQ ID NO: 24075
  source 1..80: mol_type = other DNA

SEQ ID NO: 58875 - DNA, 80 bp, synthetic construct; identical to SEQ ID NO: 24077
  source 1..80: mol_type = other DNA

SEQ ID NO: 58876 - DNA, 80 bp, synthetic construct; identical to SEQ ID NO: 9930
  source 1..80: mol_type = other DNA

SEQ ID NO: 58877 - DNA, 80 bp, synthetic construct; identical to SEQ ID NO: 24079
  source 1..80: mol_type = other DNA

SEQ ID NO: 58878 - DNA, 80 bp, synthetic construct; identical to SEQ ID NO: 24080
  source 1..80: mol_type = other DNA

SEQ ID NO: 58879 - DNA, 80 bp, synthetic construct; identical to SEQ ID NO: 24081
  source 1..80: mol_type = other DNA

SEQ ID NO: 58880 - DNA, 80 bp, synthetic construct; identical to SEQ ID NO: 9931
  source 1..80: mol_type = other DNA

SEQ ID NO: 58881 - DNA, 80 bp, synthetic construct; identical to SEQ ID NO: 24083
  source 1..80: mol_type = other DNA

SEQ ID NO: 58882 - DNA, 80 bp, synthetic construct; identical to SEQ ID NO: 24084
  source 1..80: mol_type = other DNA

SEQ ID NO: 58883 - DNA, 80 bp, synthetic construct; identical to SEQ ID NO: 9932
  source 1..80: mol_type = other DNA

SEQ ID NO: 58884 - DNA, 80 bp, synthetic construct; identical to SEQ ID NO: 24086
  source 1..80: mol_type = other DNA

SEQ ID NO: 58885 - DNA, 80 bp, synthetic construct; identical to SEQ ID NO: 24087
  source 1..80: mol_type = other DNA

SEQ ID NO: 58886 - DNA, 80 bp, synthetic construct; identical to SEQ ID NO: 24088
  source 1..80: mol_type = other DNA

SEQ ID NO: 58887 - DNA, 80 bp, synthetic construct; identical to SEQ ID NO: 24089
  source 1..80: mol_type = other DNA

SEQ ID NO: 58888 - DNA, 80 bp, synthetic construct; identical to SEQ ID NO: 9933
  source 1..80: mol_type = other DNA

SEQ ID NO: 58889 - DNA, 80 bp, synthetic construct; identical to SEQ ID NO: 24091
  source 1..80: mol_type = other DNA

SEQ ID NO: 58890 - DNA, 80 bp, synthetic construct; identical to SEQ ID NO: 24092
  source 1..80: mol_type = other DNA

SEQ ID NO: 58891 - DNA, 80 bp, synthetic construct; identical to SEQ ID NO: 9934
  source 1..80: mol_type = other DNA

SEQ ID NO: 58892 - DNA, 80 bp, synthetic construct; identical to SEQ ID NO: 24094
  source 1..80: mol_type = other DNA

SEQ ID NO: 58893 - DNA, 80 bp, synthetic construct; identical to SEQ ID NO: 24095
  source 1..80: mol_type = other DNA

SEQ ID NO: 58894 - DNA, 80 bp, synthetic construct; identical to SEQ ID NO: 24096
  source 1..80: mol_type = other DNA

SEQ ID NO: 58895 - DNA, 80 bp, synthetic construct; identical to SEQ ID NO: 9935
  source 1..80: mol_type = other DNA

SEQ ID NO: 58896 - DNA, 80 bp, synthetic construct; identical to SEQ ID NO: 24098
  source 1..80: mol_type = other DNA

SEQ ID NO: 58897 - DNA, 80 bp, synthetic construct; identical to SEQ ID NO: 24099
  source 1..80: mol_type = other DNA

SEQ ID NO: 58898 - DNA, 80 bp, synthetic construct; identical to SEQ ID NO: 24100
  source 1..80: mol_type = other DNA

SEQ ID NO: 58899 - DNA, 80 bp, synthetic construct; identical to SEQ ID NO: 24101
  source 1..80: mol_type = other DNA

SEQ ID NO: 58900 - DNA, 80 bp, synthetic construct; identical to SEQ ID NO: 9936
  source 1..80: mol_type = other DNA

SEQ ID NO: 58901 - DNA, 80 bp, synthetic construct; identical to SEQ ID NO: 24103
  source 1..80: mol_type = other DNA

SEQ ID NO: 58902 - DNA, 80 bp, synthetic construct; identical to SEQ ID NO: 24104
  source 1..80: mol_type = other DNA

SEQ ID NO: 58903 - DNA, 80 bp, synthetic construct; identical to SEQ ID NO: 9937
  source 1..80: mol_type = other DNA

SEQ ID NO: 58904 - DNA, 80 bp, synthetic construct; identical to SEQ ID NO: 24106
  source 1..80: mol_type = other DNA

SEQ ID NO: 58905 - DNA, 80 bp, synthetic construct; identical to SEQ ID NO: 24107
  source 1..80: mol_type = other DNA

SEQ ID NO: 58906 - DNA, 80 bp, synthetic construct; identical to SEQ ID NO: 24108
  source 1..80: mol_type = other DNA

SEQ ID NO: 58907 - DNA, 80 bp, synthetic construct; identical to SEQ ID NO: 9938
  source 1..80: mol_type = other DNA

SEQ ID NO: 58908 - DNA, 80 bp, synthetic construct; identical to SEQ ID NO: 24110
  source 1..80: mol_type = other DNA

SEQ ID NO: 58909 - DNA, 80 bp, synthetic construct; identical to SEQ ID NO: 24111
  source 1..80: mol_type = other DNA

SEQ ID NO: 58910 - DNA, 80 bp, synthetic construct; identical to SEQ ID NO: 24112
  source 1..80: mol_type = other DNA

SEQ ID NO: 58911 - DNA, 80 bp, synthetic construct; identical to SEQ ID NO: 9939
  source 1..80: mol_type = other DNA

SEQ ID NO: 58912 - DNA, 80 bp, synthetic construct; identical to SEQ ID NO: 24114
  source 1..80: mol_type = other DNA

SEQ ID NO: 58913 - DNA, 80 bp, synthetic construct; identical to SEQ ID NO: 24115
  source 1..80: mol_type = other DNA

SEQ ID NO: 58914 - DNA, 80 bp, synthetic construct; identical to SEQ ID NO: 24116
  source 1..80: mol_type = other DNA

SEQ ID NO: 58915 - DNA, 80 bp, synthetic construct; identical to SEQ ID NO: 24117
  source 1..80: mol_type = other DNA

SEQ ID NO: 58916 - DNA, 80 bp, synthetic construct; identical to SEQ ID NO: 9940
  source 1..80: mol_type = other DNA

SEQ ID NO: 58917 - DNA, 80 bp, synthetic construct; identical to SEQ ID NO: 24120
  source 1..80: mol_type = other DNA

SEQ ID NO: 58918 - DNA, 80 bp, synthetic construct; identical to SEQ ID NO: 9941
  source 1..80: mol_type = other DNA

SEQ ID NO: 58919 - DNA, 80 bp, synthetic construct; identical to SEQ ID NO: 24122
  source 1..80: mol_type = other DNA

SEQ ID NO: 58920 - DNA, 80 bp, synthetic construct; identical to SEQ ID NO: 24123
  source 1..80: mol_type = other DNA

SEQ ID NO: 58921 - DNA, 80 bp, synthetic construct; identical to SEQ ID NO: 24124
  source 1..80: mol_type = other DNA

SEQ ID NO: 58922 - DNA, 80 bp, synthetic construct; identical to SEQ ID NO: 24125
  source 1..80: mol_type = other DNA

SEQ ID NO: 58923 - DNA, 80 bp, synthetic construct; identical to SEQ ID NO: 9942
  source 1..80: mol_type = other DNA

SEQ ID NO: 58924 - DNA, 80 bp, synthetic construct; identical to SEQ ID NO: 24127
  source 1..80: mol_type = other DNA

SEQ ID NO: 58925 - DNA, 80 bp, synthetic construct; identical to SEQ ID NO: 24128
  source 1..80: mol_type = other DNA

SEQ ID NO: 58926 - DNA, 80 bp, synthetic construct; identical to SEQ ID NO: 9943
  source 1..80: mol_type = other DNA

SEQ ID NO: 58927 - DNA, 80 bp, synthetic construct; identical to SEQ ID NO: 24130
  source 1..80: mol_type = other DNA

SEQ ID NO: 58928 - DNA, 80 bp, synthetic construct; identical to SEQ ID NO: 24131
  source 1..80: mol_type = other DNA

SEQ ID NO: 58929 - DNA, 80 bp, synthetic construct; identical to SEQ ID NO: 24132
  source 1..80: mol_type = other DNA

SEQ ID NO: 58930 - DNA, 80 bp, synthetic construct; identical to SEQ ID NO: 9944
  source 1..80: mol_type = other DNA

SEQ ID NO: 58931 - DNA, 80 bp, synthetic construct; identical to SEQ ID NO: 24134
  source 1..80: mol_type = other DNA

SEQ ID NO: 58932 - DNA, 80 bp, synthetic construct; identical to SEQ ID NO: 24135
  source 1..80: mol_type = other DNA

SEQ ID NO: 58933 - DNA, 80 bp, synthetic construct; identical to SEQ ID NO: 24136
  source 1..80: mol_type = other DNA

SEQ ID NO: 58934 - DNA, 80 bp, synthetic construct; identical to SEQ ID NO: 24137
  source 1..80: mol_type = other DNA

SEQ ID NO: 58935 - DNA, 80 bp, synthetic construct; identical to SEQ ID NO: 9945
  source 1..80: mol_type = other DNA

SEQ ID NO: 58936 - DNA, 80 bp, synthetic construct; identical to SEQ ID NO: 24139
  source 1..80: mol_type = other DNA

SEQ ID NO: 58937 - DNA, 80 bp, synthetic construct; identical to SEQ ID NO: 24140
  source 1..80: mol_type = other DNA

SEQ ID NO: 58938 - DNA, 80 bp, synthetic construct; identical to SEQ ID NO: 9946
  source 1..80: mol_type = other DNA

SEQ ID NO: 58939 - DNA, 80 bp, synthetic construct; identical to SEQ ID NO: 24142
  source 1..80: mol_type = other DNA

SEQ ID NO: 58940 - DNA, 80 bp, synthetic construct; identical to SEQ ID NO: 24143
  source 1..80: mol_type = other DNA

SEQ ID NO: 58941 - DNA, 80 bp, synthetic construct; identical to SEQ ID NO: 24144
  source 1..80: mol_type = other DNA

SEQ ID NO: 58942 - DNA, 80 bp, synthetic construct; identical to SEQ ID NO: 24145
  source 1..80: mol_type = other DNA

SEQ ID NO: 58943 - DNA, 80 bp, synthetic construct; identical to SEQ ID NO: 9947
  source 1..80: mol_type = other DNA

SEQ ID NO: 58944 - DNA, 80 bp, synthetic construct; identical to SEQ ID NO: 24147
  source 1..80: mol_type = other DNA

SEQ ID NO: 58945 - DNA, 80 bp, synthetic construct; identical to SEQ ID NO: 24148
  source 1..80: mol_type = other DNA

SEQ ID NO: 58946 - DNA, 80 bp, synthetic construct; identical to SEQ ID NO: 24149
  source 1..80: mol_type = other DNA

SEQ ID NO: 58947 - DNA, 80 bp, synthetic construct; identical to SEQ ID NO: 9948
  source 1..80: mol_type = other DNA

SEQ ID NO: 58948 - DNA, 80 bp, synthetic construct; identical to SEQ ID NO: 24151
  source 1..80: mol_type = other DNA

SEQ ID NO: 58949 - DNA, 80 bp, synthetic construct; identical to SEQ ID NO: 24152
  source 1..80: mol_type = other DNA

SEQ ID NO: 58950 - DNA, 80 bp, synthetic construct; identical to SEQ ID NO: 24153
  source 1..80: mol_type = other DNA

SEQ ID NO: 58951 - DNA, 80 bp, synthetic construct; identical to SEQ ID NO: 9949
  source 1..80: mol_type = other DNA

SEQ ID NO: 58952 - DNA, 80 bp, synthetic construct; identical to SEQ ID NO: 24155
  source 1..80: mol_type = other DNA

SEQ ID NO: 58953 - DNA, 80 bp, synthetic construct; identical to SEQ ID NO: 24156
  source 1..80: mol_type = other DNA

SEQ ID NO: 58954 - DNA, 80 bp, synthetic construct; identical to SEQ ID NO: 24157
  source 1..80: mol_type = other DNA

SEQ ID NO: 58955 - DNA, 80 bp, synthetic construct; identical to SEQ ID NO: 9950
  source 1..80: mol_type = other DNA

SEQ ID NO: 58956 - DNA, 80 bp, synthetic construct; identical to SEQ ID NO: 24159
  source 1..80: mol_type = other DNA

SEQ ID NO: 58957 - DNA, 80 bp, synthetic construct; identical to SEQ ID NO: 24160
  source 1..80: mol_type = other DNA

SEQ ID NO: 58958 - DNA, 80 bp, synthetic construct; identical to SEQ ID NO: 24161
  source 1..80: mol_type = other DNA

SEQ ID NO: 58959 - DNA, 80 bp, synthetic construct; identical to SEQ ID NO: 9951
  source 1..80: mol_type = other DNA

SEQ ID NO: 58960 - DNA, 80 bp, synthetic construct; identical to SEQ ID NO: 24163
  source 1..80: mol_type = other DNA

SEQ ID NO: 58961 - DNA, 80 bp, synthetic construct; identical to SEQ ID NO: 24164
  source 1..80: mol_type = other DNA

SEQ ID NO: 58962 - DNA, 80 bp, synthetic construct; identical to SEQ ID NO: 24165
  source 1..80: mol_type = other DNA

SEQ ID NO: 58963 - DNA, 80 bp, synthetic construct; identical to SEQ ID NO: 9952
  source 1..80: mol_type = other DNA

SEQ ID NO: 58964 - DNA, 80 bp, synthetic construct; identical to SEQ ID NO: 24167
  source 1..80: mol_type = other DNA

SEQ ID NO: 58965 - DNA, 80 bp, synthetic construct; identical to SEQ ID NO: 24168
  source 1..80: mol_type = other DNA

SEQ ID NO: 58966 - DNA, 80 bp, synthetic construct; identical to SEQ ID NO: 9953
  source 1..80: mol_type = other DNA

SEQ ID NO: 58967 - DNA, 80 bp, synthetic construct; identical to SEQ ID NO: 24170
  source 1..80: mol_type = other DNA

SEQ ID NO: 58968 - DNA, 80 bp, synthetic construct; identical to SEQ ID NO: 24171
  source 1..80: mol_type = other DNA

SEQ ID NO: 58969 - DNA, 80 bp, synthetic construct; identical to SEQ ID NO: 24172
  source 1..80: mol_type = other DNA

SEQ ID NO: 58970 - DNA, 80 bp, synthetic construct; identical to SEQ ID NO: 24173
  source 1..80: mol_type = other DNA

SEQ ID NO: 58971 - DNA, 80 bp, synthetic construct; identical to SEQ ID NO: 9954
  source 1..80: mol_type = other DNA

SEQ ID NO: 58972 - DNA, 80 bp, synthetic construct; identical to SEQ ID NO: 24175
  source 1..80: mol_type = other DNA

SEQ ID NO: 58973 - DNA, 80 bp, synthetic construct; identical to SEQ ID NO: 24176
  source 1..80: mol_type = other DNA

SEQ ID NO: 58974 - DNA, 80 bp, synthetic construct; identical to SEQ ID NO: 24177
  source 1..80: mol_type = other DNA

SEQ ID NO: 58975 - DNA, 80 bp, synthetic construct; identical to SEQ ID NO: 9955
  source 1..80: mol_type = other DNA

SEQ ID NO: 58976 - DNA, 80 bp, synthetic construct; identical to SEQ ID NO: 24179
  source 1..80: mol_type = other DNA

SEQ ID NO: 58977 - DNA, 80 bp, synthetic construct; identical to SEQ ID NO: 24180
  source 1..80: mol_type = other DNA

SEQ ID NO: 58978 - DNA, 80 bp, synthetic construct; identical to SEQ ID NO: 9956
  source 1..80: mol_type = other DNA

SEQ ID NO: 58979 - DNA, 80 bp, synthetic construct; identical to SEQ ID NO: 24182
  source 1..80: mol_type = other DNA

SEQ ID NO: 58980 - DNA, 80 bp, synthetic construct; identical to SEQ ID NO: 24183
  source 1..80: mol_type = other DNA

SEQ ID NO: 58981 - DNA, 80 bp, synthetic construct; identical to SEQ ID NO: 9957
  source 1..80: mol_type = other DNA

SEQ ID NO: 58982 - DNA, 80 bp, synthetic construct; identical to SEQ ID NO: 24185
  source 1..80: mol_type = other DNA

SEQ ID NO: 58983 - DNA, 80 bp, synthetic construct; identical to SEQ ID NO: 24186
  source 1..80: mol_type = other DNA

SEQ ID NO: 58984 - DNA, 80 bp, synthetic construct; identical to SEQ ID NO: 24187
  source 1..80: mol_type = other DNA

SEQ ID NO: 58985 - DNA, 80 bp, synthetic construct; identical to SEQ ID NO: 24188
  source 1..80: mol_type = other DNA

SEQ ID NO: 58986 - DNA, 80 bp, synthetic construct; identical to SEQ ID NO: 9958
  source 1..80: mol_type = other DNA

SEQ ID NO: 58987 - DNA, 80 bp, synthetic construct; identical to SEQ ID NO: 24190
  source 1..80: mol_type = other DNA

SEQ ID NO: 58988 - DNA, 80 bp, synthetic construct; identical to SEQ ID NO: 24191
  source 1..80: mol_type = other DNA

SEQ ID NO: 58989 - DNA, 80 bp, synthetic construct; identical to SEQ ID NO: 24192
  source 1..80: mol_type = other DNA

SEQ ID NO: 58990 - DNA, 80 bp, synthetic construct; identical to SEQ ID NO: 9959
  source 1..80: mol_type = other DNA

SEQ ID NO: 58991 - DNA, 80 bp, synthetic construct; identical to SEQ ID NO: 24194
  source 1..80: mol_type = other DNA

SEQ ID NO: 58992 - DNA, 80 bp, synthetic construct; identical to SEQ ID NO: 24195
  source 1..80: mol_type = other DNA

SEQ ID NO: 58993 - DNA, 80 bp, synthetic construct; identical to SEQ ID NO: 9960
  source 1..80: mol_type = other DNA

SEQ ID NO: 58994 - DNA, 80 bp, synthetic construct; identical to SEQ ID NO: 24197
  source 1..80: mol_type = other DNA

SEQ ID NO: 58995 - DNA, 80 bp, synthetic construct; identical to SEQ ID NO: 24198
  source 1..80: mol_type = other DNA

SEQ ID NO: 58996 - DNA, 80 bp, synthetic construct; identical to SEQ ID NO: 24199
  source 1..80: mol_type = other DNA

SEQ ID NO: 58997 - DNA, 80 bp, synthetic construct; identical to SEQ ID NO: 24200
  source 1..80: mol_type = other DNA

SEQ ID NO: 58998 - DNA, 80 bp, synthetic construct; identical to SEQ ID NO: 9961
  source 1..80: mol_type = other DNA

SEQ ID NO: 58999 - DNA, 80 bp, synthetic construct; identical to SEQ ID NO: 24202
  source 1..80: mol_type = other DNA

SEQ ID NO: 59000 - DNA, 80 bp, synthetic construct; identical to SEQ ID NO: 24204
  source 1..80: mol_type = other DNA

SEQ ID NO: 59001 - DNA, 80 bp, synthetic construct; identical to SEQ ID NO: 9962
  source 1..80: mol_type = other DNA

SEQ ID NO: 59002 - DNA, 80 bp, synthetic construct; identical to SEQ ID NO: 24206
  source 1..80: mol_type = other DNA

SEQ ID NO: 59003 - DNA, 80 bp, synthetic construct; identical to SEQ ID NO: 24207
  source 1..80: mol_type = other DNA

SEQ ID NO: 59004 - DNA, 80 bp, synthetic construct; identical to SEQ ID NO: 24208
  source 1..80: mol_type = other DNA

SEQ ID NO: 59005 - DNA, 80 bp, synthetic construct; identical to SEQ ID NO: 9963
  source 1..80: mol_type = other DNA

SEQ ID NO: 59006 - DNA, 80 bp, synthetic construct; identical to SEQ ID NO: 24210
  source 1..80: mol_type = other DNA

SEQ ID NO: 59007 - DNA, 80 bp, synthetic construct; identical to SEQ ID NO: 24211
  source 1..80: mol_type = other DNA

SEQ ID NO: 59008 - DNA, 80 bp, synthetic construct; identical to SEQ ID NO: 9964
  source 1..80: mol_type = other DNA

SEQ ID NO: 59009 - DNA, 80 bp, synthetic construct; identical to SEQ ID NO: 24213
  source 1..80: mol_type = other DNA

SEQ ID NO: 59010 - DNA, 80 bp, synthetic construct; identical to SEQ ID NO: 24214
  source 1..80: mol_type = other DNA

SEQ ID NO: 59011 - DNA, 80 bp, synthetic construct; identical to SEQ ID NO: 24215
  source 1..80: mol_type = other DNA

SEQ ID NO: 59012 - DNA, 80 bp, synthetic construct; identical to SEQ ID NO: 9965
  source 1..80: mol_type = other DNA

SEQ ID NO: 59013 - DNA, 80 bp, synthetic construct; identical to SEQ ID NO: 24217
  source 1..80: mol_type = other DNA

SEQ ID NO: 59014 - DNA, 80 bp, synthetic construct; identical to SEQ ID NO: 24218
  source 1..80: mol_type = other DNA

SEQ ID NO: 59015 - DNA, 80 bp, synthetic construct; identical to SEQ ID NO: 24219
  source 1..80: mol_type = other DNA

SEQ ID NO: 59016 - DNA, 80 bp, synthetic construct; identical to SEQ ID NO: 9966
  source 1..80: mol_type = other DNA

SEQ ID NO: 59017 - DNA, 80 bp, synthetic construct; identical to SEQ ID NO: 24221
  source 1..80: mol_type = other DNA

SEQ ID NO: 59018 - DNA, 80 bp, synthetic construct; identical to SEQ ID NO: 24222
  source 1..80: mol_type = other DNA

SEQ ID NO: 59019 - DNA, 80 bp, synthetic construct; identical to SEQ ID NO: 24223
  source 1..80: mol_type = other DNA

SEQ ID NO: 59020 - DNA, 80 bp, synthetic construct; identical to SEQ ID NO: 9967
  source 1..80: mol_type = other DNA

SEQ ID NO: 59021 - DNA, 80 bp, synthetic construct; identical to SEQ ID NO: 24225
  source 1..80: mol_type = other DNA

SEQ ID NO: 59022 - DNA, 80 bp, synthetic construct; identical to SEQ ID NO: 24226
  source 1..80: mol_type = other DNA

SEQ ID NO: 59023 - DNA, 80 bp, synthetic construct; identical to SEQ ID NO: 24227
  source 1..80: mol_type = other DNA

SEQ ID NO: 59024 - DNA, 80 bp, synthetic construct; identical to SEQ ID NO: 24228
  source 1..80: mol_type = other DNA

SEQ ID NO: 59025 - DNA, 80 bp, synthetic construct; identical to SEQ ID NO: 9968
  source 1..80: mol_type = other DNA

SEQ ID NO: 59026 - DNA, 80 bp, synthetic construct; identical to SEQ ID NO: 24230
  source 1..80: mol_type = other DNA

SEQ ID NO: 59027 - DNA, 80 bp, synthetic construct; identical to SEQ ID NO: 24231
  source 1..80: mol_type = other DNA

SEQ ID NO: 59028 - DNA, 80 bp, synthetic construct; identical to SEQ ID NO: 9969
  source 1..80: mol_type = other DNA

SEQ ID NO: 59029 - DNA, 80 bp, synthetic construct; identical to SEQ ID NO: 24234
  source 1..80: mol_type = other DNA

SEQ ID NO: 59030 - DNA, 80 bp, synthetic construct; identical to SEQ ID NO: 24235
  source 1..80: mol_type = other DNA

SEQ ID NO: 59031 - DNA, 80 bp, synthetic construct; identical to SEQ ID NO: 9970
  source 1..80: mol_type = other DNA

SEQ ID NO: 59032 - DNA, 80 bp, synthetic construct; identical to SEQ ID NO: 24237
  source 1..80: mol_type = other DNA

SEQ ID NO: 59033 - DNA, 80 bp, synthetic construct; identical to SEQ ID NO: 24238
  source 1..80: mol_type = other DNA

SEQ ID NO: 59034 - DNA, 80 bp, synthetic construct; identical to SEQ ID NO: 24239
  source 1..80: mol_type = other DNA

SEQ ID NO: 59035 - DNA, 80 bp, synthetic construct; identical to SEQ ID NO: 9971
  source 1..80: mol_type = other DNA

SEQ ID NO: 59036 - DNA, 80 bp, synthetic construct; identical to SEQ ID NO: 24241
  source 1..80: mol_type = other DNA

SEQ ID NO: 59037 - DNA, 80 bp, synthetic construct; identical to SEQ ID NO: 24242
  source 1..80: mol_type = other DNA

SEQ ID NO: 59038 - DNA, 80 bp, synthetic construct; identical to SEQ ID NO: 24243
  source 1..80: mol_type = other DNA

SEQ ID NO: 59039 - DNA, 80 bp, synthetic construct; identical to SEQ ID NO: 9972
  source 1..80: mol_type = other DNA

SEQ ID NO: 59040 - DNA, 80 bp, synthetic construct; identical to SEQ ID NO: 24245
  source 1..80: mol_type = other DNA

SEQ ID NO: 59041 - DNA, 80 bp, synthetic construct; identical to SEQ ID NO: 24246
  source 1..80: mol_type = other DNA

SEQ ID NO: 59042 - DNA, 80 bp, synthetic construct; identical to SEQ ID NO: 24247
  source 1..80: mol_type = other DNA

SEQ ID NO: 59043 - DNA, 80 bp, synthetic construct; identical to SEQ ID NO: 24248
  source 1..80: mol_type = other DNA

SEQ ID NO: 59044 - DNA, 80 bp, synthetic construct; identical to SEQ ID NO: 9973
  source 1..80: mol_type = other DNA

SEQ ID NO: 59045 - DNA, 80 bp, synthetic construct; identical to SEQ ID NO: 24250
  source 1..80: mol_type = other DNA

SEQ ID NO: 59046 - DNA, 80 bp, synthetic construct; identical to SEQ ID NO: 24251
  source 1..80: mol_type = other DNA

SEQ ID NO: 59047 - DNA, 80 bp, synthetic construct; identical to SEQ ID NO: 24252
  source 1..80: mol_type = other DNA

SEQ ID NO: 59048 - DNA, 80 bp, synthetic construct; identical to SEQ ID NO: 9974
  source 1..80: mol_type = other DNA

SEQ ID NO: 59049 - DNA, 80 bp, synthetic construct; identical to SEQ ID NO: 24254
  source 1..80: mol_type = other DNA

SEQ ID NO: 59050 - DNA, 80 bp, synthetic construct; identical to SEQ ID NO: 24255
  source 1..80: mol_type = other DNA

SEQ ID NO: 59051 - DNA, 80 bp, synthetic construct; identical to SEQ ID NO: 24256
  source 1..80: mol_type = other DNA

SEQ ID NO: 59052 - DNA, 80 bp, synthetic construct; identical to SEQ ID NO: 9975
  source 1..80: mol_type = other DNA

SEQ ID NO: 59053 - DNA, 80 bp, synthetic construct; identical to SEQ ID NO: 24258
  source 1..80: mol_type = other DNA

SEQ ID NO: 59054 - DNA, 80 bp, synthetic construct; identical to SEQ ID NO: 24259
  source 1..80: mol_type = other DNA

SEQ ID NO: 59055 - DNA, 80 bp, synthetic construct; identical to SEQ ID NO: 9976
  source 1..80: mol_type = other DNA

SEQ ID NO: 59056 - DNA, 80 bp, synthetic construct; identical to SEQ ID NO: 24261
  source 1..80: mol_type = other DNA

SEQ ID NO: 59057 - DNA, 80 bp, synthetic construct; identical to SEQ ID NO: 24262
  source 1..80: mol_type = other DNA

SEQ ID NO: 59058 - DNA, 80 bp, synthetic construct; identical to SEQ ID NO: 24263
  source 1..80: mol_type = other DNA

SEQ ID NO: 59059 - DNA, 80 bp, synthetic construct; identical to SEQ ID NO: 9977
  source 1..80: mol_type = other DNA

SEQ ID NO: 59060 - DNA, 80 bp, synthetic construct; identical to SEQ ID NO: 24265
  source 1..80: mol_type = other DNA

SEQ ID NO: 59061 - DNA, 80 bp, synthetic construct; identical to SEQ ID NO: 24266
  source 1..80: mol_type = other DNA

SEQ ID NO: 59062 - DNA, 80 bp, synthetic construct; identical to SEQ ID NO: 24267
  source 1..80: mol_type = other DNA

SEQ ID NO: 59063 - DNA, 80 bp, synthetic construct; identical to SEQ ID NO: 24268
  source 1..80: mol_type = other DNA

SEQ ID NO: 59064 - DNA, 80 bp, synthetic construct; identical to SEQ ID NO: 9978
  source 1..80: mol_type = other DNA

SEQ ID NO: 59065 - DNA, 80 bp, synthetic construct; identical to SEQ ID NO: 24270
  source 1..80: mol_type = other DNA

SEQ ID NO: 59066 - DNA, 80 bp, synthetic construct; identical to SEQ ID NO: 24271
  source 1..80: mol_type = other DNA

SEQ ID NO: 59067 - DNA, 80 bp, synthetic construct; identical to SEQ ID NO: 24272
  source 1..80: mol_type = other DNA

SEQ ID NO: 59068 - DNA, 80 bp, synthetic construct; identical to SEQ ID NO: 9979
  source 1..80: mol_type = other DNA

SEQ ID NO: 59069 - DNA, 80 bp, synthetic construct; identical to SEQ ID NO: 24274
  source 1..80: mol_type = other DNA

SEQ ID NO: 59070 - DNA, 80 bp, synthetic construct; identical to SEQ ID NO: 24275
  source 1..80: mol_type = other DNA

SEQ ID NO: 59071 - DNA, 80 bp, synthetic construct; identical to SEQ ID NO: 24276
  source 1..80: mol_type = other DNA

SEQ ID NO: 59072 - DNA, 80 bp, synthetic construct; identical to SEQ ID NO: 9980
  source 1..80: mol_type = other DNA

SEQ ID NO: 59073 - DNA, 80 bp, synthetic construct; identical to SEQ ID NO: 24278
  source 1..80: mol_type = other DNA

SEQ ID NO: 59074 - DNA, 80 bp, synthetic construct; identical to SEQ ID NO: 24279
  source 1..80: mol_type = other DNA

SEQ ID NO: 59075 - DNA, 80 bp, synthetic construct; identical to SEQ ID NO: 24280
  source 1..80: mol_type = other DNA

SEQ ID NO: 59076 - DNA, 80 bp, synthetic construct; identical to SEQ ID NO: 9981
  source 1..80: mol_type = other DNA

SEQ ID NO: 59077 - DNA, 80 bp, synthetic construct; identical to SEQ ID NO: 24282
  source 1..80: mol_type = other DNA

SEQ ID NO: 59078 - DNA, 80 bp, synthetic construct; identical to SEQ ID NO: 24283
  source 1..80: mol_type = other DNA

SEQ ID NO: 59079 - DNA, 80 bp, synthetic construct; identical to SEQ ID NO: 24284
  source 1..80: mol_type = other DNA

SEQ ID NO: 59080 - DNA, 80 bp, synthetic construct; identical to SEQ ID NO: 9982
  source 1..80: mol_type = other DNA

SEQ ID NO: 59081 - DNA, 80 bp, synthetic construct; identical to SEQ ID NO: 24286
  source 1..80: mol_type = other DNA

SEQ ID NO: 59082 - DNA, 80 bp, synthetic construct; identical to SEQ ID NO: 24287
  source 1..80: mol_type = other DNA

SEQ ID NO: 59083 - DNA, 80 bp, synthetic construct; identical to SEQ ID NO: 24288
  source 1..80: mol_type = other DNA

SEQ ID NO: 59084 - DNA, 80 bp, synthetic construct; identical to SEQ ID NO: 9983
  source 1..80: mol_type = other DNA

SEQ ID NO: 59085 - DNA, 80 bp, synthetic construct; identical to SEQ ID NO: 24290
  source 1..80: mol_type = other DNA

SEQ ID NO: 59086 - DNA, 80 bp, synthetic construct; identical to SEQ ID NO: 24291
  source 1..80: mol_type = other DNA

SEQ ID NO: 59087 - DNA, 80 bp, synthetic construct; identical to SEQ ID NO: 9984
  source 1..80: mol_type = other DNA

SEQ ID NO: 59088 - DNA, 80 bp, synthetic construct; identical to SEQ ID NO: 24293
  source 1..80: mol_type = other DNA

SEQ ID NO: 59089 - DNA, 80 bp, synthetic construct; identical to SEQ ID NO: 24294
  source 1..80: mol_type = other DNA

SEQ ID NO: 59090 - DNA, 80 bp, synthetic construct; identical to SEQ ID NO: 24295
  source 1..80: mol_type = other DNA

SEQ ID NO: 59091 - DNA, 80 bp, synthetic construct; identical to SEQ ID NO: 24296
  source 1..80: mol_type = other DNA

SEQ ID NO: 59092 - DNA, 80 bp, synthetic construct; identical to SEQ ID NO: 9985
  source 1..80: mol_type = other DNA

SEQ ID NO: 59093 - DNA, 80 bp, synthetic construct; identical to SEQ ID NO: 24298
  source 1..80: mol_type = other DNA

SEQ ID NO: 59094 - DNA, 80 bp, synthetic construct; identical to SEQ ID NO: 24299
  source 1..80: mol_type = other DNA

SEQ ID NO: 59095 - DNA, 80 bp, synthetic construct; identical to SEQ ID NO: 9986
  source 1..80: mol_type = other DNA

SEQ ID NO: 59096 - DNA, 80 bp, synthetic construct; identical to SEQ ID NO: 24301
  source 1..80: mol_type = other DNA

SEQ ID NO: 59097 - DNA, 80 bp, synthetic construct; identical to SEQ ID NO: 24302
  source 1..80: mol_type = other DNA

SEQ ID NO: 59098 - DNA, 80 bp, synthetic construct; identical to SEQ ID NO: 24303
  source 1..80: mol_type = other DNA

SEQ ID NO: 59099 - DNA, 80 bp, synthetic construct; identical to SEQ ID NO: 24304
  source 1..80: mol_type = other DNA

SEQ ID NO: 59100 - DNA, 80 bp, synthetic construct; identical to SEQ ID NO: 9987
  source 1..80: mol_type = other DNA

SEQ ID NO: 59101 - DNA, 80 bp, synthetic construct; identical to SEQ ID NO: 24306
  source 1..80: mol_type = other DNA

SEQ ID NO: 59102 - DNA, 80 bp, synthetic construct; identical to SEQ ID NO: 24307
  source 1..80: mol_type = other DNA

SEQ ID NO: 59103 - DNA, 80 bp, synthetic construct; identical to SEQ ID NO: 9988
  source 1..80: mol_type = other DNA

SEQ ID NO: 59104 - DNA, 80 bp, synthetic construct; identical to SEQ ID NO: 24310
  source 1..80: mol_type = other DNA

SEQ ID NO: 59105 - DNA, 80 bp, synthetic construct; identical to SEQ ID NO: 24311
  source 1..80: mol_type = other DNA

SEQ ID NO: 59106 - DNA, 80 bp, synthetic construct; identical to SEQ ID NO: 24312
  source 1..80: mol_type = other DNA

SEQ ID NO: 59107 - DNA, 80 bp, synthetic construct; identical to SEQ ID NO: 9989
  source 1..80: mol_type = other DNA

SEQ ID NO: 59108 - DNA, 80 bp, synthetic construct; identical to SEQ ID NO: 24314
  source 1..80: mol_type = other DNA

SEQ ID NO: 59109 - DNA, 80 bp, synthetic construct; identical to SEQ ID NO: 24315
  source 1..80: mol_type = other DNA

SEQ ID NO: 59110 - DNA, 80 bp, synthetic construct; identical to SEQ ID NO: 9990
  source 1..80: mol_type = other DNA

SEQ ID NO: 59111 - DNA, 80 bp, synthetic construct; identical to SEQ ID NO: 24317
  source 1..80: mol_type = other DNA

SEQ ID NO: 59112 - DNA, 80 bp, synthetic construct; identical to SEQ ID NO: 24318
  source 1..80: mol_type = other DNA

SEQ ID NO: 59113 - DNA, 80 bp, synthetic construct; identical to SEQ ID NO: 24319
  source 1..80: mol_type = other DNA

SEQ ID NO: 59114 - DNA, 80 bp, synthetic construct; identical to SEQ ID NO: 24320
  source 1..80: mol_type = other DNA

SEQ ID NO: 59115 - DNA, 80 bp, synthetic construct; identical to SEQ ID NO: 9991
  source 1..80: mol_type = other DNA

SEQ ID NO: 59116 - DNA, 80 bp, synthetic construct; identical to SEQ ID NO: 24322
  source 1..80: mol_type = other DNA

SEQ ID NO: 59117 - DNA, 80 bp, synthetic construct; identical to SEQ ID NO: 24323
  source 1..80: mol_type = other DNA

SEQ ID NO: 59118 - DNA, 80 bp, synthetic construct; identical to SEQ ID NO: 24324
  source 1..80: mol_type = other DNA

SEQ ID NO: 59119 - DNA, 80 bp, synthetic construct; identical to SEQ ID NO: 9992
  source 1..80: mol_type = other DNA

SEQ ID NO: 59120 - DNA, 80 bp, synthetic construct; identical to SEQ ID NO: 24326
  source 1..80: mol_type = other DNA

SEQ ID NO: 59121 - DNA, 80 bp, synthetic construct; identical to SEQ ID NO: 24327
  source 1..80: mol_type = other DNA

SEQ ID NO: 59122 - DNA, 80 bp, synthetic construct; identical to SEQ ID NO: 24328
  source 1..80: mol_type = other DNA

SEQ ID NO: 59123 - DNA, 80 bp, synthetic construct; identical to SEQ ID NO: 9993
  source 1..80: mol_type = other DNA

SEQ ID NO: 59124 - DNA, 80 bp, synthetic construct; identical to SEQ ID NO: 24330
  source 1..80: mol_type = other DNA

SEQ ID NO: 59125 - DNA, 80 bp, synthetic construct; identical to SEQ ID NO: 24331
  source 1..80: mol_type = other DNA

SEQ ID NO: 59126 - DNA, 80 bp, synthetic construct; identical to SEQ ID NO: 24332
  source 1..80: mol_type = other DNA

SEQ ID NO: 59127 - DNA, 80 bp, synthetic construct; identical to SEQ ID NO: 9994
  source 1..80: mol_type = other DNA

SEQ ID NO: 59128 - DNA, 80 bp, synthetic construct; identical to SEQ ID NO: 24334
  source 1..80: mol_type = other DNA

SEQ ID NO: 59129 - DNA, 80 bp, synthetic construct; identical to SEQ ID NO: 24335
  source 1..80: mol_type = other DNA

SEQ ID NO: 59130 - DNA, 80 bp, synthetic construct; identical to SEQ ID NO: 24336
  source 1..80: mol_type = other DNA

SEQ ID NO: 59131 - DNA, 80 bp, synthetic construct; identical to SEQ ID NO: 9995
  source 1..80: mol_type = other DNA

SEQ ID NO: 59132 - DNA, 80 bp, synthetic construct; identical to SEQ ID NO: 24338
  source 1..80: mol_type = other DNA

SEQ ID NO: 59133 - DNA, 80 bp, synthetic construct; identical to SEQ ID NO: 24340
  source 1..80: mol_type = other DNA

SEQ ID NO: 59134 - DNA, 80 bp, synthetic construct; identical to SEQ ID NO: 9996
  source 1..80: mol_type = other DNA

SEQ ID NO: 59135 - DNA, 80 bp, synthetic construct; identical to SEQ ID NO: 24342
  source 1..80: mol_type = other DNA

SEQ ID NO: 59136 - DNA, 80 bp, synthetic construct; identical to SEQ ID NO: 24343
  source 1..80: mol_type = other DNA

SEQ ID NO: 59137 - DNA, 80 bp, synthetic construct; identical to SEQ ID NO: 9997
  source 1..80: mol_type = other DNA

SEQ ID NO: 59138 - DNA, 80 bp, synthetic construct; identical to SEQ ID NO: 24345
  source 1..80: mol_type = other DNA

SEQ ID NO: 59139 - DNA, 80 bp, synthetic construct; identical to SEQ ID NO: 24346
  source 1..80: mol_type = other DNA

SEQ ID NO: 59140 - DNA, 80 bp, synthetic construct; identical to SEQ ID NO: 24347
  source 1..80: mol_type = other DNA

SEQ ID NO: 59141 - DNA, 80 bp, synthetic construct; identical to SEQ ID NO: 9998
  source 1..80: mol_type = other DNA

SEQ ID NO: 59142 - DNA, 80 bp, synthetic construct; identical to SEQ ID NO: 24349
  source 1..80: mol_type = other DNA

SEQ ID NO: 59143 - DNA, 80 bp, synthetic construct; identical to SEQ ID NO: 24350
  source 1..80: mol_type = other DNA

SEQ ID NO: 59144 - DNA, 80 bp, synthetic construct; identical to SEQ ID NO: 24351
  source 1..80: mol_type = other DNA

SEQ ID NO: 59145 - DNA, 80 bp, synthetic construct; identical to SEQ ID NO: 9999
  source 1..80: mol_type = other DNA

SEQ ID NO: 59146 - DNA, 80 bp, synthetic construct; identical to SEQ ID NO: 24353
  source 1..80: mol_type = other DNA

SEQ ID NO: 59147 - DNA, 80 bp, synthetic construct; identical to SEQ ID NO: 24354
  source 1..80: mol_type = other DNA

SEQ ID NO: 59148 - DNA, 80 bp, synthetic construct; identical to SEQ ID NO: 24355
  source 1..80: mol_type = other DNA

SEQ ID NO: 59149 - DNA, 80 bp, synthetic construct; identical to SEQ ID NO: 24356
  source 1..80: mol_type = other DNA

SEQ ID NO: 59150 - DNA, 80 bp, synthetic construct; identical to SEQ ID NO: 10002
  source 1..80: mol_type = other DNA

SEQ ID NO: 59151 - DNA, 80 bp, synthetic construct; identical to SEQ ID NO: 24358
  source 1..80: mol_type = other DNA

SEQ ID NO: 59152 - DNA, 80 bp, synthetic construct; identical to SEQ ID NO: 24359
  source 1..80: mol_type = other DNA

SEQ ID NO: 59153 - DNA, 80 bp, synthetic construct; identical to SEQ ID NO: 24360
  source 1..80: mol_type = other DNA

SEQ ID NO: 59154 - DNA, 80 bp, synthetic construct; identical to SEQ ID NO: 10003
  source 1..80: mol_type = other DNA

SEQ ID NO: 59155 - DNA, 80 bp, synthetic construct; identical to SEQ ID NO: 24362
  source 1..80: mol_type = other DNA

SEQ ID NO: 59156 - DNA, 80 bp, synthetic construct; identical to SEQ ID NO: 24363
  source 1..80: mol_type = other DNA

SEQ ID NO: 59157 - DNA, 80 bp, synthetic construct; identical to SEQ ID NO: 10004
  source 1..80: mol_type = other DNA

SEQ ID NO: 59158 - DNA, 80 bp, synthetic construct; identical to SEQ ID NO: 24365
  source 1..80: mol_type = other DNA

SEQ ID NO: 59159 - DNA, 80 bp, synthetic construct; identical to SEQ ID NO: 24366
  source 1..80: mol_type = other DNA

SEQ ID NO: 59160 - DNA, 80 bp, synthetic construct; identical to SEQ ID NO: 24367
  source 1..80: mol_type = other DNA

SEQ ID NO: 59161 - DNA, 80 bp, synthetic construct; identical to SEQ ID NO: 24368
  source 1..80: mol_type = other DNA

SEQ ID NO: 59162 - DNA, 80 bp, synthetic construct; identical to SEQ ID NO: 10005
  source 1..80: mol_type = other DNA

SEQ ID NO: 59163 - DNA, 80 bp, synthetic construct; identical to SEQ ID NO: 24370
  source 1..80: mol_type = other DNA

SEQ ID NO: 59164 - DNA, 80 bp, synthetic construct; identical to SEQ ID NO: 24371
  source 1..80: mol_type = other DNA

SEQ ID NO: 59165 - DNA, 80 bp, synthetic construct; identical to SEQ ID NO: 24372
  source 1..80: mol_type = other DNA

SEQ ID NO: 59166 - DNA, 80 bp, synthetic construct; identical to SEQ ID NO: 10006
  source 1..80: mol_type = other DNA

SEQ ID NO: 59167 - DNA, 80 bp, synthetic construct; identical to SEQ ID NO: 24374
  source 1..80: mol_type = other DNA

SEQ ID NO: 59168 - DNA, 80 bp, synthetic construct; identical to SEQ ID NO: 24375
  source 1..80: mol_type = other DNA

SEQ ID NO: 59169 - DNA, 80 bp, synthetic construct; identical to SEQ ID NO: 24376
  source 1..80: mol_type = other DNA

SEQ ID NO: 59170 - DNA, 80 bp, synthetic construct; identical to SEQ ID NO: 24377
  source 1..80: mol_type = other DNA

SEQ ID NO: 59171 - DNA, 80 bp, synthetic construct; identical to SEQ ID NO: 10007
  source 1..80: mol_type = other DNA

SEQ ID NO: 59172 - DNA, 80 bp, synthetic construct; identical to SEQ ID NO: 24379
  source 1..80: mol_type = other DNA

SEQ ID NO: 59173 - DNA, 80 bp, synthetic construct; identical to SEQ ID NO: 24380
  source 1..80: mol_type = other DNA

SEQ ID NO: 59174 - DNA, 80 bp, synthetic construct; identical to SEQ ID NO: 24381
  source 1..80: mol_type = other DNA

SEQ ID NO: 59175 - DNA, 80 bp, synthetic construct; identical to SEQ ID NO: 10008
  source 1..80: mol_type = other DNA

SEQ ID NO: 59176 - DNA, 80 bp, synthetic construct; identical to SEQ ID NO: 24383
  source 1..80: mol_type = other DNA

SEQ ID NO: 59177 - DNA, 80 bp, synthetic construct; identical to SEQ ID NO: 24384
  source 1..80: mol_type = other DNA

SEQ ID NO: 59178 - DNA, 80 bp, synthetic construct; identical to SEQ ID NO: 10009
  source 1..80: mol_type = other DNA

SEQ ID NO: 59179 - DNA, 80 bp, synthetic construct; identical to SEQ ID NO: 24386
  source 1..80: mol_type = other DNA

SEQ ID NO: 59180 - DNA, 80 bp, synthetic construct; identical to SEQ ID NO: 24387
  source 1..80: mol_type = other DNA

SEQ ID NO: 59181 - DNA, 80 bp, synthetic construct; identical to SEQ ID NO: 24389
  source 1..80: mol_type = other DNA

SEQ ID NO: 59182 - DNA, 80 bp, synthetic construct; identical to SEQ ID NO: 10010
  source 1..80: mol_type = other DNA

SEQ ID NO: 59183 - DNA, 80 bp, synthetic construct; identical to SEQ ID NO: 24391
  source 1..80: mol_type = other DNA

SEQ ID NO: 59184 - DNA, 80 bp, synthetic construct; identical to SEQ ID NO: 24392
  source 1..80: mol_type = other DNA

SEQ ID NO: 59185 - DNA, 80 bp, synthetic construct; identical to SEQ ID NO: 10011
  source 1..80: mol_type = other DNA

SEQ ID NO: 59186 - DNA, 80 bp, synthetic construct; identical to SEQ ID NO: 24394
  source 1..80: mol_type = other DNA

SEQ ID NO: 59187 - DNA, 80 bp, synthetic construct; identical to SEQ ID NO: 24395
  source 1..80: mol_type = other DNA

SEQ ID NO: 59188 - DNA, 80 bp, synthetic construct; identical to SEQ ID NO: 24396
  source 1..80: mol_type = other DNA

SEQ ID NO: 59189 - DNA, 80 bp, synthetic construct; identical to SEQ ID NO: 24397
  source 1..80: mol_type = other DNA

SEQ ID NO: 59190 - DNA, 80 bp, synthetic construct; identical to SEQ ID NO: 24398
  source 1..80: mol_type = other DNA

SEQ ID NO: 59191 - DNA, 80 bp, synthetic construct; identical to SEQ ID NO: 10012
  source 1..80: mol_type = other DNA

SEQ ID NO: 59192 - DNA, 80 bp, synthetic construct; identical to SEQ ID NO: 24400
  source 1..80: mol_type = other DNA

SEQ ID NO: 59193 - DNA, 80 bp, synthetic construct; identical to SEQ ID NO: 24401
  source 1..80: mol_type = other DNA

SEQ ID NO: 59194 - DNA, 80 bp, synthetic construct; identical to SEQ ID NO: 24402
  source 1..80: mol_type = other DNA

SEQ ID NO: 59195 - DNA, 80 bp, synthetic construct; identical to SEQ ID NO: 10013
  source 1..80: mol_type = other DNA

SEQ ID NO: 59196 - DNA, 80 bp, synthetic construct; identical to SEQ ID NO: 24404
  source 1..80: mol_type = other DNA

SEQ ID NO: 59197 - DNA, 80 bp, synthetic construct; identical to SEQ ID NO: 24405
  source 1..80: mol_type = other DNA

SEQ ID NO: 59198 - DNA, 80 bp, synthetic construct; identical to SEQ ID NO: 10014
  source 1..80: mol_type = other DNA

SEQ ID NO: 59199 - DNA, 80 bp, synthetic construct; identical to SEQ ID NO: 24407
  source 1..80: mol_type = other DNA

SEQ ID NO: 59200 - DNA, 80 bp, synthetic construct; identical to SEQ ID NO: 24408
  source 1..80: mol_type = other DNA

SEQ ID NO: 59201 - DNA, 80 bp, synthetic construct; identical to SEQ ID NO: 24409
  source 1..80: mol_type = other DNA

SEQ ID NO: 59202 - DNA, 80 bp, synthetic construct; identical to SEQ ID NO: 10015
  source 1..80: mol_type = other DNA

SEQ ID NO: 59203 - DNA, 80 bp, synthetic construct; identical to SEQ ID NO: 24411
  source 1..80: mol_type = other DNA

SEQ ID NO: 59204 - DNA, 80 bp, synthetic construct; identical to SEQ ID NO: 24412
  source 1..80: mol_type = other DNA

SEQ ID NO: 59205 - DNA, 80 bp, synthetic construct; identical to SEQ ID NO: 24413
  source 1..80: mol_type = other DNA

SEQ ID NO: 59206 - DNA, 80 bp, synthetic construct; identical to SEQ ID NO: 24414
  source 1..80: mol_type = other DNA

SEQ ID NO: 59207 - DNA, 80 bp, synthetic construct; identical to SEQ ID NO: 10016
  source 1..80: mol_type = other DNA

SEQ ID NO: 59208 - DNA, 80 bp, synthetic construct; identical to SEQ ID NO: 24416
  source 1..80: mol_type = other DNA

SEQ ID NO: 59209 - DNA, 80 bp, synthetic construct; identical to SEQ ID NO: 24417
  source 1..80: mol_type = other DNA

SEQ ID NO: 59210 - DNA, 80 bp, synthetic construct; identical to SEQ ID NO: 24418
  source 1..80: mol_type = other DNA

SEQ ID NO: 59211 - DNA, 80 bp, synthetic construct; identical to SEQ ID NO: 10017
  source 1..80: mol_type = other DNA

SEQ ID NO: 59212 - DNA, 80 bp, synthetic construct; identical to SEQ ID NO: 24420
  source 1..80: mol_type = other DNA

SEQ ID NO: 59213 - DNA, 80 bp, synthetic construct; identical to SEQ ID NO: 24421
  source 1..80: mol_type = other DNA

SEQ ID NO: 59214 - DNA, 80 bp, synthetic construct; identical to SEQ ID NO: 24422
  source 1..80: mol_type = other DNA

SEQ ID NO: 59215 - DNA, 80 bp, synthetic construct; identical to SEQ ID NO: 10018
  source 1..80: mol_type = other DNA

SEQ ID NO: 59216 - DNA, 80 bp, synthetic construct; identical to SEQ ID NO: 24424
  source 1..80: mol_type = other DNA

SEQ ID NO: 59217 - DNA, 80 bp, synthetic construct; identical to SEQ ID NO: 24425
  source 1..80: mol_type = other DNA

SEQ ID NO: 59218 - DNA, 80 bp, synthetic construct; identical to SEQ ID NO: 24426
  source 1..80: mol_type = other DNA

SEQ ID NO: 59219 - DNA, 80 bp, synthetic construct; identical to SEQ ID NO: 10019
  source 1..80: mol_type = other DNA

SEQ ID NO: 59220 - DNA, 80 bp, synthetic construct; identical to SEQ ID NO: 24428
  source 1..80: mol_type = other DNA

SEQ ID NO: 59221 - DNA, 80 bp, synthetic construct; identical to SEQ ID NO: 24429
  source 1..80: mol_type = other DNA

SEQ ID NO: 59222 - DNA, 80 bp, synthetic construct; identical to SEQ ID NO: 24430
  source 1..80: mol_type = other DNA

SEQ ID NO: 59223 - DNA, 80 bp, synthetic construct; identical to SEQ ID NO: 10020
  source 1..80: mol_type = other DNA

SEQ ID NO: 59224 - DNA, 80 bp, synthetic construct; identical to SEQ ID NO: 24432
  source 1..80: mol_type = other DNA

SEQ ID NO: 59225 - DNA, 80 bp, synthetic construct; identical to SEQ ID NO: 24433
  source 1..80: mol_type = other DNA

SEQ ID NO: 59226 - DNA, 80 bp, synthetic construct; identical to SEQ ID NO: 10021
  source 1..80: mol_type = other DNA

SEQ ID NO: 59227 - DNA, 80 bp, synthetic construct; identical to SEQ ID NO: 24435
  source 1..80: mol_type = other DNA

SEQ ID NO: 59228 - DNA, 80 bp, synthetic construct; identical to SEQ ID NO: 24436
  source 1..80: mol_type = other DNA

SEQ ID NO: 59229 - DNA, 80 bp, synthetic construct; identical to SEQ ID NO: 24437
  source 1..80: mol_type = other DNA

SEQ ID NO: 59230 - DNA, 80 bp, synthetic construct; identical to SEQ ID NO: 24438
  source 1..80: mol_type = other DNA

SEQ ID NO: 59231 - DNA, 80 bp, synthetic construct; identical to SEQ ID NO: 10022
  source 1..80: mol_type = other DNA

SEQ ID NO: 59232 - DNA, 80 bp, synthetic construct; identical to SEQ ID NO: 24440
  source 1..80: mol_type = other DNA

SEQ ID NO: 59233 - DNA, 80 bp, synthetic construct; identical to SEQ ID NO: 24441
  source 1..80: mol_type = other DNA

SEQ ID NO: 59234 - DNA, 80 bp, synthetic construct; identical to SEQ ID NO: 10023
  source 1..80: mol_type = other DNA

SEQ ID NO: 59235 - DNA, 80 bp, synthetic construct; identical to SEQ ID NO: 24444
  source 1..80: mol_type = other DNA

SEQ ID NO: 59236 - DNA, 80 bp, synthetic construct; identical to SEQ ID NO: 24445
  source 1..80: mol_type = other DNA

SEQ ID NO: 59237 - DNA, 80 bp, synthetic construct; identical to SEQ ID NO: 10024
  source 1..80: mol_type = other DNA

SEQ ID NO: 59238 - DNA, 80 bp, synthetic construct; identical to SEQ ID NO: 24448
  source 1..80: mol_type = other DNA

SEQ ID NO: 59239 - DNA, 80 bp, synthetic construct; identical to SEQ ID NO: 24449
  source 1..80: mol_type = other DNA

SEQ ID NO: 59240 - DNA, 80 bp, synthetic construct; identical to SEQ ID NO: 24450
  source 1..80: mol_type = other DNA

SEQ ID NO: 59241 - DNA, 80 bp, synthetic construct; identical to SEQ ID NO: 10025
  source 1..80: mol_type = other DNA

SEQ ID NO: 59242 - DNA, 80 bp, synthetic construct; identical to SEQ ID NO: 24452
  source 1..80: mol_type = other DNA

SEQ ID NO: 59243 - DNA, 80 bp, synthetic construct; identical to SEQ ID NO: 24453
  source 1..80: mol_type = other DNA

SEQ ID NO: 59244 - DNA, 80 bp, synthetic construct; identical to SEQ ID NO: 10026
  source 1..80: mol_type = other DNA

SEQ ID NO: 59245 - DNA, 80 bp, synthetic construct; identical to SEQ ID NO: 24455
  source 1..80: mol_type = other DNA

SEQ ID NO: 59246 - DNA, 80 bp, synthetic construct; identical to SEQ ID NO: 24456
  source 1..80: mol_type = other DNA

SEQ ID NO: 59247 - DNA, 80 bp, synthetic construct; identical to SEQ ID NO: 24457
  source 1..80: mol_type = other DNA

SEQ ID NO: 59248 - DNA, 80 bp, synthetic construct; identical to SEQ ID NO: 10027
  source 1..80: mol_type = other DNA

SEQ ID NO: 59249 - DNA, 80 bp, synthetic construct; identical to SEQ ID NO: 24459
  source 1..80: mol_type = other DNA

SEQ ID NO: 59250 - DNA, 80 bp, synthetic construct; identical to SEQ ID NO: 24460
  source 1..80: mol_type = other DNA

SEQ ID NO: 59251 - DNA, 80 bp, synthetic construct; identical to SEQ ID NO: 24461
  source 1..80: mol_type = other DNA

SEQ ID NO: 59252 - DNA, 80 bp, synthetic construct; identical to SEQ ID NO: 10028
  source 1..80: mol_type = other DNA

SEQ ID NO: 59253 - DNA, 80 bp, synthetic construct; identical to SEQ ID NO: 24463
  source 1..80: mol_type = other DNA

SEQ ID NO: 59254 - DNA, 80 bp, synthetic construct; identical to SEQ ID NO: 24465
  source 1..80: mol_type = other DNA

SEQ ID NO: 59255 - DNA, 80 bp, synthetic construct; identical to SEQ ID NO: 10029
  source 1..80: mol_type = other DNA

SEQ ID NO: 59256 - DNA, 80 bp, synthetic construct; identical to SEQ ID NO: 24467
  source 1..80: mol_type = other DNA

SEQ ID NO: 59257 - DNA, 80 bp, synthetic construct; identical to SEQ ID NO: 24468
  source 1..80: mol_type = other DNA

SEQ ID NO: 59258 - DNA, 80 bp, synthetic construct; identical to SEQ ID NO: 24469
  source 1..80: mol_type = other DNA

SEQ ID NO: 59259 - DNA, 80 bp, synthetic construct; identical to SEQ ID NO: 10030
  source 1..80: mol_type = other DNA

SEQ ID NO: 59260 - DNA, 80 bp, synthetic construct; identical to SEQ ID NO: 24471
  source 1..80: mol_type = other DNA

SEQ ID NO: 59261 - DNA, 80 bp, synthetic construct; identical to SEQ ID NO: 24472
  source 1..80: mol_type = other DNA

SEQ ID NO: 59262 - DNA, 80 bp, synthetic construct; identical to SEQ ID NO: 24473
  source 1..80: mol_type = other DNA

SEQ ID NO: 59263 - DNA, 80 bp, synthetic construct; identical to SEQ ID NO: 24474
  source 1..80: mol_type = other DNA

SEQ ID NO: 59264 - DNA, 80 bp, synthetic construct; identical to SEQ ID NO: 10031
  source 1..80: mol_type = other DNA

SEQ ID NO: 59265 - DNA, 80 bp, synthetic construct; identical to SEQ ID NO: 24476
  source 1..80: mol_type = other DNA

SEQ ID NO: 59266 - DNA, 80 bp, synthetic construct; identical to SEQ ID NO: 24477
  source 1..80: mol_type = other DNA

SEQ ID NO: 59267 - DNA, 80 bp, synthetic construct; identical to SEQ ID NO: 24478
  source 1..80: mol_type = other DNA

SEQ ID NO: 59268 - DNA, 80 bp, synthetic construct; identical to SEQ ID NO: 10032
  source 1..80: mol_type = other DNA

SEQ ID NO: 59269 - DNA, 80 bp, synthetic construct; identical to SEQ ID NO: 24480
  source 1..80: mol_type = other DNA

SEQ ID NO: 59270 - DNA, 80 bp, synthetic construct; identical to SEQ ID NO: 24481
  source 1..80: mol_type = other DNA

SEQ ID NO: 59271 - DNA, 80 bp, synthetic construct; identical to SEQ ID NO: 24482
  source 1..80: mol_type = other DNA

SEQ ID NO: 59272 - DNA, 80 bp, synthetic construct; identical to SEQ ID NO: 10033
  source 1..80: mol_type = other DNA

SEQ ID NO: 59273 - DNA, 80 bp, synthetic construct; identical to SEQ ID NO: 24484
  source 1..80: mol_type = other DNA

SEQ ID NO: 59274 - DNA, 80 bp, synthetic construct; identical to SEQ ID NO: 10034
  source 1..80: mol_type = other DNA

SEQ ID NO: 59275 - DNA, 80 bp, synthetic construct; identical to SEQ ID NO: 24487
  source 1..80: mol_type = other DNA

SEQ ID NO: 59276 - DNA, 80 bp, synthetic construct; identical to SEQ ID NO: 24488
  source 1..80: mol_type = other DNA

SEQ ID NO: 59277 - DNA, 80 bp, synthetic construct; identical to SEQ ID NO: 24489
  source 1..80: mol_type = other DNA

SEQ ID NO: 59278 - DNA, 80 bp, synthetic construct; identical to SEQ ID NO: 10035
  source 1..80: mol_type = other DNA

SEQ ID NO: 59279 - DNA, 80 bp, synthetic construct; identical to SEQ ID NO: 24491
  source 1..80: mol_type = other DNA

SEQ ID NO: 59280 - DNA, 80 bp, synthetic construct; identical to SEQ ID NO: 24492
  source 1..80: mol_type = other DNA

SEQ ID NO: 59281 - DNA, 80 bp, synthetic construct; identical to SEQ ID NO: 24493
  source 1..80: mol_type = other DNA

SEQ ID NO: 59282 - DNA, 80 bp, synthetic construct; identical to SEQ ID NO: 10036
  source 1..80: mol_type = other DNA

SEQ ID NO: 59283 - DNA, 80 bp, synthetic construct; identical to SEQ ID NO: 24495
  source 1..80: mol_type = other DNA

SEQ ID NO: 59284 - DNA, 80 bp, synthetic construct; identical to SEQ ID NO: 24496
  source 1..80: mol_type = other DNA

SEQ ID NO: 59285 - DNA, 80 bp, synthetic construct; identical to SEQ ID NO: 24497
  source 1..80: mol_type = other DNA

SEQ ID NO: 59286 - DNA, 80 bp, synthetic construct; identical to SEQ ID NO: 10037
  source 1..80: mol_type = other DNA

SEQ ID NO: 59287 - DNA, 80 bp, synthetic construct; identical to SEQ ID NO: 24500
  source 1..80: mol_type = other DNA

SEQ ID NO: 59288 - DNA, 80 bp, synthetic construct; identical to SEQ ID NO: 24501
  source 1..80: mol_type = other DNA

SEQ ID NO: 59289 - DNA, 80 bp, synthetic construct; identical to SEQ ID NO: 24502
  source 1..80: mol_type = other DNA

SEQ ID NO: 59290 - DNA, 80 bp, synthetic construct; identical to SEQ ID NO: 10038
  source 1..80: mol_type = other DNA

SEQ ID NO: 59291 - DNA, 80 bp, synthetic construct; identical to SEQ ID NO: 24504
  source 1..80: mol_type = other DNA

SEQ ID NO: 59292 - DNA, 80 bp, synthetic construct; identical to SEQ ID NO: 24505
  source 1..80: mol_type = other DNA

SEQ ID NO: 59293 - DNA, 80 bp, synthetic construct; identical to SEQ ID NO: 10039
  source 1..80: mol_type = other DNA

SEQ ID NO: 59294 - DNA, 80 bp, synthetic construct; identical to SEQ ID NO: 24507
  source 1..80: mol_type = other DNA

SEQ ID NO: 59295 - DNA, 80 bp, synthetic construct; identical to SEQ ID NO: 24508
  source 1..80: mol_type = other DNA

SEQ ID NO: 59296 - DNA, 80 bp, synthetic construct; identical to SEQ ID NO: 24509
  source 1..80: mol_type = other DNA

SEQ ID NO: 59297 - DNA, 80 bp, synthetic construct; identical to SEQ ID NO: 10040
  source 1..80: mol_type = other DNA

SEQ ID NO: 59298 - DNA, 80 bp, synthetic construct; identical to SEQ ID NO: 24511
  source 1..80: mol_type = other DNA

SEQ ID NO: 59299 - DNA, 80 bp, synthetic construct; identical to SEQ ID NO: 24512
  source 1..80: mol_type = other DNA

SEQ ID NO: 59300 - DNA, 80 bp, synthetic construct; identical to SEQ ID NO: 24513
  source 1..80: mol_type = other DNA

SEQ ID NO: 59301 - DNA, 80 bp, synthetic construct; identical to SEQ ID NO: 24514
  source 1..80: mol_type = other DNA

SEQ ID NO: 59302 - DNA, 80 bp, synthetic construct; identical to SEQ ID NO: 10041
  source 1..80: mol_type = other DNA

SEQ ID NO: 59303 - DNA, 80 bp, synthetic construct; identical to SEQ ID NO: 24516
  source 1..80: mol_type = other DNA

SEQ ID NO: 59304 - DNA, 80 bp, synthetic construct; identical to SEQ ID NO: 24517
  source 1..80: mol_type = other DNA

SEQ ID NO: 59305 - DNA, 80 bp, synthetic construct; identical to SEQ ID NO: 10042
  source 1..80: mol_type = other DNA

SEQ ID NO: 59306 - DNA, 80 bp, synthetic construct; identical to SEQ ID NO: 24519
  source 1..80: mol_type = other DNA

SEQ ID NO: 59307 - DNA, 80 bp, synthetic construct; identical to SEQ ID NO: 24520
  source 1..80: mol_type = other DNA

SEQ ID NO: 59308 - DNA, 80 bp, synthetic construct; identical to SEQ ID NO: 24521
  source 1..80: mol_type = other DNA

SEQ ID NO: 59309 - DNA, 80 bp, synthetic construct; identical to SEQ ID NO: 24522
  source 1..80: mol_type = other DNA

SEQ ID NO: 59310 - DNA, 80 bp, synthetic construct; identical to SEQ ID NO: 10043
  source 1..80: mol_type = other DNA

SEQ ID NO: 59311 - DNA, 80 bp, synthetic construct; identical to SEQ ID NO: 24524
  source 1..80: mol_type = other DNA

SEQ ID NO: 59312 - DNA, 80 bp, synthetic construct; identical to SEQ ID NO: 24525
  source 1..80: mol_type = other DNA

SEQ ID NO: 59313 - DNA, 80 bp, synthetic construct; identical to SEQ ID NO: 24526
  source 1..80: mol_type = other DNA

SEQ ID NO: 59314 - DNA, 80 bp, synthetic construct; identical to SEQ ID NO: 10044
  source 1..80: mol_type = other DNA

SEQ ID NO: 59315 - DNA, 80 bp, synthetic construct; identical to SEQ ID NO: 24528
  source 1..80: mol_type = other DNA

SEQ ID NO: 59316 - DNA, 80 bp, synthetic construct; identical to SEQ ID NO: 24529
  source 1..80: mol_type = other DNA

SEQ ID NO: 59317 - DNA, 80 bp, synthetic construct; identical to SEQ ID NO: 10045
  source 1..80: mol_type = other DNA

SEQ ID NO: 59318 - DNA, 80 bp, synthetic construct; identical to SEQ ID NO: 24531
  source 1..80: mol_type = other DNA

SEQ ID NO: 59319 - DNA, 80 bp, synthetic construct; identical to SEQ ID NO: 24532
  source 1..80: mol_type = other DNA

SEQ ID NO: 59320 - DNA, 80 bp, synthetic construct; identical to SEQ ID NO: 24533
  source 1..80: mol_type = other DNA

SEQ ID NO: 59321 - DNA, 80 bp, synthetic construct; identical to SEQ ID NO: 10046
  source 1..80: mol_type = other DNA

SEQ ID NO: 59322 - DNA, 80 bp, synthetic construct; identical to SEQ ID NO: 24535
  source 1..80: mol_type = other DNA

SEQ ID NO: 59323 - DNA, 80 bp, synthetic construct; identical to SEQ ID NO: 24536
  source 1..80: mol_type = other DNA

SEQ ID NO: 59324 - DNA, 80 bp, synthetic construct; identical to SEQ ID NO: 24537
  source 1..80: mol_type = other DNA

SEQ ID NO: 59325 - DNA, 80 bp, synthetic construct; identical to SEQ ID NO: 24538
  source 1..80: mol_type = other DNA

SEQ ID NO: 59326 - DNA, 80 bp, synthetic construct; identical to SEQ ID NO: 10047
  source 1..80: mol_type = other DNA

SEQ ID NO: 59327 - DNA, 80 bp, synthetic construct; identical to SEQ ID NO: 24540
  source 1..80: mol_type = other DNA

SEQ ID NO: 59328 - DNA, 80 bp, synthetic construct; identical to SEQ ID NO: 24541
  source 1..80: mol_type = other DNA

SEQ ID NO: 59329 - DNA, 80 bp, synthetic construct; identical to SEQ ID NO: 24542
  source 1..80: mol_type = other DNA

SEQ ID NO: 59330 - DNA, 80 bp, synthetic construct; identical to SEQ ID NO: 10048
  source 1..80: mol_type = other DNA

SEQ ID NO: 59331 - DNA, 80 bp, synthetic construct; identical to SEQ ID NO: 24544
  source 1..80: mol_type = other DNA

SEQ ID NO: 59332 - DNA, 80 bp, synthetic construct; identical to SEQ ID NO: 24545
  source 1..80: mol_type = other DNA

SEQ ID NO: 59333 - DNA, 80 bp, synthetic construct; identical to SEQ ID NO: 10049
  source 1..80: mol_type = other DNA

SEQ ID NO: 59334 - DNA, 80 bp, synthetic construct; identical to SEQ ID NO: 24547
  source 1..80: mol_type = other DNA

SEQ ID NO: 59335 - DNA, 80 bp, synthetic construct; identical to SEQ ID NO: 24548
  source 1..80: mol_type = other DNA

SEQ ID NO: 59336 - DNA, 80 bp, synthetic construct; identical to SEQ ID NO: 24549
  source 1..80: mol_type = other DNA

SEQ ID NO: 59337 - DNA, 80 bp, synthetic construct; identical to SEQ ID NO: 24550
  source 1..80: mol_type = other DNA

SEQ ID NO: 59338 - DNA, 80 bp, synthetic construct; identical to SEQ ID NO: 10050
  source 1..80: mol_type = other DNA

SEQ ID NO: 59339 - DNA, 80 bp, synthetic construct; identical to SEQ ID NO: 24552
  source 1..80: mol_type = other DNA

SEQ ID NO: 59340 - DNA, 80 bp, synthetic construct; identical to SEQ ID NO: 24553
  source 1..80: mol_type = other DNA

SEQ ID NO: 59341 - DNA, 80 bp, synthetic construct; identical to SEQ ID NO: 24554
  source 1..80: mol_type = other DNA

SEQ ID NO: 59342 - DNA, 80 bp, synthetic construct; identical to SEQ ID NO: 10051
  source 1..80: mol_type = other DNA

SEQ ID NO: 59343 - DNA, 80 bp, synthetic construct; identical to SEQ ID NO: 24556
  source 1..80: mol_type = other DNA

SEQ ID NO: 59344 - DNA, 80 bp, synthetic construct; identical to SEQ ID NO: 24557
  source 1..80: mol_type = other DNA

SEQ ID NO: 59345 - DNA, 80 bp, synthetic construct; identical to SEQ ID NO: 24558
  source 1..80: mol_type = other DNA

SEQ ID NO: 59346 - DNA, 80 bp, synthetic construct; identical to SEQ ID NO: 10052
  source 1..80: mol_type = other DNA

SEQ ID NO: 59347 - DNA, 80 bp, synthetic construct; identical to SEQ ID NO: 24560
  source 1..80: mol_type = other DNA

SEQ ID NO: 59348 - DNA, 80 bp, synthetic construct; identical to SEQ ID NO: 24561
  source 1..80: mol_type = other DNA

SEQ ID NO: 59349 - DNA, 80 bp, synthetic construct; identical to SEQ ID NO: 24562
  source 1..80: mol_type = other DNA

SEQ ID NO: 59350 - DNA, 80 bp, synthetic construct; identical to SEQ ID NO: 10053
  source 1..80: mol_type = other DNA

SEQ ID NO: 59351 - DNA, 80 bp, synthetic construct; identical to SEQ ID NO: 24564
  source 1..80: mol_type = other DNA

SEQ ID NO: 59352 - DNA, 80 bp, synthetic construct; identical to SEQ ID NO: 24565
  source 1..80: mol_type = other DNA

SEQ ID NO: 59353 - DNA, 80 bp, synthetic construct; identical to SEQ ID NO: 10054
  source 1..80: mol_type = other DNA

SEQ ID NO: 59354 - DNA, 80 bp, synthetic construct; identical to SEQ ID NO: 24567
  source 1..80: mol_type = other DNA

SEQ ID NO: 59355 - DNA, 80 bp, synthetic construct; identical to SEQ ID NO: 24568
  source 1..80: mol_type = other DNA

SEQ ID NO: 59356 - DNA, 80 bp, synthetic construct; identical to SEQ ID NO: 24569
  source 1..80: mol_type = other DNA

SEQ ID NO: 59357 - DNA, 80 bp, synthetic construct; identical to SEQ ID NO: 24570
  source 1..80: mol_type = other DNA

SEQ ID NO: 59358 - DNA, 80 bp, synthetic construct; identical to SEQ ID NO: 10055
  source 1..80: mol_type = other DNA

SEQ ID NO: 59359 - DNA, 80 bp, synthetic construct; identical to SEQ ID NO: 24572
  source 1..80: mol_type = other DNA

SEQ ID NO: 59360 - DNA, 80 bp, synthetic construct; identical to SEQ ID NO: 24573
  source 1..80: mol_type = other DNA

SEQ ID NO: 59361 - DNA, 80 bp, synthetic construct; identical to SEQ ID NO: 10056
  source 1..80: mol_type = other DNA

SEQ ID NO: 59362 - DNA, 80 bp, synthetic construct; identical to SEQ ID NO: 24575
  source 1..80: mol_type = other DNA

SEQ ID NO: 59363 - DNA, 80 bp, synthetic construct; identical to SEQ ID NO: 24576
  source 1..80: mol_type = other DNA

SEQ ID NO: 59364 - DNA, 80 bp, synthetic construct; identical to SEQ ID NO: 24577
  source 1..80: mol_type = other DNA

SEQ ID NO: 59365 - DNA, 80 bp, synthetic construct; identical to SEQ ID NO: 24578
  source 1..80: mol_type = other DNA

SEQ ID NO: 59366 - DNA, 80 bp, synthetic construct; identical to SEQ ID NO: 10057
  source 1..80: mol_type = other DNA

SEQ ID NO: 59367 - DNA, 80 bp, synthetic construct; identical to SEQ ID NO: 24580
  source 1..80: mol_type = other DNA

SEQ ID NO: 59368 - DNA, 80 bp, synthetic construct; identical to SEQ ID NO: 24581
  source 1..80: mol_type = other DNA

SEQ ID NO: 59369 - DNA, 80 bp, synthetic construct; identical to SEQ ID NO: 24582
  source 1..80: mol_type = other DNA

SEQ ID NO: 59370 - DNA, 80 bp, synthetic construct; identical to SEQ ID NO: 10058
  source 1..80: mol_type = other DNA

SEQ ID NO: 59371 - DNA, 80 bp, synthetic construct; identical to SEQ ID NO: 24584
  source 1..80: mol_type = other DNA

SEQ ID NO: 59372 - DNA, 80 bp, synthetic construct; identical to SEQ ID NO: 24585
  source 1..80: mol_type = other DNA

SEQ ID NO: 59373 - DNA, 80 bp, synthetic construct; identical to SEQ ID NO: 10059
  source 1..80: mol_type = other DNA

SEQ ID NO: 59374 - DNA, 80 bp, synthetic construct; identical to SEQ ID NO: 24587
  source 1..80: mol_type = other DNA

SEQ ID NO: 59375 - DNA, 80 bp, synthetic construct; identical to SEQ ID NO: 24588
  source 1..80: mol_type = other DNA

SEQ ID NO: 59376 - DNA, 80 bp, synthetic construct; identical to SEQ ID NO: 24589
  source 1..80: mol_type = other DNA

SEQ ID NO: 59377 - DNA, 80 bp, synthetic construct; identical to SEQ ID NO: 10060
  source 1..80: mol_type = other DNA

SEQ ID NO: 59378 - DNA, 80 bp, synthetic construct; identical to SEQ ID NO: 24591
  source 1..80: mol_type = other DNA

SEQ ID NO: 59379 - DNA, 80 bp, synthetic construct; identical to SEQ ID NO: 24592
  source 1..80: mol_type = other DNA

SEQ ID NO: 59380 - DNA, 80 bp, synthetic construct; identical to SEQ ID NO: 24593
  source 1..80: mol_type = other DNA

SEQ ID NO: 59381 - DNA, 80 bp, synthetic construct; identical to SEQ ID NO: 10061
  source 1..80: mol_type = other DNA

SEQ ID NO: 59382 - DNA, 80 bp, synthetic construct; identical to SEQ ID NO: 24595
  source 1..80: mol_type = other DNA

SEQ ID NO: 59383 - DNA, 80 bp, synthetic construct; identical to SEQ ID NO: 24596
  source 1..80: mol_type = other DNA

SEQ ID NO: 59384 - DNA, 80 bp, synthetic construct; identical to SEQ ID NO: 24597
  source 1..80: mol_type = other DNA

SEQ ID NO: 59385 - DNA, 80 bp, synthetic construct; identical to SEQ ID NO: 10062
  source 1..80: mol_type = other DNA

SEQ ID NO: 59386 - DNA, 80 bp, synthetic construct; identical to SEQ ID NO: 24599
  source 1..80: mol_type = other DNA

SEQ ID NO: 59387 - DNA, 80 bp, synthetic construct; identical to SEQ ID NO: 24600
  source 1..80: mol_type = other DNA

SEQ ID NO: 59388 - DNA, 80 bp, synthetic construct; identical to SEQ ID NO: 24601
  source 1..80: mol_type = other DNA

SEQ ID NO: 59389 - DNA, 80 bp, synthetic construct; identical to SEQ ID NO: 10063
  source 1..80: mol_type = other DNA

SEQ ID NO: 59390 - DNA, 80 bp, synthetic construct; identical to SEQ ID NO: 24603
  source 1..80: mol_type = other DNA

SEQ ID NO: 59391 - DNA, 80 bp, synthetic construct; identical to SEQ ID NO: 24604
  source 1..80: mol_type = other DNA

SEQ ID NO: 59392 - DNA, 80 bp, synthetic construct; identical to SEQ ID NO: 24605
  source 1..80: mol_type = other DNA

SEQ ID NO: 59393 - DNA, 80 bp, synthetic construct; identical to SEQ ID NO: 10064
  source 1..80: mol_type = other DNA

SEQ ID NO: 59394 - DNA, 80 bp, synthetic construct; identical to SEQ ID NO: 24607
  source 1..80: mol_type = other DNA

SEQ ID NO: 59395 - DNA, 80 bp, synthetic construct; identical to SEQ ID NO: 24608
  source 1..80: mol_type = other DNA

SEQ ID NO: 59396 - DNA, 80 bp, synthetic construct; identical to SEQ ID NO: 24609
  source 1..80: mol_type = other DNA

SEQ ID NO: 59397 - DNA, 80 bp, synthetic construct; identical to SEQ ID NO: 10065
  source 1..80: mol_type = other DNA

SEQ ID NO: 59398 - DNA, 80 bp, synthetic construct; identical to SEQ ID NO: 24611
  source 1..80: mol_type = other DNA

SEQ ID NO: 59399 - DNA, 80 bp, synthetic construct; identical to SEQ ID NO: 24612
  source 1..80: mol_type = other DNA

SEQ ID NO: 59400 - DNA, 80 bp, synthetic construct; identical to SEQ ID NO: 24613
  source 1..80: mol_type = other DNA

SEQ ID NO: 59401 - DNA, 80 bp, synthetic construct; identical to SEQ ID NO: 10066
  source 1..80: mol_type = other DNA

SEQ ID NO: 59402 - DNA, 80 bp, synthetic construct; identical to SEQ ID NO: 24615
  source 1..80: mol_type = other DNA

SEQ ID NO: 59403 - DNA, 80 bp, synthetic construct; identical to SEQ ID NO: 24616
  source 1..80: mol_type = other DNA

SEQ ID NO: 59404 - DNA, 80 bp, synthetic construct; identical to SEQ ID NO: 24617
  source 1..80: mol_type = other DNA

SEQ ID NO: 59405 - DNA, 80 bp, synthetic construct; identical to SEQ ID NO: 24618
  source 1..80: mol_type = other DNA

SEQ ID NO: 59406 - DNA, 80 bp, synthetic construct; identical to SEQ ID NO: 10067
  source 1..80: mol_type = other DNA

SEQ ID NO: 59407 - DNA, 80 bp, synthetic construct; identical to SEQ ID NO: 24620
  source 1..80: mol_type = other DNA

SEQ ID NO: 59408 - DNA, 80 bp, synthetic construct; identical to SEQ ID NO: 24621
  source 1..80: mol_type = other DNA

SEQ ID NO: 59409 - DNA, 80 bp, synthetic construct; identical to SEQ ID NO: 24622
  source 1..80: mol_type = other DNA

SEQ ID NO: 59410 - DNA, 80 bp, synthetic construct; identical to SEQ ID NO: 10068
  source 1..80: mol_type = other DNA

SEQ ID NO: 59411 - DNA, 80 bp, synthetic construct; identical to SEQ ID NO: 24624
  source 1..80: mol_type = other DNA

SEQ ID NO: 59412 - DNA, 80 bp, synthetic construct; identical to SEQ ID NO: 24625
  source 1..80: mol_type = other DNA

SEQ ID NO: 59413 - DNA, 80 bp, synthetic construct; identical to SEQ ID NO: 24626
  source 1..80: mol_type = other DNA

SEQ ID NO: 59414 - DNA, 80 bp, synthetic construct; identical to SEQ ID NO: 10069
  source 1..80: mol_type = other DNA

SEQ ID NO: 59415 - DNA, 80 bp, synthetic construct; identical to SEQ ID NO: 24628
  source 1..80: mol_type = other DNA

SEQ ID NO: 59416 - DNA, 80 bp, synthetic construct; identical to SEQ ID NO: 24629
  source 1..80: mol_type = other DNA

SEQ ID NO: 59417 - DNA, 80 bp, synthetic construct; identical to SEQ ID NO: 10070
  source 1..80: mol_type = other DNA

SEQ ID NO: 59418 - DNA, 80 bp, synthetic construct; identical to SEQ ID NO: 24631
  source 1..80: mol_type = other DNA

SEQ ID NO: 59419 - DNA, 80 bp, synthetic construct; identical to SEQ ID NO: 24632
  source 1..80: mol_type = other DNA

SEQ ID NO: 59420 - DNA, 80 bp, synthetic construct; identical to SEQ ID NO: 24633
  source 1..80: mol_type = other DNA

SEQ ID NO: 59421 - DNA, 80 bp, synthetic construct; identical to SEQ ID NO: 10071
  source 1..80: mol_type = other DNA

SEQ ID NO: 59422 - DNA, 80 bp, synthetic construct; identical to SEQ ID NO: 24635
  source 1..80: mol_type = other DNA

SEQ ID NO: 59423 - DNA, 80 bp, synthetic construct; identical to SEQ ID NO: 24637
  source 1..80: mol_type = other DNA

SEQ ID NO: 59424 - DNA, 80 bp, synthetic construct; identical to SEQ ID NO: 10072
  source 1..80: mol_type = other DNA

SEQ ID NO: 59425 - DNA, 80 bp, synthetic construct; identical to SEQ ID NO: 24639
  source 1..80: mol_type = other DNA

SEQ ID NO: 59426 - DNA, 80 bp, synthetic construct; identical to SEQ ID NO: 24640
  source 1..80: mol_type = other DNA

SEQ ID NO: 59427 - DNA, 80 bp, synthetic construct; identical to SEQ ID NO: 24641
  source 1..80: mol_type = other DNA

SEQ ID NO: 59428 - DNA, 80 bp, synthetic construct; identical to SEQ ID NO: 10073
  source 1..80: mol_type = other DNA

SEQ ID NO: 59429 - DNA, 80 bp, synthetic construct; identical to SEQ ID NO: 24644
  source 1..80: mol_type = other DNA

SEQ ID NO: 59430 - DNA, 80 bp, synthetic construct; identical to SEQ ID NO: 24645
  source 1..80: mol_type = other DNA

SEQ ID NO: 59431 - DNA, 80 bp, synthetic construct; identical to SEQ ID NO: 24646
  source 1..80: mol_type = other DNA

SEQ ID NO: 59432 - DNA, 80 bp, synthetic construct; identical to SEQ ID NO: 10074
  source 1..80: mol_type = other DNA

SEQ ID NO: 59433 - DNA, 80 bp, synthetic construct; identical to SEQ ID NO: 24648
  source 1..80: mol_type = other DNA

SEQ ID NO: 59434 - DNA, 80 bp, synthetic construct; identical to SEQ ID NO: 24649
  source 1..80: mol_type = other DNA

SEQ ID NO: 59435 - DNA, 80 bp, synthetic construct; identical to SEQ ID NO: 24650
  source 1..80: mol_type = other DNA

SEQ ID NO: 59436 - DNA, 80 bp, synthetic construct; identical to SEQ ID NO: 10075
  source 1..80: mol_type = other DNA

SEQ ID NO: 59437 - DNA, 80 bp, synthetic construct; identical to SEQ ID NO: 24652
  source 1..80: mol_type = other DNA

SEQ ID NO: 59438 - DNA, 80 bp, synthetic construct; identical to SEQ ID NO: 24653
  source 1..80: mol_type = other DNA

SEQ ID NO: 59439 - DNA, 80 bp, synthetic construct; identical to SEQ ID NO: 24654
  source 1..80: mol_type = other DNA

SEQ ID NO: 59440 - DNA, 80 bp, synthetic construct; identical to SEQ ID NO: 10076
  source 1..80: mol_type = other DNA

SEQ ID NO: 59441 - DNA, 80 bp, synthetic construct; identical to SEQ ID NO: 24656
  source 1..80: mol_type = other DNA

SEQ ID NO: 59442 - DNA, 80 bp, synthetic construct; identical to SEQ ID NO: 24657
  source 1..80: mol_type = other DNA

SEQ ID NO: 59443 - DNA, 80 bp, synthetic construct; identical to SEQ ID NO: 10077
  source 1..80: mol_type = other DNA

SEQ ID NO: 59444 - DNA, 80 bp, synthetic construct; identical to SEQ ID NO: 24659
  source 1..80: mol_type = other DNA

SEQ ID NO: 59445 - DNA, 80 bp, synthetic construct; identical to SEQ ID NO: 24660
  source 1..80: mol_type = other DNA

SEQ ID NO: 59446 - DNA, 80 bp, synthetic construct; identical to SEQ ID NO: 24661
  source 1..80: mol_type = other DNA

SEQ ID NO: 59447 - DNA, 80 bp, synthetic construct; identical to SEQ ID NO: 24662
  source 1..80: mol_type = other DNA

SEQ ID NO: 59448 - DNA, 80 bp, synthetic construct; identical to SEQ ID NO: 10078
  source 1..80: mol_type = other DNA

SEQ ID NO: 59449 - DNA, 80 bp, synthetic construct; identical to SEQ ID NO: 24664
  source 1..80: mol_type = other DNA

SEQ ID NO: 59450 - DNA, 80 bp, synthetic construct; identical to SEQ ID NO: 24665
  source 1..80: mol_type = other DNA

SEQ ID NO: 59451 - DNA, 80 bp, synthetic construct; identical to SEQ ID NO: 10079
  source 1..80: mol_type = other DNA

SEQ ID NO: 59452 - DNA, 80 bp, synthetic construct; identical to SEQ ID NO: 24667
  source 1..80: mol_type = other DNA

SEQ ID NO: 59453 - DNA, 80 bp, synthetic construct; identical to SEQ ID NO: 24668
  source 1..80: mol_type = other DNA

SEQ ID NO: 59454 - DNA, 80 bp, synthetic construct; identical to SEQ ID NO: 24669
  source 1..80: mol_type = other DNA

SEQ ID NO: 59455 - DNA, 80 bp, synthetic construct; identical to SEQ ID NO: 10080
  source 1..80: mol_type = other DNA

SEQ ID NO: 59456 - DNA, 80 bp, synthetic construct; identical to SEQ ID NO: 24671
  source 1..80: mol_type = other DNA

SEQ ID NO: 59457 - DNA, 80 bp, synthetic construct; identical to SEQ ID NO: 24672
  source 1..80: mol_type = other DNA

SEQ ID NO: 59458 - DNA, 80 bp, synthetic construct; identical to SEQ ID NO: 24673
  source 1..80: mol_type = other DNA

SEQ ID NO: 59459 - DNA, 80 bp, synthetic construct; identical to SEQ ID NO: 24674
  source 1..80: mol_type = other DNA

SEQ ID NO: 59460 - DNA, 80 bp, synthetic construct; identical to SEQ ID NO: 10081
  source 1..80: mol_type = other DNA

SEQ ID NO: 59461 - DNA, 80 bp, synthetic construct; identical to SEQ ID NO: 24676
  source 1..80: mol_type = other DNA

SEQ ID NO: 59462 - DNA, 80 bp, synthetic construct; identical to SEQ ID NO: 10082
  source 1..80: mol_type = other DNA

SEQ ID NO: 59463 - DNA, 80 bp, synthetic construct; identical to SEQ ID NO: 24679
  source 1..80: mol_type = other DNA

SEQ ID NO: 59464 - DNA, 80 bp, synthetic construct; identical to SEQ ID NO: 24680
  source 1..80: mol_type = other DNA

SEQ ID NO: 59465 - DNA, 80 bp, synthetic construct; identical to SEQ ID NO: 24681
  source 1..80: mol_type = other DNA

SEQ ID NO: 59466 - DNA, 80 bp, synthetic construct; identical to SEQ ID NO: 24682
  source 1..80: mol_type = other DNA

SEQ ID NO: 59467 - DNA, 80 bp, synthetic construct; identical to SEQ ID NO: 10083
  source 1..80: mol_type = other DNA

SEQ ID NO: 59468 - DNA, 80 bp, synthetic construct; identical to SEQ ID NO: 24684
  source 1..80: mol_type = other DNA

SEQ ID NO: 59469 - DNA, 80 bp, synthetic construct; identical to SEQ ID NO: 24685
  source 1..80: mol_type = other DNA

SEQ ID NO: 59470 - DNA, 80 bp, synthetic construct; identical to SEQ ID NO: 10084
  source 1..80: mol_type = other DNA

SEQ ID NO: 59471 - DNA, 80 bp, synthetic construct; identical to SEQ ID NO: 24688
  source 1..80: mol_type = other DNA

SEQ ID NO: 59472 - DNA, 80 bp, synthetic construct; identical to SEQ ID NO: 24689
  source 1..80: mol_type = other DNA

SEQ ID NO: 59473 - DNA, 80 bp, synthetic construct; identical to SEQ ID NO: 24690
  source 1..80: mol_type = other DNA

SEQ ID NO: 59474 - DNA, 80 bp, synthetic construct; identical to SEQ ID NO: 10085
  source 1..80: mol_type = other DNA

SEQ ID NO: 59475 - DNA, 80 bp, synthetic construct; identical to SEQ ID NO: 24692
  source 1..80: mol_type = other DNA

SEQ ID NO: 59476 - DNA, 80 bp, synthetic construct; identical to SEQ ID NO: 24694
  source 1..80: mol_type = other DNA

SEQ ID NO: 59477 - DNA, 80 bp, synthetic construct; identical to SEQ ID NO: 10086
  source 1..80: mol_type = other DNA

SEQ ID NO: 59478 - DNA, 80 bp, synthetic construct; identical to SEQ ID NO: 24696
  source 1..80: mol_type = other DNA

SEQ ID NO: 59479 - DNA, 80 bp, synthetic construct; identical to SEQ ID NO: 24697
  source 1..80: mol_type = other DNA

SEQ ID NO: 59480 - DNA, 80 bp, synthetic construct; identical to SEQ ID NO: 24698
  source 1..80: mol_type = other DNA

SEQ ID NO: 59481 - DNA, 80 bp, synthetic construct; identical to SEQ ID NO: 10087
  source 1..80: mol_type = other DNA

SEQ ID NO: 59482 - DNA, 80 bp, synthetic construct; identical to SEQ ID NO: 24700
  source 1..80: mol_type = other DNA

SEQ ID NO: 59483 - DNA, 80 bp, synthetic construct; identical to SEQ ID NO: 24701
  source 1..80: mol_type = other DNA

SEQ ID NO: 59484 - DNA, 80 bp, synthetic construct; identical to SEQ ID NO: 24702
  source 1..80: mol_type = other DNA

SEQ ID NO: 59485 - DNA, 80 bp, synthetic construct; identical to SEQ ID NO: 10088
  source 1..80: mol_type = other DNA

SEQ ID NO: 59486 - DNA, 80 bp, synthetic construct; identical to SEQ ID NO: 24704
  source 1..80: mol_type = other DNA

SEQ ID NO: 59487 - DNA, 80 bp, synthetic construct; identical to SEQ ID NO: 24705
  source 1..80: mol_type = other DNA

SEQ ID NO: 59488 - DNA, 80 bp, synthetic construct; identical to SEQ ID NO: 24706
  source 1..80: mol_type = other DNA

SEQ ID NO: 59489 - DNA, 80 bp, synthetic construct; identical to SEQ ID NO: 10089
  source 1..80: mol_type = other DNA

SEQ ID NO: 59490 - DNA, 80 bp, synthetic construct; identical to SEQ ID NO: 24708
  source 1..80: mol_type = other DNA

SEQ ID NO: 59491 - DNA, 80 bp, synthetic construct; identical to SEQ ID NO: 24709
  source 1..80: mol_type = other DNA

SEQ ID NO: 59492 - DNA, 80 bp, synthetic construct; identical to SEQ ID NO: 24710
  source 1..80: mol_type = other DNA

SEQ ID NO: 59493 - DNA, 80 bp, synthetic construct; identical to SEQ ID NO: 24712
  source 1..80: mol_type = other DNA

SEQ ID NO: 59494 - DNA, 80 bp, synthetic construct; identical to SEQ ID NO: 24713
  source 1..80: mol_type = other DNA

SEQ ID NO: 59495 - DNA, 80 bp, synthetic construct; identical to SEQ ID NO: 24714
  source 1..80: mol_type = other DNA

SEQ ID NO: 59496 - DNA, 80 bp, synthetic construct; identical to SEQ ID NO: 10091
  source 1..80: mol_type = other DNA

SEQ ID NO: 59497 - DNA, 80 bp, synthetic construct; identical to SEQ ID NO: 24716
  source 1..80: mol_type = other DNA

SEQ ID NO: 59498 - DNA, 80 bp, synthetic construct; identical to SEQ ID NO: 24717
  source 1..80: mol_type = other DNA

SEQ ID NO: 59499 - DNA, 80 bp, synthetic construct; identical to SEQ ID NO: 24718
  source 1..80: mol_type = other DNA

SEQ ID NO: 59500 - DNA, 80 bp, synthetic construct; identical to SEQ ID NO: 10092
  source 1..80: mol_type = other DNA

SEQ ID NO: 59501 - DNA, 80 bp, synthetic construct; identical to SEQ ID NO: 24720
  source 1..80: mol_type = other DNA

SEQ ID NO: 59502 - DNA, 80 bp, synthetic construct; identical to SEQ ID NO: 24721
  source 1..80: mol_type = other DNA

SEQ ID NO: 59503 - DNA, 80 bp, synthetic construct; identical to SEQ ID NO: 24722
  source 1..80: mol_type = other DNA

SEQ ID NO: 59504 - DNA, 80 bp, synthetic construct; identical to SEQ ID NO: 10093
  source 1..80: mol_type = other DNA

SEQ ID NO: 59505 - DNA, 80 bp, synthetic construct; identical to SEQ ID NO: 24724
  source 1..80: mol_type = other DNA

SEQ ID NO: 59506 - DNA, 80 bp, synthetic construct; identical to SEQ ID NO: 24725
  source 1..80: mol_type = other DNA

SEQ ID NO: 59507 - DNA, 80 bp, synthetic construct; identical to SEQ ID NO: 24726
  source 1..80: mol_type = other DNA

SEQ ID NO: 59508 - DNA, 80 bp, synthetic construct; identical to SEQ ID NO: 24727
  source 1..80: mol_type = other DNA

SEQ ID NO: 59509 - DNA, 80 bp, synthetic construct; identical to SEQ ID NO: 10094
  source 1..80: mol_type = other DNA

SEQ ID NO: 59510 - DNA, 80 bp, synthetic construct; identical to SEQ ID NO: 24729
  source 1..80: mol_type = other DNA

SEQ ID NO: 59511 - DNA, 80 bp, synthetic construct; identical to SEQ ID NO: 24730
  source 1..80: mol_type = other DNA

SEQ ID NO: 59512 - DNA, 80 bp, synthetic construct; identical to SEQ ID NO: 10095
  source 1..80: mol_type = other DNA

SEQ ID NO: 59513 - DNA, 80 bp, synthetic construct; identical to SEQ ID NO: 24732
  source 1..80: mol_type = other DNA

SEQ ID NO: 59514 - DNA, 80 bp, synthetic construct; identical to SEQ ID NO: 24733
  source 1..80: mol_type = other DNA

SEQ ID NO: 59515 - DNA, 80 bp, synthetic construct; identical to SEQ ID NO: 24734
  source 1..80: mol_type = other DNA

SEQ ID NO: 59516 - DNA, 80 bp, synthetic construct; identical to SEQ ID NO: 24735
  source 1..80: mol_type = other DNA

SEQ ID NO: 59517 - DNA, 80 bp, synthetic construct; identical to SEQ ID NO: 10096
  source 1..80: mol_type = other DNA

SEQ ID NO: 59518 - DNA, 80 bp, synthetic construct; identical to SEQ ID NO: 24737
  source 1..80: mol_type = other DNA

SEQ ID NO: 59519 - DNA, 80 bp, synthetic construct; identical to SEQ ID NO: 24738
  source 1..80: mol_type = other DNA

SEQ ID NO: 59520 - DNA, 80 bp, synthetic construct; identical to SEQ ID NO: 10097
  source 1..80: mol_type = other DNA

SEQ ID NO: 59521 - DNA, 80 bp, synthetic construct; identical to SEQ ID NO: 24741
  source 1..80: mol_type = other DNA

SEQ ID NO: 59522 - DNA, 80 bp, synthetic construct; identical to SEQ ID NO: 24742
  source 1..80: mol_type = other DNA

SEQ ID NO: 59523 - DNA, 80 bp, synthetic construct; identical to SEQ ID NO: 10098
  source 1..80: mol_type = other DNA

SEQ ID NO: 59524 - DNA, 80 bp, synthetic construct; identical to SEQ ID NO: 24744
  source 1..80: mol_type = other DNA

SEQ ID NO: 59525 - DNA, 80 bp, synthetic construct; identical to SEQ ID NO: 24745
  source 1..80: mol_type = other DNA

SEQ ID NO: 59526 - DNA, 80 bp, synthetic construct; identical to SEQ ID NO: 24746
  source 1..80: mol_type = other DNA

SEQ ID NO: 59527 - DNA, 80 bp, synthetic construct; identical to SEQ ID NO: 10099
  source 1..80: mol_type = other DNA

SEQ ID NO: 59528 - DNA, 80 bp, synthetic construct; identical to SEQ ID NO: 24748
  source 1..80: mol_type = other DNA

SEQ ID NO: 59529 - DNA, 80 bp, synthetic construct; identical to SEQ ID NO: 24749
  source 1..80: mol_type = other DNA

SEQ ID NO: 59530 - DNA, 80 bp, synthetic construct; identical to SEQ ID NO: 10100
  source 1..80: mol_type = other DNA

SEQ ID NO: 59531 - DNA, 80 bp, synthetic construct; identical to SEQ ID NO: 24751
  source 1..80: mol_type = other DNA

SEQ ID NO: 59532 - DNA, 80 bp, synthetic construct; identical to SEQ ID NO: 24752
  source 1..80: mol_type = other DNA

SEQ ID NO: 59533 - DNA, 80 bp, synthetic construct; identical to SEQ ID NO: 24753
  source 1..80: mol_type = other DNA

SEQ ID NO: 59534 - DNA, 80 bp, synthetic construct; identical to SEQ ID NO: 10101
  source 1..80: mol_type = other DNA

SEQ ID NO: 59535 - DNA, 80 bp, synthetic construct; identical to SEQ ID NO: 24755
  source 1..80: mol_type = other DNA

SEQ ID NO: 59536 - DNA, 80 bp, synthetic construct; identical to SEQ ID NO: 24756
  source 1..80: mol_type = other DNA

SEQ ID NO: 59537 - DNA, 80 bp, synthetic construct; identical to SEQ ID NO: 24757
  source 1..80: mol_type = other DNA

SEQ ID NO: 59538 - DNA, 80 bp, synthetic construct; identical to SEQ ID NO: 24758
  source 1..80: mol_type = other DNA

SEQ ID NO: 59539 - DNA, 80 bp, synthetic construct; identical to SEQ ID NO: 24759
  source 1..80: mol_type = other DNA

SEQ ID NO: 59540 - DNA, 80 bp, synthetic construct; identical to SEQ ID NO: 10102
  source 1..80: mol_type = other DNA

SEQ ID NO: 59541 - DNA, 80 bp, synthetic construct; identical to SEQ ID NO: 24761
  source 1..80: mol_type = other DNA

SEQ ID NO: 59542 - DNA, 80 bp, synthetic construct; identical to SEQ ID NO: 24762
  source 1..80: mol_type = other DNA

SEQ ID NO: 59543 - DNA, 80 bp, synthetic construct; identical to SEQ ID NO: 10103
  source 1..80: mol_type = other DNA

SEQ ID NO: 59544 - DNA, 80 bp, synthetic construct; identical to SEQ ID NO: 24764
  source 1..80: mol_type = other DNA

SEQ ID NO: 59545 - DNA, 80 bp, synthetic construct; identical to SEQ ID NO: 24765
  source 1..80: mol_type = other DNA

SEQ ID NO: 59546 - DNA, 80 bp, synthetic construct; identical to SEQ ID NO: 24766
  source 1..80: mol_type = other DNA

SEQ ID NO: 59547 - DNA, 80 bp, synthetic construct; identical to SEQ ID NO: 10104
  source 1..80: mol_type = other DNA

SEQ ID NO: 59548 - DNA, 80 bp, synthetic construct; identical to SEQ ID NO: 24768
  source 1..80: mol_type = other DNA

SEQ ID NO: 59549 - DNA, 80 bp, synthetic construct; identical to SEQ ID NO: 24769
  source 1..80: mol_type = other DNA

SEQ ID NO: 59550 - DNA, 80 bp, synthetic construct; identical to SEQ ID NO: 24770
  source 1..80: mol_type = other DNA

SEQ ID NO: 59551 - DNA, 80 bp, synthetic construct; identical to SEQ ID NO: 24771
  source 1..80: mol_type = other DNA

SEQ ID NO: 59552 - DNA, 80 bp, synthetic construct; identical to SEQ ID NO: 10105
  source 1..80: mol_type = other DNA

SEQ ID NO: 59553 - DNA, 80 bp, synthetic construct; identical to SEQ ID NO: 24773
  source 1..80: mol_type = other DNA

SEQ ID NO: 59554 - DNA, 80 bp, synthetic construct; identical to SEQ ID NO: 24774
  source 1..80: mol_type = other DNA

SEQ ID NO: 59555 - DNA, 80 bp, synthetic construct; identical to SEQ ID NO: 10106
  source 1..80: mol_type = other DNA

SEQ ID NO: 59556 - DNA, 80 bp, synthetic construct; identical to SEQ ID NO: 24776
  source 1..80: mol_type = other DNA

SEQ ID NO: 59557 - DNA, 80 bp, synthetic construct; identical to SEQ ID NO: 24777
  source 1..80: mol_type = other DNA

SEQ ID NO: 59558 - DNA, 80 bp, synthetic construct; identical to SEQ ID NO: 24779
  source 1..80: mol_type = other DNA

SEQ ID NO: 59559 - DNA, 80 bp, synthetic construct; identical to SEQ ID NO: 10107
  source 1..80: mol_type = other DNA

SEQ ID NO: 59560 - DNA, 80 bp, synthetic construct; identical to SEQ ID NO: 24781
  source 1..80: mol_type = other DNA

SEQ ID NO: 59561 - DNA, 80 bp, synthetic construct; identical to SEQ ID NO: 24782
  source 1..80: mol_type = other DNA

SEQ ID NO: 59562 - DNA, 80 bp, synthetic construct; identical to SEQ ID NO: 10108
  source 1..80: mol_type = other DNA

SEQ ID NO: 59563 - DNA, 80 bp, synthetic construct; identical to SEQ ID NO: 24784
  source 1..80: mol_type = other DNA

SEQ ID NO: 59564 - DNA, 80 bp, synthetic construct; identical to SEQ ID NO: 24785
  source 1..80: mol_type = other DNA

SEQ ID NO: 59565 - DNA, 80 bp, synthetic construct; identical to SEQ ID NO: 24786
  source 1..80: mol_type = other DNA

SEQ ID NO: 59566 - DNA, 80 bp, synthetic construct; identical to SEQ ID NO: 24787
  source 1..80: mol_type = other DNA

SEQ ID NO: 59567 - DNA, 80 bp, synthetic construct; identical to SEQ ID NO: 10109
  source 1..80: mol_type = other DNA

SEQ ID NO: 59568 - DNA, 80 bp, synthetic construct; identical to SEQ ID NO: 24789
  source 1..80: mol_type = other DNA

SEQ ID NO: 59569 - DNA, 80 bp, synthetic construct; identical to SEQ ID NO: 24790
  source 1..80: mol_type = other DNA

SEQ ID NO: 59570 - DNA, 80 bp, synthetic construct; identical to SEQ ID NO: 10110
  source 1..80: mol_type = other DNA

SEQ ID NO: 59571 - DNA, 80 bp, synthetic construct; identical to SEQ ID NO: 24792
  source 1..80: mol_type = other DNA

SEQ ID NO: 59572 - DNA, 80 bp, synthetic construct; identical to SEQ ID NO: 24793
  source 1..80: mol_type = other DNA

SEQ ID NO: 59573 - DNA, 80 bp, synthetic construct; identical to SEQ ID NO: 24794
  source 1..80: mol_type = other DNA

SEQ ID NO: 59574 - DNA, 80 bp, synthetic construct; identical to SEQ ID NO: 10111
  source 1..80: mol_type = other DNA

SEQ ID NO: 59575 - DNA, 80 bp, synthetic construct; identical to SEQ ID NO: 24796
  source 1..80: mol_type = other DNA

SEQ ID NO: 59576 - DNA, 80 bp, synthetic construct; identical to SEQ ID NO: 24797
  source 1..80: mol_type = other DNA

SEQ ID NO: 59577 - DNA, 80 bp, synthetic construct; identical to SEQ ID NO: 24798
  source 1..80: mol_type = other DNA

SEQ ID NO: 59578 - DNA, 80 bp, synthetic construct; identical to SEQ ID NO: 10112
  source 1..80: mol_type = other DNA

SEQ ID NO: 59579 - DNA, 80 bp, synthetic construct; identical to SEQ ID NO: 24800
  source 1..80: mol_type = other DNA

SEQ ID NO: 59580 - DNA, 80 bp, synthetic construct; identical to SEQ ID NO: 24801
  source 1..80: mol_type = other DNA

SEQ ID NO: 59581 - DNA, 80 bp, synthetic construct; identical to SEQ ID NO: 24802
  source 1..80: mol_type = other DNA

SEQ ID NO: 59582 - DNA, 80 bp, synthetic construct; identical to SEQ ID NO: 24803
  source 1..80: mol_type = other DNA

SEQ ID NO: 59583 - DNA, 80 bp, synthetic construct; identical to SEQ ID NO: 10113
  source 1..80: mol_type = other DNA

SEQ ID NO: 59584 - DNA, 80 bp, synthetic construct; identical to SEQ ID NO: 24805
  source 1..80: mol_type = other DNA

SEQ ID NO: 59585 - DNA, 80 bp, synthetic construct; identical to SEQ ID NO: 24806
  source 1..80: mol_type = other DNA

SEQ ID NO: 59586 - DNA, 80 bp, synthetic construct; identical to SEQ ID NO: 24807
  source 1..80: mol_type = other DNA

SEQ ID NO: 59587 - DNA, 80 bp, synthetic construct; identical to SEQ ID NO: 10114
  source 1..80: mol_type = other DNA

SEQ ID NO: 59588 - DNA, 80 bp, synthetic construct; identical to SEQ ID NO: 24810
  source 1..80: mol_type = other DNA

SEQ ID NO: 59589 - DNA, 80 bp, synthetic construct; identical to SEQ ID NO: 10115
  source 1..80: mol_type = other DNA

SEQ ID NO: 59590 - DNA, 80 bp, synthetic construct; identical to SEQ ID NO: 24812
  source 1..80: mol_type = other DNA

SEQ ID NO: 59591 - DNA, 80 bp, synthetic construct; identical to SEQ ID NO: 24813
  source 1..80: mol_type = other DNA

SEQ ID NO: 59592 - DNA, 80 bp, synthetic construct; identical to SEQ ID NO: 24814
  source 1..80: mol_type = other DNA

SEQ ID NO: 59593 - DNA, 80 bp, synthetic construct; identical to SEQ ID NO: 10116
  source 1..80: mol_type = other DNA

SEQ ID NO: 59594 - DNA, 80 bp, synthetic construct; identical to SEQ ID NO: 24816
  source 1..80: mol_type = other DNA

SEQ ID NO: 59595 - DNA, 80 bp, synthetic construct; identical to SEQ ID NO: 24817
  source 1..80: mol_type = other DNA

SEQ ID NO: 59596 - DNA, 80 bp, synthetic construct; identical to SEQ ID NO: 24818
  source 1..80: mol_type = other DNA

SEQ ID NO: 59597 - DNA, 80 bp, synthetic construct; identical to SEQ ID NO: 10117
  source 1..80: mol_type = other DNA

SEQ ID NO: 59598 - DNA, 80 bp, synthetic construct; identical to SEQ ID NO: 24820
  source 1..80: mol_type = other DNA

SEQ ID NO: 59599 - DNA, 80 bp, synthetic construct; identical to SEQ ID NO: 24821
  source 1..80: mol_type = other DNA

SEQ ID NO: 59600 - DNA, 80 bp, synthetic construct; identical to SEQ ID NO: 24822
  source 1..80: mol_type = other DNA

SEQ ID NO: 59601 - DNA, 80 bp, synthetic construct; identical to SEQ ID NO: 10118
  source 1..80: mol_type = other DNA

SEQ ID NO: 59602 - DNA, 80 bp, synthetic construct; identical to SEQ ID NO: 24824
  source 1..80: mol_type = other DNA

SEQ ID NO: 59603 - DNA, 80 bp, synthetic construct; identical to SEQ ID NO: 24825
  source 1..80: mol_type = other DNA

SEQ ID NO: 59604 - DNA, 80 bp, synthetic construct; identical to SEQ ID NO: 10119
  source 1..80: mol_type = other DNA

SEQ ID NO: 59605 - DNA, 80 bp, synthetic construct; identical to SEQ ID NO: 24827
  source 1..80: mol_type = other DNA

SEQ ID NO: 59606 - DNA, 80 bp, synthetic construct; identical to SEQ ID NO: 24828
  source 1..80: mol_type = other DNA

SEQ ID NO: 59607 - DNA, 80 bp, synthetic construct; identical to SEQ ID NO: 24829
  source 1..80: mol_type = other DNA

SEQ ID NO: 59608 - DNA, 80 bp, synthetic construct; identical to SEQ ID NO: 10120
  source 1..80: mol_type = other DNA

SEQ ID NO: 59609 - DNA, 80 bp, synthetic construct; identical to SEQ ID NO: 24831
  source 1..80: mol_type = other DNA

SEQ ID NO: 59610 - DNA, 80 bp, synthetic construct; identical to SEQ ID NO: 24832
  source 1..80: mol_type = other DNA

SEQ ID NO: 59611 - DNA, 80 bp, synthetic construct; identical to SEQ ID NO: 24833
  source 1..80: mol_type = other DNA

SEQ ID NO: 59612 - DNA, 80 bp, synthetic construct; identical to SEQ ID NO: 10121
  source 1..80: mol_type = other DNA

SEQ ID NO: 59613 - DNA, 80 bp, synthetic construct; identical to SEQ ID NO: 24836
  source 1..80: mol_type = other DNA

SEQ ID NO: 59614 - DNA, 80 bp, synthetic construct; identical to SEQ ID NO: 24837
  source 1..80: mol_type = other DNA

SEQ ID NO: 59615 - DNA, 80 bp, synthetic construct; identical to SEQ ID NO: 10122
  source 1..80: mol_type = other DNA

SEQ ID NO: 59616 - DNA, 80 bp, synthetic construct; identical to SEQ ID NO: 24839
  source 1..80: mol_type = other DNA

SEQ ID NO: 59617 - DNA, 80 bp, synthetic construct; identical to SEQ ID NO: 24840
  source 1..80: mol_type = other DNA

SEQ ID NO: 59618 - DNA, 80 bp, synthetic construct; identical to SEQ ID NO: 24841
  source 1..80: mol_type = other DNA

SEQ ID NO: 59619 - DNA, 80 bp, synthetic construct; identical to SEQ ID NO: 10123
  source 1..80: mol_type = other DNA

SEQ ID NO: 59620 - DNA, 80 bp, synthetic construct; identical to SEQ ID NO: 24843
  source 1..80: mol_type = other DNA

SEQ ID NO: 59621 - DNA, 80 bp, synthetic construct; identical to SEQ ID NO: 24845
  source 1..80: mol_type = other DNA

SEQ ID NO: 59622 - DNA, 80 bp, synthetic construct; identical to SEQ ID NO: 10124
  source 1..80: mol_type = other DNA

SEQ ID NO: 59623 - DNA, 80 bp, synthetic construct; identical to SEQ ID NO: 24847
  source 1..80: mol_type = other DNA

SEQ ID NO: 59624 - DNA, 80 bp, synthetic construct; identical to SEQ ID NO: 24848
  source 1..80: mol_type = other DNA

SEQ ID NO: 59625 - DNA, 80 bp, synthetic construct; identical to SEQ ID NO: 24849
  source 1..80: mol_type = other DNA

SEQ ID NO: 59626 - DNA, 80 bp, synthetic construct; identical to SEQ ID NO: 10125
  source 1..80: mol_type = other DNA

SEQ ID NO: 59627 - DNA, 80 bp, synthetic construct; identical to SEQ ID NO: 24851
  source 1..80: mol_type = other DNA

SEQ ID NO: 59628 - DNA, 80 bp, synthetic construct; identical to SEQ ID NO: 24852
  source 1..80: mol_type = other DNA

SEQ ID NO: 59629 - DNA, 80 bp, synthetic construct; identical to SEQ ID NO: 24853
  source 1..80: mol_type = other DNA

SEQ ID NO: 59630 - DNA, 80 bp, synthetic construct; identical to SEQ ID NO: 24854
  source 1..80: mol_type = other DNA

SEQ ID NO: 59631 - DNA, 80 bp, synthetic construct; identical to SEQ ID NO: 10126
  source 1..80: mol_type = other DNA

SEQ ID NO: 59632 - DNA, 80 bp, synthetic construct; identical to SEQ ID NO: 24856
  source 1..80: mol_type = other DNA

SEQ ID NO: 59633 - DNA, 80 bp, synthetic construct; identical to SEQ ID NO: 24857
  source 1..80: mol_type = other DNA

SEQ ID NO: 59634 - DNA, 80 bp, synthetic construct; identical to SEQ ID NO: 24858
  source 1..80: mol_type = other DNA

SEQ ID NO: 59635 - DNA, 80 bp, synthetic construct; identical to SEQ ID NO: 10127
  source 1..80: mol_type = other DNA

SEQ ID NO: 59636 - DNA, 80 bp, synthetic construct; identical to SEQ ID NO: 24860
  source 1..80: mol_type = other DNA

SEQ ID NO: 59637 - DNA, 80 bp, synthetic construct; identical to SEQ ID NO: 24861
  source 1..80: mol_type = other DNA

SEQ ID NO: 59638 - DNA, 80 bp, synthetic construct; identical to SEQ ID NO: 10128
  source 1..80: mol_type = other DNA

SEQ ID NO: 59639 - DNA, 80 bp, synthetic construct; identical to SEQ ID NO: 24866
  source 1..80: mol_type = other DNA

SEQ ID NO: 59640 - DNA, 80 bp, synthetic construct; identical to SEQ ID NO: 24867
  source 1..80: mol_type = other DNA

SEQ ID NO: 59641 - DNA, 80 bp, synthetic construct; identical to SEQ ID NO: 10129
  source 1..80: mol_type = other DNA

SEQ ID NO: 59642 - DNA, 80 bp, synthetic construct; identical to SEQ ID NO: 24869
  source 1..80: mol_type = other DNA

SEQ ID NO: 59643 - DNA, 80 bp, synthetic construct; identical to SEQ ID NO: 24870
  source 1..80: mol_type = other DNA

SEQ ID NO: 59644 - DNA, 80 bp, synthetic construct; identical to SEQ ID NO: 10130
  source 1..80: mol_type = other DNA

SEQ ID NO: 59645 - DNA, 80 bp, synthetic construct; identical to SEQ ID NO: 24872
  source 1..80: mol_type = other DNA

SEQ ID NO: 59646 - DNA, 80 bp, synthetic construct; identical to SEQ ID NO: 24873
  source 1..80: mol_type = other DNA

SEQ ID NO: 59647 - DNA, 80 bp, synthetic construct; identical to SEQ ID NO: 24874
  source 1..80: mol_type = other DNA

SEQ ID NO: 59648 - DNA, 80 bp, synthetic construct; identical to SEQ ID NO: 24875
  source 1..80: mol_type = other DNA

SEQ ID NO: 59649 - DNA, 80 bp, synthetic construct; identical to SEQ ID NO: 10131
  source 1..80: mol_type = other DNA

SEQ ID NO: 59650 - DNA, 80 bp, synthetic construct; identical to SEQ ID NO: 24877
  source 1..80: mol_type = other DNA

SEQ ID NO: 59651 - DNA, 80 bp, synthetic construct; identical to SEQ ID NO: 24878
  source 1..80: mol_type = other DNA

SEQ ID NO: 59652 - DNA, 80 bp, synthetic construct; identical to SEQ ID NO: 10132
  source 1..80: mol_type = other DNA

SEQ ID NO: 59653 - DNA, 80 bp, synthetic construct; identical to SEQ ID NO: 24880
  source 1..80: mol_type = other DNA

SEQ ID NO: 59654 - DNA, 80 bp, synthetic construct; identical to SEQ ID NO: 24881
  source 1..80: mol_type = other DNA

SEQ ID NO: 59655 - DNA, 80 bp, synthetic construct; identical to SEQ ID NO: 24882
  source 1..80: mol_type = other DNA

SEQ ID NO: 59656 - DNA, 80 bp, synthetic construct; identical to SEQ ID NO: 24883
  source 1..80: mol_type = other DNA

SEQ ID NO: 59657 - DNA, 80 bp, synthetic construct; identical to SEQ ID NO: 10133
  source 1..80: mol_type = other DNA

SEQ ID NO: 59658 - DNA, 80 bp, synthetic construct; identical to SEQ ID NO: 24885
  source 1..80: mol_type = other DNA

SEQ ID NO: 59659 - DNA, 80 bp, synthetic construct; identical to SEQ ID NO: 24886
  source 1..80: mol_type = other DNA

SEQ ID NO: 59660 - DNA, 80 bp, synthetic construct; identical to SEQ ID NO: 24887
  source 1..80: mol_type = other DNA

SEQ ID NO: 59661 - DNA, 80 bp, synthetic construct; identical to SEQ ID NO: 10134
  source 1..80: mol_type = other DNA

SEQ ID NO: 59662 - DNA, 80 bp, synthetic construct; identical to SEQ ID NO: 24889
  source 1..80: mol_type = other DNA

SEQ ID NO: 59663 - DNA, 80 bp, synthetic construct; identical to SEQ ID NO: 24890
  source 1..80: mol_type = other DNA

SEQ ID NO: 59664 - DNA, 80 bp, synthetic construct; identical to SEQ ID NO: 24891
  source 1..80: mol_type = other DNA

SEQ ID NO: 59665 - DNA, 80 bp, synthetic construct; identical to SEQ ID NO: 10135
  source 1..80: mol_type = other DNA

SEQ ID NO: 59666 - DNA, 80 bp, synthetic construct; identical to SEQ ID NO: 24893
  source 1..80: mol_type = other DNA

SEQ ID NO: 59667 - DNA, 80 bp, synthetic construct; identical to SEQ ID NO: 24894
  source 1..80: mol_type = other DNA

SEQ ID NO: 59668 - DNA, 80 bp, synthetic construct; identical to SEQ ID NO: 24895
  source 1..80: mol_type = other DNA

SEQ ID NO: 59669 - DNA, 80 bp, synthetic construct; identical to SEQ ID NO: 10136
  source 1..80: mol_type = other DNA

SEQ ID NO: 59670 - DNA, 80 bp, synthetic construct; identical to SEQ ID NO: 24897
  source 1..80: mol_type = other DNA

SEQ ID NO: 59671 - DNA, 80 bp, synthetic construct; identical to SEQ ID NO: 24898
  source 1..80: mol_type = other DNA

SEQ ID NO: 59672 - DNA, 80 bp, synthetic construct; identical to SEQ ID NO: 24899
  source 1..80: mol_type = other DNA

SEQ ID NO: 59673 - DNA, 80 bp, synthetic construct; identical to SEQ ID NO: 24900
  source 1..80: mol_type = other DNA

SEQ ID NO: 59674 - DNA, 80 bp, synthetic construct; identical to SEQ ID NO: 10137
  source 1..80: mol_type = other DNA

SEQ ID NO: 59675 - DNA, 80 bp, synthetic construct; identical to SEQ ID NO: 24902
  source 1..80: mol_type = other DNA

SEQ ID NO: 59676 - DNA, 80 bp, synthetic construct; identical to SEQ ID NO: 24903
  source 1..80: mol_type = other DNA

SEQ ID NO: 59677 - DNA, 80 bp, synthetic construct; identical to SEQ ID NO: 24904
  source 1..80: mol_type = other DNA

SEQ ID NO: 59678 - DNA, 80 bp, synthetic construct; identical to SEQ ID NO: 10138
  source 1..80: mol_type = other DNA

SEQ ID NO: 59679 - DNA, 80 bp, synthetic construct; identical to SEQ ID NO: 24906
  source 1..80: mol_type = other DNA

SEQ ID NO: 59680 - DNA, 80 bp, synthetic construct; identical to SEQ ID NO: 24907
  source 1..80: mol_type = other DNA

SEQ ID NO: 59681 - DNA, 80 bp, synthetic construct; identical to SEQ ID NO: 24908
  source 1..80: mol_type = other DNA

SEQ ID NO: 59682 - DNA, 80 bp, synthetic construct; identical to SEQ ID NO: 10139
  source 1..80: mol_type = other DNA

SEQ ID NO: 59683 - DNA, 80 bp, synthetic construct; identical to SEQ ID NO: 24910
  source 1..80: mol_type = other DNA

SEQ ID NO: 59684 - DNA, 80 bp, synthetic construct; identical to SEQ ID NO: 24911
  source 1..80: mol_type = other DNA

SEQ ID NO: 59685 - DNA, 80 bp, synthetic construct; identical to SEQ ID NO: 10140
  source 1..80: mol_type = other DNA

SEQ ID NO: 59686 - DNA, 80 bp, synthetic construct; identical to SEQ ID NO: 24914
  source 1..80: mol_type = other DNA

SEQ ID NO: 59687 - DNA, 80 bp, synthetic construct; identical to SEQ ID NO: 24915
  source 1..80: mol_type = other DNA

SEQ ID NO: 59688 - DNA, 80 bp, synthetic construct; identical to SEQ ID NO: 24916
  source 1..80: mol_type = other DNA

SEQ ID NO: 59689 - DNA, 80 bp, synthetic construct; identical to SEQ ID NO: 10141
  source 1..80: mol_type = other DNA

SEQ ID NO: 59690 - DNA, 80 bp, synthetic construct; identical to SEQ ID NO: 24918
  source 1..80: mol_type = other DNA

SEQ ID NO: 59691 - DNA, 80 bp, synthetic construct; identical to SEQ ID NO: 24919
  source 1..80: mol_type = other DNA

SEQ ID NO: 59692 - DNA, 80 bp, synthetic construct; identical to SEQ ID NO: 24920
  source 1..80: mol_type = other DNA

SEQ ID NO: 59693 - DNA, 80 bp, synthetic construct; identical to SEQ ID NO: 10142
  source 1..80: mol_type = other DNA

SEQ ID NO: 59694 - DNA, 80 bp, synthetic construct; identical to SEQ ID NO: 24922
  source 1..80: mol_type = other DNA

SEQ ID NO: 59695 - DNA, 80 bp, synthetic construct; identical to SEQ ID NO: 24923
  source 1..80: mol_type = other DNA

SEQ ID NO: 59696 - DNA, 80 bp, synthetic construct; identical to SEQ ID NO: 24924
  source 1..80: mol_type = other DNA

SEQ ID NO: 59697 - DNA, 80 bp, synthetic construct; identical to SEQ ID NO: 10143
  source 1..80: mol_type = other DNA

SEQ ID NO: 59698 - DNA, 80 bp, synthetic construct; identical to SEQ ID NO: 24926
  source 1..80: mol_type = other DNA

SEQ ID NO: 59699 - DNA, 80 bp, synthetic construct; identical to SEQ ID NO: 24927
  source 1..80: mol_type = other DNA

SEQ ID NO: 59700 - DNA, 80 bp, synthetic construct; identical to SEQ ID NO: 24928
  source 1..80: mol_type = other DNA

SEQ ID NO: 59701 - DNA, 80 bp, synthetic construct; identical to SEQ ID NO: 10144
  source 1..80: mol_type = other DNA

SEQ ID NO: 59702 - DNA, 80 bp, synthetic construct; identical to SEQ ID NO: 24930
  source 1..80: mol_type = other DNA

SEQ ID NO: 59703 - DNA, 80 bp, synthetic construct; identical to SEQ ID NO: 24931
  source 1..80: mol_type = other DNA

SEQ ID NO: 59704 - DNA, 80 bp, synthetic construct; identical to SEQ ID NO: 24932
  source 1..80: mol_type = other DNA

SEQ ID NO: 59705 - DNA, 80 bp, synthetic construct; identical to SEQ ID NO: 10145
  source 1..80: mol_type = other DNA

SEQ ID NO: 59706 - DNA, 80 bp, synthetic construct; identical to SEQ ID NO: 24934
  source 1..80: mol_type = other DNA

SEQ ID NO: 59707 - DNA, 80 bp, synthetic construct; identical to SEQ ID NO: 24935
  source 1..80: mol_type = other DNA

SEQ ID NO: 59708 - DNA, 80 bp, synthetic construct; identical to SEQ ID NO: 24936
  source 1..80: mol_type = other DNA

SEQ ID NO: 59709 - DNA, 80 bp, synthetic construct; identical to SEQ ID NO: 10146
  source 1..80: mol_type = other DNA

SEQ ID NO: 59710 - DNA, 80 bp, synthetic construct; identical to SEQ ID NO: 24938
  source 1..80: mol_type = other DNA

SEQ ID NO: 59711 - DNA, 80 bp, synthetic construct; identical to SEQ ID NO: 24939
  source 1..80: mol_type = other DNA

SEQ ID NO: 59712 - DNA, 80 bp, synthetic construct; identical to SEQ ID NO: 24940
  source 1..80: mol_type = other DNA

SEQ ID NO: 59713 - DNA, 80 bp, synthetic construct; identical to SEQ ID NO: 10147
  source 1..80: mol_type = other DNA

SEQ ID NO: 59714 - DNA, 80 bp, synthetic construct; identical to SEQ ID NO: 24942
  source 1..80: mol_type = other DNA

SEQ ID NO: 59715 - DNA, 80 bp, synthetic construct; identical to SEQ ID NO: 24943
  source 1..80: mol_type = other DNA

SEQ ID NO: 59716 - DNA, 80 bp, synthetic construct; identical to SEQ ID NO: 24944
  source 1..80: mol_type = other DNA

SEQ ID NO: 59717 - DNA, 80 bp, synthetic construct; identical to SEQ ID NO: 10148
  source 1..80: mol_type = other DNA

SEQ ID NO: 59718 - DNA, 80 bp, synthetic construct; identical to SEQ ID NO: 24946
  source 1..80: mol_type = other DNA

SEQ ID NO: 59719 - DNA, 80 bp, synthetic construct; identical to SEQ ID NO: 24948
  source 1..80: mol_type = other DNA

SEQ ID NO: 59720 - DNA, 80 bp, synthetic construct; identical to SEQ ID NO: 24949
  source 1..80: mol_type = other DNA

SEQ ID NO: 59721 - DNA, 80 bp, synthetic construct; identical to SEQ ID NO: 24950
  source 1..80: mol_type = other DNA

SEQ ID NO: 59722 - DNA, 80 bp, synthetic construct; identical to SEQ ID NO: 10149
  source 1..80: mol_type = other DNA

SEQ ID NO: 59723 - DNA, 80 bp, synthetic construct; identical to SEQ ID NO: 24952
  source 1..80: mol_type = other DNA

SEQ ID NO: 59724 - DNA, 80 bp, synthetic construct; identical to SEQ ID NO: 10150
  source 1..80: mol_type = other DNA

SEQ ID NO: 59725 - DNA, 80 bp, synthetic construct; identical to SEQ ID NO: 24954
  source 1..80: mol_type = other DNA

SEQ ID NO: 59726 - DNA, 80 bp, synthetic construct; identical to SEQ ID NO: 24955
  source 1..80: mol_type = other DNA

SEQ ID NO: 59727 - DNA, 80 bp, synthetic construct; identical to SEQ ID NO: 24956
  source 1..80: mol_type = other DNA

SEQ ID NO: 59728 - DNA, 80 bp, synthetic construct; identical to SEQ ID NO: 24957
  source 1..80: mol_type = other DNA

SEQ ID NO: 59729 - DNA, 80 bp, synthetic construct; identical to SEQ ID NO: 10151
  source 1..80: mol_type = other DNA

SEQ ID NO: 59730 - DNA, 80 bp, synthetic construct; identical to SEQ ID NO: 24959
  source 1..80: mol_type = other DNA

SEQ ID NO: 59731 - DNA, 80 bp, synthetic construct; identical to SEQ ID NO: 24960
  source 1..80: mol_type = other DNA

SEQ ID NO: 59732 - DNA, 80 bp, synthetic construct; identical to SEQ ID NO: 24961
  source 1..80: mol_type = other DNA

SEQ ID NO: 59733 - DNA, 80 bp, synthetic construct; identical to SEQ ID NO: 24962
  source 1..80: mol_type = other DNA

SEQ ID NO: 59734 - DNA, 80 bp, synthetic construct; identical to SEQ ID NO: 10152
  source 1..80: mol_type = other DNA

SEQ ID NO: 59735 - DNA, 80 bp, synthetic construct; identical to SEQ ID NO: 24964
  source 1..80: mol_type = other DNA

SEQ ID NO: 59736 - DNA, 80 bp, synthetic construct; identical to SEQ ID NO: 24965
  source 1..80: mol_type = other DNA

SEQ ID NO: 59737 - DNA, 80 bp, synthetic construct; identical to SEQ ID NO: 10153
  source 1..80: mol_type = other DNA

SEQ ID NO: 59738 - DNA, 80 bp, synthetic construct; identical to SEQ ID NO: 24968
  source 1..80: mol_type = other DNA

SEQ ID NO: 59739 - DNA, 80 bp, synthetic construct; identical to SEQ ID NO: 24969
  source 1..80: mol_type = other DNA

SEQ ID NO: 59740 - DNA, 80 bp, synthetic construct; identical to SEQ ID NO: 24970
  source 1..80: mol_type = other DNA

SEQ ID NO: 59741 - DNA, 80 bp, synthetic construct; identical to SEQ ID NO: 10154
  source 1..80: mol_type = other DNA

SEQ ID NO: 59742 - DNA, 80 bp, synthetic construct; identical to SEQ ID NO: 24972
  source 1..80: mol_type = other DNA

SEQ ID NO: 59743 - DNA, 80 bp, synthetic construct; identical to SEQ ID NO: 24973
  source 1..80: mol_type = other DNA

SEQ ID NO: 59744 - DNA, 80 bp, synthetic construct; identical to SEQ ID NO: 10155
  source 1..80: mol_type = other DNA

SEQ ID NO: 59745 - DNA, 80 bp, synthetic construct; identical to SEQ ID NO: 24975
  source 1..80: mol_type = other DNA

SEQ ID NO: 59746 - DNA, 80 bp, synthetic construct; identical to SEQ ID NO: 24976
  source 1..80: mol_type = other DNA

SEQ ID NO: 59747 - DNA, 80 bp, synthetic construct; identical to SEQ ID NO: 24977
  source 1..80: mol_type = other DNA

SEQ ID NO: 59748 - DNA, 80 bp, synthetic construct; identical to SEQ ID NO: 10156
  source 1..80: mol_type = other DNA

SEQ ID NO: 59749 - DNA, 80 bp, synthetic construct; identical to SEQ ID NO: 24979
  source 1..80: mol_type = other DNA

SEQ ID NO: 59750 - DNA, 80 bp, synthetic construct; identical to SEQ ID NO: 24980
  source 1..80: mol_type = other DNA

SEQ ID NO: 59751 - DNA, 80 bp, synthetic construct; identical to SEQ ID NO: 24981
  source 1..80: mol_type = other DNA

SEQ ID NO: 59752 - DNA, 80 bp, synthetic construct; identical to SEQ ID NO: 10157
  source 1..80: mol_type = other DNA

SEQ ID NO: 59753 - DNA, 80 bp, synthetic construct; identical to SEQ ID NO: 24983
  source 1..80: mol_type = other DNA

SEQ ID NO: 59754 - DNA, 80 bp, synthetic construct; identical to SEQ ID NO: 24984
  source 1..80: mol_type = other DNA

SEQ ID NO: 59755 - DNA, 80 bp, synthetic construct; identical to SEQ ID NO: 24985
  source 1..80: mol_type = other DNA

SEQ ID NO: 59756 - DNA, 80 bp, synthetic construct; identical to SEQ ID NO: 10158
  source 1..80: mol_type = other DNA

SEQ ID NO: 59757 - DNA, 80 bp, synthetic construct; identical to SEQ ID NO: 24987
  source 1..80: mol_type = other DNA

SEQ ID NO: 59758 - DNA, 80 bp, synthetic construct; identical to SEQ ID NO: 24988
  source 1..80: mol_type = other DNA

SEQ ID NO: 59759 - DNA, 80 bp, synthetic construct; identical to SEQ ID NO: 24989
  source 1..80: mol_type = other DNA

SEQ ID NO: 59760 - DNA, 80 bp, synthetic construct; identical to SEQ ID NO: 10159
  source 1..80: mol_type = other DNA

SEQ ID NO: 59761 - DNA, 80 bp, synthetic construct; identical to SEQ ID NO: 24991
  source 1..80: mol_type = other DNA

SEQ ID NO: 59762 - DNA, 80 bp, synthetic construct; identical to SEQ ID NO: 24992
  source 1..80: mol_type = other DNA

SEQ ID NO: 59763 - DNA, 80 bp, synthetic construct; identical to SEQ ID NO: 24993
  source 1..80: mol_type = other DNA

SEQ ID NO: 59764 - DNA, 80 bp, synthetic construct; identical to SEQ ID NO: 10160
  source 1..80: mol_type = other DNA

SEQ ID NO: 59765 - DNA, 80 bp, synthetic construct; identical to SEQ ID NO: 24995
  source 1..80: mol_type = other DNA

SEQ ID NO: 59766 - DNA, 80 bp, synthetic construct; identical to SEQ ID NO: 24996
  source 1..80: mol_type = other DNA

SEQ ID NO: 59767 - DNA, 80 bp, synthetic construct; identical to SEQ ID NO: 24997
  source 1..80: mol_type = other DNA

SEQ ID NO: 59768 - DNA, 80 bp, synthetic construct; identical to SEQ ID NO: 10161
  source 1..80: mol_type = other DNA

SEQ ID NO: 59769 - DNA, 80 bp, synthetic construct; identical to SEQ ID NO: 24999
  source 1..80: mol_type = other DNA

SEQ ID NO: 59770 - DNA, 80 bp, synthetic construct; identical to SEQ ID NO: 25000
  source 1..80: mol_type = other DNA

SEQ ID NO: 59771 - DNA, 80 bp, synthetic construct; identical to SEQ ID NO: 25001
  source 1..80: mol_type = other DNA

SEQ ID NO: 59772 - DNA, 80 bp, synthetic construct; identical to SEQ ID NO: 10162
  source 1..80: mol_type = other DNA

SEQ ID NO: 59773 - DNA, 80 bp, synthetic construct; identical to SEQ ID NO: 25003
  source 1..80: mol_type = other DNA

SEQ ID NO: 59774 - DNA, 80 bp, synthetic construct; identical to SEQ ID NO: 25005
  source 1..80: mol_type = other DNA

SEQ ID NO: 59775 - DNA, 80 bp, synthetic construct; identical to SEQ ID NO: 25007
  source 1..80: mol_type = other DNA

SEQ ID NO: 59776 - DNA, 80 bp, synthetic construct; identical to SEQ ID NO: 25009
  source 1..80: mol_type = other DNA

SEQ ID NO: 59777 - DNA, 80 bp, synthetic construct; identical to SEQ ID NO: 10164
  source 1..80: mol_type = other DNA

SEQ ID NO: 59778 - DNA, 80 bp, synthetic construct; identical to SEQ ID NO: 25012
  source 1..80: mol_type = other DNA

SEQ ID NO: 59779 - DNA, 80 bp, synthetic construct; identical to SEQ ID NO: 25013
  source 1..80: mol_type = other DNA

SEQ ID NO: 59780 - DNA, 80 bp, synthetic construct; identical to SEQ ID NO: 25014
  source 1..80: mol_type = other DNA

SEQ ID NO: 59781 - DNA, 80 bp, synthetic construct; identical to SEQ ID NO: 10165
  source 1..80: mol_type = other DNA

SEQ ID NO: 59782 - DNA, 80 bp, synthetic construct; identical to SEQ ID NO: 25016
  source 1..80: mol_type = other DNA

SEQ ID NO: 59783 - DNA, 80 bp, synthetic construct; identical to SEQ ID NO: 25017
  source 1..80: mol_type = other DNA

SEQ ID NO: 59784 - DNA, 80 bp, synthetic construct; identical to SEQ ID NO: 25018
  source 1..80: mol_type = other DNA

SEQ ID NO: 59785 - DNA, 80 bp, synthetic construct; identical to SEQ ID NO: 25019
  source 1..80: mol_type = other DNA

SEQ ID NO: 59786 - DNA, 80 bp, synthetic construct; identical to SEQ ID NO: 10166
  source 1..80: mol_type = other DNA

SEQ ID NO: 59787 - DNA, 80 bp, synthetic construct; identical to SEQ ID NO: 25021
  source 1..80: mol_type = other DNA

SEQ ID NO: 59788 - DNA, 80 bp, synthetic construct; identical to SEQ ID NO: 25022
  source 1..80: mol_type = other DNA

SEQ ID NO: 59789 - DNA, 80 bp, synthetic construct; identical to SEQ ID NO: 10167
  source 1..80: mol_type = other DNA

SEQ ID NO: 59790 - DNA, 80 bp, synthetic construct; identical to SEQ ID NO: 25025
  source 1..80: mol_type = other DNA

SEQ ID NO: 59791 - DNA, 80 bp, synthetic construct; identical to SEQ ID NO: 10168
  source 1..80: mol_type = other DNA

SEQ ID NO: 59792 - DNA, 80 bp, synthetic construct; identical to SEQ ID NO: 25029
  source 1..80: mol_type = other DNA

SEQ ID NO: 59793 - DNA, 80 bp, synthetic construct; identical to SEQ ID NO: 25030
  source 1..80: mol_type = other DNA

SEQ ID NO: 59794 - DNA, 80 bp, synthetic construct; identical to SEQ ID NO: 25031
  source 1..80: mol_type = other DNA

SEQ ID NO: 59795 - DNA, 80 bp, synthetic construct; identical to SEQ ID NO: 10169
  source 1..80: mol_type = other DNA

SEQ ID NO: 59796 - DNA, 80 bp, synthetic construct; identical to SEQ ID NO: 25033
  source 1..80: mol_type = other DNA

SEQ ID NO: 59797 - DNA, 80 bp, synthetic construct; identical to SEQ ID NO: 25034
  source 1..80: mol_type = other DNA

SEQ ID NO: 59798 - DNA, 80 bp, synthetic construct; identical to SEQ ID NO: 10170
  source 1..80: mol_type = other DNA

SEQ ID NO: 59799 - DNA, 80 bp, synthetic construct; identical to SEQ ID NO: 25036
  source 1..80: mol_type = other DNA

SEQ ID NO: 59800 - DNA, 80 bp, synthetic construct; identical to SEQ ID NO: 25037
  source 1..80: mol_type = other DNA

SEQ ID NO: 59801 - DNA, 80 bp, synthetic construct; identical to SEQ ID NO: 25038
  source 1..80: mol_type = other DNA

SEQ ID NO: 59802 - DNA, 80 bp, synthetic construct; identical to SEQ ID NO: 10171
  source 1..80: mol_type = other DNA

SEQ ID NO: 59803 - DNA, 80 bp, synthetic construct; identical to SEQ ID NO: 25040
  source 1..80: mol_type = other DNA

SEQ ID NO: 59804 - DNA, 80 bp, synthetic construct; identical to SEQ ID NO: 25041
  source 1..80: mol_type = other DNA

SEQ ID NO: 59805 - DNA, 80 bp, synthetic construct; identical to SEQ ID NO: 25042
  source 1..80: mol_type = other DNA

SEQ ID NO: 59806 - DNA, 80 bp, synthetic construct; identical to SEQ ID NO: 10172
  source 1..80: mol_type = other DNA

SEQ ID NO: 59807 - DNA, 80 bp, synthetic construct; identical to SEQ ID NO: 25044
  source 1..80: mol_type = other DNA

SEQ ID NO: 59808 - DNA, 80 bp, synthetic construct; identical to SEQ ID NO: 25045
  source 1..80: mol_type = other DNA

SEQ ID NO: 59809 - DNA, 80 bp, synthetic construct; identical to SEQ ID NO: 25046
  source 1..80: mol_type = other DNA

SEQ ID NO: 59810 - DNA, 80 bp, synthetic construct; identical to SEQ ID NO: 10173
  source 1..80: mol_type = other DNA

SEQ ID NO: 59811 - DNA, 80 bp, synthetic construct; identical to SEQ ID NO: 25048
  source 1..80: mol_type = other DNA

SEQ ID NO: 59812 - DNA, 80 bp, synthetic construct; identical to SEQ ID NO: 25049
  source 1..80: mol_type = other DNA

SEQ ID NO: 59813 - DNA, 80 bp, synthetic construct; identical to SEQ ID NO: 25050
  source 1..80: mol_type = other DNA

SEQ ID NO: 59814 - DNA, 80 bp, synthetic construct; identical to SEQ ID NO: 25051
  source 1..80: mol_type = other DNA

SEQ ID NO: 59815 - DNA, 80 bp, synthetic construct; identical to SEQ ID NO: 10174
  source 1..80: mol_type = other DNA

SEQ ID NO: 59816 - DNA, 80 bp, synthetic construct; identical to SEQ ID NO: 25053
  source 1..80: mol_type = other DNA

SEQ ID NO: 59817 - DNA, 80 bp, synthetic construct; identical to SEQ ID NO: 25054
  source 1..80: mol_type = other DNA

SEQ ID NO: 59818 - DNA, 80 bp, synthetic construct; identical to SEQ ID NO: 10175
  source 1..80: mol_type = other DNA

SEQ ID NO: 59819 - DNA, 80 bp, synthetic construct; identical to SEQ ID NO: 25056
  source 1..80: mol_type = other DNA

SEQ ID NO: 59820 - DNA, 80 bp, synthetic construct; identical to SEQ ID NO: 25057
  source 1..80: mol_type = other DNA

SEQ ID NO: 59821 - DNA, 80 bp, synthetic construct; identical to SEQ ID NO: 25058
  source 1..80: mol_type = other DNA

SEQ ID NO: 59822 - DNA, 80 bp, synthetic construct; identical to SEQ ID NO: 25059
  source 1..80: mol_type = other DNA

SEQ ID NO: 59823 - DNA, 80 bp, synthetic construct; identical to SEQ ID NO: 10176
  source 1..80: mol_type = other DNA

SEQ ID NO: 59824 - DNA, 80 bp, synthetic construct; identical to SEQ ID NO: 25061
  source 1..80: mol_type = other DNA

SEQ ID NO: 59825 - DNA, 80 bp, synthetic construct; identical to SEQ ID NO: 25062
  source 1..80: mol_type = other DNA

SEQ ID NO: 59826 - DNA, 80 bp, synthetic construct; identical to SEQ ID NO: 10177
  source 1..80: mol_type = other DNA

SEQ ID NO: 59827 - DNA, 80 bp, synthetic construct; identical to SEQ ID NO: 25064
  source 1..80: mol_type = other DNA

SEQ ID NO: 59828 - DNA, 80 bp, synthetic construct; identical to SEQ ID NO: 25065
  source 1..80: mol_type = other DNA

SEQ ID NO: 59829 - DNA, 80 bp, synthetic construct; identical to SEQ ID NO: 25066
  source 1..80: mol_type = other DNA

SEQ ID NO: 59830 - DNA, 80 bp, synthetic construct; identical to SEQ ID NO: 25067
  source 1..80: mol_type = other DNA

SEQ ID NO: 59831 - DNA, 80 bp, synthetic construct; identical to SEQ ID NO: 10178
  source 1..80: mol_type = other DNA

SEQ ID NO: 59832 - DNA, 80 bp, synthetic construct; identical to SEQ ID NO: 25069
  source 1..80: mol_type = other DNA

SEQ ID NO: 59833 - DNA, 80 bp, synthetic construct; identical to SEQ ID NO: 25070
  source 1..80: mol_type = other DNA

SEQ ID NO: 59834 - DNA, 80 bp, synthetic construct; identical to SEQ ID NO: 10179
  source 1..80: mol_type = other DNA

SEQ ID NO: 59835 - DNA, 80 bp, synthetic construct; identical to SEQ ID NO: 25072
  source 1..80: mol_type = other DNA

SEQ ID NO: 59836 - DNA, 80 bp, synthetic construct; identical to SEQ ID NO: 25073
  source 1..80: mol_type = other DNA

SEQ ID NO: 59837 - DNA, 80 bp, synthetic construct; identical to SEQ ID NO: 25074
  source 1..80: mol_type = other DNA

SEQ ID NO: 59838 - DNA, 80 bp, synthetic construct; identical to SEQ ID NO: 25075
  source 1..80: mol_type = other DNA

SEQ ID NO: 59839 - DNA, 80 bp, synthetic construct; identical to SEQ ID NO: 10180
  source 1..80: mol_type = other DNA

SEQ ID NO: 59840 - DNA, 80 bp, synthetic construct; identical to SEQ ID NO: 25077
  source 1..80: mol_type = other DNA

SEQ ID NO: 59841 - DNA, 80 bp, synthetic construct; identical to SEQ ID NO: 25078
  source 1..80: mol_type = other DNA

SEQ ID NO: 59842 - DNA, 80 bp, synthetic construct; identical to SEQ ID NO: 25079
  source 1..80: mol_type = other DNA

SEQ ID NO: 59843 - DNA, 80 bp, synthetic construct; identical to SEQ ID NO: 10181
  source 1..80: mol_type = other DNA

SEQ ID NO: 59844 - DNA, 80 bp, synthetic construct; identical to SEQ ID NO: 25081
  source 1..80: mol_type = other DNA

SEQ ID NO: 59845 - DNA, 80 bp, synthetic construct; identical to SEQ ID NO: 25082
  source 1..80: mol_type = other DNA

SEQ ID NO: 59846 - DNA, 80 bp, synthetic construct; identical to SEQ ID NO: 25083
  source 1..80: mol_type = other DNA

SEQ ID NO: 59847 - DNA, 80 bp, synthetic construct; identical to SEQ ID NO: 10182
  source 1..80: mol_type = other DNA

SEQ ID NO: 59848 - DNA, 80 bp, synthetic construct; identical to SEQ ID NO: 25085
  source 1..80: mol_type = other DNA

SEQ ID NO: 59849 - DNA, 80 bp, synthetic construct; identical to SEQ ID NO: 25086
  source 1..80: mol_type = other DNA

SEQ ID NO: 59850 - DNA, 80 bp, synthetic construct; identical to SEQ ID NO: 25087
  source 1..80: mol_type = other DNA

SEQ ID NO: 59851 - DNA, 80 bp, synthetic construct; identical to SEQ ID NO: 10183
  source 1..80: mol_type = other DNA

SEQ ID NO: 59852 - DNA, 80 bp, synthetic construct; identical to SEQ ID NO: 25089
  source 1..80: mol_type = other DNA

SEQ ID NO: 59853 - DNA, 80 bp, synthetic construct; identical to SEQ ID NO: 25090
  source 1..80: mol_type = other DNA

SEQ ID NO: 59854 - DNA, 80 bp, synthetic construct; identical to SEQ ID NO: 25091
  source 1..80: mol_type = other DNA

SEQ ID NO: 59855 - DNA, 80 bp, synthetic construct; identical to SEQ ID NO: 25092
  source 1..80: mol_type = other DNA

SEQ ID NO: 59856 - DNA, 80 bp, synthetic construct; identical to SEQ ID NO: 10184
  source 1..80: mol_type = other DNA

SEQ ID NO: 59857 - DNA, 80 bp, synthetic construct; identical to SEQ ID NO: 25094
  source 1..80: mol_type = other DNA

SEQ ID NO: 59858 - DNA, 80 bp, synthetic construct; identical to SEQ ID NO: 25095
  source 1..80: mol_type = other DNA

SEQ ID NO: 59859 - DNA, 80 bp, synthetic construct; identical to SEQ ID NO: 10185
  source 1..80: mol_type = other DNA

SEQ ID NO: 59860 - DNA, 80 bp, synthetic construct; identical to SEQ ID NO: 25097
  source 1..80: mol_type = other DNA

SEQ ID NO: 59861 - DNA, 80 bp, synthetic construct; identical to SEQ ID NO: 25098
  source 1..80: mol_type = other DNA

SEQ ID NO: 59862 - DNA, 80 bp, synthetic construct; identical to SEQ ID NO: 25099
  source 1..80: mol_type = other DNA

SEQ ID NO: 59863 - DNA, 80 bp, synthetic construct; identical to SEQ ID NO: 10186
  source 1..80: mol_type = other DNA

SEQ ID NO: 59864 - DNA, 80 bp, synthetic construct; identical to SEQ ID NO: 25101
  source 1..80: mol_type = other DNA

SEQ ID NO: 59865 - DNA, 80 bp, synthetic construct; identical to SEQ ID NO: 25102
  source 1..80: mol_type = other DNA

SEQ ID NO: 59866 - DNA, 80 bp, synthetic construct; identical to SEQ ID NO: 25103
  source 1..80: mol_type = other DNA

SEQ ID NO: 59867 - DNA, 80 bp, synthetic construct; identical to SEQ ID NO: 10187
  source 1..80: mol_type = other DNA

SEQ ID NO: 59868 - DNA, 80 bp, synthetic construct; identical to SEQ ID NO: 25105
  source 1..80: mol_type = other DNA

SEQ ID NO: 59869 - DNA, 80 bp, synthetic construct; identical to SEQ ID NO: 25106
  source 1..80: mol_type = other DNA

SEQ ID NO: 59870 - DNA, 80 bp, synthetic construct; identical to SEQ ID NO: 10188
  source 1..80: mol_type = other DNA

SEQ ID NO: 59871 - DNA, 80 bp, synthetic construct; identical to SEQ ID NO: 25108
  source 1..80: mol_type = other DNA

SEQ ID NO: 59872 - DNA, 80 bp, synthetic construct; identical to SEQ ID NO: 25109
  source 1..80: mol_type = other DNA

SEQ ID NO: 59873 - DNA, 80 bp, synthetic construct; identical to SEQ ID NO: 25110
  source 1..80: mol_type = other DNA

SEQ ID NO: 59874 - DNA, 80 bp, synthetic construct; identical to SEQ ID NO: 25111
  source 1..80: mol_type = other DNA

SEQ ID NO: 59875 - DNA, 80 bp, synthetic construct; identical to SEQ ID NO: 10189
  source 1..80: mol_type = other DNA

SEQ ID NO: 59876 - DNA, 80 bp, synthetic construct; identical to SEQ ID NO: 25113
  source 1..80: mol_type = other DNA

SEQ ID NO: 59877 - DNA, 80 bp, synthetic construct; identical to SEQ ID NO: 25114
  source 1..80: mol_type = other DNA

SEQ ID NO: 59878 - DNA, 80 bp, synthetic construct; identical to SEQ ID NO: 10190
  source 1..80: mol_type = other DNA

SEQ ID NO: 59879 - DNA, 80 bp, synthetic construct; identical to SEQ ID NO: 25116
  source 1..80: mol_type = other DNA

SEQ ID NO: 59880 - DNA, 80 bp, synthetic construct; identical to SEQ ID NO: 25117
  source 1..80: mol_type = other DNA

SEQ ID NO: 59881 - DNA, 80 bp, synthetic construct; identical to SEQ ID NO: 25118
  source 1..80: mol_type = other DNA

SEQ ID NO: 59882 - DNA, 80 bp, synthetic construct; identical to SEQ ID NO: 25119
  source 1..80: mol_type = other DNA

SEQ ID NO: 59883 - DNA, 80 bp, synthetic construct; identical to SEQ ID NO: 10191
  source 1..80: mol_type = other DNA

SEQ ID NO: 59884 - DNA, 80 bp, synthetic construct; identical to SEQ ID NO: 25121
  source 1..80: mol_type = other DNA

SEQ ID NO: 59885 - DNA, 80 bp, synthetic construct; identical to SEQ ID NO: 25122
  source 1..80: mol_type = other DNA

SEQ ID NO: 59886 - DNA, 80 bp, synthetic construct; identical to SEQ ID NO: 10192
  source 1..80: mol_type = other DNA

SEQ ID NO: 59887 - DNA, 80 bp, synthetic construct; identical to SEQ ID NO: 25124
  source 1..80: mol_type = other DNA

SEQ ID NO: 59888 - DNA, 80 bp, synthetic construct; identical to SEQ ID NO: 25125
  source 1..80: mol_type = other DNA

SEQ ID NO: 59889 - DNA, 80 bp, synthetic construct; identical to SEQ ID NO: 25126
  source 1..80: mol_type = other DNA

SEQ ID NO: 59890 - DNA, 80 bp, synthetic construct; identical to SEQ ID NO: 10193
  source 1..80: mol_type = other DNA

SEQ ID NO: 59891 - DNA, 80 bp, synthetic construct; identical to SEQ ID NO: 25128
  source 1..80: mol_type = other DNA

SEQ ID NO: 59892 - DNA, 80 bp, synthetic construct; identical to SEQ ID NO: 25129
  source 1..80: mol_type = other DNA

SEQ ID NO: 59893 - DNA, 80 bp, synthetic construct; identical to SEQ ID NO: 25130
  source 1..80: mol_type = other DNA

SEQ ID NO: 59894 - DNA, 80 bp, synthetic construct; identical to SEQ ID NO: 10194
  source 1..80: mol_type = other DNA

SEQ ID NO: 59895 - DNA, 80 bp, synthetic construct; identical to SEQ ID NO: 25132
  source 1..80: mol_type = other DNA

SEQ ID NO: 59896 - DNA, 80 bp, synthetic construct; identical to SEQ ID NO: 25133
  source 1..80: mol_type = other DNA

SEQ ID NO: 59897 - DNA, 80 bp, synthetic construct; identical to SEQ ID NO: 25134
  source 1..80: mol_type = other DNA

SEQ ID NO: 59898 - DNA, 80 bp, synthetic construct; identical to SEQ ID NO: 25135
  source 1..80: mol_type = other DNA

SEQ ID NO: 59899 - DNA, 80 bp, synthetic construct; identical to SEQ ID NO: 10195
  source 1..80: mol_type = other DNA

SEQ ID NO: 59900 - DNA, 80 bp, synthetic construct; identical to SEQ ID NO: 25137
  source 1..80: mol_type = other DNA

SEQ ID NO: 59901 - DNA, 80 bp, synthetic construct; identical to SEQ ID NO: 25138
  source 1..80: mol_type = other DNA

SEQ ID NO: 59902 - DNA, 80 bp, synthetic construct; identical to SEQ ID NO: 10196
  source 1..80: mol_type = other DNA

SEQ ID NO: 59903 - DNA, 80 bp, synthetic construct; identical to SEQ ID NO: 25140
  source 1..80: mol_type = other DNA

SEQ ID NO: 59904 - DNA, 80 bp, synthetic construct; identical to SEQ ID NO: 25141
  source 1..80: mol_type = other DNA

SEQ ID NO: 59905 - DNA, 80 bp, synthetic construct; identical to SEQ ID NO: 25142
  source 1..80: mol_type = other DNA

SEQ ID NO: 59906 - DNA, 80 bp, synthetic construct; identical to SEQ ID NO: 25143
  source 1..80: mol_type = other DNA

SEQ ID NO: 59907 - DNA, 80 bp, synthetic construct; identical to SEQ ID NO: 10197
  source 1..80: mol_type = other DNA

SEQ ID NO: 59908 - DNA, 80 bp, synthetic construct; identical to SEQ ID NO: 25145
  source 1..80: mol_type = other DNA

SEQ ID NO: 59909 - DNA, 80 bp, synthetic construct; identical to SEQ ID NO: 25146
  source 1..80: mol_type = other DNA

SEQ ID NO: 59910 - DNA, 80 bp, synthetic construct; identical to SEQ ID NO: 25147
  source 1..80: mol_type = other DNA

SEQ ID NO: 59911 - DNA, 80 bp, synthetic construct; identical to SEQ ID NO: 10198
  source 1..80: mol_type = other DNA

SEQ ID NO: 59912 - DNA, 80 bp, synthetic construct; identical to SEQ ID NO: 25149
  source 1..80: mol_type = other DNA

SEQ ID NO: 59913 - DNA, 80 bp, synthetic construct; identical to SEQ ID NO: 25150
  source 1..80: mol_type = other DNA

SEQ ID NO: 59914 - DNA, 80 bp, synthetic construct; identical to SEQ ID NO: 25151
  source 1..80: mol_type = other DNA

SEQ ID NO: 59915 - DNA, 80 bp, synthetic construct; identical to SEQ ID NO: 10199
  source 1..80: mol_type = other DNA

SEQ ID NO: 59916 - DNA, 80 bp, synthetic construct; identical to SEQ ID NO: 25153
  source 1..80: mol_type = other DNA

SEQ ID NO: 59917 - DNA, 80 bp, synthetic construct; identical to SEQ ID NO: 25154
  source 1..80: mol_type = other DNA

SEQ ID NO: 59918 - DNA, 80 bp, synthetic construct; identical to SEQ ID NO: 10200
  source 1..80: mol_type = other DNA

SEQ ID NO: 59919 - DNA, 80 bp, synthetic construct; identical to SEQ ID NO: 25156
  source 1..80: mol_type = other DNA

SEQ ID NO: 59920 - DNA, 80 bp, synthetic construct; identical to SEQ ID NO: 25157
  source 1..80: mol_type = other DNA

SEQ ID NO: 59921 - DNA, 80 bp, synthetic construct; identical to SEQ ID NO: 25158
  source 1..80: mol_type = other DNA

SEQ ID NO: 59922 - DNA, 80 bp, synthetic construct; identical to SEQ ID NO: 10201
  source 1..80: mol_type = other DNA

SEQ ID NO: 59923 - DNA, 80 bp, synthetic construct; identical to SEQ ID NO: 25161
  source 1..80: mol_type = other DNA

SEQ ID NO: 59924 - DNA, 80 bp, synthetic construct; identical to SEQ ID NO: 25162
  source 1..80: mol_type = other DNA

SEQ ID NO: 59925 - DNA, 80 bp, synthetic construct; identical to SEQ ID NO: 10202
  source 1..80: mol_type = other DNA

SEQ ID NO: 59926 - DNA, 80 bp, synthetic construct; identical to SEQ ID NO: 25164
  source 1..80: mol_type = other DNA

SEQ ID NO: 59927 - DNA, 80 bp, synthetic construct; identical to SEQ ID NO: 25165
  source 1..80: mol_type = other DNA

SEQ ID NO: 59928 - DNA, 80 bp, synthetic construct; identical to SEQ ID NO: 10203
  source 1..80: mol_type = other DNA

SEQ ID NO: 59929 - DNA, 80 bp, synthetic construct; identical to SEQ ID NO: 25167
  source 1..80: mol_type = other DNA

SEQ ID NO: 59930 - DNA, 80 bp, synthetic construct; identical to SEQ ID NO: 25168
  source 1..80: mol_type = other DNA

SEQ ID NO: 59931 - DNA, 80 bp, synthetic construct; identical to SEQ ID NO: 25169
  source 1..80: mol_type = other DNA

SEQ ID NO: 59932 - DNA, 80 bp, synthetic construct; identical to SEQ ID NO: 10204
  source 1..80: mol_type = other DNA

SEQ ID NO: 59933 - DNA, 80 bp, synthetic construct; identical to SEQ ID NO: 25171
  source 1..80: mol_type = other DNA

SEQ ID NO: 59934 - DNA, 80 bp, synthetic construct; identical to SEQ ID NO: 25172
  source 1..80: mol_type = other DNA

SEQ ID NO: 59935 - DNA, 80 bp, synthetic construct; identical to SEQ ID NO: 25173
  source 1..80: mol_type = other DNA

SEQ ID NO: 59936 - DNA, 80 bp, synthetic construct; identical to SEQ ID NO: 10205
  source 1..80: mol_type = other DNA

SEQ ID NO: 59937 - DNA, 80 bp, synthetic construct; identical to SEQ ID NO: 25175
  source 1..80: mol_type = other DNA

SEQ ID NO: 59938 - DNA, 80 bp, synthetic construct; identical to SEQ ID NO: 25176
  source 1..80: mol_type = other DNA

SEQ ID NO: 59939 - DNA, 80 bp, synthetic construct; identical to SEQ ID NO: 25177
  source 1..80: mol_type = other DNA

SEQ ID NO: 59940 - DNA, 80 bp, synthetic construct; identical to SEQ ID NO: 10206
  source 1..80: mol_type = other DNA

SEQ ID NO: 59941 - DNA, 80 bp, synthetic construct; identical to SEQ ID NO: 25179
  source 1..80: mol_type = other DNA

SEQ ID NO: 59942 - DNA, 80 bp, synthetic construct; identical to SEQ ID NO: 25180
  source 1..80: mol_type = other DNA

SEQ ID NO: 59943 - DNA, 80 bp, synthetic construct; identical to SEQ ID NO: 25181
  source 1..80: mol_type = other DNA

SEQ ID NO: 59944 - DNA, 80 bp, synthetic construct; identical to SEQ ID NO: 10207
  source 1..80: mol_type = other DNA

SEQ ID NO: 59945 - DNA, 80 bp, synthetic construct; identical to SEQ ID NO: 25183
  source 1..80: mol_type = other DNA

SEQ ID NO: 59946 - DNA, 80 bp, synthetic construct; identical to SEQ ID NO: 25184
  source 1..80: mol_type = other DNA

SEQ ID NO: 59947 - DNA, 80 bp, synthetic construct; identical to SEQ ID NO: 25185
  source 1..80: mol_type = other DNA

SEQ ID NO: 59948 - DNA, 80 bp, synthetic construct; identical to SEQ ID NO: 25186
  source 1..80: mol_type = other DNA

SEQ ID NO: 59949 - DNA, 80 bp, synthetic construct; identical to SEQ ID NO: 10208
  source 1..80: mol_type = other DNA

SEQ ID NO: 59950 - DNA, 80 bp, synthetic construct; identical to SEQ ID NO: 25188
  source 1..80: mol_type = other DNA

SEQ ID NO: 59951 - DNA, 80 bp, synthetic construct; identical to SEQ ID NO: 25189
  source 1..80: mol_type = other DNA

SEQ ID NO: 59952 - DNA, 80 bp, synthetic construct; identical to SEQ ID NO: 10209
  source 1..80: mol_type = other DNA

SEQ ID NO: 59953 - DNA, 80 bp, synthetic construct; identical to SEQ ID NO: 25191
  source 1..80: mol_type = other DNA

SEQ ID NO: 59954 - DNA, 80 bp, synthetic construct; identical to SEQ ID NO: 25192
  source 1..80: mol_type = other DNA

SEQ ID NO: 59955 - DNA, 80 bp, synthetic construct; identical to SEQ ID NO: 25193
  source 1..80: mol_type = other DNA

SEQ ID NO: 59956 - DNA, 80 bp, synthetic construct; identical to SEQ ID NO: 25194
  source 1..80: mol_type = other DNA

SEQ ID NO: 59957 - DNA, 80 bp, synthetic construct; identical to SEQ ID NO: 10210
  source 1..80: mol_type = other DNA

SEQ ID NO: 59958 - DNA, 80 bp, synthetic construct; identical to SEQ ID NO: 25196
  source 1..80: mol_type = other DNA

SEQ ID NO: 59959 - DNA, 80 bp, synthetic construct; identical to SEQ ID NO: 25197
  source 1..80: mol_type = other DNA

SEQ ID NO: 59960 - DNA, 80 bp, synthetic construct; identical to SEQ ID NO: 10211
  source 1..80: mol_type = other DNA

SEQ ID NO: 59961 - DNA, 80 bp, synthetic construct; identical to SEQ ID NO: 25199
  source 1..80: mol_type = other DNA

SEQ ID NO: 59962 - DNA, 80 bp, synthetic construct; identical to SEQ ID NO: 25200
  source 1..80: mol_type = other DNA

SEQ ID NO: 59963 - DNA, 80 bp, synthetic construct; identical to SEQ ID NO: 25201
  source 1..80: mol_type = other DNA

SEQ ID NO: 59964 - DNA, 80 bp, synthetic construct; identical to SEQ ID NO: 10212
  source 1..80: mol_type = other DNA

SEQ ID NO: 59965 - DNA, 80 bp, synthetic construct; identical to SEQ ID NO: 25203
  source 1..80: mol_type = other DNA

SEQ ID NO: 59966 - DNA, 80 bp, synthetic construct; identical to SEQ ID NO: 25204
  source 1..80: mol_type = other DNA

SEQ ID NO: 59967 - DNA, 80 bp, synthetic construct; identical to SEQ ID NO: 25205
  source 1..80: mol_type = other DNA

SEQ ID NO: 59968 - DNA, 80 bp, synthetic construct; identical to SEQ ID NO: 10213
  source 1..80: mol_type = other DNA

SEQ ID NO: 59969 - DNA, 80 bp, synthetic construct; identical to SEQ ID NO: 25207
  source 1..80: mol_type = other DNA

SEQ ID NO: 59970 - DNA, 80 bp, synthetic construct; identical to SEQ ID NO: 25208
  source 1..80: mol_type = other DNA

SEQ ID NO: 59971 - DNA, 80 bp, synthetic construct; identical to SEQ ID NO: 25209
  source 1..80: mol_type = other DNA

SEQ ID NO: 59972 - DNA, 80 bp, synthetic construct; identical to SEQ ID NO: 25210
  source 1..80: mol_type = other DNA

SEQ ID NO: 59973 - DNA, 80 bp, synthetic construct; identical to SEQ ID NO: 10214
  source 1..80: mol_type = other DNA

SEQ ID NO: 59974 - DNA, 80 bp, synthetic construct; identical to SEQ ID NO: 25212
  source 1..80: mol_type = other DNA

SEQ ID NO: 59975 - DNA, 80 bp, synthetic construct; identical to SEQ ID NO: 25213
  source 1..80: mol_type = other DNA

SEQ ID NO: 59976 - DNA, 80 bp, synthetic construct; identical to SEQ ID NO: 25214
  source 1..80: mol_type = other DNA

SEQ ID NO: 59977 - DNA, 80 bp, synthetic construct; identical to SEQ ID NO: 10215
  source 1..80: mol_type = other DNA

SEQ ID NO: 59978 - DNA, 80 bp, synthetic construct; identical to SEQ ID NO: 25216
  source 1..80: mol_type = other DNA

SEQ ID NO: 59979 - DNA, 80 bp, synthetic construct; identical to SEQ ID NO: 25217
  source 1..80: mol_type = other DNA

SEQ ID NO: 59980 - DNA, 80 bp, synthetic construct; identical to SEQ ID NO: 10216
  source 1..80: mol_type = other DNA

SEQ ID NO: 59981 - DNA, 80 bp, synthetic construct; identical to SEQ ID NO: 25220
  source 1..80: mol_type = other DNA

SEQ ID NO: 59982 - DNA, 80 bp, synthetic construct; identical to SEQ ID NO: 25221
  source 1..80: mol_type = other DNA

SEQ ID NO: 59983 - DNA, 80 bp, synthetic construct; identical to SEQ ID NO: 10217
  source 1..80: mol_type = other DNA

SEQ ID NO: 59984 - DNA, 80 bp, synthetic construct; identical to SEQ ID NO: 25223
  source 1..80: mol_type = other DNA

SEQ ID NO: 59985 - DNA, 80 bp, synthetic construct; identical to SEQ ID NO: 25224
  source 1..80: mol_type = other DNA

SEQ ID NO: 59986 - DNA, 80 bp, synthetic construct; identical to SEQ ID NO: 25225
  source 1..80: mol_type = other DNA

SEQ ID NO: 59987 - DNA, 80 bp, synthetic construct; identical to SEQ ID NO: 25226
  source 1..80: mol_type = other DNA

SEQ ID NO: 59988 - DNA, 80 bp, synthetic construct; identical to SEQ ID NO: 10218
  source 1..80: mol_type = other DNA

SEQ ID NO: 59989 - DNA, 80 bp, synthetic construct; identical to SEQ ID NO: 25228
  source 1..80: mol_type = other DNA

SEQ ID NO: 59990 - DNA, 80 bp, synthetic construct; identical to SEQ ID NO: 25229
  source 1..80: mol_type = other DNA

SEQ ID NO: 59991 - DNA, 80 bp, synthetic construct; identical to SEQ ID NO: 25230
  source 1..80: mol_type = other DNA

SEQ ID NO: 59992 - DNA, 80 bp, synthetic construct; identical to SEQ ID NO: 10219
  source 1..80: mol_type = other DNA

SEQ ID NO: 59993 - DNA, 80 bp, synthetic construct; identical to SEQ ID NO: 25232
  source 1..80: mol_type = other DNA

SEQ ID NO: 59994 - DNA, 80 bp, synthetic construct; identical to SEQ ID NO: 25233
  source 1..80: mol_type = other DNA

SEQ ID NO: 59995 - DNA, 80 bp, synthetic construct; identical to SEQ ID NO: 25234
  source 1..80: mol_type = other DNA

SEQ ID NO: 59996 - DNA, 80 bp, synthetic construct; identical to SEQ ID NO: 10220
  source 1..80: mol_type = other DNA

SEQ ID NO: 59997 - DNA, 80 bp, synthetic construct; identical to SEQ ID NO: 25236
  source 1..80: mol_type = other DNA

SEQ ID NO: 59998 - DNA, 80 bp, synthetic construct; identical to SEQ ID NO: 25237
  source 1..80: mol_type = other DNA

SEQ ID NO: 59999 - DNA, 80 bp, synthetic construct; identical to SEQ ID NO: 10221
  source 1..80: mol_type = other DNA

SEQ ID NO: 60000 - DNA, 80 bp, synthetic construct; identical to SEQ ID NO: 25239
  source 1..80: mol_type = other DNA

SEQ ID NO: 60001 - DNA, 80 bp, synthetic construct; identical to SEQ ID NO: 25240
  source 1..80: mol_type = other DNA

SEQ ID NO: 60002 - DNA, 80 bp, synthetic construct; identical to SEQ ID NO: 25241
  source 1..80: mol_type = other DNA

SEQ ID NO: 60003 - DNA, 80 bp, synthetic construct; identical to SEQ ID NO: 25242
  source 1..80: mol_type = other DNA

SEQ ID NO: 60004 - DNA, 80 bp, synthetic construct; identical to SEQ ID NO: 10222
  source 1..80: mol_type = other DNA

SEQ ID NO: 60005 - DNA, 80 bp, synthetic construct; identical to SEQ ID NO: 25244
  source 1..80: mol_type = other DNA

SEQ ID NO: 60006 - DNA, 80 bp, synthetic construct; identical to SEQ ID NO: 25245
  source 1..80: mol_type = other DNA

SEQ ID NO: 60007 - DNA, 80 bp, synthetic construct; identical to SEQ ID NO: 10223
  source 1..80: mol_type = other DNA

SEQ ID NO: 60008 - DNA, 80 bp, synthetic construct; identical to SEQ ID NO: 25247
  source 1..80: mol_type = other DNA

SEQ ID NO: 60009 - DNA, 80 bp, synthetic construct; identical to SEQ ID NO: 25249
  source 1..80: mol_type = other DNA

SEQ ID NO: 60010 - DNA, 80 bp, synthetic construct; identical to SEQ ID NO: 25250
  source 1..80: mol_type = other DNA

SEQ ID NO: 60011 - DNA, 80 bp, synthetic construct; identical to SEQ ID NO: 10224
  source 1..80: mol_type = other DNA

SEQ ID NO: 60012 - DNA, 80 bp, synthetic construct; identical to SEQ ID NO: 25252
  source 1..80: mol_type = other DNA

SEQ ID NO: 60013 - DNA, 80 bp, synthetic construct; identical to SEQ ID NO: 25253
  source 1..80: mol_type = other DNA

SEQ ID NO: 60014 - DNA, 80 bp, synthetic construct; identical to SEQ ID NO: 25254
  source 1..80: mol_type = other DNA

SEQ ID NO: 60015 - DNA, 80 bp, synthetic construct; identical to SEQ ID NO: 10225
  source 1..80: mol_type = other DNA

SEQ ID NO: 60016 - DNA, 80 bp, synthetic construct; identical to SEQ ID NO: 25256
  source 1..80: mol_type = other DNA

SEQ ID NO: 60017 - DNA, 80 bp, synthetic construct; identical to SEQ ID NO: 25257
  source 1..80: mol_type = other DNA

SEQ ID NO: 60018 - DNA, 80 bp, synthetic construct; identical to SEQ ID NO: 10226
  source 1..80: mol_type = other DNA

SEQ ID NO: 60019 - DNA, 80 bp, synthetic construct; identical to SEQ ID NO: 25259
  source 1..80: mol_type = other DNA

SEQ ID NO: 60020 - DNA, 80 bp, synthetic construct; identical to SEQ ID NO: 25260
  source 1..80: mol_type = other DNA

SEQ ID NO: 60021 - DNA, 80 bp, synthetic construct; identical to SEQ ID NO: 25261
  source 1..80: mol_type = other DNA

SEQ ID NO: 60022 - DNA, 80 bp, synthetic construct; identical to SEQ ID NO: 10227
  source 1..80: mol_type = other DNA

SEQ ID NO: 60023 - DNA, 80 bp, synthetic construct; identical to SEQ ID NO: 25263
  source 1..80: mol_type = other DNA

SEQ ID NO: 60024 - DNA, 80 bp, synthetic construct; identical to SEQ ID NO: 25264
  source 1..80: mol_type = other DNA

SEQ ID NO: 60025 - DNA, 80 bp, synthetic construct; identical to SEQ ID NO: 25265
  source 1..80: mol_type = other DNA

SEQ ID NO: 60026 - DNA, 80 bp, synthetic construct; identical to SEQ ID NO: 25266
  source 1..80: mol_type = other DNA

SEQ ID NO: 60027 - DNA, 80 bp, synthetic construct; identical to SEQ ID NO: 10228
  source 1..80: mol_type = other DNA

SEQ ID NO: 60028 - DNA, 80 bp, synthetic construct; identical to SEQ ID NO: 25268
  source 1..80: mol_type = other DNA

SEQ ID NO: 60029 - DNA, 80 bp, synthetic construct; identical to SEQ ID NO: 25269
  source 1..80: mol_type = other DNA

SEQ ID NO: 60030 - DNA, 80 bp, synthetic construct; identical to SEQ ID NO: 10229
  source 1..80: mol_type = other DNA

SEQ ID NO: 60031 - DNA, 80 bp, synthetic construct; identical to SEQ ID NO: 25271
  source 1..80: mol_type = other DNA

SEQ ID NO: 60032 - DNA, 80 bp, synthetic construct; identical to SEQ ID NO: 25272
  source 1..80: mol_type = other DNA

SEQ ID NO: 60033 - DNA, 80 bp, synthetic construct; identical to SEQ ID NO: 25273
  source 1..80: mol_type = other DNA

SEQ ID NO: 60034 - DNA, 80 bp, synthetic construct; identical to SEQ ID NO: 25274
  source 1..80: mol_type = other DNA

SEQ ID NO: 60035 - DNA, 80 bp, synthetic construct; identical to SEQ ID NO: 10230
  source 1..80: mol_type = other DNA

SEQ ID NO: 60036 - DNA, 80 bp, synthetic construct; identical to SEQ ID NO: 25276
  source 1..80: mol_type = other DNA

SEQ ID NO: 60037 - DNA, 80 bp, synthetic construct; identical to SEQ ID NO: 25277
  source 1..80: mol_type = other DNA

SEQ ID NO: 60038 - DNA, 80 bp, synthetic construct; identical to SEQ ID NO: 25278
  source 1..80: mol_type = other DNA

SEQ ID NO: 60039 - DNA, 80 bp, synthetic construct; identical to SEQ ID NO: 10231
  source 1..80: mol_type = other DNA

SEQ ID NO: 60040 - DNA, 80 bp, synthetic construct; identical to SEQ ID NO: 25280
  source 1..80: mol_type = other DNA

SEQ ID NO: 60041 - DNA, 80 bp, synthetic construct; identical to SEQ ID NO: 25281
  source 1..80: mol_type = other DNA

SEQ ID NO: 60042 - DNA, 80 bp, synthetic construct; identical to SEQ ID NO: 10232
  source 1..80: mol_type = other DNA

SEQ ID NO: 60043 - DNA, 80 bp, synthetic construct; identical to SEQ ID NO: 25283
  source 1..80: mol_type = other DNA

SEQ ID NO: 60044 - DNA, 80 bp, synthetic construct; identical to SEQ ID NO: 25284
  source 1..80: mol_type = other DNA

SEQ ID NO: 60045 - DNA, 80 bp, synthetic construct; identical to SEQ ID NO: 25285
  source 1..80: mol_type = other DNA

SEQ ID NO: 60046 - DNA, 80 bp, synthetic construct; identical to SEQ ID NO: 25286
  source 1..80: mol_type = other DNA

SEQ ID NO: 60047 - DNA, 80 bp, synthetic construct; identical to SEQ ID NO: 10233
  source 1..80: mol_type = other DNA

SEQ ID NO: 60048 - DNA, 80 bp, synthetic construct; identical to SEQ ID NO: 25288
  source 1..80: mol_type = other DNA

SEQ ID NO: 60049 - DNA, 80 bp, synthetic construct; identical to SEQ ID NO: 25289
  source 1..80: mol_type = other DNA

SEQ ID NO: 60050 - DNA, 80 bp, synthetic construct; identical to SEQ ID NO: 25290
  source 1..80: mol_type = other DNA

SEQ ID NO: 60051 - DNA, 80 bp, synthetic construct; identical to SEQ ID NO: 10234
  source 1..80: mol_type = other DNA

SEQ ID NO: 60052 - DNA, 80 bp, synthetic construct; identical to SEQ ID NO: 25292
  source 1..80: mol_type = other DNA

SEQ ID NO: 60053 - DNA, 80 bp, synthetic construct; identical to SEQ ID NO: 25293
  source 1..80: mol_type = other DNA

SEQ ID NO: 60054 - DNA, 80 bp, synthetic construct; identical to SEQ ID NO: 10235
  source 1..80: mol_type = other DNA

SEQ ID NO: 60055 - DNA, 80 bp, synthetic construct; identical to SEQ ID NO: 25295
  source 1..80: mol_type = other DNA

SEQ ID NO: 60056 - DNA, 80 bp, synthetic construct; identical to SEQ ID NO: 25296
  source 1..80: mol_type = other DNA

SEQ ID NO: 60057 - DNA, 80 bp, synthetic construct; identical to SEQ ID NO: 25297
  source 1..80: mol_type = other DNA

SEQ ID NO: 60058 - DNA, 80 bp, synthetic construct; identical to SEQ ID NO: 10236
  source 1..80: mol_type = other DNA

SEQ ID NO: 60059 - DNA, 80 bp, synthetic construct; identical to SEQ ID NO: 25299
  source 1..80: mol_type = other DNA

SEQ ID NO: 60060 - DNA, 80 bp, synthetic construct; identical to SEQ ID NO: 25300
  source 1..80: mol_type = other DNA

SEQ ID NO: 60061 - DNA, 80 bp, synthetic construct; identical to SEQ ID NO: 25301
  source 1..80: mol_type = other DNA

SEQ ID NO: 60062 - DNA, 80 bp, synthetic construct; identical to SEQ ID NO: 25302
  source 1..80: mol_type = other DNA

SEQ ID NO: 60063 - DNA, 80 bp, synthetic construct; identical to SEQ ID NO: 10237
  source 1..80: mol_type = other DNA

SEQ ID NO: 60064 - DNA, 80 bp, synthetic construct; identical to SEQ ID NO: 25304
  source 1..80: mol_type = other DNA

SEQ ID NO: 60065 - DNA, 80 bp, synthetic construct; identical to SEQ ID NO: 25305
  source 1..80: mol_type = other DNA

SEQ ID NO: 60066 - DNA, 80 bp, synthetic construct; identical to SEQ ID NO: 25306
  source 1..80: mol_type = other DNA

SEQ ID NO: 60067 - DNA, 80 bp, synthetic construct; identical to SEQ ID NO: 10238
  source 1..80: mol_type = other DNA

SEQ ID NO: 60068 - DNA, 80 bp, synthetic construct; identical to SEQ ID NO: 25308
  source 1..80: mol_type = other DNA

SEQ ID NO: 60069 - DNA, 80 bp, synthetic construct; identical to SEQ ID NO: 25309
  source 1..80: mol_type = other DNA

SEQ ID NO: 60070 - DNA, 80 bp, synthetic construct; identical to SEQ ID NO: 25310
  source 1..80: mol_type = other DNA

SEQ ID NO: 60071 - DNA, 80 bp, synthetic construct; identical to SEQ ID NO: 10239
  source 1..80: mol_type = other DNA

SEQ ID NO: 60072 - DNA, 80 bp, synthetic construct; identical to SEQ ID NO: 25312
  source 1..80: mol_type = other DNA

SEQ ID NO: 60073 - DNA, 80 bp, synthetic construct; identical to SEQ ID NO: 25313
  source 1..80: mol_type = other DNA

SEQ ID NO: 60074 - DNA, 80 bp, synthetic construct; identical to SEQ ID NO: 25314
  source 1..80: mol_type = other DNA

SEQ ID NO: 60075 - DNA, 80 bp, synthetic construct; identical to SEQ ID NO: 10240
  source 1..80: mol_type = other DNA

SEQ ID NO: 60076 - DNA, 80 bp, synthetic construct; identical to SEQ ID NO: 25316
  source 1..80: mol_type = other DNA

SEQ ID NO: 60077 - DNA, 80 bp, synthetic construct; identical to SEQ ID NO: 25317
  source 1..80: mol_type = other DNA

SEQ ID NO: 60078 - DNA, 80 bp, synthetic construct; identical to SEQ ID NO: 25318
  source 1..80: mol_type = other DNA

SEQ ID NO: 60079 - DNA, 80 bp, synthetic construct; identical to SEQ ID NO: 25319
  source 1..80: mol_type = other DNA

SEQ ID NO: 60080 - DNA, 80 bp, synthetic construct; identical to SEQ ID NO: 10241
  source 1..80: mol_type = other DNA

SEQ ID NO: 60081 - DNA, 80 bp, synthetic construct; identical to SEQ ID NO: 25321
  source 1..80: mol_type = other DNA

SEQ ID NO: 60082 - DNA, 80 bp, synthetic construct; identical to SEQ ID NO: 25322
  source 1..80: mol_type = other DNA

SEQ ID NO: 60083 - DNA, 80 bp, synthetic construct; identical to SEQ ID NO: 10242
  source 1..80: mol_type = other DNA

SEQ ID NO: 60084 - DNA, 80 bp, synthetic construct; identical to SEQ ID NO: 25325
  source 1..80: mol_type = other DNA

SEQ ID NO: 60085 - DNA, 80 bp, synthetic construct; identical to SEQ ID NO: 25326
  source 1..80: mol_type = other DNA

SEQ ID NO: 60086 - DNA, 80 bp, synthetic construct; identical to SEQ ID NO: 25327
  source 1..80: mol_type = other DNA

SEQ ID NO: 60087 - DNA, 80 bp, synthetic construct; identical to SEQ ID NO: 10243
  source 1..80: mol_type = other DNA

SEQ ID NO: 60088 - DNA, 80 bp, synthetic construct; identical to SEQ ID NO: 25329
  source 1..80: mol_type = other DNA

SEQ ID NO: 60089 - DNA, 80 bp, synthetic construct; identical to SEQ ID NO: 25330
  source 1..80: mol_type = other DNA

SEQ ID NO: 60090 - DNA, 80 bp, synthetic construct; identical to SEQ ID NO: 25331
  source 1..80: mol_type = other DNA

SEQ ID NO: 60091 - DNA, 80 bp, synthetic construct; identical to SEQ ID NO: 10244
  source 1..80: mol_type = other DNA

SEQ ID NO: 60092 - DNA, 80 bp, synthetic construct; identical to SEQ ID NO: 25333
  source 1..80: mol_type = other DNA

SEQ ID NO: 60093 - DNA, 80 bp, synthetic construct; identical to SEQ ID NO: 25334
  source 1..80: mol_type = other DNA

SEQ ID NO: 60094 - DNA, 80 bp, synthetic construct; identical to SEQ ID NO: 10245
  source 1..80: mol_type = other DNA

SEQ ID NO: 60095 - DNA, 80 bp, synthetic construct; identical to SEQ ID NO: 25336
  source 1..80: mol_type = other DNA

SEQ ID NO: 60096 - DNA, 80 bp, synthetic construct; identical to SEQ ID NO: 25337
  source 1..80: mol_type = other DNA

SEQ ID NO: 60097 - DNA, 80 bp, synthetic construct; identical to SEQ ID NO: 25338
  source 1..80: mol_type = other DNA

SEQ ID NO: 60098 - DNA, 80 bp, synthetic construct; identical to SEQ ID NO: 10246
  source 1..80: mol_type = other DNA

SEQ ID NO: 60099 - DNA, 80 bp, synthetic construct; identical to SEQ ID NO: 25340
  source 1..80: mol_type = other DNA

SEQ ID NO: 60100 - DNA, 80 bp, synthetic construct; identical to SEQ ID NO: 25341
  source 1..80: mol_type = other DNA

SEQ ID NO: 60101 - DNA, 80 bp, synthetic construct; identical to SEQ ID NO: 25342
  source 1..80: mol_type = other DNA

SEQ ID NO: 60102 - DNA, 80 bp, synthetic construct; identical to SEQ ID NO: 25343
  source 1..80: mol_type = other DNA

SEQ ID NO: 60103 - DNA, 80 bp, synthetic construct; identical to SEQ ID NO: 10247
  source 1..80: mol_type = other DNA

SEQ ID NO: 60104 - DNA, 80 bp, synthetic construct; identical to SEQ ID NO: 25345
  source 1..80: mol_type = other DNA

SEQ ID NO: 60105 - DNA, 80 bp, synthetic construct; identical to SEQ ID NO: 25346
  source 1..80: mol_type = other DNA

SEQ ID NO: 60106 - DNA, 80 bp, synthetic construct; identical to SEQ ID NO: 25347
  source 1..80: mol_type = other DNA

SEQ ID NO: 60107 - DNA, 80 bp, synthetic construct; identical to SEQ ID NO: 10248
  source 1..80: mol_type = other DNA

SEQ ID NO: 60108 - DNA, 80 bp, synthetic construct; identical to SEQ ID NO: 25349
  source 1..80: mol_type = other DNA

SEQ ID NO: 60109 - DNA, 80 bp, synthetic construct; identical to SEQ ID NO: 25350
  source 1..80: mol_type = other DNA

SEQ ID NO: 60110 - DNA, 80 bp, synthetic construct; identical to SEQ ID NO: 25351
  source 1..80: mol_type = other DNA

SEQ ID NO: 60111 - DNA, 80 bp, synthetic construct; identical to SEQ ID NO: 10249
  source 1..80: mol_type = other DNA

SEQ ID NO: 60112 - DNA, 80 bp, synthetic construct; identical to SEQ ID NO: 25353
  source 1..80: mol_type = other DNA

SEQ ID NO: 60113 - DNA, 80 bp, synthetic construct; identical to SEQ ID NO: 25354
  source 1..80: mol_type = other DNA

SEQ ID NO: 60114 - DNA, 80 bp, synthetic construct; identical to SEQ ID NO: 10250
  source 1..80: mol_type = other DNA

SEQ ID NO: 60115 - DNA, 80 bp, synthetic construct; identical to SEQ ID NO: 25356
  source 1..80: mol_type = other DNA

SEQ ID NO: 60116 - DNA, 80 bp, synthetic construct; identical to SEQ ID NO: 25357
  source 1..80: mol_type = other DNA

SEQ ID NO: 60117 - DNA, 80 bp, synthetic construct; identical to SEQ ID NO: 25358
  source 1..80: mol_type = other DNA

SEQ ID NO: 60118 - DNA, 80 bp, synthetic construct; identical to SEQ ID NO: 10251
  source 1..80: mol_type = other DNA

SEQ ID NO: 60119 - DNA, 80 bp, synthetic construct; identical to SEQ ID NO: 25360
  source 1..80: mol_type = other DNA

SEQ ID NO: 60120 - DNA, 80 bp, synthetic construct; identical to SEQ ID NO: 25361
  source 1..80: mol_type = other DNA

SEQ ID NO: 60121 - DNA, 80 bp, synthetic construct; identical to SEQ ID NO: 25362
  source 1..80: mol_type = other DNA

SEQ ID NO: 60122 - DNA, 80 bp, synthetic construct; identical to SEQ ID NO: 10252
  source 1..80: mol_type = other DNA

SEQ ID NO: 60123 - DNA, 80 bp, synthetic construct; identical to SEQ ID NO: 25364
  source 1..80: mol_type = other DNA

SEQ ID NO: 60124 - DNA, 80 bp, synthetic construct; identical to SEQ ID NO: 25365
  source 1..80: mol_type = other DNA

SEQ ID NO: 60125 - DNA, 80 bp, synthetic construct; identical to SEQ ID NO: 25366
  source 1..80: mol_type = other DNA

SEQ ID NO: 60126 - DNA, 80 bp, synthetic construct; identical to SEQ ID NO: 10253
  source 1..80: mol_type = other DNA

SEQ ID NO: 60127 - DNA, 80 bp, synthetic construct; identical to SEQ ID NO: 25368
  source 1..80: mol_type = other DNA

SEQ ID NO: 60128 - DNA, 80 bp, synthetic construct; identical to SEQ ID NO: 25369
  source 1..80: mol_type = other DNA

SEQ ID NO: 60129 - DNA, 80 bp, synthetic construct; identical to SEQ ID NO: 25370
  source 1..80: mol_type = other DNA

SEQ ID NO: 60130 - DNA, 80 bp, synthetic construct; identical to SEQ ID NO: 25371
  source 1..80: mol_type = other DNA

SEQ ID NO: 60131 - DNA, 80 bp, synthetic construct; identical to SEQ ID NO: 10254
  source 1..80: mol_type = other DNA

SEQ ID NO: 60132 - DNA, 80 bp, synthetic construct; identical to SEQ ID NO: 25373
  source 1..80: mol_type = other DNA

SEQ ID NO: 60133 - DNA, 80 bp, synthetic construct; identical to SEQ ID NO: 25374
  source 1..80: mol_type = other DNA

SEQ ID NO: 60134 - DNA, 80 bp, synthetic construct; identical to SEQ ID NO: 10255
  source 1..80: mol_type = other DNA

SEQ ID NO: 60135 - DNA, 80 bp, synthetic construct; identical to SEQ ID NO: 25376
  source 1..80: mol_type = other DNA

SEQ ID NO: 60136 - DNA, 80 bp, synthetic construct; identical to SEQ ID NO: 25377
  source 1..80: mol_type = other DNA

SEQ ID NO: 60137 - DNA, 80 bp, synthetic construct; identical to SEQ ID NO: 25378
  source 1..80: mol_type = other DNA

SEQ ID NO: 60138 - DNA, 80 bp, synthetic construct; identical to SEQ ID NO: 10256
  source 1..80: mol_type = other DNA

SEQ ID NO: 60139 - DNA, 80 bp, synthetic construct; identical to SEQ ID NO: 25380
  source 1..80: mol_type = other DNA

SEQ ID NO: 60140 - DNA, 80 bp, synthetic construct; identical to SEQ ID NO: 25381
  source 1..80: mol_type = other DNA

SEQ ID NO: 60141 - DNA, 80 bp, synthetic construct; identical to SEQ ID NO: 25382
  source 1..80: mol_type = other DNA

SEQ ID NO: 60142 - DNA, 80 bp, synthetic construct; identical to SEQ ID NO: 25383
  source 1..80: mol_type = other DNA

SEQ ID NO: 60143 - DNA, 80 bp, synthetic construct; identical to SEQ ID NO: 10257
  source 1..80: mol_type = other DNA

SEQ ID NO: 60144 - DNA, 80 bp, synthetic construct; identical to SEQ ID NO: 25385
  source 1..80: mol_type = other DNA

SEQ ID NO: 60145 - DNA, 80 bp, synthetic construct; identical to SEQ ID NO: 25386
  source 1..80: mol_type = other DNA

SEQ ID NO: 60146 - DNA, 80 bp, synthetic construct; identical to SEQ ID NO: 10258
  source 1..80: mol_type = other DNA

SEQ ID NO: 60147 - DNA, 80 bp, synthetic construct; identical to SEQ ID NO: 25388
  source 1..80: mol_type = other DNA

SEQ ID NO: 60148 - DNA, 80 bp, synthetic construct; identical to SEQ ID NO: 25389
  source 1..80: mol_type = other DNA

SEQ ID NO: 60149 - DNA, 80 bp, synthetic construct; identical to SEQ ID NO: 25390
  source 1..80: mol_type = other DNA

SEQ ID NO: 60150 - DNA, 80 bp, synthetic construct; identical to SEQ ID NO: 10259
  source 1..80: mol_type = other DNA

SEQ ID NO: 60151 - DNA, 80 bp, synthetic construct; identical to SEQ ID NO: 25392
  source 1..80: mol_type = other DNA

SEQ ID NO: 60152 - DNA, 80 bp, synthetic construct; identical to SEQ ID NO: 25393
  source 1..80: mol_type = other DNA

SEQ ID NO: 60153 - DNA, 80 bp, synthetic construct; identical to SEQ ID NO: 25394
  source 1..80: mol_type = other DNA

SEQ ID NO: 60154 - DNA, 80 bp, synthetic construct; identical to SEQ ID NO: 10260
  source 1..80: mol_type = other DNA

SEQ ID NO: 60155 - DNA, 80 bp, synthetic construct; identical to SEQ ID NO: 25396
  source 1..80: mol_type = other DNA

SEQ ID NO: 60156 - DNA, 80 bp, synthetic construct; identical to SEQ ID NO: 25397
  source 1..80: mol_type = other DNA

SEQ ID NO: 60157 - DNA, 80 bp, synthetic construct; identical to SEQ ID NO: 25398
  source 1..80: mol_type = other DNA

SEQ ID NO: 60158 - DNA, 80 bp, synthetic construct; identical to SEQ ID NO: 10261
  source 1..80: mol_type = other DNA

SEQ ID NO: 60159 - DNA, 80 bp, synthetic construct; identical to SEQ ID NO: 25400
  source 1..80: mol_type = other DNA

SEQ ID NO: 60160 - DNA, 80 bp, synthetic construct; identical to SEQ ID NO: 25401
  source 1..80: mol_type = other DNA

SEQ ID NO: 60161 - DNA, 80 bp, synthetic construct; identical to SEQ ID NO: 25402
  source 1..80: mol_type = other DNA

SEQ ID NO: 60162 - DNA, 80 bp, synthetic construct; identical to SEQ ID NO: 10262
  source 1..80: mol_type = other DNA

SEQ ID NO: 60163 - DNA, 80 bp, synthetic construct; identical to SEQ ID NO: 25404
  source 1..80: mol_type = other DNA

SEQ ID NO: 60164 - DNA, 80 bp, synthetic construct; identical to SEQ ID NO: 25405
  source 1..80: mol_type = other DNA

SEQ ID NO: 60165 - DNA, 80 bp, synthetic construct; identical to SEQ ID NO: 25406
  source 1..80: mol_type = other DNA

SEQ ID NO: 60166 - DNA, 80 bp, synthetic construct; identical to SEQ ID NO: 25407
  source 1..80: mol_type = other DNA

SEQ ID NO: 60167 - DNA, 80 bp, synthetic construct; identical to SEQ ID NO: 10263
  source 1..80: mol_type = other DNA

SEQ ID NO: 60168 - DNA, 80 bp, synthetic construct; identical to SEQ ID NO: 25409
  source 1..80: mol_type = other DNA

SEQ ID NO: 60169 - DNA, 80 bp, synthetic construct; identical to SEQ ID NO: 25410
  source 1..80: mol_type = other DNA

SEQ ID NO: 60170 - DNA, 80 bp, synthetic construct; identical to SEQ ID NO: 25411
  source 1..80: mol_type = other DNA

SEQ ID NO: 60171 - DNA, 80 bp, synthetic construct; identical to SEQ ID NO: 10264
  source 1..80: mol_type = other DNA

SEQ ID NO: 60172 - DNA, 80 bp, synthetic construct; identical to SEQ ID NO: 25413
  source 1..80: mol_type = other DNA

SEQ ID NO: 60173 - DNA, 80 bp, synthetic construct; identical to SEQ ID NO: 25414
  source 1..80: mol_type = other DNA

SEQ ID NO: 60174 - DNA, 80 bp, synthetic construct; identical to SEQ ID NO: 25415
  source 1..80: mol_type = other DNA

SEQ ID NO: 60175 - DNA, 80 bp, synthetic construct; identical to SEQ ID NO: 25416
  source 1..80: mol_type = other DNA

SEQ ID NO: 60176 - DNA, 80 bp, synthetic construct; identical to SEQ ID NO: 10265
  source 1..80: mol_type = other DNA

SEQ ID NO: 60177 - DNA, 80 bp, synthetic construct; identical to SEQ ID NO: 25418
  source 1..80: mol_type = other DNA

SEQ ID NO: 60178 - DNA, 80 bp, synthetic construct; identical to SEQ ID NO: 25419
  source 1..80: mol_type = other DNA

SEQ ID NO: 60179 - DNA, 80 bp, synthetic construct; identical to SEQ ID NO: 25420
  source 1..80: mol_type = other DNA

SEQ ID NO: 60180 - DNA, 80 bp, synthetic construct; identical to SEQ ID NO: 10266
  source 1..80: mol_type = other DNA

SEQ ID NO: 60181 - DNA, 80 bp, synthetic construct; identical to SEQ ID NO: 25422
  source 1..80: mol_type = other DNA

SEQ ID NO: 60182 - DNA, 80 bp, synthetic construct; identical to SEQ ID NO: 25423
  source 1..80: mol_type = other DNA

SEQ ID NO: 60183 - DNA, 80 bp, synthetic construct; identical to SEQ ID NO: 25424
  source 1..80: mol_type = other DNA

SEQ ID NO: 60184 - DNA, 80 bp, synthetic construct; identical to SEQ ID NO: 25425
  source 1..80: mol_type = other DNA

SEQ ID NO: 60185 - DNA, 80 bp, synthetic construct; identical to SEQ ID NO: 10267
  source 1..80: mol_type = other DNA

SEQ ID NO: 60186 - DNA, 80 bp, synthetic construct; identical to SEQ ID NO: 25427
  source 1..80: mol_type = other DNA

SEQ ID NO: 60187 - DNA, 80 bp, synthetic construct; identical to SEQ ID NO: 25428
  source 1..80: mol_type = other DNA

SEQ ID NO: 60188 - DNA, 80 bp, synthetic construct; identical to SEQ ID NO: 10268
  source 1..80: mol_type = other DNA

SEQ ID NO: 60189 - DNA, 80 bp, synthetic construct; identical to SEQ ID NO: 25430
  source 1..80: mol_type = other DNA

SEQ ID NO: 60190 - DNA, 80 bp, synthetic construct; identical to SEQ ID NO: 25431
  source 1..80: mol_type = other DNA

SEQ ID NO: 60191 - DNA, 80 bp, synthetic construct; identical to SEQ ID NO: 25432
  source 1..80: mol_type = other DNA

SEQ ID NO: 60192 - DNA, 80 bp, synthetic construct; identical to SEQ ID NO: 25433
  source 1..80: mol_type = other DNA

SEQ ID NO: 60193 - DNA, 80 bp, synthetic construct; identical to SEQ ID NO: 10269
  source 1..80: mol_type = other DNA

SEQ ID NO: 60194 - DNA, 80 bp, synthetic construct; identical to SEQ ID NO: 25435
  source 1..80: mol_type = other DNA

SEQ ID NO: 60195 - DNA, 80 bp, synthetic construct; identical to SEQ ID NO: 25436
  source 1..80: mol_type = other DNA

SEQ ID NO: 60196 - DNA, 80 bp, synthetic construct; identical to SEQ ID NO: 25437
  source 1..80: mol_type = other DNA

SEQ ID NO: 60197 - DNA, 80 bp, synthetic construct; identical to SEQ ID NO: 25438
  source 1..80: mol_type = other DNA

SEQ ID NO: 60198 - DNA, 80 bp, synthetic construct; identical to SEQ ID NO: 10270
  source 1..80: mol_type = other DNA

SEQ ID NO: 60199 - DNA, 80 bp, synthetic construct; identical to SEQ ID NO: 25440
  source 1..80: mol_type = other DNA

SEQ ID NO: 60200 - DNA, 80 bp, synthetic construct; identical to SEQ ID NO: 25441
  source 1..80: mol_type = other DNA

SEQ ID NO: 60201 - DNA, 80 bp, synthetic construct; identical to SEQ ID NO: 10271
  source 1..80: mol_type = other DNA

SEQ ID NO: 60202 - DNA, 80 bp, synthetic construct; identical to SEQ ID NO: 25443
  source 1..80: mol_type = other DNA

SEQ ID NO: 60203 - DNA, 80 bp, synthetic construct; identical to SEQ ID NO: 25444
  source 1..80: mol_type = other DNA

SEQ ID NO: 60204 - DNA, 80 bp, synthetic construct; identical to SEQ ID NO: 25445
  source 1..80: mol_type = other DNA

SEQ ID NO: 60205 - DNA, 80 bp, synthetic construct; identical to SEQ ID NO: 25446
  source 1..80: mol_type = other DNA

SEQ ID NO: 60206 - DNA, 80 bp, synthetic construct; identical to SEQ ID NO: 10272
  source 1..80: mol_type = other DNA

SEQ ID NO: 60207 - DNA, 80 bp, synthetic construct; identical to SEQ ID NO: 25448
  source 1..80: mol_type = other DNA

SEQ ID NO: 60208 - DNA, 80 bp, synthetic construct; identical to SEQ ID NO: 25449
  source 1..80: mol_type = other DNA

SEQ ID NO: 60209 - DNA, 80 bp, synthetic construct; identical to SEQ ID NO: 10273
  source 1..80: mol_type = other DNA

SEQ ID NO: 60210 - DNA, 80 bp, synthetic construct; identical to SEQ ID NO: 25452
  source 1..80: mol_type = other DNA

SEQ ID NO: 60211 - DNA, 80 bp, synthetic construct; identical to SEQ ID NO: 25453
  source 1..80: mol_type = other DNA

SEQ ID NO: 60212 - DNA, 80 bp, synthetic construct; identical to SEQ ID NO: 10274
  source 1..80: mol_type = other DNA

SEQ ID NO: 60213 - DNA, 80 bp, synthetic construct; identical to SEQ ID NO: 25455
  source 1..80: mol_type = other DNA

SEQ ID NO: 60214 - DNA, 80 bp, synthetic construct; identical to SEQ ID NO: 25456
  source 1..80: mol_type = other DNA

SEQ ID NO: 60215 - DNA, 80 bp, synthetic construct; identical to SEQ ID NO: 25457
  source 1..80: mol_type = other DNA

SEQ ID NO: 60216 - DNA, 80 bp, synthetic construct; identical to SEQ ID NO: 10275
  source 1..80: mol_type = other DNA

SEQ ID NO: 60217 - DNA, 80 bp, synthetic construct; identical to SEQ ID NO: 25459
  source 1..80: mol_type = other DNA

SEQ ID NO: 60218 - DNA, 80 bp, synthetic construct; identical to SEQ ID NO: 25460
  source 1..80: mol_type = other DNA

SEQ ID NO: 60219 - DNA, 80 bp, synthetic construct; identical to SEQ ID NO: 25461
  source 1..80: mol_type = other DNA

SEQ ID NO: 60220 - DNA, 80 bp, synthetic construct; identical to SEQ ID NO: 10276
  source 1..80: mol_type = other DNA

SEQ ID NO: 60221 - DNA, 80 bp, synthetic construct; identical to SEQ ID NO: 25463
  source 1..80: mol_type = other DNA

SEQ ID NO: 60222 - DNA, 80 bp, synthetic construct; identical to SEQ ID NO: 25464
  source 1..80: mol_type = other DNA

SEQ ID NO: 60223 - DNA, 80 bp, synthetic construct; identical to SEQ ID NO: 25465
  source 1..80: mol_type = other DNA

SEQ ID NO: 60224 - DNA, 80 bp, synthetic construct; identical to SEQ ID NO: 25466
  source 1..80: mol_type = other DNA

SEQ ID NO: 60225 - DNA, 80 bp, synthetic construct; identical to SEQ ID NO: 10277
  source 1..80: mol_type = other DNA

SEQ ID NO: 60226 - DNA, 80 bp, synthetic construct; identical to SEQ ID NO: 25468
  source 1..80: mol_type = other DNA

SEQ ID NO: 60227 - DNA, 80 bp, synthetic construct; identical to SEQ ID NO: 25469
  source 1..80: mol_type = other DNA

SEQ ID NO: 60228 - DNA, 80 bp, synthetic construct; identical to SEQ ID NO: 25470
  source 1..80: mol_type = other DNA

SEQ ID NO: 60229 - DNA, 80 bp, synthetic construct; identical to SEQ ID NO: 25471
  source 1..80: mol_type = other DNA

SEQ ID NO: 60230 - DNA, 80 bp, synthetic construct; identical to SEQ ID NO: 10278
  source 1..80: mol_type = other DNA

SEQ ID NO: 60231 - DNA, 80 bp, synthetic construct; identical to SEQ ID NO: 25473
  source 1..80: mol_type = other DNA

SEQ ID NO: 60232 - DNA, 80 bp, synthetic construct; identical to SEQ ID NO: 25474
  source 1..80: mol_type = other DNA

SEQ ID NO: 60233 - DNA, 80 bp, synthetic construct; identical to SEQ ID NO: 10279
  source 1..80: mol_type = other DNA

SEQ ID NO: 60234 - DNA, 80 bp, synthetic construct; identical to SEQ ID NO: 25476
  source 1..80: mol_type = other DNA

SEQ ID NO: 60235 - DNA, 80 bp, synthetic construct; identical to SEQ ID NO: 25477
  source 1..80: mol_type = other DNA

SEQ ID NO: 60236 - DNA, 80 bp, synthetic construct; identical to SEQ ID NO: 25478
  source 1..80: mol_type = other DNA

SEQ ID NO: 60237 - DNA, 80 bp, synthetic construct; identical to SEQ ID NO: 25479
  source 1..80: mol_type = other DNA

SEQ ID NO: 60238 - DNA, 80 bp, synthetic construct; identical to SEQ ID NO: 10280
  source 1..80: mol_type = other DNA

SEQ ID NO: 60239 - DNA, 80 bp, synthetic construct; identical to SEQ ID NO: 25481
  source 1..80: mol_type = other DNA

SEQ ID NO: 60240 - DNA, 80 bp, synthetic construct; identical to SEQ ID NO: 10281
  source 1..80: mol_type = other DNA

SEQ ID NO: 60241 - DNA, 80 bp, synthetic construct; identical to SEQ ID NO: 25483
  source 1..80: mol_type = other DNA

SEQ ID NO: 60242 - DNA, 80 bp, synthetic construct; identical to SEQ ID NO: 25484
  source 1..80: mol_type = other DNA

SEQ ID NO: 60243 - DNA, 80 bp, synthetic construct; identical to SEQ ID NO: 25486
  source 1..80: mol_type = other DNA

SEQ ID NO: 60244 - DNA, 80 bp, synthetic construct; identical to SEQ ID NO: 25489
  source 1..80: mol_type = other DNA

SEQ ID NO: 60245 - DNA, 80 bp, synthetic construct; identical to SEQ ID NO: 10283
  source 1..80: mol_type = other DNA

SEQ ID NO: 60246 - DNA, 80 bp, synthetic construct; identical to SEQ ID NO: 25493
  source 1..80: mol_type = other DNA

SEQ ID NO: 60247 - DNA, 80 bp, synthetic construct; identical to SEQ ID NO: 10284
  source 1..80: mol_type = other DNA

SEQ ID NO: 60248 - DNA, 80 bp, synthetic construct; identical to SEQ ID NO: 25497
  source 1..80: mol_type = other DNA

SEQ ID NO: 60249 - DNA, 80 bp, synthetic construct; identical to SEQ ID NO: 25499
  source 1..80: mol_type = other DNA

SEQ ID NO: 60250 - DNA, 80 bp, synthetic construct; identical to SEQ ID NO: 25500
  source 1..80: mol_type = other DNA

SEQ ID NO: 60251 - DNA, 80 bp, synthetic construct; identical to SEQ ID NO: 10286
  source 1..80: mol_type = other DNA

SEQ ID NO: 60252 - DNA, 80 bp, synthetic construct; identical to SEQ ID NO: 25504
  source 1..80: mol_type = other DNA

SEQ ID NO: 60253 - DNA, 80 bp, synthetic construct; identical to SEQ ID NO: 25506
  source 1..80: mol_type = other DNA

SEQ ID NO: 60254 - DNA, 80 bp, synthetic construct; identical to SEQ ID NO: 25508
  source 1..80: mol_type = other DNA

SEQ ID NO: 60255 - DNA, 80 bp, synthetic construct; identical to SEQ ID NO: 10288
  source 1..80: mol_type = other DNA

SEQ ID NO: 60256 - DNA, 80 bp, synthetic construct; identical to SEQ ID NO: 25512
  source 1..80: mol_type = other DNA

SEQ ID NO: 60257 - DNA, 80 bp, synthetic construct; identical to SEQ ID NO: 25514
  source 1..80: mol_type = other DNA

SEQ ID NO: 60258 - DNA, 80 bp, synthetic construct; identical to SEQ ID NO: 10289
  source 1..80: mol_type = other DNA

SEQ ID NO: 60259 - DNA, 80 bp, synthetic construct; identical to SEQ ID NO: 25516
  source 1..80: mol_type = other DNA

SEQ ID NO: 60260 - DNA, 80 bp, synthetic construct; identical to SEQ ID NO: 25517
  source 1..80: mol_type = other DNA

SEQ ID NO: 60261 - DNA, 80 bp, synthetic construct; identical to SEQ ID NO: 10290
  source 1..80: mol_type = other DNA

SEQ ID NO: 60262 - DNA, 80 bp, synthetic construct; identical to SEQ ID NO: 25519
  source 1..80: mol_type = other DNA

SEQ ID NO: 60263 - DNA, 80 bp, synthetic construct; identical to SEQ ID NO: 25520
  source 1..80: mol_type = other DNA

SEQ ID NO: 60264 - DNA, 80 bp, synthetic construct; identical to SEQ ID NO: 25521
  source 1..80: mol_type = other DNA

SEQ ID NO: 60265 - DNA, 80 bp, synthetic construct; identical to SEQ ID NO: 10291
  source 1..80: mol_type = other DNA

SEQ ID NO: 60266 - DNA, 80 bp, synthetic construct; identical to SEQ ID NO: 25524
  source 1..80: mol_type = other DNA

SEQ ID NO: 60267 - DNA, 80 bp, synthetic construct; identical to SEQ ID NO: 25525
  source 1..80: mol_type = other DNA

SEQ ID NO: 60268 - DNA, 80 bp, synthetic construct; identical to SEQ ID NO: 10292
  source 1..80: mol_type = other DNA

SEQ ID NO: 60269 - DNA, 80 bp, synthetic construct; identical to SEQ ID NO: 25527
  source 1..80: mol_type = other DNA

SEQ ID NO: 60270 - DNA, 80 bp, synthetic construct; identical to SEQ ID NO: 25528
  source 1..80: mol_type = other DNA

SEQ ID NO: 60271 - DNA, 80 bp, synthetic construct; identical to SEQ ID NO: 25529
  source 1..80: mol_type = other DNA

SEQ ID NO: 60272 - DNA, 80 bp, synthetic construct; identical to SEQ ID NO: 25530
  source 1..80: mol_type = other DNA

SEQ ID NO: 60273 - DNA, 80 bp, synthetic construct; identical to SEQ ID NO: 10293
  source 1..80: mol_type = other DNA

SEQ ID NO: 60274 - DNA, 80 bp, synthetic construct; identical to SEQ ID NO: 25532
  source 1..80: mol_type = other DNA

SEQ ID NO: 60275 - DNA, 80 bp, synthetic construct; identical to SEQ ID NO: 25533
  source 1..80: mol_type = other DNA

SEQ ID NO: 60276 - DNA, 80 bp, synthetic construct; identical to SEQ ID NO: 10294
  source 1..80: mol_type = other DNA

SEQ ID NO: 60277 - DNA, 80 bp, synthetic construct; identical to SEQ ID NO: 25535
  source 1..80: mol_type = other DNA

SEQ ID NO: 60278 - DNA, 80 bp, synthetic construct; identical to SEQ ID NO: 25537
  source 1..80: mol_type = other DNA

SEQ ID NO: 60279 - DNA, 80 bp, synthetic construct; identical to SEQ ID NO: 25538
  source 1..80: mol_type = other DNA

SEQ ID NO: 60280 - DNA, 80 bp, synthetic construct; identical to SEQ ID NO: 10295
  source 1..80: mol_type = other DNA

SEQ ID NO: 60281 - DNA, 80 bp, synthetic construct; identical to SEQ ID NO: 25540
  source 1..80: mol_type = other DNA

SEQ ID NO: 60282 - DNA, 80 bp, synthetic construct; identical to SEQ ID NO: 25541
  source 1..80: mol_type = other DNA

SEQ ID NO: 60283 - DNA, 80 bp, synthetic construct; identical to SEQ ID NO: 10296
  source 1..80: mol_type = other DNA

SEQ ID NO: 60284 - DNA, 80 bp, synthetic construct; identical to SEQ ID NO: 25544
  source 1..80: mol_type = other DNA

SEQ ID NO: 60285 - DNA, 80 bp, synthetic construct; identical to SEQ ID NO: 25545
  source 1..80: mol_type = other DNA

SEQ ID NO: 60286 - DNA, 80 bp, synthetic construct; identical to SEQ ID NO: 25546
  source 1..80: mol_type = other DNA

SEQ ID NO: 60287 - DNA, 80 bp, synthetic construct; identical to SEQ ID NO: 10297
  source 1..80: mol_type = other DNA

SEQ ID NO: 60288 - DNA, 80 bp, synthetic construct; identical to SEQ ID NO: 25548
  source 1..80: mol_type = other DNA

SEQ ID NO: 60289 - DNA, 80 bp, synthetic construct; identical to SEQ ID NO: 25549
  source 1..80: mol_type = other DNA

SEQ ID NO: 60290 - DNA, 80 bp, synthetic construct; identical to SEQ ID NO: 10298
  source 1..80: mol_type = other DNA

SEQ ID NO: 60291 - DNA, 80 bp, synthetic construct; identical to SEQ ID NO: 25551
  source 1..80: mol_type = other DNA

SEQ ID NO: 60292 - DNA, 80 bp, synthetic construct; identical to SEQ ID NO: 25552
  source 1..80: mol_type = other DNA

SEQ ID NO: 60293 - DNA, 80 bp, synthetic construct; identical to SEQ ID NO: 25553
  source 1..80: mol_type = other DNA

SEQ ID NO: 60294 - DNA, 80 bp, synthetic construct; identical to SEQ ID NO: 25554
  source 1..80: mol_type = other DNA

SEQ ID NO: 60295 - DNA, 80 bp, synthetic construct; identical to SEQ ID NO: 10299
  source 1..80: mol_type = other DNA

SEQ ID NO: 60296 - DNA, 80 bp, synthetic construct; identical to SEQ ID NO: 25556
  source 1..80: mol_type = other DNA

SEQ ID NO: 60297 - DNA, 80 bp, synthetic construct; identical to SEQ ID NO: 25557
  source 1..80: mol_type = other DNA

SEQ ID NO: 60298 - DNA, 80 bp, synthetic construct; identical to SEQ ID NO: 25558
  source 1..80: mol_type = other DNA

SEQ ID NO: 60299 - DNA, 80 bp, synthetic construct; identical to SEQ ID NO: 10300
  source 1..80: mol_type = other DNA

SEQ ID NO: 60300 - DNA, 80 bp, synthetic construct; identical to SEQ ID NO: 25560
  source 1..80: mol_type = other DNA

SEQ ID NO: 60301 - DNA, 80 bp, synthetic construct; identical to SEQ ID NO: 25561
  source 1..80: mol_type = other DNA

SEQ ID NO: 60302 - DNA, 80 bp, synthetic construct; identical to SEQ ID NO: 10301
  source 1..80: mol_type = other DNA

SEQ ID NO: 60303 - DNA, 80 bp, synthetic construct; identical to SEQ ID NO: 25563
  source 1..80: mol_type = other DNA

SEQ ID NO: 60304 - DNA, 80 bp, synthetic construct; identical to SEQ ID NO: 25564
  source 1..80: mol_type = other DNA

SEQ ID NO: 60305 - DNA, 80 bp, synthetic construct; identical to SEQ ID NO: 25565
  source 1..80: mol_type = other DNA

SEQ ID NO: 60306 - DNA, 80 bp, synthetic construct; identical to SEQ ID NO: 10302
  source 1..80: mol_type = other DNA

SEQ ID NO: 60307 - DNA, 80 bp, synthetic construct; identical to SEQ ID NO: 25567
  source 1..80: mol_type = other DNA

SEQ ID NO: 60308 - DNA, 80 bp, synthetic construct; identical to SEQ ID NO: 25568
  source 1..80: mol_type = other DNA

SEQ ID NO: 60309 - DNA, 80 bp, synthetic construct; identical to SEQ ID NO: 25569
  source 1..80: mol_type = other DNA

SEQ ID NO: 60310 - DNA, 80 bp, synthetic construct; identical to SEQ ID NO: 10303
  source 1..80: mol_type = other DNA

SEQ ID NO: 60311 - DNA, 80 bp, synthetic construct; identical to SEQ ID NO: 25571
  source 1..80: mol_type = other DNA

SEQ ID NO: 60312 - DNA, 80 bp, synthetic construct; identical to SEQ ID NO: 25572
  source 1..80: mol_type = other DNA

SEQ ID NO: 60313 - DNA, 80 bp, synthetic construct; identical to SEQ ID NO: 25573
  source 1..80: mol_type = other DNA

SEQ ID NO: 60314 - DNA, 80 bp, synthetic construct; identical to SEQ ID NO: 10304
  source 1..80: mol_type = other DNA

SEQ ID NO: 60315 - DNA, 80 bp, synthetic construct; identical to SEQ ID NO: 25575
  source 1..80: mol_type = other DNA

SEQ ID NO: 60316 - DNA, 80 bp, synthetic construct; identical to SEQ ID NO: 25576
  source 1..80: mol_type = other DNA

SEQ ID NO: 60317 - DNA, 80 bp, synthetic construct; identical to SEQ ID NO: 25577
  source 1..80: mol_type = other DNA

SEQ ID NO: 60318 - DNA, 80 bp, synthetic construct; identical to SEQ ID NO: 10305
  source 1..80: mol_type = other DNA

SEQ ID NO: 60319 - DNA, 80 bp, synthetic construct; identical to SEQ ID NO: 25579
  source 1..80: mol_type = other DNA

SEQ ID NO: 60320 - DNA, 80 bp, synthetic construct; identical to SEQ ID NO: 25580
  source 1..80: mol_type = other DNA

SEQ ID NO: 60321 - DNA, 80 bp, synthetic construct; identical to SEQ ID NO: 25581
  source 1..80: mol_type = other DNA

SEQ ID NO: 60322 - DNA, 80 bp, synthetic construct; identical to SEQ ID NO: 10306
  source 1..80: mol_type = other DNA

SEQ ID NO: 60323 - DNA, 80 bp, synthetic construct; identical to SEQ ID NO: 25583
  source 1..80: mol_type = other DNA

SEQ ID NO: 60324 - DNA, 80 bp, synthetic construct; identical to SEQ ID NO: 25584
  source 1..80: mol_type = other DNA

SEQ ID NO: 60325 - DNA, 80 bp, synthetic construct; identical to SEQ ID NO: 25585
  source 1..80: mol_type = other DNA

SEQ ID NO: 60326 - DNA, 80 bp, synthetic construct; identical to SEQ ID NO: 25586
  source 1..80: mol_type = other DNA

SEQ ID NO: 60327 - DNA, 80 bp, synthetic construct; identical to SEQ ID NO: 10307
  source 1..80: mol_type = other DNA

SEQ ID NO: 60328 - DNA, 80 bp, synthetic construct; identical to SEQ ID NO: 25588
  source 1..80: mol_type = other DNA

SEQ ID NO: 60329 - DNA, 80 bp, synthetic construct; identical to SEQ ID NO: 25589
  source 1..80: mol_type = other DNA

SEQ ID NO: 60330 - DNA, 80 bp, synthetic construct; identical to SEQ ID NO: 25590
  source 1..80: mol_type = other DNA

SEQ ID NO: 60331 - DNA, 80 bp, synthetic construct; identical to SEQ ID NO: 10308
  source 1..80: mol_type = other DNA

SEQ ID NO: 60332 - DNA, 80 bp, synthetic construct; identical to SEQ ID NO: 25592
  source 1..80: mol_type = other DNA

SEQ ID NO: 60333 - DNA, 80 bp, synthetic construct; identical to SEQ ID NO: 25594
  source 1..80: mol_type = other DNA

SEQ ID NO: 60334 - DNA, 80 bp, synthetic construct; identical to SEQ ID NO: 25596
  source 1..80: mol_type = other DNA

SEQ ID NO: 60335 - DNA, 80 bp, synthetic construct; identical to SEQ ID NO: 10310
  source 1..80: mol_type = other DNA

SEQ ID NO: 60336 - DNA, 80 bp, synthetic construct; identical to SEQ ID NO: 25599
  source 1..80: mol_type = other DNA

SEQ ID NO: 60337 - DNA, 80 bp, synthetic construct; identical to SEQ ID NO: 25601
  source 1..80: mol_type = other DNA

SEQ ID NO: 60338 - DNA, 80 bp, synthetic construct; identical to SEQ ID NO: 10311
  source 1..80: mol_type = other DNA

SEQ ID NO: 60339 - DNA, 80 bp, synthetic construct; identical to SEQ ID NO: 25603
  source 1..80: mol_type = other DNA

SEQ ID NO: 60340 - DNA, 80 bp, synthetic construct; identical to SEQ ID NO: 25604
  source 1..80: mol_type = other DNA

SEQ ID NO: 60341 - DNA, 80 bp, synthetic construct; identical to SEQ ID NO: 25605
  source 1..80: mol_type = other DNA

SEQ ID NO: 60342 - DNA, 80 bp, synthetic construct; identical to SEQ ID NO: 25606
  source 1..80: mol_type = other DNA

SEQ ID NO: 60343 - DNA, 80 bp, synthetic construct; identical to SEQ ID NO: 10312
  source 1..80: mol_type = other DNA

SEQ ID NO: 60344 - DNA, 80 bp, synthetic construct; identical to SEQ ID NO: 25608
  source 1..80: mol_type = other DNA

SEQ ID NO: 60345 - DNA, 80 bp, synthetic construct; identical to SEQ ID NO: 25609
  source 1..80: mol_type = other DNA

SEQ ID NO: 60346 - DNA, 80 bp, synthetic construct; identical to SEQ ID NO: 10313
  source 1..80: mol_type = other DNA

SEQ ID NO: 60347 - DNA, 80 bp, synthetic construct; identical to SEQ ID NO: 25611
  source 1..80: mol_type = other DNA

SEQ ID NO: 60348 - DNA, 80 bp, synthetic construct; identical to SEQ ID NO: 25612
  source 1..80: mol_type = other DNA

SEQ ID NO: 60349 - DNA, 80 bp, synthetic construct; identical to SEQ ID NO: 25613
  source 1..80: mol_type = other DNA

SEQ ID NO: 60350 - DNA, 80 bp, synthetic construct; identical to SEQ ID NO: 10314
  source 1..80: mol_type = other DNA

SEQ ID NO: 60351 - DNA, 80 bp, synthetic construct; identical to SEQ ID NO: 25615
  source 1..80: mol_type = other DNA

SEQ ID NO: 60352 - DNA, 80 bp, synthetic construct; identical to SEQ ID NO: 25616
  source 1..80: mol_type = other DNA

SEQ ID NO: 60353 - DNA, 80 bp, synthetic construct; identical to SEQ ID NO: 25617
  source 1..80: mol_type = other DNA

SEQ ID NO: 60354 - DNA, 80 bp, synthetic construct; identical to SEQ ID NO: 25618
  source 1..80: mol_type = other DNA

SEQ ID NO: 60355 - DNA, 80 bp, synthetic construct; identical to SEQ ID NO: 10315
  source 1..80: mol_type = other DNA

SEQ ID NO: 60356 - DNA, 80 bp, synthetic construct; identical to SEQ ID NO: 25620
  source 1..80: mol_type = other DNA

SEQ ID NO: 60357 - DNA, 80 bp, synthetic construct; identical to SEQ ID NO: 25621
  source 1..80: mol_type = other DNA

SEQ ID NO: 60358 - DNA, 80 bp, synthetic construct; identical to SEQ ID NO: 10316
  source 1..80: mol_type = other DNA

SEQ ID NO: 60359 - DNA, 80 bp, synthetic construct; identical to SEQ ID NO: 25623
  source 1..80: mol_type = other DNA

SEQ ID NO: 60360 - DNA, 80 bp, synthetic construct; identical to SEQ ID NO: 25624
  source 1..80: mol_type = other DNA

SEQ ID NO: 60361 - DNA, 80 bp, synthetic construct; identical to SEQ ID NO: 25625
  source 1..80: mol_type = other DNA

SEQ ID NO: 60362 - DNA, 80 bp, synthetic construct; identical to SEQ ID NO: 10317
  source 1..80: mol_type = other DNA

SEQ ID NO: 60363 - DNA, 80 bp, synthetic construct; identical to SEQ ID NO: 25627
  source 1..80: mol_type = other DNA

SEQ ID NO: 60364 - DNA, 80 bp, synthetic construct; identical to SEQ ID NO: 25628
  source 1..80: mol_type = other DNA

SEQ ID NO: 60365 - DNA, 80 bp, synthetic construct; identical to SEQ ID NO: 25629
  source 1..80: mol_type = other DNA

SEQ ID NO: 60366 - DNA, 80 bp, synthetic construct; identical to SEQ ID NO: 10318
  source 1..80: mol_type = other DNA

SEQ ID NO: 60367 - DNA, 80 bp, synthetic construct; identical to SEQ ID NO: 25631
  source 1..80: mol_type = other DNA

SEQ ID NO: 60368 - DNA, 80 bp, synthetic construct; identical to SEQ ID NO: 25632
  source 1..80: mol_type = other DNA

SEQ ID NO: 60369 - DNA, 80 bp, synthetic construct; identical to SEQ ID NO: 25633
  source 1..80: mol_type = other DNA

SEQ ID NO: 60370 - DNA, 80 bp, synthetic construct; identical to SEQ ID NO: 10319
  source 1..80: mol_type = other DNA

SEQ ID NO: 60371 - DNA, 80 bp, synthetic construct; identical to SEQ ID NO: 25635
  source 1..80: mol_type = other DNA

SEQ ID NO: 60372 - DNA, 80 bp, synthetic construct; identical to SEQ ID NO: 25636
  source 1..80: mol_type = other DNA

SEQ ID NO: 60373 - DNA, 80 bp, synthetic construct; identical to SEQ ID NO: 25637
  source 1..80: mol_type = other DNA

SEQ ID NO: 60374 - DNA, 80 bp, synthetic construct; identical to SEQ ID NO: 10320
  source 1..80: mol_type = other DNA

SEQ ID NO: 60375 - DNA, 80 bp, synthetic construct; identical to SEQ ID NO: 25639
  source 1..80: mol_type = other DNA

SEQ ID NO: 60376 - DNA, 80 bp, synthetic construct; identical to SEQ ID NO: 25640
  source 1..80: mol_type = other DNA

SEQ ID NO: 60377 - DNA, 80 bp, synthetic construct; identical to SEQ ID NO: 25641
  source 1..80: mol_type = other DNA

SEQ ID NO: 60378 - DNA, 80 bp, synthetic construct; identical to SEQ ID NO: 10321
  source 1..80: mol_type = other DNA

SEQ ID NO: 60379 - DNA, 80 bp, synthetic construct; identical to SEQ ID NO: 25643
  source 1..80: mol_type = other DNA

SEQ ID NO: 60380 - DNA, 80 bp, synthetic construct; identical to SEQ ID NO: 25644
  source 1..80: mol_type = other DNA

SEQ ID NO: 60381 - DNA, 80 bp, synthetic construct; identical to SEQ ID NO: 25645
  source 1..80: mol_type = other DNA

SEQ ID NO: 60382 - DNA, 80 bp, synthetic construct; identical to SEQ ID NO: 25646
  source 1..80: mol_type = other DNA

SEQ ID NO: 60383 - DNA, 80 bp, synthetic construct; identical to SEQ ID NO: 10322
  source 1..80: mol_type = other DNA

SEQ ID NO: 60384 - DNA, 80 bp, synthetic construct; identical to SEQ ID NO: 25648
  source 1..80: mol_type = other DNA

SEQ ID NO: 60385 - DNA, 80 bp, synthetic construct; identical to SEQ ID NO: 25649
  source 1..80: mol_type = other DNA

SEQ ID NO: 60386 - DNA, 80 bp, synthetic construct; identical to SEQ ID NO: 10323
  source 1..80: mol_type = other DNA

SEQ ID NO: 60387 - DNA, 80 bp, synthetic construct; identical to SEQ ID NO: 25651
  source 1..80: mol_type = other DNA

SEQ ID NO: 60388 - DNA, 80 bp, synthetic construct; identical to SEQ ID NO: 25652
  source 1..80: mol_type = other DNA

SEQ ID NO: 60389 - DNA, 80 bp, synthetic construct; identical to SEQ ID NO: 25653
  source 1..80: mol_type = other DNA

SEQ ID NO: 60390 - DNA, 80 bp, synthetic construct; identical to SEQ ID NO: 25654
  source 1..80: mol_type = other DNA

SEQ ID NO: 60391 - DNA, 80 bp, synthetic construct; identical to SEQ ID NO: 10324
  source 1..80: mol_type = other DNA

SEQ ID NO: 60392 - DNA, 80 bp, synthetic construct; identical to SEQ ID NO: 25656
  source 1..80: mol_type = other DNA

SEQ ID NO: 60393 - DNA, 80 bp, synthetic construct; identical to SEQ ID NO: 25657
  source 1..80: mol_type = other DNA

SEQ ID NO: 60394 - DNA, 80 bp, synthetic construct; identical to SEQ ID NO: 25658
  source 1..80: mol_type = other DNA

SEQ ID NO: 60395 - DNA, 80 bp, synthetic construct; identical to SEQ ID NO: 25659
  source 1..80: mol_type = other DNA

SEQ ID NO: 60396 - DNA, 80 bp, synthetic construct; identical to SEQ ID NO: 10325
  source 1..80: mol_type = other DNA

SEQ ID NO: 60397 - DNA, 80 bp, synthetic construct; identical to SEQ ID NO: 25661
  source 1..80: mol_type = other DNA

SEQ ID NO: 60398 - DNA, 80 bp, synthetic construct; identical to SEQ ID NO: 25662
  source 1..80: mol_type = other DNA

SEQ ID NO: 60399 - DNA, 80 bp, synthetic construct; identical to SEQ ID NO: 25663
  source 1..80: mol_type = other DNA

SEQ ID NO: 60400 - DNA, 80 bp, synthetic construct; identical to SEQ ID NO: 10326
  source 1..80: mol_type = other DNA

SEQ ID NO: 60401 - DNA, 80 bp, synthetic construct; identical to SEQ ID NO: 25665
  source 1..80: mol_type = other DNA

SEQ ID NO: 60402 - DNA, 80 bp, synthetic construct; identical to SEQ ID NO: 25666
  source 1..80: mol_type = other DNA

SEQ ID NO: 60403 - DNA, 80 bp, synthetic construct; identical to SEQ ID NO: 10327
  source 1..80: mol_type = other DNA

SEQ ID NO: 60404 - DNA, 80 bp, synthetic construct; identical to SEQ ID NO: 25668
  source 1..80: mol_type = other DNA

SEQ ID NO: 60405 - DNA, 80 bp, synthetic construct; identical to SEQ ID NO: 25669
  source 1..80: mol_type = other DNA

SEQ ID NO: 60406 - DNA, 80 bp, synthetic construct; identical to SEQ ID NO: 25670
  source 1..80: mol_type = other DNA

SEQ ID NO: 60407 - DNA, 80 bp, synthetic construct; identical to SEQ ID NO: 10328
  source 1..80: mol_type = other DNA

SEQ ID NO: 60408 - DNA, 80 bp, synthetic construct; identical to SEQ ID NO: 25673
  source 1..80: mol_type = other DNA

SEQ ID NO: 60409 - DNA, 80 bp, synthetic construct; identical to SEQ ID NO: 25674
  source 1..80: mol_type = other DNA

SEQ ID NO: 60410 - DNA, 80 bp, synthetic construct; identical to SEQ ID NO: 10329
  source 1..80: mol_type = other DNA

SEQ ID NO: 60411 - DNA, 80 bp, synthetic construct; identical to SEQ ID NO: 25676
  source 1..80: mol_type = other DNA

SEQ ID NO: 60412 - DNA, 80 bp, synthetic construct; identical to SEQ ID NO: 25677
  source 1..80: mol_type = other DNA

SEQ ID NO: 60413 - DNA, 80 bp, synthetic construct; identical to SEQ ID NO: 25678
  source 1..80: mol_type = other DNA

SEQ ID NO: 60414 - DNA, 80 bp, synthetic construct; identical to SEQ ID NO: 10330
  source 1..80: mol_type = other DNA

SEQ ID NO: 60415 - DNA, 80 bp, synthetic construct; identical to SEQ ID NO: 25680
  source 1..80: mol_type = other DNA

SEQ ID NO: 60416 - DNA, 80 bp, synthetic construct; identical to SEQ ID NO: 25681
  source 1..80: mol_type = other DNA

SEQ ID NO: 60417 - DNA, 80 bp, synthetic construct; identical to SEQ ID NO: 25682
  source 1..80: mol_type = other DNA

SEQ ID NO: 60418 - DNA, 80 bp, synthetic construct; identical to SEQ ID NO: 10331
  source 1..80: mol_type = other DNA

SEQ ID NO: 60419 - DNA, 80 bp, synthetic construct; identical to SEQ ID NO: 25684
  source 1..80: mol_type = other DNA

SEQ ID NO: 60420 - DNA, 80 bp, synthetic construct; identical to SEQ ID NO: 25685
  source 1..80: mol_type = other DNA

SEQ ID NO: 60421 - DNA, 80 bp, synthetic construct; identical to SEQ ID NO: 25686
  source 1..80: mol_type = other DNA

SEQ ID NO: 60422 - DNA, 80 bp, synthetic construct; identical to SEQ ID NO: 25687
  source 1..80: mol_type = other DNA

SEQ ID NO: 60423 - DNA, 80 bp, synthetic construct; identical to SEQ ID NO: 10332
  source 1..80: mol_type = other DNA

SEQ ID NO: 60424 - DNA, 80 bp, synthetic construct; identical to SEQ ID NO: 25689
  source 1..80: mol_type = other DNA

SEQ ID NO: 60425 - DNA, 80 bp, synthetic construct; identical to SEQ ID NO: 25690
  source 1..80: mol_type = other DNA

SEQ ID NO: 60426 - DNA, 80 bp, synthetic construct; identical to SEQ ID NO: 10333
  source 1..80: mol_type = other DNA

SEQ ID NO: 60427 - DNA, 80 bp, synthetic construct; identical to SEQ ID NO: 25693
  source 1..80: mol_type = other DNA

SEQ ID NO: 60428 - DNA, 80 bp, synthetic construct; identical to SEQ ID NO: 25694
  source 1..80: mol_type = other DNA

SEQ ID NO: 60429 - DNA, 80 bp, synthetic construct; identical to SEQ ID NO: 10334
  source 1..80: mol_type = other DNA

SEQ ID NO: 60430 - DNA, 80 bp, synthetic construct; identical to SEQ ID NO: 25697
  source 1..80: mol_type = other DNA

SEQ ID NO: 60431 - DNA, 80 bp, synthetic construct; identical to SEQ ID NO: 25698
  source 1..80: mol_type = other DNA

SEQ ID NO: 60432 - DNA, 80 bp, synthetic construct; identical to SEQ ID NO: 25699
  source 1..80: mol_type = other DNA

SEQ ID NO: 60433 - DNA, 80 bp, synthetic construct; identical to SEQ ID NO: 10335
  source 1..80: mol_type = other DNA

SEQ ID NO: 60434 - DNA, 80 bp, synthetic construct; identical to SEQ ID NO: 25701
  source 1..80: mol_type = other DNA

SEQ ID NO: 60435 - DNA, 80 bp, synthetic construct; identical to SEQ ID NO: 25702
  source 1..80: mol_type = other DNA

SEQ ID NO: 60436 - DNA, 80 bp, synthetic construct; identical to SEQ ID NO: 10336
  source 1..80: mol_type = other DNA

SEQ ID NO: 60437 - DNA, 80 bp, synthetic construct; identical to SEQ ID NO: 25704
  source 1..80: mol_type = other DNA

SEQ ID NO: 60438 - DNA, 80 bp, synthetic construct; identical to SEQ ID NO: 25705
  source 1..80: mol_type = other DNA

SEQ ID NO: 60439 - DNA, 80 bp, synthetic construct; identical to SEQ ID NO: 25706
  source 1..80: mol_type = other DNA

SEQ ID NO: 60440 - DNA, 80 bp, synthetic construct; identical to SEQ ID NO: 25707
  source 1..80: mol_type = other DNA

SEQ ID NO: 60441 - DNA, 80 bp, synthetic construct; identical to SEQ ID NO: 10337
  source 1..80: mol_type = other DNA

SEQ ID NO: 60442 - DNA, 80 bp, synthetic construct; identical to SEQ ID NO: 25709
  source 1..80: mol_type = other DNA

SEQ ID NO: 60443 - DNA, 80 bp, synthetic construct; identical to SEQ ID NO: 25710
  source 1..80: mol_type = other DNA

SEQ ID NO: 60444 - DNA, 80 bp, synthetic construct; identical to SEQ ID NO: 25711
  source 1..80: mol_type = other DNA

SEQ ID NO: 60445 - DNA, 80 bp, synthetic construct; identical to SEQ ID NO: 10338
  source 1..80: mol_type = other DNA

SEQ ID NO: 60446 - DNA, 80 bp, synthetic construct; identical to SEQ ID NO: 25713
  source 1..80: mol_type = other DNA

SEQ ID NO: 60447 - DNA, 80 bp, synthetic construct; identical to SEQ ID NO: 25714
  source 1..80: mol_type = other DNA

SEQ ID NO: 60448 - DNA, 80 bp, synthetic construct; identical to SEQ ID NO: 25715
  source 1..80: mol_type = other DNA

SEQ ID NO: 60449 - DNA, 80 bp, synthetic construct; identical to SEQ ID NO: 10339
  source 1..80: mol_type = other DNA

SEQ ID NO: 60450 - DNA, 80 bp, synthetic construct; identical to SEQ ID NO: 25717
  source 1..80: mol_type = other DNA

SEQ ID NO: 60451 - DNA, 80 bp, synthetic construct; identical to SEQ ID NO: 25718
  source 1..80: mol_type = other DNA

SEQ ID NO: 60452 - DNA, 80 bp, synthetic construct; identical to SEQ ID NO: 25719
  source 1..80: mol_type = other DNA

SEQ ID NO: 60453 - DNA, 80 bp, synthetic construct; identical to SEQ ID NO: 10340
  source 1..80: mol_type = other DNA

SEQ ID NO: 60454 - DNA, 80 bp, synthetic construct; identical to SEQ ID NO: 25721
  source 1..80: mol_type = other DNA

SEQ ID NO: 60455 - DNA, 80 bp, synthetic construct; identical to SEQ ID NO: 25722
  source 1..80: mol_type = other DNA

SEQ ID NO: 60456 - DNA, 80 bp, synthetic construct; identical to SEQ ID NO: 25723
  source 1..80: mol_type = other DNA

SEQ ID NO: 60457 - DNA, 80 bp, synthetic construct; identical to SEQ ID NO: 10341
  source 1..80: mol_type = other DNA

SEQ ID NO: 60458 - DNA, 80 bp, synthetic construct; identical to SEQ ID NO: 25725
  source 1..80: mol_type = other DNA

SEQ ID NO: 60459 - DNA, 80 bp, synthetic construct; identical to SEQ ID NO: 25726
  source 1..80: mol_type = other DNA

SEQ ID NO: 60460 - DNA, 80 bp, synthetic construct; identical to SEQ ID NO: 25727
  source 1..80: mol_type = other DNA

SEQ ID NO: 60461 - DNA, 80 bp, synthetic construct; identical to SEQ ID NO: 10342
  source 1..80: mol_type = other DNA

SEQ ID NO: 60462 - DNA, 80 bp, synthetic construct; identical to SEQ ID NO: 25729
  source 1..80: mol_type = other DNA

SEQ ID NO: 60463 - DNA, 80 bp, synthetic construct; identical to SEQ ID NO: 25730
  source 1..80: mol_type = other DNA

SEQ ID NO: 60464 - DNA, 80 bp, synthetic construct; identical to SEQ ID NO: 25731
  source 1..80: mol_type = other DNA

SEQ ID NO: 60465 - DNA, 80 bp, synthetic construct; identical to SEQ ID NO: 10343
  source 1..80: mol_type = other DNA

SEQ ID NO: 60466 - DNA, 80 bp, synthetic construct; identical to SEQ ID NO: 25733
  source 1..80: mol_type = other DNA

SEQ ID NO: 60467 - DNA, 80 bp, synthetic construct; identical to SEQ ID NO: 25734
  source 1..80: mol_type = other DNA

SEQ ID NO: 60468 - DNA, 80 bp, synthetic construct; identical to SEQ ID NO: 25735
  source 1..80: mol_type = other DNA

SEQ ID NO: 60469 - DNA, 80 bp, synthetic construct; identical to SEQ ID NO: 10344
  source 1..80: mol_type = other DNA

SEQ ID NO: 60470 - DNA, 80 bp, synthetic construct; identical to SEQ ID NO: 25737
  source 1..80: mol_type = other DNA

SEQ ID NO: 60471 - DNA, 80 bp, synthetic construct; identical to SEQ ID NO: 25738
  source 1..80: mol_type = other DNA

SEQ ID NO: 60472 - DNA, 80 bp, synthetic construct; identical to SEQ ID NO: 25739
  source 1..80: mol_type = other DNA

SEQ ID NO: 60473 - DNA, 80 bp, synthetic construct; identical to SEQ ID NO: 10345
  source 1..80: mol_type = other DNA

SEQ ID NO: 60474 - DNA, 80 bp, synthetic construct; identical to SEQ ID NO: 25741
  source 1..80: mol_type = other DNA

SEQ ID NO: 60475 - DNA, 80 bp, synthetic construct; identical to SEQ ID NO: 25742
  source 1..80: mol_type = other DNA

SEQ ID NO: 60476 - DNA, 80 bp, synthetic construct; identical to SEQ ID NO: 25743
  source 1..80: mol_type = other DNA

SEQ ID NO: 60477 - DNA, 80 bp, synthetic construct; identical to SEQ ID NO: 10346
  source 1..80: mol_type = other DNA

SEQ ID NO: 60478 - DNA, 80 bp, synthetic construct; identical to SEQ ID NO: 25745
  source 1..80: mol_type = other DNA

SEQ ID NO: 60479 - DNA, 80 bp, synthetic construct; identical to SEQ ID NO: 25747
  source 1..80: mol_type = other DNA

SEQ ID NO: 60480 - DNA, 80 bp, synthetic construct; identical to SEQ ID NO: 10347
  source 1..80: mol_type = other DNA

SEQ ID NO: 60481 - DNA, 80 bp, synthetic construct; identical to SEQ ID NO: 25749
  source 1..80: mol_type = other DNA

SEQ ID NO: 60482 - DNA, 80 bp, synthetic construct; identical to SEQ ID NO: 25750
  source 1..80: mol_type = other DNA

SEQ ID NO: 60483 - DNA, 80 bp, synthetic construct; identical to SEQ ID NO: 25751
  source 1..80: mol_type = other DNA

SEQ ID NO: 60484 - DNA, 80 bp, synthetic construct; identical to SEQ ID NO: 10348
  source 1..80: mol_type = other DNA

SEQ ID NO: 60485 - DNA, 80 bp, synthetic construct; identical to SEQ ID NO: 25753
  source 1..80: mol_type = other DNA

SEQ ID NO: 60486 - DNA, 80 bp, synthetic construct; identical to SEQ ID NO: 25754
  source 1..80: mol_type = other DNA

SEQ ID NO: 60487 - DNA, 80 bp, synthetic construct; identical to SEQ ID NO: 25755
  source 1..80: mol_type = other DNA

SEQ ID NO: 60488 - DNA, 80 bp, synthetic construct; identical to SEQ ID NO: 25756
  source 1..80: mol_type = other DNA

SEQ ID NO: 60489 - DNA, 80 bp, synthetic construct; identical to SEQ ID NO: 10349
  source 1..80: mol_type = other DNA

SEQ ID NO: 60490 - DNA, 80 bp, synthetic construct; identical to SEQ ID NO: 25758
  source 1..80: mol_type = other DNA

SEQ ID NO: 60491 - DNA, 80 bp, synthetic construct; identical to SEQ ID NO: 25759
  source 1..80: mol_type = other DNA

SEQ ID NO: 60492 - DNA, 80 bp, synthetic construct; identical to SEQ ID NO: 25760
  source 1..80: mol_type = other DNA

SEQ ID NO: 60493 - DNA, 80 bp, synthetic construct; identical to SEQ ID NO: 10350
  source 1..80: mol_type = other DNA

SEQ ID NO: 60494 - DNA, 80 bp, synthetic construct; identical to SEQ ID NO: 25762
  source 1..80: mol_type = other DNA

SEQ ID NO: 60495 - DNA, 80 bp, synthetic construct; identical to SEQ ID NO: 25763
  source 1..80: mol_type = other DNA

SEQ ID NO: 60496 - DNA, 80 bp, synthetic construct; identical to SEQ ID NO: 10351
  source 1..80: mol_type = other DNA

SEQ ID NO: 60497 - DNA, 80 bp, synthetic construct; identical to SEQ ID NO: 25765
  source 1..80: mol_type = other DNA

SEQ ID NO: 60498 - DNA, 80 bp, synthetic construct; identical to SEQ ID NO: 25766
  source 1..80: mol_type = other DNA

SEQ ID NO: 60499 - DNA, 80 bp, synthetic construct; identical to SEQ ID NO: 25767
  source 1..80: mol_type = other DNA

SEQ ID NO: 60500 - DNA, 80 bp, synthetic construct; identical to SEQ ID NO: 10352
  source 1..80: mol_type = other DNA

SEQ ID NO: 60501 - DNA, 80 bp, synthetic construct; identical to SEQ ID NO: 25769
  source 1..80: mol_type = other DNA

SEQ ID NO: 60502 - DNA, 80 bp, synthetic construct; identical to SEQ ID NO: 25770
  source 1..80: mol_type = other DNA

SEQ ID NO: 60503 - DNA, 80 bp, synthetic construct; identical to SEQ ID NO: 25771
  source 1..80: mol_type = other DNA

SEQ ID NO: 60504 - DNA, 80 bp, synthetic construct; identical to SEQ ID NO: 10353
  source 1..80: mol_type = other DNA

SEQ ID NO: 60505 - DNA, 80 bp, synthetic construct; identical to SEQ ID NO: 25773
  source 1..80: mol_type = other DNA

SEQ ID NO: 60506 - DNA, 80 bp, synthetic construct; identical to SEQ ID NO: 25774
  source 1..80: mol_type = other DNA

SEQ ID NO: 60507 - DNA, 80 bp, synthetic construct; identical to SEQ ID NO: 25775
  source 1..80: mol_type = other DNA

SEQ ID NO: 60508 - DNA, 80 bp, synthetic construct; identical to SEQ ID NO: 25776
  source 1..80: mol_type = other DNA

SEQ ID NO: 60509 - DNA, 80 bp, synthetic construct; identical to SEQ ID NO: 10354
  source 1..80: mol_type = other DNA

SEQ ID NO: 60510 - DNA, 80 bp, synthetic construct; identical to SEQ ID NO: 25778
  source 1..80: mol_type = other DNA

SEQ ID NO: 60511 - DNA, 80 bp, synthetic construct; identical to SEQ ID NO: 25779
  source 1..80: mol_type = other DNA

SEQ ID NO: 60512 - DNA, 80 bp, synthetic construct; identical to SEQ ID NO: 25780
  source 1..80: mol_type = other DNA

SEQ ID NO: 60513 - DNA, 80 bp, synthetic construct; identical to SEQ ID NO: 10355
  source 1..80: mol_type = other DNA

SEQ ID NO: 60514 - DNA, 80 bp, synthetic construct; identical to SEQ ID NO: 25782
  source 1..80: mol_type = other DNA

SEQ ID NO: 60515 - DNA, 80 bp, synthetic construct; identical to SEQ ID NO: 25783
  source 1..80: mol_type = other DNA

SEQ ID NO: 60516 - DNA, 80 bp, synthetic construct; identical to SEQ ID NO: 25784
  source 1..80: mol_type = other DNA

SEQ ID NO: 60517 - DNA, 80 bp, synthetic construct; identical to SEQ ID NO: 25785
  source 1..80: mol_type = other DNA

SEQ ID NO: 60518 - DNA, 80 bp, synthetic construct; identical to SEQ ID NO: 10356
  source 1..80: mol_type = other DNA

SEQ ID NO: 60519 - DNA, 80 bp, synthetic construct; identical to SEQ ID NO: 25787
  source 1..80: mol_type = other DNA

SEQ ID NO: 60520 - DNA, 80 bp, synthetic construct; identical to SEQ ID NO: 25788
  source 1..80: mol_type = other DNA

SEQ ID NO: 60521 - DNA, 80 bp, synthetic construct; identical to SEQ ID NO: 25789
  source 1..80: mol_type = other DNA

SEQ ID NO: 60522 - DNA, 80 bp, synthetic construct; identical to SEQ ID NO: 25790
  source 1..80: mol_type = other DNA

SEQ ID NO: 60523 - DNA, 80 bp, synthetic construct; identical to SEQ ID NO: 10357
  source 1..80: mol_type = other DNA

SEQ ID NO: 60524 - DNA, 80 bp, synthetic construct; identical to SEQ ID NO: 25792
  source 1..80: mol_type = other DNA

SEQ ID NO: 60525 - DNA, 80 bp, synthetic construct; identical to SEQ ID NO: 25793
  source 1..80: mol_type = other DNA

SEQ ID NO: 60526 - DNA, 80 bp, synthetic construct; identical to SEQ ID NO: 25794
  source 1..80: mol_type = other DNA

SEQ ID NO: 60527 - DNA, 80 bp, synthetic construct; identical to SEQ ID NO: 10358
  source 1..80: mol_type = other DNA

SEQ ID NO: 60528 - DNA, 80 bp, synthetic construct; identical to SEQ ID NO: 25797
  source 1..80: mol_type = other DNA

SEQ ID NO: 60529 - DNA, 80 bp, synthetic construct; identical to SEQ ID NO: 25798
  source 1..80: mol_type = other DNA

SEQ ID NO: 60530 - DNA, 80 bp, synthetic construct; identical to SEQ ID NO: 25799
  source 1..80: mol_type = other DNA

SEQ ID NO: 60531 - DNA, 80 bp, synthetic construct; identical to SEQ ID NO: 10359
  source 1..80: mol_type = other DNA

SEQ ID NO: 60532 - DNA, 80 bp, synthetic construct; identical to SEQ ID NO: 25801
  source 1..80: mol_type = other DNA

SEQ ID NO: 60533 - DNA, 80 bp, synthetic construct; identical to SEQ ID NO: 10360
  source 1..80: mol_type = other DNA

SEQ ID NO: 60534 - DNA, 80 bp, synthetic construct; identical to SEQ ID NO: 25804
  source 1..80: mol_type = other DNA

SEQ ID NO: 60535 - DNA, 80 bp, synthetic construct; identical to SEQ ID NO: 25806
  source 1..80: mol_type = other DNA

SEQ ID NO: 60536 - DNA, 80 bp, synthetic construct; identical to SEQ ID NO: 25807
  source 1..80: mol_type = other DNA

SEQ ID NO: 60537 - DNA, 80 bp, synthetic construct; identical to SEQ ID NO: 10361
  source 1..80: mol_type = other DNA

SEQ ID NO: 60538 - DNA, 80 bp, synthetic construct; identical to SEQ ID NO: 25810
  source 1..80: mol_type = other DNA

SEQ ID NO: 60539 - DNA, 80 bp, synthetic construct; identical to SEQ ID NO: 10362
  source 1..80: mol_type = other DNA

SEQ ID NO: 60540 - DNA, 80 bp, synthetic construct; identical to SEQ ID NO: 25813
  source 1..80: mol_type = other DNA

SEQ ID NO: 60541 - DNA, 80 bp, synthetic construct; identical to SEQ ID NO: 25814
  source 1..80: mol_type = other DNA

SEQ ID NO: 60542 - DNA, 80 bp, synthetic construct; identical to SEQ ID NO: 10363
  source 1..80: mol_type = other DNA

SEQ ID NO: 60543 - DNA, 80 bp, synthetic construct; identical to SEQ ID NO: 25816
  source 1..80: mol_type = other DNA

SEQ ID NO: 60544 - DNA, 80 bp, synthetic construct; identical to SEQ ID NO: 25817
  source 1..80: mol_type = other DNA

SEQ ID NO: 60545 - DNA, 80 bp, synthetic construct; identical to SEQ ID NO: 25818
  source 1..80: mol_type = other DNA

SEQ ID NO: 60546 - DNA, 80 bp, synthetic construct; identical to SEQ ID NO: 10364
  source 1..80: mol_type = other DNA

SEQ ID NO: 60547 - DNA, 80 bp, synthetic construct; identical to SEQ ID NO: 25820
  source 1..80: mol_type = other DNA

SEQ ID NO: 60548 - DNA, 80 bp, synthetic construct; identical to SEQ ID NO: 25822
  source 1..80: mol_type = other DNA

SEQ ID NO: 60549 - DNA, 80 bp, synthetic construct; identical to SEQ ID NO: 25823
  source 1..80: mol_type = other DNA

SEQ ID NO: 60550 - DNA, 80 bp, synthetic construct; identical to SEQ ID NO: 10365
  source 1..80: mol_type = other DNA

SEQ ID NO: 60551 - DNA, 80 bp, synthetic construct; identical to SEQ ID NO: 25825
  source 1..80: mol_type = other DNA

SEQ ID NO: 60552 - DNA, 80 bp, synthetic construct; identical to SEQ ID NO: 25827
  source 1..80: mol_type = other DNA

SEQ ID NO: 60553 - DNA, 80 bp, synthetic construct; identical to SEQ ID NO: 10366
  source 1..80: mol_type = other DNA

SEQ ID NO: 60554 - DNA, 80 bp, synthetic construct; identical to SEQ ID NO: 25829
  source 1..80: mol_type = other DNA

SEQ ID NO: 60555 - DNA, 80 bp, synthetic construct; identical to SEQ ID NO: 25830
  source 1..80: mol_type = other DNA

SEQ ID NO: 60556 - DNA, 80 bp, synthetic construct; identical to SEQ ID NO: 10367
  source 1..80: mol_type = other DNA

SEQ ID NO: 60557 - DNA, 80 bp, synthetic construct; identical to SEQ ID NO: 25833
  source 1..80: mol_type = other DNA

SEQ ID NO: 60558 - DNA, 80 bp, synthetic construct; identical to SEQ ID NO: 25834
  source 1..80: mol_type = other DNA

SEQ ID NO: 60559 - DNA, 80 bp, synthetic construct; identical to SEQ ID NO: 25835
  source 1..80: mol_type = other DNA

SEQ ID NO: 60560 - DNA, 80 bp, synthetic construct; identical to SEQ ID NO: 10368
  source 1..80: mol_type = other DNA

SEQ ID NO: 60561 - DNA, 80 bp, synthetic construct; identical to SEQ ID NO: 25837
  source 1..80: mol_type = other DNA

SEQ ID NO: 60562 - DNA, 80 bp, synthetic construct; identical to SEQ ID NO: 25838
  source 1..80: mol_type = other DNA

SEQ ID NO: 60563 - DNA, 80 bp, synthetic construct; identical to SEQ ID NO: 25839
  source 1..80: mol_type = other DNA

SEQ ID NO: 60564 - DNA, 80 bp, synthetic construct; identical to SEQ ID NO: 10369
  source 1..80: mol_type = other DNA

SEQ ID NO: 60565 - DNA, 80 bp, synthetic construct; identical to SEQ ID NO: 25842
  source 1..80: mol_type = other DNA

SEQ ID NO: 60566 - DNA, 80 bp, synthetic construct; identical to SEQ ID NO: 25843
  source 1..80: mol_type = other DNA

SEQ ID NO: 60567 - DNA, 80 bp, synthetic construct; identical to SEQ ID NO: 10370
  source 1..80: mol_type = other DNA

SEQ ID NO: 60568 - DNA, 80 bp, synthetic construct; identical to SEQ ID NO: 25845
  source 1..80: mol_type = other DNA

SEQ ID NO: 60569 - DNA, 80 bp, synthetic construct; identical to SEQ ID NO: 25846
  source 1..80: mol_type = other DNA

SEQ ID NO: 60570 - DNA, 80 bp, synthetic construct; identical to SEQ ID NO: 25847
  source 1..80: mol_type = other DNA

SEQ ID NO: 60571 - DNA, 80 bp, synthetic construct; identical to SEQ ID NO: 25848
  source 1..80: mol_type = other DNA

SEQ ID NO: 60572 - DNA, 80 bp, synthetic construct; identical to SEQ ID NO: 10371
  source 1..80: mol_type = other DNA

SEQ ID NO: 60573 - DNA, 80 bp, synthetic construct; identical to SEQ ID NO: 25850
  source 1..80: mol_type = other DNA

SEQ ID NO: 60574 - DNA, 80 bp, synthetic construct; identical to SEQ ID NO: 25851
  source 1..80: mol_type = other DNA

SEQ ID NO: 60575 - DNA, 80 bp, synthetic construct; identical to SEQ ID NO: 25852
  source 1..80: mol_type = other DNA

SEQ ID NO: 60576 - DNA, 80 bp, synthetic construct; identical to SEQ ID NO: 10372
  source 1..80: mol_type = other DNA

SEQ ID NO: 60577 - DNA, 80 bp, synthetic construct; identical to SEQ ID NO: 25855
  source 1..80: mol_type = other DNA

SEQ ID NO: 60578 - DNA, 80 bp, synthetic construct; identical to SEQ ID NO: 25856
  source 1..80: mol_type = other DNA

SEQ ID NO: 60579 - DNA, 80 bp, synthetic construct; identical to SEQ ID NO: 10373
  source 1..80: mol_type = other DNA

SEQ ID NO: 60580 - DNA, 80 bp, synthetic construct; identical to SEQ ID NO: 25858
  source 1..80: mol_type = other DNA

SEQ ID NO: 60581 - DNA, 80 bp, synthetic construct; identical to SEQ ID NO: 25859
  source 1..80: mol_type = other DNA

SEQ ID NO: 60582 - DNA, 80 bp, synthetic construct; identical to SEQ ID NO: 10374
  source 1..80: mol_type = other DNA

SEQ ID NO: 60583 - DNA, 80 bp, synthetic construct; identical to SEQ ID NO: 25862
  source 1..80: mol_type = other DNA

SEQ ID NO: 60584 - DNA, 80 bp, synthetic construct; identical to SEQ ID NO: 25863
  source 1..80: mol_type = other DNA

SEQ ID NO: 60585 - DNA, 80 bp, synthetic construct; identical to SEQ ID NO: 10375
  source 1..80: mol_type = other DNA

SEQ ID NO: 60586 - DNA, 80 bp, synthetic construct; identical to SEQ ID NO: 25865
  source 1..80: mol_type = other DNA

SEQ ID NO: 60587 - DNA, 80 bp, synthetic construct; identical to SEQ ID NO: 25866
  source 1..80: mol_type = other DNA

SEQ ID NO: 60588 - DNA, 80 bp, synthetic construct; identical to SEQ ID NO: 25867
  source 1..80: mol_type = other DNA

SEQ ID NO: 60589 - DNA, 80 bp, synthetic construct; identical to SEQ ID NO: 10376
  source 1..80: mol_type = other DNA

SEQ ID NO: 60590 - DNA, 80 bp, synthetic construct; identical to SEQ ID NO: 25869
  source 1..80: mol_type = other DNA

SEQ ID NO: 60591 - DNA, 80 bp, synthetic construct; identical to SEQ ID NO: 25870
  source 1..80: mol_type = other DNA

SEQ ID NO: 60592 - DNA, 80 bp, synthetic construct; identical to SEQ ID NO: 25871
  source 1..80: mol_type = other DNA

SEQ ID NO: 60593 - DNA, 80 bp, synthetic construct; identical to SEQ ID NO: 10377
  source 1..80: mol_type = other DNA

SEQ ID NO: 60594 - DNA, 80 bp, synthetic construct; identical to SEQ ID NO: 25873
  source 1..80: mol_type = other DNA

SEQ ID NO: 60595 - DNA, 80 bp, synthetic construct; identical to SEQ ID NO: 25874
  source 1..80: mol_type = other DNA

SEQ ID NO: 60596 - DNA, 80 bp, synthetic construct; identical to SEQ ID NO: 25875
  source 1..80: mol_type = other DNA

SEQ ID NO: 60597 - DNA, 80 bp, synthetic construct; identical to SEQ ID NO: 25877
  source 1..80: mol_type = other DNA

SEQ ID NO: 60598 - DNA, 80 bp, synthetic construct; identical to SEQ ID NO: 10378
  source 1..80: mol_type = other DNA

SEQ ID NO: 60599 - DNA, 80 bp, synthetic construct; identical to SEQ ID NO: 25879
  source 1..80: mol_type = other DNA

SEQ ID NO: 60600 - DNA, 80 bp, synthetic construct; identical to SEQ ID NO: 25880
  source 1..80: mol_type = other DNA

SEQ ID NO: 60601 - DNA, 80 bp, synthetic construct; identical to SEQ ID NO: 25881
  source 1..80: mol_type = other DNA

SEQ ID NO: 60602 - DNA, 80 bp, synthetic construct; identical to SEQ ID NO: 25882
  source 1..80: mol_type = other DNA

SEQ ID NO: 60603 - DNA, 80 bp, synthetic construct; identical to SEQ ID NO: 10379
  source 1..80: mol_type = other DNA

SEQ ID NO: 60604 - DNA, 80 bp, synthetic construct; identical to SEQ ID NO: 25884
  source 1..80: mol_type = other DNA

SEQ ID NO: 60605 - DNA, 80 bp, synthetic construct; identical to SEQ ID NO: 25885
  source 1..80: mol_type = other DNA

SEQ ID NO: 60606 - DNA, 80 bp, synthetic construct; identical to SEQ ID NO: 25886
  source 1..80: mol_type = other DNA

SEQ ID NO: 60607 - DNA, 80 bp, synthetic construct; identical to SEQ ID NO: 10380
  source 1..80: mol_type = other DNA

SEQ ID NO: 60608 - DNA, 80 bp, synthetic construct; identical to SEQ ID NO: 25888
  source 1..80: mol_type = other DNA

SEQ ID NO: 60609 - DNA, 80 bp, synthetic construct; identical to SEQ ID NO: 25889
  source 1..80: mol_type = other DNA

SEQ ID NO: 60610 - DNA, 80 bp, synthetic construct; identical to SEQ ID NO: 25890
  source 1..80: mol_type = other DNA

SEQ ID NO: 60611 - DNA, 80 bp, synthetic construct; identical to SEQ ID NO: 25891
  source 1..80: mol_type = other DNA

SEQ ID NO: 60612 - DNA, 80 bp, synthetic construct; identical to SEQ ID NO: 10381
  source 1..80: mol_type = other DNA

SEQ ID NO: 60613 - DNA, 80 bp, synthetic construct; identical to SEQ ID NO: 25893
  source 1..80: mol_type = other DNA

SEQ ID NO: 60614 - DNA, 80 bp, synthetic construct; identical to SEQ ID NO: 25894
  source 1..80: mol_type = other DNA

SEQ ID NO: 60615 - DNA, 80 bp, synthetic construct; identical to SEQ ID NO: 10382
  source 1..80: mol_type = other DNA

SEQ ID NO: 60616 - DNA, 80 bp, synthetic construct; identical to SEQ ID NO: 25896
  source 1..80: mol_type = other DNA

SEQ ID NO: 60617 - DNA, 80 bp, synthetic construct; identical to SEQ ID NO: 25897
  source 1..80: mol_type = other DNA

SEQ ID NO: 60618 - DNA, 80 bp, synthetic construct; identical to SEQ ID NO: 25898
  source 1..80: mol_type = other DNA

SEQ ID NO: 60619 - DNA, 80 bp, synthetic construct; identical to SEQ ID NO: 25899
  source 1..80: mol_type = other DNA

SEQ ID NO: 60620 - DNA, 80 bp, synthetic construct; identical to SEQ ID NO: 25901
  source 1..80: mol_type = other DNA

SEQ ID NO: 60621 - DNA, 80 bp, synthetic construct; identical to SEQ ID NO: 25902
  source 1..80: mol_type = other DNA

SEQ ID NO: 60622 - DNA, 80 bp, synthetic construct; identical to SEQ ID NO: 10384
  source 1..80: mol_type = other DNA

SEQ ID NO: 60623 - DNA, 80 bp, synthetic construct; identical to SEQ ID NO: 25905
  source 1..80: mol_type = other DNA

SEQ ID NO: 60624 - DNA, 80 bp, synthetic construct; identical to SEQ ID NO: 10385
  source 1..80: mol_type = other DNA

SEQ ID NO: 60625 - DNA, 80 bp, synthetic construct; identical to SEQ ID NO: 25908
  source 1..80: mol_type = other DNA

SEQ ID NO: 60626 - DNA, 80 bp, synthetic construct; identical to SEQ ID NO: 25909
  source 1..80: mol_type = other DNA

SEQ ID NO: 60627 - DNA, 80 bp, synthetic construct; identical to SEQ ID NO: 25910
  source 1..80: mol_type = other DNA

SEQ ID NO: 60628 - DNA, 80 bp, synthetic construct; identical to SEQ ID NO: 25911
  source 1..80: mol_type = other DNA

SEQ ID NO: 60629 - DNA, 80 bp, synthetic construct; identical to SEQ ID NO: 10386
  source 1..80: mol_type = other DNA

SEQ ID NO: 60630 - DNA, 80 bp, synthetic construct; identical to SEQ ID NO: 25913
  source 1..80: mol_type = other DNA

SEQ ID NO: 60631 - DNA, 80 bp, synthetic construct; identical to SEQ ID NO: 25914
  source 1..80: mol_type = other DNA

SEQ ID NO: 60632 - DNA, 80 bp, synthetic construct; identical to SEQ ID NO: 25915
  source 1..80: mol_type = other DNA

SEQ ID NO: 60633 - DNA, 80 bp, synthetic construct; identical to SEQ ID NO: 10387
  source 1..80: mol_type = other DNA

SEQ ID NO: 60634 - DNA, 80 bp, synthetic construct; identical to SEQ ID NO: 25917
  source 1..80: mol_type = other DNA

SEQ ID NO: 60635 - DNA, 80 bp, synthetic construct; identical to SEQ ID NO: 25918
  source 1..80: mol_type = other DNA

SEQ ID NO: 60636 - DNA, 80 bp, synthetic construct; identical to SEQ ID NO: 25919
  source 1..80: mol_type = other DNA

SEQ ID NO: 60637 - DNA, 80 bp, synthetic construct; identical to SEQ ID NO: 10388
  source 1..80: mol_type = other DNA

SEQ ID NO: 60638 - DNA, 80 bp, synthetic construct; identical to SEQ ID NO: 25921
  source 1..80: mol_type = other DNA

SEQ ID NO: 60639 - DNA, 80 bp, synthetic construct; identical to SEQ ID NO: 25922
  source 1..80: mol_type = other DNA

SEQ ID NO: 60640 - DNA, 80 bp, synthetic construct; identical to SEQ ID NO: 25923
  source 1..80: mol_type = other DNA

SEQ ID NO: 60641 - DNA, 80 bp, synthetic construct; identical to SEQ ID NO: 10389
  source 1..80: mol_type = other DNA

SEQ ID NO: 60642 - DNA, 80 bp, synthetic construct; identical to SEQ ID NO: 25925
  source 1..80: mol_type = other DNA

SEQ ID NO: 60643 - DNA, 80 bp, synthetic construct; identical to SEQ ID NO: 25926
  source 1..80: mol_type = other DNA

SEQ ID NO: 60644 - DNA, 80 bp, synthetic construct; identical to SEQ ID NO: 25927
  source 1..80: mol_type = other DNA

SEQ ID NO: 60645 - DNA, 80 bp, synthetic construct; identical to SEQ ID NO: 10390
  source 1..80: mol_type = other DNA

SEQ ID NO: 60646 - DNA, 80 bp, synthetic construct; identical to SEQ ID NO: 25929
  source 1..80: mol_type = other DNA

SEQ ID NO: 60647 - DNA, 80 bp, synthetic construct; identical to SEQ ID NO: 25930
  source 1..80: mol_type = other DNA

SEQ ID NO: 60648 - DNA, 80 bp, synthetic construct; identical to SEQ ID NO: 25931
  source 1..80: mol_type = other DNA

SEQ ID NO: 60649 - DNA, 80 bp, synthetic construct; identical to SEQ ID NO: 25932
  source 1..80: mol_type = other DNA

SEQ ID NO: 60650 - DNA, 80 bp, synthetic construct; identical to SEQ ID NO: 10391
  source 1..80: mol_type = other DNA

SEQ ID NO: 60651 - DNA, 80 bp, synthetic construct; identical to SEQ ID NO: 25934
  source 1..80: mol_type = other DNA

SEQ ID NO: 60652 - DNA, 80 bp, synthetic construct; identical to SEQ ID NO: 25935
  source 1..80: mol_type = other DNA

SEQ ID NO: 60653 - DNA, 80 bp, synthetic construct; identical to SEQ ID NO: 25936
  source 1..80: mol_type = other DNA

SEQ ID NO: 60654 - DNA, 80 bp, synthetic construct; identical to SEQ ID NO: 25937
  source 1..80: mol_type = other DNA

SEQ ID NO: 60655 - DNA, 80 bp, synthetic construct; identical to SEQ ID NO: 10392
  source 1..80: mol_type = other DNA

SEQ ID NO: 60656 - DNA, 80 bp, synthetic construct; identical to SEQ ID NO: 25939
  source 1..80: mol_type = other DNA

SEQ ID NO: 60657 - DNA, 80 bp, synthetic construct; identical to SEQ ID NO: 25940
  source 1..80: mol_type = other DNA

SEQ ID NO: 60658 - DNA, 80 bp, synthetic construct; identical to SEQ ID NO: 25941
  source 1..80: mol_type = other DNA

SEQ ID NO: 60659 - DNA, 80 bp, synthetic construct; identical to SEQ ID NO: 10393
  source 1..80: mol_type = other DNA

SEQ ID NO: 60660 - DNA, 80 bp, synthetic construct; identical to SEQ ID NO: 25943
  source 1..80: mol_type = other DNA

SEQ ID NO: 60661 - DNA, 80 bp, synthetic construct; identical to SEQ ID NO: 25944
  source 1..80: mol_type = other DNA

SEQ ID NO: 60662 - DNA, 80 bp, synthetic construct; identical to SEQ ID NO: 10394
  source 1..80: mol_type = other DNA

SEQ ID NO: 60663 - DNA, 80 bp, synthetic construct; identical to SEQ ID NO: 25946
  source 1..80: mol_type = other DNA

SEQ ID NO: 60664 - DNA, 80 bp, synthetic construct; identical to SEQ ID NO: 25947
  source 1..80: mol_type = other DNA

SEQ ID NO: 60665 - DNA, 80 bp, synthetic construct; identical to SEQ ID NO: 25948
  source 1..80: mol_type = other DNA

SEQ ID NO: 60666 - DNA, 80 bp, synthetic construct; identical to SEQ ID NO: 10395
  source 1..80: mol_type = other DNA

SEQ ID NO: 60667 - DNA, 80 bp, synthetic construct; identical to SEQ ID NO: 25951
  source 1..80: mol_type = other DNA

SEQ ID NO: 60668 - DNA, 80 bp, synthetic construct; identical to SEQ ID NO: 10396
  source 1..80: mol_type = other DNA

SEQ ID NO: 60669 - DNA, 80 bp, synthetic construct; identical to SEQ ID NO: 25954
  source 1..80: mol_type = other DNA

SEQ ID NO: 60670 - DNA, 80 bp, synthetic construct; identical to SEQ ID NO: 25955
  source 1..80: mol_type = other DNA

SEQ ID NO: 60671 - DNA, 80 bp, synthetic construct; identical to SEQ ID NO: 25956
  source 1..80: mol_type = other DNA

SEQ ID NO: 60672 - DNA, 80 bp, synthetic construct; identical to SEQ ID NO: 10397
  source 1..80: mol_type = other DNA

SEQ ID NO: 60673 - DNA, 80 bp, synthetic construct; identical to SEQ ID NO: 25958
  source 1..80: mol_type = other DNA

SEQ ID NO: 60674 - DNA, 80 bp, synthetic construct; identical to SEQ ID NO: 25959
  source 1..80: mol_type = other DNA

SEQ ID NO: 60675 - DNA, 80 bp, synthetic construct; identical to SEQ ID NO: 25960
  source 1..80: mol_type = other DNA

SEQ ID NO: 60676 - DNA, 80 bp, synthetic construct; identical to SEQ ID NO: 10398
  source 1..80: mol_type = other DNA

SEQ ID NO: 60677 - DNA, 80 bp, synthetic construct; identical to SEQ ID NO: 25963
  source 1..80: mol_type = other DNA

SEQ ID NO: 60678 - DNA, 80 bp, synthetic construct; identical to SEQ ID NO: 25964
  source 1..80: mol_type = other DNA

SEQ ID NO: 60679 - DNA, 80 bp, synthetic construct; identical to SEQ ID NO: 10399
  source 1..80: mol_type = other DNA

SEQ ID NO: 60680 - DNA, 80 bp, synthetic construct; identical to SEQ ID NO: 25966
  source 1..80: mol_type = other DNA

SEQ ID NO: 60681 - DNA, 80 bp, synthetic construct; identical to SEQ ID NO: 25967
  source 1..80: mol_type = other DNA

SEQ ID NO: 60682 - DNA, 80 bp, synthetic construct; identical to SEQ ID NO: 25968
  source 1..80: mol_type = other DNA

SEQ ID NO: 60683 - DNA, 80 bp, synthetic construct; identical to SEQ ID NO: 25969
  source 1..80: mol_type = other DNA

SEQ ID NO: 60684 - DNA, 80 bp, synthetic construct; identical to SEQ ID NO: 10400
  source 1..80: mol_type = other DNA

SEQ ID NO: 60685 - DNA, 80 bp, synthetic construct; identical to SEQ ID NO: 25971
  source 1..80: mol_type = other DNA

SEQ ID NO: 60686 - DNA, 80 bp, synthetic construct; identical to SEQ ID NO: 25972
  source 1..80: mol_type = other DNA

SEQ ID NO: 60687 - DNA, 80 bp, synthetic construct; identical to SEQ ID NO: 25973
  source 1..80: mol_type = other DNA

SEQ ID NO: 60688 - DNA, 80 bp, synthetic construct; identical to SEQ ID NO: 10401
  source 1..80: mol_type = other DNA

SEQ ID NO: 60689 - DNA, 80 bp, synthetic construct; identical to SEQ ID NO: 25975
  source 1..80: mol_type = other DNA

SEQ ID NO: 60690 - DNA, 80 bp, synthetic construct; identical to SEQ ID NO: 10402
  source 1..80: mol_type = other DNA

SEQ ID NO: 60691 - DNA, 80 bp, synthetic construct; identical to SEQ ID NO: 25978
  source 1..80: mol_type = other DNA

SEQ ID NO: 60692 - DNA, 80 bp, synthetic construct; identical to SEQ ID NO: 25979
  source 1..80: mol_type = other DNA

SEQ ID NO: 60693 - DNA, 80 bp, synthetic construct; identical to SEQ ID NO: 25980
  source 1..80: mol_type = other DNA

SEQ ID NO: 60694 - DNA, 80 bp, synthetic construct; identical to SEQ ID NO: 10403
  source 1..80: mol_type = other DNA

SEQ ID NO: 60695 - DNA, 80 bp, synthetic construct; identical to SEQ ID NO: 25982
  source 1..80: mol_type = other DNA

SEQ ID NO: 60696 - DNA, 80 bp, synthetic construct; identical to SEQ ID NO: 25983
  source 1..80: mol_type = other DNA

SEQ ID NO: 60697 - DNA, 80 bp, synthetic construct; identical to SEQ ID NO: 25984
  source 1..80: mol_type = other DNA

SEQ ID NO: 60698 - DNA, 80 bp, synthetic construct; identical to SEQ ID NO: 10404
  source 1..80: mol_type = other DNA

SEQ ID NO: 60699 - DNA, 80 bp, synthetic construct; identical to SEQ ID NO: 25986
  source 1..80: mol_type = other DNA

SEQ ID NO: 60700 - DNA, 80 bp, synthetic construct; identical to SEQ ID NO: 25987
  source 1..80: mol_type = other DNA

SEQ ID NO: 60701 - DNA, 80 bp, synthetic construct; identical to SEQ ID NO: 25988
  source 1..80: mol_type = other DNA

SEQ ID NO: 60702 - DNA, 80 bp, synthetic construct; identical to SEQ ID NO: 25989
  source 1..80: mol_type = other DNA

SEQ ID NO: 60703 - DNA, 80 bp, synthetic construct; identical to SEQ ID NO: 10405
  source 1..80: mol_type = other DNA

SEQ ID NO: 60704 - DNA, 80 bp, synthetic construct; identical to SEQ ID NO: 25991
  source 1..80: mol_type = other DNA

SEQ ID NO: 60705 - DNA, 80 bp, synthetic construct; identical to SEQ ID NO: 25992
  source 1..80: mol_type = other DNA

SEQ ID NO: 60706 - DNA, 80 bp, synthetic construct; identical to SEQ ID NO: 25993
  source 1..80: mol_type = other DNA

SEQ ID NO: 60707 - DNA, 80 bp, synthetic construct; identical to SEQ ID NO: 10406
  source 1..80: mol_type = other DNA

SEQ ID NO: 60708 - DNA, 80 bp, synthetic construct; identical to SEQ ID NO: 10424
  source 1..80: mol_type = other DNA

SEQ ID NO: 60709 - DNA, 80 bp, synthetic construct; identical to SEQ ID NO: 25996
  source 1..80: mol_type = other DNA

SEQ ID NO: 60710 - DNA, 80 bp, synthetic construct; identical to SEQ ID NO: 25997
  source 1..80: mol_type = other DNA

SEQ ID NO: 60711 - DNA, 80 bp, synthetic construct; identical to SEQ ID NO: 10407
  source 1..80: mol_type = other DNA

SEQ ID NO: 60712 - DNA, 80 bp, synthetic construct; identical to SEQ ID NO: 25999
  source 1..80: mol_type = other DNA

SEQ ID NO: 60713 - DNA, 80 bp, synthetic construct; identical to SEQ ID NO: 26000
  source 1..80: mol_type = other DNA

SEQ ID NO: 60714 - DNA, 80 bp, synthetic construct; identical to SEQ ID NO: 10408
  source 1..80: mol_type = other DNA

SEQ ID NO: 60715 - DNA, 80 bp, synthetic construct; identical to SEQ ID NO: 26003
  source 1..80: mol_type = other DNA

SEQ ID NO: 60716 - DNA, 80 bp, synthetic construct; identical to SEQ ID NO: 26004
  source 1..80: mol_type = other DNA

SEQ ID NO: 60717 - DNA, 80 bp, synthetic construct; identical to SEQ ID NO: 26005
  source 1..80: mol_type = other DNA

SEQ ID NO: 60718 - DNA, 80 bp, synthetic construct; identical to SEQ ID NO: 10409
  source 1..80: mol_type = other DNA

SEQ ID NO: 60719 - DNA, 80 bp, synthetic construct; identical to SEQ ID NO: 26007
  source 1..80: mol_type = other DNA

SEQ ID NO: 60720 - DNA, 80 bp, synthetic construct; identical to SEQ ID NO: 26008
  source 1..80: mol_type = other DNA

SEQ ID NO: 60721 - DNA, 80 bp, synthetic construct; identical to SEQ ID NO: 26009
  source 1..80: mol_type = other DNA

SEQ ID NO: 60722 - DNA, 80 bp, synthetic construct; identical to SEQ ID NO: 10410
  source 1..80: mol_type = other DNA

SEQ ID NO: 60723 - DNA, 80 bp, synthetic construct; identical to SEQ ID NO: 26011
  source 1..80: mol_type = other DNA

SEQ ID NO: 60724 - DNA, 80 bp, synthetic construct; identical to SEQ ID NO: 26012
  source 1..80: mol_type = other DNA

SEQ ID NO: 60725 - DNA, 80 bp, synthetic construct; identical to SEQ ID NO: 26013
  source 1..80: mol_type = other DNA

SEQ ID NO: 60726 - DNA, 80 bp, synthetic construct; identical to SEQ ID NO: 10411
  source 1..80: mol_type = other DNA

SEQ ID NO: 60727 - DNA, 80 bp, synthetic construct; identical to SEQ ID NO: 26015
  source 1..80: mol_type = other DNA

SEQ ID NO: 60728 - DNA, 80 bp, synthetic construct; identical to SEQ ID NO: 26016
  source 1..80: mol_type = other DNA

SEQ ID NO: 60729 - DNA, 80 bp, synthetic construct; identical to SEQ ID NO: 26017
  source 1..80: mol_type = other DNA

SEQ ID NO: 60730 - DNA, 80 bp, synthetic construct; identical to SEQ ID NO: 10412
  source 1..80: mol_type = other DNA

SEQ ID NO: 60731 - DNA, 80 bp, synthetic construct; identical to SEQ ID NO: 26019
  source 1..80: mol_type = other DNA

SEQ ID NO: 60732 - DNA, 80 bp, synthetic construct; identical to SEQ ID NO: 26020
  source 1..80: mol_type = other DNA

SEQ ID NO: 60733 - DNA, 80 bp, synthetic construct; identical to SEQ ID NO: 26021
  source 1..80: mol_type = other DNA

SEQ ID NO: 60734 - DNA, 80 bp, synthetic construct; identical to SEQ ID NO: 10413
  source 1..80: mol_type = other DNA

SEQ ID NO: 60735 - DNA, 80 bp, synthetic construct; identical to SEQ ID NO: 26023
  source 1..80: mol_type = other DNA

SEQ ID NO: 60736 - DNA, 80 bp, synthetic construct; identical to SEQ ID NO: 26024
  source 1..80: mol_type = other DNA

SEQ ID NO: 60737 - DNA, 80 bp, synthetic construct; identical to SEQ ID NO: 26026
  source 1..80: mol_type = other DNA

SEQ ID NO: 60738 - DNA, 80 bp, synthetic construct; identical to SEQ ID NO: 10414
  source 1..80: mol_type = other DNA

SEQ ID NO: 60739 - DNA, 80 bp, synthetic construct; identical to SEQ ID NO: 26028
  source 1..80: mol_type = other DNA

SEQ ID NO: 60740 - DNA, 80 bp, synthetic construct; identical to SEQ ID NO: 26029
  source 1..80: mol_type = other DNA

SEQ ID NO: 60741 - DNA, 80 bp, synthetic construct; identical to SEQ ID NO: 10415
  source 1..80: mol_type = other DNA

SEQ ID NO: 60742 - DNA, 80 bp, synthetic construct; identical to SEQ ID NO: 26031
  source 1..80: mol_type = other DNA

SEQ ID NO: 60743 - DNA, 80 bp, synthetic construct; identical to SEQ ID NO: 26032
  source 1..80: mol_type = other DNA

SEQ ID NO: 60744 - DNA, 80 bp, synthetic construct; identical to SEQ ID NO: 26033
  source 1..80: mol_type = other DNA

SEQ ID NO: 60745 - DNA, 80 bp, synthetic construct; identical to SEQ ID NO: 10416
  source 1..80: mol_type = other DNA

SEQ ID NO: 60746 - DNA, 80 bp, synthetic construct; identical to SEQ ID NO: 26035
  source 1..80: mol_type = other DNA

SEQ ID NO: 60747 - DNA, 80 bp, synthetic construct; identical to SEQ ID NO: 26036
  source 1..80: mol_type = other DNA

SEQ ID NO: 60748 - DNA, 80 bp, synthetic construct; identical to SEQ ID NO: 26037
  source 1..80: mol_type = other DNA

SEQ ID NO: 60749 - DNA, 80 bp, synthetic construct; identical to SEQ ID NO: 26038
  source 1..80: mol_type = other DNA

SEQ ID NO: 60750 - DNA, 80 bp, synthetic construct; identical to SEQ ID NO: 10417
  source 1..80: mol_type = other DNA

SEQ ID NO: 60751 - DNA, 80 bp, synthetic construct; identical to SEQ ID NO: 26040
  source 1..80: mol_type = other DNA

SEQ ID NO: 60752 - DNA, 80 bp, synthetic construct; identical to SEQ ID NO: 26041
  source 1..80: mol_type = other DNA

SEQ ID NO: 60753 - DNA, 80 bp, synthetic construct; identical to SEQ ID NO: 10418
  source 1..80: mol_type = other DNA

SEQ ID NO: 60754 - DNA, 80 bp, synthetic construct; identical to SEQ ID NO: 26043
  source 1..80: mol_type = other DNA

SEQ ID NO: 60755 - DNA, 80 bp, synthetic construct; identical to SEQ ID NO: 26044
  source 1..80: mol_type = other DNA

SEQ ID NO: 60756 - DNA, 80 bp, synthetic construct; identical to SEQ ID NO: 26045
  source 1..80: mol_type = other DNA

SEQ ID NO: 60757 - DNA, 80 bp, synthetic construct; identical to SEQ ID NO: 10419
  source 1..80: mol_type = other DNA

SEQ ID NO: 60758 - DNA, 80 bp, synthetic construct; identical to SEQ ID NO: 26047
  source 1..80: mol_type = other DNA

SEQ ID NO: 60759 - DNA, 80 bp, synthetic construct; identical to SEQ ID NO: 26048
  source 1..80: mol_type = other DNA

SEQ ID NO: 60760 - DNA, 80 bp, synthetic construct; identical to SEQ ID NO: 26049
  source 1..80: mol_type = other DNA

SEQ ID NO: 60761 - DNA, 80 bp, synthetic construct; identical to SEQ ID NO: 10420
  source 1..80: mol_type = other DNA

SEQ ID NO: 60762 - DNA, 80 bp, synthetic construct; identical to SEQ ID NO: 26051
  source 1..80: mol_type = other DNA

SEQ ID NO: 60763 - DNA, 80 bp, synthetic construct; identical to SEQ ID NO: 26052
  source 1..80: mol_type = other DNA

SEQ ID NO: 60764 - DNA, 80 bp, synthetic construct; identical to SEQ ID NO: 26053
  source 1..80: mol_type = other DNA

SEQ ID NO: 60765 - DNA, 80 bp, synthetic construct; identical to SEQ ID NO: 26054
  source 1..80: mol_type = other DNA

SEQ ID NO: 60766 - DNA, 80 bp, synthetic construct; identical to SEQ ID NO: 10421
  source 1..80: mol_type = other DNA

SEQ ID NO: 60767 - DNA, 80 bp, synthetic construct; identical to SEQ ID NO: 26056
  source 1..80: mol_type = other DNA

SEQ ID NO: 60768 - DNA, 80 bp, synthetic construct; identical to SEQ ID NO: 26057
  source 1..80: mol_type = other DNA

SEQ ID NO: 60769 - DNA, 80 bp, synthetic construct; identical to SEQ ID NO: 26058
  source 1..80: mol_type = other DNA

SEQ ID NO: 60770 - DNA, 80 bp, synthetic construct; identical to SEQ ID NO: 26059
  source 1..80: mol_type = other DNA

SEQ ID NO: 60771 - DNA, 80 bp, synthetic construct; identical to SEQ ID NO: 10422
  source 1..80: mol_type = other DNA

SEQ ID NO: 60772 - DNA, 80 bp, synthetic construct; identical to SEQ ID NO: 26061
  source 1..80: mol_type = other DNA

SEQ ID NO: 60773 - DNA, 80 bp, synthetic construct; identical to SEQ ID NO: 26062
  source 1..80: mol_type = other DNA

SEQ ID NO: 60774 - DNA, 80 bp, synthetic construct; identical to SEQ ID NO: 26063
  source 1..80: mol_type = other DNA

SEQ ID NO: 60775 - DNA, 80 bp, synthetic construct; identical to SEQ ID NO: 10423
  source 1..80: mol_type = other DNA

SEQ ID NO: 60776 - DNA, 80 bp, synthetic construct; identical to SEQ ID NO: 26065
  source 1..80: mol_type = other DNA

SEQ ID NO: 60777 - DNA, 80 bp, synthetic construct; identical to SEQ ID NO: 26066
  source 1..80: mol_type = other DNA

SEQ ID NO: 60778 - DNA, 80 bp, synthetic construct; identical to SEQ ID NO: 26067
  source 1..80: mol_type = other DNA

SEQ ID NO: 60779 - DNA, 80 bp, synthetic construct; identical to SEQ ID NO: 26068
  source 1..80: mol_type = other DNA

SEQ ID NO: 60780 - DNA, 80 bp, synthetic construct; identical to SEQ ID NO: 26069
  source 1..80: mol_type = other DNA

SEQ ID NO: 60781 - DNA, 80 bp, synthetic construct; identical to SEQ ID NO: 26070
  source 1..80: mol_type = other DNA

SEQ ID NO: 60782 - DNA, 80 bp, synthetic construct; identical to SEQ ID NO: 10425
  source 1..80: mol_type = other DNA

SEQ ID NO: 60783 - DNA, 80 bp, synthetic construct; identical to SEQ ID NO: 26072
  source 1..80: mol_type = other DNA

SEQ ID NO: 60784 - DNA, 80 bp, synthetic construct; identical to SEQ ID NO: 26073
  source 1..80: mol_type = other DNA

SEQ ID NO: 60785 - DNA, 80 bp, synthetic construct; identical to SEQ ID NO: 26074
  source 1..80: mol_type = other DNA

SEQ ID NO: 60786 - DNA, 80 bp, synthetic construct; identical to SEQ ID NO: 10426
  source 1..80: mol_type = other DNA

SEQ ID NO: 60787 - DNA, 80 bp, synthetic construct; identical to SEQ ID NO: 26076
  source 1..80: mol_type = other DNA

SEQ ID NO: 60788 - DNA, 80 bp, synthetic construct; identical to SEQ ID NO: 26077
  source 1..80: mol_type = other DNA

SEQ ID NO: 60789 - DNA, 80 bp, synthetic construct; identical to SEQ ID NO: 26078
  source 1..80: mol_type = other DNA

SEQ ID NO: 60790 - DNA, 80 bp, synthetic construct; identical to SEQ ID NO: 10427
  source 1..80: mol_type = other DNA

SEQ ID NO: 60791 - DNA, 80 bp, synthetic construct; identical to SEQ ID NO: 26080
  source 1..80: mol_type = other DNA

SEQ ID NO: 60792 - DNA, 80 bp, synthetic construct; identical to SEQ ID NO: 26081
  source 1..80: mol_type = other DNA

SEQ ID NO: 60793 - DNA, 80 bp, synthetic construct; identical to SEQ ID NO: 26082
  source 1..80: mol_type = other DNA

SEQ ID NO: 60794 - DNA, 80 bp, synthetic construct; identical to SEQ ID NO: 10428
  source 1..80: mol_type = other DNA

SEQ ID NO: 60795 - DNA, 80 bp, synthetic construct; identical to SEQ ID NO: 26084
  source 1..80: mol_type = other DNA

SEQ ID NO: 60796 - DNA, 80 bp, synthetic construct; identical to SEQ ID NO: 26085
  source 1..80: mol_type = other DNA

SEQ ID NO: 60797 - DNA, 80 bp, synthetic construct; identical to SEQ ID NO: 26086
  source 1..80: mol_type = other DNA

SEQ ID NO: 60798 - DNA, 80 bp, synthetic construct; identical to SEQ ID NO: 10429
  source 1..80: mol_type = other DNA

SEQ ID NO: 60799 - DNA, 80 bp, synthetic construct; identical to SEQ ID NO: 26088
  source 1..80: mol_type = other DNA

SEQ ID NO: 60800 - DNA, 80 bp, synthetic construct; identical to SEQ ID NO: 26089
  source 1..80: mol_type = other DNA

SEQ ID NO: 60801 - DNA, 80 bp, synthetic construct; identical to SEQ ID NO: 26090
  source 1..80: mol_type = other DNA

SEQ ID NO: 60802 - DNA, 80 bp, synthetic construct; identical to SEQ ID NO: 26091
  source 1..80: mol_type = other DNA

SEQ ID NO: 60803 - DNA, 80 bp, synthetic construct; identical to SEQ ID NO: 10430
  source 1..80: mol_type = other DNA

SEQ ID NO: 60804 - DNA, 80 bp, synthetic construct; identical to SEQ ID NO: 26093
  source 1..80: mol_type = other DNA

SEQ ID NO: 60805 - DNA, 80 bp, synthetic construct; identical to SEQ ID NO: 26094
  source 1..80: mol_type = other DNA

SEQ ID NO: 60806 - DNA, 80 bp, synthetic construct; identical to SEQ ID NO: 10431
  source 1..80: mol_type = other DNA

SEQ ID NO: 60807 - DNA, 80 bp, synthetic construct; identical to SEQ ID NO: 26096
  source 1..80: mol_type = other DNA

SEQ ID NO: 60808 - DNA, 80 bp, synthetic construct; identical to SEQ ID NO: 26097
  source 1..80: mol_type = other DNA

SEQ ID NO: 60809 - DNA, 80 bp, synthetic construct; identical to SEQ ID NO: 26098
  source 1..80: mol_type = other DNA

SEQ ID NO: 60810 - DNA, 80 bp, synthetic construct; identical to SEQ ID NO: 10432
  source 1..80: mol_type = other DNA

SEQ ID NO: 60811 - DNA, 80 bp, synthetic construct; identical to SEQ ID NO: 26101
  source 1..80: mol_type = other DNA

SEQ ID NO: 60812 - DNA, 80 bp, synthetic construct; identical to SEQ ID NO: 26102
  source 1..80: mol_type = other DNA

SEQ ID NO: 60813 - DNA, 80 bp, synthetic construct; identical to SEQ ID NO: 10433
  source 1..80: mol_type = other DNA

SEQ ID NO: 60814 - DNA, 80 bp, synthetic construct; identical to SEQ ID NO: 26104
  source 1..80: mol_type = other DNA

SEQ ID NO: 60815 - DNA, 80 bp, synthetic construct; identical to SEQ ID NO: 26105
  source 1..80: mol_type = other DNA

SEQ ID NO: 60816 - DNA, 80 bp, synthetic construct; identical to SEQ ID NO: 26106
  source 1..80: mol_type = other DNA

SEQ ID NO: 60817 - DNA, 80 bp, synthetic construct; identical to SEQ ID NO: 10434
  source 1..80: mol_type = other DNA

SEQ ID NO: 60818 - DNA, 80 bp, synthetic construct; identical to SEQ ID NO: 26108
  source 1..80: mol_type = other DNA

SEQ ID NO: 60819 - DNA, 80 bp, synthetic construct; identical to SEQ ID NO: 26109
  source 1..80: mol_type = other DNA

SEQ ID NO: 60820 - DNA, 80 bp, synthetic construct; identical to SEQ ID NO: 26110
  source 1..80: mol_type = other DNA

SEQ ID NO: 60821 - DNA, 80 bp, synthetic construct; identical to SEQ ID NO: 10435
  source 1..80: mol_type = other DNA

SEQ ID NO: 60822 - DNA, 80 bp, synthetic construct; identical to SEQ ID NO: 26112
  source 1..80: mol_type = other DNA

SEQ ID NO: 60823 - DNA, 80 bp, synthetic construct; identical to SEQ ID NO: 26113
  source 1..80: mol_type = other DNA

SEQ ID NO: 60824 - DNA, 80 bp, synthetic construct; identical to SEQ ID NO: 26114
  source 1..80: mol_type = other DNA

SEQ ID NO: 60825 - DNA, 80 bp, synthetic construct; identical to SEQ ID NO: 10436
  source 1..80: mol_type = other DNA

SEQ ID NO: 60826 - DNA, 80 bp, synthetic construct; identical to SEQ ID NO: 26116
  source 1..80: mol_type = other DNA

SEQ ID NO: 60827 - DNA, 80 bp, synthetic construct; identical to SEQ ID NO: 26117
  source 1..80: mol_type = other DNA

SEQ ID NO: 60828 - DNA, 80 bp, synthetic construct; identical to SEQ ID NO: 26118
  source 1..80: mol_type = other DNA

SEQ ID NO: 60829 - DNA, 80 bp, synthetic construct; identical to SEQ ID NO: 10437
  source 1..80: mol_type = other DNA

SEQ ID NO: 60830 - DNA, 80 bp, synthetic construct; identical to SEQ ID NO: 26120
  source 1..80: mol_type = other DNA

SEQ ID NO: 60831 - DNA, 80 bp, synthetic construct; identical to SEQ ID NO: 26121
  source 1..80: mol_type = other DNA

SEQ ID NO: 60832 - DNA, 80 bp, synthetic construct; identical to SEQ ID NO: 26122
  source 1..80: mol_type = other DNA

SEQ ID NO: 60833 - DNA, 80 bp, synthetic construct; identical to SEQ ID NO: 10438
  source 1..80: mol_type = other DNA

SEQ ID NO: 60834 - DNA, 80 bp, synthetic construct; identical to SEQ ID NO: 26124
  source 1..80: mol_type = other DNA

SEQ ID NO: 60835 - DNA, 80 bp, synthetic construct; identical to SEQ ID NO: 26125
  source 1..80: mol_type = other DNA

SEQ ID NO: 60836 - DNA, 80 bp, synthetic construct; identical to SEQ ID NO: 26126
  source 1..80: mol_type = other DNA

SEQ ID NO: 60837 - DNA, 80 bp, synthetic construct; identical to SEQ ID NO: 10439
  source 1..80: mol_type = other DNA

SEQ ID NO: 60838 - DNA, 80 bp, synthetic construct; identical to SEQ ID NO: 26129
  source 1..80: mol_type = other DNA

SEQ ID NO: 60839 - DNA, 80 bp, synthetic construct; identical to SEQ ID NO: 26130
  source 1..80: mol_type = other DNA

SEQ ID NO: 60840 - DNA, 80 bp, synthetic construct; identical to SEQ ID NO: 26131
  source 1..80: mol_type = other DNA

SEQ ID NO: 60841 - DNA, 80 bp, synthetic construct; identical to SEQ ID NO: 10440
  source 1..80: mol_type = other DNA

SEQ ID NO: 60842 - DNA, 80 bp, synthetic construct; identical to SEQ ID NO: 26133
  source 1..80: mol_type = other DNA

SEQ ID NO: 60843 - DNA, 80 bp, synthetic construct; identical to SEQ ID NO: 26134
  source 1..80: mol_type = other DNA

SEQ ID NO: 60844 - DNA, 80 bp, synthetic construct; identical to SEQ ID NO: 10441
  source 1..80: mol_type = other DNA

SEQ ID NO: 60845 - DNA, 80 bp, synthetic construct; identical to SEQ ID NO: 26136
  source 1..80: mol_type = other DNA

SEQ ID NO: 60846 - DNA, 80 bp, synthetic construct; identical to SEQ ID NO: 26137
  source 1..80: mol_type = other DNA

SEQ ID NO: 60847 - DNA, 80 bp, synthetic construct; identical to SEQ ID NO: 26138
  source 1..80: mol_type = other DNA

SEQ ID NO: 60848 - DNA, 80 bp, synthetic construct; identical to SEQ ID NO: 10442
  source 1..80: mol_type = other DNA

SEQ ID NO: 60849 - DNA, 80 bp, synthetic construct; identical to SEQ ID NO: 26140
  source 1..80: mol_type = other DNA

SEQ ID NO: 60850 - DNA, 80 bp, synthetic construct; identical to SEQ ID NO: 26141
  source 1..80: mol_type = other DNA

SEQ ID NO: 60851 - DNA, 80 bp, synthetic construct; identical to SEQ ID NO: 26142
  source 1..80: mol_type = other DNA

SEQ ID NO: 60852 - DNA, 80 bp, synthetic construct; identical to SEQ ID NO: 10443
  source 1..80: mol_type = other DNA

SEQ ID NO: 60853 - DNA, 80 bp, synthetic construct; identical to SEQ ID NO: 26144
  source 1..80: mol_type = other DNA

SEQ ID NO: 60854 - DNA, 80 bp, synthetic construct; identical to SEQ ID NO: 26145
  source 1..80: mol_type = other DNA

SEQ ID NO: 60855 - DNA, 80 bp, synthetic construct; identical to SEQ ID NO: 26146
  source 1..80: mol_type = other DNA

SEQ ID NO: 60856 - DNA, 80 bp, synthetic construct; identical to SEQ ID NO: 26147
  source 1..80: mol_type = other DNA

SEQ ID NO: 60857 - DNA, 80 bp, synthetic construct; identical to SEQ ID NO: 10444
  source 1..80: mol_type = other DNA

SEQ ID NO: 60858 - DNA, 80 bp, synthetic construct; identical to SEQ ID NO: 26149
  source 1..80: mol_type = other DNA

SEQ ID NO: 60859 - DNA, 80 bp, synthetic construct; identical to SEQ ID NO: 26150
  source 1..80: mol_type = other DNA

SEQ ID NO: 60860 - DNA, 80 bp, synthetic construct; identical to SEQ ID NO: 26151
  source 1..80: mol_type = other DNA

SEQ ID NO: 60861 - DNA, 80 bp, synthetic construct; identical to SEQ ID NO: 10445
  source 1..80: mol_type = other DNA

SEQ ID NO: 60862 - DNA, 80 bp, synthetic construct; identical to SEQ ID NO: 26153
  source 1..80: mol_type = other DNA

SEQ ID NO: 60863 - DNA, 80 bp, synthetic construct; identical to SEQ ID NO: 26154
  source 1..80: mol_type = other DNA

SEQ ID NO: 60864 - DNA, 80 bp, synthetic construct; identical to SEQ ID NO: 26155
  source 1..80: mol_type = other DNA

SEQ ID NO: 60865 - DNA, 80 bp, synthetic construct; identical to SEQ ID NO: 26156
  source 1..80: mol_type = other DNA

SEQ ID NO: 60866 - DNA, 80 bp, synthetic construct; identical to SEQ ID NO: 26157
  source 1..80: mol_type = other DNA

SEQ ID NO: 60867 - DNA, 80 bp, synthetic construct; identical to SEQ ID NO: 10446
  source 1..80: mol_type = other DNA

SEQ ID NO: 60868 - DNA, 80 bp, synthetic construct; identical to SEQ ID NO: 26159
  source 1..80: mol_type = other DNA

SEQ ID NO: 60869 - DNA, 80 bp, synthetic construct; identical to SEQ ID NO: 26160
  source 1..80: mol_type = other DNA

SEQ ID NO: 60870 - DNA, 80 bp, synthetic construct; identical to SEQ ID NO: 26161
  source 1..80: mol_type = other DNA

SEQ ID NO: 60871 - DNA, 80 bp, synthetic construct; identical to SEQ ID NO: 26162
  source 1..80: mol_type = other DNA

SEQ ID NO: 60872 - DNA, 80 bp, synthetic construct; identical to SEQ ID NO: 10447
  source 1..80: mol_type = other DNA

SEQ ID NO: 60873 - DNA, 80 bp, synthetic construct; identical to SEQ ID NO: 26164
  source 1..80: mol_type = other DNA

SEQ ID NO: 60874 - DNA, 80 bp, synthetic construct; identical to SEQ ID NO: 26165
  source 1..80: mol_type = other DNA

SEQ ID NO: 60875 - DNA, 80 bp, synthetic construct; identical to SEQ ID NO: 10448
  source 1..80: mol_type = other DNA

SEQ ID NO: 60876 - DNA, 80 bp, synthetic construct; identical to SEQ ID NO: 26167
  source 1..80: mol_type = other DNA

SEQ ID NO: 60877 - DNA, 80 bp, synthetic construct; identical to SEQ ID NO: 26168
  source 1..80: mol_type = other DNA

SEQ ID NO: 60878 - DNA, 80 bp, synthetic construct; identical to SEQ ID NO: 26169
  source 1..80: mol_type = other DNA

SEQ ID NO: 60879 - DNA, 80 bp, synthetic construct; identical to SEQ ID NO: 26170
  source 1..80: mol_type = other DNA

SEQ ID NO: 60880 - DNA, 80 bp, synthetic construct; identical to SEQ ID NO: 10449
  source 1..80: mol_type = other DNA

SEQ ID NO: 60881 - DNA, 80 bp, synthetic construct; identical to SEQ ID NO: 26172
  source 1..80: mol_type = other DNA

SEQ ID NO: 60882 - DNA, 80 bp, synthetic construct; identical to SEQ ID NO: 26173
  source 1..80: mol_type = other DNA

SEQ ID NO: 60883 - DNA, 80 bp, synthetic construct; identical to SEQ ID NO: 10450
  source 1..80: mol_type = other DNA

SEQ ID NO: 60884 - DNA, 80 bp, synthetic construct; identical to SEQ ID NO: 26176
  source 1..80: mol_type = other DNA

SEQ ID NO: 60885 - DNA, 80 bp, synthetic construct; identical to SEQ ID NO: 26178
  source 1..80: mol_type = other DNA

SEQ ID NO: 60886 - DNA, 80 bp, synthetic construct; identical to SEQ ID NO: 10451
  source 1..80: mol_type = other DNA

SEQ ID NO: 60887 - DNA, 80 bp, synthetic construct; identical to SEQ ID NO: 26180
  source 1..80: mol_type = other DNA

SEQ ID NO: 60888 - DNA, 80 bp, synthetic construct; identical to SEQ ID NO: 26181
  source 1..80: mol_type = other DNA

SEQ ID NO: 60889 - DNA, 80 bp, synthetic construct; identical to SEQ ID NO: 10452
  source 1..80: mol_type = other DNA

SEQ ID NO: 60890 - DNA, 80 bp, synthetic construct; identical to SEQ ID NO: 26183
  source 1..80: mol_type = other DNA

SEQ ID NO: 60891 - DNA, 80 bp, synthetic construct; identical to SEQ ID NO: 26184
  source 1..80: mol_type = other DNA

SEQ ID NO: 60892 - DNA, 80 bp, synthetic construct; identical to SEQ ID NO: 26185
  source 1..80: mol_type = other DNA

SEQ ID NO: 60893 - DNA, 80 bp, synthetic construct; identical to SEQ ID NO: 26186
  source 1..80: mol_type = other DNA

SEQ ID NO: 60894 - DNA, 80 bp, synthetic construct; identical to SEQ ID NO: 10453
  source 1..80: mol_type = other DNA

SEQ ID NO: 60895 - DNA, 80 bp, synthetic construct; identical to SEQ ID NO: 26188
  source 1..80: mol_type = other DNA

SEQ ID NO: 60896 - DNA, 80 bp, synthetic construct; identical to SEQ ID NO: 26189
  source 1..80: mol_type = other DNA

SEQ ID NO: 60897 - DNA, 80 bp, synthetic construct; identical to SEQ ID NO: 26190
  source 1..80: mol_type = other DNA

SEQ ID NO: 60898 - DNA, 80 bp, synthetic construct; identical to SEQ ID NO: 10454
  source 1..80: mol_type = other DNA

SEQ ID NO: 60899 - DNA, 80 bp, synthetic construct; identical to SEQ ID NO: 26192
  source 1..80: mol_type = other DNA

SEQ ID NO: 60900 - DNA, 80 bp, synthetic construct; identical to SEQ ID NO: 26194
  source 1..80: mol_type = other DNA

SEQ ID NO: 60901 - DNA, 80 bp, synthetic construct; identical to SEQ ID NO: 10455
  source 1..80: mol_type = other DNA

SEQ ID NO: 60902 - DNA, 80 bp, synthetic construct; identical to SEQ ID NO: 26197
  source 1..80: mol_type = other DNA

SEQ ID NO: 60903 - DNA, 80 bp, synthetic construct; identical to SEQ ID NO: 10456
  source 1..80: mol_type = other DNA

SEQ ID NO: 60904 - DNA, 80 bp, synthetic construct; identical to SEQ ID NO: 26199
  source 1..80: mol_type = other DNA

SEQ ID NO: 60905 - DNA, 80 bp, synthetic construct; identical to SEQ ID NO: 26200
  source 1..80: mol_type = other DNA

SEQ ID NO: 60906 - DNA, 80 bp, synthetic construct; identical to SEQ ID NO: 26201
  source 1..80: mol_type = other DNA

SEQ ID NO: 60907 - DNA, 80 bp, synthetic construct; identical to SEQ ID NO: 26202
  source 1..80: mol_type = other DNA

SEQ ID NO: 60908 - DNA, 80 bp, synthetic construct; identical to SEQ ID NO: 10457
  source 1..80: mol_type = other DNA

SEQ ID NO: 60909 - DNA, 80 bp, synthetic construct; identical to SEQ ID NO: 26204
  source 1..80: mol_type = other DNA

SEQ ID NO: 60910 - DNA, 80 bp, synthetic construct; identical to SEQ ID NO: 26205
  source 1..80: mol_type = other DNA

SEQ ID NO: 60911 - DNA, 80 bp, synthetic construct; identical to SEQ ID NO: 10458
  source 1..80: mol_type = other DNA

SEQ ID NO: 60912 - DNA, 80 bp, synthetic construct; identical to SEQ ID NO: 26207
  source 1..80: mol_type = other DNA

SEQ ID NO: 60913 - DNA, 80 bp, synthetic construct; identical to SEQ ID NO: 26208
  source 1..80: mol_type = other DNA

SEQ ID NO: 60914 - DNA, 80 bp, synthetic construct; identical to SEQ ID NO: 26209
  source 1..80: mol_type = other DNA

SEQ ID NO: 60915 - DNA, 80 bp, synthetic construct; identical to SEQ ID NO: 26210
  source 1..80: mol_type = other DNA

SEQ ID NO: 60916 - DNA, 80 bp, synthetic construct; identical to SEQ ID NO: 10459
  source 1..80: mol_type = other DNA

SEQ ID NO: 60917 - DNA, 80 bp, synthetic construct; identical to SEQ ID NO: 26212
  source 1..80: mol_type = other DNA

SEQ ID NO: 60918 - DNA, 80 bp, synthetic construct; identical to SEQ ID NO: 26213
  source 1..80: mol_type = other DNA

SEQ ID NO: 60919 - DNA, 80 bp, synthetic construct; identical to SEQ ID NO: 10460
  source 1..80: mol_type = other DNA

SEQ ID NO: 60920 - DNA, 80 bp, synthetic construct; identical to SEQ ID NO: 26216
  source 1..80: mol_type = other DNA

SEQ ID NO: 60921 - DNA, 80 bp, synthetic construct; identical to SEQ ID NO: 26217
  source 1..80: mol_type = other DNA

SEQ ID NO: 60922 - DNA, 80 bp, synthetic construct; identical to SEQ ID NO: 10461
  source 1..80: mol_type = other DNA

SEQ ID NO: 60923 - DNA, 80 bp, synthetic construct; identical to SEQ ID NO: 26221
  source 1..80: mol_type = other DNA

SEQ ID NO: 60924 - DNA, 80 bp, synthetic construct; identical to SEQ ID NO: 10462
  source 1..80: mol_type = other DNA

SEQ ID NO: 60925 - DNA, 80 bp, synthetic construct; identical to SEQ ID NO: 26223
  source 1..80: mol_type = other DNA

SEQ ID NO: 60926 - DNA, 80 bp, synthetic construct; identical to SEQ ID NO: 26224
  source 1..80: mol_type = other DNA

SEQ ID NO: 60927 - DNA, 80 bp, synthetic construct; identical to SEQ ID NO: 26225
  source 1..80: mol_type = other DNA

SEQ ID NO: 60928 - DNA, 80 bp, synthetic construct; identical to SEQ ID NO: 26226
  source 1..80: mol_type = other DNA

SEQ ID NO: 60929 - DNA, 80 bp, synthetic construct; identical to SEQ ID NO: 10463
  source 1..80: mol_type = other DNA

SEQ ID NO: 60930 - DNA, 80 bp, synthetic construct; identical to SEQ ID NO: 26228
  source 1..80: mol_type = other DNA

SEQ ID NO: 60931 - DNA, 80 bp, synthetic construct; identical to SEQ ID NO: 26229
  source 1..80: mol_type = other DNA

SEQ ID NO: 60932 - DNA, 80 bp, synthetic construct; identical to SEQ ID NO: 10464
  source 1..80: mol_type = other DNA

SEQ ID NO: 60933 - DNA, 80 bp, synthetic construct; identical to SEQ ID NO: 26231
  source 1..80: mol_type = other DNA

SEQ ID NO: 60934 - DNA, 80 bp, synthetic construct; identical to SEQ ID NO: 26232
  source 1..80: mol_type = other DNA

SEQ ID NO: 60935 - DNA, 80 bp, synthetic construct; identical to SEQ ID NO: 26233
  source 1..80: mol_type = other DNA

SEQ ID NO: 60936 - DNA, 80 bp, synthetic construct; identical to SEQ ID NO: 26234
  source 1..80: mol_type = other DNA

SEQ ID NO: 60937 - DNA, 80 bp, synthetic construct; identical to SEQ ID NO: 10465
  source 1..80: mol_type = other DNA

SEQ ID NO: 60938 - DNA, 80 bp, synthetic construct; identical to SEQ ID NO: 26236
  source 1..80: mol_type = other DNA

SEQ ID NO: 60939 - DNA, 80 bp, synthetic construct; identical to SEQ ID NO: 26237
  source 1..80: mol_type = other DNA

SEQ ID NO: 60940 - DNA, 80 bp, synthetic construct; identical to SEQ ID NO: 10466
  source 1..80: mol_type = other DNA

SEQ ID NO: 60941 - DNA, 80 bp, synthetic construct; identical to SEQ ID NO: 26240
  source 1..80: mol_type = other DNA

SEQ ID NO: 60942 - DNA, 80 bp, synthetic construct; identical to SEQ ID NO: 26241
  source 1..80: mol_type = other DNA

SEQ ID NO: 60943 - DNA, 80 bp, synthetic construct; identical to SEQ ID NO: 26242
  source 1..80: mol_type = other DNA

SEQ ID NO: 60944 - DNA, 80 bp, synthetic construct; identical to SEQ ID NO: 10467
  source 1..80: mol_type = other DNA

SEQ ID NO: 60945 - DNA, 80 bp, synthetic construct; identical to SEQ ID NO: 26244
  source 1..80: mol_type = other DNA

SEQ ID NO: 60946 - DNA, 80 bp, synthetic construct; identical to SEQ ID NO: 10468
  source 1..80: mol_type = other DNA

SEQ ID NO: 60947 - DNA, 80 bp, synthetic construct; identical to SEQ ID NO: 26247
  source 1..80: mol_type = other DNA

SEQ ID NO: 60948 - DNA, 80 bp, synthetic construct; identical to SEQ ID NO: 26248
  source 1..80: mol_type = other DNA

SEQ ID NO: 60949 - DNA, 80 bp, synthetic construct; identical to SEQ ID NO: 26249
  source 1..80: mol_type = other DNA

SEQ ID NO: 60950 - DNA, 80 bp, synthetic construct; identical to SEQ ID NO: 10469
  source 1..80: mol_type = other DNA

SEQ ID NO: 60951 - DNA, 80 bp, synthetic construct; identical to SEQ ID NO: 26251
  source 1..80: mol_type = other DNA

SEQ ID NO: 60952 - DNA, 80 bp, synthetic construct; identical to SEQ ID NO: 26252
  source 1..80: mol_type = other DNA

SEQ ID NO: 60953 - DNA, 80 bp, synthetic construct; identical to SEQ ID NO: 26253
  source 1..80: mol_type = other DNA

SEQ ID NO: 60954 - DNA, 80 bp, synthetic construct; identical to SEQ ID NO: 26254
  source 1..80: mol_type = other DNA

SEQ ID NO: 60955 - DNA, 80 bp, synthetic construct; identical to SEQ ID NO: 10470
  source 1..80: mol_type = other DNA

SEQ ID NO: 60956 - DNA, 80 bp, synthetic construct; identical to SEQ ID NO: 26256
  source 1..80: mol_type = other DNA

SEQ ID NO: 60957 - DNA, 80 bp, synthetic construct; identical to SEQ ID NO: 26257
  source 1..80: mol_type = other DNA

SEQ ID NO: 60958 - DNA, 80 bp, synthetic construct; identical to SEQ ID NO: 26258
  source 1..80: mol_type = other DNA

SEQ ID NO: 60959 - DNA, 80 bp, synthetic construct; identical to SEQ ID NO: 10471
  source 1..80: mol_type = other DNA

SEQ ID NO: 60960 - DNA, 80 bp, synthetic construct; identical to SEQ ID NO: 26260
  source 1..80: mol_type = other DNA

SEQ ID NO: 60961 - DNA, 80 bp, synthetic construct; identical to SEQ ID NO: 26261
  source 1..80: mol_type = other DNA

SEQ ID NO: 60962 - DNA, 80 bp, synthetic construct; identical to SEQ ID NO: 26262
  source 1..80: mol_type = other DNA

SEQ ID NO: 60963 - DNA, 80 bp, synthetic construct; identical to SEQ ID NO: 26263
  source 1..80: mol_type = other DNA

SEQ ID NO: 60964 - DNA, 80 bp, synthetic construct; identical to SEQ ID NO: 10472
  source 1..80: mol_type = other DNA

SEQ ID NO: 60965 - DNA, 80 bp, synthetic construct; identical to SEQ ID NO: 26265
  source 1..80: mol_type = other DNA

SEQ ID NO: 60966 - DNA, 80 bp, synthetic construct; identical to SEQ ID NO: 26266
  source 1..80: mol_type = other DNA

SEQ ID NO: 60967 - DNA, 80 bp, synthetic construct; identical to SEQ ID NO: 26267
  source 1..80: mol_type = other DNA

SEQ ID NO: 60968 - DNA, 80 bp, synthetic construct; identical to SEQ ID NO: 10473
  source 1..80: mol_type = other DNA

SEQ ID NO: 60969 - DNA, 80 bp, synthetic construct; identical to SEQ ID NO: 26269
  source 1..80: mol_type = other DNA

SEQ ID NO: 60970 - DNA, 80 bp, synthetic construct; identical to SEQ ID NO: 26270
  source 1..80: mol_type = other DNA

SEQ ID NO: 60971 - DNA, 80 bp, synthetic construct; identical to SEQ ID NO: 10474
  source 1..80: mol_type = other DNA

SEQ ID NO: 60972 - DNA, 80 bp, synthetic construct; identical to SEQ ID NO: 26272
  source 1..80: mol_type = other DNA

SEQ ID NO: 60973 - DNA, 80 bp, synthetic construct; identical to SEQ ID NO: 26273
  source 1..80: mol_type = other DNA

SEQ ID NO: 60974 - DNA, 80 bp, synthetic construct; identical to SEQ ID NO: 26274
  source 1..80: mol_type = other DNA

SEQ ID NO: 60975 - DNA, 80 bp, synthetic construct; identical to SEQ ID NO: 10475
  source 1..80: mol_type = other DNA

SEQ ID NO: 60976 - DNA, 80 bp, synthetic construct; identical to SEQ ID NO: 26276
  source 1..80: mol_type = other DNA

SEQ ID NO: 60977 - DNA, 80 bp, synthetic construct; identical to SEQ ID NO: 26278
  source 1..80: mol_type = other DNA

SEQ ID NO: 60978 - DNA, 80 bp, synthetic construct; identical to SEQ ID NO: 26279
  source 1..80: mol_type = other DNA

SEQ ID NO: 60979 - DNA, 80 bp, synthetic construct; identical to SEQ ID NO: 10476
  source 1..80: mol_type = other DNA

SEQ ID NO: 60980 - DNA, 80 bp, synthetic construct; identical to SEQ ID NO: 26282
  source 1..80: mol_type = other DNA

SEQ ID NO: 60981 - DNA, 80 bp, synthetic construct; identical to SEQ ID NO: 10477
  source 1..80: mol_type = other DNA

SEQ ID NO: 60982 - DNA, 80 bp, synthetic construct; identical to SEQ ID NO: 26284
  source 1..80: mol_type = other DNA

SEQ ID NO: 60983 - DNA, 80 bp, synthetic construct; identical to SEQ ID NO: 26285
  source 1..80: mol_type = other DNA

SEQ ID NO: 60984 - DNA, 80 bp, synthetic construct; identical to SEQ ID NO: 26286
  source 1..80: mol_type = other DNA

SEQ ID NO: 60985 - DNA, 80 bp, synthetic construct; identical to SEQ ID NO: 10478
  source 1..80: mol_type = other DNA

SEQ ID NO: 60986 - DNA, 80 bp, synthetic construct; identical to SEQ ID NO: 26289
  source 1..80: mol_type = other DNA

SEQ ID NO: 60987 - DNA, 80 bp, synthetic construct; identical to SEQ ID NO: 26290
  source 1..80: mol_type = other DNA

SEQ ID NO: 60988 - DNA, 80 bp, synthetic construct; identical to SEQ ID NO: 10479
  source 1..80: mol_type = other DNA

SEQ ID NO: 60989 - DNA, 80 bp, synthetic construct; identical to SEQ ID NO: 26292
  source 1..80: mol_type = other DNA

SEQ ID NO: 60990 - DNA, 80 bp, synthetic construct; identical to SEQ ID NO: 26293
  source 1..80: mol_type = other DNA

SEQ ID NO: 60991 - DNA, 80 bp, synthetic construct; identical to SEQ ID NO: 26294
  source 1..80: mol_type = other DNA

SEQ ID NO: 60992 - DNA, 80 bp, synthetic construct; identical to SEQ ID NO: 10480
  source 1..80: mol_type = other DNA

SEQ ID NO: 60993 - DNA, 80 bp, synthetic construct; identical to SEQ ID NO: 26296
  source 1..80: mol_type = other DNA

SEQ ID NO: 60994 - DNA, 80 bp, synthetic construct; identical to SEQ ID NO: 26297
  source 1..80: mol_type = other DNA

SEQ ID NO: 60995 - DNA, 80 bp, synthetic construct; identical to SEQ ID NO: 26298
  source 1..80: mol_type = other DNA

SEQ ID NO: 60996 - DNA, 80 bp, synthetic construct; identical to SEQ ID NO: 26299
  source 1..80: mol_type = other DNA

SEQ ID NO: 60997 - DNA, 80 bp, synthetic construct; identical to SEQ ID NO: 10481
  source 1..80: mol_type = other DNA

SEQ ID NO: 60998 - DNA, 80 bp, synthetic construct; identical to SEQ ID NO: 26301
  source 1..80: mol_type = other DNA

SEQ ID NO: 60999 - DNA, 80 bp, synthetic construct; identical to SEQ ID NO: 26302
  source 1..80: mol_type = other DNA

SEQ ID NO: 61000 - DNA, 80 bp, synthetic construct; identical to SEQ ID NO: 10482
  source 1..80: mol_type = other DNA

SEQ ID NO: 61001 - DNA, 80 bp, synthetic construct; identical to SEQ ID NO: 26304
  source 1..80: mol_type = other DNA

SEQ ID NO: 61002 - DNA, 80 bp, synthetic construct; identical to SEQ ID NO: 26305
  source 1..80: mol_type = other DNA

SEQ ID NO: 61003 - DNA, 80 bp, synthetic construct; identical to SEQ ID NO: 26306
  source 1..80: mol_type = other DNA

SEQ ID NO: 61004 - DNA, 80 bp, synthetic construct; identical to SEQ ID NO: 26307
  source 1..80: mol_type = other DNA

SEQ ID NO: 61005 - DNA, 80 bp, synthetic construct; identical to SEQ ID NO: 10483
  source 1..80: mol_type = other DNA

SEQ ID NO: 61006 - DNA, 80 bp, synthetic construct; identical to SEQ ID NO: 26309
  source 1..80: mol_type = other DNA

SEQ ID NO: 61007 - DNA, 80 bp, synthetic construct; identical to SEQ ID NO: 26310
  source 1..80: mol_type = other DNA

SEQ ID NO: 61008 - DNA, 80 bp, synthetic construct; identical to SEQ ID NO: 10484
  source 1..80: mol_type = other DNA

SEQ ID NO: 61009 - DNA, 80 bp, synthetic construct; identical to SEQ ID NO: 26312
  source 1..80: mol_type = other DNA

SEQ ID NO: 61010 - DNA, 80 bp, synthetic construct; identical to SEQ ID NO: 26313
  source 1..80: mol_type = other DNA

SEQ ID NO: 61011 - DNA, 80 bp, synthetic construct; identical to SEQ ID NO: 26314
  source 1..80: mol_type = other DNA

SEQ ID NO: 61012 - DNA, 80 bp, synthetic construct; identical to SEQ ID NO: 26315
  source 1..80: mol_type = other DNA

SEQ ID NO: 61013 - DNA, 80 bp, synthetic construct; identical to SEQ ID NO: 10485
  source 1..80: mol_type = other DNA

SEQ ID NO: 61014 - DNA, 80 bp, synthetic construct; identical to SEQ ID NO: 26317
  source 1..80: mol_type = other DNA

SEQ ID NO: 61015 - DNA, 80 bp, synthetic construct; identical to SEQ ID NO: 26318
  source 1..80: mol_type = other DNA

SEQ ID NO: 61016 - DNA, 80 bp, synthetic construct; identical to SEQ ID NO: 10486
  source 1..80: mol_type = other DNA

SEQ ID NO: 61017 - DNA, 80 bp, synthetic construct; identical to SEQ ID NO: 26320
  source 1..80: mol_type = other DNA

SEQ ID NO: 61018 - DNA, 80 bp, synthetic construct; identical to SEQ ID NO: 26321
  source 1..80: mol_type = other DNA

SEQ ID NO: 61019 - DNA, 80 bp, synthetic construct; identical to SEQ ID NO: 26322
  source 1..80: mol_type = other DNA

SEQ ID NO: 61020 - DNA, 80 bp, synthetic construct; identical to SEQ ID NO: 10487
  source 1..80: mol_type = other DNA

SEQ ID NO: 61021 - DNA, 80 bp, synthetic construct; identical to SEQ ID NO: 26324
  source 1..80: mol_type = other DNA

SEQ ID NO: 61022 - DNA, 80 bp, synthetic construct; identical to SEQ ID NO: 26325
  source 1..80: mol_type = other DNA

SEQ ID NO: 61023 - DNA, 80 bp, synthetic construct; identical to SEQ ID NO: 26326
  source 1..80: mol_type = other DNA

SEQ ID NO: 61024 - DNA, 80 bp, synthetic construct; identical to SEQ ID NO: 26327
  source 1..80: mol_type = other DNA

SEQ ID NO: 61025 - DNA, 80 bp, synthetic construct; identical to SEQ ID NO: 10488
  source 1..80: mol_type = other DNA

SEQ ID NO: 61026 - DNA, 80 bp, synthetic construct; identical to SEQ ID NO: 26329
  source 1..80: mol_type = other DNA

SEQ ID NO: 61027 - DNA, 80 bp, synthetic construct; identical to SEQ ID NO: 26330
  source 1..80: mol_type = other DNA

SEQ ID NO: 61028 - DNA, 80 bp, synthetic construct; identical to SEQ ID NO: 10489
  source 1..80: mol_type = other DNA

SEQ ID NO: 61029 - DNA, 80 bp, synthetic construct; identical to SEQ ID NO: 26332
  source 1..80: mol_type = other DNA

SEQ ID NO: 61030 - DNA, 80 bp, synthetic construct; identical to SEQ ID NO: 26333
  source 1..80: mol_type = other DNA

SEQ ID NO: 61031 - DNA, 80 bp, synthetic construct; identical to SEQ ID NO: 26334
  source 1..80: mol_type = other DNA

SEQ ID NO: 61032 - DNA, 80 bp, synthetic construct; identical to SEQ ID NO: 10490
  source 1..80: mol_type = other DNA

SEQ ID NO: 61033 - DNA, 80 bp, synthetic construct; identical to SEQ ID NO: 26337
  source 1..80: mol_type = other DNA

SEQ ID NO: 61034 - DNA, 80 bp, synthetic construct; identical to SEQ ID NO: 26338
  source 1..80: mol_type = other DNA

SEQ ID NO: 61035 - DNA, 80 bp, synthetic construct; identical to SEQ ID NO: 10491
  source 1..80: mol_type = other DNA

SEQ ID NO: 61036 - DNA, 80 bp, synthetic construct; identical to SEQ ID NO: 26340
  source 1..80: mol_type = other DNA

SEQ ID NO: 61037 - DNA, 80 bp, synthetic construct; identical to SEQ ID NO: 26341
  source 1..80: mol_type = other DNA

SEQ ID NO: 61038 - DNA, 80 bp, synthetic construct; identical to SEQ ID NO: 26342
  source 1..80: mol_type = other DNA

SEQ ID NO: 61039 - DNA, 80 bp, synthetic construct; identical to SEQ ID NO: 26343
  source 1..80: mol_type = other DNA

SEQ ID NO: 61040 - DNA, 80 bp, synthetic construct; identical to SEQ ID NO: 10492
  source 1..80: mol_type = other DNA

SEQ ID NO: 61041 - DNA, 80 bp, synthetic construct; identical to SEQ ID NO: 26345
  source 1..80: mol_type = other DNA

SEQ ID NO: 61042 - DNA, 80 bp, synthetic construct; identical to SEQ ID NO: 26346
  source 1..80: mol_type = other DNA

SEQ ID NO: 61043 - DNA, 80 bp, synthetic construct; identical to SEQ ID NO: 10493
  source 1..80: mol_type = other DNA

SEQ ID NO: 61044 - DNA, 80 bp, synthetic construct; identical to SEQ ID NO: 26349
  source 1..80: mol_type = other DNA

SEQ ID NO: 61045 - DNA, 80 bp, synthetic construct; identical to SEQ ID NO: 26350
  source 1..80: mol_type = other DNA

SEQ ID NO: 61046 - DNA, 80 bp, synthetic construct; identical to SEQ ID NO: 26351
  source 1..80: mol_type = other DNA

SEQ ID NO: 61047 - DNA, 80 bp, synthetic construct; identical to SEQ ID NO: 10494
  source 1..80: mol_type = other DNA

SEQ ID NO: 61048 - DNA, 80 bp, synthetic construct; identical to SEQ ID NO: 26353
  source 1..80: mol_type = other DNA

SEQ ID NO: 61049 - DNA, 80 bp, synthetic construct; identical to SEQ ID NO: 26354
  source 1..80: mol_type = other DNA

SEQ ID NO: 61050 - DNA, 80 bp, synthetic construct; identical to SEQ ID NO: 26355
  source 1..80: mol_type = other DNA

SEQ ID NO: 61051 - DNA, 80 bp, synthetic construct; identical to SEQ ID NO: 10495
  source 1..80: mol_type = other DNA

SEQ ID NO: 61052 - DNA, 80 bp, synthetic construct; identical to SEQ ID NO: 26357
  source 1..80: mol_type = other DNA

SEQ ID NO: 61053 - DNA, 80 bp, synthetic construct; identical to SEQ ID NO: 26358
  source 1..80: mol_type = other DNA

SEQ ID NO: 61054 - DNA, 80 bp, synthetic construct; identical to SEQ ID NO: 26359
  source 1..80: mol_type = other DNA

SEQ ID NO: 61055 - DNA, 80 bp, synthetic construct; identical to SEQ ID NO: 10496
  source 1..80: mol_type = other DNA

SEQ ID NO: 61056 - DNA, 80 bp, synthetic construct; identical to SEQ ID NO: 26361
  source 1..80: mol_type = other DNA

SEQ ID NO: 61057 - DNA, 80 bp, synthetic construct; identical to SEQ ID NO: 26362
  source 1..80: mol_type = other DNA

SEQ ID NO: 61058 - DNA, 80 bp, synthetic construct; identical to SEQ ID NO: 26363
  source 1..80: mol_type = other DNA

SEQ ID NO: 61059 - DNA, 80 bp, synthetic construct; identical to SEQ ID NO: 10497
  source 1..80: mol_type = other DNA

SEQ ID NO: 61060 - DNA, 80 bp, synthetic construct; identical to SEQ ID NO: 26365
  source 1..80: mol_type = other DNA

SEQ ID NO: 61061 - DNA, 80 bp, synthetic construct; identical to SEQ ID NO: 26366
  source 1..80: mol_type = other DNA

SEQ ID NO: 61062 - DNA, 80 bp, synthetic construct; identical to SEQ ID NO: 26367
  source 1..80: mol_type = other DNA

SEQ ID NO: 61063 - DNA, 80 bp, synthetic construct; identical to SEQ ID NO: 26368
  source 1..80: mol_type = other DNA

SEQ ID NO: 61064 - DNA, 80 bp, synthetic construct; identical to SEQ ID NO: 10498
  source 1..80: mol_type = other DNA

SEQ ID NO: 61065 - DNA, 80 bp, synthetic construct; identical to SEQ ID NO: 26370
  source 1..80: mol_type = other DNA

SEQ ID NO: 61066 - DNA, 80 bp, synthetic construct; identical to SEQ ID NO: 26371
  source 1..80: mol_type = other DNA

SEQ ID NO: 61067 - DNA, 80 bp, synthetic construct; identical to SEQ ID NO: 10499
  source 1..80: mol_type = other DNA

SEQ ID NO: 61068 - DNA, 80 bp, synthetic construct; identical to SEQ ID NO: 26373
  source 1..80: mol_type = other DNA

SEQ ID NO: 61069 - DNA, 80 bp, synthetic construct; identical to SEQ ID NO: 26374
  source 1..80: mol_type = other DNA

SEQ ID NO: 61070 - DNA, 80 bp, synthetic construct; identical to SEQ ID NO: 26375
  source 1..80: mol_type = other DNA

SEQ ID NO: 61071 - DNA, 80 bp, synthetic construct; identical to SEQ ID NO: 10500
  source 1..80: mol_type = other DNA

SEQ ID NO: 61072 - DNA, 80 bp, synthetic construct; identical to SEQ ID NO: 26377
  source 1..80: mol_type = other DNA

SEQ ID NO: 61073 - DNA, 80 bp, synthetic construct; identical to SEQ ID NO: 26378
  source 1..80: mol_type = other DNA

SEQ ID NO: 61074 - DNA, 80 bp, synthetic construct; identical to SEQ ID NO: 26379
  source 1..80: mol_type = other DNA

SEQ ID NO: 61075 - DNA, 80 bp, synthetic construct; identical to SEQ ID NO: 10501
  source 1..80: mol_type = other DNA

SEQ ID NO: 61076 - DNA, 80 bp, synthetic construct; identical to SEQ ID NO: 26381
  source 1..80: mol_type = other DNA

SEQ ID NO: 61077 - DNA, 80 bp, synthetic construct; identical to SEQ ID NO: 26382
  source 1..80: mol_type = other DNA

SEQ ID NO: 61078 - DNA, 80 bp, synthetic construct; identical to SEQ ID NO: 26383
  source 1..80: mol_type = other DNA

SEQ ID NO: 61079 - DNA, 80 bp, synthetic construct; identical to SEQ ID NO: 10502
  source 1..80: mol_type = other DNA

SEQ ID NO: 61080 - DNA, 80 bp, synthetic construct; identical to SEQ ID NO: 26385
  source 1..80: mol_type = other DNA

SEQ ID NO: 61081 - DNA, 80 bp, synthetic construct; identical to SEQ ID NO: 26386
  source 1..80: mol_type = other DNA

SEQ ID NO: 61082 - DNA, 80 bp, synthetic construct; identical to SEQ ID NO: 26387
  source 1..80: mol_type = other DNA

SEQ ID NO: 61083 - DNA, 80 bp, synthetic construct; identical to SEQ ID NO: 26388
  source 1..80: mol_type = other DNA

SEQ ID NO: 61084 - DNA, 80 bp, synthetic construct; identical to SEQ ID NO: 10503
  source 1..80: mol_type = other DNA

SEQ ID NO: 61085 - DNA, 80 bp, synthetic construct; identical to SEQ ID NO: 26390
  source 1..80: mol_type = other DNA

SEQ ID NO: 61086 - DNA, 80 bp, synthetic construct; identical to SEQ ID NO: 26391
  source 1..80: mol_type = other DNA

SEQ ID NO: 61087 - DNA, 80 bp, synthetic construct; identical to SEQ ID NO: 26392
  source 1..80: mol_type = other DNA

SEQ ID NO: 61088 - DNA, 80 bp, synthetic construct; identical to SEQ ID NO: 10504
  source 1..80: mol_type = other DNA

SEQ ID NO: 61089 - DNA, 80 bp, synthetic construct; identical to SEQ ID NO: 26395
  source 1..80: mol_type = other DNA

SEQ ID NO: 61090 - DNA, 80 bp, synthetic construct; identical to SEQ ID NO: 26396
  source 1..80: mol_type = other DNA

SEQ ID NO: 61091 - DNA, 80 bp, synthetic construct; identical to SEQ ID NO: 10505
  source 1..80: mol_type = other DNA

SEQ ID NO: 61092 - DNA, 80 bp, synthetic construct; identical to SEQ ID NO: 26398
  source 1..80: mol_type = other DNA

SEQ ID NO: 61093 - DNA, 80 bp, synthetic construct; identical to SEQ ID NO: 26399
  source 1..80: mol_type = other DNA

SEQ ID NO: 61094 - DNA, 80 bp, synthetic construct; identical to SEQ ID NO: 26400
  source 1..80: mol_type = other DNA

SEQ ID NO: 61095 - DNA, 80 bp, synthetic construct; identical to SEQ ID NO: 10506
  source 1..80: mol_type = other DNA

SEQ ID NO: 61096 - DNA, 80 bp, synthetic construct; identical to SEQ ID NO: 26402
  source 1..80: mol_type = other DNA

SEQ ID NO: 61097 - DNA, 80 bp, synthetic construct; identical to SEQ ID NO: 26403
  source 1..80: mol_type = other DNA

SEQ ID NO: 61098 - DNA, 80 bp, synthetic construct; identical to SEQ ID NO: 26404
  source 1..80: mol_type = other DNA

SEQ ID NO: 61099 - DNA, 80 bp, synthetic construct; identical to SEQ ID NO: 10507
  source 1..80: mol_type = other DNA

SEQ ID NO: 61100 - DNA, 80 bp, synthetic construct; identical to SEQ ID NO: 26406
  source 1..80: mol_type = other DNA

SEQ ID NO: 61101 - DNA, 80 bp, synthetic construct; identical to SEQ ID NO: 26407
  source 1..80: mol_type = other DNA

SEQ ID NO: 61102 - DNA, 80 bp, synthetic construct; identical to SEQ ID NO: 10508
  source 1..80: mol_type = other DNA

SEQ ID NO: 61103 - DNA, 80 bp, synthetic construct; identical to SEQ ID NO: 26409
  source 1..80: mol_type = other DNA

SEQ ID NO: 61104 - DNA, 80 bp, synthetic construct; identical to SEQ ID NO: 26410
  source 1..80: mol_type = other DNA

SEQ ID NO: 61105 - DNA, 80 bp, synthetic construct; identical to SEQ ID NO: 26411
  source 1..80: mol_type = other DNA

SEQ ID NO: 61106 - DNA, 80 bp, synthetic construct; identical to SEQ ID NO: 26412
  source 1..80: mol_type = other DNA

SEQ ID NO: 61107 - DNA, 80 bp, synthetic construct; identical to SEQ ID NO: 10509
  source 1..80: mol_type = other DNA

SEQ ID NO: 61108 - DNA, 80 bp, synthetic construct; identical to SEQ ID NO: 26414
  source 1..80: mol_type = other DNA

SEQ ID NO: 61109 - DNA, 80 bp, synthetic construct; identical to SEQ ID NO: 26415
  source 1..80: mol_type = other DNA

SEQ ID NO: 61110 - DNA, 80 bp, synthetic construct; identical to SEQ ID NO: 10510
  source 1..80: mol_type = other DNA

SEQ ID NO: 61111 - DNA, 80 bp, synthetic construct; identical to SEQ ID NO: 26418
  source 1..80: mol_type = other DNA

SEQ ID NO: 61112 - DNA, 80 bp, synthetic construct; identical to SEQ ID NO: 26419
  source 1..80: mol_type = other DNA

SEQ ID NO: 61113 - DNA, 80 bp, synthetic construct; identical to SEQ ID NO: 10511
  source 1..80: mol_type = other DNA

SEQ ID NO: 61114 - DNA, 80 bp, synthetic construct; identical to SEQ ID NO: 26421
  source 1..80: mol_type = other DNA

SEQ ID NO: 61115 - DNA, 80 bp, synthetic construct; identical to SEQ ID NO: 26422
  source 1..80: mol_type = other DNA

SEQ ID NO: 61116 - DNA, 80 bp, synthetic construct; identical to SEQ ID NO: 10512
  source 1..80: mol_type = other DNA

SEQ ID NO: 61117 - DNA, 80 bp, synthetic construct; identical to SEQ ID NO: 26424
  source 1..80: mol_type = other DNA

SEQ ID NO: 61118 - DNA, 80 bp, synthetic construct; identical to SEQ ID NO: 26425
  source 1..80: mol_type = other DNA

SEQ ID NO: 61119 - DNA, 80 bp, synthetic construct; identical to SEQ ID NO: 26426
  source 1..80: mol_type = other DNA

SEQ ID NO: 61120 - DNA, 80 bp, synthetic construct; identical to SEQ ID NO: 26427
  source 1..80: mol_type = other DNA

SEQ ID NO: 61121 - DNA, 80 bp, synthetic construct; identical to SEQ ID NO: 10513
  source 1..80: mol_type = other DNA

SEQ ID NO: 61122 - DNA, 80 bp, synthetic construct; identical to SEQ ID NO: 26429
  source 1..80: mol_type = other DNA

SEQ ID NO: 61123 - DNA, 80 bp, synthetic construct; identical to SEQ ID NO: 26431
  source 1..80: mol_type = other DNA

SEQ ID NO: 61124 - DNA, 80 bp, synthetic construct; identical to SEQ ID NO: 10514
  source 1..80: mol_type = other DNA

SEQ ID NO: 61125 - DNA, 80 bp, synthetic construct; identical to SEQ ID NO: 26433
  source 1..80: mol_type = other DNA

SEQ ID NO: 61126 - DNA, 80 bp, synthetic construct; identical to SEQ ID NO: 26434
  source 1..80: mol_type = other DNA

SEQ ID NO: 61127 - DNA, 80 bp, synthetic construct; identical to SEQ ID NO: 10515
  source 1..80: mol_type = other DNA

SEQ ID NO: 61128 - DNA, 80 bp, synthetic construct; identical to SEQ ID NO: 26436
  source 1..80: mol_type = other DNA

SEQ ID NO: 61129 - DNA, 80 bp, synthetic construct; identical to SEQ ID NO: 26437
  source 1..80: mol_type = other DNA

SEQ ID NO: 61130 - DNA, 80 bp, synthetic construct; identical to SEQ ID NO: 26438
  source 1..80: mol_type = other DNA

SEQ ID NO: 61131 - DNA, 80 bp, synthetic construct; identical to SEQ ID NO: 10516
  source 1..80: mol_type = other DNA

SEQ ID NO: 61132 - DNA, 80 bp, synthetic construct; identical to SEQ ID NO: 26440
  source 1..80: mol_type = other DNA

SEQ ID NO: 61133 - DNA, 80 bp, synthetic construct; identical to SEQ ID NO: 26441
  source 1..80: mol_type = other DNA

SEQ ID NO: 61134 - DNA, 80 bp, synthetic construct; identical to SEQ ID NO: 26442
  source 1..80: mol_type = other DNA

SEQ ID NO: 61135 - DNA, 80 bp, synthetic construct; identical to SEQ ID NO: 10517
  source 1..80: mol_type = other DNA

SEQ ID NO: 61136 - DNA, 80 bp, synthetic construct; identical to SEQ ID NO: 26444
  source 1..80: mol_type = other DNA

SEQ ID NO: 61137 - DNA, 80 bp, synthetic construct; identical to SEQ ID NO: 26445
  source 1..80: mol_type = other DNA

SEQ ID NO: 61138 - DNA, 80 bp, synthetic construct; identical to SEQ ID NO: 26446
  source 1..80: mol_type = other DNA

SEQ ID NO: 61139 - DNA, 80 bp, synthetic construct; identical to SEQ ID NO: 26447
  source 1..80: mol_type = other DNA

SEQ ID NO: 61140 - DNA, 80 bp, synthetic construct; identical to SEQ ID NO: 10518
  source 1..80: mol_type = other DNA

SEQ ID NO: 61141 - DNA, 80 bp, synthetic construct; identical to SEQ ID NO: 26450
  source 1..80: mol_type = other DNA

SEQ ID NO: 61142 - DNA, 80 bp, synthetic construct; identical to SEQ ID NO: 26451
  source 1..80: mol_type = other DNA

SEQ ID NO: 61143 - DNA, 80 bp, synthetic construct; identical to SEQ ID NO: 10519
  source 1..80: mol_type = other DNA

SEQ ID NO: 61144 - DNA, 80 bp, synthetic construct; identical to SEQ ID NO: 10520
  source 1..80: mol_type = other DNA

SEQ ID NO: 61145 - DNA, 80 bp, synthetic construct; identical to SEQ ID NO: 26456
  source 1..80: mol_type = other DNA

SEQ ID NO: 61146 - DNA, 80 bp, synthetic construct; identical to SEQ ID NO: 26457
  source 1..80: mol_type = other DNA

SEQ ID NO: 61147 - DNA, 80 bp, synthetic construct; identical to SEQ ID NO: 26458
  source 1..80: mol_type = other DNA

SEQ ID NO: 61148 - DNA, 80 bp, synthetic construct; identical to SEQ ID NO: 26459
  source 1..80: mol_type = other DNA

SEQ ID NO: 61149 - DNA, 80 bp, synthetic construct; identical to SEQ ID NO: 10521
  source 1..80: mol_type = other DNA

SEQ ID NO: 61150 - DNA, 80 bp, synthetic construct; identical to SEQ ID NO: 26461
  source 1..80: mol_type = other DNA

SEQ ID NO: 61151 - DNA, 80 bp, synthetic construct; identical to SEQ ID NO: 26462
  source 1..80: mol_type = other DNA

SEQ ID NO: 61152 - DNA, 80 bp, synthetic construct; identical to SEQ ID NO: 26463
  source 1..80: mol_type = other DNA

SEQ ID NO: 61153 - DNA, 80 bp, synthetic construct; identical to SEQ ID NO: 10522
  source 1..80: mol_type = other DNA

SEQ ID NO: 61154 - DNA, 80 bp, synthetic construct; identical to SEQ ID NO: 26465
  source 1..80: mol_type = other DNA

SEQ ID NO: 61155 - DNA, 80 bp, synthetic construct; identical to SEQ ID NO: 26466
  source 1..80: mol_type = other DNA

SEQ ID NO: 61156 - DNA, 80 bp, synthetic construct; identical to SEQ ID NO: 10523
  source 1..80: mol_type = other DNA

SEQ ID NO: 61157 - DNA, 80 bp, synthetic construct; identical to SEQ ID NO: 26469
  source 1..80: mol_type = other DNA

SEQ ID NO: 61158 - DNA, 80 bp, synthetic construct; identical to SEQ ID NO: 26470
  source 1..80: mol_type = other DNA

SEQ ID NO: 61159 - DNA, 80 bp, synthetic construct; identical to SEQ ID NO: 26471
  source 1..80: mol_type = other DNA

SEQ ID NO: 61160 - DNA, 80 bp, synthetic construct; identical to SEQ ID NO: 10524
  source 1..80: mol_type = other DNA

SEQ ID NO: 61161 - DNA, 80 bp, synthetic construct; identical to SEQ ID NO: 26473
  source 1..80: mol_type = other DNA

SEQ ID NO: 61162 - DNA, 80 bp, synthetic construct; identical to SEQ ID NO: 26474
  source 1..80: mol_type = other DNA

SEQ ID NO: 61163 - DNA, 80 bp, synthetic construct; identical to SEQ ID NO: 26475
  source 1..80: mol_type = other DNA

SEQ ID NO: 61164 - DNA, 80 bp, synthetic construct; identical to SEQ ID NO: 10525
  source 1..80: mol_type = other DNA

SEQ ID NO: 61165 - DNA, 80 bp, synthetic construct; identical to SEQ ID NO: 26477
  source 1..80: mol_type = other DNA

SEQ ID NO: 61166 - DNA, 80 bp, synthetic construct; identical to SEQ ID NO: 26478
  source 1..80: mol_type = other DNA

SEQ ID NO: 61167 - DNA, 80 bp, synthetic construct; identical to SEQ ID NO: 10526
  source 1..80: mol_type = other DNA

SEQ ID NO: 61168 - DNA, 80 bp, synthetic construct; identical to SEQ ID NO: 26480
  source 1..80: mol_type = other DNA

SEQ ID NO: 61169 - DNA, 80 bp, synthetic construct; identical to SEQ ID NO: 26481
  source 1..80: mol_type = other DNA

SEQ ID NO: 61170 - DNA, 80 bp, synthetic construct; identical to SEQ ID NO: 26482
  source 1..80: mol_type = other DNA

SEQ ID NO: 61171 - DNA, 80 bp, synthetic construct; identical to SEQ ID NO: 26483
  source 1..80: mol_type = other DNA

SEQ ID NO: 61172 - DNA, 80 bp, synthetic construct; identical to SEQ ID NO: 10527
  source 1..80: mol_type = other DNA

SEQ ID NO: 61173 - DNA, 80 bp, synthetic construct; identical to SEQ ID NO: 26485
  source 1..80: mol_type = other DNA

SEQ ID NO: 61174 - DNA, 80 bp, synthetic construct; identical to SEQ ID NO: 26486
  source 1..80: mol_type = other DNA

SEQ ID NO: 61175 - DNA, 80 bp, synthetic construct; identical to SEQ ID NO: 10528
  source 1..80: mol_type = other DNA

SEQ ID NO: 61176 - DNA, 80 bp, synthetic construct; identical to SEQ ID NO: 26488
  source 1..80: mol_type = other DNA

SEQ ID NO: 61177 - DNA, 80 bp, synthetic construct; identical to SEQ ID NO: 26489
  source 1..80: mol_type = other DNA

SEQ ID NO: 61178 - DNA, 80 bp, synthetic construct; identical to SEQ ID NO: 26490
  source 1..80: mol_type = other DNA

SEQ ID NO: 61179 - DNA, 80 bp, synthetic construct; identical to SEQ ID NO: 26491
  source 1..80: mol_type = other DNA

SEQ ID NO: 61180 - DNA, 80 bp, synthetic construct; identical to SEQ ID NO: 10529
  source 1..80: mol_type = other DNA

SEQ ID NO: 61181 - DNA, 80 bp, synthetic construct; identical to SEQ ID NO: 26493
  source 1..80: mol_type = other DNA

SEQ ID NO: 61182 - DNA, 80 bp, synthetic construct; identical to SEQ ID NO: 26494
  source 1..80: mol_type = other DNA

SEQ ID NO: 61183 - DNA, 80 bp, synthetic construct; identical to SEQ ID NO: 10530
  source 1..80: mol_type = other DNA

SEQ ID NO: 61184 - DNA, 80 bp, synthetic construct; identical to SEQ ID NO: 26496
  source 1..80: mol_type = other DNA

SEQ ID NO: 61185 - DNA, 80 bp, synthetic construct; identical to SEQ ID NO: 26497
  source 1..80: mol_type = other DNA

SEQ ID NO: 61186 - DNA, 80 bp, synthetic construct; identical to SEQ ID NO: 26498
  source 1..80: mol_type = other DNA

SEQ ID NO: 61187 - DNA, 80 bp, synthetic construct; identical to SEQ ID NO: 26499
  source 1..80: mol_type = other DNA

SEQ ID NO: 61188 - DNA, 80 bp, synthetic construct; identical to SEQ ID NO: 10531
  source 1..80: mol_type = other DNA

SEQ ID NO: 61189 - DNA, 80 bp, synthetic construct; identical to SEQ ID NO: 26501
  source 1..80: mol_type = other DNA

SEQ ID NO: 61190 - DNA, 80 bp, synthetic construct; identical to SEQ ID NO: 26502
  source 1..80: mol_type = other DNA

SEQ ID NO: 61191 - DNA, 80 bp, synthetic construct; identical to SEQ ID NO: 26503
  source 1..80: mol_type = other DNA

SEQ ID NO: 61192 - DNA, 80 bp, synthetic construct; identical to SEQ ID NO: 10532
  source 1..80: mol_type = other DNA

SEQ ID NO: 61193 - DNA, 80 bp, synthetic construct; identical to SEQ ID NO: 26505
  source 1..80: mol_type = other DNA

SEQ ID NO: 61194 - DNA, 80 bp, synthetic construct; identical to SEQ ID NO: 26506
  source 1..80: mol_type = other DNA

SEQ ID NO: 61195 - DNA, 80 bp, synthetic construct; identical to SEQ ID NO: 10533
  source 1..80: mol_type = other DNA

SEQ ID NO: 61196 - DNA, 80 bp, synthetic construct; identical to SEQ ID NO: 26509
  source 1..80: mol_type = other DNA

SEQ ID NO: 61197 - DNA, 80 bp, synthetic construct; identical to SEQ ID NO: 26510
  source 1..80: mol_type = other DNA

SEQ ID NO: 61198 - DNA, 80 bp, synthetic construct; identical to SEQ ID NO: 26511
  source 1..80: mol_type = other DNA

SEQ ID NO: 61199 - DNA, 80 bp, synthetic construct; identical to SEQ ID NO: 10534
  source 1..80: mol_type = other DNA

SEQ ID NO: 61200 - DNA, 80 bp, synthetic construct; identical to SEQ ID NO: 26513
  source 1..80: mol_type = other DNA

SEQ ID NO: 61201 - DNA, 80 bp, synthetic construct; identical to SEQ ID NO: 26514
  source 1..80: mol_type = other DNA

SEQ ID NO: 61202 - DNA, 80 bp, synthetic construct; identical to SEQ ID NO: 26515
  source 1..80: mol_type = other DNA

SEQ ID NO: 61203 - DNA, 80 bp, synthetic construct; identical to SEQ ID NO: 10535
  source 1..80: mol_type = other DNA

SEQ ID NO: 61204 - DNA, 80 bp, synthetic construct; identical to SEQ ID NO: 26517
  source 1..80: mol_type = other DNA

SEQ ID NO: 61205 - DNA, 80 bp, synthetic construct; identical to SEQ ID NO: 26518
  source 1..80: mol_type = other DNA

SEQ ID NO: 61206 - DNA, 80 bp, synthetic construct; identical to SEQ ID NO: 10536
  source 1..80: mol_type = other DNA

SEQ ID NO: 61207 - DNA, 80 bp, synthetic construct; identical to SEQ ID NO: 26520
  source 1..80: mol_type = other DNA

SEQ ID NO: 61208 - DNA, 80 bp, synthetic construct; identical to SEQ ID NO: 26521
  source 1..80: mol_type = other DNA

SEQ ID NO: 61209 - DNA, 80 bp, synthetic construct; identical to SEQ ID NO: 26522
  source 1..80: mol_type = other DNA

SEQ ID NO: 61210 - DNA, 80 bp, synthetic construct; identical to SEQ ID NO: 10537
  source 1..80: mol_type = other DNA

SEQ ID NO: 61211 - DNA, 80 bp, synthetic construct; identical to SEQ ID NO: 26524
  source 1..80: mol_type = other DNA

SEQ ID NO: 61212 - DNA, 80 bp, synthetic construct; identical to SEQ ID NO: 26525
  source 1..80: mol_type = other DNA

SEQ ID NO: 61213 - DNA, 80 bp, synthetic construct; identical to SEQ ID NO: 26526
  source 1..80: mol_type = other DNA

SEQ ID NO: 61214 - DNA, 80 bp, synthetic construct; identical to SEQ ID NO: 10538
  source 1..80: mol_type = other DNA

SEQ ID NO: 61215 - DNA, 80 bp, synthetic construct; identical to SEQ ID NO: 26529
  source 1..80: mol_type = other DNA

SEQ ID NO: 61216 - DNA, 80 bp, synthetic construct; identical to SEQ ID NO: 26530
  source 1..80: mol_type = other DNA

SEQ ID NO: 61217 - DNA, 80 bp, synthetic construct; identical to SEQ ID NO: 10539
  source 1..80: mol_type = other DNA

SEQ ID NO: 61218 - DNA, 80 bp, synthetic construct; identical to SEQ ID NO: 26532
  source 1..80: mol_type = other DNA

SEQ ID NO: 61219 - DNA, 80 bp, synthetic construct; identical to SEQ ID NO: 26533
  source 1..80: mol_type = other DNA

SEQ ID NO: 61220 - DNA, 80 bp, synthetic construct; identical to SEQ ID NO: 10540
  source 1..80: mol_type = other DNA

SEQ ID NO: 61221 - DNA, 80 bp, synthetic construct; identical to SEQ ID NO: 26535
  source 1..80: mol_type = other DNA

SEQ ID NO: 61222 - DNA, 80 bp, synthetic construct; identical to SEQ ID NO: 26536
  source 1..80: mol_type = other DNA

SEQ ID NO: 61223 - DNA, 80 bp, synthetic construct; identical to SEQ ID NO: 26537
  source 1..80: mol_type = other DNA

SEQ ID NO: 61224 - DNA, 80 bp, synthetic construct; identical to SEQ ID NO: 10541
  source 1..80: mol_type = other DNA

SEQ ID NO: 61225 - DNA, 80 bp, synthetic construct; identical to SEQ ID NO: 26539
  source 1..80: mol_type = other DNA

SEQ ID NO: 61226 - DNA, 80 bp, synthetic construct; identical to SEQ ID NO: 26540
  source 1..80: mol_type = other DNA

SEQ ID NO: 61227 - DNA, 80 bp, synthetic construct; identical to SEQ ID NO: 26541
  source 1..80: mol_type = other DNA

SEQ ID NO: 61228 - DNA, 80 bp, synthetic construct; identical to SEQ ID NO: 26542
  source 1..80: mol_type = other DNA

SEQ ID NO: 61229 - DNA, 80 bp, synthetic construct; identical to SEQ ID NO: 10542
  source 1..80: mol_type = other DNA

SEQ ID NO: 61230 - DNA, 80 bp, synthetic construct; identical to SEQ ID NO: 26544
  source 1..80: mol_type = other DNA

SEQ ID NO: 61231 - DNA, 80 bp, synthetic construct; identical to SEQ ID NO: 26545
  source 1..80: mol_type = other DNA

SEQ ID NO: 61232 - DNA, 80 bp, synthetic construct; identical to SEQ ID NO: 10543
  source 1..80: mol_type = other DNA

SEQ ID NO: 61233 - DNA, 80 bp, synthetic construct; identical to SEQ ID NO: 26547
  source 1..80: mol_type = other DNA

SEQ ID NO: 61234 - DNA, 80 bp, synthetic construct; identical to SEQ ID NO: 26548
  source 1..80: mol_type = other DNA

SEQ ID NO: 61235 - DNA, 80 bp, synthetic construct; identical to SEQ ID NO: 26549
  source 1..80: mol_type = other DNA

SEQ ID NO: 61236 - DNA, 80 bp, synthetic construct; identical to SEQ ID NO: 10544
  source 1..80: mol_type = other DNA

SEQ ID NO: 61237 - DNA, 80 bp, synthetic construct; identical to SEQ ID NO: 26551
  source 1..80: mol_type = other DNA

SEQ ID NO: 61238 - DNA, 80 bp, synthetic construct; identical to SEQ ID NO: 26552
  source 1..80: mol_type = other DNA

SEQ ID NO: 61239 - DNA, 80 bp, synthetic construct; identical to SEQ ID NO: 10545
  source 1..80: mol_type = other DNA

SEQ ID NO: 61240 - DNA, 80 bp, synthetic construct; identical to SEQ ID NO: 26554
  source 1..80: mol_type = other DNA

SEQ ID NO: 61241 - DNA, 80 bp, synthetic construct; identical to SEQ ID NO: 26555
  source 1..80: mol_type = other DNA

SEQ ID NO: 61242 - DNA, 80 bp, synthetic construct; identical to SEQ ID NO: 26556
  source 1..80: mol_type = other DNA

SEQ ID NO: 61243 - DNA, 80 bp, synthetic construct; identical to SEQ ID NO: 10546
  source 1..80: mol_type = other DNA

SEQ ID NO: 61244 - DNA, 80 bp, synthetic construct; identical to SEQ ID NO: 26558
  source 1..80: mol_type = other DNA

SEQ ID NO: 61245 - DNA, 80 bp, synthetic construct; identical to SEQ ID NO: 26559
  source 1..80: mol_type = other DNA

SEQ ID NO: 61246 - DNA, 80 bp, synthetic construct; identical to SEQ ID NO: 26560
  source 1..80: mol_type = other DNA

SEQ ID NO: 61247 - DNA, 80 bp, synthetic construct; identical to SEQ ID NO: 10547
  source 1..80: mol_type = other DNA

SEQ ID NO: 61248 - DNA, 80 bp, synthetic construct; identical to SEQ ID NO: 26562
  source 1..80: mol_type = other DNA

SEQ ID NO: 61249 - DNA, 80 bp, synthetic construct; identical to SEQ ID NO: 26564
  source 1..80: mol_type = other DNA

SEQ ID NO: 61250 - DNA, 80 bp, synthetic construct; identical to SEQ ID NO: 26565
  source 1..80: mol_type = other DNA

SEQ ID NO: 61251 - DNA, 80 bp, synthetic construct; identical to SEQ ID NO: 10548
  source 1..80: mol_type = other DNA

SEQ ID NO: 61252 - DNA, 80 bp, synthetic construct; identical to SEQ ID NO: 26567
  source 1..80: mol_type = other DNA

SEQ ID NO: 61253 - DNA, 80 bp, synthetic construct; identical to SEQ ID NO: 26568
  source 1..80: mol_type = other DNA

SEQ ID NO: 61254 - DNA, 80 bp, synthetic construct; identical to SEQ ID NO: 26570
  source 1..80: mol_type = other DNA

SEQ ID NO: 61255 - DNA, 80 bp, synthetic construct; identical to SEQ ID NO: 26571
  source 1..80: mol_type = other DNA

SEQ ID NO: 61256 - DNA, 80 bp, synthetic construct; identical to SEQ ID NO: 26572
  source 1..80: mol_type = other DNA

SEQ ID NO: 61257 - DNA, 80 bp, synthetic construct; identical to SEQ ID NO: 10550
  source 1..80: mol_type = other DNA

SEQ ID NO: 61258 - DNA, 80 bp, synthetic construct; identical to SEQ ID NO: 26574
  source 1..80: mol_type = other DNA

SEQ ID NO: 61259 - DNA, 80 bp, synthetic construct; identical to SEQ ID NO: 26575
  source 1..80: mol_type = other DNA

SEQ ID NO: 61260 - DNA, 80 bp, synthetic construct; identical to SEQ ID NO: 26576
  source 1..80: mol_type = other DNA

SEQ ID NO: 61261 - DNA, 80 bp, synthetic construct; identical to SEQ ID NO: 10551
  source 1..80: mol_type = other DNA

SEQ ID NO: 61262 - DNA, 80 bp, synthetic construct; identical to SEQ ID NO: 26578
  source 1..80: mol_type = other DNA

SEQ ID NO: 61263 - DNA, 80 bp, synthetic construct; identical to SEQ ID NO: 26580
  source 1..80: mol_type = other DNA

SEQ ID NO: 61264 - DNA, 80 bp, synthetic construct; identical to SEQ ID NO: 10552
  source 1..80: mol_type = other DNA

SEQ ID NO: 61265 - DNA, 80 bp, synthetic construct; identical to SEQ ID NO: 26582
  source 1..80: mol_type = other DNA

SEQ ID NO: 61266 - DNA, 80 bp, synthetic construct; identical to SEQ ID NO: 26583
  source 1..80: mol_type = other DNA

SEQ ID NO: 61267 - DNA, 80 bp, synthetic construct; identical to SEQ ID NO: 26584
  source 1..80: mol_type = other DNA

SEQ ID NO: 61268 - DNA, 80 bp, synthetic construct; identical to SEQ ID NO: 26585
  source 1..80: mol_type = other DNA

SEQ ID NO: 61269 - DNA, 80 bp, synthetic construct; identical to SEQ ID NO: 10553
  source 1..80: mol_type = other DNA

SEQ ID NO: 61270 - DNA, 80 bp, synthetic construct; identical to SEQ ID NO: 26587
  source 1..80: mol_type = other DNA

SEQ ID NO: 61271 - DNA, 80 bp, synthetic construct; identical to SEQ ID NO: 26588
  source 1..80: mol_type = other DNA

SEQ ID NO: 61272 - DNA, 80 bp, synthetic construct; identical to SEQ ID NO: 26589
  source 1..80: mol_type = other DNA

SEQ ID NO: 61273 - DNA, 80 bp, synthetic construct; identical to SEQ ID NO: 10554
  source 1..80: mol_type = other DNA

SEQ ID NO: 61274 - DNA, 80 bp, synthetic construct; identical to SEQ ID NO: 26591
  source 1..80: mol_type = other DNA

SEQ ID NO: 61275 - DNA, 80 bp, synthetic construct; identical to SEQ ID NO: 26592
  source 1..80: mol_type = other DNA

SEQ ID NO: 61276 - DNA, 80 bp, synthetic construct; identical to SEQ ID NO: 26593
  source 1..80: mol_type = other DNA

SEQ ID NO: 61277 - DNA, 80 bp, synthetic construct; identical to SEQ ID NO: 10555
  source 1..80: mol_type = other DNA

SEQ ID NO: 61278 - DNA, 80 bp, synthetic construct; identical to SEQ ID NO: 26595
  source 1..80: mol_type = other DNA

SEQ ID NO: 61279 - DNA, 80 bp, synthetic construct; identical to SEQ ID NO: 26596
  source 1..80: mol_type = other DNA

SEQ ID NO: 61280 - DNA, 80 bp, synthetic construct; identical to SEQ ID NO: 26597
  source 1..80: mol_type = other DNA

SEQ ID NO: 61281 - DNA, 80 bp, synthetic construct; identical to SEQ ID NO: 10556
  source 1..80: mol_type = other DNA

SEQ ID NO: 61282 - DNA, 80 bp, synthetic construct; identical to SEQ ID NO: 26599
  source 1..80: mol_type = other DNA

SEQ ID NO: 61283 - DNA, 80 bp, synthetic construct; identical to SEQ ID NO: 26600
  source 1..80: mol_type = other DNA

SEQ ID NO: 61284 - DNA, 80 bp, synthetic construct; identical to SEQ ID NO: 10557
  source 1..80: mol_type = other DNA

SEQ ID NO: 61285 - DNA, 80 bp, synthetic construct; identical to SEQ ID NO: 26602
  source 1..80: mol_type = other DNA

SEQ ID NO: 61286 - DNA, 80 bp, synthetic construct; identical to SEQ ID NO: 26603
  source 1..80: mol_type = other DNA

SEQ ID NO: 61287 - DNA, 80 bp, synthetic construct; identical to SEQ ID NO: 26604
  source 1..80: mol_type = other DNA

SEQ ID NO: 61288 - DNA, 80 bp, synthetic construct; identical to SEQ ID NO: 26605
  source 1..80: mol_type = other DNA

SEQ ID NO: 61289 - DNA, 80 bp, synthetic construct; identical to SEQ ID NO: 10558
  source 1..80: mol_type = other DNA

SEQ ID NO: 61290 - DNA, 80 bp, synthetic construct; identical to SEQ ID NO: 26607
  source 1..80: mol_type = other DNA

SEQ ID NO: 61291 - DNA, 80 bp, synthetic construct; identical to SEQ ID NO: 26608
  source 1..80: mol_type = other DNA

SEQ ID NO: 61292 - DNA, 80 bp, synthetic construct; identical to SEQ ID NO: 26609
  source 1..80: mol_type = other DNA

SEQ ID NO: 61293 - DNA, 80 bp, synthetic construct; identical to SEQ ID NO: 10559
  source 1..80: mol_type = other DNA

SEQ ID NO: 61294 - DNA, 80 bp, synthetic construct; identical to SEQ ID NO: 26611
  source 1..80: mol_type = other DNA

SEQ ID NO: 61295 - DNA, 80 bp, synthetic construct; identical to SEQ ID NO: 26612
  source 1..80: mol_type = other DNA

SEQ ID NO: 61296 - DNA, 80 bp, synthetic construct; identical to SEQ ID NO: 10560
  source 1..80: mol_type = other DNA

SEQ ID NO: 61297 - DNA, 80 bp, synthetic construct; identical to SEQ ID NO: 26614
  source 1..80: mol_type = other DNA

SEQ ID NO: 61298 - DNA, 80 bp, synthetic construct; identical to SEQ ID NO: 26615
  source 1..80: mol_type = other DNA

SEQ ID NO: 61299 - DNA, 80 bp, synthetic construct; identical to SEQ ID NO: 26616
  source 1..80: mol_type = other DNA

SEQ ID NO: 61300 - DNA, 80 bp, synthetic construct; identical to SEQ ID NO: 26617
  source 1..80: mol_type = other DNA

SEQ ID NO: 61301 - DNA, 80 bp, synthetic construct; identical to SEQ ID NO: 10561
  source 1..80: mol_type = other DNA

SEQ ID NO: 61302 - DNA, 80 bp, synthetic construct; identical to SEQ ID NO: 26619
  source 1..80: mol_type = other DNA

SEQ ID NO: 61303 - DNA, 80 bp, synthetic construct; identical to SEQ ID NO: 26620
  source 1..80: mol_type = other DNA

SEQ ID NO: 61304 - DNA, 80 bp, synthetic construct; identical to SEQ ID NO: 10562
  source 1..80: mol_type = other DNA

SEQ ID NO: 61305 - DNA, 80 bp, synthetic construct; identical to SEQ ID NO: 26622
  source 1..80: mol_type = other DNA

SEQ ID NO: 61306 - DNA, 80 bp, synthetic construct; identical to SEQ ID NO: 26623
  source 1..80: mol_type = other DNA

SEQ ID NO: 61307 - DNA, 80 bp, synthetic construct; identical to SEQ ID NO: 26624
  source 1..80: mol_type = other DNA

SEQ ID NO: 61308 - DNA, 80 bp, synthetic construct; identical to SEQ ID NO: 10563
  source 1..80: mol_type = other DNA

SEQ ID NO: 61309 - DNA, 80 bp, synthetic construct; identical to SEQ ID NO: 26626
  source 1..80: mol_type = other DNA

SEQ ID NO: 61310 - DNA, 80 bp, synthetic construct; identical to SEQ ID NO: 26627
  source 1..80: mol_type = other DNA

SEQ ID NO: 61311 - DNA, 80 bp, synthetic construct; identical to SEQ ID NO: 26628
  source 1..80: mol_type = other DNA

SEQ ID NO: 61312 - DNA, 80 bp, synthetic construct; identical to SEQ ID NO: 10564
  source 1..80: mol_type = other DNA

SEQ ID NO: 61313 - DNA, 80 bp, synthetic construct; identical to SEQ ID NO: 26630
  source 1..80: mol_type = other DNA

SEQ ID NO: 61314 - DNA, 80 bp, synthetic construct; identical to SEQ ID NO: 26631
  source 1..80: mol_type = other DNA

SEQ ID NO: 61315 - DNA, 80 bp, synthetic construct; identical to SEQ ID NO: 26632
  source 1..80: mol_type = other DNA

SEQ ID NO: 61316 - DNA, 80 bp, synthetic construct; identical to SEQ ID NO: 10565
  source 1..80: mol_type = other DNA

SEQ ID NO: 61317 - DNA, 80 bp, synthetic construct; identical to SEQ ID NO: 26635
  source 1..80: mol_type = other DNA

SEQ ID NO: 61318 - DNA, 80 bp, synthetic construct; identical to SEQ ID NO: 26636
  source 1..80: mol_type = other DNA

SEQ ID NO: 61319 - DNA, 80 bp, synthetic construct; identical to SEQ ID NO: 10566
  source 1..80: mol_type = other DNA

SEQ ID NO: 61320 - DNA, 80 bp, synthetic construct; identical to SEQ ID NO: 26638
  source 1..80: mol_type = other DNA

SEQ ID NO: 61321 - DNA, 80 bp, synthetic construct; identical to SEQ ID NO: 26639
  source 1..80: mol_type = other DNA

SEQ ID NO: 61322 - DNA, 80 bp, synthetic construct; identical to SEQ ID NO: 26640
  source 1..80: mol_type = other DNA

SEQ ID NO: 61323 - DNA, 80 bp, synthetic construct; identical to SEQ ID NO: 26641
  source 1..80: mol_type = other DNA

SEQ ID NO: 61324 - DNA, 80 bp, synthetic construct; identical to SEQ ID NO: 10567
  source 1..80: mol_type = other DNA

SEQ ID NO: 61325 - DNA, 80 bp, synthetic construct; identical to SEQ ID NO: 26643
  source 1..80: mol_type = other DNA

SEQ ID NO: 61326 - DNA, 80 bp, synthetic construct; identical to SEQ ID NO: 26644
  source 1..80: mol_type = other DNA

SEQ ID NO: 61327 - DNA, 80 bp, synthetic construct; identical to SEQ ID NO: 26645
  source 1..80: mol_type = other DNA

SEQ ID NO: 61328 - DNA, 80 bp, synthetic construct; identical to SEQ ID NO: 26646
  source 1..80: mol_type = other DNA

SEQ ID NO: 61329 - DNA, 80 bp, synthetic construct; identical to SEQ ID NO: 10568
  source 1..80: mol_type = other DNA

SEQ ID NO: 61330 - DNA, 80 bp, synthetic construct; identical to SEQ ID NO: 26648
  source 1..80: mol_type = other DNA

SEQ ID NO: 61331 - DNA, 80 bp, synthetic construct; identical to SEQ ID NO: 10569
  source 1..80: mol_type = other DNA

SEQ ID NO: 61332 - DNA, 80 bp, synthetic construct; identical to SEQ ID NO: 26651
  source 1..80: mol_type = other DNA

SEQ ID NO: 61333 - DNA, 80 bp, synthetic construct; identical to SEQ ID NO: 26652
  source 1..80: mol_type = other DNA

SEQ ID NO: 61334 - DNA, 80 bp, synthetic construct; identical to SEQ ID NO: 26653
  source 1..80: mol_type = other DNA

SEQ ID NO: 61335 - DNA, 80 bp, synthetic construct; identical to SEQ ID NO: 26654
  source 1..80: mol_type = other DNA

SEQ ID NO: 61336 - DNA, 80 bp, synthetic construct; identical to SEQ ID NO: 10570
  source 1..80: mol_type = other DNA

SEQ ID NO: 61337 - DNA, 80 bp, synthetic construct; identical to SEQ ID NO: 26657
  source 1..80: mol_type = other DNA

SEQ ID NO: 61338 - DNA, 80 bp, synthetic construct; identical to SEQ ID NO: 26658
  source 1..80: mol_type = other DNA

SEQ ID NO: 61339 - DNA, 80 bp, synthetic construct; identical to SEQ ID NO: 10571
  source 1..80: mol_type = other DNA

SEQ ID NO: 61340 - DNA, 80 bp, synthetic construct; identical to SEQ ID NO: 26660
  source 1..80: mol_type = other DNA

SEQ ID NO: 61341 - DNA, 80 bp, synthetic construct; identical to SEQ ID NO: 26661
  source 1..80: mol_type = other DNA

SEQ ID NO: 61342 - DNA, 80 bp, synthetic construct; identical to SEQ ID NO: 26662
  source 1..80: mol_type = other DNA

SEQ ID NO: 61343 - DNA, 80 bp, synthetic construct; identical to SEQ ID NO: 10572
  source 1..80: mol_type = other DNA

SEQ ID NO: 61344 - DNA, 80 bp, synthetic construct; identical to SEQ ID NO: 26664
  source 1..80: mol_type = other DNA

SEQ ID NO: 61345 - DNA, 80 bp, synthetic construct; identical to SEQ ID NO: 26665
  source 1..80: mol_type = other DNA

SEQ ID NO: 61346 - DNA, 80 bp, synthetic construct; identical to SEQ ID NO: 10573
  source 1..80: mol_type = other DNA

SEQ ID NO: 61347 - DNA, 80 bp, synthetic construct; identical to SEQ ID NO: 26667
  source 1..80: mol_type = other DNA

SEQ ID NO: 61348 - DNA, 80 bp, synthetic construct; identical to SEQ ID NO: 26668
  source 1..80: mol_type = other DNA

SEQ ID NO: 61349 - DNA, 80 bp, synthetic construct; identical to SEQ ID NO: 26670
  source 1..80: mol_type = other DNA

SEQ ID NO: 61350 - DNA, 80 bp, synthetic construct; identical to SEQ ID NO: 10574
  source 1..80: mol_type = other DNA

SEQ ID NO: 61351 - DNA, 80 bp, synthetic construct; identical to SEQ ID NO: 26672
  source 1..80: mol_type = other DNA

SEQ ID NO: 61352 - DNA, 80 bp, synthetic construct; identical to SEQ ID NO: 26673
  source 1..80: mol_type = other DNA

SEQ ID NO: 61353 - DNA, 80 bp, synthetic construct; identical to SEQ ID NO: 10575
  source 1..80: mol_type = other DNA

SEQ ID NO: 61354 - DNA, 80 bp, synthetic construct; identical to SEQ ID NO: 26675
  source 1..80: mol_type = other DNA

SEQ ID NO: 61355 - DNA, 80 bp, synthetic construct; identical to SEQ ID NO: 26676
  source 1..80: mol_type = other DNA

SEQ ID NO: 61356 - DNA, 80 bp, synthetic construct; identical to SEQ ID NO: 26677
  source 1..80: mol_type = other DNA

SEQ ID NO: 61357 - DNA, 80 bp, synthetic construct; identical to SEQ ID NO: 10576
  source 1..80: mol_type = other DNA

SEQ ID NO: 61358 - DNA, 80 bp, synthetic construct; identical to SEQ ID NO: 26680
  source 1..80: mol_type = other DNA

SEQ ID NO: 61359 - DNA, 80 bp, synthetic construct; identical to SEQ ID NO: 26681
  source 1..80: mol_type = other DNA

SEQ ID NO: 61360 - DNA, 80 bp, synthetic construct; identical to SEQ ID NO: 10577
  source 1..80: mol_type = other DNA

SEQ ID NO: 61361 - DNA, 80 bp, synthetic construct; identical to SEQ ID NO: 26683
  source 1..80: mol_type = other DNA

SEQ ID NO: 61362 - DNA, 80 bp, synthetic construct; identical to SEQ ID NO: 26684
  source 1..80: mol_type = other DNA

SEQ ID NO: 61363 - DNA, 80 bp, synthetic construct; identical to SEQ ID NO: 26685
  source 1..80: mol_type = other DNA

SEQ ID NO: 61364 - DNA, 80 bp, synthetic construct; identical to SEQ ID NO: 26686
  source 1..80: mol_type = other DNA

SEQ ID NO: 61365 - DNA, 80 bp, synthetic construct; identical to SEQ ID NO: 10578
  source 1..80: mol_type = other DNA

SEQ ID NO: 61366 - DNA, 80 bp, synthetic construct; identical to SEQ ID NO: 26688
  source 1..80: mol_type = other DNA

SEQ ID NO: 61367 - DNA, 80 bp, synthetic construct; identical to SEQ ID NO: 26689
  source 1..80: mol_type = other DNA

SEQ ID NO: 61368 - DNA, 80 bp, synthetic construct; identical to SEQ ID NO: 10579
  source 1..80: mol_type = other DNA

SEQ ID NO: 61369 - DNA, 80 bp, synthetic construct; identical to SEQ ID NO: 26691
  source 1..80: mol_type = other DNA

SEQ ID NO: 61370 - DNA, 80 bp, synthetic construct; identical to SEQ ID NO: 26692
  source 1..80: mol_type = other DNA

SEQ ID NO: 61371 - DNA, 80 bp, synthetic construct; identical to SEQ ID NO: 26693
  source 1..80: mol_type = other DNA

SEQ ID NO: 61372 - DNA, 80 bp, synthetic construct; identical to SEQ ID NO: 10580
  source 1..80: mol_type = other DNA

SEQ ID NO: 61373 - DNA, 80 bp, synthetic construct; identical to SEQ ID NO: 26696
  source 1..80: mol_type = other DNA

SEQ ID NO: 61374 - DNA, 80 bp, synthetic construct; identical to SEQ ID NO: 26697
  source 1..80: mol_type = other DNA

SEQ ID NO: 61375 - DNA, 80 bp, synthetic construct; identical to SEQ ID NO: 26698
  source 1..80: mol_type = other DNA

SEQ ID NO: 61376 - DNA, 80 bp, synthetic construct; identical to SEQ ID NO: 10581
  source 1..80: mol_type = other DNA

SEQ ID NO: 61377 - DNA, 80 bp, synthetic construct; identical to SEQ ID NO: 26700
  source 1..80: mol_type = other DNA

SEQ ID NO: 61378 - DNA, 80 bp, synthetic construct; identical to SEQ ID NO: 26701
  source 1..80: mol_type = other DNA

SEQ ID NO: 61379 - DNA, 80 bp, synthetic construct; identical to SEQ ID NO: 10582
  source 1..80: mol_type = other DNA

SEQ ID NO: 61380 - DNA, 80 bp, synthetic construct; identical to SEQ ID NO: 26703
  source 1..80: mol_type = other DNA

SEQ ID NO: 61381 - DNA, 80 bp, synthetic construct; identical to SEQ ID NO: 26704
  source 1..80: mol_type = other DNA

SEQ ID NO: 61382 - DNA, 80 bp, synthetic construct; identical to SEQ ID NO: 26705
  source 1..80: mol_type = other DNA

SEQ ID NO: 61383 - DNA, 80 bp, synthetic construct; identical to SEQ ID NO: 10583
  source 1..80: mol_type = other DNA

SEQ ID NO: 61384 - DNA, 80 bp, synthetic construct; identical to SEQ ID NO: 26707
  source 1..80: mol_type = other DNA

SEQ ID NO: 61385 - DNA, 80 bp, synthetic construct; identical to SEQ ID NO: 26708
  source 1..80: mol_type = other DNA

SEQ ID NO: 61386 - DNA, 80 bp, synthetic construct; identical to SEQ ID NO: 26709
  source 1..80: mol_type = other DNA

SEQ ID NO: 61387 - DNA, 80 bp, synthetic construct; identical to SEQ ID NO: 10584
  source 1..80: mol_type = other DNA

SEQ ID NO: 61388 - DNA, 80 bp, synthetic construct; identical to SEQ ID NO: 26712
  source 1..80: mol_type = other DNA

SEQ ID NO: 61389 - DNA, 80 bp, synthetic construct; identical to SEQ ID NO: 26713
  source 1..80: mol_type = other DNA

SEQ ID NO: 61390 - DNA, 80 bp, synthetic construct; identical to SEQ ID NO: 26714
  source 1..80: mol_type = other DNA

SEQ ID NO: 61391 - DNA, 80 bp, synthetic construct; identical to SEQ ID NO: 10585
  source 1..80: mol_type = other DNA

SEQ ID NO: 61392 - DNA, 80 bp, synthetic construct; identical to SEQ ID NO: 26716
  source 1..80: mol_type = other DNA

SEQ ID NO: 61393 - DNA, 80 bp, synthetic construct; identical to SEQ ID NO: 26717
  source 1..80: mol_type = other DNA

SEQ ID NO: 61394 - DNA, 80 bp, synthetic construct; identical to SEQ ID NO: 26718
  source 1..80: mol_type = other DNA

SEQ ID NO: 61395 - DNA, 80 bp, synthetic construct; identical to SEQ ID NO: 10586
  source 1..80: mol_type = other DNA

SEQ ID NO: 61396 - DNA, 80 bp, synthetic construct; identical to SEQ ID NO: 26720
  source 1..80: mol_type = other DNA

SEQ ID NO: 61397 - DNA, 80 bp, synthetic construct; identical to SEQ ID NO: 26721
  source 1..80: mol_type = other DNA

SEQ ID NO: 61398 - DNA, 80 bp, synthetic construct; identical to SEQ ID NO: 26722
  source 1..80: mol_type = other DNA

SEQ ID NO: 61399 - DNA, 80 bp, synthetic construct; identical to SEQ ID NO: 10587
  source 1..80: mol_type = other DNA

SEQ ID NO: 61400 - DNA, 80 bp, synthetic construct; identical to SEQ ID NO: 26724
  source 1..80: mol_type = other DNA

SEQ ID NO: 61401 - DNA, 80 bp, synthetic construct; identical to SEQ ID NO: 26725
  source 1..80: mol_type = other DNA

SEQ ID NO: 61402 - DNA, 80 bp, synthetic construct; identical to SEQ ID NO: 10588
  source 1..80: mol_type = other DNA

SEQ ID NO: 61403 - DNA, 80 bp, synthetic construct; identical to SEQ ID NO: 26727
  source 1..80: mol_type = other DNA

SEQ ID NO: 61404 - DNA, 80 bp, synthetic construct; identical to SEQ ID NO: 26728
  source 1..80: mol_type = other DNA

SEQ ID NO: 61405 - DNA, 80 bp, synthetic construct; identical to SEQ ID NO: 26729
  source 1..80: mol_type = other DNA

SEQ ID NO: 61406 - DNA, 80 bp, synthetic construct; identical to SEQ ID NO: 10589
  source 1..80: mol_type = other DNA

SEQ ID NO: 61407 - DNA, 80 bp, synthetic construct; identical to SEQ ID NO: 26731
  source 1..80: mol_type = other DNA

SEQ ID NO: 61408 - DNA, 80 bp, synthetic construct; identical to SEQ ID NO: 26732
  source 1..80: mol_type = other DNA

SEQ ID NO: 61409 - DNA, 80 bp, synthetic construct; identical to SEQ ID NO: 26733
  source 1..80: mol_type = other DNA

SEQ ID NO: 61410 - DNA, 80 bp, synthetic construct; identical to SEQ ID NO: 10590
  source 1..80: mol_type = other DNA

SEQ ID NO: 61411 - DNA, 80 bp, synthetic construct; identical to SEQ ID NO: 26735
  source 1..80: mol_type = other DNA

SEQ ID NO: 61412 - DNA, 80 bp, synthetic construct; identical to SEQ ID NO: 26736
  source 1..80: mol_type = other DNA

SEQ ID NO: 61413 - DNA, 80 bp, synthetic construct; identical to SEQ ID NO: 26737
  source 1..80: mol_type = other DNA

SEQ ID NO: 61414 - DNA, 80 bp, synthetic construct; identical to SEQ ID NO: 26738
  source 1..80: mol_type = other DNA

SEQ ID NO: 61415 - DNA, 80 bp, synthetic construct; identical to SEQ ID NO: 10591
  source 1..80: mol_type = other DNA

SEQ ID NO: 61416 - DNA, 80 bp, synthetic construct; identical to SEQ ID NO: 26740
  source 1..80: mol_type = other DNA

SEQ ID NO: 61417 - DNA, 80 bp, synthetic construct; identical to SEQ ID NO: 26741
  source 1..80: mol_type = other DNA

SEQ ID NO: 61418 - DNA, 80 bp, synthetic construct; identical to SEQ ID NO: 10592
  source 1..80: mol_type = other DNA

SEQ ID NO: 61419 - DNA, 80 bp, synthetic construct; identical to SEQ ID NO: 26743
  source 1..80: mol_type = other DNA

SEQ ID NO: 61420 - DNA, 80 bp, synthetic construct; identical to SEQ ID NO: 26744
  source 1..80: mol_type = other DNA

SEQ ID NO: 61421 - DNA, 80 bp, synthetic construct; identical to SEQ ID NO: 26745
  source 1..80: mol_type = other DNA

SEQ ID NO: 61422 - DNA, 80 bp, synthetic construct; identical to SEQ ID NO: 26746
  source 1..80: mol_type = other DNA

SEQ ID NO: 61423 - DNA, 80 bp, synthetic construct; identical to SEQ ID NO: 10593
  source 1..80: mol_type = other DNA

SEQ ID NO: 61424 - DNA, 80 bp, synthetic construct; identical to SEQ ID NO: 26748
  source 1..80: mol_type = other DNA

SEQ ID NO: 61425 - DNA, 80 bp, synthetic construct; identical to SEQ ID NO: 26749
  source 1..80: mol_type = other DNA

SEQ ID NO: 61426 - DNA, 80 bp, synthetic construct; identical to SEQ ID NO: 10594
  source 1..80: mol_type = other DNA

SEQ ID NO: 61427 - DNA, 80 bp, synthetic construct; identical to SEQ ID NO: 26751
  source 1..80: mol_type = other DNA

SEQ ID NO: 61428 - DNA, 80 bp, synthetic construct; identical to SEQ ID NO: 26752
  source 1..80: mol_type = other DNA

SEQ ID NO: 61429 - DNA, 80 bp, synthetic construct; identical to SEQ ID NO: 26753
  source 1..80: mol_type = other DNA

SEQ ID NO: 61430 - DNA, 80 bp, synthetic construct; identical to SEQ ID NO: 10595
  source 1..80: mol_type = other DNA

SEQ ID NO: 61431 - DNA, 80 bp, synthetic construct; identical to SEQ ID NO: 26755
  source 1..80: mol_type = other DNA

SEQ ID NO: 61432 - DNA, 80 bp, synthetic construct; identical to SEQ ID NO: 26756
  source 1..80: mol_type = other DNA

SEQ ID NO: 61433 - DNA, 80 bp, synthetic construct; identical to SEQ ID NO: 26757
  source 1..80: mol_type = other DNA

SEQ ID NO: 61434 - DNA, 80 bp, synthetic construct; identical to SEQ ID NO: 10596
  source 1..80: mol_type = other DNA

SEQ ID NO: 61435 - DNA, 80 bp, synthetic construct; identical to SEQ ID NO: 26759
  source 1..80: mol_type = other DNA

SEQ ID NO: 61436 - DNA, 80 bp, synthetic construct; identical to SEQ ID NO: 26760
  source 1..80: mol_type = other DNA

SEQ ID NO: 61437 - DNA, 80 bp, synthetic construct; identical to SEQ ID NO: 26761
  source 1..80: mol_type = other DNA

SEQ ID NO: 61438 - DNA, 80 bp, synthetic construct; identical to SEQ ID NO: 26762
  source 1..80: mol_type = other DNA

SEQ ID NO: 61439 - DNA, 80 bp, synthetic construct; identical to SEQ ID NO: 10597
  source 1..80: mol_type = other DNA

SEQ ID NO: 61440 - DNA, 80 bp, synthetic construct; identical to SEQ ID NO: 26764
  source 1..80: mol_type = other DNA

SEQ ID NO: 61441 - DNA, 80 bp, synthetic construct; identical to SEQ ID NO: 26765
  source 1..80: mol_type = other DNA

SEQ ID NO: 61442 - DNA, 80 bp, synthetic construct; identical to SEQ ID NO: 10598
  source 1..80: mol_type = other DNA

SEQ ID NO: 61443 - DNA, 80 bp, synthetic construct; identical to SEQ ID NO: 26767
  source 1..80: mol_type = other DNA

SEQ ID NO: 61444 - DNA, 80 bp, synthetic construct; identical to SEQ ID NO: 26768
  source 1..80: mol_type = other DNA

SEQ ID NO: 61445 - DNA, 80 bp, synthetic construct; identical to SEQ ID NO: 26769
  source 1..80: mol_type = other DNA

SEQ ID NO: 61446 - DNA, 80 bp, synthetic construct; identical to SEQ ID NO: 26770
  source 1..80: mol_type = other DNA

SEQ ID NO: 61447 - DNA, 80 bp, synthetic construct; identical to SEQ ID NO: 26771
  source 1..80: mol_type = other DNA

SEQ ID NO: 61448 - DNA, 80 bp, synthetic construct; identical to SEQ ID NO: 10599
  source 1..80: mol_type = other DNA

SEQ ID NO: 61449 - DNA, 80 bp, synthetic construct; identical to SEQ ID NO: 26773
  source 1..80: mol_type = other DNA

SEQ ID NO: 61450 - DNA, 80 bp, synthetic construct; identical to SEQ ID NO: 10600
  source 1..80: mol_type = other DNA

SEQ ID NO: 61451 - DNA, 80 bp, synthetic construct; identical to SEQ ID NO: 26775
  source 1..80: mol_type = other DNA

SEQ ID NO: 61452 - DNA, 80 bp, synthetic construct; identical to SEQ ID NO: 26776
  source 1..80: mol_type = other DNA

SEQ ID NO: 61453 - DNA, 80 bp, synthetic construct; identical to SEQ ID NO: 26777
  source 1..80: mol_type = other DNA

SEQ ID NO: 61454 - DNA, 80 bp, synthetic construct; identical to SEQ ID NO: 10601
  source 1..80: mol_type = other DNA

SEQ ID NO: 61455 - DNA, 80 bp, synthetic construct; identical to SEQ ID NO: 26779
  source 1..80: mol_type = other DNA

SEQ ID NO: 61456 - DNA, 80 bp, synthetic construct; identical to SEQ ID NO: 26780
  source 1..80: mol_type = other DNA

SEQ ID NO: 61457 - DNA, 80 bp, synthetic construct; identical to SEQ ID NO: 26781
  source 1..80: mol_type = other DNA

SEQ ID NO: 61458 - DNA, 80 bp, synthetic construct; identical to SEQ ID NO: 26782
  source 1..80: mol_type = other DNA

SEQ ID NO: 61459 - DNA, 80 bp, synthetic construct; identical to SEQ ID NO: 10602
  source 1..80: mol_type = other DNA

SEQ ID NO: 61460 - DNA, 80 bp, synthetic construct; identical to SEQ ID NO: 26784
  source 1..80: mol_type = other DNA

SEQ ID NO: 61461 - DNA, 80 bp, synthetic construct; identical to SEQ ID NO: 26785
  source 1..80: mol_type = other DNA

SEQ ID NO: 61462 - DNA, 80 bp, synthetic construct; identical to SEQ ID NO: 10603
  source 1..80: mol_type = other DNA

SEQ ID NO: 61463 - DNA, 80 bp, synthetic construct; identical to SEQ ID NO: 26788
  source 1..80: mol_type = other DNA

SEQ ID NO: 61464 - DNA, 80 bp, synthetic construct; identical to SEQ ID NO: 26790
  source 1..80: mol_type = other DNA

SEQ ID NO: 61465 - DNA, 80 bp, synthetic construct; identical to SEQ ID NO: 10604
  source 1..80: mol_type = other DNA

SEQ ID NO: 61466 - DNA, 80 bp, synthetic construct; identical to SEQ ID NO: 26792
  source 1..80: mol_type = other DNA

SEQ ID NO: 61467 - DNA, 80 bp, synthetic construct; identical to SEQ ID NO: 26793
  source 1..80: mol_type = other DNA

SEQ ID NO: 61468 - DNA, 80 bp, synthetic construct; identical to SEQ ID NO: 26794
  source 1..80: mol_type = other DNA

SEQ ID NO: 61469 - DNA, 80 bp, synthetic construct; identical to SEQ ID NO: 10605
  source 1..80: mol_type = other DNA

SEQ ID NO: 61470 - DNA, 80 bp, synthetic construct; identical to SEQ ID NO: 26796
  source 1..80: mol_type = other DNA

SEQ ID NO: 61471 - DNA, 80 bp, synthetic construct; identical to SEQ ID NO: 26798
  source 1..80: mol_type = other DNA

SEQ ID NO: 61472 - DNA, 80 bp, synthetic construct; identical to SEQ ID NO: 10606
  source 1..80: mol_type = other DNA

SEQ ID NO: 61473 - DNA, 80 bp, synthetic construct; identical to SEQ ID NO: 26800
  source 1..80: mol_type = other DNA

SEQ ID NO: 61474 - DNA, 80 bp, synthetic construct; identical to SEQ ID NO: 10607
  source 1..80: mol_type = other DNA

SEQ ID NO: 61475 - DNA, 80 bp, synthetic construct; identical to SEQ ID NO: 26803
  source 1..80: mol_type = other DNA

SEQ ID NO: 61476 - DNA, 80 bp, synthetic construct; identical to SEQ ID NO: 26804
  source 1..80: mol_type = other DNA

SEQ ID NO: 61477 - DNA, 80 bp, synthetic construct; identical to SEQ ID NO: 26805
  source 1..80: mol_type = other DNA

SEQ ID NO: 61478 - DNA, 80 bp, synthetic construct; identical to SEQ ID NO: 10608
  source 1..80: mol_type = other DNA

SEQ ID NO: 61479 - DNA, 80 bp, synthetic construct; identical to SEQ ID NO: 26807
  source 1..80: mol_type = other DNA

SEQ ID NO: 61480 - DNA, 80 bp, synthetic construct; identical to SEQ ID NO: 26809
  source 1..80: mol_type = other DNA

SEQ ID NO: 61481 - DNA, 80 bp, synthetic construct; identical to SEQ ID NO: 10609
  source 1..80: mol_type = other DNA

SEQ ID NO: 61482 - DNA, 80 bp, synthetic construct; identical to SEQ ID NO: 26811
  source 1..80: mol_type = other DNA

SEQ ID NO: 61483 - DNA, 80 bp, synthetic construct; identical to SEQ ID NO: 26812
  source 1..80: mol_type = other DNA

SEQ ID NO: 61484 - DNA, 80 bp, synthetic construct; identical to SEQ ID NO: 26813
  source 1..80: mol_type = other DNA

SEQ ID NO: 61485 - DNA, 80 bp, synthetic construct; identical to SEQ ID NO: 10610
  source 1..80: mol_type = other DNA

SEQ ID NO: 61486 - DNA, 80 bp, synthetic construct; identical to SEQ ID NO: 26815
  source 1..80: mol_type = other DNA

SEQ ID NO: 61487 - DNA, 80 bp, synthetic construct; identical to SEQ ID NO: 26816
  source 1..80: mol_type = other DNA

SEQ ID NO: 61488 - DNA, 80 bp, synthetic construct; identical to SEQ ID NO: 26817
  source 1..80: mol_type = other DNA

SEQ ID NO: 61489 - DNA, 80 bp, synthetic construct; identical to SEQ ID NO: 26818
  source 1..80: mol_type = other DNA

SEQ ID NO: 61490 - DNA, 80 bp, synthetic construct; identical to SEQ ID NO: 10611
  source 1..80: mol_type = other DNA

SEQ ID NO: 61491 - DNA, 80 bp, synthetic construct; identical to SEQ ID NO: 26820
  source 1..80: mol_type = other DNA

SEQ ID NO: 61492 - DNA, 80 bp, synthetic construct; identical to SEQ ID NO: 26821
  source 1..80: mol_type = other DNA

SEQ ID NO: 61493 - DNA, 80 bp, synthetic construct; identical to SEQ ID NO: 10612
  source 1..80: mol_type = other DNA

SEQ ID NO: 61494 - DNA, 80 bp, synthetic construct; identical to SEQ ID NO: 26823
  source 1..80: mol_type = other DNA

SEQ ID NO: 61495 - DNA, 80 bp, synthetic construct; identical to SEQ ID NO: 26825
  source 1..80: mol_type = other DNA

SEQ ID NO: 61496 - DNA, 80 bp, synthetic construct; identical to SEQ ID NO: 10613
  source 1..80: mol_type = other DNA

SEQ ID NO: 61497 - DNA, 80 bp, synthetic construct; identical to SEQ ID NO: 26829
  source 1..80: mol_type = other DNA

SEQ ID NO: 61498 - DNA, 80 bp, synthetic construct; identical to SEQ ID NO: 26830
  source 1..80: mol_type = other DNA

SEQ ID NO: 61499 - DNA, 80 bp, synthetic construct; identical to SEQ ID NO: 10614
  source 1..80: mol_type = other DNA

SEQ ID NO: 61500 - DNA, 80 bp, synthetic construct; identical to SEQ ID NO: 26832
  source 1..80: mol_type = other DNA

SEQ ID NO: 61501 - DNA, 80 bp, synthetic construct; identical to SEQ ID NO: 26833
  source 1..80: mol_type = other DNA

SEQ ID NO: 61502 - DNA, 80 bp, synthetic construct; identical to SEQ ID NO: 26834
  source 1..80: mol_type = other DNA

SEQ ID NO: 61503 - DNA, 80 bp, synthetic construct; identical to SEQ ID NO: 10615
  source 1..80: mol_type = other DNA

SEQ ID NO: 61504 - DNA, 80 bp, synthetic construct; identical to SEQ ID NO: 26836
  source 1..80: mol_type = other DNA

SEQ ID NO: 61505 - DNA, 80 bp, synthetic construct; identical to SEQ ID NO: 26837
  source 1..80: mol_type = other DNA

SEQ ID NO: 61506 - DNA, 80 bp, synthetic construct; identical to SEQ ID NO: 26838
  source 1..80: mol_type = other DNA

SEQ ID NO: 61507 - DNA, 80 bp, synthetic construct; identical to SEQ ID NO: 10616
  source 1..80: mol_type = other DNA

SEQ ID NO: 61508 - DNA, 80 bp, synthetic construct; identical to SEQ ID NO: 26840
  source 1..80: mol_type = other DNA

SEQ ID NO: 61509 - DNA, 80 bp, synthetic construct; identical to SEQ ID NO: 26841
  source 1..80: mol_type = other DNA

SEQ ID NO: 61510 - DNA, 80 bp, synthetic construct; identical to SEQ ID NO: 10617
  source 1..80: mol_type = other DNA

SEQ ID NO: 61511 - DNA, 80 bp, synthetic construct; identical to SEQ ID NO: 26843
  source 1..80: mol_type = other DNA

SEQ ID NO: 61512 - DNA, 80 bp, synthetic construct; identical to SEQ ID NO: 26844
  source 1..80: mol_type = other DNA

SEQ ID NO: 61513 - DNA, 80 bp, synthetic construct; identical to SEQ ID NO: 26845
  source 1..80: mol_type = other DNA

SEQ ID NO: 61514 - DNA, 80 bp, synthetic construct; identical to SEQ ID NO: 26846
  source 1..80: mol_type = other DNA

SEQ ID NO: 61515 - DNA, 80 bp, synthetic construct; identical to SEQ ID NO: 10618
  source 1..80: mol_type = other DNA

SEQ ID NO: 61516 - DNA, 80 bp, synthetic construct; identical to SEQ ID NO: 26848
  source 1..80: mol_type = other DNA

SEQ ID NO: 61517 - DNA, 80 bp, synthetic construct; identical to SEQ ID NO: 26849
  source 1..80: mol_type = other DNA

SEQ ID NO: 61518 - DNA, 80 bp, synthetic construct; identical to SEQ ID NO: 10619
  source 1..80: mol_type = other DNA

SEQ ID NO: 61519 - DNA, 80 bp, synthetic construct; identical to SEQ ID NO: 26852
  source 1..80: mol_type = other DNA

SEQ ID NO: 61520 - DNA, 80 bp, synthetic construct; identical to SEQ ID NO: 26853
  source 1..80: mol_type = other DNA

SEQ ID NO: 61521 - DNA, 80 bp, synthetic construct; identical to SEQ ID NO: 10620
  source 1..80: mol_type = other DNA

SEQ ID NO: 61522 - DNA, 80 bp, synthetic construct; identical to SEQ ID NO: 26856
  source 1..80: mol_type = other DNA

SEQ ID NO: 61523 - DNA, 80 bp, synthetic construct; identical to SEQ ID NO: 26858
  source 1..80: mol_type = other DNA

SEQ ID NO: 61524 - DNA, 80 bp, synthetic construct; identical to SEQ ID NO: 10621
  source 1..80: mol_type = other DNA

SEQ ID NO: 61525 - DNA, 80 bp, synthetic construct; identical to SEQ ID NO: 26860
  source 1..80: mol_type = other DNA

SEQ ID NO: 61526 - DNA, 80 bp, synthetic construct; identical to SEQ ID NO: 26861
  source 1..80: mol_type = other DNA

SEQ ID NO: 61527 - DNA, 80 bp, synthetic construct; identical to SEQ ID NO: 26862
  source 1..80: mol_type = other DNA

SEQ ID NO: 61528 - DNA, 80 bp, synthetic construct; identical to SEQ ID NO: 10622
  source 1..80: mol_type = other DNA

SEQ ID NO: 61529 - DNA, 80 bp, synthetic construct; identical to SEQ ID NO: 26864
  source 1..80: mol_type = other DNA

SEQ ID NO: 61530 - DNA, 80 bp, synthetic construct; identical to SEQ ID NO: 26865
  source 1..80: mol_type = other DNA

SEQ ID NO: 61531 - DNA, 80 bp, synthetic construct; identical to SEQ ID NO: 26866
  source 1..80: mol_type = other DNA

SEQ ID NO: 61532 - DNA, 80 bp, synthetic construct; identical to SEQ ID NO: 10623
  source 1..80: mol_type = other DNA

SEQ ID NO: 61533 - DNA, 80 bp, synthetic construct; identical to SEQ ID NO: 26868
  source 1..80: mol_type = other DNA

SEQ ID NO: 61534 - DNA, 80 bp, synthetic construct; identical to SEQ ID NO: 26869
  source 1..80: mol_type = other DNA

SEQ ID NO: 61535 - DNA, 80 bp, synthetic construct; identical to SEQ ID NO: 26870
  source 1..80: mol_type = other DNA

SEQ ID NO: 61536 - DNA, 80 bp, synthetic construct; identical to SEQ ID NO: 10624
  source 1..80: mol_type = other DNA

SEQ ID NO: 61537 - DNA, 80 bp, synthetic construct; identical to SEQ ID NO: 26873
  source 1..80: mol_type = other DNA

SEQ ID NO: 61538 - DNA, 80 bp, synthetic construct; identical to SEQ ID NO: 26874
  source 1..80: mol_type = other DNA

SEQ ID NO: 61539 - DNA, 80 bp, synthetic construct; identical to SEQ ID NO: 10625
  source 1..80: mol_type = other DNA

SEQ ID NO: 61540 - DNA, 80 bp, synthetic construct; identical to SEQ ID NO: 26876
  source 1..80: mol_type = other DNA

SEQ ID NO: 61541 - DNA, 80 bp, synthetic construct; identical to SEQ ID NO: 26877
  source 1..80: mol_type = other DNA

SEQ ID NO: 61542 - DNA, 80 bp, synthetic construct; identical to SEQ ID NO: 26878
  source 1..80: mol_type = other DNA

SEQ ID NO: 61543 - DNA, 80 bp, synthetic construct; identical to SEQ ID NO: 26879
  source 1..80: mol_type = other DNA

SEQ ID NO: 61544 - DNA, 80 bp, synthetic construct; identical to SEQ ID NO: 10626
  source 1..80: mol_type = other DNA

SEQ ID NO: 61545 - DNA, 80 bp, synthetic construct; identical to SEQ ID NO: 26881
  source 1..80: mol_type = other DNA

SEQ ID NO: 61546 - DNA, 80 bp, synthetic construct; identical to SEQ ID NO: 26882
  source 1..80: mol_type = other DNA

SEQ ID NO: 61547 - DNA, 80 bp, synthetic construct; identical to SEQ ID NO: 26883
  source 1..80: mol_type = other DNA

SEQ ID NO: 61548 - DNA, 80 bp, synthetic construct; identical to SEQ ID NO: 10627
  source 1..80: mol_type = other DNA

SEQ ID NO: 61549 - DNA, 80 bp, synthetic construct; identical to SEQ ID NO: 26885
  source 1..80: mol_type = other DNA

SEQ ID NO: 61550 - DNA, 80 bp, synthetic construct; identical to SEQ ID NO: 26886
  source 1..80: mol_type = other DNA

SEQ ID NO: 61551 - DNA, 80 bp, synthetic construct; identical to SEQ ID NO: 26887
  source 1..80: mol_type = other DNA

SEQ ID NO: 61552 - DNA, 80 bp, synthetic construct; identical to SEQ ID NO: 10628
  source 1..80: mol_type = other DNA

SEQ ID NO: 61553 - DNA, 80 bp, synthetic construct; identical to SEQ ID NO: 26889
  source 1..80: mol_type = other DNA

SEQ ID NO: 61554 - DNA, 80 bp, synthetic construct; identical to SEQ ID NO: 26890
  source 1..80: mol_type = other DNA

SEQ ID NO: 61555 - DNA, 80 bp, synthetic construct; identical to SEQ ID NO: 26891
  source 1..80: mol_type = other DNA

SEQ ID NO: 61556 - DNA, 80 bp, synthetic construct; identical to SEQ ID NO: 26892
  source 1..80: mol_type = other DNA

SEQ ID NO: 61557 - DNA, 80 bp, synthetic construct; identical to SEQ ID NO: 10629
  source 1..80: mol_type = other DNA

SEQ ID NO: 61558 - DNA, 80 bp, synthetic construct; identical to SEQ ID NO: 26894
  source 1..80: mol_type = other DNA

SEQ ID NO: 61559 - DNA, 80 bp, synthetic construct; identical to SEQ ID NO: 26895
  source 1..80: mol_type = other DNA

SEQ ID NO: 61560 - DNA, 80 bp, synthetic construct; identical to SEQ ID NO: 26896
  source 1..80: mol_type = other DNA

SEQ ID NO: 61561 - DNA, 80 bp, synthetic construct; identical to SEQ ID NO: 10630
  source 1..80: mol_type = other DNA

SEQ ID NO: 61562 - DNA, 80 bp, synthetic construct; identical to SEQ ID NO: 26898
  source 1..80: mol_type = other DNA

SEQ ID NO: 61563 - DNA, 80 bp, synthetic construct; identical to SEQ ID NO: 26899
  source 1..80: mol_type = other DNA

SEQ ID NO: 61564 - DNA, 80 bp, synthetic construct; identical to SEQ ID NO: 26900
  source 1..80: mol_type = other DNA

SEQ ID NO: 61565 - DNA, 80 bp, synthetic construct; identical to SEQ ID NO: 10631
  source 1..80: mol_type = other DNA

SEQ ID NO: 61566 - DNA, 80 bp, synthetic construct; identical to SEQ ID NO: 26902
  source 1..80: mol_type = other DNA

SEQ ID NO: 61567 - DNA, 80 bp, synthetic construct; identical to SEQ ID NO: 26903
  source 1..80: mol_type = other DNA

SEQ ID NO: 61568 - DNA, 80 bp, synthetic construct; identical to SEQ ID NO: 26904
  source 1..80: mol_type = other DNA

SEQ ID NO: 61569 - DNA, 80 bp, synthetic construct; identical to SEQ ID NO: 26905
  source 1..80: mol_type = other DNA

SEQ ID NO: 61570 - DNA, 80 bp, synthetic construct; identical to SEQ ID NO: 10632
  source 1..80: mol_type = other DNA

SEQ ID NO: 61571 - DNA, 80 bp, synthetic construct; identical to SEQ ID NO: 26907
  source 1..80: mol_type = other DNA

SEQ ID NO: 61572 - DNA, 80 bp, synthetic construct; identical to SEQ ID NO: 26908
  source 1..80: mol_type = other DNA

SEQ ID NO: 61573 - DNA, 80 bp, synthetic construct; identical to SEQ ID NO: 10633
  source 1..80: mol_type = other DNA

SEQ ID NO: 61574 - DNA, 80 bp, synthetic construct; identical to SEQ ID NO: 26910
  source 1..80: mol_type = other DNA

SEQ ID NO: 61575 - DNA, 80 bp, synthetic construct; identical to SEQ ID NO: 26911
  source 1..80: mol_type = other DNA

SEQ ID NO: 61576 - DNA, 80 bp, synthetic construct; identical to SEQ ID NO: 26912
  source 1..80: mol_type = other DNA

SEQ ID NO: 61577 - DNA, 80 bp, synthetic construct; identical to SEQ ID NO: 10634
  source 1..80: mol_type = other DNA

SEQ ID NO: 61578 - DNA, 80 bp, synthetic construct; identical to SEQ ID NO: 26914
  source 1..80: mol_type = other DNA

SEQ ID NO: 61579 - DNA, 80 bp, synthetic construct; identical to SEQ ID NO: 26915
  source 1..80: mol_type = other DNA

SEQ ID NO: 61580 - DNA, 80 bp, synthetic construct; identical to SEQ ID NO: 26916
  source 1..80: mol_type = other DNA

SEQ ID NO: 61581 - DNA, 80 bp, synthetic construct; identical to SEQ ID NO: 26917
  source 1..80: mol_type = other DNA

SEQ ID NO: 61582 - DNA, 80 bp, synthetic construct; identical to SEQ ID NO: 10635
  source 1..80: mol_type = other DNA

SEQ ID NO: 61583 - DNA, 80 bp, synthetic construct; identical to SEQ ID NO: 26919
  source 1..80: mol_type = other DNA

SEQ ID NO: 61584 - DNA, 80 bp, synthetic construct; identical to SEQ ID NO: 26921
  source 1..80: mol_type = other DNA

SEQ ID NO: 61585 - DNA, 80 bp, synthetic construct; identical to SEQ ID NO: 10636
  source 1..80: mol_type = other DNA

SEQ ID NO: 61586 - DNA, 80 bp, synthetic construct; identical to SEQ ID NO: 26923
  source 1..80: mol_type = other DNA

SEQ ID NO: 61587 - DNA, 80 bp, synthetic construct; identical to SEQ ID NO: 26924
  source 1..80: mol_type = other DNA

SEQ ID NO: 61588 - DNA, 80 bp, synthetic construct; identical to SEQ ID NO: 10637
  source 1..80: mol_type = other DNA

SEQ ID NO: 61589 - DNA, 80 bp, synthetic construct; identical to SEQ ID NO: 26927
  source 1..80: mol_type = other DNA

SEQ ID NO: 61590 - DNA, 80 bp, synthetic construct; identical to SEQ ID NO: 26928
  source 1..80: mol_type = other DNA

SEQ ID NO: 61591 - DNA, 80 bp, synthetic construct; identical to SEQ ID NO: 10638
  source 1..80: mol_type = other DNA

SEQ ID NO: 61592 - DNA, 80 bp, synthetic construct; identical to SEQ ID NO: 26931
  source 1..80: mol_type = other DNA

SEQ ID NO: 61593 - DNA, 80 bp, synthetic construct; identical to SEQ ID NO: 26932
  source 1..80: mol_type = other DNA

SEQ ID NO: 61594 - DNA, 80 bp, synthetic construct; identical to SEQ ID NO: 10639
  source 1..80: mol_type = other DNA

SEQ ID NO: 61595 - DNA, 80 bp, synthetic construct; identical to SEQ ID NO: 26936
  source 1..80: mol_type = other DNA

SEQ ID NO: 61596 - DNA, 80 bp, synthetic construct; identical to SEQ ID NO: 10640
  source 1..80: mol_type = other DNA

SEQ ID NO: 61597 - DNA, 80 bp, synthetic construct; identical to SEQ ID NO: 26940
  source 1..80: mol_type = other DNA

SEQ ID NO: 61598 - DNA, 80 bp, synthetic construct; identical to SEQ ID NO: 26942
  source 1..80: mol_type = other DNA

SEQ ID NO: 61599 - DNA, 80 bp, synthetic construct; identical to SEQ ID NO: 26944
  source 1..80: mol_type = other DNA

SEQ ID NO: 61600 - DNA, 80 bp, synthetic construct; identical to SEQ ID NO: 26946
  source 1..80: mol_type = other DNA

SEQ ID NO: 61601 - DNA, 80 bp, synthetic construct; identical to SEQ ID NO: 26948
  source 1..80: mol_type = other DNA

SEQ ID NO: 61602 - DNA, 80 bp, synthetic construct; identical to SEQ ID NO: 26950
  source 1..80: mol_type = other DNA

SEQ ID NO: 61603 - DNA, 80 bp, synthetic construct; identical to SEQ ID NO: 26952
  source 1..80: mol_type = other DNA

SEQ ID NO: 61604 - DNA, 80 bp, synthetic construct; identical to SEQ ID NO: 26954
  source 1..80: mol_type = other DNA

SEQ ID NO: 61605 - DNA, 80 bp, synthetic construct; identical to SEQ ID NO: 26955
  source 1..80: mol_type = other DNA

SEQ ID NO: 61606 - DNA, 80 bp, synthetic construct; identical to SEQ ID NO: 26956
  source 1..80: mol_type = other DNA

SEQ ID NO: 61607 - DNA, 80 bp, synthetic construct; identical to SEQ ID NO: 10645
  source 1..80: mol_type = other DNA

SEQ ID NO: 61608 - DNA, 80 bp, synthetic construct; identical to SEQ ID NO: 26959
  source 1..80: mol_type = other DNA

SEQ ID NO: 61609 - DNA, 80 bp, synthetic construct; identical to SEQ ID NO: 10646
  source 1..80: mol_type = other DNA

SEQ ID NO: 61610 - DNA, 80 bp, synthetic construct; identical to SEQ ID NO: 26962
  source 1..80: mol_type = other DNA

SEQ ID NO: 61611 - DNA, 80 bp, synthetic construct; identical to SEQ ID NO: 26963
  source 1..80: mol_type = other DNA

SEQ ID NO: 61612 - DNA, 80 bp, synthetic construct; identical to SEQ ID NO: 26964
  source 1..80: mol_type = other DNA

SEQ ID NO: 61613 - DNA, 80 bp, synthetic construct; identical to SEQ ID NO: 10647
  source 1..80: mol_type = other DNA

SEQ ID NO: 61614 - DNA, 80 bp, synthetic construct; identical to SEQ ID NO: 26966
  source 1..80: mol_type = other DNA

SEQ ID NO: 61615 - DNA, 80 bp, synthetic construct; identical to SEQ ID NO: 26967
  source 1..80: mol_type = other DNA

SEQ ID NO: 61616 - DNA, 80 bp, synthetic construct; identical to SEQ ID NO: 26968
  source 1..80: mol_type = other DNA

SEQ ID NO: 61617 - DNA, 80 bp, synthetic construct; identical to SEQ ID NO: 10648
  source 1..80: mol_type = other DNA

SEQ ID NO: 61618 - DNA, 80 bp, synthetic construct; identical to SEQ ID NO: 26971
  source 1..80: mol_type = other DNA

SEQ ID NO: 61619 - DNA, 80 bp, synthetic construct; identical to SEQ ID NO: 26972
  source 1..80: mol_type = other DNA

SEQ ID NO: 61620 - DNA, 80 bp, synthetic construct; identical to SEQ ID NO: 26973
  source 1..80: mol_type = other DNA

SEQ ID NO: 61621 - DNA, 80 bp, synthetic construct; identical to SEQ ID NO: 10649
  source 1..80: mol_type = other DNA

SEQ ID NO: 61622 - DNA, 80 bp, synthetic construct; identical to SEQ ID NO: 26975
  source 1..80: mol_type = other DNA

SEQ ID NO: 61623 - DNA, 80 bp, synthetic construct; identical to SEQ ID NO: 26976
  source 1..80: mol_type = other DNA

SEQ ID NO: 61624 - DNA, 80 bp, synthetic construct; identical to SEQ ID NO: 26978
  source 1..80: mol_type = other DNA

SEQ ID NO: 61625 - DNA, 80 bp, synthetic construct; identical to SEQ ID NO: 26979
  source 1..80: mol_type = other DNA

SEQ ID NO: 61626 - DNA, 80 bp, synthetic construct; identical to SEQ ID NO: 26980
  source 1..80: mol_type = other DNA

SEQ ID NO: 61627 - DNA, 80 bp, synthetic construct; identical to SEQ ID NO: 10651
  source 1..80: mol_type = other DNA

SEQ ID NO: 61628 - DNA, 80 bp, synthetic construct; identical to SEQ ID NO: 26982
  source 1..80: mol_type = other DNA

SEQ ID NO: 61629 - DNA, 80 bp, synthetic construct; identical to SEQ ID NO: 26983
  source 1..80: mol_type = other DNA

SEQ ID NO: 61630 - DNA, 80 bp, synthetic construct; identical to SEQ ID NO: 26984
  source 1..80: mol_type = other DNA

SEQ ID NO: 61631 - DNA, 80 bp, synthetic construct; identical to SEQ ID NO: 10652
  source 1..80: mol_type = other DNA

SEQ ID NO: 61632 - DNA, 80 bp, synthetic construct; identical to SEQ ID NO: 26986
  source 1..80: mol_type = other DNA

SEQ ID NO: 61633 - DNA, 80 bp, synthetic construct; identical to SEQ ID NO: 26987
  source 1..80: mol_type = other DNA

SEQ ID NO: 61634 - DNA, 80 bp, synthetic construct; identical to SEQ ID NO: 26988
  source 1..80: mol_type = other DNA

SEQ ID NO: 61635 - DNA, 80 bp, synthetic construct; identical to SEQ ID NO: 10653
  source 1..80: mol_type = other DNA

SEQ ID NO: 61636 - DNA, 80 bp, synthetic construct; identical to SEQ ID NO: 26990
  source 1..80: mol_type = other DNA

SEQ ID NO: 61637 - DNA, 80 bp, synthetic construct; identical to SEQ ID NO: 26991
  source 1..80: mol_type = other DNA

SEQ ID NO: 61638 - DNA, 80 bp, synthetic construct; identical to SEQ ID NO: 26992
  source 1..80: mol_type = other DNA

SEQ ID NO: 61639 - DNA, 80 bp, synthetic construct; identical to SEQ ID NO: 26993
  source 1..80: mol_type = other DNA

SEQ ID NO: 61640 - DNA, 80 bp, synthetic construct; identical to SEQ ID NO: 10654
  source 1..80: mol_type = other DNA

SEQ ID NO: 61641 - DNA, 80 bp, synthetic construct; identical to SEQ ID NO: 26995
  source 1..80: mol_type = other DNA

SEQ ID NO: 61642 - DNA, 80 bp, synthetic construct; identical to SEQ ID NO: 26996
  source 1..80: mol_type = other DNA

SEQ ID NO: 61643 - DNA, 80 bp, synthetic construct; identical to SEQ ID NO: 26997
  source 1..80: mol_type = other DNA

SEQ ID NO: 61644 - DNA, 80 bp, synthetic construct; identical to SEQ ID NO: 10655
  source 1..80: mol_type = other DNA

SEQ ID NO: 61645 - DNA, 80 bp, synthetic construct; identical to SEQ ID NO: 26999
  source 1..80: mol_type = other DNA

SEQ ID NO: 61646 - DNA, 80 bp, synthetic construct; identical to SEQ ID NO: 27000
  source 1..80: mol_type = other DNA

SEQ ID NO: 61647 - DNA, 80 bp, synthetic construct; identical to SEQ ID NO: 27001
  source 1..80: mol_type = other DNA

SEQ ID NO: 61648 - DNA, 80 bp, synthetic construct; identical to SEQ ID NO: 10656
  source 1..80: mol_type = other DNA

SEQ ID NO: 61649 - DNA, 80 bp, synthetic construct; identical to SEQ ID NO: 27003
  source 1..80: mol_type = other DNA

SEQ ID NO: 61650 - DNA, 80 bp, synthetic construct; identical to SEQ ID NO: 27004
  source 1..80: mol_type = other DNA

SEQ ID NO: 61651 - DNA, 80 bp, synthetic construct; identical to SEQ ID NO: 27005
  source 1..80: mol_type = other DNA

SEQ ID NO: 61652 - DNA, 80 bp, synthetic construct; identical to SEQ ID NO: 10657
  source 1..80: mol_type = other DNA

SEQ ID NO: 61653 - DNA, 80 bp, synthetic construct; identical to SEQ ID NO: 27007
  source 1..80: mol_type = other DNA

SEQ ID NO: 61654 - DNA, 80 bp, synthetic construct; identical to SEQ ID NO: 27008
  source 1..80: mol_type = other DNA

SEQ ID NO: 61655 - DNA, 80 bp, synthetic construct; identical to SEQ ID NO: 10658
  source 1..80: mol_type = other DNA

SEQ ID NO: 61656 - DNA, 80 bp, synthetic construct; identical to SEQ ID NO: 27010
  source 1..80: mol_type = other DNA

SEQ ID NO: 61657 - DNA, 80 bp, synthetic construct; identical to SEQ ID NO: 27011
  source 1..80: mol_type = other DNA

SEQ ID NO: 61658 - DNA, 80 bp, synthetic construct; identical to SEQ ID NO: 27012
  source 1..80: mol_type = other DNA

SEQ ID NO: 61659 - DNA, 80 bp, synthetic construct; identical to SEQ ID NO: 10659
  source 1..80: mol_type = other DNA

SEQ ID NO: 61660 - DNA, 80 bp, synthetic construct; identical to SEQ ID NO: 27014
  source 1..80: mol_type = other DNA

SEQ ID NO: 61661 - DNA, 80 bp, synthetic construct; identical to SEQ ID NO: 27015
  source 1..80: mol_type = other DNA

SEQ ID NO: 61662 - DNA, 80 bp, synthetic construct; identical to SEQ ID NO: 27016
  source 1..80: mol_type = other DNA

SEQ ID NO: 61663 - DNA, 80 bp, synthetic construct; identical to SEQ ID NO: 10660
  source 1..80: mol_type = other DNA

SEQ ID NO: 61664 - DNA, 80 bp, synthetic construct; identical to SEQ ID NO: 27019
  source 1..80: mol_type = other DNA

SEQ ID NO: 61665 - DNA, 80 bp, synthetic construct; identical to SEQ ID NO: 27020
  source 1..80: mol_type = other DNA

SEQ ID NO: 61666 - DNA, 80 bp, synthetic construct; identical to SEQ ID NO: 10661
  source 1..80: mol_type = other DNA

SEQ ID NO: 61667 - DNA, 80 bp, synthetic construct; identical to SEQ ID NO: 27023
  source 1..80: mol_type = other DNA

SEQ ID NO: 61668 - DNA, 80 bp, synthetic construct; identical to SEQ ID NO: 27024
  source 1..80: mol_type = other DNA

SEQ ID NO: 61669 - DNA, 80 bp, synthetic construct; identical to SEQ ID NO: 10662
  source 1..80: mol_type = other DNA

SEQ ID NO: 61670 - DNA, 80 bp, synthetic construct; identical to SEQ ID NO: 27027
  source 1..80: mol_type = other DNA

SEQ ID NO: 61671 - DNA, 80 bp, synthetic construct; identical to SEQ ID NO: 27028
  source 1..80: mol_type = other DNA

SEQ ID NO: 61672 - DNA, 80 bp, synthetic construct; identical to SEQ ID NO: 27029
  source 1..80: mol_type = other DNA

SEQ ID NO: 61673 - DNA, 80 bp, synthetic construct; identical to SEQ ID NO: 10663
  source 1..80: mol_type = other DNA

SEQ ID NO: 61674 - DNA, 80 bp, synthetic construct; identical to SEQ ID NO: 27031
  source 1..80: mol_type = other DNA

SEQ ID NO: 61675 - DNA, 80 bp, synthetic construct; identical to SEQ ID NO: 27032
  source 1..80: mol_type = other DNA

SEQ ID NO: 61676 - DNA, 80 bp, synthetic construct; identical to SEQ ID NO: 27033
  source 1..80: mol_type = other DNA

SEQ ID NO: 61677 - DNA, 80 bp, synthetic construct; identical to SEQ ID NO: 10664
  source 1..80: mol_type = other DNA

SEQ ID NO: 61678 - DNA, 80 bp, synthetic construct; identical to SEQ ID NO: 27035
  source 1..80: mol_type = other DNA

SEQ ID NO: 61679 - DNA, 80 bp, synthetic construct; identical to SEQ ID NO: 27036
  source 1..80: mol_type = other DNA

SEQ ID NO: 61680 - DNA, 80 bp, synthetic construct; identical to SEQ ID NO: 10665
  source 1..80: mol_type = other DNA

SEQ ID NO: 61681 - DNA, 80 bp, synthetic construct; identical to SEQ ID NO: 27039
  source 1..80: mol_type = other DNA

SEQ ID NO: 61682 - DNA, 80 bp, synthetic construct; identical to SEQ ID NO: 27040
  source 1..80: mol_type = other DNA

SEQ ID NO: 61683 - DNA, 80 bp, synthetic construct; identical to SEQ ID NO: 10666
  source 1..80: mol_type = other DNA

SEQ ID NO: 61684 - DNA, 80 bp, synthetic construct; identical to SEQ ID NO: 27042
  source 1..80: mol_type = other DNA

SEQ ID NO: 61685 - DNA, 80 bp, synthetic construct; identical to SEQ ID NO: 27043
  source 1..80: mol_type = other DNA

SEQ ID NO: 61686 - DNA, 80 bp, synthetic construct; identical to SEQ ID NO: 27044
  source 1..80: mol_type = other DNA

SEQ ID NO: 61687 - DNA, 80 bp, synthetic construct; identical to SEQ ID NO: 27045
  source 1..80: mol_type = other DNA

SEQ ID NO: 61688 - DNA, 80 bp, synthetic construct; identical to SEQ ID NO: 10667
  source 1..80: mol_type = other DNA

SEQ ID NO: 61689 - DNA, 80 bp, synthetic construct; identical to SEQ ID NO: 27048
  source 1..80: mol_type = other DNA

SEQ ID NO: 61690 - DNA, 80 bp, synthetic construct; identical to SEQ ID NO: 10668
  source 1..80: mol_type = other DNA

SEQ ID NO: 61691 - DNA, 80 bp, synthetic construct; identical to SEQ ID NO: 27050
  source 1..80: mol_type = other DNA

SEQ ID NO: 61692 - DNA, 80 bp, synthetic construct; identical to SEQ ID NO: 27051
  source 1..80: mol_type = other DNA

SEQ ID NO: 61693 - DNA, 80 bp, synthetic construct; identical to SEQ ID NO: 27052
  source 1..80: mol_type = other DNA

SEQ ID NO: 61694 - DNA, 80 bp, synthetic construct; identical to SEQ ID NO: 10669
  source 1..80: mol_type = other DNA

SEQ ID NO: 61695 - DNA, 80 bp, synthetic construct; identical to SEQ ID NO: 27055
  source 1..80: mol_type = other DNA

SEQ ID NO: 61696 - DNA, 80 bp, synthetic construct; identical to SEQ ID NO: 27056
  source 1..80: mol_type = other DNA

SEQ ID NO: 61697 - DNA, 80 bp, synthetic construct; identical to SEQ ID NO: 27057
  source 1..80: mol_type = other DNA

SEQ ID NO: 61698 - DNA, 80 bp, synthetic construct; identical to SEQ ID NO: 10670
  source 1..80: mol_type = other DNA

SEQ ID NO: 61699 - DNA, 80 bp, synthetic construct; identical to SEQ ID NO: 27060
  source 1..80: mol_type = other DNA

SEQ ID NO: 61700 - DNA, 80 bp, synthetic construct; identical to SEQ ID NO: 27061
  source 1..80: mol_type = other DNA

SEQ ID NO: 61701 - DNA, 80 bp, synthetic construct; identical to SEQ ID NO: 10671
  source 1..80: mol_type = other DNA

SEQ ID NO: 61702 - DNA, 80 bp, synthetic construct; identical to SEQ ID NO: 27064
  source 1..80: mol_type = other DNA

SEQ ID NO: 61703 - DNA, 80 bp, synthetic construct; identical to SEQ ID NO: 10672
  source 1..80: mol_type = other DNA

SEQ ID NO: 61704 - DNA, 80 bp, synthetic construct; identical to SEQ ID NO: 27066
  source 1..80: mol_type = other DNA

SEQ ID NO: 61705 - DNA, 80 bp, synthetic construct; identical to SEQ ID NO: 27067
  source 1..80: mol_type = other DNA

SEQ ID NO: 61706 - DNA, 80 bp, synthetic construct; identical to SEQ ID NO: 27068
  source 1..80: mol_type = other DNA

SEQ ID NO: 61707 - DNA, 80 bp, synthetic construct; identical to SEQ ID NO: 27069
  source 1..80: mol_type = other DNA

SEQ ID NO: 61708 - DNA, 80 bp, synthetic construct; identical to SEQ ID NO: 10673
  source 1..80: mol_type = other DNA

SEQ ID NO: 61709 - DNA, 80 bp, synthetic construct; identical to SEQ ID NO: 27071
  source 1..80: mol_type = other DNA

SEQ ID NO: 61710 - DNA, 80 bp, synthetic construct; identical to SEQ ID NO: 27072
  source 1..80: mol_type = other DNA

SEQ ID NO: 61711 - DNA, 80 bp, synthetic construct; identical to SEQ ID NO: 10674
  source 1..80: mol_type = other DNA

SEQ ID NO: 61712 - DNA, 80 bp, synthetic construct; identical to SEQ ID NO: 27074
  source 1..80: mol_type = other DNA

SEQ ID NO: 61713 - DNA, 80 bp, synthetic construct; identical to SEQ ID NO: 27075
  source 1..80: mol_type = other DNA

SEQ ID NO: 61714 - DNA, 80 bp, synthetic construct; identical to SEQ ID NO: 27076
  source 1..80: mol_type = other DNA

SEQ ID NO: 61715 - DNA, 80 bp, synthetic construct; identical to SEQ ID NO: 10675
  source 1..80: mol_type = other DNA

SEQ ID NO: 61716 - DNA, 80 bp, synthetic construct; identical to SEQ ID NO: 27078
  source 1..80: mol_type = other DNA

SEQ ID NO: 61717 - DNA, 80 bp, synthetic construct; identical to SEQ ID NO: 27079
  source 1..80: mol_type = other DNA

SEQ ID NO: 61718 - DNA, 80 bp, synthetic construct; identical to SEQ ID NO: 27080
  source 1..80: mol_type = other DNA

SEQ ID NO: 61719 - DNA, 80 bp, synthetic construct; identical to SEQ ID NO: 10676
  source 1..80: mol_type = other DNA

SEQ ID NO: 61720 - DNA, 80 bp, synthetic construct; identical to SEQ ID NO: 27082
  source 1..80: mol_type = other DNA

SEQ ID NO: 61721 - DNA, 80 bp, synthetic construct; identical to SEQ ID NO: 27083
  source 1..80: mol_type = other DNA

SEQ ID NO: 61722 - DNA, 80 bp, synthetic construct; identical to SEQ ID NO: 27084
  source 1..80: mol_type = other DNA

SEQ ID NO: 61723 - DNA, 80 bp, synthetic construct; identical to SEQ ID NO: 10677
  source 1..80: mol_type = other DNA

SEQ ID NO: 61724 - DNA, 80 bp, synthetic construct; identical to SEQ ID NO: 27087
  source 1..80: mol_type = other DNA

SEQ ID NO: 61725 - DNA, 80 bp, synthetic construct; identical to SEQ ID NO: 27088
  source 1..80: mol_type = other DNA

SEQ ID NO: 61726 - DNA, 80 bp, synthetic construct; identical to SEQ ID NO: 10678
  source 1..80: mol_type = other DNA

SEQ ID NO: 61727 - DNA, 80 bp, synthetic construct; identical to SEQ ID NO: 27090
  source 1..80: mol_type = other DNA

SEQ ID NO: 61728 - DNA, 80 bp, synthetic construct; identical to SEQ ID NO: 27091
  source 1..80: mol_type = other DNA

SEQ ID NO: 61729 - DNA, 80 bp, synthetic construct; identical to SEQ ID NO: 27092
  source 1..80: mol_type = other DNA

SEQ ID NO: 61730 - DNA, 80 bp, synthetic construct; identical to SEQ ID NO: 10679
  source 1..80: mol_type = other DNA

SEQ ID NO: 61731 - DNA, 80 bp, synthetic construct; identical to SEQ ID NO: 27094
  source 1..80: mol_type = other DNA

SEQ ID NO: 61732 - DNA, 80 bp, synthetic construct; identical to SEQ ID NO: 27095
  source 1..80: mol_type = other DNA

SEQ ID NO: 61733 - DNA, 80 bp, synthetic construct; identical to SEQ ID NO: 27096
  source 1..80: mol_type = other DNA

SEQ ID NO: 61734 - DNA, 80 bp, synthetic construct; identical to SEQ ID NO: 10680
  source 1..80: mol_type = other DNA

SEQ ID NO: 61735 - DNA, 80 bp, synthetic construct; identical to SEQ ID NO: 27099
  source 1..80: mol_type = other DNA

SEQ ID NO: 61736 - DNA, 80 bp, synthetic construct; identical to SEQ ID NO: 27100
  source 1..80: mol_type = other DNA

SEQ ID NO: 61737 - DNA, 80 bp, synthetic construct; identical to SEQ ID NO: 27101
  source 1..80: mol_type = other DNA

SEQ ID NO: 61738 - DNA, 80 bp, synthetic construct; identical to SEQ ID NO: 10681
  source 1..80: mol_type = other DNA

SEQ ID NO: 61739 - DNA, 80 bp, synthetic construct; identical to SEQ ID NO: 27103
  source 1..80: mol_type = other DNA

SEQ ID NO: 61740 - DNA, 80 bp, synthetic construct; identical to SEQ ID NO: 27104
  source 1..80: mol_type = other DNA

SEQ ID NO: 61741 - DNA, 80 bp, synthetic construct; identical to SEQ ID NO: 10682
  source 1..80: mol_type = other DNA

SEQ ID NO: 61742 - DNA, 80 bp, synthetic construct; identical to SEQ ID NO: 27106
  source 1..80: mol_type = other DNA

SEQ ID NO: 61743 - DNA, 80 bp, synthetic construct; identical to SEQ ID NO: 27107
  source 1..80: mol_type = other DNA

SEQ ID NO: 61744 - DNA, 80 bp, synthetic construct; identical to SEQ ID NO: 27108
  source 1..80: mol_type = other DNA

SEQ ID NO: 61745 - DNA, 80 bp, synthetic construct; identical to SEQ ID NO: 27109
  source 1..80: mol_type = other DNA

SEQ ID NO: 61746 - DNA, 80 bp, synthetic construct; identical to SEQ ID NO: 10683
  source 1..80: mol_type = other DNA

SEQ ID NO: 61747 - DNA, 80 bp, synthetic construct; identical to SEQ ID NO: 27111
  source 1..80: mol_type = other DNA

SEQ ID NO: 61748 - DNA, 80 bp, synthetic construct; identical to SEQ ID NO: 27112
  source 1..80: mol_type = other DNA

SEQ ID NO: 61749 - DNA, 80 bp, synthetic construct; identical to SEQ ID NO: 10684
  source 1..80: mol_type = other DNA

SEQ ID NO: 61750 - DNA, 80 bp, synthetic construct; identical to SEQ ID NO: 27115
  source 1..80: mol_type = other DNA

SEQ ID NO: 61751 - DNA, 80 bp, synthetic construct; identical to SEQ ID NO: 27116
  source 1..80: mol_type = other DNA

SEQ ID NO: 61752 - DNA, 80 bp, synthetic construct; identical to SEQ ID NO: 10685
  source 1..80: mol_type = other DNA

SEQ ID NO: 61753 - DNA, 80 bp, synthetic construct; identical to SEQ ID NO: 27118
  source 1..80: mol_type = other DNA

SEQ ID NO: 61754 - DNA, 80 bp, synthetic construct; identical to SEQ ID NO: 27119
  source 1..80: mol_type = other DNA

SEQ ID NO: 61755 - DNA, 80 bp, synthetic construct; identical to SEQ ID NO: 10686
  source 1..80: mol_type = other DNA

SEQ ID NO: 61756 - DNA, 80 bp, synthetic construct; identical to SEQ ID NO: 27122
  source 1..80: mol_type = other DNA

SEQ ID NO: 61757 - DNA, 80 bp, synthetic construct; identical to SEQ ID NO: 27123
  source 1..80: mol_type = other DNA

SEQ ID NO: 61758 - DNA, 80 bp, synthetic construct; identical to SEQ ID NO: 27124
  source 1..80: mol_type = other DNA

SEQ ID NO: 61759 - DNA, 80 bp, synthetic construct; identical to SEQ ID NO: 27125
  source 1..80: mol_type = other DNA

SEQ ID NO: 61760 - DNA, 80 bp, synthetic construct; identical to SEQ ID NO: 10687
  source 1..80: mol_type = other DNA

SEQ ID NO: 61761 - DNA, 80 bp, synthetic construct; identical to SEQ ID NO: 27127
  source 1..80: mol_type = other DNA

SEQ ID NO: 61762 - DNA, 80 bp, synthetic construct; identical to SEQ ID NO: 27128
  source 1..80: mol_type = other DNA

SEQ ID NO: 61763 - DNA, 80 bp, synthetic construct; identical to SEQ ID NO: 10688
  source 1..80: mol_type = other DNA

SEQ ID NO: 61764 - DNA, 80 bp, synthetic construct; identical to SEQ ID NO: 27130
  source 1..80: mol_type = other DNA

SEQ ID NO: 61765 - DNA, 80 bp, synthetic construct; identical to SEQ ID NO: 27131
  source 1..80: mol_type = other DNA

SEQ ID NO: 61766 - DNA, 80 bp, synthetic construct; identical to SEQ ID NO: 27132
  source 1..80: mol_type = other DNA

SEQ ID NO: 61767 - DNA, 80 bp, synthetic construct; identical to SEQ ID NO: 27133
  source 1..80: mol_type = other DNA

SEQ ID NO: 61768 - DNA, 80 bp, synthetic construct; identical to SEQ ID NO: 10689
  source 1..80: mol_type = other DNA

SEQ ID NO: 61769 - DNA, 80 bp, synthetic construct; identical to SEQ ID NO: 27135
  source 1..80: mol_type = other DNA

SEQ ID NO: 61770 - DNA, 80 bp, synthetic construct; identical to SEQ ID NO: 27136
  source 1..80: mol_type = other DNA

SEQ ID NO: 61771 - DNA, 80 bp, synthetic construct; identical to SEQ ID NO: 27137
  source 1..80: mol_type = other DNA

SEQ ID NO: 61772 - DNA, 80 bp, synthetic construct; identical to SEQ ID NO: 10690
  source 1..80: mol_type = other DNA

SEQ ID NO: 61773 - DNA, 80 bp, synthetic construct; identical to SEQ ID NO: 27139
  source 1..80: mol_type = other DNA

SEQ ID NO: 61774 - DNA, 80 bp, synthetic construct; identical to SEQ ID NO: 27140
  source 1..80: mol_type = other DNA

SEQ ID NO: 61775 - DNA, 80 bp, synthetic construct; identical to SEQ ID NO: 27141
  source 1..80: mol_type = other DNA

SEQ ID NO: 61776 - DNA, 80 bp, synthetic construct; identical to SEQ ID NO: 10691
  source 1..80: mol_type = other DNA

SEQ ID NO: 61777 - DNA, 80 bp, synthetic construct; identical to SEQ ID NO: 27143
  source 1..80: mol_type = other DNA

SEQ ID NO: 61778 - DNA, 80 bp, synthetic construct; identical to SEQ ID NO: 27144
  source 1..80: mol_type = other DNA

SEQ ID NO: 61779 - DNA, 80 bp, synthetic construct; identical to SEQ ID NO: 10692
  source 1..80: mol_type = other DNA

SEQ ID NO: 61780 - DNA, 80 bp, synthetic construct; identical to SEQ ID NO: 27146
  source 1..80: mol_type = other DNA

SEQ ID NO: 61781 - DNA, 80 bp, synthetic construct; identical to SEQ ID NO: 27147
  source 1..80: mol_type = other DNA

SEQ ID NO: 61782 - DNA, 80 bp, synthetic construct; identical to SEQ ID NO: 10693
  source 1..80: mol_type = other DNA

SEQ ID NO: 61783 - DNA, 80 bp, synthetic construct; identical to SEQ ID NO: 27149
  source 1..80: mol_type = other DNA

SEQ ID NO: 61784 - DNA, 80 bp, synthetic construct; identical to SEQ ID NO: 27150
  source 1..80: mol_type = other DNA

SEQ ID NO: 61785 - DNA, 80 bp, synthetic construct; identical to SEQ ID NO: 27151
  source 1..80: mol_type = other DNA

SEQ ID NO: 61786 - DNA, 80 bp, synthetic construct; identical to SEQ ID NO: 10694
  source 1..80: mol_type = other DNA

SEQ ID NO: 61787 - DNA, 80 bp, synthetic construct; identical to SEQ ID NO: 27153
  source 1..80: mol_type = other DNA

SEQ ID NO: 61788 - DNA, 80 bp, synthetic construct; identical to SEQ ID NO: 27154
  source 1..80: mol_type = other DNA

SEQ ID NO: 61789 - DNA, 80 bp, synthetic construct; identical to SEQ ID NO: 27155
  source 1..80: mol_type = other DNA

SEQ ID NO: 61790 - DNA, 80 bp, synthetic construct; identical to SEQ ID NO: 10695
  source 1..80: mol_type = other DNA

SEQ ID NO: 61791 - DNA, 80 bp, synthetic construct; identical to SEQ ID NO: 27157
  source 1..80: mol_type = other DNA

SEQ ID NO: 61792 - DNA, 80 bp, synthetic construct; identical to SEQ ID NO: 27158
  source 1..80: mol_type = other DNA

SEQ ID NO: 61793 - DNA, 80 bp, synthetic construct; identical to SEQ ID NO: 27159
  source 1..80: mol_type = other DNA

SEQ ID NO: 61794 - DNA, 80 bp, synthetic construct; identical to SEQ ID NO: 27160
  source 1..80: mol_type = other DNA

SEQ ID NO: 61795 - DNA, 80 bp, synthetic construct; identical to SEQ ID NO: 10696
  source 1..80: mol_type = other DNA

SEQ ID NO: 61796 - DNA, 80 bp, synthetic construct; identical to SEQ ID NO: 27162
  source 1..80: mol_type = other DNA

SEQ ID NO: 61797 - DNA, 80 bp, synthetic construct; identical to SEQ ID NO: 27163
  source 1..80: mol_type = other DNA

SEQ ID NO: 61798 - DNA, 80 bp, synthetic construct; identical to SEQ ID NO: 10697
  source 1..80: mol_type = other DNA

SEQ ID NO: 61799 - DNA, 80 bp, synthetic construct; identical to SEQ ID NO: 27166
  source 1..80: mol_type = other DNA

SEQ ID NO: 61800 - DNA, 80 bp, synthetic construct; identical to SEQ ID NO: 27167
  source 1..80: mol_type = other DNA

SEQ ID NO: 61801 - DNA, 80 bp, synthetic construct; identical to SEQ ID NO: 27168
  source 1..80: mol_type = other DNA

SEQ ID NO: 61802 - DNA, 80 bp, synthetic construct; identical to SEQ ID NO: 10698
  source 1..80: mol_type = other DNA

SEQ ID NO: 61803 - DNA, 80 bp, synthetic construct; identical to SEQ ID NO: 27170
  source 1..80: mol_type = other DNA

SEQ ID NO: 61804 - DNA, 80 bp, synthetic construct; identical to SEQ ID NO: 27171
  source 1..80: mol_type = other DNA

SEQ ID NO: 61805 - DNA, 80 bp, synthetic construct; identical to SEQ ID NO: 27172
  source 1..80: mol_type = other DNA

SEQ ID NO: 61806 - DNA, 80 bp, synthetic construct; identical to SEQ ID NO: 10699
  source 1..80: mol_type = other DNA

SEQ ID NO: 61807 - DNA, 80 bp, synthetic construct; identical to SEQ ID NO: 27174
  source 1..80: mol_type = other DNA

SEQ ID NO: 61808 - DNA, 80 bp, synthetic construct; identical to SEQ ID NO: 27175
  source 1..80: mol_type = other DNA

SEQ ID NO: 61809 - DNA, 80 bp, synthetic construct; identical to SEQ ID NO: 27176
  source 1..80: mol_type = other DNA

SEQ ID NO: 61810 - DNA, 80 bp, synthetic construct; identical to SEQ ID NO: 10700
  source 1..80: mol_type = other DNA

SEQ ID NO: 61811 - DNA, 80 bp, synthetic construct; identical to SEQ ID NO: 27178
  source 1..80: mol_type = other DNA

SEQ ID NO: 61812 - DNA, 80 bp, synthetic construct; identical to SEQ ID NO: 27179
  source 1..80: mol_type = other DNA

SEQ ID NO: 61813 - DNA, 80 bp, synthetic construct; identical to SEQ ID NO: 27180
  source 1..80: mol_type = other DNA

SEQ ID NO: 61814 - DNA, 80 bp, synthetic construct; identical to SEQ ID NO: 10701
  source 1..80: mol_type = other DNA

SEQ ID NO: 61815 - DNA, 80 bp, synthetic construct; identical to SEQ ID NO: 27183
  source 1..80: mol_type = other DNA

SEQ ID NO: 61816 - DNA, 80 bp, synthetic construct; identical to SEQ ID NO: 10702
  source 1..80: mol_type = other DNA

SEQ ID NO: 61817 - DNA, 80 bp, synthetic construct; identical to SEQ ID NO: 27185
  source 1..80: mol_type = other DNA

SEQ ID NO: 61818 - DNA, 80 bp, synthetic construct; identical to SEQ ID NO: 27186
  source 1..80: mol_type = other DNA

SEQ ID NO: 61819 - DNA, 80 bp, synthetic construct; identical to SEQ ID NO: 27187
  source 1..80: mol_type = other DNA

SEQ ID NO: 61820 - DNA, 80 bp, synthetic construct; identical to SEQ ID NO: 27188
  source 1..80: mol_type = other DNA

SEQ ID NO: 61821 - DNA, 80 bp, synthetic construct; identical to SEQ ID NO: 10703
  source 1..80: mol_type = other DNA

SEQ ID NO: 61822 - DNA, 80 bp, synthetic construct; identical to SEQ ID NO: 27190
  source 1..80: mol_type = other DNA

SEQ ID NO: 61823 - DNA, 80 bp, synthetic construct; identical to SEQ ID NO: 27191
  source 1..80: mol_type = other DNA

SEQ ID NO: 61824 - DNA, 80 bp, synthetic construct; identical to SEQ ID NO: 10704
  source 1..80: mol_type = other DNA

SEQ ID NO: 61825 - DNA, 80 bp, synthetic construct; identical to SEQ ID NO: 27193
  source 1..80: mol_type = other DNA

SEQ ID NO: 61826 - DNA, 80 bp, synthetic construct; identical to SEQ ID NO: 27194
  source 1..80: mol_type = other DNA

SEQ ID NO: 61827 - DNA, 80 bp, synthetic construct; identical to SEQ ID NO: 27196
  source 1..80: mol_type = other DNA

SEQ ID NO: 61828 - DNA, 80 bp, synthetic construct; identical to SEQ ID NO: 10705
  source 1..80: mol_type = other DNA

SEQ ID NO: 61829 - DNA, 80 bp, synthetic construct; identical to SEQ ID NO: 27198
  source 1..80: mol_type = other DNA

SEQ ID NO: 61830 - DNA, 80 bp, synthetic construct; identical to SEQ ID NO: 27199
  source 1..80: mol_type = other DNA

SEQ ID NO: 61831 - DNA, 80 bp, synthetic construct; identical to SEQ ID NO: 10706
  source 1..80: mol_type = other DNA

SEQ ID NO: 61832 - DNA, 80 bp, synthetic construct; identical to SEQ ID NO: 27201
  source 1..80: mol_type = other DNA

SEQ ID NO: 61833 - DNA, 80 bp, synthetic construct; identical to SEQ ID NO: 27202
  source 1..80: mol_type = other DNA

SEQ ID NO: 61834 - DNA, 80 bp, synthetic construct; identical to SEQ ID NO: 27203
  source 1..80: mol_type = other DNA

SEQ ID NO: 61835 - DNA, 80 bp, synthetic construct; identical to SEQ ID NO: 27204
  source 1..80: mol_type = other DNA

SEQ ID NO: 61836 - DNA, 80 bp, synthetic construct; identical to SEQ ID NO: 10707
  source 1..80: mol_type = other DNA

SEQ ID NO: 61837 - DNA, 80 bp, synthetic construct; identical to SEQ ID NO: 27206
  source 1..80: mol_type = other DNA

SEQ ID NO: 61838 - DNA, 80 bp, synthetic construct; identical to SEQ ID NO: 27207
  source 1..80: mol_type = other DNA

SEQ ID NO: 61839 - DNA, 80 bp, synthetic construct; identical to SEQ ID NO: 10708
  source 1..80: mol_type = other DNA

SEQ ID NO: 61840 - DNA, 80 bp, synthetic construct; identical to SEQ ID NO: 27209
  source 1..80: mol_type = other DNA

SEQ ID NO: 61841 - DNA, 80 bp, synthetic construct; identical to SEQ ID NO: 27210
  source 1..80: mol_type = other DNA

SEQ ID NO: 61842 - DNA, 80 bp, synthetic construct; identical to SEQ ID NO: 10709
  source 1..80: mol_type = other DNA

SEQ ID NO: 61843 - DNA, 80 bp, synthetic construct; identical to SEQ ID NO: 27213
  source 1..80: mol_type = other DNA

SEQ ID NO: 61844 - DNA, 80 bp, synthetic construct; identical to SEQ ID NO: 27214
  source 1..80: mol_type = other DNA

SEQ ID NO: 61845 - DNA, 80 bp, synthetic construct; identical to SEQ ID NO: 27215
  source 1..80: mol_type = other DNA

SEQ ID NO: 61846 - DNA, 80 bp, synthetic construct; identical to SEQ ID NO: 27216
  source 1..80: mol_type = other DNA

SEQ ID NO: 61847 - DNA, 80 bp, synthetic construct; identical to SEQ ID NO: 10710
  source 1..80: mol_type = other DNA

SEQ ID NO: 61848 - DNA, 80 bp, synthetic construct; identical to SEQ ID NO: 27218
  source 1..80: mol_type = other DNA

SEQ ID NO: 61849 - DNA, 80 bp, synthetic construct; identical to SEQ ID NO: 27219
  source 1..80: mol_type = other DNA

SEQ ID NO: 61850 - DNA, 80 bp, synthetic construct; identical to SEQ ID NO: 27220
  source 1..80: mol_type = other DNA

SEQ ID NO: 61851 - DNA, 80 bp, synthetic construct; identical to SEQ ID NO: 10711
  source 1..80: mol_type = other DNA

SEQ ID NO: 61852 - DNA, 80 bp, synthetic construct; identical to SEQ ID NO: 27222
  source 1..80: mol_type = other DNA

SEQ ID NO: 61853 - DNA, 80 bp, synthetic construct; identical to SEQ ID NO: 27223
  source 1..80: mol_type = other DNA

SEQ ID NO: 61854 - DNA, 80 bp, synthetic construct; identical to SEQ ID NO: 10712
  source 1..80: mol_type = other DNA

SEQ ID NO: 61855 - DNA, 80 bp, synthetic construct; identical to SEQ ID NO: 27226
  source 1..80: mol_type = other DNA

SEQ ID NO: 61856 - DNA, 80 bp, synthetic construct; identical to SEQ ID NO: 27227
  source 1..80: mol_type = other DNA

SEQ ID NO: 61857 - DNA, 80 bp, synthetic construct; identical to SEQ ID NO: 27228
  source 1..80: mol_type = other DNA

SEQ ID NO: 61858 - DNA, 80 bp, synthetic construct; identical to SEQ ID NO: 10713
  source 1..80: mol_type = other DNA

SEQ ID NO: 61859 - DNA, 80 bp, synthetic construct; identical to SEQ ID NO: 27230
  source 1..80: mol_type = other DNA

SEQ ID NO: 61860 - DNA, 80 bp, synthetic construct; identical to SEQ ID NO: 27231
  source 1..80: mol_type = other DNA

SEQ ID NO: 61861 - DNA, 80 bp, synthetic construct; identical to SEQ ID NO: 10714
  source 1..80: mol_type = other DNA

SEQ ID NO: 61862 - DNA, 80 bp, synthetic construct; identical to SEQ ID NO: 27233
  source 1..80: mol_type = other DNA

SEQ ID NO: 61863 - DNA, 80 bp, synthetic construct; identical to SEQ ID NO: 27234
  source 1..80: mol_type = other DNA

SEQ ID NO: 61864 - DNA, 80 bp, synthetic construct; identical to SEQ ID NO: 27235
  source 1..80: mol_type = other DNA

SEQ ID NO: 61865 - DNA, 80 bp, synthetic construct; identical to SEQ ID NO: 10715
  source 1..80: mol_type = other DNA

SEQ ID NO: 61866 - DNA, 80 bp, synthetic construct; identical to SEQ ID NO: 27237
  source 1..80: mol_type = other DNA

SEQ ID NO: 61867 - DNA, 80 bp, synthetic construct; identical to SEQ ID NO: 27238
  source 1..80: mol_type = other DNA

SEQ ID NO: 61868 - DNA, 80 bp, synthetic construct; identical to SEQ ID NO: 27239
  source 1..80: mol_type = other DNA

SEQ ID NO: 61869 - DNA, 80 bp, synthetic construct; identical to SEQ ID NO: 27240
  source 1..80: mol_type = other DNA

SEQ ID NO: 61870 - DNA, 80 bp, synthetic construct; identical to SEQ ID NO: 10716
  source 1..80: mol_type = other DNA

SEQ ID NO: 61871 - DNA, 80 bp, synthetic construct; identical to SEQ ID NO: 27242
  source 1..80: mol_type = other DNA

SEQ ID NO: 61872 - DNA, 80 bp, synthetic construct; identical to SEQ ID NO: 27243
  source 1..80: mol_type = other DNA

SEQ ID NO: 61873 - DNA, 80 bp, synthetic construct; identical to SEQ ID NO: 10717
  source 1..80: mol_type = other DNA

SEQ ID NO: 61874 - DNA, 80 bp, synthetic construct; identical to SEQ ID NO: 27245
  source 1..80: mol_type = other DNA

SEQ ID NO: 61875 - DNA, 80 bp, synthetic construct; identical to SEQ ID NO: 27246
  source 1..80: mol_type = other DNA

SEQ ID NO: 61876 - DNA, 80 bp, synthetic construct; identical to SEQ ID NO: 27247
  source 1..80: mol_type = other DNA

SEQ ID NO: 61877 - DNA, 80 bp, synthetic construct; identical to SEQ ID NO: 27248
  source 1..80: mol_type = other DNA

SEQ ID NO: 61878 - DNA, 80 bp, synthetic construct; identical to SEQ ID NO: 10718
  source 1..80: mol_type = other DNA

SEQ ID NO: 61879 - DNA, 80 bp, synthetic construct; identical to SEQ ID NO: 27250
  source 1..80: mol_type = other DNA

SEQ ID NO: 61880 - DNA, 80 bp, synthetic construct; identical to SEQ ID NO: 27251
  source 1..80: mol_type = other DNA

SEQ ID NO: 61881 - DNA, 80 bp, synthetic construct; identical to SEQ ID NO: 27252
  source 1..80: mol_type = other DNA

SEQ ID NO: 61882 - DNA, 80 bp, synthetic construct; identical to SEQ ID NO: 10719
  source 1..80: mol_type = other DNA

SEQ ID NO: 61883 - DNA, 80 bp, synthetic construct; identical to SEQ ID NO: 27254
  source 1..80: mol_type = other DNA

SEQ ID NO: 61884 - DNA, 80 bp, synthetic construct; identical to SEQ ID NO: 27255
  source 1..80: mol_type = other DNA

SEQ ID NO: 61885 - DNA, 80 bp, synthetic construct; identical to SEQ ID NO: 27256
  source 1..80: mol_type = other DNA

SEQ ID NO: 61886 - DNA, 80 bp, synthetic construct; identical to SEQ ID NO: 10720
  source 1..80: mol_type = other DNA

SEQ ID NO: 61887 - DNA, 80 bp, synthetic construct; identical to SEQ ID NO: 27258
  source 1..80: mol_type = other DNA

SEQ ID NO: 61888 - DNA, 80 bp, synthetic construct; identical to SEQ ID NO: 27259
  source 1..80: mol_type = other DNA

SEQ ID NO: 61889 - DNA, 80 bp, synthetic construct; identical to SEQ ID NO: 27260
  source 1..80: mol_type = other DNA

SEQ ID NO: 61890 - DNA, 80 bp, synthetic construct; identical to SEQ ID NO: 10721
  source 1..80: mol_type = other DNA

SEQ ID NO: 61891 - DNA, 80 bp, synthetic construct; identical to SEQ ID NO: 27262
  source 1..80: mol_type = other DNA

SEQ ID NO: 61892 - DNA, 80 bp, synthetic construct; identical to SEQ ID NO: 27263
  source 1..80: mol_type = other DNA

SEQ ID NO: 61893 - DNA, 80 bp, synthetic construct; identical to SEQ ID NO: 27264
  source 1..80: mol_type = other DNA

SEQ ID NO: 61894 - DNA, 80 bp, synthetic construct; identical to SEQ ID NO: 10722
  source 1..80: mol_type = other DNA

SEQ ID NO: 61895 - DNA, 80 bp, synthetic construct; identical to SEQ ID NO: 27266
  source 1..80: mol_type = other DNA

SEQ ID NO: 61896 - DNA, 80 bp, synthetic construct; identical to SEQ ID NO: 27267
  source 1..80: mol_type = other DNA

SEQ ID NO: 61897 - DNA, 80 bp, synthetic construct; identical to SEQ ID NO: 10723
  source 1..80: mol_type = other DNA

SEQ ID NO: 61898 - DNA, 80 bp, synthetic construct; identical to SEQ ID NO: 27269
  source 1..80: mol_type = other DNA

SEQ ID NO: 61899 - DNA, 80 bp, synthetic construct; identical to SEQ ID NO: 27270
  source 1..80: mol_type = other DNA

SEQ ID NO: 61900 - DNA, 80 bp, synthetic construct; identical to SEQ ID NO: 27271
  source 1..80: mol_type = other DNA

SEQ ID NO: 61901 - DNA, 80 bp, synthetic construct; identical to SEQ ID NO: 10724
  source 1..80: mol_type = other DNA

SEQ ID NO: 61902 - DNA, 80 bp, synthetic construct; identical to SEQ ID NO: 27273
  source 1..80: mol_type = other DNA

SEQ ID NO: 61903 - DNA, 80 bp, synthetic construct; identical to SEQ ID NO: 27274
  source 1..80: mol_type = other DNA

SEQ ID NO: 61904 - DNA, 80 bp, synthetic construct; identical to SEQ ID NO: 27275
  source 1..80: mol_type = other DNA

SEQ ID NO: 61905 - DNA, 80 bp, synthetic construct; identical to SEQ ID NO: 10725
  source 1..80: mol_type = other DNA

SEQ ID NO: 61906 - DNA, 80 bp, synthetic construct; identical to SEQ ID NO: 27277
  source 1..80: mol_type = other DNA

SEQ ID NO: 61907 - DNA, 80 bp, synthetic construct; identical to SEQ ID NO: 27279
  source 1..80: mol_type = other DNA

SEQ ID NO: 61908 - DNA, 80 bp, synthetic construct; identical to SEQ ID NO: 27280
  source 1..80: mol_type = other DNA

SEQ ID NO: 61909 - DNA, 80 bp, synthetic construct; identical to SEQ ID NO: 10726
  source 1..80: mol_type = other DNA

SEQ ID NO: 61910 - DNA, 80 bp, synthetic construct; identical to SEQ ID NO: 27282
  source 1..80: mol_type = other DNA

SEQ ID NO: 61911 - DNA, 80 bp, synthetic construct; identical to SEQ ID NO: 27283
  source 1..80: mol_type = other DNA

SEQ ID NO: 61912 - DNA, 80 bp, synthetic construct; identical to SEQ ID NO: 27284
  source 1..80: mol_type = other DNA

SEQ ID NO: 61913 - DNA, 80 bp, synthetic construct; identical to SEQ ID NO: 10727
  source 1..80: mol_type = other DNA

SEQ ID NO: 61914 - DNA, 80 bp, synthetic construct; identical to SEQ ID NO: 27286
  source 1..80: mol_type = other DNA

SEQ ID NO: 61915 - DNA, 80 bp, synthetic construct; identical to SEQ ID NO: 27287
  source 1..80: mol_type = other DNA

SEQ ID NO: 61916 - DNA, 80 bp, synthetic construct; identical to SEQ ID NO: 10728
  source 1..80: mol_type = other DNA

SEQ ID NO: 61917 - DNA, 80 bp, synthetic construct; identical to SEQ ID NO: 27289
  source 1..80: mol_type = other DNA

SEQ ID NO: 61918 - DNA, 80 bp, synthetic construct; identical to SEQ ID NO: 27290
  source 1..80: mol_type = other DNA

SEQ ID NO: 61919 - DNA, 80 bp, synthetic construct; identical to SEQ ID NO: 27291
  source 1..80: mol_type = other DNA

SEQ ID NO: 61920 - DNA, 80 bp, synthetic construct; identical to SEQ ID NO: 10729
  source 1..80: mol_type = other DNA

SEQ ID NO: 61921 - DNA, 80 bp, synthetic construct; identical to SEQ ID NO: 27294
  source 1..80: mol_type = other DNA

SEQ ID NO: 61922 - DNA, 80 bp, synthetic construct; identical to SEQ ID NO: 27295
  source 1..80: mol_type = other DNA

SEQ ID NO: 61923 - DNA, 80 bp, synthetic construct; identical to SEQ ID NO: 27296
  source 1..80: mol_type = other DNA

SEQ ID NO: 61924 - DNA, 80 bp, synthetic construct; identical to SEQ ID NO: 10730
  source 1..80: mol_type = other DNA

SEQ ID NO: 61925 - DNA, 80 bp, synthetic construct; identical to SEQ ID NO: 27298
  source 1..80: mol_type = other DNA

SEQ ID NO: 61926 - DNA, 80 bp, synthetic construct; identical to SEQ ID NO: 27299
  source 1..80: mol_type = other DNA

SEQ ID NO: 61927 - DNA, 80 bp, synthetic construct; identical to SEQ ID NO: 27300
  source 1..80: mol_type = other DNA

SEQ ID NO: 61928 - DNA, 80 bp, synthetic construct; identical to SEQ ID NO: 10731
  source 1..80: mol_type = other DNA

SEQ ID NO: 61929 - DNA, 80 bp, synthetic construct; identical to SEQ ID NO: 27302
  source 1..80: mol_type = other DNA

SEQ ID NO: 61930 - DNA, 80 bp, synthetic construct; identical to SEQ ID NO: 27303
  source 1..80: mol_type = other DNA

SEQ ID NO: 61931 - DNA, 80 bp, synthetic construct; identical to SEQ ID NO: 27304
  source 1..80: mol_type = other DNA

SEQ ID NO: 61932 - DNA, 80 bp, synthetic construct; identical to SEQ ID NO: 10732
  source 1..80: mol_type = other DNA

SEQ ID NO: 61933 - DNA, 80 bp, synthetic construct; identical to SEQ ID NO: 27306
  source 1..80: mol_type = other DNA

SEQ ID NO: 61934 - DNA, 80 bp, synthetic construct; identical to SEQ ID NO: 27307
  source 1..80: mol_type = other DNA

SEQ ID NO: 61935 - DNA, 80 bp, synthetic construct; identical to SEQ ID NO: 10733
  source 1..80: mol_type = other DNA

SEQ ID NO: 61936 - DNA, 80 bp, synthetic construct; identical to SEQ ID NO: 27310
  source 1..80: mol_type = other DNA

SEQ ID NO: 61937 - DNA, 80 bp, synthetic construct; identical to SEQ ID NO: 27311
  source 1..80: mol_type = other DNA

SEQ ID NO: 61938 - DNA, 80 bp, synthetic construct; identical to SEQ ID NO: 10734
  source 1..80: mol_type = other DNA

SEQ ID NO: 61939 - DNA, 80 bp, synthetic construct; identical to SEQ ID NO: 27313
  source 1..80: mol_type = other DNA

SEQ ID NO: 61940 - DNA, 80 bp, synthetic construct; identical to SEQ ID NO: 27314
  source 1..80: mol_type = other DNA

SEQ ID NO: 61941 - DNA, 80 bp, synthetic construct; identical to SEQ ID NO: 27315
  source 1..80: mol_type = other DNA

SEQ ID NO: 61942 - DNA, 80 bp, synthetic construct; identical to SEQ ID NO: 10735
  source 1..80: mol_type = other DNA

SEQ ID NO: 61943 - DNA, 80 bp, synthetic construct; identical to SEQ ID NO: 27317
  source 1..80: mol_type = other DNA

SEQ ID NO: 61944 - DNA, 80 bp, synthetic construct; identical to SEQ ID NO: 27318
  source 1..80: mol_type = other DNA

SEQ ID NO: 61945 - DNA, 80 bp, synthetic construct; identical to SEQ ID NO: 27319
  source 1..80: mol_type = other DNA

SEQ ID NO: 61946 - DNA, 80 bp, synthetic construct; identical to SEQ ID NO: 10736
  source 1..80: mol_type = other DNA

SEQ ID NO: 61947 - DNA, 80 bp, synthetic construct; identical to SEQ ID NO: 27321
  source 1..80: mol_type = other DNA

SEQ ID NO: 61948 - DNA, 80 bp, synthetic construct; identical to SEQ ID NO: 27322
  source 1..80: mol_type = other DNA

SEQ ID NO: 61949 - DNA, 80 bp, synthetic construct; identical to SEQ ID NO: 27323
  source 1..80: mol_type = other DNA

SEQ ID NO: 61950 - DNA, 80 bp, synthetic construct; identical to SEQ ID NO: 10737
  source 1..80: mol_type = other DNA

SEQ ID NO: 61951 - DNA, 80 bp, synthetic construct; identical to SEQ ID NO: 27325
  source 1..80: mol_type = other DNA

SEQ ID NO: 61952 - DNA, 80 bp, synthetic construct; identical to SEQ ID NO: 27326
  source 1..80: mol_type = other DNA

SEQ ID NO: 61953 - DNA, 80 bp, synthetic construct; identical to SEQ ID NO: 27327
  source 1..80: mol_type = other DNA

SEQ ID NO: 61954 - DNA, 80 bp, synthetic construct; identical to SEQ ID NO: 10738
  source 1..80: mol_type = other DNA

SEQ ID NO: 61955 - DNA, 80 bp, synthetic construct; identical to SEQ ID NO: 27329
  source 1..80: mol_type = other DNA

SEQ ID NO: 61956 - DNA, 80 bp, synthetic construct; identical to SEQ ID NO: 27330
  source 1..80: mol_type = other DNA

SEQ ID NO: 61957 - DNA, 80 bp, synthetic construct; identical to SEQ ID NO: 27331
  source 1..80: mol_type = other DNA

SEQ ID NO: 61958 - DNA, 80 bp, synthetic construct; identical to SEQ ID NO: 27332
  source 1..80: mol_type = other DNA

SEQ ID NO: 61959 - DNA, 80 bp, synthetic construct; identical to SEQ ID NO: 10739
  source 1..80: mol_type = other DNA

SEQ ID NO: 61960 - DNA, 80 bp, synthetic construct; identical to SEQ ID NO: 27334
  source 1..80: mol_type = other DNA

SEQ ID NO: 61961 - DNA, 80 bp, synthetic construct; identical to SEQ ID NO: 27335
  source 1..80: mol_type = other DNA

SEQ ID NO: 61962 - DNA, 80 bp, synthetic construct; identical to SEQ ID NO: 27336
  source 1..80: mol_type = other DNA

SEQ ID NO: 61963 - DNA, 80 bp, synthetic construct; identical to SEQ ID NO: 10740
  source 1..80: mol_type = other DNA

SEQ ID NO: 61964 - DNA, 80 bp, synthetic construct; identical to SEQ ID NO: 27338
  source 1..80: mol_type = other DNA

SEQ ID NO: 61965 - DNA, 80 bp, synthetic construct; identical to SEQ ID NO: 10741
  source 1..80: mol_type = other DNA

SEQ ID NO: 61966 - DNA, 80 bp, synthetic construct; identical to SEQ ID NO: 27341
  source 1..80: mol_type = other DNA

SEQ ID NO: 61967 - DNA, 80 bp, synthetic construct; identical to SEQ ID NO: 27342
  source 1..80: mol_type = other DNA

SEQ ID NO: 61968 - DNA, 80 bp, synthetic construct; identical to SEQ ID NO: 27344
  source 1..80: mol_type = other DNA

SEQ ID NO: 61969 - DNA, 80 bp, synthetic construct; identical to SEQ ID NO: 10742
  source 1..80: mol_type = other DNA

SEQ ID NO: 61970 - DNA, 80 bp, synthetic construct; identical to SEQ ID NO: 27346
  source 1..80: mol_type = other DNA

SEQ ID NO: 61971 - DNA, 80 bp, synthetic construct; identical to SEQ ID NO: 27347
  source 1..80: mol_type = other DNA

SEQ ID NO: 61972 - DNA, 80 bp, synthetic construct; identical to SEQ ID NO: 10743
  source 1..80: mol_type = other DNA

SEQ ID NO: 61973 - DNA, 80 bp, synthetic construct; identical to SEQ ID NO: 27349
  source 1..80: mol_type = other DNA

SEQ ID NO: 61974 - DNA, 80 bp, synthetic construct; identical to SEQ ID NO: 27350
  source 1..80: mol_type = other DNA

SEQ ID NO: 61975 - DNA, 80 bp, synthetic construct; identical to SEQ ID NO: 27351
  source 1..80: mol_type = other DNA

SEQ ID NO: 61976 - DNA, 80 bp, synthetic construct; identical to SEQ ID NO: 27352
  source 1..80: mol_type = other DNA

SEQ ID NO: 61977 - DNA, 80 bp, synthetic construct; identical to SEQ ID NO: 10744
  source 1..80: mol_type = other DNA

SEQ ID NO: 61978 - DNA, 80 bp, synthetic construct; identical to SEQ ID NO: 27354
  source 1..80: mol_type = other DNA

SEQ ID NO: 61979 - DNA, 80 bp, synthetic construct; identical to SEQ ID NO: 27355
  source 1..80: mol_type = other DNA

SEQ ID NO: 61980 - DNA, 80 bp, synthetic construct; identical to SEQ ID NO: 10745
  source 1..80: mol_type = other DNA

SEQ ID NO: 61981 - DNA, 80 bp, synthetic construct; identical to SEQ ID NO: 27357
  source 1..80: mol_type = other DNA

SEQ ID NO: 61982 - DNA, 80 bp, synthetic construct; identical to SEQ ID NO: 27358
  source 1..80: mol_type = other DNA

SEQ ID NO: 61983 - DNA, 80 bp, synthetic construct; identical to SEQ ID NO: 27359
  source 1..80: mol_type = other DNA

SEQ ID NO: 61984 - DNA, 80 bp, synthetic construct; identical to SEQ ID NO: 10746
  source 1..80: mol_type = other DNA

SEQ ID NO: 61985 - DNA, 80 bp, synthetic construct; identical to SEQ ID NO: 27362
  source 1..80: mol_type = other DNA

SEQ ID NO: 61986 - DNA, 80 bp, synthetic construct; identical to SEQ ID NO: 27363
  source 1..80: mol_type = other DNA

SEQ ID NO: 61987 - DNA, 80 bp, synthetic construct; identical to SEQ ID NO: 10747
  source 1..80: mol_type = other DNA

SEQ ID NO: 61988 - DNA, 80 bp, synthetic construct; identical to SEQ ID NO: 27365
  source 1..80: mol_type = other DNA

SEQ ID NO: 61989 - DNA, 80 bp, synthetic construct; identical to SEQ ID NO: 27366
  source 1..80: mol_type = other DNA

SEQ ID NO: 61990 - DNA, 80 bp, synthetic construct; identical to SEQ ID NO: 27367
  source 1..80: mol_type = other DNA

SEQ ID NO: 61991 - DNA, 80 bp, synthetic construct; identical to SEQ ID NO: 10748
  source 1..80: mol_type = other DNA

SEQ ID NO: 61992 - DNA, 80 bp, synthetic construct; identical to SEQ ID NO: 27369
  source 1..80: mol_type = other DNA

SEQ ID NO: 61993 - DNA, 80 bp, synthetic construct; identical to SEQ ID NO: 27370
  source 1..80: mol_type = other DNA

SEQ ID NO: 61994 - DNA, 80 bp, synthetic construct; identical to SEQ ID NO: 27371
  source 1..80: mol_type = other DNA

SEQ ID NO: 61995 - DNA, 80 bp, synthetic construct; identical to SEQ ID NO: 10749
  source 1..80: mol_type = other DNA

SEQ ID NO: 61996 - DNA, 80 bp, synthetic construct; identical to SEQ ID NO: 27373
  source 1..80: mol_type = other DNA

SEQ ID NO: 61997 - DNA, 80 bp, synthetic construct; identical to SEQ ID NO: 27374
  source 1..80: mol_type = other DNA

SEQ ID NO: 61998 - DNA, 80 bp, synthetic construct; identical to SEQ ID NO: 27375
  source 1..80: mol_type = other DNA

SEQ ID NO: 61999 - DNA, 80 bp, synthetic construct; identical to SEQ ID NO: 10750
  source 1..80: mol_type = other DNA

SEQ ID NO: 62000 - DNA, 80 bp, synthetic construct; identical to SEQ ID NO: 27377
  source 1..80: mol_type = other DNA

SEQ ID NO: 62001 - DNA, 80 bp, synthetic construct; identical to SEQ ID NO: 27378
  source 1..80: mol_type = other DNA

SEQ ID NO: 62002 - DNA, 80 bp, synthetic construct; identical to SEQ ID NO: 27379
  source 1..80: mol_type = other DNA

SEQ ID NO: 62003 - DNA, 80 bp, synthetic construct; identical to SEQ ID NO: 27380
  source 1..80: mol_type = other DNA

SEQ ID NO: 62004 - DNA, 80 bp, synthetic construct; identical to SEQ ID NO: 10751
  source 1..80: mol_type = other DNA

SEQ ID NO: 62005 - DNA, 80 bp, synthetic construct; identical to SEQ ID NO: 27382
  source 1..80: mol_type = other DNA

SEQ ID NO: 62006 - DNA, 80 bp, synthetic construct; identical to SEQ ID NO: 27383
  source 1..80: mol_type = other DNA

SEQ ID NO: 62007 - DNA, 80 bp, synthetic construct; identical to SEQ ID NO: 10752
  source 1..80: mol_type = other DNA

SEQ ID NO: 62008 - DNA, 80 bp, synthetic construct; identical to SEQ ID NO: 27386
  source 1..80: mol_type = other DNA

SEQ ID NO: 62009 - DNA, 80 bp, synthetic construct; identical to SEQ ID NO: 27387
  source 1..80: mol_type = other DNA

SEQ ID NO: 62010 - DNA, 80 bp, synthetic construct; identical to SEQ ID NO: 27388
  source 1..80: mol_type = other DNA

SEQ ID NO: 62011 - DNA, 80 bp, synthetic construct; identical to SEQ ID NO: 10753
  source 1..80: mol_type = other DNA

SEQ ID NO: 62012 - DNA, 80 bp, synthetic construct; identical to SEQ ID NO: 27390
  source 1..80: mol_type = other DNA

SEQ ID NO: 62013 - DNA, 80 bp, synthetic construct; identical to SEQ ID NO: 27391
  source 1..80: mol_type = other DNA

SEQ ID NO: 62014 - DNA, 80 bp, synthetic construct; identical to SEQ ID NO: 27392
  source 1..80: mol_type = other DNA

SEQ ID NO: 62015 - DNA, 80 bp, synthetic construct; identical to SEQ ID NO: 10754
  source 1..80: mol_type = other DNA

SEQ ID NO: 62016 - DNA, 80 bp, synthetic construct; identical to SEQ ID NO: 27394
  source 1..80: mol_type = other DNA

SEQ ID NO: 62017 - DNA, 80 bp, synthetic construct; identical to SEQ ID NO: 27395
  source 1..80: mol_type = other DNA

SEQ ID NO: 62018 - DNA, 80 bp, synthetic construct; identical to SEQ ID NO: 27396
  source 1..80: mol_type = other DNA

SEQ ID NO: 62019 - DNA, 80 bp, synthetic construct; identical to SEQ ID NO: 10755
  source 1..80: mol_type = other DNA

SEQ ID NO: 62020 - DNA, 80 bp, synthetic construct; identical to SEQ ID NO: 27398
  source 1..80: mol_type = other DNA

SEQ ID NO: 62021 - DNA, 80 bp, synthetic construct; identical to SEQ ID NO: 27399
  source 1..80: mol_type = other DNA

SEQ ID NO: 62022 - DNA, 80 bp, synthetic construct; identical to SEQ ID NO: 10756
  source 1..80: mol_type = other DNA

SEQ ID NO: 62023 - DNA, 80 bp, synthetic construct; identical to SEQ ID NO: 27401
  source 1..80: mol_type = other DNA

SEQ ID NO: 62024 - DNA, 80 bp, synthetic construct; identical to SEQ ID NO: 27402
  source 1..80: mol_type = other DNA

SEQ ID NO: 62025 - DNA, 80 bp, synthetic construct; identical to SEQ ID NO: 27404
  source 1..80: mol_type = other DNA

SEQ ID NO: 62026 - DNA, 80 bp, synthetic construct; identical to SEQ ID NO: 10757
  source 1..80: mol_type = other DNA

SEQ ID NO: 62027 - DNA, 80 bp, synthetic construct; identical to SEQ ID NO: 27406
  source 1..80: mol_type = other DNA

SEQ ID NO: 62028 - DNA, 80 bp, synthetic construct; identical to SEQ ID NO: 27407
  source 1..80: mol_type = other DNA

SEQ ID NO: 62029 - DNA, 80 bp, synthetic construct; identical to SEQ ID NO: 27408
  source 1..80: mol_type = other DNA

SEQ ID NO: 62030 - DNA, 80 bp, synthetic construct; identical to SEQ ID NO: 10758
  source 1..80: mol_type = other DNA

SEQ ID NO: 62031 - DNA, 80 bp, synthetic construct; identical to SEQ ID NO: 27410
  source 1..80: mol_type = other DNA

SEQ ID NO: 62032 - DNA, 80 bp, synthetic construct; identical to SEQ ID NO: 27411
  source 1..80: mol_type = other DNA

SEQ ID NO: 62033 - DNA, 80 bp, synthetic construct; identical to SEQ ID NO: 27412
  source 1..80: mol_type = other DNA

SEQ ID NO: 62034 - DNA, 80 bp, synthetic construct; identical to SEQ ID NO: 10759
  source 1..80: mol_type = other DNA

SEQ ID NO: 62035 - DNA, 80 bp, synthetic construct; identical to SEQ ID NO: 27414
  source 1..80: mol_type = other DNA

SEQ ID NO: 62036 - DNA, 80 bp, synthetic construct; identical to SEQ ID NO: 27415
  source 1..80: mol_type = other DNA

SEQ ID NO: 62037 - DNA, 80 bp, synthetic construct; identical to SEQ ID NO: 10760
  source 1..80: mol_type = other DNA

SEQ ID NO: 62038 - DNA, 80 bp, synthetic construct; identical to SEQ ID NO: 27417
  source 1..80: mol_type = other DNA

SEQ ID NO: 62039 - DNA, 80 bp, synthetic construct; identical to SEQ ID NO: 27418
  source 1..80: mol_type = other DNA

SEQ ID NO: 62040 - DNA, 80 bp, synthetic construct; identical to SEQ ID NO: 10761
  source 1..80: mol_type = other DNA

SEQ ID NO: 62041 - DNA, 80 bp, synthetic construct; identical to SEQ ID NO: 27421
  source 1..80: mol_type = other DNA

SEQ ID NO: 62042 - DNA, 80 bp, synthetic construct; identical to SEQ ID NO: 27422
  source 1..80: mol_type = other DNA

SEQ ID NO: 62043 - DNA, 80 bp, synthetic construct; identical to SEQ ID NO: 10762
  source 1..80: mol_type = other DNA

SEQ ID NO: 62044 - DNA, 80 bp, synthetic construct; identical to SEQ ID NO: 27425
  source 1..80: mol_type = other DNA

SEQ ID NO: 62045 - DNA, 80 bp, synthetic construct; identical to SEQ ID NO: 27426
  source 1..80: mol_type = other DNA

SEQ ID NO: 62046 - DNA, 80 bp, synthetic construct; identical to SEQ ID NO: 10763
  source 1..80: mol_type = other DNA

SEQ ID NO: 62047 - DNA, 80 bp, synthetic construct; identical to SEQ ID NO: 27428
  source 1..80: mol_type = other DNA

SEQ ID NO: 62048 - DNA, 80 bp, synthetic construct; identical to SEQ ID NO: 27429
  source 1..80: mol_type = other DNA

SEQ ID NO: 62049 - DNA, 80 bp, synthetic construct; identical to SEQ ID NO: 27430
  source 1..80: mol_type = other DNA

SEQ ID NO: 62050 - DNA, 80 bp, synthetic construct; identical to SEQ ID NO: 10764
  source 1..80: mol_type = other DNA

SEQ ID NO: 62051 - DNA, 80 bp, synthetic construct; identical to SEQ ID NO: 27432
  source 1..80: mol_type = other DNA

SEQ ID NO: 62052 - DNA, 80 bp, synthetic construct; identical to SEQ ID NO: 27433
  source 1..80: mol_type = other DNA

SEQ ID NO: 62053 - DNA, 80 bp, synthetic construct; identical to SEQ ID NO: 27434
  source 1..80: mol_type = other DNA

SEQ ID NO: 62054 - DNA, 80 bp, synthetic construct; identical to SEQ ID NO: 27435
  source 1..80: mol_type = other DNA

SEQ ID NO: 62055 - DNA, 80 bp, synthetic construct; identical to SEQ ID NO: 10765
  source 1..80: mol_type = other DNA

SEQ ID NO: 62056 - DNA, 80 bp, synthetic construct; identical to SEQ ID NO: 27437
  source 1..80: mol_type = other DNA

SEQ ID NO: 62057 - DNA, 80 bp, synthetic construct; identical to SEQ ID NO: 27438
  source 1..80: mol_type = other DNA

SEQ ID NO: 62058 - DNA, 80 bp, synthetic construct; identical to SEQ ID NO: 27439
  source 1..80: mol_type = other DNA

SEQ ID NO: 62059 - DNA, 80 bp, synthetic construct; identical to SEQ ID NO: 10766
  source 1..80: mol_type = other DNA

SEQ ID NO: 62060 - DNA, 80 bp, synthetic construct; identical to SEQ ID NO: 27441
  source 1..80: mol_type = other DNA

SEQ ID NO: 62061 - DNA, 80 bp, synthetic construct; identical to SEQ ID NO: 27442
  source 1..80: mol_type = other DNA

SEQ ID NO: 62062 - DNA, 80 bp, synthetic construct; identical to SEQ ID NO: 10767
  source 1..80: mol_type = other DNA

SEQ ID NO: 62063 - DNA, 80 bp, synthetic construct; identical to SEQ ID NO: 27444
  source 1..80: mol_type = other DNA

SEQ ID NO: 62064 - DNA, 80 bp, synthetic construct; identical to SEQ ID NO: 27446
  source 1..80: mol_type = other DNA

SEQ ID NO: 62065 - DNA, 80 bp, synthetic construct; identical to SEQ ID NO: 10768
  source 1..80: mol_type = other DNA

SEQ ID NO: 62066 - DNA, 80 bp, synthetic construct; identical to SEQ ID NO: 27449
  source 1..80: mol_type = other DNA

SEQ ID NO: 62067 - DNA, 80 bp, synthetic construct; identical to SEQ ID NO: 27450
  source 1..80: mol_type = other DNA

SEQ ID NO: 62068 - DNA, 80 bp, synthetic construct; identical to SEQ ID NO: 10769
  source 1..80: mol_type = other DNA

SEQ ID NO: 62069 - DNA, 80 bp, synthetic construct; identical to SEQ ID NO: 27452
  source 1..80: mol_type = other DNA

SEQ ID NO: 62070 - DNA, 80 bp, synthetic construct; identical to SEQ ID NO: 27453
  source 1..80: mol_type = other DNA

SEQ ID NO: 62071 - DNA, 80 bp, synthetic construct; identical to SEQ ID NO: 27454
  source 1..80: mol_type = other DNA

SEQ ID NO: 62072 - DNA, 80 bp, synthetic construct; identical to SEQ ID NO: 10770
  source 1..80: mol_type = other DNA

SEQ ID NO: 62073 - DNA, 80 bp, synthetic construct; identical to SEQ ID NO: 27456
  source 1..80: mol_type = other DNA

SEQ ID NO: 62074 - DNA, 80 bp, synthetic construct; identical to SEQ ID NO: 27457
  source 1..80: mol_type = other DNA

SEQ ID NO: 62075 - DNA, 80 bp, synthetic construct; identical to SEQ ID NO: 27458
  source 1..80: mol_type = other DNA

SEQ ID NO: 62076 - DNA, 80 bp, synthetic construct; identical to SEQ ID NO: 10771
  source 1..80: mol_type = other DNA

SEQ ID NO: 62077 - DNA, 80 bp, synthetic construct; identical to SEQ ID NO: 27461
  source 1..80: mol_type = other DNA

SEQ ID NO: 62078 - DNA, 80 bp, synthetic construct; identical to SEQ ID NO: 27462
  source 1..80: mol_type = other DNA

SEQ ID NO: 62079 - DNA, 80 bp, synthetic construct; identical to SEQ ID NO: 27463
  source 1..80: mol_type = other DNA

SEQ ID NO: 62080 - DNA, 80 bp, synthetic construct; identical to SEQ ID NO: 10772
  source 1..80: mol_type = other DNA

SEQ ID NO: 62081 - DNA, 80 bp, synthetic construct; identical to SEQ ID NO: 27465
  source 1..80: mol_type = other DNA

SEQ ID NO: 62082 - DNA, 80 bp, synthetic construct; identical to SEQ ID NO: 27466
  source 1..80: mol_type = other DNA

SEQ ID NO: 62083 - DNA, 80 bp, synthetic construct; identical to SEQ ID NO: 27467
  source 1..80: mol_type = other DNA

SEQ ID NO: 62084 - DNA, 80 bp, synthetic construct; identical to SEQ ID NO: 10773
  source 1..80: mol_type = other DNA

SEQ ID NO: 62085 - DNA, 80 bp, synthetic construct; identical to SEQ ID NO: 27469
  source 1..80: mol_type = other DNA

SEQ ID NO: 62086 - DNA, 80 bp, synthetic construct; identical to SEQ ID NO: 27470
  source 1..80: mol_type = other DNA

SEQ ID NO: 62087 - DNA, 80 bp, synthetic construct; identical to SEQ ID NO: 27471
  source 1..80: mol_type = other DNA

SEQ ID NO: 62088 - DNA, 80 bp, synthetic construct; identical to SEQ ID NO: 10774
  source 1..80: mol_type = other DNA

SEQ ID NO: 62089 - DNA, 80 bp, synthetic construct; identical to SEQ ID NO: 27473
  source 1..80: mol_type = other DNA

SEQ ID NO: 62090 - DNA, 80 bp, synthetic construct; identical to SEQ ID NO: 27474
  source 1..80: mol_type = other DNA

SEQ ID NO: 62091 - DNA, 80 bp, synthetic construct; identical to SEQ ID NO: 10775
  source 1..80: mol_type = other DNA

SEQ ID NO: 62092 - DNA, 80 bp, synthetic construct; identical to SEQ ID NO: 27476
  source 1..80: mol_type = other DNA

SEQ ID NO: 62093 - DNA, 80 bp, synthetic construct; identical to SEQ ID NO: 27477
  source 1..80: mol_type = other DNA

SEQ ID NO: 62094 - DNA, 80 bp, synthetic construct; identical to SEQ ID NO: 27478
  source 1..80: mol_type = other DNA

SEQ ID NO: 62095 - DNA, 80 bp, synthetic construct; identical to SEQ ID NO: 27479
  source 1..80: mol_type = other DNA

SEQ ID NO: 62096 - DNA, 80 bp, synthetic construct; identical to SEQ ID NO: 10776
  source 1..80: mol_type = other DNA

SEQ ID NO: 62097 - DNA, 80 bp, synthetic construct; identical to SEQ ID NO: 27481
  source 1..80: mol_type = other DNA

SEQ ID NO: 62098 - DNA, 80 bp, synthetic construct; identical to SEQ ID NO: 10777
  source 1..80: mol_type = other DNA

SEQ ID NO: 62099 - DNA, 80 bp, synthetic construct; identical to SEQ ID NO: 27484
  source 1..80: mol_type = other DNA

SEQ ID NO: 62100 - DNA, 80 bp, synthetic construct; identical to SEQ ID NO: 27485
  source 1..80: mol_type = other DNA

SEQ ID NO: 62101 - DNA, 80 bp, synthetic construct; identical to SEQ ID NO: 27486
  source 1..80: mol_type = other DNA

SEQ ID NO: 62102 - DNA, 80 bp, synthetic construct; identical to SEQ ID NO: 10778
  source 1..80: mol_type = other DNA

SEQ ID NO: 62103 - DNA, 80 bp, synthetic construct; identical to SEQ ID NO: 27488
  source 1..80: mol_type = other DNA

SEQ ID NO: 62104 - DNA, 80 bp, synthetic construct; identical to SEQ ID NO: 27489
  source 1..80: mol_type = other DNA

SEQ ID NO: 62105 - DNA, 80 bp, synthetic construct; identical to SEQ ID NO: 27490
  source 1..80: mol_type = other DNA

SEQ ID NO: 62106 - DNA, 80 bp, synthetic construct; identical to SEQ ID NO: 10779
  source 1..80: mol_type = other DNA

SEQ ID NO: 62107 - DNA, 80 bp, synthetic construct; identical to SEQ ID NO: 27492
  source 1..80: mol_type = other DNA

SEQ ID NO: 62108 - DNA, 80 bp, synthetic construct; identical to SEQ ID NO: 27493
  source 1..80: mol_type = other DNA

SEQ ID NO: 62109 - DNA, 80 bp, synthetic construct; identical to SEQ ID NO: 27494
  source 1..80: mol_type = other DNA

SEQ ID NO: 62110 - DNA, 80 bp, synthetic construct; identical to SEQ ID NO: 27495
  source 1..80: mol_type = other DNA

SEQ ID NO: 62111 - DNA, 80 bp, synthetic construct; identical to SEQ ID NO: 10780
  source 1..80: mol_type = other DNA

SEQ ID NO: 62112 - DNA, 80 bp, synthetic construct; identical to SEQ ID NO: 27497
  source 1..80: mol_type = other DNA

SEQ ID NO: 62113 - DNA, 80 bp, synthetic construct; identical to SEQ ID NO: 27498
  source 1..80: mol_type = other DNA

SEQ ID NO: 62114 - DNA, 80 bp, synthetic construct; identical to SEQ ID NO: 10781
  source 1..80: mol_type = other DNA

SEQ ID NO: 62115 - DNA, 80 bp, synthetic construct; identical to SEQ ID NO: 27501
  source 1..80: mol_type = other DNA

SEQ ID NO: 62116 - DNA, 80 bp, synthetic construct; identical to SEQ ID NO: 27502
  source 1..80: mol_type = other DNA

SEQ ID NO: 62117 - DNA, 80 bp, synthetic construct; identical to SEQ ID NO: 10782
  source 1..80: mol_type = other DNA

SEQ ID NO: 62118 - DNA, 80 bp, synthetic construct; identical to SEQ ID NO: 27504
  source 1..80: mol_type = other DNA

SEQ ID NO: 62119 - DNA, 80 bp, synthetic construct; identical to SEQ ID NO: 27505
  source 1..80: mol_type = other DNA

SEQ ID NO: 62120 - DNA, 80 bp, synthetic construct; identical to SEQ ID NO: 27507
  source 1..80: mol_type = other DNA

SEQ ID NO: 62121 - DNA, 80 bp, synthetic construct; identical to SEQ ID NO: 10783
  source 1..80: mol_type = other DNA

SEQ ID NO: 62122 - DNA, 80 bp, synthetic construct; identical to SEQ ID NO: 27509
  source 1..80: mol_type = other DNA

SEQ ID NO: 62123 - DNA, 80 bp, synthetic construct; identical to SEQ ID NO: 27510
  source 1..80: mol_type = other DNA

SEQ ID NO: 62124 - DNA, 80 bp, synthetic construct; identical to SEQ ID NO: 10784
  source 1..80: mol_type = other DNA

SEQ ID NO: 62125 - DNA, 80 bp, synthetic construct; identical to SEQ ID NO: 27512
  source 1..80: mol_type = other DNA

SEQ ID NO: 62126 - DNA, 80 bp, synthetic construct; identical to SEQ ID NO: 27513
  source 1..80: mol_type = other DNA

SEQ ID NO: 62127 - DNA, 80 bp, synthetic construct; identical to SEQ ID NO: 27514
  source 1..80: mol_type = other DNA

SEQ ID NO: 62128 - DNA, 80 bp, synthetic construct; identical to SEQ ID NO: 27515
  source 1..80: mol_type = other DNA

SEQ ID NO: 62129 - DNA, 80 bp, synthetic construct; identical to SEQ ID NO: 10785
  source 1..80: mol_type = other DNA

SEQ ID NO: 62130 - DNA, 80 bp, synthetic construct; identical to SEQ ID NO: 27517
  source 1..80: mol_type = other DNA

SEQ ID NO: 62131 - DNA, 80 bp, synthetic construct; identical to SEQ ID NO: 10786
  source 1..80: mol_type = other DNA

SEQ ID NO: 62132 - DNA, 80 bp, synthetic construct; identical to SEQ ID NO: 27519
  source 1..80: mol_type = other DNA

SEQ ID NO: 62133 - DNA, 80 bp, synthetic construct; identical to SEQ ID NO: 27521
  source 1..80: mol_type = other DNA

SEQ ID NO: 62134 - DNA, 80 bp, synthetic construct; identical to SEQ ID NO: 10787
  source 1..80: mol_type = other DNA

SEQ ID NO: 62135 - DNA, 80 bp, synthetic construct; identical to SEQ ID NO: 27523
  source 1..80: mol_type = other DNA

SEQ ID NO: 62136 - DNA, 80 bp, synthetic construct; identical to SEQ ID NO: 27525
  source 1..80: mol_type = other DNA

SEQ ID NO: 62137 - DNA, 80 bp, synthetic construct; identical to SEQ ID NO: 10788
  source 1..80: mol_type = other DNA

SEQ ID NO: 62138 - DNA, 80 bp, synthetic construct; identical to SEQ ID NO: 27527
  source 1..80: mol_type = other DNA

SEQ ID NO: 62139 - DNA, 80 bp, synthetic construct; identical to SEQ ID NO: 27528
  source 1..80: mol_type = other DNA

SEQ ID NO: 62140 - DNA, 80 bp, synthetic construct; identical to SEQ ID NO: 27529
  source 1..80: mol_type = other DNA

SEQ ID NO: 62141 - DNA, 80 bp, synthetic construct; identical to SEQ ID NO: 27530
  source 1..80: mol_type = other DNA

SEQ ID NO: 62142 - DNA, 80 bp, synthetic construct; identical to SEQ ID NO: 10789
  source 1..80: mol_type = other DNA

SEQ ID NO: 62143 - DNA, 80 bp, synthetic construct; identical to SEQ ID NO: 27532
  source 1..80: mol_type = other DNA

SEQ ID NO: 62144 - DNA, 80 bp, synthetic construct; identical to SEQ ID NO: 27533
  source 1..80: mol_type = other DNA

SEQ ID NO: 62145 - DNA, 80 bp, synthetic construct; identical to SEQ ID NO: 10790
  source 1..80: mol_type = other DNA

SEQ ID NO: 62146 - DNA, 80 bp, synthetic construct; identical to SEQ ID NO: 27535
  source 1..80: mol_type = other DNA

SEQ ID NO: 62147 - DNA, 80 bp, synthetic construct; identical to SEQ ID NO: 27536
  source 1..80: mol_type = other DNA

SEQ ID NO: 62148 - DNA, 80 bp, synthetic construct; identical to SEQ ID NO: 27537
  source 1..80: mol_type = other DNA

SEQ ID NO: 62149 - DNA, 80 bp, synthetic construct; identical to SEQ ID NO: 10791
  source 1..80: mol_type = other DNA

SEQ ID NO: 62150 - DNA, 80 bp, synthetic construct; identical to SEQ ID NO: 27540
  source 1..80: mol_type = other DNA

SEQ ID NO: 62151 - DNA, 80 bp, synthetic construct; identical to SEQ ID NO: 27541
  source 1..80: mol_type = other DNA

SEQ ID NO: 62152 - DNA, 80 bp, synthetic construct; identical to SEQ ID NO: 27542
  source 1..80: mol_type = other DNA

SEQ ID NO: 62153 - DNA, 80 bp, synthetic construct; identical to SEQ ID NO: 10792
  source 1..80: mol_type = other DNA

SEQ ID NO: 62154 - DNA, 80 bp, synthetic construct; identical to SEQ ID NO: 27544
  source 1..80: mol_type = other DNA

SEQ ID NO: 62155 - DNA, 80 bp, synthetic construct; identical to SEQ ID NO: 27545
  source 1..80: mol_type = other DNA

SEQ ID NO: 62156 - DNA, 80 bp, synthetic construct; identical to SEQ ID NO: 27546
  source 1..80: mol_type = other DNA

SEQ ID NO: 62157 - DNA, 80 bp, synthetic construct; identical to SEQ ID NO: 10793
  source 1..80: mol_type = other DNA

SEQ ID NO: 62158 - DNA, 80 bp, synthetic construct; identical to SEQ ID NO: 27549
  source 1..80: mol_type = other DNA

SEQ ID NO: 62159 - DNA, 80 bp, synthetic construct; identical to SEQ ID NO: 27550
  source 1..80: mol_type = other DNA

SEQ ID NO: 62160 - DNA, 80 bp, synthetic construct; identical to SEQ ID NO: 10794
  source 1..80: mol_type = other DNA

SEQ ID NO: 62161 - DNA, 80 bp, synthetic construct; identical to SEQ ID NO: 27552
  source 1..80: mol_type = other DNA

SEQ ID NO: 62162 - DNA, 80 bp, synthetic construct; identical to SEQ ID NO: 27553
  source 1..80: mol_type = other DNA

SEQ ID NO: 62163 - DNA, 80 bp, synthetic construct; identical to SEQ ID NO: 10795
  source 1..80: mol_type = other DNA

SEQ ID NO: 62164 - DNA, 80 bp, synthetic construct; identical to SEQ ID NO: 27556
  source 1..80: mol_type = other DNA

SEQ ID NO: 62165 - DNA, 80 bp, synthetic construct; identical to SEQ ID NO: 27557
  source 1..80: mol_type = other DNA

SEQ ID NO: 62166 - DNA, 80 bp, synthetic construct; identical to SEQ ID NO: 10796
  source 1..80: mol_type = other DNA

SEQ ID NO: 62167 - DNA, 80 bp, synthetic construct; identical to SEQ ID NO: 27559
  source 1..80: mol_type = other DNA

SEQ ID NO: 62168 - DNA, 80 bp, synthetic construct; identical to SEQ ID NO: 27561
  source 1..80: mol_type = other DNA

SEQ ID NO: 62169 - DNA, 80 bp, synthetic construct; identical to SEQ ID NO: 10797
  source 1..80: mol_type = other DNA

SEQ ID NO: 62170 - DNA, 80 bp, synthetic construct; identical to SEQ ID NO: 27563
  source 1..80: mol_type = other DNA

SEQ ID NO: 62171 - DNA, 80 bp, synthetic construct; identical to SEQ ID NO: 27564
  source 1..80: mol_type = other DNA

SEQ ID NO: 62172 - DNA, 80 bp, synthetic construct; identical to SEQ ID NO: 27565
  source 1..80: mol_type = other DNA

SEQ ID NO: 62173 - DNA, 80 bp, synthetic construct; identical to SEQ ID NO: 10798
  source 1..80: mol_type = other DNA

SEQ ID NO: 62174 - DNA, 80 bp, synthetic construct; identical to SEQ ID NO: 27568
  source 1..80: mol_type = other DNA

SEQ ID NO: 62175 - DNA, 80 bp, synthetic construct; identical to SEQ ID NO: 27570
  source 1..80: mol_type = other DNA

SEQ ID NO: 62176 - DNA, 80 bp, synthetic construct; identical to SEQ ID NO: 10799
  source 1..80: mol_type = other DNA

SEQ ID NO: 62177 - DNA, 80 bp, synthetic construct; identical to SEQ ID NO: 27572
  source 1..80: mol_type = other DNA

SEQ ID NO: 62178 - DNA, 80 bp, synthetic construct; identical to SEQ ID NO: 27573
  source 1..80: mol_type = other DNA

SEQ ID NO: 62179 - DNA, 80 bp, synthetic construct; identical to SEQ ID NO: 10800
  source 1..80: mol_type = other DNA

SEQ ID NO: 62180 - DNA, 80 bp, synthetic construct; identical to SEQ ID NO: 27576
  source 1..80: mol_type = other DNA

SEQ ID NO: 62181 - DNA, 80 bp, synthetic construct; identical to SEQ ID NO: 27577
  source 1..80: mol_type = other DNA

SEQ ID NO: 62182 - DNA, 80 bp, synthetic construct; identical to SEQ ID NO: 10801
  source 1..80: mol_type = other DNA

SEQ ID NO: 62183 - DNA, 80 bp, synthetic construct; identical to SEQ ID NO: 27579
  source 1..80: mol_type = other DNA

SEQ ID NO: 62184 - DNA, 80 bp, synthetic construct; identical to SEQ ID NO: 27580
  source 1..80: mol_type = other DNA

SEQ ID NO: 62185 - DNA, 80 bp, synthetic construct; identical to SEQ ID NO: 27581
  source 1..80: mol_type = other DNA

SEQ ID NO: 62186 - DNA, 80 bp, synthetic construct; identical to SEQ ID NO: 10802
  source 1..80: mol_type = other DNA

SEQ ID NO: 62187 - DNA, 80 bp, synthetic construct; identical to SEQ ID NO: 27583
  source 1..80: mol_type = other DNA

SEQ ID NO: 62188 - DNA, 80 bp, synthetic construct; identical to SEQ ID NO: 27584
  source 1..80: mol_type = other DNA

SEQ ID NO: 62189 - DNA, 80 bp, synthetic construct; identical to SEQ ID NO: 27585
  source 1..80: mol_type = other DNA

SEQ ID NO: 62190 - DNA, 80 bp, synthetic construct; identical to SEQ ID NO: 10803
  source 1..80: mol_type = other DNA

SEQ ID NO: 62191 - DNA, 80 bp, synthetic construct; identical to SEQ ID NO: 27587
  source 1..80: mol_type = other DNA

SEQ ID NO: 62192 - DNA, 80 bp, synthetic construct; identical to SEQ ID NO: 27588
  source 1..80: mol_type = other DNA

SEQ ID NO: 62193 - DNA, 80 bp, synthetic construct; identical to SEQ ID NO: 27589
  source 1..80: mol_type = other DNA

SEQ ID NO: 62194 - DNA, 80 bp, synthetic construct; identical to SEQ ID NO: 10804
  source 1..80: mol_type = other DNA

SEQ ID NO: 62195 - DNA, 80 bp, synthetic construct; identical to SEQ ID NO: 27591
  source 1..80: mol_type = other DNA

SEQ ID NO: 62196 - DNA, 80 bp, synthetic construct; identical to SEQ ID NO: 27592
  source 1..80: mol_type = other DNA

SEQ ID NO: 62197 - DNA, 80 bp, synthetic construct; identical to SEQ ID NO: 27593
  source 1..80: mol_type = other DNA

SEQ ID NO: 62198 - DNA, 80 bp, synthetic construct; identical to SEQ ID NO: 10805
  source 1..80: mol_type = other DNA

SEQ ID NO: 62199 - DNA, 80 bp, synthetic construct; identical to SEQ ID NO: 27596
  source 1..80: mol_type = other DNA

SEQ ID NO: 62200 - DNA, 80 bp, synthetic construct; identical to SEQ ID NO: 27597
  source 1..80: mol_type = other DNA

SEQ ID NO: 62201 - DNA, 80 bp, synthetic construct; identical to SEQ ID NO: 27598
  source 1..80: mol_type = other DNA

SEQ ID NO: 62202 - DNA, 80 bp, synthetic construct; identical to SEQ ID NO: 10806
  source 1..80: mol_type = other DNA

SEQ ID NO: 62203 - DNA, 80 bp, synthetic construct; identical to SEQ ID NO: 27600
  source 1..80: mol_type = other DNA

SEQ ID NO: 62204 - DNA, 80 bp, synthetic construct; identical to SEQ ID NO: 27601
  source 1..80: mol_type = other DNA

SEQ ID NO: 62205 - DNA, 80 bp, synthetic construct; identical to SEQ ID NO: 27602
  source 1..80: mol_type = other DNA

SEQ ID NO: 62206 - DNA, 80 bp, synthetic construct; identical to SEQ ID NO: 10807
  source 1..80: mol_type = other DNA

SEQ ID NO: 62207 - DNA, 80 bp, synthetic construct; identical to SEQ ID NO: 27605
  source 1..80: mol_type = other DNA

SEQ ID NO: 62208 - DNA, 80 bp, synthetic construct; identical to SEQ ID NO: 27606
  source 1..80: mol_type = other DNA

SEQ ID NO: 62209 - DNA, 80 bp, synthetic construct; identical to SEQ ID NO: 27607
  source 1..80: mol_type = other DNA

SEQ ID NO: 62210 - DNA, 80 bp, synthetic construct; identical to SEQ ID NO: 10808
  source 1..80: mol_type = other DNA

SEQ ID NO: 62211 - DNA, 80 bp, synthetic construct; identical to SEQ ID NO: 27609
  source 1..80: mol_type = other DNA

SEQ ID NO: 62212 - DNA, 80 bp, synthetic construct; identical to SEQ ID NO: 27611
  source 1..80: mol_type = other DNA

SEQ ID NO: 62213 - DNA, 80 bp, synthetic construct; identical to SEQ ID NO: 10809
  source 1..80: mol_type = other DNA

SEQ ID NO: 62214 - DNA, 80 bp, synthetic construct; identical to SEQ ID NO: 27613
  source 1..80: mol_type = other DNA

SEQ ID NO: 62215 - DNA, 80 bp, synthetic construct; identical to SEQ ID NO: 27614
  source 1..80: mol_type = other DNA

SEQ ID NO: 62216 - DNA, 80 bp, synthetic construct; identical to SEQ ID NO: 27615
  source 1..80: mol_type = other DNA

SEQ ID NO: 62217 - DNA, 80 bp, synthetic construct; identical to SEQ ID NO: 10810
  source 1..80: mol_type = other DNA

SEQ ID NO: 62218 - DNA, 80 bp, synthetic construct; identical to SEQ ID NO: 27617
  source 1..80: mol_type = other DNA

SEQ ID NO: 62219 - DNA, 80 bp, synthetic construct; identical to SEQ ID NO: 27618
  source 1..80: mol_type = other DNA

SEQ ID NO: 62220 - DNA, 80 bp, synthetic construct; identical to SEQ ID NO: 10811
  source 1..80: mol_type = other DNA

SEQ ID NO: 62221 - DNA, 80 bp, synthetic construct; identical to SEQ ID NO: 27620
  source 1..80: mol_type = other DNA

SEQ ID NO: 62222 - DNA, 80 bp, synthetic construct; identical to SEQ ID NO: 27621
  source 1..80: mol_type = other DNA

SEQ ID NO: 62223 - DNA, 80 bp, synthetic construct; identical to SEQ ID NO: 27622
  source 1..80: mol_type = other DNA

SEQ ID NO: 62224 - DNA, 80 bp, synthetic construct; identical to SEQ ID NO: 27623
  source 1..80: mol_type = other DNA

SEQ ID NO: 62225 - DNA, 80 bp, synthetic construct; identical to SEQ ID NO: 10812
  source 1..80: mol_type = other DNA

SEQ ID NO: 62226 - DNA, 80 bp, synthetic construct; identical to SEQ ID NO: 27625
  source 1..80: mol_type = other DNA

SEQ ID NO: 62227 - DNA, 80 bp, synthetic construct; identical to SEQ ID NO: 27626
  source 1..80: mol_type = other DNA

SEQ ID NO: 62228 - DNA, 80 bp, synthetic construct; identical to SEQ ID NO: 10813
  source 1..80: mol_type = other DNA

SEQ ID NO: 62229 - DNA, 80 bp, synthetic construct; identical to SEQ ID NO: 27628
  source 1..80: mol_type = other DNA

SEQ ID NO: 62230 - DNA, 80 bp, synthetic construct; identical to SEQ ID NO: 27629
  source 1..80: mol_type = other DNA

SEQ ID NO: 62231 - DNA, 80 bp, synthetic construct; identical to SEQ ID NO: 27630
  source 1..80: mol_type = other DNA

SEQ ID NO: 62232 - DNA, 80 bp, synthetic construct; identical to SEQ ID NO: 10814
  source 1..80: mol_type = other DNA

SEQ ID NO: 62233 - DNA, 80 bp, synthetic construct; identical to SEQ ID NO: 27632
  source 1..80: mol_type = other DNA

SEQ ID NO: 62234 - DNA, 80 bp, synthetic construct; identical to SEQ ID NO: 27633
  source 1..80: mol_type = other DNA

SEQ ID NO: 62235 - DNA, 80 bp, synthetic construct; identical to SEQ ID NO: 27634
  source 1..80: mol_type = other DNA

SEQ ID NO: 62236 - DNA, 80 bp, synthetic construct; identical to SEQ ID NO: 27635
  source 1..80: mol_type = other DNA

SEQ ID NO: 62237 - DNA, 80 bp, synthetic construct; identical to SEQ ID NO: 10815
  source 1..80: mol_type = other DNA

SEQ ID NO: 62238 - DNA, 80 bp, synthetic construct; identical to SEQ ID NO: 27637
  source 1..80: mol_type = other DNA

SEQ ID NO: 62239 - DNA, 80 bp, synthetic construct; identical to SEQ ID NO: 27638
  source 1..80: mol_type = other DNA

SEQ ID NO: 62240 - DNA, 80 bp, synthetic construct; identical to SEQ ID NO: 10816
  source 1..80: mol_type = other DNA

SEQ ID NO: 62241 - DNA, 80 bp, synthetic construct; identical to SEQ ID NO: 27640
  source 1..80: mol_type = other DNA

SEQ ID NO: 62242 - DNA, 80 bp, synthetic construct; identical to SEQ ID NO: 27641
  source 1..80: mol_type = other DNA

SEQ ID NO: 62243 - DNA, 80 bp, synthetic construct; identical to SEQ ID NO: 27642
  source 1..80: mol_type = other DNA

SEQ ID NO: 62244 - DNA, 80 bp, synthetic construct; identical to SEQ ID NO: 27643
  source 1..80: mol_type = other DNA

SEQ ID NO: 62245 - DNA, 80 bp, synthetic construct; identical to SEQ ID NO: 27644
  source 1..80: mol_type = other DNA

SEQ ID NO: 62246 - DNA, 80 bp, synthetic construct; identical to SEQ ID NO: 27645
  source 1..80: mol_type = other DNA

SEQ ID NO: 62247 - DNA, 80 bp, synthetic construct; identical to SEQ ID NO: 27646
  source 1..80: mol_type = other DNA

SEQ ID NO: 62248 - DNA, 80 bp, synthetic construct; identical to SEQ ID NO: 10817
  source 1..80: mol_type = other DNA

SEQ ID NO: 62249 - DNA, 80 bp, synthetic construct; identical to SEQ ID NO: 10818
  source 1..80: mol_type = other DNA

SEQ ID NO: 62250 - DNA, 80 bp, synthetic construct; identical to SEQ ID NO: 27650
  source 1..80: mol_type = other DNA

SEQ ID NO: 62251 - DNA, 80 bp, synthetic construct; identical to SEQ ID NO: 27651
  source 1..80: mol_type = other DNA

SEQ ID NO: 62252 - DNA, 80 bp, synthetic construct; identical to SEQ ID NO: 27653
  source 1..80: mol_type = other DNA

SEQ ID NO: 62253 - DNA, 80 bp, synthetic construct; identical to SEQ ID NO: 10819
  source 1..80: mol_type = other DNA

SEQ ID NO: 62254 - DNA, 80 bp, synthetic construct; identical to SEQ ID NO: 27655
  source 1..80: mol_type = other DNA

SEQ ID NO: 62255 - DNA, 80 bp, synthetic construct; identical to SEQ ID NO: 27656
  source 1..80: mol_type = other DNA

SEQ ID NO: 62256 - DNA, 80 bp, synthetic construct; identical to SEQ ID NO: 27657
  source 1..80: mol_type = other DNA

SEQ ID NO: 62257 - DNA, 80 bp, synthetic construct; identical to SEQ ID NO: 10820
  source 1..80: mol_type = other DNA

SEQ ID NO: 62258 - DNA, 80 bp, synthetic construct; identical to SEQ ID NO: 27659
  source 1..80: mol_type = other DNA

SEQ ID NO: 62259 - DNA, 80 bp, synthetic construct; identical to SEQ ID NO: 27660
  source 1..80: mol_type = other DNA

SEQ ID NO: 62260 - DNA, 80 bp, synthetic construct; identical to SEQ ID NO: 10821
  source 1..80: mol_type = other DNA

SEQ ID NO: 62261 - DNA, 80 bp, synthetic construct; identical to SEQ ID NO: 27663
  source 1..80: mol_type = other DNA

SEQ ID NO: 62262 - DNA, 80 bp, synthetic construct; identical to SEQ ID NO: 27664
  source 1..80: mol_type = other DNA

SEQ ID NO: 62263 - DNA, 80 bp, synthetic construct; identical to SEQ ID NO: 10822
  source 1..80: mol_type = other DNA

SEQ ID NO: 62264 - DNA, 80 bp, synthetic construct; identical to SEQ ID NO: 27666
  source 1..80: mol_type = other DNA

SEQ ID NO: 62265 - DNA, 80 bp, synthetic construct; identical to SEQ ID NO: 27667
  source 1..80: mol_type = other DNA

SEQ ID NO: 62266 - DNA, 80 bp, synthetic construct; identical to SEQ ID NO: 27668
  source 1..80: mol_type = other DNA

SEQ ID NO: 62267 - DNA, 80 bp, synthetic construct; identical to SEQ ID NO: 27669
  source 1..80: mol_type = other DNA

SEQ ID NO: 62268 - DNA, 80 bp, synthetic construct; identical to SEQ ID NO: 10823
  source 1..80: mol_type = other DNA

SEQ ID NO: 62269 - DNA, 80 bp, synthetic construct; identical to SEQ ID NO: 27672
  source 1..80: mol_type = other DNA

SEQ ID NO: 62270 - DNA, 80 bp, synthetic construct; identical to SEQ ID NO: 10824
  source 1..80: mol_type = other DNA

SEQ ID NO: 62271 - DNA, 80 bp, synthetic construct; identical to SEQ ID NO: 27674
  source 1..80: mol_type = other DNA

SEQ ID NO: 62272 - DNA, 80 bp, synthetic construct; identical to SEQ ID NO: 27675
  source 1..80: mol_type = other DNA

SEQ ID NO: 62273 - DNA, 80 bp, synthetic construct; identical to SEQ ID NO: 27676
  source 1..80: mol_type = other DNA

SEQ ID NO: 62274 - DNA, 80 bp, synthetic construct; identical to SEQ ID NO: 10825
  source 1..80: mol_type = other DNA

SEQ ID NO: 62275 - DNA, 80 bp, synthetic construct; identical to SEQ ID NO: 27679
  source 1..80: mol_type = other DNA

SEQ ID NO: 62276 - DNA, 80 bp, synthetic construct; identical to SEQ ID NO: 27680
  source 1..80: mol_type = other DNA

SEQ ID NO: 62277 - DNA, 80 bp, synthetic construct; identical to SEQ ID NO: 10826
  source 1..80: mol_type = other DNA

SEQ ID NO: 62278 - DNA, 80 bp, synthetic construct; identical to SEQ ID NO: 27683
  source 1..80: mol_type = other DNA

SEQ ID NO: 62279 - DNA, 80 bp, synthetic construct; identical to SEQ ID NO: 27684
  source 1..80: mol_type = other DNA

SEQ ID NO: 62280 - DNA, 80 bp, synthetic construct; identical to SEQ ID NO: 10827
  source 1..80: mol_type = other DNA

SEQ ID NO: 62281 - DNA, 80 bp, synthetic construct; identical to SEQ ID NO: 27687
  source 1..80: mol_type = other DNA

SEQ ID NO: 62282 - DNA, 80 bp, synthetic construct; identical to SEQ ID NO: 27688
  source 1..80: mol_type = other DNA

SEQ ID NO: 62283 - DNA, 80 bp, synthetic construct; identical to SEQ ID NO: 27689
  source 1..80: mol_type = other DNA

SEQ ID NO: 62284 - DNA, 80 bp, synthetic construct; identical to SEQ ID NO: 10828
  source 1..80: mol_type = other DNA

SEQ ID NO: 62285 - DNA, 80 bp, synthetic construct; identical to SEQ ID NO: 27691
  source 1..80: mol_type = other DNA

SEQ ID NO: 62286 - DNA, 80 bp, synthetic construct; identical to SEQ ID NO: 27692
  source 1..80: mol_type = other DNA

SEQ ID NO: 62287 - DNA, 80 bp, synthetic construct; identical to SEQ ID NO: 27694
  source 1..80: mol_type = other DNA

SEQ ID NO: 62288 - DNA, 80 bp, synthetic construct; identical to SEQ ID NO: 27695
  source 1..80: mol_type = other DNA

SEQ ID NO: 62289 - DNA, 80 bp, synthetic construct; identical to SEQ ID NO: 27696
  source 1..80: mol_type = other DNA

SEQ ID NO: 62290 - DNA, 80 bp, synthetic construct; identical to SEQ ID NO: 10830
  source 1..80: mol_type = other DNA

SEQ ID NO: 62291 - DNA, 80 bp, synthetic construct; identical to SEQ ID NO: 27698
  source 1..80: mol_type = other DNA

SEQ ID NO: 62292 - DNA, 80 bp, synthetic construct; identical to SEQ ID NO: 27699
  source 1..80: mol_type = other DNA

SEQ ID NO: 62293 - DNA, 80 bp, synthetic construct; identical to SEQ ID NO: 27700
  source 1..80: mol_type = other DNA

SEQ ID NO: 62294 - DNA, 80 bp, synthetic construct; identical to SEQ ID NO: 10831
  source 1..80: mol_type = other DNA

SEQ ID NO: 62295 - DNA, 80 bp, synthetic construct; identical to SEQ ID NO: 27702
  source 1..80: mol_type = other DNA

SEQ ID NO: 62296 - DNA, 80 bp, synthetic construct; identical to SEQ ID NO: 27704
  source 1..80: mol_type = other DNA

SEQ ID NO: 62297 - DNA, 80 bp, synthetic construct; identical to SEQ ID NO: 10832
  source 1..80: mol_type = other DNA

SEQ ID NO: 62298 - DNA, 80 bp, synthetic construct; identical to SEQ ID NO: 27706
  source 1..80: mol_type = other DNA

SEQ ID NO: 62299 - DNA, 80 bp, synthetic construct; identical to SEQ ID NO: 27707
  source 1..80: mol_type = other DNA

SEQ ID NO: 62300 - DNA, 80 bp, synthetic construct; identical to SEQ ID NO: 27708
  source 1..80: mol_type = other DNA

SEQ ID NO: 62301 - DNA, 80 bp, synthetic construct; identical to SEQ ID NO: 10833
  source 1..80: mol_type = other DNA

SEQ ID NO: 62302 - DNA, 80 bp, synthetic construct; identical to SEQ ID NO: 27711
  source 1..80: mol_type = other DNA

SEQ ID NO: 62303 - DNA, 80 bp, synthetic construct; identical to SEQ ID NO: 27712
  source 1..80: mol_type = other DNA

SEQ ID NO: 62304 - DNA, 80 bp, synthetic construct; identical to SEQ ID NO: 10834
  source 1..80: mol_type = other DNA

SEQ ID NO: 62305 - DNA, 80 bp, synthetic construct; identical to SEQ ID NO: 27714
  source 1..80: mol_type = other DNA

SEQ ID NO: 62306 - DNA, 80 bp, synthetic construct; identical to SEQ ID NO: 27715
  source 1..80: mol_type = other DNA

SEQ ID NO: 62307 - DNA, 80 bp, synthetic construct; identical to SEQ ID NO: 27716
  source 1..80: mol_type = other DNA

SEQ ID NO: 62308 - DNA, 80 bp, synthetic construct; identical to SEQ ID NO: 27717
  source 1..80: mol_type = other DNA

SEQ ID NO: 62309 - DNA, 80 bp, synthetic construct; identical to SEQ ID NO: 10835
  source 1..80: mol_type = other DNA

SEQ ID NO: 62310 - DNA, 80 bp, synthetic construct; identical to SEQ ID NO: 27719
  source 1..80: mol_type = other DNA

SEQ ID NO: 62311 - DNA, 80 bp, synthetic construct; identical to SEQ ID NO: 10836
  source 1..80: mol_type = other DNA

SEQ ID NO: 62312 - DNA, 80 bp, synthetic construct; identical to SEQ ID NO: 27722
  source 1..80: mol_type = other DNA

SEQ ID NO: 62313 - DNA, 80 bp, synthetic construct; identical to SEQ ID NO: 27723
  source 1..80: mol_type = other DNA

SEQ ID NO: 62314 - DNA, 80 bp, synthetic construct; identical to SEQ ID NO: 27724
  source 1..80: mol_type = other DNA

SEQ ID NO: 62315 - DNA, 80 bp, synthetic construct; identical to SEQ ID NO: 27725
  source 1..80: mol_type = other DNA

SEQ ID NO: 62316 - DNA, 80 bp, synthetic construct; identical to SEQ ID NO: 27727
  source 1..80: mol_type = other DNA

SEQ ID NO: 62317 - DNA, 80 bp, synthetic construct; identical to SEQ ID NO: 27728
  source 1..80: mol_type = other DNA

SEQ ID NO: 62318 - DNA, 80 bp, synthetic construct; identical to SEQ ID NO: 10838
  source 1..80: mol_type = other DNA

SEQ ID NO: 62319 - DNA, 80 bp, synthetic construct; identical to SEQ ID NO: 27730
  source 1..80: mol_type = other DNA

SEQ ID NO: 62320 - DNA, 80 bp, synthetic construct; identical to SEQ ID NO: 27731
  source 1..80: mol_type = other DNA

SEQ ID NO: 62321 - DNA, 80 bp, synthetic construct; identical to SEQ ID NO: 27732
  source 1..80: mol_type = other DNA

SEQ ID NO: 62322 - DNA, 80 bp, synthetic construct; identical to SEQ ID NO: 10839
  source 1..80: mol_type = other DNA

SEQ ID NO: 62323 - DNA, 80 bp, synthetic construct; identical to SEQ ID NO: 27734
  source 1..80: mol_type = other DNA

SEQ ID NO: 62324 - DNA, 80 bp, synthetic construct; identical to SEQ ID NO: 27736
  source 1..80: mol_type = other DNA

SEQ ID NO: 62325 - DNA, 80 bp, synthetic construct; identical to SEQ ID NO: 27737
  source 1..80: mol_type = other DNA

SEQ ID NO: 62326 - DNA, 80 bp, synthetic construct; identical to SEQ ID NO: 10840
  source 1..80: mol_type = other DNA

SEQ ID NO: 62327 - DNA, 80 bp, synthetic construct; identical to SEQ ID NO: 27739
  source 1..80: mol_type = other DNA

SEQ ID NO: 62328 - DNA, 80 bp, synthetic construct; identical to SEQ ID NO: 27740
  source 1..80: mol_type = other DNA

SEQ ID NO: 62329 - DNA, 80 bp, synthetic construct; identical to SEQ ID NO: 10841
  source 1..80: mol_type = other DNA

SEQ ID NO: 62330 - DNA, 80 bp, synthetic construct; identical to SEQ ID NO: 27743
  source 1..80: mol_type = other DNA

SEQ ID NO: 62331 - DNA, 80 bp, synthetic construct; identical to SEQ ID NO: 10842
  source 1..80: mol_type = other DNA

SEQ ID NO: 62332 - DNA, 80 bp, synthetic construct; identical to SEQ ID NO: 27747
  source 1..80: mol_type = other DNA

SEQ ID NO: 62333 - DNA, 80 bp, synthetic construct; identical to SEQ ID NO: 27748
  source 1..80: mol_type = other DNA

SEQ ID NO: 62334 - DNA, 80 bp, synthetic construct; identical to SEQ ID NO: 10843
  source 1..80: mol_type = other DNA

SEQ ID NO: 62335 - DNA, 80 bp, synthetic construct; identical to SEQ ID NO: 27751
  source 1..80: mol_type = other DNA

SEQ ID NO: 62336 - DNA, 80 bp, synthetic construct; identical to SEQ ID NO: 27752
  source 1..80: mol_type = other DNA

SEQ ID NO: 62337 - DNA, 80 bp, synthetic construct; identical to SEQ ID NO: 10844
  source 1..80: mol_type = other DNA

SEQ ID NO: 62338 - DNA, 80 bp, synthetic construct; identical to SEQ ID NO: 27754
  source 1..80: mol_type = other DNA

SEQ ID NO: 62339 - DNA, 80 bp, synthetic construct; identical to SEQ ID NO: 27755
  source 1..80: mol_type = other DNA

SEQ ID NO: 62340 - DNA, 80 bp, synthetic construct; identical to SEQ ID NO: 27756
  source 1..80: mol_type = other DNA

SEQ ID NO: 62341 - DNA, 80 bp, synthetic construct; identical to SEQ ID NO: 10845
  source 1..80: mol_type = other DNA

SEQ ID NO: 62342 - DNA, 80 bp, synthetic construct; identical to SEQ ID NO: 27759
  source 1..80: mol_type = other DNA

SEQ ID NO: 62343 - DNA, 80 bp, synthetic construct; identical to SEQ ID NO: 27760
  source 1..80: mol_type = other DNA

SEQ ID NO: 62344 - DNA, 80 bp, synthetic construct; identical to SEQ ID NO: 27761
  source 1..80: mol_type = other DNA

SEQ ID NO: 62345 - DNA, 80 bp, synthetic construct; identical to SEQ ID NO: 10846
  source 1..80: mol_type = other DNA

SEQ ID NO: 62346 - DNA, 80 bp, synthetic construct; identical to SEQ ID NO: 27763
  source 1..80: mol_type = other DNA

SEQ ID NO: 62347 - DNA, 80 bp, synthetic construct; identical to SEQ ID NO: 27764
  source 1..80: mol_type = other DNA

SEQ ID NO: 62348 - DNA, 80 bp, synthetic construct; identical to SEQ ID NO: 10847
  source 1..80: mol_type = other DNA

SEQ ID NO: 62349 - DNA, 80 bp, synthetic construct; identical to SEQ ID NO: 27767
  source 1..80: mol_type = other DNA

SEQ ID NO: 62350 - DNA, 80 bp, synthetic construct; identical to SEQ ID NO: 27768
  source 1..80: mol_type = other DNA

SEQ ID NO: 62351 - DNA, 80 bp, synthetic construct; identical to SEQ ID NO: 10848
  source 1..80: mol_type = other DNA

SEQ ID NO: 62352 - DNA, 80 bp, synthetic construct; identical to SEQ ID NO: 27771
  source 1..80: mol_type = other DNA

SEQ ID NO: 62353 - DNA, 80 bp, synthetic construct; identical to SEQ ID NO: 27772
  source 1..80: mol_type = other DNA

SEQ ID NO: 62354 - DNA, 80 bp, synthetic construct; identical to SEQ ID NO: 27773
  source 1..80: mol_type = other DNA

SEQ ID NO: 62355 - DNA, 80 bp, synthetic construct; identical to SEQ ID NO: 10849
  source 1..80: mol_type = other DNA

SEQ ID NO: 62356 - DNA, 80 bp, synthetic construct; identical to SEQ ID NO: 27775
  source 1..80: mol_type = other DNA

SEQ ID NO: 62357 - DNA, 80 bp, synthetic construct; identical to SEQ ID NO: 27776
  source 1..80: mol_type = other DNA

SEQ ID NO: 62358 - DNA, 80 bp, synthetic construct; identical to SEQ ID NO: 10850
  source 1..80: mol_type = other DNA

SEQ ID NO: 62359 - DNA, 80 bp, synthetic construct; identical to SEQ ID NO: 27778
  source 1..80: mol_type = other DNA

SEQ ID NO: 62360 - DNA, 80 bp, synthetic construct; identical to SEQ ID NO: 27779
  source 1..80: mol_type = other DNA

SEQ ID NO: 62361 - DNA, 80 bp, synthetic construct; identical to SEQ ID NO: 27780
  source 1..80: mol_type = other DNA

SEQ ID NO: 62362 - DNA, 80 bp, synthetic construct; identical to SEQ ID NO: 27781
  source 1..80: mol_type = other DNA

SEQ ID NO: 62363 - DNA, 80 bp, synthetic construct; identical to SEQ ID NO: 10851
  source 1..80: mol_type = other DNA

SEQ ID NO: 62364 - DNA, 80 bp, synthetic construct; identical to SEQ ID NO: 27783
  source 1..80: mol_type = other DNA

SEQ ID NO: 62365 - DNA, 80 bp, synthetic construct; identical to SEQ ID NO: 27784
  source 1..80: mol_type = other DNA

SEQ ID NO: 62366 - DNA, 80 bp, synthetic construct; identical to SEQ ID NO: 10852
  source 1..80: mol_type = other DNA

SEQ ID NO: 62367 - DNA, 80 bp, synthetic construct; identical to SEQ ID NO: 27786
  source 1..80: mol_type = other DNA

SEQ ID NO: 62368 - DNA, 80 bp, synthetic construct; identical to SEQ ID NO: 27787
  source 1..80: mol_type = other DNA

SEQ ID NO: 62369 - DNA, 80 bp, synthetic construct; identical to SEQ ID NO: 27788
  source 1..80: mol_type = other DNA

SEQ ID NO: 62370 - DNA, 80 bp, synthetic construct; identical to SEQ ID NO: 10853
  source 1..80: mol_type = other DNA

SEQ ID NO: 62371 - DNA, 80 bp, synthetic construct; identical to SEQ ID NO: 27791
  source 1..80: mol_type = other DNA

SEQ ID NO: 62372 - DNA, 80 bp, synthetic construct; identical to SEQ ID NO: 27793
  source 1..80: mol_type = other DNA

SEQ ID NO: 62373 - DNA, 80 bp, synthetic construct; identical to SEQ ID NO: 10854
  source 1..80: mol_type = other DNA

SEQ ID NO: 62374 - DNA, 80 bp, synthetic construct; identical to SEQ ID NO: 27795
  source 1..80: mol_type = other DNA

SEQ ID NO: 62375 - DNA, 80 bp, synthetic construct; identical to SEQ ID NO: 27796
  source 1..80: mol_type = other DNA

SEQ ID NO: 62376 - DNA, 80 bp, synthetic construct; identical to SEQ ID NO: 27797
  source 1..80: mol_type = other DNA

SEQ ID NO: 62377 - DNA, 80 bp, synthetic construct; identical to SEQ ID NO: 10855
  source 1..80: mol_type = other DNA

SEQ ID NO: 62378 - DNA, 80 bp, synthetic construct; identical to SEQ ID NO: 27799
  source 1..80: mol_type = other DNA

SEQ ID NO: 62379 - DNA, 80 bp, synthetic construct; identical to SEQ ID NO: 27800
  source 1..80: mol_type = other DNA

SEQ ID NO: 62380 - DNA, 80 bp, synthetic construct; identical to SEQ ID NO: 27801
  source 1..80: mol_type = other DNA

SEQ ID NO: 62381 - DNA, 80 bp, synthetic construct; identical to SEQ ID NO: 10856
  source 1..80: mol_type = other DNA

SEQ ID NO: 62382 - DNA, 80 bp, synthetic construct; identical to SEQ ID NO: 27803
  source 1..80: mol_type = other DNA

SEQ ID NO: 62383 - DNA, 80 bp, synthetic construct; identical to SEQ ID NO: 27804
  source 1..80: mol_type = other DNA

SEQ ID NO: 62384 - DNA, 80 bp, synthetic construct; identical to SEQ ID NO: 27805
  source 1..80: mol_type = other DNA

SEQ ID NO: 62385 - DNA, 80 bp, synthetic construct; identical to SEQ ID NO: 10857
  source 1..80: mol_type = other DNA

SEQ ID NO: 62386 - DNA, 80 bp, synthetic construct; identical to SEQ ID NO: 27807
  source 1..80: mol_type = other DNA

SEQ ID NO: 62387 - DNA, 80 bp, synthetic construct; identical to SEQ ID NO: 27808
  source 1..80: mol_type = other DNA

SEQ ID NO: 62388 - DNA, 80 bp, synthetic construct; identical to SEQ ID NO: 27809
  source 1..80: mol_type = other DNA

SEQ ID NO: 62389 - DNA, 80 bp, synthetic construct; identical to SEQ ID NO: 10858
  source 1..80: mol_type = other DNA

SEQ ID NO: 62390 - DNA, 80 bp, synthetic construct; identical to SEQ ID NO: 27811
  source 1..80: mol_type = other DNA

SEQ ID NO: 62391 - DNA, 80 bp, synthetic construct; identical to SEQ ID NO: 27812
  source 1..80: mol_type = other DNA

SEQ ID NO: 62392 - DNA, 80 bp, synthetic construct; identical to SEQ ID NO: 10859
  source 1..80: mol_type = other DNA

SEQ ID NO: 62393 - DNA, 80 bp, synthetic construct; identical to SEQ ID NO: 27814
  source 1..80: mol_type = other DNA

SEQ ID NO: 62394 - DNA, 80 bp, synthetic construct; identical to SEQ ID NO: 27815
  source 1..80: mol_type = other DNA

SEQ ID NO: 62395 - DNA, 80 bp, synthetic construct; identical to SEQ ID NO: 27816
  source 1..80: mol_type = other DNA

SEQ ID NO: 62396 - DNA, 80 bp, synthetic construct; identical to SEQ ID NO: 10860
  source 1..80: mol_type = other DNA

SEQ ID NO: 62397 - DNA, 80 bp, synthetic construct; identical to SEQ ID NO: 27818
  source 1..80: mol_type = other DNA

SEQ ID NO: 62398 - DNA, 80 bp, synthetic construct; identical to SEQ ID NO: 27820
  source 1..80: mol_type = other DNA

SEQ ID NO: 62399 - DNA, 80 bp, synthetic construct; identical to SEQ ID NO: 27821
  source 1..80: mol_type = other DNA

SEQ ID NO: 62400 - DNA, 80 bp, synthetic construct; identical to SEQ ID NO: 10861
  source 1..80: mol_type = other DNA

SEQ ID NO: 62401 - DNA, 80 bp, synthetic construct; identical to SEQ ID NO: 27823
  source 1..80: mol_type = other DNA

SEQ ID NO: 62402 - DNA, 80 bp, synthetic construct; identical to SEQ ID NO: 27824
  source 1..80: mol_type = other DNA

SEQ ID NO: 62403 - DNA, 80 bp, synthetic construct; identical to SEQ ID NO: 10862
  source 1..80: mol_type = other DNA

SEQ ID NO: 62404 - DNA, 80 bp, synthetic construct; identical to SEQ ID NO: 27826
  source 1..80: mol_type = other DNA

SEQ ID NO: 62405 - DNA, 80 bp, synthetic construct; identical to SEQ ID NO: 27827
  source 1..80: mol_type = other DNA

SEQ ID NO: 62406 - DNA, 80 bp, synthetic construct; identical to SEQ ID NO: 27828
  source 1..80: mol_type = other DNA

SEQ ID NO: 62407 - DNA, 80 bp, synthetic construct; identical to SEQ ID NO: 27829
  source 1..80: mol_type = other DNA

SEQ ID NO: 62408 - DNA, 80 bp, synthetic construct; identical to SEQ ID NO: 10863
  source 1..80: mol_type = other DNA

SEQ ID NO: 62409 - DNA, 80 bp, synthetic construct; identical to SEQ ID NO: 27831
  source 1..80: mol_type = other DNA

SEQ ID NO: 62410 - DNA, 80 bp, synthetic construct; identical to SEQ ID NO: 27832
  source 1..80: mol_type = other DNA

SEQ ID NO: 62411 - DNA, 80 bp, synthetic construct; identical to SEQ ID NO: 10864
  source 1..80: mol_type = other DNA

SEQ ID NO: 62412 - DNA, 80 bp, synthetic construct; identical to SEQ ID NO: 27835
  source 1..80: mol_type = other DNA

SEQ ID NO: 62413 - DNA, 80 bp, synthetic construct; identical to SEQ ID NO: 27836
  source 1..80: mol_type = other DNA

SEQ ID NO: 62414 - DNA, 80 bp, synthetic construct; identical to SEQ ID NO: 27837
  source 1..80: mol_type = other DNA

SEQ ID NO: 62415 - DNA, 80 bp, synthetic construct; identical to SEQ ID NO: 10865
  source 1..80: mol_type = other DNA

SEQ ID NO: 62416 - DNA, 80 bp, synthetic construct; identical to SEQ ID NO: 27839
  source 1..80: mol_type = other DNA

SEQ ID NO: 62417 - DNA, 80 bp, synthetic construct; identical to SEQ ID NO: 27840
  source 1..80: mol_type = other DNA

SEQ ID NO: 62418 - DNA, 80 bp, synthetic construct; identical to SEQ ID NO: 10866
  source 1..80: mol_type = other DNA

SEQ ID NO: 62419 - DNA, 80 bp, synthetic construct; identical to SEQ ID NO: 27844
  source 1..80: mol_type = other DNA

SEQ ID NO: 62420 - DNA, 80 bp, synthetic construct; identical to SEQ ID NO: 27845
  source 1..80: mol_type = other DNA

SEQ ID NO: 62421 - DNA, 80 bp, synthetic construct; identical to SEQ ID NO: 10867
  source 1..80: mol_type = other DNA

SEQ ID NO: 62422 - DNA, 80 bp, synthetic construct; identical to SEQ ID NO: 27848
  source 1..80: mol_type = other DNA

SEQ ID NO: 62423 - DNA, 80 bp, synthetic construct; identical to SEQ ID NO: 10868
  source 1..80: mol_type = other DNA

SEQ ID NO: 62424 - DNA, 80 bp, synthetic construct; identical to SEQ ID NO: 27850
  source 1..80: mol_type = other DNA

SEQ ID NO: 62425 - DNA, 80 bp, synthetic construct; identical to SEQ ID NO: 27851
  source 1..80: mol_type = other DNA

SEQ ID NO: 62426 - DNA, 80 bp, synthetic construct; identical to SEQ ID NO: 27852
  source 1..80: mol_type = other DNA

SEQ ID NO: 62427 - DNA, 80 bp, synthetic construct; identical to SEQ ID NO: 27853
  source 1..80: mol_type = other DNA

SEQ ID NO: 62428 - DNA, 80 bp, synthetic construct; identical to SEQ ID NO: 10869
  source 1..80: mol_type = other DNA

SEQ ID NO: 62429 - DNA, 80 bp, synthetic construct; identical to SEQ ID NO: 27855
  source 1..80: mol_type = other DNA

SEQ ID NO: 62430 - DNA, 80 bp, synthetic construct; identical to SEQ ID NO: 27856
  source 1..80: mol_type = other DNA

SEQ ID NO: 62431 - DNA, 80 bp, synthetic construct; identical to SEQ ID NO: 27857
  source 1..80: mol_type = other DNA

SEQ ID NO: 62432 - DNA, 80 bp, synthetic construct; identical to SEQ ID NO: 10870
  source 1..80: mol_type = other DNA

SEQ ID NO: 62433 - DNA, 80 bp, synthetic construct; identical to SEQ ID NO: 27859
  source 1..80: mol_type = other DNA

SEQ ID NO: 62434 - DNA, 80 bp, synthetic construct; identical to SEQ ID NO: 27860
  source 1..80: mol_type = other DNA

SEQ ID NO: 62435 - DNA, 80 bp, synthetic construct; identical to SEQ ID NO: 10871
  source 1..80: mol_type = other DNA

SEQ ID NO: 62436 - DNA, 80 bp, synthetic construct; identical to SEQ ID NO: 27862
  source 1..80: mol_type = other DNA

SEQ ID NO: 62437 - DNA, 80 bp, synthetic construct; identical to SEQ ID NO: 27863
  source 1..80: mol_type = other DNA

SEQ ID NO: 62438 - DNA, 80 bp, synthetic construct; identical to SEQ ID NO: 27864
  source 1..80: mol_type = other DNA

SEQ ID NO: 62439 - DNA, 80 bp, synthetic construct; identical to SEQ ID NO: 27865
  source 1..80: mol_type = other DNA

SEQ ID NO: 62440 - DNA, 80 bp, synthetic construct; identical to SEQ ID NO: 10872
  source 1..80: mol_type = other DNA

SEQ ID NO: 62441 - DNA, 80 bp, synthetic construct; identical to SEQ ID NO: 27867
  source 1..80: mol_type = other DNA

SEQ ID NO: 62442 - DNA, 80 bp, synthetic construct; identical to SEQ ID NO: 27868
  source 1..80: mol_type = other DNA

SEQ ID NO: 62443 - DNA, 80 bp, synthetic construct; identical to SEQ ID NO: 27869
  source 1..80: mol_type = other DNA

SEQ ID NO: 62444 - DNA, 80 bp, synthetic construct; identical to SEQ ID NO: 10873
  source 1..80: mol_type = other DNA

SEQ ID NO: 62445 - DNA, 80 bp, synthetic construct; identical to SEQ ID NO: 27872
  source 1..80: mol_type = other DNA

SEQ ID NO: 62446 - DNA, 80 bp, synthetic construct; identical to SEQ ID NO: 27873
  source 1..80: mol_type = other DNA

SEQ ID NO: 62447 - DNA, 80 bp, synthetic construct; identical to SEQ ID NO: 10874
  source 1..80: mol_type = other DNA

SEQ ID NO: 62448 - DNA, 80 bp, synthetic construct; identical to SEQ ID NO: 27875
  source 1..80: mol_type = other DNA

SEQ ID NO: 62449 - DNA, 80 bp, synthetic construct; identical to SEQ ID NO: 27876
  source 1..80: mol_type = other DNA

SEQ ID NO: 62450 - DNA, 80 bp, synthetic construct; identical to SEQ ID NO: 27877
  source 1..80: mol_type = other DNA

SEQ ID NO: 62451 - DNA, 80 bp, synthetic construct; identical to SEQ ID NO: 10875
  source 1..80: mol_type = other DNA

SEQ ID NO: 62452 - DNA, 80 bp, synthetic construct; identical to SEQ ID NO: 27879
  source 1..80: mol_type = other DNA

SEQ ID NO: 62453 - DNA, 80 bp, synthetic construct; identical to SEQ ID NO: 27880
  source 1..80: mol_type = other DNA

SEQ ID NO: 62454 - DNA, 80 bp, synthetic construct; identical to SEQ ID NO: 27881
  source 1..80: mol_type = other DNA

SEQ ID NO: 62455 - DNA, 80 bp, synthetic construct; identical to SEQ ID NO: 27883
  source 1..80: mol_type = other DNA

SEQ ID NO: 62456 - DNA, 80 bp, synthetic construct; identical to SEQ ID NO: 27885
  source 1..80: mol_type = other DNA

SEQ ID NO: 62457 - DNA, 80 bp, synthetic construct; identical to SEQ ID NO: 10877
  source 1..80: mol_type = other DNA

SEQ ID NO: 62458 - DNA, 80 bp, synthetic construct; identical to SEQ ID NO: 27888
  source 1..80: mol_type = other DNA

SEQ ID NO: 62459 - DNA, 80 bp, synthetic construct; identical to SEQ ID NO: 27889
  source 1..80: mol_type = other DNA

SEQ ID NO: 62460 - DNA, 80 bp, synthetic construct; identical to SEQ ID NO: 10878
  source 1..80: mol_type = other DNA

SEQ ID NO: 62461 - DNA, 80 bp, synthetic construct; identical to SEQ ID NO: 27891
  source 1..80: mol_type = other DNA

SEQ ID NO: 62462 - DNA, 80 bp, synthetic construct; identical to SEQ ID NO: 27893
  source 1..80: mol_type = other DNA

SEQ ID NO: 62463 - DNA, 80 bp, synthetic construct; identical to SEQ ID NO: 10879
  source 1..80: mol_type = other DNA

SEQ ID NO: 62464 - DNA, 80 bp, synthetic construct; identical to SEQ ID NO: 27896
  source 1..80: mol_type = other DNA

SEQ ID NO: 62465 - DNA, 80 bp, synthetic construct; identical to SEQ ID NO: 27897
  source 1..80: mol_type = other DNA

SEQ ID NO: 62466 - DNA, 80 bp, synthetic construct; identical to SEQ ID NO: 10880
  source 1..80: mol_type = other DNA

SEQ ID NO: 62467 - DNA, 80 bp, synthetic construct; identical to SEQ ID NO: 27900
  source 1..80: mol_type = other DNA

SEQ ID NO: 62468 - DNA, 80 bp, synthetic construct; identical to SEQ ID NO: 27901
  source 1..80: mol_type = other DNA

SEQ ID NO: 62469 - DNA, 80 bp, synthetic construct; identical to SEQ ID NO: 10881
  source 1..80: mol_type = other DNA

SEQ ID NO: 62470 - DNA, 80 bp, synthetic construct; identical to SEQ ID NO: 27904
  source 1..80: mol_type = other DNA

SEQ ID NO: 62471 - DNA, 80 bp, synthetic construct; identical to SEQ ID NO: 10882
  source 1..80: mol_type = other DNA

SEQ ID NO: 62472 - DNA, 80 bp, synthetic construct; identical to SEQ ID NO: 27907
  source 1..80: mol_type = other DNA

SEQ ID NO: 62473 - DNA, 80 bp, synthetic construct; identical to SEQ ID NO: 27908
  source 1..80: mol_type = other DNA

SEQ ID NO: 62474 - DNA, 80 bp, synthetic construct; identical to SEQ ID NO: 27909
  source 1..80: mol_type = other DNA

SEQ ID NO: 62475 - DNA, 80 bp, synthetic construct; identical to SEQ ID NO: 10883
  source 1..80: mol_type = other DNA

SEQ ID NO: 62476 - DNA, 80 bp, synthetic construct; identical to SEQ ID NO: 27911
  source 1..80: mol_type = other DNA

SEQ ID NO: 62477 - DNA, 80 bp, synthetic construct; identical to SEQ ID NO: 27912
  source 1..80: mol_type = other DNA

SEQ ID NO: 62478 - DNA, 80 bp, synthetic construct; identical to SEQ ID NO: 27913
  source 1..80: mol_type = other DNA

SEQ ID NO: 62479 - DNA, 80 bp, synthetic construct; identical to SEQ ID NO: 27914
  source 1..80: mol_type = other DNA

SEQ ID NO: 62480 - DNA, 80 bp, synthetic construct; identical to SEQ ID NO: 10884
  source 1..80: mol_type = other DNA

SEQ ID NO: 62481 - DNA, 80 bp, synthetic construct; identical to SEQ ID NO: 27916
  source 1..80: mol_type = other DNA

SEQ ID NO: 62482 - DNA, 80 bp, synthetic construct; identical to SEQ ID NO: 27917
  source 1..80: mol_type = other DNA

SEQ ID NO: 62483 - DNA, 80 bp, synthetic construct; identical to SEQ ID NO: 10885
  source 1..80: mol_type = other DNA

SEQ ID NO: 62484 - DNA, 80 bp, synthetic construct; identical to SEQ ID NO: 27920
  source 1..80: mol_type = other DNA

SEQ ID NO: 62485 - DNA, 80 bp, synthetic construct; identical to SEQ ID NO: 27921
  source 1..80: mol_type = other DNA

SEQ ID NO: 62486 - DNA, 80 bp, synthetic construct; identical to SEQ ID NO: 10886
  source 1..80: mol_type = other DNA

SEQ ID NO: 62487 - DNA, 80 bp, synthetic construct; identical to SEQ ID NO: 27924
  source 1..80: mol_type = other DNA

SEQ ID NO: 62488 - DNA, 80 bp, synthetic construct; identical to SEQ ID NO: 27925
  source 1..80: mol_type = other DNA

SEQ ID NO: 62489 - DNA, 80 bp, synthetic construct; identical to SEQ ID NO: 10887
  source 1..80: mol_type = other DNA

SEQ ID NO: 62490 - DNA, 80 bp, synthetic construct; identical to SEQ ID NO: 27928
  source 1..80: mol_type = other DNA

SEQ ID NO: 62491 - DNA, 80 bp, synthetic construct; identical to SEQ ID NO: 27929
  source 1..80: mol_type = other DNA

SEQ ID NO: 62492 - DNA, 80 bp, synthetic construct; identical to SEQ ID NO: 10888
  source 1..80: mol_type = other DNA

SEQ ID NO: 62493 - DNA, 80 bp, synthetic construct; identical to SEQ ID NO: 27932
  source 1..80: mol_type = other DNA

SEQ ID NO: 62494 - DNA, 80 bp, synthetic construct; identical to SEQ ID NO: 27933
  source 1..80: mol_type = other DNA

SEQ ID NO: 62495 - DNA, 80 bp, synthetic construct; identical to SEQ ID NO: 10889
  source 1..80: mol_type = other DNA

SEQ ID NO: 62496 - DNA, 80 bp, synthetic construct; identical to SEQ ID NO: 27936
  source 1..80: mol_type = other DNA

SEQ ID NO: 62497 - DNA, 80 bp, synthetic construct; identical to SEQ ID NO: 27937
  source 1..80: mol_type = other DNA
